United States Patent Application Publication US 2022/0259616 A1 - sequence listing, part 4

SEQ ID NO: 80975 - DNA, 20 bp, Artificial Sequence
  MKO10080975_B_Ddx17
  gRNA
agcggttacgaaaaaagaag

SEQ ID NO: 80976 - DNA, 20 bp, Artificial Sequence
  MKO10080976_B_Ddx17
  gRNA
tataaaccaccagccatact

SEQ ID NO: 80977 - DNA, 20 bp, Artificial Sequence
  MKO10080977_B_Ddx18
  gRNA
aatactaagggaccttctgg

SEQ ID NO: 80978 - DNA, 20 bp, Artificial Sequence
  MKO10080978_B_Ddx18
  gRNA
ccatacctgccttccagaag

SEQ ID NO: 80979 - DNA, 20 bp, Artificial Sequence
  MKO10080979_B_Ddx18
  gRNA
gaggtgcccagcctgcccct

SEQ ID NO: 80980 - DNA, 20 bp, Artificial Sequence
  MKO10080980_B_Ddx19a
  gRNA
aaagtcaaagcagacaccaa

SEQ ID NO: 80981 - DNA, 20 bp, Artificial Sequence
  MKO10080981_B_Ddx19a
  gRNA
aggaaacctcagcttctcca

SEQ ID NO: 80982 - DNA, 20 bp, Artificial Sequence
  MKO10080982_B_Ddx19a
  gRNA
gctgatcagaagcaatcttg

SEQ ID NO: 80983 - DNA, 20 bp, Artificial Sequence
  MKO10080983_B_Ddx19b
  gRNA
gttgagcaacttgcatctta

SEQ ID NO: 80984 - DNA, 20 bp, Artificial Sequence
  MKO10080984_B_Ddx19b
  gRNA
tgtcttctctgtgtttgcat

SEQ ID NO: 80985 - DNA, 20 bp, Artificial Sequence
  MKO10080985_B_Ddx19b
  gRNA
tgcaaacacagagaagacag

SEQ ID NO: 80986 - DNA, 20 bp, Artificial Sequence
  MKO10080986_B_Ddx1
  gRNA
gaatctatcccattgatcct

SEQ ID NO: 80987 - DNA, 20 bp, Artificial Sequence
  MKO10080987_B_Ddx1
  gRNA
cctattcaggctgcagaaac

SEQ ID NO: 80988 - DNA, 20 bp, Artificial Sequence
  MKO10080988_B_Ddx1
  gRNA
gggaaaacaactattaaaac

SEQ ID NO: 80989 - DNA, 20 bp, Artificial Sequence
  MKO10080989_B_Ddx20
  gRNA
ctgaacagcaatttctcttg

SEQ ID NO: 80990 - DNA, 20 bp, Artificial Sequence
  MKO10080990_B_Ddx20
  gRNA
tgctacttaccctgaagttt

SEQ ID NO: 80991 - DNA, 20 bp, Artificial Sequence
  MKO10080991_B_Ddx20
  gRNA
agaacttgactacctgaatc

SEQ ID NO: 80992 - DNA, 20 bp, Artificial Sequence
  MKO10080992_B_Ddx21
  gRNA
ccttgaagtttctcaattaa

SEQ ID NO: 80993 - DNA, 20 bp, Artificial Sequence
  MKO10080993_B_Ddx21
  gRNA
gctttgataggaaatacctg

SEQ ID NO: 80994 - DNA, 20 bp, Artificial Sequence
  MKO10080994_B_Ddx21
  gRNA
acctttcatcatgtgtacag

SEQ ID NO: 80995 - DNA, 20 bp, Artificial Sequence
  MKO10080995_B_Ddx23
  gRNA
acaaggaccgaaaaagatcc

SEQ ID NO: 80996 - DNA, 20 bp, Artificial Sequence
  MKO10080996_B_Ddx23
  gRNA
gctcccgctccttcttactc

SEQ ID NO: 80997 - DNA, 20 bp, Artificial Sequence
  MKO10080997_B_Ddx23
  gRNA
ggaacttctggccaagaaaa

SEQ ID NO: 80998 - DNA, 20 bp, Artificial Sequence
  MKO10080998_B_Ddx24
  gRNA
cccagagaggcgtttgatgc

SEQ ID NO: 80999 - DNA, 20 bp, Artificial Sequence
  MKO10080999_B_Ddx24
  gRNA
gtgccacggcttgccaactt

SEQ ID NO: 81000 - DNA, 20 bp, Artificial Sequence
  MKO10081000_B_Ddx24
  gRNA
gctgactcctactcgagagc

SEQ ID NO: 81001 - DNA, 20 bp, Artificial Sequence
  MKO10081001_B_Ddx25
  gRNA
tcacgggtgtgctagcatca

SEQ ID NO: 81002 - DNA, 20 bp, Artificial Sequence
  MKO10081002_B_Ddx25
  gRNA
tggattctattaaggactga

SEQ ID NO: 81003 - DNA, 20 bp, Artificial Sequence
  MKO10081003_B_Ddx25
  gRNA
gagggccatctcttggattt

SEQ ID NO: 81004 - DNA, 20 bp, Artificial Sequence
  MKO10081004_B_Ddx26b
  gRNA
cctgtttaccttgatgcagt

SEQ ID NO: 81005 - DNA, 20 bp, Artificial Sequence
  MKO10081005_B_Ddx26b
  gRNA
tggactgactactcttggtc

SEQ ID NO: 81006 - DNA, 20 bp, Artificial Sequence
  MKO10081006_B_Ddx26b
  gRNA
tactgctagcgttcaagaag

SEQ ID NO: 81007 - DNA, 20 bp, Artificial Sequence
  MKO10081007_B_Ddx27
  gRNA
tcggcctacctgctttggtg

SEQ ID NO: 81008 - DNA, 20 bp, Artificial Sequence
  MKO10081008_B_Ddx27
  gRNA
aatcttctcatctagtgtag

SEQ ID NO: 81009 - DNA, 20 bp, Artificial Sequence
  MKO10081009_B_Ddx27
  gRNA
atgagaagattgagaaagtc

SEQ ID NO: 81010 - DNA, 20 bp, Artificial Sequence
  MKO10081010_B_Ddx28
  gRNA
gccgccgcgccgagaccagc

SEQ ID NO: 81011 - DNA, 20 bp, Artificial Sequence
  MKO10081011_B_Ddx28
  gRNA
tgcacagacatcgcctcccg

SEQ ID NO: 81012 - DNA, 20 bp, Artificial Sequence
  MKO10081012_B_Ddx28
  gRNA
acttcagctgtatagacgac

SEQ ID NO: 81013 - DNA, 20 bp, Artificial Sequence
  MKO10081013_B_Ddx31
  gRNA
gcagagtatcccagtgctgc

SEQ ID NO: 81014 - DNA, 20 bp, Artificial Sequence
  MKO10081014_B_Ddx31
  gRNA
gtgatgctccaccagcaaaa

SEQ ID NO: 81015 - DNA, 20 bp, Artificial Sequence
  MKO10081015_B_Ddx31
  gRNA
taaaaatgtccagtatgacc

SEQ ID NO: 81016 - DNA, 20 bp, Artificial Sequence
  MKO10081016_B_Ddx39b
  gRNA
cagcagctggagcccgttac

SEQ ID NO: 81017 - DNA, 20 bp, Artificial Sequence
  MKO10081017_B_Ddx39b
  gRNA
gggtcatgcgaaaaatttcc

SEQ ID NO: 81018 - DNA, 20 bp, Artificial Sequence
  MKO10081018_B_Ddx39b
  gRNA
ctcccctgcagacatgcgtc

SEQ ID NO: 81019 - DNA, 20 bp, Artificial Sequence
  MKO10081019_B_Ddx39
  gRNA
ccggatctccttgctcaggg

SEQ ID NO: 81020 - DNA, 20 bp, Artificial Sequence
  MKO10081020_B_Ddx39
  gRNA
ccagcatgagtgtattcccc

SEQ ID NO: 81021 - DNA, 20 bp, Artificial Sequence
  MKO10081021_B_Ddx39
  gRNA
catgtgccacacgagggagc

SEQ ID NO: 81022 - DNA, 20 bp, Artificial Sequence
  MKO10081022_B_Ddx3x
  gRNA
agatcgtggaagtggatcaa

SEQ ID NO: 81023 - DNA, 20 bp, Artificial Sequence
  MKO10081023_B_Ddx3x
  gRNA
agagggaagtctagcttctt

SEQ ID NO: 81024 - DNA, 20 bp, Artificial Sequence
  MKO10081024_B_Ddx3x
  gRNA
tctgattatctgaagagttc

SEQ ID NO: 81025 - DNA, 20 bp, Artificial Sequence
  MKO10081025_B_Ddx3y
  gRNA
gctatatacctcctcactta

SEQ ID NO: 81026 - DNA, 20 bp, Artificial Sequence
  MKO10081026_B_Ddx3y
  gRNA
cttgaaaggggtctgtgata

SEQ ID NO: 81027 - DNA, 20 bp, Artificial Sequence
  MKO10081027_B_Ddx3y
  gRNA
gtttctctgttccttaagtg

SEQ ID NO: 81028 - DNA, 20 bp, Artificial Sequence
  MKO10081028_B_Ddx41
  gRNA
gctgctgcagcgaagacgca

SEQ ID NO: 81029 - DNA, 20 bp, Artificial Sequence
  MKO10081029_B_Ddx41
  gRNA
agcacgcaaggagtccgcca

SEQ ID NO: 81030 - DNA, 20 bp, Artificial Sequence
  MKO10081030_B_Ddx41
  gRNA
atgacgatccaatcaaaact

SEQ ID NO: 81031 - DNA, 20 bp, Artificial Sequence
  MKO10081031_B_Ddx42
  gRNA
ttcagccatgaatgcctcta

SEQ ID NO: 81032 - DNA, 20 bp, Artificial Sequence
  MKO10081032_B_Ddx42
  gRNA
cagtgatgatgaccccttag

SEQ ID NO: 81033 - DNA, 20 bp, Artificial Sequence
  MKO10081033_B_Ddx42
  gRNA
catgaagagacttgaagaaa

SEQ ID NO: 81034 - DNA, 20 bp, Artificial Sequence
  MKO10081034_B_Ddx43
  gRNA
tccaaaatacaacgaacact

SEQ ID NO: 81035 - DNA, 20 bp, Artificial Sequence
  MKO10081035_B_Ddx43
  gRNA
cacaagtgcaaatagacaac

SEQ ID NO: 81036 - DNA, 20 bp, Artificial Sequence
  MKO10081036_B_Ddx43
  gRNA
tcctagtgttcgttgtattt

SEQ ID NO: 81037 - DNA, 20 bp, Artificial Sequence
  MKO10081037_B_Ddx46
  gRNA
tggagcttggaggacgacga

SEQ ID NO: 81038 - DNA, 20 bp, Artificial Sequence
  MKO10081038_B_Ddx46
  gRNA
acaagagaagatctcggtca

SEQ ID NO: 81039 - DNA, 20 bp, Artificial Sequence
  MKO10081039_B_Ddx46
  gRNA
agagcagcgtaagaaggcta

SEQ ID NO: 81040 - DNA, 20 bp, Artificial Sequence
  MKO10081040_B_Ddx47
  gRNA
tggccgactgattgaccact

SEQ ID NO: 81041 - DNA, 20 bp, Artificial Sequence
  MKO10081041_B_Ddx47
  gRNA
aatagcttcgatctggatct

SEQ ID NO: 81042 - DNA, 20 bp, Artificial Sequence
  MKO10081042_B_Ddx47
  gRNA
ccagatcgaagctattcctt

SEQ ID NO: 81043 - DNA, 20 bp, Artificial Sequence
  MKO10081043_B_Ddx49
  gRNA
aactgcgcaggtggtcagcc

SEQ ID NO: 81044 - DNA, 20 bp, Artificial Sequence
  MKO10081044_B_Ddx49
  gRNA
ggggtggcaatcactacatg

SEQ ID NO: 81045 - DNA, 20 bp, Artificial Sequence
  MKO10081045_B_Ddx49
  gRNA
cccttatggcatcttctgct

SEQ ID NO: 81046 - DNA, 20 bp, Artificial Sequence
  MKO10081046_B_Ddx4
  gRNA
ttacaggataaatattcttc

SEQ ID NO: 81047 - DNA, 20 bp, Artificial Sequence
  MKO10081047_B_Ddx4
  gRNA
gatagctctggtttctggaa

SEQ ID NO: 81048 - DNA, 20 bp, Artificial Sequence
  MKO10081048_B_Ddx4
  gRNA
tttggaagaggaaagggctt

SEQ ID NO: 81049 - DNA, 20 bp, Artificial Sequence
  MKO10081049_B_Ddx50
  gRNA
tactcatccacatctccatt

SEQ ID NO: 81050 - DNA, 20 bp, Artificial Sequence
  MKO10081050_B_Ddx50
  gRNA
tttgtctacagagtgataga

SEQ ID NO: 81051 - DNA, 20 bp, Artificial Sequence
  MKO10081051_B_Ddx50
  gRNA
taaaaaaagccgctcaccaa

SEQ ID NO: 81052 - DNA, 20 bp, Artificial Sequence
  MKO10081052_B_Ddx51
  gRNA
ctcctcgaaagtgctgacca

SEQ ID NO: 81053 - DNA, 20 bp, Artificial Sequence
  MKO10081053_B_Ddx51
  gRNA
actggttgtacttcccacta

SEQ ID NO: 81054 - DNA, 20 bp, Artificial Sequence
  MKO10081054_B_Ddx51
  gRNA
tcagcactttcgaggagggc

SEQ ID NO: 81055 - DNA, 20 bp, Artificial Sequence
  MKO10081055_B_Ddx52
  gRNA
ttgttagggtcgggaacttc

SEQ ID NO: 81056 - DNA, 20 bp, Artificial Sequence
  MKO10081056_B_Ddx52
  gRNA
ctccagaatattctagacgc

SEQ ID NO: 81057 - DNA, 20 bp, Artificial Sequence
  MKO10081057_B_Ddx52
  gRNA
tacatttcagcaacttgacc

SEQ ID NO: 81058 - DNA, 20 bp, Artificial Sequence
  MKO10081058_B_Ddx54
  gRNA
cacatctgatacgcactctg

SEQ ID NO: 81059 - DNA, 20 bp, Artificial Sequence
  MKO10081059_B_Ddx54
  gRNA
atccttacttgtctccaccc

SEQ ID NO: 81060 - DNA, 20 bp, Artificial Sequence
  MKO10081060_B_Ddx54
  gRNA
cctcaagactgccttgatcc

SEQ ID NO: 81061 - DNA, 20 bp, Artificial Sequence
  MKO10081061_B_Ddx55
  gRNA
cgaagcactttccgcagttc

SEQ ID NO: 81062 - DNA, 20 bp, Artificial Sequence
  MKO10081062_B_Ddx55
  gRNA
aaacaaagatgttgccgcag

SEQ ID NO: 81063 - DNA, 20 bp, Artificial Sequence
  MKO10081063_B_Ddx55
  gRNA
tatttgcaggtgacaggtag

SEQ ID NO: 81064 - DNA, 20 bp, Artificial Sequence
  MKO10081064_B_Ddx56
  gRNA
tcgcacatcccgagcacagt

SEQ ID NO: 81065 - DNA, 20 bp, Artificial Sequence
  MKO10081065_B_Ddx56
  gRNA
agaaaagcctggtaaatccg

SEQ ID NO: 81066 - DNA, 20 bp, Artificial Sequence
  MKO10081066_B_Ddx56
  gRNA
gagttcatcctcaaagccaa

SEQ ID NO: 81067 - DNA, 20 bp, Artificial Sequence
  MKO10081067_B_Ddx58
  gRNA
gtcggatctgataagacatt

SEQ ID NO: 81068 - DNA, 20 bp, Artificial Sequence
  MKO10081068_B_Ddx58
  gRNA
agaggaggtgcagtacattc

SEQ ID NO: 81069 - DNA, 20 bp, Artificial Sequence
  MKO10081069_B_Ddx58
  gRNA
ttggatgccctgtaccatgc

SEQ ID NO: 81070 - DNA, 20 bp, Artificial Sequence
  MKO10081070_B_Ddx59
  gRNA
gtgagctgttctatgctatc

SEQ ID NO: 81071 - DNA, 20 bp, Artificial Sequence
  MKO10081071_B_Ddx59
  gRNA
agaagcactgtcttcatgcg

SEQ ID NO: 81072 - DNA, 20 bp, Artificial Sequence
  MKO10081072_B_Ddx59
  gRNA
aggcgcagatctgttgagcg

SEQ ID NO: 81073 - DNA, 20 bp, Artificial Sequence
  MKO10081073_B_Ddx5
  gRNA
ctggtggtttatgtgtacaa

SEQ ID NO: 81074 - DNA, 20 bp, Artificial Sequence
  MKO10081074_B_Ddx5
  gRNA
agatacatacagaagaagca

SEQ ID NO: 81075 - DNA, 20 bp, Artificial Sequence
  MKO10081075_B_Ddx5
  gRNA
gcggtgcgccttgccaaatc

SEQ ID NO: 81076 - DNA, 20 bp, Artificial Sequence
  MKO10081076_B_Ddx60
  gRNA
ctttgctaataacatccaac

SEQ ID NO: 81077 - DNA, 20 bp, Artificial Sequence
  MKO10081077_B_Ddx60
  gRNA
caaaagcctgattcaacagc

SEQ ID NO: 81078 - DNA, 20 bp, Artificial Sequence
  MKO10081078_B_Ddx60
  gRNA
atggctttagcacatctgtt

SEQ ID NO: 81079 - DNA, 20 bp, Artificial Sequence
  MKO10081079_B_Ddx6
  gRNA
ggaaaaaccatctcctatcc

SEQ ID NO: 81080 - DNA, 20 bp, Artificial Sequence
  MKO10081080_B_Ddx6
  gRNA
ctgaagaaggacaatattca

SEQ ID NO: 81081 - DNA, 20 bp, Artificial Sequence
  MKO10081081_B_Ddx6
  gRNA
taggatgtgacctccacaaa

SEQ ID NO: 81082 - DNA, 20 bp, Artificial Sequence
  MKO10081082_B_Deaf1
  gRNA
aagagaagcatccgctatgc

SEQ ID NO: 81083 - DNA, 20 bp, Artificial Sequence
  MKO10081083_B_Deaf1
  gRNA
atcgatatcaggacatgtcc

SEQ ID NO: 81084 - DNA, 20 bp, Artificial Sequence
  MKO10081084_B_Deaf1
  gRNA
tgtgaagacgttatctgcag

SEQ ID NO: 81085 - DNA, 20 bp, Artificial Sequence
  MKO10081085_B_Dear1
  gRNA
aagtgtcaaccataatgagc

SEQ ID NO: 81086 - DNA, 20 bp, Artificial Sequence
  MKO10081086_B_Dear1
  gRNA
tgacagccccttacctcttt

SEQ ID NO: 81087 - DNA, 20 bp, Artificial Sequence
  MKO10081087_B_Dear1
  gRNA
gacaaactgctatagccttt

SEQ ID NO: 81088 - DNA, 20 bp, Artificial Sequence
  MKO10081088_B_Deb1
  gRNA
tcaatcaagagacaatccag

SEQ ID NO: 81089 - DNA, 20 bp, Artificial Sequence
  MKO10081089_B_Deb1
  gRNA
ctttgtgagactgcttgtgt

SEQ ID NO: 81090 - DNA, 20 bp, Artificial Sequence
  MKO10081090_B_Deb1
  gRNA
caacacaagcagtctcacaa

SEQ ID NO: 81091 - DNA, 20 bp, Artificial Sequence
  MKO10081091_B_Decr1
  gRNA
aaagtggctttcattactgg

SEQ ID NO: 81092 - DNA, 20 bp, Artificial Sequence
  MKO10081092_B_Decr1
  gRNA
ctggaactgatcaaagttgc

SEQ ID NO: 81093 - DNA, 20 bp, Artificial Sequence
  MKO10081093_B_Decr1
  gRNA
aagttgtcattgccttgcca

SEQ ID NO: 81094 - DNA, 20 bp, Artificial Sequence
  MKO10081094_B_Decr2
  gRNA
tcatgaaaatctctgcgatc

SEQ ID NO: 81095 - DNA, 20 bp, Artificial Sequence
  MKO10081095_B_Decr2
  gRNA
gcggtgcctccctctgtcta

SEQ ID NO: 81096 - DNA, 20 bp, Artificial Sequence
  MKO10081096_B_Decr2
  gRNA
actcggacatccatagacag

SEQ ID NO: 81097 - DNA, 20 bp, Artificial Sequence
  MKO10081097_B_Dedd2
  gRNA
tgctcgcctgtcgccgacgc

SEQ ID NO: 81098 - DNA, 20 bp, Artificial Sequence
  MKO10081098_B_Dedd2
  gRNA
agtcggggccgccctagcag

SEQ ID NO: 81099 - DNA, 20 bp, Artificial Sequence
  MKO10081099_B_Dedd2
  gRNA
ccggcgtcgcctgttgctga

SEQ ID NO: 81100 - DNA, 20 bp, Artificial Sequence
  MKO10081100_B_Dedd
  gRNA
ccagcgaaaacgccggaagt

SEQ ID NO: 81101 - DNA, 20 bp, Artificial Sequence
  MKO10081101_B_Dedd
  gRNA
agtctcgccagaatgcgtcg

SEQ ID NO: 81102 - DNA, 20 bp, Artificial Sequence
  MKO10081102_B_Dedd
  gRNA
gcccgagggagaaccacact

SEQ ID NO: 81103 - DNA, 20 bp, Artificial Sequence
  MKO10081103_B_Def6
  gRNA
tcatcgggaaccatgatcag

SEQ ID NO: 81104 - DNA, 20 bp, Artificial Sequence
  MKO10081104_B_Def6
  gRNA
gaacatcccccatgaccccg

SEQ ID NO: 81105 - DNA, 20 bp, Artificial Sequence
  MKO10081105_B_Def6
  gRNA
tccggccacagggctatctg

SEQ ID NO: 81106 - DNA, 20 bp, Artificial Sequence
  MKO10081106_B_Def8
  gRNA
acccaacatccgggttctcc

SEQ ID NO: 81107 - DNA, 20 bp, Artificial Sequence
  MKO10081107_B_Def8
  gRNA
ggccatcgaagaatgcaaac

SEQ ID NO: 81108 - DNA, 20 bp, Artificial Sequence
  MKO10081108_B_Def8
  gRNA
ccttgtagaagcgatgttcc

SEQ ID NO: 81109 - DNA, 20 bp, Artificial Sequence
  MKO10081109_B_Defa-rs1
  gRNA
cagcctttatgctgtgtatt

SEQ ID NO: 81110 - DNA, 20 bp, Artificial Sequence
  MKO10081110_B_Defa-rs1
  gRNA
agagccttctgtgcctccaa

SEQ ID NO: 81111 - DNA, 20 bp, Artificial Sequence
  MKO10081111_B_Defa-rs1
  gRNA
agatgaagagactaaaactg

SEQ ID NO: 81112 - DNA, 20 bp, Artificial Sequence
  MKO10081112_B_Defa-rs7
  gRNA
gtctccagcgttgagagatc

SEQ ID NO: 81113 - DNA, 20 bp, Artificial Sequence
  MKO10081113_B_Defa-rs7
  gRNA
caaaagagacagacacagcc

SEQ ID NO: 81114 - DNA, 20 bp, Artificial Sequence
  MKO10081114_B_Defa-rs7
  gRNA
agatgaagagactaaaactg

SEQ ID NO: 81115 - DNA, 20 bp, Artificial Sequence
  MKO10081115_B_Defa17
  gRNA
gtctccagcgttgagagatc

SEQ ID NO: 81116 - DNA, 20 bp, Artificial Sequence
  MKO10081116_B_Defa17
  gRNA
caaaagagacagacacagcc

SEQ ID NO: 81117 - DNA, 20 bp, Artificial Sequence
  MKO10081117_B_Defa17
  gRNA
agatgaagagactaaaactg

SEQ ID NO: 81118 - DNA, 20 bp, Artificial Sequence
  MKO10081118_B_Defa20
  gRNA
ctgatatgctattgtagaaa

SEQ ID NO: 81119 - DNA, 20 bp, Artificial Sequence
  MKO10081119_B_Defa20
  gRNA
caaaggagacagacacagcc

SEQ ID NO: 81120 - DNA, 20 bp, Artificial Sequence
  MKO10081120_B_Defa20
  gRNA
tcctatccaaaacacagatg

SEQ ID NO: 81121 - DNA, 20 bp, Artificial Sequence
  MKO10081121_B_Defa21
  gRNA
catgaagagcagatccttct

SEQ ID NO: 81122 - DNA, 20 bp, Artificial Sequence
  MKO10081122_B_Defa21
  gRNA
cctctctgccctcatcctgc

SEQ ID NO: 81123 - DNA, 20 bp, Artificial Sequence
  MKO10081123_B_Defa21
  gRNA
caaaggagacagacacagcc

SEQ ID NO: 81124 - DNA, 20 bp, Artificial Sequence
  MKO10081124_B_Defa22
  gRNA
atctgcactctcagcggcgg

SEQ ID NO: 81125 - DNA, 20 bp, Artificial Sequence
  MKO10081125_B_Defa22
  gRNA
caaaggagacagacacagcc

SEQ ID NO: 81126 - DNA, 20 bp, Artificial Sequence
  MKO10081126_B_Defa22
  gRNA
agatgaagagactaatactg

SEQ ID NO: 81127 - DNA, 20 bp, Artificial Sequence
  MKO10081127_B_Defa23
  gRNA
gtctccagcgttgagagatc

SEQ ID NO: 81128 - DNA, 20 bp, Artificial Sequence
  MKO10081128_B_Defa23
  gRNA
caaaagagacagacacagcc

SEQ ID NO: 81129 - DNA, 20 bp, Artificial Sequence
  MKO10081129_B_Defa23
  gRNA
agatgaagagactaaaactg

SEQ ID NO: 81130 - DNA, 20 bp, Artificial Sequence
  MKO10081130_B_Defa24
  gRNA
tagtctcttcatctgtattt

SEQ ID NO: 81131 - DNA, 20 bp, Artificial Sequence
  MKO10081131_B_Defa24
  gRNA
cctctctgccctcgtcctgc

SEQ ID NO: 81132 - DNA, 20 bp, Artificial Sequence
  MKO10081132_B_Defa24
  gRNA
caaaagagacagacacagcc

SEQ ID NO: 81133 - DNA, 20 bp, Artificial Sequence
  MKO10081133_B_Defa25
  gRNA
cattaaatgaccctttctgc

SEQ ID NO: 81134 - DNA, 20 bp, Artificial Sequence
  MKO10081134_B_Defa25
  gRNA
caaaggagacagaaacagct

SEQ ID NO: 81135 - DNA, 20 bp, Artificial Sequence
  MKO10081135_B_Defa25
  gRNA
agtaaaattgatgagcagcc

SEQ ID NO: 81136 - DNA, 20 bp, Artificial Sequence
  MKO10081136_B_Defa26
  gRNA
gtccccagcgttgagagatc

SEQ ID NO: 81137 - DNA, 20 bp, Artificial Sequence
  MKO10081137_B_Defa26
  gRNA
caaaggagacagacacagcc

SEQ ID NO: 81138 - DNA, 20 bp, Artificial Sequence
  MKO10081138_B_Defa26
  gRNA
agatgaagagactaatactg

SEQ ID NO: 81139 - DNA, 20 bp, Artificial Sequence
  MKO10081139_B_Defa2
  gRNA
ctgatatgctattgtagaaa

SEQ ID NO: 81140 - DNA, 20 bp, Artificial Sequence
  MKO10081140_B_Defa2
  gRNA
caaaggagacagacacagcc

SEQ ID NO: 81141 - DNA, 20 bp, Artificial Sequence
  MKO10081141_B_Defa2
  gRNA
tcctatccaaaacacagatg

SEQ ID NO: 81142 - DNA, 20 bp, Artificial Sequence
  MKO10081142_B_Defa3
  gRNA
gtctccagcgttgagagatc

SEQ ID NO: 81143 - DNA, 20 bp, Artificial Sequence
  MKO10081143_B_Defa3
  gRNA
caaaagagacagacacagcc

SEQ ID NO: 81144 - DNA, 20 bp, Artificial Sequence
  MKO10081144_B_Defa3
  gRNA
agatgaagagactaaaactg

SEQ ID NO: 81145 - DNA, 20 bp, Artificial Sequence
  MKO10081145_B_Defa4
  gRNA
agatgaagagactaatactg

SEQ ID NO: 81146 - DNA, 20 bp, Artificial Sequence
  MKO10081146_B_Defa4
  gRNA
gcagccaggggaagaggacc

SEQ ID NO: 81147 - DNA, 20 bp, Artificial Sequence
  MKO10081147_B_Defa4
  gRNA
aggatcagcctggacctgga

SEQ ID NO: 81148 - DNA, 20 bp, Artificial Sequence
  MKO10081148_B_Defa5
  gRNA
atatgctattgtagaataag

SEQ ID NO: 81149 - DNA, 20 bp, Artificial Sequence
  MKO10081149_B_Defa5
  gRNA
caaaggagatagacacagcc

SEQ ID NO: 81150 - DNA, 20 bp, Artificial Sequence
  MKO10081150_B_Defa5
  gRNA
agatgaagagactaatactg

SEQ ID NO: 81151 - DNA, 20 bp, Artificial Sequence
  MKO10081151_B_Defa6
  gRNA
tagtctcttcatctgtattt

SEQ ID NO: 81152 - DNA, 20 bp, Artificial Sequence
  MKO10081152_B_Defa6
  gRNA
cctctctgccctcgtcctgc

SEQ ID NO: 81153 - DNA, 20 bp, Artificial Sequence
  MKO10081153_B_Defa6
  gRNA
caaaagagacagacacagcc

SEQ ID NO: 81154 - DNA, 20 bp, Artificial Sequence
  MKO10081154_B_Defb10
  gRNA
cagagagcagagagtcctca

SEQ ID NO: 81155 - DNA, 20 bp, Artificial Sequence
  MKO10081155_B_Defb10
  gRNA
tgtcactataatatttgtcc

SEQ ID NO: 81156 - DNA, 20 bp, Artificial Sequence
  MKO10081156_B_Defb11
  gRNA
cagagagcagagagtcctca

SEQ ID NO: 81157 - DNA, 20 bp, Artificial Sequence
  MKO10081157_B_Defb11
  gRNA
ctttcatgtttatgcaacag

SEQ ID NO: 81158 - DNA, 20 bp, Artificial Sequence
  MKO10081158_B_Defb11
  gRNA
tactcaaagcacaacttgca

SEQ ID NO: 81159 - DNA, 20 bp, Artificial Sequence
  MKO10081159_B_Defb12
  gRNA
atttacctcctggaaatgac

SEQ ID NO: 81160 - DNA, 20 bp, Artificial Sequence
  MKO10081160_B_Defb12
  gRNA
ttgctgtgtgcgagacatgc

SEQ ID NO: 81161 - DNA, 20 bp, Artificial Sequence
  MKO10081161_B_Defb12
  gRNA
catagagagtgagaagattg

SEQ ID NO: 81162 - DNA, 20 bp, Artificial Sequence
  MKO10081162_B_Defb13
  gRNA
taaagcactcagcttcacat

SEQ ID NO: 81163 - DNA, 20 bp, Artificial Sequence
  MKO10081163_B_Defb13
  gRNA
cctggggcacattgtacaga

SEQ ID NO: 81164 - DNA, 20 bp, Artificial Sequence
  MKO10081164_B_Defb13
  gRNA
aagccaatttcctgtgctgc

SEQ ID NO: 81165 - DNA, 20 bp, Artificial Sequence
  MKO10081165_B_Defb14
  gRNA
caggcaccaagaacaagatg

SEQ ID NO: 81166 - DNA, 20 bp, Artificial Sequence
  MKO10081166_B_Defb14
  gRNA
gggtcttctacttcttcttt

SEQ ID NO: 81167 - DNA, 20 bp, Artificial Sequence
  MKO10081167_B_Defb14
  gRNA
ctatttgttcttcctttcca

SEQ ID NO: 81168 - DNA, 20 bp, Artificial Sequence
  MKO10081168_B_Defb15
  gRNA
tgtgtgacagtccagccctg

SEQ ID NO: 81169 - DNA, 20 bp, Artificial Sequence
  MKO10081169_B_Defb15
  gRNA
gttgctcttgctctttccac

SEQ ID NO: 81170 - DNA, 20 bp, Artificial Sequence
  MKO10081170_B_Defb15
  gRNA
ctcatcaaaaaatgcattct

SEQ ID NO: 81171 - DNA, 20 bp, Artificial Sequence
  MKO10081171_B_Defb18
  gRNA
caatcaacaatgaagatgtt

SEQ ID NO: 81172 - DNA, 20 bp, Artificial Sequence
  MKO10081172_B_Defb18
  gRNA
attcagacttgcatgtacca

SEQ ID NO: 81173 - DNA, 20 bp, Artificial Sequence
  MKO10081173_B_Defb18
  gRNA
aagaacacacaaatgttccc

SEQ ID NO: 81174 - DNA, 20 bp, Artificial Sequence
  MKO10081174_B_Defb19
  gRNA
cctgcttcttgccatacttg

SEQ ID NO: 81175 - DNA, 20 bp, Artificial Sequence
  MKO10081175_B_Defb19
  gRNA
gctgcctccagtcctacgtg

SEQ ID NO: 81176 - DNA, 20 bp, Artificial Sequence
  MKO10081176_B_Defb19
  gRNA
ttcctgcaaaaagagtgaac

SEQ ID NO: 81177 - DNA, 20 bp, Artificial Sequence
  MKO10081177_B_Defb1
  gRNA
aaagcttacctggctccatc

SEQ ID NO: 81178 - DNA, 20 bp, Artificial Sequence
  MKO10081178_B_Defb1
  gRNA
gttggcattctcacaagtct

SEQ ID NO: 81179 - DNA, 20 bp, Artificial Sequence
  MKO10081179_B_Defb1
  gRNA
tttacaggttccctgtagtt

SEQ ID NO: 81180 - DNA, 20 bp, Artificial Sequence
  MKO10081180_B_Defb20
  gRNA
tgaagacatgaagctgcttc

SEQ ID NO: 81181 - DNA, 20 bp, Artificial Sequence
  MKO10081181_B_Defb20
  gRNA
caagaagcactcagtcgttg

SEQ ID NO: 81182 - DNA, 20 bp, Artificial Sequence
  MKO10081182_B_Defb20
  gRNA
cacaacagtatttcccatgc

SEQ ID NO: 81183 - DNA, 20 bp, Artificial Sequence
  MKO10081183_B_Defb21
  gRNA
tctacctcccaagagccatg

SEQ ID NO: 81184 - DNA, 20 bp, Artificial Sequence
  MKO10081184_B_Defb21
  gRNA
aagtacacctatgaaatctg

SEQ ID NO: 81185 - DNA, 20 bp, Artificial Sequence
  MKO10081185_B_Defb21
  gRNA
gatctgtcctcagatttcat

SEQ ID NO: 81186 - DNA, 20 bp, Artificial Sequence
  MKO10081186_B_Defb22
  gRNA
tgatcacaagagtagacagt

SEQ ID NO: 81187 - DNA, 20 bp, Artificial Sequence
  MKO10081187_B_Defb22
  gRNA
aattgccagcactcccgcac

SEQ ID NO: 81188 - DNA, 20 bp, Artificial Sequence
  MKO10081188_B_Defb22
  gRNA
gttctggacttcaaaattag

SEQ ID NO: 81189 - DNA, 20 bp, Artificial Sequence
  MKO10081189_B_Defb23
  gRNA
cagtctcatgcttcagtctc

SEQ ID NO: 81190 - DNA, 20 bp, Artificial Sequence
  MKO10081190_B_Defb23
  gRNA
atctctacgatgtcctcatc

SEQ ID NO: 81191 - DNA, 20 bp, Artificial Sequence
  MKO10081191_B_Defb23
  gRNA
gtccaataccaactctgcta

SEQ ID NO: 81192 - DNA, 20 bp, Artificial Sequence
  MKO10081192_B_Defb25
  gRNA
gagcagaatccactttgcca

SEQ ID NO: 81193 - DNA, 20 bp, Artificial Sequence
  MKO10081193_B_Defb25
  gRNA
gaccttcatgcacctgtgtc

SEQ ID NO: 81194 - DNA, 20 bp, Artificial Sequence
  MKO10081194_B_Defb25
  gRNA
tcaagccttcacgcccctca

SEQ ID NO: 81195 - DNA, 20 bp, Artificial Sequence
  MKO10081195_B_Defb26
  gRNA
tgtccatgggttgctaactc

SEQ ID NO: 81196 - DNA, 20 bp, Artificial Sequence
  MKO10081196_B_Defb26
  gRNA
ttcactggtatattgaaact

SEQ ID NO: 81197 - DNA, 20 bp, Artificial Sequence
  MKO10081197_B_Defb26
  gRNA
tcagaagacaaactaccctc

SEQ ID NO: 81198 - DNA, 20 bp, Artificial Sequence
  MKO10081198_B_Defb28
  gRNA
acattccagtgaccaaagat

SEQ ID NO: 81199 - DNA, 20 bp, Artificial Sequence
  MKO10081199_B_Defb28
  gRNA
tacctggggatgtctgagcc

SEQ ID NO: 81200 - DNA, 20 bp, Artificial Sequence
  MKO10081200_B_Defb28
  gRNA
ccacaaggacagctaaggtc

SEQ ID NO: 81201 - DNA, 20 bp, Artificial Sequence
  MKO10081201_B_Defb29
  gRNA
atcctggttgacgagaccac

SEQ ID NO: 81202 - DNA, 20 bp, Artificial Sequence
  MKO10081202_B_Defb29
  gRNA
gattgcgtgtgagctttacc

SEQ ID NO: 81203 - DNA, 20 bp, Artificial Sequence
  MKO10081203_B_Defb29
  gRNA
taaagctcacacgcaatcca

SEQ ID NO: 81204 - DNA, 20 bp, Artificial Sequence
  MKO10081204_B_Defb2
  gRNA
cagagagcagagagtcctca

SEQ ID NO: 81205 - DNA, 20 bp, Artificial Sequence
  MKO10081205_B_Defb2
  gRNA
tctgacacagtaccctccat

SEQ ID NO: 81206 - DNA, 20 bp, Artificial Sequence
  MKO10081206_B_Defb2
  gRNA
ttctctgggaaacagctccc

SEQ ID NO: 81207 - DNA, 20 bp, Artificial Sequence
  MKO10081207_B_Defb30
  gRNA
agagcaagacaaagagcacg

SEQ ID NO: 81208 - DNA, 20 bp, Artificial Sequence
  MKO10081208_B_Defb30
  gRNA
tctgtttgcagttagaagtg

SEQ ID NO: 81209 - DNA, 20 bp, Artificial Sequence
  MKO10081209_B_Defb30
  gRNA
gttgtgctgcttagagaaaa

SEQ ID NO: 81210 - DNA, 20 bp, Artificial Sequence
  MKO10081210_B_Defb33
  gRNA
gagaagaaataacagcctca

SEQ ID NO: 81211 - DNA, 20 bp, Artificial Sequence
  MKO10081211_B_Defb33
  gRNA
tatcgactcttgcattctgc

SEQ ID NO: 81212 - DNA, 20 bp, Artificial Sequence
  MKO10081212_B_Defb33
  gRNA
tagtctgagcaagacacaca

SEQ ID NO: 81213 - DNA, 20 bp, Artificial Sequence
  MKO10081213_B_Defb34
  gRNA
aagaacttgttgctctctgc

SEQ ID NO: 81214 - DNA, 20 bp, Artificial Sequence
  MKO10081214_B_Defb34
  gRNA
gttgcccttgctccttccac

SEQ ID NO: 81215 - DNA, 20 bp, Artificial Sequence
  MKO10081215_B_Defb34
  gRNA
aagggcaaccagtcagatga

SEQ ID NO: 81216 - DNA, 20 bp, Artificial Sequence
  MKO10081216_B_Defb35
  gRNA
ttgctgtgtgcgagacatgc

SEQ ID NO: 81217 - DNA, 20 bp, Artificial Sequence
  MKO10081217_B_Defb35
  gRNA
catagagagtgagaagattg

SEQ ID NO: 81218 - DNA, 20 bp, Artificial Sequence
  MKO10081218_B_Defb35
  gRNA
acttcttctgctgtcgagag

SEQ ID NO: 81219 - DNA, 20 bp, Artificial Sequence
  MKO10081219_B_Defb36
  gRNA
ctacattacctggagtgagc

SEQ ID NO: 81220 - DNA, 20 bp, Artificial Sequence
  MKO10081220_B_Defb36
  gRNA
gacgtagacgctctccttcc

SEQ ID NO: 81221 - DNA, 20 bp, Artificial Sequence
  MKO10081221_B_Defb36
  gRNA
ctttggcttcggctggtatt

SEQ ID NO: 81222 - DNA, 20 bp, Artificial Sequence
  MKO10081222_B_Defb37
  gRNA
tccaacttccagaacaaccc

SEQ ID NO: 81223 - DNA, 20 bp, Artificial Sequence
  MKO10081223_B_Defb37
  gRNA
gaggagcagcagcagaaagt

SEQ ID NO: 81224 - DNA, 20 bp, Artificial Sequence
  MKO10081224_B_Defb38
  gRNA
tatttcttccagatcaacca

SEQ ID NO: 81225 - DNA, 20 bp, Artificial Sequence
  MKO10081225_B_Defb38
  gRNA
ccaacagaataatacaacca

SEQ ID NO: 81226 - DNA, 20 bp, Artificial Sequence
  MKO10081226_B_Defb38
  gRNA
gaggatcagtagcagaaagc

SEQ ID NO: 81227 - DNA, 20 bp, Artificial Sequence
  MKO10081227_B_Defb39
  gRNA
ctgctgctgatcctctctct

SEQ ID NO: 81228 - DNA, 20 bp, Artificial Sequence
  MKO10081228_B_Defb39
  gRNA
gaggatcagcagcagaaagt

SEQ ID NO: 81229 - DNA, 20 bp, Artificial Sequence
  MKO10081229_B_Defb3
  gRNA
ccttctgtttgcatttctcc

SEQ ID NO: 81230 - DNA, 20 bp, Artificial Sequence
  MKO10081230_B_Defb3
  gRNA
acaatccagtaagttgtttg

SEQ ID NO: 81231 - DNA, 20 bp, Artificial Sequence
  MKO10081231_B_Defb3
  gRNA
aaggaggcagatgctggaat

SEQ ID NO: 81232 - DNA, 20 bp, Artificial Sequence
  MKO10081232_B_Defb40
  gRNA
tcatgctttcagatcaaccc

SEQ ID NO: 81233 - DNA, 20 bp, Artificial Sequence
  MKO10081233_B_Defb40
  gRNA
cacatggtacacatgatttc

SEQ ID NO: 81234 - DNA, 20 bp, Artificial Sequence
  MKO10081234_B_Defb40
  gRNA
tgtgacagttgttgtttcct

SEQ ID NO: 81235 - DNA, 20 bp, Artificial Sequence
  MKO10081235_B_Defb41
  gRNA
gaaaaatagatgaaacttca

SEQ ID NO: 81236 - DNA, 20 bp, Artificial Sequence
  MKO10081236_B_Defb41
  gRNA
cttgatgtcaatatgacttc

SEQ ID NO: 81237 - DNA, 20 bp, Artificial Sequence
  MKO10081237_B_Defb41
  gRNA
atactcatcaatatcacaga

SEQ ID NO: 81238 - DNA, 20 bp, Artificial Sequence
  MKO10081238_B_Defb42
  gRNA
ttcatgcttactgttcatcc

SEQ ID NO: 81239 - DNA, 20 bp, Artificial Sequence
  MKO10081239_B_Defb42
  gRNA
tcttcaggtcgctgttcgat

SEQ ID NO: 81240 - DNA, 20 bp, Artificial Sequence
  MKO10081240_B_Defb42
  gRNA
atcggtatcctttctacaac

SEQ ID NO: 81241 - DNA, 20 bp, Artificial Sequence
  MKO10081241_B_Defb43
  gRNA
tgtcttacccagaggaacta

SEQ ID NO: 81242 - DNA, 20 bp, Artificial Sequence
  MKO10081242_B_Defb43
  gRNA
ccagtcctcgcagtatctga

SEQ ID NO: 81243 - DNA, 20 bp, Artificial Sequence
  MKO10081243_B_Defb43
  gRNA
cttcttcacccgacagcaga

SEQ ID NO: 81244 - DNA, 20 bp, Artificial Sequence
  MKO10081244_B_Defb45
  gRNA
tcctgaagtcatgaagactg

SEQ ID NO: 81245 - DNA, 20 bp, Artificial Sequence
  MKO10081245_B_Defb45
  gRNA
aaagacttccagcatctttc

SEQ ID NO: 81246 - DNA, 20 bp, Artificial Sequence
  MKO10081246_B_Defb45
  gRNA
aatctaaattctgtgaccac

SEQ ID NO: 81247 - DNA, 20 bp, Artificial Sequence
  MKO10081247_B_Defb46
  gRNA
ccttctctttgcatttctcc

SEQ ID NO: 81248 - DNA, 20 bp, Artificial Sequence
  MKO10081248_B_Defb46
  gRNA
actagagagattggcatgtc

SEQ ID NO: 81249 - DNA, 20 bp, Artificial Sequence
  MKO10081249_B_Defb46
  gRNA
ctcttattgaactaattatt

SEQ ID NO: 81250 - DNA, 20 bp, Artificial Sequence
  MKO10081250_B_Defb47
  gRNA
tttgtgatgatgatgctgag

SEQ ID NO: 81251 - DNA, 20 bp, Artificial Sequence
  MKO10081251_B_Defb47
  gRNA
acatcctcagacgatactat

SEQ ID NO: 81252 - DNA, 20 bp, Artificial Sequence
  MKO10081252_B_Defb47
  gRNA
aagcagtgcatttcgttgaa

SEQ ID NO: 81253 - DNA, 20 bp, Artificial Sequence
  MKO10081253_B_Defb48
  gRNA
ctctactctattcttcctct

SEQ ID NO: 81254 - DNA, 20 bp, Artificial Sequence
  MKO10081254_B_Defb48
  gRNA
gacgctctgcgtcagtctgc

SEQ ID NO: 81255 - DNA, 20 bp, Artificial Sequence
  MKO10081255_B_Defb48
  gRNA
aaactgatagaagacgagat

SEQ ID NO: 81256 - DNA, 20 bp, Artificial Sequence
  MKO10081256_B_Defb4
  gRNA
ccttctcttcacatttctcc

SEQ ID NO: 81257 - DNA, 20 bp, Artificial Sequence
  MKO10081257_B_Defb4
  gRNA
ccattggtcatgcatgttat

SEQ ID NO: 81258 - DNA, 20 bp, Artificial Sequence
  MKO10081258_B_Defb4
  gRNA
ccaataacatgcatgaccaa

SEQ ID NO: 81259 - DNA, 20 bp, Artificial Sequence
  MKO10081259_B_Defb50
  gRNA
tgctttctgttgctgacatc

SEQ ID NO: 81260 - DNA, 20 bp, Artificial Sequence
  MKO10081260_B_Defb50
  gRNA
tcaggtgttggcagtcaccc

SEQ ID NO: 81261 - DNA, 20 bp, Artificial Sequence
  MKO10081261_B_Defb50
  gRNA
ttgctctttctatagcagca

SEQ ID NO: 81262 - DNA, 20 bp, Artificial Sequence
  MKO10081262_B_Defb5
  gRNA
ccttctctttgcatttctcc

SEQ ID NO: 81263 - DNA, 20 bp, Artificial Sequence
  MKO10081263_B_Defb5
  gRNA
attcttcagaatggcagttg

SEQ ID NO: 81264 - DNA, 20 bp, Artificial Sequence
  MKO10081264_B_Defb5
  gRNA
catatgcaggtatctgtgca

SEQ ID NO: 81265 - DNA, 20 bp, Artificial Sequence
  MKO10081265_B_Defb6
  gRNA
taaaggcaaagagcaggtaa

SEQ ID NO: 81266 - DNA, 20 bp, Artificial Sequence
  MKO10081266_B_Defb6
  gRNA
tcatgccagcgttcatgcaa

SEQ ID NO: 81267 - DNA, 20 bp, Artificial Sequence
  MKO10081267_B_Defb6
  gRNA
ccatagctcatgcatgttac

SEQ ID NO: 81268 - DNA, 20 bp, Artificial Sequence
  MKO10081268_B_Defb7
  gRNA
tgttctgttcgcatttctcc

SEQ ID NO: 81269 - DNA, 20 bp, Artificial Sequence
  MKO10081269_B_Defb7
  gRNA
ctcgtttactgttgatgtct

SEQ ID NO: 81270 - DNA, 20 bp, Artificial Sequence
  MKO10081270_B_Defb7
  gRNA
aagttccaatcttatgaaaa

SEQ ID NO: 81271 - DNA, 20 bp, Artificial Sequence
  MKO10081271_B_Defb8
  gRNA
caagtggagacagcagcacc

SEQ ID NO: 81272 - DNA, 20 bp, Artificial Sequence
  MKO10081272_B_Defb8
  gRNA
aagttccaatcttatgccta

SEQ ID NO: 81273 - DNA, 20 bp, Artificial Sequence
  MKO10081273_B_Defb8
  gRNA
atatgccagtatcggtgcat

SEQ ID NO: 81274 - DNA, 20 bp, Artificial Sequence
  MKO10081274_B_Defb9
  gRNA
cagagagcagagagtcctca

SEQ ID NO: 81275 - DNA, 20 bp, Artificial Sequence
  MKO10081275_B_Defb9
  gRNA
tttatgttcttgcagcacct

SEQ ID NO: 81276 - DNA, 20 bp, Artificial Sequence
  MKO10081276_B_Defb9
  gRNA
aacagtaccctcctttcttg

SEQ ID NO: 81277 - DNA, 20 bp, Artificial Sequence
  MKO10081277_B_Degs1
  gRNA
cggaccagccccacgccgcc

SEQ ID NO: 81278 - DNA, 20 bp, Artificial Sequence
  MKO10081278_B_Degs1
  gRNA
cacctaagatctccttgcgc

SEQ ID NO: 81279 - DNA, 20 bp, Artificial Sequence
  MKO10081279_B_Degs1
  gRNA
acacaataagtccctactcg

SEQ ID NO: 81280 - DNA, 20 bp, Artificial Sequence
  MKO10081280_B_Degs2
  gRNA
agacccactcgaagtcgctg

SEQ ID NO: 81281 - DNA, 20 bp, Artificial Sequence
  MKO10081281_B_Degs2
  gRNA
cttacacttgcgcttaaccc

SEQ ID NO: 81282 - DNA, 20 bp, Artificial Sequence
  MKO10081282_B_Degs2
  gRNA
gcgcaagtgtaagctggcga

SEQ ID NO: 81283 - DNA, 20 bp, Artificial Sequence
  MKO10081283_B_Dek
  gRNA
tctagaaaagagtcttatcg

SEQ ID NO: 81284 - DNA, 20 bp, Artificial Sequence
  MKO10081284_B_Dek
  gRNA
gtggcccttactttgccaga

SEQ ID NO: 81285 - DNA, 20 bp, Artificial Sequence
  MKO10081285_B_Dek
  gRNA
tcaccttgtgtcactgtaaa

SEQ ID NO: 81286 - DNA, 20 bp, Artificial Sequence
  MKO10081286_B_Dennd1a
  gRNA
gactacatttgaagtgtatg

SEQ ID NO: 81287 - DNA, 20 bp, Artificial Sequence
  MKO10081287_B_Dennd1a
  gRNA
ttacagatcctgaggtgcag

SEQ ID NO: 81288 - DNA, 20 bp, Artificial Sequence
  MKO10081288_B_Dennd1a
  gRNA
gaaagagtgccacctgtcct

SEQ ID NO: 81289 - DNA, 20 bp, Artificial Sequence
  MKO10081289_B_Dennd1b
  gRNA
ctataaccacccagtaccaa

SEQ ID NO: 81290 - DNA, 20 bp, Artificial Sequence
  MKO10081290_B_Dennd1b
  gRNA
cttaccacactcaagttgac

SEQ ID NO: 81291 - DNA, 20 bp, Artificial Sequence
  MKO10081291_B_Dennd1b
  gRNA
agattacttggccaaggaac

SEQ ID NO: 81292 - DNA, 20 bp, Artificial Sequence
  MKO10081292_B_Dennd1c
  gRNA
gtttccccttcgacatagaa

SEQ ID NO: 81293 - DNA, 20 bp, Artificial Sequence
  MKO10081293_B_Dennd1c
  gRNA
atccccctgccatgtttgac

SEQ ID NO: 81294 - DNA, 20 bp, Artificial Sequence
  MKO10081294_B_Dennd1c
  gRNA
ctacagatccccccatcctg

SEQ ID NO: 81295 - DNA, 20 bp, Artificial Sequence
  MKO10081295_B_Dennd2a
  gRNA
agtaccttggtggacgtgtc

SEQ ID NO: 81296 - DNA, 20 bp, Artificial Sequence
  MKO10081296_B_Dennd2a
  gRNA
cagtccacggagagcaactc

SEQ ID NO: 81297 - DNA, 20 bp, Artificial Sequence
  MKO10081297_B_Dennd2a
  gRNA
actaggaagcttagtcggga

SEQ ID NO: 81298 - DNA, 20 bp, Artificial Sequence
  MKO10081298_B_Dennd2c
  gRNA
ggtggcagcctccacgctga

SEQ ID NO: 81299 - DNA, 20 bp, Artificial Sequence
  MKO10081299_B_Dennd2c
  gRNA
actttactacacacagtccg

SEQ ID NO: 81300 - DNA, 20 bp, Artificial Sequence
  MKO10081300_B_Dennd2c
  gRNA
tagtcttccgctgaaagaac

SEQ ID NO: 81301 - DNA, 20 bp, Artificial Sequence
  MKO10081301_B_Dennd2d
  gRNA
ggacaatcccagaacaatcc

SEQ ID NO: 81302 - DNA, 20 bp, Artificial Sequence
  MKO10081302_B_Dennd2d
  gRNA
ctcatttgtcctgaccaatg

SEQ ID NO: 81303 - DNA, 20 bp, Artificial Sequence
  MKO10081303_B_Dennd2d
  gRNA
cagagggagaacctgctccg

SEQ ID NO: 81304 - DNA, 20 bp, Artificial Sequence
  MKO10081304_B_Dennd3
  gRNA
ttaatacctagtccaccgcc

SEQ ID NO: 81305 - DNA, 20 bp, Artificial Sequence
  MKO10081305_B_Dennd3
  gRNA
cttctctcgcttcttccgga

SEQ ID NO: 81306 - DNA, 20 bp, Artificial Sequence
  MKO10081306_B_Dennd3
  gRNA
catgcaggggtcgatagtac

SEQ ID NO: 81307 - DNA, 20 bp, Artificial Sequence
  MKO10081307_B_Dennd4a
  gRNA
aaacacgactcagaatacgc

SEQ ID NO: 81308 - DNA, 20 bp, Artificial Sequence
  MKO10081308_B_Dennd4a
  gRNA
aacgactcgtaatcttcttg

SEQ ID NO: 81309 - DNA, 20 bp, Artificial Sequence
  MKO10081309_B_Dennd4a
  gRNA
cgtacgcaccttctcagctg

SEQ ID NO: 81310 - DNA, 20 bp, Artificial Sequence
  MKO10081310_B_Dennd4b
  gRNA
cccgcacctacctcatgtat

SEQ ID NO: 81311 - DNA, 20 bp, Artificial Sequence
  MKO10081311_B_Dennd4b
  gRNA
gctgctgggccgctacccag

SEQ ID NO: 81312 - DNA, 20 bp, Artificial Sequence
  MKO10081312_B_Dennd4b
  gRNA
agcagtgtacctgtgctaca

SEQ ID NO: 81313 - DNA, 20 bp, Artificial Sequence
  MKO10081313_B_Dennd4c
  gRNA
tatgctattgcatttgaagc

SEQ ID NO: 81314 - DNA, 20 bp, Artificial Sequence
  MKO10081314_B_Dennd4c
  gRNA
aaagactcatagtcttcttc

SEQ ID NO: 81315 - DNA, 20 bp, Artificial Sequence
  MKO10081315_B_Dennd4c
  gRNA
cttgtaacacagaaacacgt

SEQ ID NO: 81316 - DNA, 20 bp, Artificial Sequence
  MKO10081316_B_Dennd5a
  gRNA
gaggatggttctcggacatt

SEQ ID NO: 81317 - DNA, 20 bp, Artificial Sequence
  MKO10081317_B_Dennd5a
  gRNA
ttcatttcaagtacgactga

SEQ ID NO: 81318 - DNA, 20 bp, Artificial Sequence
  MKO10081318_B_Dennd5a
  gRNA
gacttgaatgttcgtctcaa

SEQ ID NO: 81319 - DNA, 20 bp, Artificial Sequence
  MKO10081319_B_Dennd5b
  gRNA
ctcgcagctgtacattgagc

SEQ ID NO: 81320 - DNA, 20 bp, Artificial Sequence
  MKO10081320_B_Dennd5b
  gRNA
taaattagaacttcctcaag

SEQ ID NO: 81321 - DNA, 20 bp, Artificial Sequence
  MKO10081321_B_Dennd5b
  gRNA
actatcctcaaaacatagaa

SEQ ID NO: 81322 - DNA, 20 bp, Artificial Sequence
  MKO10081322_B_Dennd6a
  gRNA
cgagataaaactcttaaaag

SEQ ID NO: 81323 - DNA, 20 bp, Artificial Sequence
  MKO10081323_B_Dennd6a
  gRNA
tacttctttatcagtaagtt

SEQ ID NO: 81324 - DNA, 20 bp, Artificial Sequence
  MKO10081324_B_Dennd6a
  gRNA
acatatccataaaaatatgc

SEQ ID NO: 81325 - DNA, 20 bp, Artificial Sequence
  MKO10081325_B_Dennd6b
  gRNA
gagggagccagcacactatc

SEQ ID NO: 81326 - DNA, 20 bp, Artificial Sequence
  MKO10081326_B_Dennd6b
  gRNA
cacctacctgagtgcgagtc

SEQ ID NO: 81327 - DNA, 20 bp, Artificial Sequence
  MKO10081327_B_Dennd6b
  gRNA
gaaaagcagcatctgctacc

SEQ ID NO: 81328 - DNA, 20 bp, Artificial Sequence
  MKO10081328_B_Denr
  gRNA
gaatttgcaaaacttactgt

SEQ ID NO: 81329 - DNA, 20 bp, Artificial Sequence
  MKO10081329_B_Denr
  gRNA
ctagtactgtgaatacatgc

SEQ ID NO: 81330 - DNA, 20 bp, Artificial Sequence
  MKO10081330_B_Denr
  gRNA
agtaattccagtttcttgtt

SEQ ID NO: 81331 - DNA, 20 bp, Artificial Sequence
  MKO10081331_B_Depdc1a
  gRNA
atagttgattgttgtcatca

SEQ ID NO: 81332 - DNA, 20 bp, Artificial Sequence
  MKO10081332_B_Depdc1a
  gRNA
aaaaataccatctttgtctt

SEQ ID NO: 81333 - DNA, 20 bp, Artificial Sequence
  MKO10081333_B_Depdc1a
  gRNA
ttgatttctgtatgtctttg

SEQ ID NO: 81334 - DNA, 20 bp, Artificial Sequence
  MKO10081334_B_Depdc1b
  gRNA
cctcggtcagctgtctgcgg

SEQ ID NO: 81335 - DNA, 20 bp, Artificial Sequence
  MKO10081335_B_Depdc1b
  gRNA
aagcgccacagtattgctat

SEQ ID NO: 81336 - DNA, 20 bp, Artificial Sequence
  MKO10081336_B_Depdc1b
  gRNA
cgagcattgcttcactgcat

SEQ ID NO: 81337 - DNA, 20 bp, Artificial Sequence
  MKO10081337_B_Depdc5
  gRNA
tgtgaatgttgtagacccca

SEQ ID NO: 81338 - DNA, 20 bp, Artificial Sequence
  MKO10081338_B_Depdc5
  gRNA
ttcacatagacatcttgata

SEQ ID NO: 81339 - DNA, 20 bp, Artificial Sequence
  MKO10081339_B_Depdc5
  gRNA
gacaagtttgtagacctttg

SEQ ID NO: 81340 - DNA, 20 bp, Artificial Sequence
  MKO10081340_B_Depdc7
  gRNA
aaggtattccaagcagtcga

SEQ ID NO: 81341 - DNA, 20 bp, Artificial Sequence
  MKO10081341_B_Depdc7
  gRNA
ccttcccgaccagatggttg

SEQ ID NO: 81342 - DNA, 20 bp, Artificial Sequence
  MKO10081342_B_Depdc7
  gRNA
accagcaactatctggatcg

SEQ ID NO: 81343 - DNA, 20 bp, Artificial Sequence
  MKO10081343_B_Deptor
  gRNA
taaaactcttctaccgcttt

SEQ ID NO: 81344 - DNA, 20 bp, Artificial Sequence
  MKO10081344_B_Deptor
  gRNA
agttcagaatgaacttccgt

SEQ ID NO: 81345 - DNA, 20 bp, Artificial Sequence
  MKO10081345_B_Deptor
  gRNA
tgagacgtccccgtcctctc

SEQ ID NO: 81346 - DNA, 20 bp, Artificial Sequence
  MKO10081346_B_Dera
  gRNA
cagtctgcgtttatcccgcc

SEQ ID NO: 81347 - DNA, 20 bp, Artificial Sequence
  MKO10081347_B_Dera
  gRNA
tggagctactgaaattgacg

SEQ ID NO: 81348 - DNA, 20 bp, Artificial Sequence
  MKO10081348_B_Dera
  gRNA
tcttcacgcttctgcgagcc

SEQ ID NO: 81349 - DNA, 20 bp, Artificial Sequence
  MKO10081349_B_Derl1
  gRNA
aaatacagaaatccagtccc

SEQ ID NO: 81350 - DNA, 20 bp, Artificial Sequence
  MKO10081350_B_Derl1
  gRNA
agcatgaataaatagtctgc

SEQ ID NO: 81351 - DNA, 20 bp, Artificial Sequence
  MKO10081351_B_Derl1
  gRNA
tattcatgcttctctttaac

SEQ ID NO: 81352 - DNA, 20 bp, Artificial Sequence
  MKO10081352_B_Derl2
  gRNA
ccaggcctttacaataatgc

SEQ ID NO: 81353 - DNA, 20 bp, Artificial Sequence
  MKO10081353_B_Derl2
  gRNA
aacaaaaaattgaatccaac

SEQ ID NO: 81354 - DNA, 20 bp, Artificial Sequence
  MKO10081354_B_Derl2
  gRNA
aaatgtttaaaaattaattc

SEQ ID NO: 81355 - DNA, 20 bp, Artificial Sequence
  MKO10081355_B_Derl3
  gRNA
gggttctttccgtggccgca

SEQ ID NO: 81356 - DNA, 20 bp, Artificial Sequence
  MKO10081356_B_Derl3
  gRNA
gttccgctactgccgcatgc

SEQ ID NO: 81357 - DNA, 20 bp, Artificial Sequence
  MKO10081357_B_Derl3
  gRNA
gctctacttcaacccgcacc

SEQ ID NO: 81358 - DNA, 20 bp, Artificial Sequence
  MKO10081358_B_Desi1
  gRNA
gagttcttcttcggcagcag

SEQ ID NO: 81359 - DNA, 20 bp, Artificial Sequence
  MKO10081359_B_Desi1
  gRNA
ccctgggggagtctctgttc

SEQ ID NO: 81360 - DNA, 20 bp, Artificial Sequence
  MKO10081360_B_Desi1
  gRNA
accggaacagagactccccc

SEQ ID NO: 81361 - DNA, 20 bp, Artificial Sequence
  MKO10081361_B_Desi2
  gRNA
aatgaatacacctcatctat

SEQ ID NO: 81362 - DNA, 20 bp, Artificial Sequence
  MKO10081362_B_Desi2
  gRNA
agagaaaattgtagaagaac

SEQ ID NO: 81363 - DNA, 20 bp, Artificial Sequence
  MKO10081363_B_Desi2
  gRNA
atttcaaatattccagaaaa

SEQ ID NO: 81364 - DNA, 20 bp, Artificial Sequence
  MKO10081364_B_Des
  gRNA
caatctcgcaggtgtaggac

SEQ ID NO: 81365 - DNA, 20 bp, Artificial Sequence
  MKO10081365_B_Des
  gRNA
cagcgcatcgttgttcttat

SEQ ID NO: 81366 - DNA, 20 bp, Artificial Sequence
  MKO10081366_B_Des
  gRNA
ggagatggacatgtccaagc

SEQ ID NO: 81367 - DNA, 20 bp, Artificial Sequence
  MKO10081367_B_Det1
  gRNA
ccacgaggcgtcgcactgtg

SEQ ID NO: 81368 - DNA, 20 bp, Artificial Sequence
  MKO10081368_B_Det1
  gRNA
gaggctgtgcgccgactgct

SEQ ID NO: 81369 - DNA, 20 bp, Artificial Sequence
  MKO10081369_B_Det1
  gRNA
atggagcgacccaagacttg

SEQ ID NO: 81370 - DNA, 20 bp, Artificial Sequence
  MKO10081370_B_Dexi
  gRNA
cgcagcccacctggacgctc

SEQ ID NO: 81371 - DNA, 20 bp, Artificial Sequence
  MKO10081371_B_Dexi
  gRNA
cctttactacgccttcctta

SEQ ID NO: 81372 - DNA, 20 bp, Artificial Sequence
  MKO10081372_B_Dexi
  gRNA
cgtccaggtgggctgcgacc

SEQ ID NO: 81373 - DNA, 20 bp, Artificial Sequence
  MKO10081373_B_Dffa
  gRNA
cggcgtcagggacttatcaa

SEQ ID NO: 81374 - DNA, 20 bp, Artificial Sequence
  MKO10081374_B_Dffa
  gRNA
actggcgggcttcctctctc

SEQ ID NO: 81375 - DNA, 20 bp, Artificial Sequence
  MKO10081375_B_Dffa
  gRNA
gggagtcttacctttctggt

SEQ ID NO: 81376 - DNA, 20 bp, Artificial Sequence
  MKO10081376_B_Dffb
  gRNA
acatggagccaaggactcgc

SEQ ID NO: 81377 - DNA, 20 bp, Artificial Sequence
  MKO10081377_B_Dffb
  gRNA
ggtgagcgcttacacctcta

SEQ ID NO: 81378 - DNA, 20 bp, Artificial Sequence
  MKO10081378_B_Dffb
  gRNA
gggtctctgcagtaatattc

SEQ ID NO: 81379 - DNA, 20 bp, Artificial Sequence
  MKO10081379_B_Dfna5
  gRNA
ctacagagagttcgcctttc

SEQ ID NO: 81380 - DNA, 20 bp, Artificial Sequence
  MKO10081380_B_Dfna5
  gRNA
agaaatcacgcacttctgcg

SEQ ID NO: 81381 - DNA, 20 bp, Artificial Sequence
  MKO10081381_B_Dfna5
  gRNA
agggatctccagcactacat

SEQ ID NO: 81382 - DNA, 20 bp, Artificial Sequence
  MKO10081382_B_Dfnb59
  gRNA
tgctctctgtcagtgcacgc

SEQ ID NO: 81383 - DNA, 20 bp, Artificial Sequence
  MKO10081383_B_Dfnb59
  gRNA
acagtttgatccgccaatca

SEQ ID NO: 81384 - DNA, 20 bp, Artificial Sequence
  MKO10081384_B_Dfnb59
  gRNA
aaagctatagttgtgtgtgc

SEQ ID NO: 81385 - DNA, 20 bp, Artificial Sequence
  MKO10081385_B_Dgat1
  gRNA
cactctcaggtatggcatcc

SEQ ID NO: 81386 - DNA, 20 bp, Artificial Sequence
  MKO10081386_B_Dgat1
  gRNA
attatcgtggtatcctgaat

SEQ ID NO: 81387 - DNA, 20 bp, Artificial Sequence
  MKO10081387_B_Dgat1
  gRNA
aaaataaccttgcattactc

SEQ ID NO: 81388 - DNA, 20 bp, Artificial Sequence
  MKO10081388_B_Dgat2l6
  gRNA
atctacctcaaaaaacgcca

SEQ ID NO: 81389 - DNA, 20 bp, Artificial Sequence
  MKO10081389_B_Dgat2l6
  gRNA
gccataaggtagtgaacagc

SEQ ID NO: 81390 - DNA, 20 bp, Artificial Sequence
  MKO10081390_B_Dgat2l6
  gRNA
tcctgctgttcactacctta

SEQ ID NO: 81391 - DNA, 20 bp, Artificial Sequence
  MKO10081391_B_Dgat2
  gRNA
caccttagatctgttgagcc

SEQ ID NO: 81392 - DNA, 20 bp, Artificial Sequence
  MKO10081392_B_Dgat2
  gRNA
gactggaacacgcccaagaa

SEQ ID NO: 81393 - DNA, 20 bp, Artificial Sequence
  MKO10081393_B_Dgat2
  gRNA
ccgagactactttcccatcc

SEQ ID NO: 81394 - DNA, 20 bp, Artificial Sequence
  MKO10081394_B_Dgcr14
  gRNA
actcaccatcatctaggtct

SEQ ID NO: 81395 - DNA, 20 bp, Artificial Sequence
  MKO10081395_B_Dgcr14
  gRNA
ttcccgagatatcttgccca

SEQ ID NO: 81396 - DNA, 20 bp, Artificial Sequence
  MKO10081396_B_Dgcr14
  gRNA
ctctctcatgtactatcccg

SEQ ID NO: 81397 - DNA, 20 bp, Artificial Sequence
  MKO10081397_B_Dgcr2
  gRNA
tcactcttatcctcacacgt

SEQ ID NO: 81398 - DNA, 20 bp, Artificial Sequence
  MKO10081398_B_Dgcr2
  gRNA
tcactgtcaccgagccgctg

SEQ ID NO: 81399 - DNA, 20 bp, Artificial Sequence
  MKO10081399_B_Dgcr2
  gRNA
agtgatgaagccgactgtcc

SEQ ID NO: 81400 - DNA, 20 bp, Artificial Sequence
  MKO10081400_B_Dgcr6
  gRNA
ccgaaagattgtcctggagc

SEQ ID NO: 81401 - DNA, 20 bp, Artificial Sequence
  MKO10081401_B_Dgcr6
  gRNA
gacgctgcagatgaacctat

SEQ ID NO: 81402 - DNA, 20 bp, Artificial Sequence
  MKO10081402_B_Dgcr6
  gRNA
cagtgctcagacagactcta

SEQ ID NO: 81403 - DNA, 20 bp, Artificial Sequence
  MKO10081403_B_Dgcr8
  gRNA
gactccatgggtggagactc

SEQ ID NO: 81404 - DNA, 20 bp, Artificial Sequence
  MKO10081404_B_Dgcr8
  gRNA
ttggtccagaccctacttct

SEQ ID NO: 81405 - DNA, 20 bp, Artificial Sequence
  MKO10081405_B_Dgcr8
  gRNA
caaagtcaaaacgcttctca

SEQ ID NO: 81406 - DNA, 20 bp, Artificial Sequence
  MKO10081406_B_Dgka
  gRNA
gtccatgtcatatagcttga

SEQ ID NO: 81407 - DNA, 20 bp, Artificial Sequence
  MKO10081407_B_Dgka
  gRNA
tgctacttcaccctcctaga

SEQ ID NO: 81408 - DNA, 20 bp, Artificial Sequence
  MKO10081408_B_Dgka
  gRNA
cttactcagactccaccaaa

SEQ ID NO: 81409 - DNA, 20 bp, Artificial Sequence
  MKO10081409_B_Dgkb
  gRNA
tacctgtctcttctcgaaag

SEQ ID NO: 81410 - DNA, 20 bp, Artificial Sequence
  MKO10081410_B_Dgkb
  gRNA
agtaagcccgctcttctttc

SEQ ID NO: 81411 - DNA, 20 bp, Artificial Sequence
  MKO10081411_B_Dgkb
  gRNA
ttgcaagcacgccattacca

SEQ ID NO: 81412 - DNA, 20 bp, Artificial Sequence
  MKO10081412_B_Dgkd
  gRNA
ccagtcgattatatttgatg

SEQ ID NO: 81413 - DNA, 20 bp, Artificial Sequence
  MKO10081413_B_Dgkd
  gRNA
tcatcttgtgtgccgacaac

SEQ ID NO: 81414 - DNA, 20 bp, Artificial Sequence
  MKO10081414_B_Dgkd
  gRNA
ctgctacgctggcatcagtc

SEQ ID NO: 81415 - DNA, 20 bp, Artificial Sequence
  MKO10081415_B_Dgke
  gRNA
tgcctcgcatgcactcgtcg

SEQ ID NO: 81416 - DNA, 20 bp, Artificial Sequence
  MKO10081416_B_Dgke
  gRNA
tcagttcgagtccttgtttg

SEQ ID NO: 81417 - DNA, 20 bp, Artificial Sequence
  MKO10081417_B_Dgke
  gRNA
gcggtcttacctctgggaac

SEQ ID NO: 81418 - DNA, 20 bp, Artificial Sequence
  MKO10081418_B_Dgkg
  gRNA
ggaccttgtacctgagacat

SEQ ID NO: 81419 - DNA, 20 bp, Artificial Sequence
  MKO10081419_B_Dgkg
  gRNA
ttgttccctagattataatt

SEQ ID NO: 81420 - DNA, 20 bp, Artificial Sequence
  MKO10081420_B_Dgkg
  gRNA
ttaatgaaggtggaagcctc

SEQ ID NO: 81421 - DNA, 20 bp, Artificial Sequence
  MKO10081421_B_Dgkh
  gRNA
aagagatacttcaagcttcg

SEQ ID NO: 81422 - DNA, 20 bp, Artificial Sequence
  MKO10081422_B_Dgkh
  gRNA
tcccacggcctgtcctgtga

SEQ ID NO: 81423 - DNA, 20 bp, Artificial Sequence
  MKO10081423_B_Dgkh
  gRNA
gtaggtggcccagttcaatg

SEQ ID NO: 81424 - DNA, 20 bp, Artificial Sequence
  MKO10081424_B_Dgki
  gRNA
ttcgctggaccgttagccac

SEQ ID NO: 81425 - DNA, 20 bp, Artificial Sequence
  MKO10081425_B_Dgki
  gRNA
tactcactgcaaatcggact

SEQ ID NO: 81426 - DNA, 20 bp, Artificial Sequence
  MKO10081426_B_Dgki
  gRNA
actcacttctcttggcgatc

SEQ ID NO: 81427 - DNA, 20 bp, Artificial Sequence
  MKO10081427_B_Dgkk
  gRNA
ttcttccatgtcttgccgag

SEQ ID NO: 81428 - DNA, 20 bp, Artificial Sequence
  MKO10081428_B_Dgkk
  gRNA
gctacttactatttcatcag

SEQ ID NO: 81429 - DNA, 20 bp, Artificial Sequence
  MKO10081429_B_Dgkk
  gRNA
tagaagaaggtcatcagtca

SEQ ID NO: 81430 - DNA, 20 bp, Artificial Sequence
  MKO10081430_B_Dgkq
  gRNA
gcattgcaccaagcctcgtc

SEQ ID NO: 81431 - DNA, 20 bp, Artificial Sequence
  MKO10081431_B_Dgkq
  gRNA
tggctggtgtacgctgcgag

SEQ ID NO: 81432 - DNA, 20 bp, Artificial Sequence
  MKO10081432_B_Dgkq
  gRNA
ggtaccttcacagcggaatg

SEQ ID NO: 81433 - DNA, 20 bp, Artificial Sequence
  MKO10081433_B_Dgkz
  gRNA
tgctcctcagattcaccgca

SEQ ID NO: 81434 - DNA, 20 bp, Artificial Sequence
  MKO10081434_B_Dgkz
  gRNA
cccgacatagcagaagtcac

SEQ ID NO: 81435 - DNA, 20 bp, Artificial Sequence
  MKO10081435_B_Dgkz
  gRNA
gtgtgcagcctgtaagatcg

SEQ ID NO: 81436 - DNA, 20 bp, Artificial Sequence
  MKO10081436_B_Dguok
  gRNA
tagcaagtttccaagacgtt

SEQ ID NO: 81437 - DNA, 20 bp, Artificial Sequence
  MKO10081437_B_Dguok
  gRNA
cttgctagaaatgatgtacc

SEQ ID NO: 81438 - DNA, 20 bp, Artificial Sequence
  MKO10081438_B_Dguok
  gRNA
gagttacctggggtgaagcc

SEQ ID NO: 81439 - DNA, 20 bp, Artificial Sequence
  MKO10081439_B_Dhcr24
  gRNA
gagtcatcgtcccacaagta

SEQ ID NO: 81440 - DNA, 20 bp, Artificial Sequence
  MKO10081440_B_Dhcr24
  gRNA
gcacaaagctgccgtctgcc

SEQ ID NO: 81441 - DNA, 20 bp, Artificial Sequence
  MKO10081441_B_Dhcr24
  gRNA
ctcactgtctcgctgcgagt

SEQ ID NO: 81442 - DNA, 20 bp, Artificial Sequence
  MKO10081442_B_Dhcr7
  gRNA
tggacgcctcccacataacc

SEQ ID NO: 81443 - DNA, 20 bp, Artificial Sequence
  MKO10081443_B_Dhcr7
  gRNA
ctccctgactgcccccgcat

SEQ ID NO: 81444 - DNA, 20 bp, Artificial Sequence
  MKO10081444_B_Dhcr7
  gRNA
cctgtagctatatccaatgc

SEQ ID NO: 81445 - DNA, 20 bp, Artificial Sequence
  MKO10081445_B_Dhdds
  gRNA
tcgctatgccaagaagtgtc

SEQ ID NO: 81446 - DNA, 20 bp, Artificial Sequence
  MKO10081446_B_Dhdds
  gRNA
gggcgtggaacaaggtctgc

SEQ ID NO: 81447 - DNA, 20 bp, Artificial Sequence
  MKO10081447_B_Dhdds
  gRNA
gagtccgtcaacctcactct

SEQ ID NO: 81448 - DNA, 20 bp, Artificial Sequence
  MKO10081448_B_Dhdh
  gRNA
gttgccaaagcccgttctca

SEQ ID NO: 81449 - DNA, 20 bp, Artificial Sequence
  MKO10081449_B_Dhdh
  gRNA
ccaacagctgaaatcttctc

SEQ ID NO: 81450 - DNA, 20 bp, Artificial Sequence
  MKO10081450_B_Dhdh
  gRNA
gaatttctgtgcgaactcct

SEQ ID NO: 81451 - DNA, 20 bp, Artificial Sequence
  MKO10081451_B_Dhfr
  gRNA
aatgaccacaacctcttcag

SEQ ID NO: 81452 - DNA, 20 bp, Artificial Sequence
  MKO10081452_B_Dhfr
  gRNA
tccttgtcacaaagagtctg

SEQ ID NO: 81453 - DNA, 20 bp, Artificial Sequence
  MKO10081453_B_Dhfr
  gRNA
acctcagactctttgtgaca

SEQ ID NO: 81454 - DNA, 20 bp, Artificial Sequence
  MKO10081454_B_Dhh
  gRNA
actctctagaaccgcgtagc

SEQ ID NO: 81455 - DNA, 20 bp, Artificial Sequence
  MKO10081455_B_Dhh
  gRNA
ccactacgaaggccgtgcct

SEQ ID NO: 81456 - DNA, 20 bp, Artificial Sequence
  MKO10081456_B_Dhh
  gRNA
cgggccgaggaccggttggc

SEQ ID NO: 81457 - DNA, 20 bp, Artificial Sequence
  MKO10081457_B_Dhodh
  gRNA
gttccaccgctgagagcccg

SEQ ID NO: 81458 - DNA, 20 bp, Artificial Sequence
  MKO10081458_B_Dhodh
  gRNA
cacgttaaccaccaggtagt

SEQ ID NO: 81459 - DNA, 20 bp, Artificial Sequence
  MKO10081459_B_Dhodh
  gRNA
aatgacacaccttggacagc

SEQ ID NO: 81460 - DNA, 20 bp, Artificial Sequence
  MKO10081460_B_Dhps
  gRNA
ccctgaggctgaactcgcca

SEQ ID NO: 81461 - DNA, 20 bp, Artificial Sequence
  MKO10081461_B_Dhps
  gRNA
catgcccattctggaccaga

SEQ ID NO: 81462 - DNA, 20 bp, Artificial Sequence
  MKO10081462_B_Dhps
  gRNA
tcccatgatagggtgtgaag

SEQ ID NO: 81463 - DNA, 20 bp, Artificial Sequence
  MKO10081463_B_Dhrs11
  gRNA
ttggcccagtgtatctctcc

SEQ ID NO: 81464 - DNA, 20 bp, Artificial Sequence
  MKO10081464_B_Dhrs11
  gRNA
cttcccccgggtccttgtca

SEQ ID NO: 81465 - DNA, 20 bp, Artificial Sequence
  MKO10081465_B_Dhrs11
  gRNA
ggcacatcattaacatcaac

SEQ ID NO: 81466 - DNA, 20 bp, Artificial Sequence
  MKO10081466_B_Dhrs13
  gRNA
tgaagtcgagacgaccacgt

SEQ ID NO: 81467 - DNA, 20 bp, Artificial Sequence
  MKO10081467_B_Dhrs13
  gRNA
aaaataggacgcagccatcc

SEQ ID NO: 81468 - DNA, 20 bp, Artificial Sequence
  MKO10081468_B_Dhrs13
  gRNA
acccctgtactgcgctctgc

SEQ ID NO: 81469 - DNA, 20 bp, Artificial Sequence
  MKO10081469_B_Dhrs1
  gRNA
gcctgttcgagcaagtagat

SEQ ID NO: 81470 - DNA, 20 bp, Artificial Sequence
  MKO10081470_B_Dhrs1
  gRNA
atcgtgattgtctcctcccc

SEQ ID NO: 81471 - DNA, 20 bp, Artificial Sequence
  MKO10081471_B_Dhrs1
  gRNA
ttgccaaccttcttaaatag

SEQ ID NO: 81472 - DNA, 20 bp, Artificial Sequence
  MKO10081472_B_Dhrs2
  gRNA
tgaccacatgtgccccatcc

SEQ ID NO: 81473 - DNA, 20 bp, Artificial Sequence
  MKO10081473_B_Dhrs2
  gRNA
cttgtcccagatctgttcac

SEQ ID NO: 81474 - DNA, 20 bp, Artificial Sequence
  MKO10081474_B_Dhrs2
  gRNA
aactggtacataagccactc

SEQ ID NO: 81475 - DNA, 20 bp, Artificial Sequence
  MKO10081475_B_Dhrs3
  gRNA
acggtggtggcgctgacacc

SEQ ID NO: 81476 - DNA, 20 bp, Artificial Sequence
  MKO10081476_B_Dhrs3
  gRNA
gaccttctctcggacagctt

SEQ ID NO: 81477 - DNA, 20 bp, Artificial Sequence
  MKO10081477_B_Dhrs3
  gRNA
ccgggaagaggtgtaccaga

SEQ ID NO: 81478 - DNA, 20 bp, Artificial Sequence
  MKO10081478_B_Dhrs4
  gRNA
caccaccgctttaatcatca

SEQ ID NO: 81479 - DNA, 20 bp, Artificial Sequence
  MKO10081479_B_Dhrs4
  gRNA
gttctgtagcaggcttcact

SEQ ID NO: 81480 - DNA, 20 bp, Artificial Sequence
  MKO10081480_B_Dhrs4
  gRNA
tacagccatgatgattaaag

SEQ ID NO: 81481 - DNA, 20 bp, Artificial Sequence
  MKO10081481_B_Dhrs7b
  gRNA
gatcagcattcctttccgat

SEQ ID NO: 81482 - DNA, 20 bp, Artificial Sequence
  MKO10081482_B_Dhrs7b
  gRNA
ccagtttagcccccgcagca

SEQ ID NO: 81483 - DNA, 20 bp, Artificial Sequence
  MKO10081483_B_Dhrs7b
  gRNA
acgggcgccacctcaggtct

SEQ ID NO: 81484 - DNA, 20 bp, Artificial Sequence
  MKO10081484_B_Dhrs7c
  gRNA
cggtaggagcggatgaaagt

SEQ ID NO: 81485 - DNA, 20 bp, Artificial Sequence
  MKO10081485_B_Dhrs7c
  gRNA
gcctgcccacaagatttccc

SEQ ID NO: 81486 - DNA, 20 bp, Artificial Sequence
  MKO10081486_B_Dhrs7c
  gRNA
aacaacatccaagcgaagtt

SEQ ID NO: 81487 - DNA, 20 bp, Artificial Sequence
  MKO10081487_B_Dhrs7
  gRNA
tttctagaactaaggaacgc

SEQ ID NO: 81488 - DNA, 20 bp, Artificial Sequence
  MKO10081488_B_Dhrs7
  gRNA
tacccgaagagcatgcttgc

SEQ ID NO: 81489 - DNA, 20 bp, Artificial Sequence
  MKO10081489_B_Dhrs7
  gRNA
acgttgcaaaatgttatgcc

SEQ ID NO: 81490 - DNA, 20 bp, Artificial Sequence
  MKO10081490_B_Dhrs9
  gRNA
cccagcaatgtaccgagtct

SEQ ID NO: 81491 - DNA, 20 bp, Artificial Sequence
  MKO10081491_B_Dhrs9
  gRNA
aggcgggatatgaaagcttt

SEQ ID NO: 81492 - DNA, 20 bp, Artificial Sequence
  MKO10081492_B_Dhrs9
  gRNA
catgtctcatgcattgaacc

SEQ ID NO: 81493 - DNA, 20 bp, Artificial Sequence
  MKO10081493_B_Dhrsx
  gRNA
gtcgcgggcgaagcctcgga

SEQ ID NO: 81494 - DNA, 20 bp, Artificial Sequence
  MKO10081494_B_Dhrsx
  gRNA
cctcaccgttgttgacgagc

SEQ ID NO: 81495 - DNA, 20 bp, Artificial Sequence
  MKO10081495_B_Dhrsx
  gRNA
agctgtcgcccctgtcacga

SEQ ID NO: 81496 - DNA, 20 bp, Artificial Sequence
  MKO10081496_B_Dhtkd1
  gRNA
tgggcggtttcgatagaaat

SEQ ID NO: 81497 - DNA, 20 bp, Artificial Sequence
  MKO10081497_B_Dhtkd1
  gRNA
gatggggactactccccgaa

SEQ ID NO: 81498 - DNA, 20 bp, Artificial Sequence
  MKO10081498_B_Dhtkd1
  gRNA
cagggacccttcactaccac

SEQ ID NO: 81499 - DNA, 20 bp, Artificial Sequence
  MKO10081499_B_Dhx15
  gRNA
actgcagtcttcaaatcgaa

SEQ ID NO: 81500 - DNA, 20 bp, Artificial Sequence
  MKO10081500_B_Dhx15
  gRNA
agccatgaacgatccccttc

SEQ ID NO: 81501 - DNA, 20 bp, Artificial Sequence
  MKO10081501_B_Dhx15
  gRNA
atgagtgctaccctagatgc

SEQ ID NO: 81502 - DNA, 20 bp, Artificial Sequence
  MKO10081502_B_Dhx16
  gRNA
ttcggcaacgggacaaggac

SEQ ID NO: 81503 - DNA, 20 bp, Artificial Sequence
  MKO10081503_B_Dhx16
  gRNA
ctaccggcaggtgccacgga

SEQ ID NO: 81504 - DNA, 20 bp, Artificial Sequence
  MKO10081504_B_Dhx16
  gRNA
aaaccgttcttataagttgt

SEQ ID NO: 81505 - DNA, 20 bp, Artificial Sequence
  MKO10081505_B_Dhx29
  gRNA
ggaggaagaccctaaaatta

SEQ ID NO: 81506 - DNA, 20 bp, Artificial Sequence
  MKO10081506_B_Dhx29
  gRNA
attccagtctgtacaaatac

SEQ ID NO: 81507 - DNA, 20 bp, Artificial Sequence
  MKO10081507_B_Dhx29
  gRNA
gtccagatttgcagagccac

SEQ ID NO: 81508 - DNA, 20 bp, Artificial Sequence
  MKO10081508_B_Dhx30
  gRNA
gaagattgatgctgagcgtc

SEQ ID NO: 81509 - DNA, 20 bp, Artificial Sequence
  MKO10081509_B_Dhx30
  gRNA
ttccaatcacgctgttgaga

SEQ ID NO: 81510 - DNA, 20 bp, Artificial Sequence
  MKO10081510_B_Dhx30
  gRNA
ggttgcaatctgaatcactt

SEQ ID NO: 81511 - DNA, 20 bp, Artificial Sequence
  MKO10081511_B_Dhx32
  gRNA
ccacccgtctctgatacact

SEQ ID NO: 81512 - DNA, 20 bp, Artificial Sequence
  MKO10081512_B_Dhx32
  gRNA
caatgacaaatttgaccgtg

SEQ ID NO: 81513 - DNA, 20 bp, Artificial Sequence
  MKO10081513_B_Dhx32
  gRNA
gatattcacatccatctcgt

SEQ ID NO: 81514 - DNA, 20 bp, Artificial Sequence
  MKO10081514_B_Dhx33
  gRNA
gtgccttgcgatgtctctgc

SEQ ID NO: 81515 - DNA, 20 bp, Artificial Sequence
  MKO10081515_B_Dhx33
  gRNA
acagctgtacttccgaagca

SEQ ID NO: 81516 - DNA, 20 bp, Artificial Sequence
  MKO10081516_B_Dhx33
  gRNA
gagagatggcagccactcga

SEQ ID NO: 81517 - DNA, 20 bp, Artificial Sequence
  MKO10081517_B_Dhx34
  gRNA
gtaggagcagccccaccgtc

SEQ ID NO: 81518 - DNA, 20 bp, Artificial Sequence
  MKO10081518_B_Dhx34
  gRNA
accctgcggatttccgggac

SEQ ID NO: 81519 - DNA, 20 bp, Artificial Sequence
  MKO10081519_B_Dhx34
  gRNA
cgtggacctcgtccacgatc

SEQ ID NO: 81520 - DNA, 20 bp, Artificial Sequence
  MKO10081520_B_Dhx35
  gRNA
gtcacggcagccactctgcg

SEQ ID NO: 81521 - DNA, 20 bp, Artificial Sequence
  MKO10081521_B_Dhx35
  gRNA
agcgtagggattgtaaatga

SEQ ID NO: 81522 - DNA, 20 bp, Artificial Sequence
  MKO10081522_B_Dhx35
  gRNA
ctggacagcggaaggacgag

SEQ ID NO: 81523 - DNA, 20 bp, Artificial Sequence
  MKO10081523_B_Dhx36
  gRNA
tcaggttacgcagttcatct

SEQ ID NO: 81524 - DNA, 20 bp, Artificial Sequence
  MKO10081524_B_Dhx36
  gRNA
accttctgcattccatatga

SEQ ID NO: 81525 - DNA, 20 bp, Artificial Sequence
  MKO10081525_B_Dhx36
  gRNA
acagtaataagtggtgaaac

SEQ ID NO: 81526 - DNA, 20 bp, Artificial Sequence
  MKO10081526_B_Dhx37
  gRNA
ttcacggggatgaatacagc

SEQ ID NO: 81527 - DNA, 20 bp, Artificial Sequence
  MKO10081527_B_Dhx37
  gRNA
gcttccggtgggccccgctg

SEQ ID NO: 81528 - DNA, 20 bp, Artificial Sequence
  MKO10081528_B_Dhx37
  gRNA
actgagtgaagtccaagtat

SEQ ID NO: 81529 - DNA, 20 bp, Artificial Sequence
  MKO10081529_B_Dhx38
  gRNA
aacctgagagtcctcgacat

SEQ ID NO: 81530 - DNA, 20 bp, Artificial Sequence
  MKO10081530_B_Dhx38
  gRNA
cctcctataagtacaatgaa

SEQ ID NO: 81531 - DNA, 20 bp, Artificial Sequence
  MKO10081531_B_Dhx38
  gRNA
tcaggcattaccgatctgct

SEQ ID NO: 81532 - DNA, 20 bp, Artificial Sequence
  MKO10081532_B_Dhx40
  gRNA
ctgtatttccagtaacgatg

SEQ ID NO: 81533 - DNA, 20 bp, Artificial Sequence
  MKO10081533_B_Dhx40
  gRNA
ccgccatatcagttgctcag

SEQ ID NO: 81534 - DNA, 20 bp, Artificial Sequence
  MKO10081534_B_Dhx40
  gRNA
acactgaatttgctaagatt

SEQ ID NO: 81535 - DNA, 20 bp, Artificial Sequence
  MKO10081535_B_Dhx57
  gRNA
ggtactggagggacgttcac

SEQ ID NO: 81536 - DNA, 20 bp, Artificial Sequence
  MKO10081536_B_Dhx57
  gRNA
aggacctgcatcaattatcg

SEQ ID NO: 81537 - DNA, 20 bp, Artificial Sequence
  MKO10081537_B_Dhx57
  gRNA
ctgagcccaagcgcccgtcc

SEQ ID NO: 81538 - DNA, 20 bp, Artificial Sequence
  MKO10081538_B_Dhx58
  gRNA
aattctttggcgacatgatg

SEQ ID NO: 81539 - DNA, 20 bp, Artificial Sequence
  MKO10081539_B_Dhx58
  gRNA
cctgacttgaagcaacaatt

SEQ ID NO: 81540 - DNA, 20 bp, Artificial Sequence
  MKO10081540_B_Dhx58
  gRNA
ccacgacctgctcatctgta

SEQ ID NO: 81541 - DNA, 20 bp, Artificial Sequence
  MKO10081541_B_Dhx8
  gRNA
gcatggtctgtatgagacgc

SEQ ID NO: 81542 - DNA, 20 bp, Artificial Sequence
  MKO10081542_B_Dhx8
  gRNA
tgcgtctcatacagaccatg

SEQ ID NO: 81543 - DNA, 20 bp, Artificial Sequence
  MKO10081543_B_Dhx8
  gRNA
gttgtccggctggcagagga

SEQ ID NO: 81544 - DNA, 20 bp, Artificial Sequence
  MKO10081544_B_Dhx9
  gRNA
gcctatgaaattagagcagt

SEQ ID NO: 81545 - DNA, 20 bp, Artificial Sequence
  MKO10081545_B_Dhx9
  gRNA
ttcttgagtagtaatcttta

SEQ ID NO: 81546 - DNA, 20 bp, Artificial Sequence
  MKO10081546_B_Dhx9
  gRNA
taaagattactactcaagaa

SEQ ID NO: 81547 - DNA, 20 bp, Artificial Sequence
  MKO10081547_B_Diablo
  gRNA
cgacaatatacaagtttact

SEQ ID NO: 81548 - DNA, 20 bp, Artificial Sequence
  MKO10081548_B_Diablo
  gRNA
gtgtgcggttcctattgctc

SEQ ID NO: 81549 - DNA, 20 bp, Artificial Sequence
  MKO10081549_B_Diablo
  gRNA
cagtcccttacctgagcaat

SEQ ID NO: 81550 - DNA, 20 bp, Artificial Sequence
  MKO10081550_B_Diap1
  gRNA
tgagggcctagcctccttat

SEQ ID NO: 81551 - DNA, 20 bp, Artificial Sequence
  MKO10081551_B_Diap1
  gRNA
acgactccatgatgagaaag

SEQ ID NO: 81552 - DNA, 20 bp, Artificial Sequence
  MKO10081552_B_Diap1
  gRNA
gcaatatctgcacacttcca

SEQ ID NO: 81553 - DNA, 20 bp, Artificial Sequence
  MKO10081553_B_Diap2
  gRNA
tcatcatgtactatcagagc

SEQ ID NO: 81554 - DNA, 20 bp, Artificial Sequence
  MKO10081554_B_Diap2
  gRNA
tattgattatcaaactgcag

SEQ ID NO: 81555 - DNA, 20 bp, Artificial Sequence
  MKO10081555_B_Diap2
  gRNA
ctttaaccagccatcctgtc

SEQ ID NO: 81556 - DNA, 20 bp, Artificial Sequence
  MKO10081556_B_Diap3
  gRNA
tagccgacagatctcacctc

SEQ ID NO: 81557 - DNA, 20 bp, Artificial Sequence
  MKO10081557_B_Diap3
  gRNA
tttgccagtataagaattcc

SEQ ID NO: 81558 - DNA, 20 bp, Artificial Sequence
  MKO10081558_B_Diap3
  gRNA
tagaacactgacagatgata

SEQ ID NO: 81559 - DNA, 20 bp, Artificial Sequence
  MKO10081559_B_Dicer1
  gRNA
taccttcataatttcacgat

SEQ ID NO: 81560 - DNA, 20 bp, Artificial Sequence
  MKO10081560_B_Dicer1
  gRNA
acctcaacccgcatgcaaaa

SEQ ID NO: 81561 - DNA, 20 bp, Artificial Sequence
  MKO10081561_B_Dicer1
  gRNA
acctagaagtaaatgcatct

SEQ ID NO: 81562 - DNA, 20 bp, Artificial Sequence
  MKO10081562_B_Dido1
  gRNA
gctcctaaatgcattggccc

SEQ ID NO: 81563 - DNA, 20 bp, Artificial Sequence
  MKO10081563_B_Dido1
  gRNA
ccaatgcatttaggagcacc

SEQ ID NO: 81564 - DNA, 20 bp, Artificial Sequence
  MKO10081564_B_Dido1
  gRNA
gatacgtacatttactcaat

SEQ ID NO: 81565 - DNA, 20 bp, Artificial Sequence
  MKO10081565_B_Diexf
  gRNA
tctcaccttgggatggcctc

SEQ ID NO: 81566 - DNA, 20 bp, Artificial Sequence
  MKO10081566_B_Diexf
  gRNA
acacgagtcactgttcagcc

SEQ ID NO: 81567 - DNA, 20 bp, Artificial Sequence
  MKO10081567_B_Diexf
  gRNA
attaccagctgacaaatctg

SEQ ID NO: 81568 - DNA, 20 bp, Artificial Sequence
  MKO10081568_B_Dimt1
  gRNA
tgctttaagacctaccgatg

SEQ ID NO: 81569 - DNA, 20 bp, Artificial Sequence
  MKO10081569_B_Dimt1
  gRNA
tgaagttcagctactagcct

SEQ ID NO: 81570 - DNA, 20 bp, Artificial Sequence
  MKO10081570_B_Dimt1
  gRNA
ttgcctgtgaacttgatcca

SEQ ID NO: 81571 - DNA, 20 bp, Artificial Sequence
  MKO10081571_B_Dio1
  gRNA
cccgattcgcccctgacaac

SEQ ID NO: 81572 - DNA, 20 bp, Artificial Sequence
  MKO10081572_B_Dio1
  gRNA
attgaagaagctcacgccac

SEQ ID NO: 81573 - DNA, 20 bp, Artificial Sequence
  MKO10081573_B_Dio1
  gRNA
catctacgagtctcttgaac

SEQ ID NO: 81574 - DNA, 20 bp, Artificial Sequence
  MKO10081574_B_Dio2
  gRNA
cacgatgcacacacgttcaa

SEQ ID NO: 81575 - DNA, 20 bp, Artificial Sequence
  MKO10081575_B_Dio2
  gRNA
tgaccgagtcatagagcgcc

SEQ ID NO: 81576 - DNA, 20 bp, Artificial Sequence
  MKO10081576_B_Dio2
  gRNA
cctcatcaatgtataccaac

SEQ ID NO: 81577 - DNA, 20 bp, Artificial Sequence
  MKO10081577_B_Dio3
  gRNA
ggaagcgcgggaacagcacg

SEQ ID NO: 81578 - DNA, 20 bp, Artificial Sequence
  MKO10081578_B_Dio3
  gRNA
cgacaaccgtctgtgcaccc

SEQ ID NO: 81579 - DNA, 20 bp, Artificial Sequence
  MKO10081579_B_Dio3
  gRNA
gtactctcgctgcgctgaca

SEQ ID NO: 81580 - DNA, 20 bp, Artificial Sequence
  MKO10081580_B_Dip2a
  gRNA
catcgagccctggctcgaca

SEQ ID NO: 81581 - DNA, 20 bp, Artificial Sequence
  MKO10081581_B_Dip2a
  gRNA
gttgagacctacacgcctcc

SEQ ID NO: 81582 - DNA, 20 bp, Artificial Sequence
  MKO10081582_B_Dip2a
  gRNA
actccagggatgagcgcttc

SEQ ID NO: 81583 - DNA, 20 bp, Artificial Sequence
  MKO10081583_B_Dip2b
  gRNA
gtcattgttggggtaaacca

SEQ ID NO: 81584 - DNA, 20 bp, Artificial Sequence
  MKO10081584_B_Dip2b
  gRNA
ttacacactgcttaataaac

SEQ ID NO: 81585 - DNA, 20 bp, Artificial Sequence
  MKO10081585_B_Dip2b
  gRNA
agaagtacccctgaccagaa

SEQ ID NO: 81586 - DNA, 20 bp, Artificial Sequence
  MKO10081586_B_Dip2c
  gRNA
atggatgcctacactccccc

SEQ ID NO: 81587 - DNA, 20 bp, Artificial Sequence
  MKO10081587_B_Dip2c
  gRNA
cagtggggcagcacaccggc

SEQ ID NO: 81588 - DNA, 20 bp, Artificial Sequence
  MKO10081588_B_Dip2c
  gRNA
gtcatggcccagacacacat

SEQ ID NO: 81589 - DNA, 20 bp, Artificial Sequence
  MKO10081589_B_Diras1
  gRNA
cgtgttcggcgcaggcggcg

SEQ ID NO: 81590 - DNA, 20 bp, Artificial Sequence
  MKO10081590_B_Diras1
  gRNA
agcgtttgccgtccacgctg

SEQ ID NO: 81591 - DNA, 20 bp, Artificial Sequence
  MKO10081591_B_Diras1
  gRNA
ctgcacgatcaacttgtaga

SEQ ID NO: 81592 - DNA, 20 bp, Artificial Sequence
  MKO10081592_B_Diras2
  gRNA
cgcacttccatgtgcgggct

SEQ ID NO: 81593 - DNA, 20 bp, Artificial Sequence
  MKO10081593_B_Diras2
  gRNA
caagctcaaccacaacgtga

SEQ ID NO: 81594 - DNA, 20 bp, Artificial Sequence
  MKO10081594_B_Diras2
  gRNA
accgtgagcctccagatcga

SEQ ID NO: 81595 - DNA, 20 bp, Artificial Sequence
  MKO10081595_B_Dirc2
  gRNA
gggcggaaaataagctagcg

SEQ ID NO: 81596 - DNA, 20 bp, Artificial Sequence
  MKO10081596_B_Dirc2
  gRNA
ttagcatacgcaataccact

SEQ ID NO: 81597 - DNA, 20 bp, Artificial Sequence
  MKO10081597_B_Dirc2
  gRNA
cttacttgactgacatgcac

SEQ ID NO: 81598 - DNA, 20 bp, Artificial Sequence
  MKO10081598_B_Dis3l2
  gRNA
ctccaatttaggatggtgat

SEQ ID NO: 81599 - DNA, 20 bp, Artificial Sequence
  MKO10081599_B_Dis3l2
  gRNA
tctatacctctgggggtccc

SEQ ID NO: 81600 - DNA, 20 bp, Artificial Sequence
  MKO10081600_B_Dis3l2
  gRNA
agcactcgggccaaccacag

SEQ ID NO: 81601 - DNA, 20 bp, Artificial Sequence
  MKO10081601_B_Dis3l
  gRNA
agcagcactgttacctcccc

SEQ ID NO: 81602 - DNA, 20 bp, Artificial Sequence
  MKO10081602_B_Dis3l
  gRNA
caaactgcgaaacctcctga

SEQ ID NO: 81603 - DNA, 20 bp, Artificial Sequence
  MKO10081603_B_Dis3l
  gRNA
ttggtactatcaccactgtg

SEQ ID NO: 81604 - DNA, 20 bp, Artificial Sequence
  MKO10081604_B_Dis3
  gRNA
gattgatgtcctcgaacacc

SEQ ID NO: 81605 - DNA, 20 bp, Artificial Sequence
  MKO10081605_B_Dis3
  gRNA
cccccatctacaagcgaatc

SEQ ID NO: 81606 - DNA, 20 bp, Artificial Sequence
  MKO10081606_B_Dis3
  gRNA
cccttaagcaagctccaaca

SEQ ID NO: 81607 - DNA, 20 bp, Artificial Sequence
  MKO10081607_B_Disc1
  gRNA
ggacagtgcggacttgaccc

SEQ ID NO: 81608 - DNA, 20 bp, Artificial Sequence
  MKO10081608_B_Disc1
  gRNA
ccgatccacagtccgagcca

SEQ ID NO: 81609 - DNA, 20 bp, Artificial Sequence
  MKO10081609_B_Disc1
  gRNA
ccttgcatggagccacccaa

SEQ ID NO: 81610 - DNA, 20 bp, Artificial Sequence
  MKO10081610_B_Disp1
  gRNA
aataacatgatgcgaaacac

SEQ ID NO: 81611 - DNA, 20 bp, Artificial Sequence
  MKO10081611_B_Disp1
  gRNA
tcagccaccgggatgaccga

SEQ ID NO: 81612 - DNA, 20 bp, Artificial Sequence
  MKO10081612_B_Disp1
  gRNA
gacctttcaagttcccgaga

SEQ ID NO: 81613 - DNA, 20 bp, Artificial Sequence
  MKO10081613_B_Disp2
  gRNA
acaggcaggaacgcactttc

SEQ ID NO: 81614 - DNA, 20 bp, Artificial Sequence
  MKO10081614_B_Disp2
  gRNA
ggtccggaccacactttcct

SEQ ID NO: 81615 - DNA, 20 bp, Artificial Sequence
  MKO10081615_B_Disp2
  gRNA
gagcctcgagacacagagat

SEQ ID NO: 81616 - DNA, 20 bp, Artificial Sequence
  MKO10081616_B_Dixdc1
  gRNA
accacactgtgccaccgctg

SEQ ID NO: 81617 - DNA, 20 bp, Artificial Sequence
  MKO10081617_B_Dixdc1
  gRNA
gtcctgaccgtgacacgtca

SEQ ID NO: 81618 - DNA, 20 bp, Artificial Sequence
  MKO10081618_B_Dixdc1
  gRNA
atgcatcagacgtcagcgaa

SEQ ID NO: 81619 - DNA, 20 bp, Artificial Sequence
  MKO10081619_B_Dkc1
  gRNA
cactatacacctcttccttg

SEQ ID NO: 81620 - DNA, 20 bp, Artificial Sequence
  MKO10081620_B_Dkc1
  gRNA
aaaacatacctttagtaaca

SEQ ID NO: 81621 - DNA, 20 bp, Artificial Sequence
  MKO10081621_B_Dkc1
  gRNA
aattgagccactttagattc

SEQ ID NO: 81622 - DNA, 20 bp, Artificial Sequence
  MKO10081622_B_Dkk1
  gRNA
cgatcatcagactgtgccgc

SEQ ID NO: 81623 - DNA, 20 bp, Artificial Sequence
  MKO10081623_B_Dkk1
  gRNA
cttggccgtgtttacaatga

SEQ ID NO: 81624 - DNA, 20 bp, Artificial Sequence
  MKO10081624_B_Dkk1
  gRNA
tgcagcgcttcctgcgcttt

SEQ ID NO: 81625 - DNA, 20 bp, Artificial Sequence
  MKO10081625_B_Dkk2
  gRNA
cctggtacccgctgcaataa

SEQ ID NO: 81626 - DNA, 20 bp, Artificial Sequence
  MKO10081626_B_Dkk2
  gRNA
cggcatagagatcgcaacca

SEQ ID NO: 81627 - DNA, 20 bp, Artificial Sequence
  MKO10081627_B_Dkk2
  gRNA
caatgcagtctgatgaccgt

SEQ ID NO: 81628 - DNA, 20 bp, Artificial Sequence
  MKO10081628_B_Dkk3
  gRNA
cccttaccttgtgaacttcc

SEQ ID NO: 81629 - DNA, 20 bp, Artificial Sequence
  MKO10081629_B_Dkk3
  gRNA
ctggcaggtgtacttgaagc

SEQ ID NO: 81630 - DNA, 20 bp, Artificial Sequence
  MKO10081630_B_Dkk3
  gRNA
ctatcacaatgagaccagca

SEQ ID NO: 81631 - DNA, 20 bp, Artificial Sequence
  MKO10081631_B_Dkk4
  gRNA
caagacggcgcctatgcaga

SEQ ID NO: 81632 - DNA, 20 bp, Artificial Sequence
  MKO10081632_B_Dkk4
  gRNA
gctttgtgatttcttcgtac

SEQ ID NO: 81633 - DNA, 20 bp, Artificial Sequence
  MKO10081633_B_Dkk4
  gRNA
tgttgttaaagtccagaacc

SEQ ID NO: 81634 - DNA, 20 bp, Artificial Sequence
  MKO10081634_B_Dkkl1
  gRNA
ggaacagtcgactaaagctt

SEQ ID NO: 81635 - DNA, 20 bp, Artificial Sequence
  MKO10081635_B_Dkkl1
  gRNA
cattgagccagaacggaacc

SEQ ID NO: 81636 - DNA, 20 bp, Artificial Sequence
  MKO10081636_B_Dkkl1
  gRNA
agttgtccaggtctcgtagc

SEQ ID NO: 81637 - DNA, 20 bp, Artificial Sequence
  MKO10081637_B_Dlat
  gRNA
accgtgcccatggtcatggt

SEQ ID NO: 81638 - DNA, 20 bp, Artificial Sequence
  MKO10081638_B_Dlat
  gRNA
gagcctggaggagtgctata

SEQ ID NO: 81639 - DNA, 20 bp, Artificial Sequence
  MKO10081639_B_Dlat
  gRNA
tgagggtgatctaattgcag

SEQ ID NO: 81640 - DNA, 20 bp, Artificial Sequence
  MKO10081640_B_Dlc1
  gRNA
gtactcactcgcttccggtg

SEQ ID NO: 81641 - DNA, 20 bp, Artificial Sequence
  MKO10081641_B_Dlc1
  gRNA
cagccagtcgcaagcttcct

SEQ ID NO: 81642 - DNA, 20 bp, Artificial Sequence
  MKO10081642_B_Dlc1
  gRNA
gttccctattgatattgcgc

SEQ ID NO: 81643 - DNA, 20 bp, Artificial Sequence
  MKO10081643_B_Dld
  gRNA
cgttggttgtattccttcaa

SEQ ID NO: 81644 - DNA, 20 bp, Artificial Sequence
  MKO10081644_B_Dld
  gRNA
gccatcaaatctgcccagtt

SEQ ID NO: 81645 - DNA, 20 bp, Artificial Sequence
  MKO10081645_B_Dld
  gRNA
taattctcattattaccata

SEQ ID NO: 81646 - DNA, 20 bp, Artificial Sequence
  MKO10081646_B_Dlec1
  gRNA
atccagacgctgtttataga

SEQ ID NO: 81647 - DNA, 20 bp, Artificial Sequence
  MKO10081647_B_Dlec1
  gRNA
ttcccgcctaacacaccaca

SEQ ID NO: 81648 - DNA, 20 bp, Artificial Sequence
  MKO10081648_B_Dlec1
  gRNA
acgtcagctttgaacatcca

SEQ ID NO: 81649 - DNA, 20 bp, Artificial Sequence
  MKO10081649_B_Dleu7
  gRNA
gcaaccacgtgggcatctga

SEQ ID NO: 81650 - DNA, 20 bp, Artificial Sequence
  MKO10081650_B_Dleu7
  gRNA
ggaccacgtgcccatcgccc

SEQ ID NO: 81651 - DNA, 20 bp, Artificial Sequence
  MKO10081651_B_Dleu7
  gRNA
tacagggcccgcggtcccgg

SEQ ID NO: 81652 - DNA, 20 bp, Artificial Sequence
  MKO10081652_B_Dlg1
  gRNA
ttgtgcgattgtatgtgaaa

SEQ ID NO: 81653 - DNA, 20 bp, Artificial Sequence
  MKO10081653_B_Dlg1
  gRNA
ctgtctgtgttgaccagcac

SEQ ID NO: 81654 - DNA, 20 bp, Artificial Sequence
  MKO10081654_B_Dlg1
  gRNA
tgatgcagattatgaatatg

SEQ ID NO: 81655 - DNA, 20 bp, Artificial Sequence
  MKO10081655_B_Dlg2
  gRNA
atacactcaccgacaagatc

SEQ ID NO: 81656 - DNA, 20 bp, Artificial Sequence
  MKO10081656_B_Dlg2
  gRNA
ctttgtgaaggactaccttg

SEQ ID NO: 81657 - DNA, 20 bp, Artificial Sequence
  MKO10081657_B_Dlg2
  gRNA
ctgatgcctacctgacatac

SEQ ID NO: 81658 - DNA, 20 bp, Artificial Sequence
  MKO10081658_B_Dlg3
  gRNA
tcttaccttcaggtctatac

SEQ ID NO: 81659 - DNA, 20 bp, Artificial Sequence
  MKO10081659_B_Dlg3
  gRNA
ctctccgaaccagtgagaag

SEQ ID NO: 81660 - DNA, 20 bp, Artificial Sequence
  MKO10081660_B_Dlg3
  gRNA
tcatttgttcccgcaagtca

SEQ ID NO: 81661 - DNA, 20 bp, Artificial Sequence
  MKO10081661_B_Dlg4
  gRNA
gggcgtttacctggttgggg

SEQ ID NO: 81662 - DNA, 20 bp, Artificial Sequence
  MKO10081662_B_Dlg4
  gRNA
agatgaagacacgccccctc

SEQ ID NO: 81663 - DNA, 20 bp, Artificial Sequence
  MKO10081663_B_Dlg4
  gRNA
ggagtatgaggagatcacat

SEQ ID NO: 81664 - DNA, 20 bp, Artificial Sequence
  MKO10081664_B_Dlg5
  gRNA
ccgacatggcccgcacacac

SEQ ID NO: 81665 - DNA, 20 bp, Artificial Sequence
  MKO10081665_B_Dlg5
  gRNA
catgaagcggctccgggaag

SEQ ID NO: 81666 - DNA, 20 bp, Artificial Sequence
  MKO10081666_B_Dlg5
  gRNA
gagtgaccagacgcagctga

SEQ ID NO: 81667 - DNA, 20 bp, Artificial Sequence
  MKO10081667_B_Dlgap1
  gRNA
gcgacacgcattcgtcgtcc

SEQ ID NO: 81668 - DNA, 20 bp, Artificial Sequence
  MKO10081668_B_Dlgap1
  gRNA
cggcccagcaagtcaacata

SEQ ID NO: 81669 - DNA, 20 bp, Artificial Sequence
  MKO10081669_B_Dlgap1
  gRNA
cagcaactccaccgaaagtc

SEQ ID NO: 81670 - DNA, 20 bp, Artificial Sequence
  MKO10081670_B_Dlgap2
  gRNA
gagtctcagtgcaccctttg

SEQ ID NO: 81671 - DNA, 20 bp, Artificial Sequence
  MKO10081671_B_Dlgap2
  gRNA
caccttctggctctccacaa

SEQ ID NO: 81672 - DNA, 20 bp, Artificial Sequence
  MKO10081672_B_Dlgap2
  gRNA
ccgggaagctgaggcccggc

SEQ ID NO: 81673 - DNA, 20 bp, Artificial Sequence
  MKO10081673_B_Dlgap3
  gRNA
ggtccagggcgtccacggcc

SEQ ID NO: 81674 - DNA, 20 bp, Artificial Sequence
  MKO10081674_B_Dlgap3
  gRNA
gccgtgtgcgggtccgtgtt

SEQ ID NO: 81675 - DNA, 20 bp, Artificial Sequence
  MKO10081675_B_Dlgap3
  gRNA
agctgccgctccgcatcctg

SEQ ID NO: 81676 - DNA, 20 bp, Artificial Sequence
  MKO10081676_B_Dlgap4
  gRNA
tggtggagacccccgagaag

SEQ ID NO: 81677 - DNA, 20 bp, Artificial Sequence
  MKO10081677_B_Dlgap4
  gRNA
caacccccgtccgacagccc

SEQ ID NO: 81678 - DNA, 20 bp, Artificial Sequence
  MKO10081678_B_Dlgap4
  gRNA
gcgcttgatctgggcaatct

SEQ ID NO: 81679 - DNA, 20 bp, Artificial Sequence
  MKO10081679_B_Dlgap5
  gRNA
cttgtaatccgtccagtatg

SEQ ID NO: 81680 - DNA, 20 bp, Artificial Sequence
  MKO10081680_B_Dlgap5
  gRNA
agtctgctccatatattctt

SEQ ID NO: 81681 - DNA, 20 bp, Artificial Sequence
  MKO10081681_B_Dlgap5
  gRNA
tctcttcacagattggtagc

SEQ ID NO: 81682 - DNA, 20 bp, Artificial Sequence
  MKO10081682_B_Dlk1
  gRNA
gcgcgtcctcttgctcctgc

SEQ ID NO: 81683 - DNA, 20 bp, Artificial Sequence
  MKO10081683_B_Dlk1
  gRNA
gacgggaaattctgcgaaat

SEQ ID NO: 81684 - DNA, 20 bp, Artificial Sequence
  MKO10081684_B_Dlk1
  gRNA
cagactccattgacacagcc

SEQ ID NO: 81685 - DNA, 20 bp, Artificial Sequence
  MKO10081685_B_Dlk2
  gRNA
aagtacctgcaggagccgtc

SEQ ID NO: 81686 - DNA, 20 bp, Artificial Sequence
  MKO10081686_B_Dlk2
  gRNA
tggacgtggctgtgagcgca

SEQ ID NO: 81687 - DNA, 20 bp, Artificial Sequence
  MKO10081687_B_Dlk2
  gRNA
cacggctgctgcgctcctga

SEQ ID NO: 81688 - DNA, 20 bp, Artificial Sequence
  MKO10081688_B_Dll1
  gRNA
gtgtgtgacgagcactacta

SEQ ID NO: 81689 - DNA, 20 bp, Artificial Sequence
  MKO10081689_B_Dll1
  gRNA
tggccaaaggcgtcatcccg

SEQ ID NO: 81690 - DNA, 20 bp, Artificial Sequence
  MKO10081690_B_Dll1
  gRNA
cttacctgttgcgaggtcat

SEQ ID NO: 81691 - DNA, 20 bp, Artificial Sequence
  MKO10081691_B_Dll3
  gRNA
ggcacacgtacgaggccatc

SEQ ID NO: 81692 - DNA, 20 bp, Artificial Sequence
  MKO10081692_B_Dll3
  gRNA
gcctgatgaatgccgttgcc

SEQ ID NO: 81693 - DNA, 20 bp, Artificial Sequence
  MKO10081693_B_Dll3
  gRNA
tctccctcgtcattgaaacc

SEQ ID NO: 81694 - DNA, 20 bp, Artificial Sequence
  MKO10081694_B_Dll4
  gRNA
cattggccagcataccgcgc

SEQ ID NO: 81695 - DNA, 20 bp, Artificial Sequence
  MKO10081695_B_Dll4
  gRNA
acacaccgggagacgacctg

SEQ ID NO: 81696 - DNA, 20 bp, Artificial Sequence
  MKO10081696_B_Dll4
  gRNA
cctggccgcaggtcgtctcc

SEQ ID NO: 81697 - DNA, 20 bp, Artificial Sequence
  MKO10081697_B_Dlst
  gRNA
tacttaactgcacacagccg

SEQ ID NO: 81698 - DNA, 20 bp, Artificial Sequence
  MKO10081698_B_Dlst
  gRNA
ttgcaggggtctccttatgt

SEQ ID NO: 81699 - DNA, 20 bp, Artificial Sequence
  MKO10081699_B_Dlst
  gRNA
ggcagggaacgtctccctag

SEQ ID NO: 81700 - DNA, 20 bp, Artificial Sequence
  MKO10081700_B_Dlx1
  gRNA
ccccaccggtaccacccggc

SEQ ID NO: 81701 - DNA, 20 bp, Artificial Sequence
  MKO10081701_B_Dlx1
  gRNA
cgatcctgcaggtcaagata

SEQ ID NO: 81702 - DNA, 20 bp, Artificial Sequence
  MKO10081702_B_Dlx1
  gRNA
ggcggcgaggtgcgctttaa

SEQ ID NO: 81703 - DNA, 20 bp, Artificial Sequence
  MKO10081703_B_Dlx2
  gRNA
ggcctcgccctacgcgcaca

SEQ ID NO: 81704 - DNA, 20 bp, Artificial Sequence
  MKO10081704_B_Dlx2
  gRNA
cgcccccgcctgcgtggtgg

SEQ ID NO: 81705 - DNA, 20 bp, Artificial Sequence
  MKO10081705_B_Dlx2
  gRNA
cctgccagagcgagccgagc

SEQ ID NO: 81706 - DNA, 20 bp, Artificial Sequence
  MKO10081706_B_Dlx3
  gRNA
gctgctgagcttgcgatcga

SEQ ID NO: 81707 - DNA, 20 bp, Artificial Sequence
  MKO10081707_B_Dlx3
  gRNA
caccgccgtcaccagcactc

SEQ ID NO: 81708 - DNA, 20 bp, Artificial Sequence
  MKO10081708_B_Dlx3
  gRNA
tggggtcgtccaggtagttg

SEQ ID NO: 81709 - DNA, 20 bp, Artificial Sequence
  MKO10081709_B_Dlx4
  gRNA
tggggagcgatgctgatacc

SEQ ID NO: 81710 - DNA, 20 bp, Artificial Sequence
  MKO10081710_B_Dlx4
  gRNA
gcatcgctccccagatgtgc

SEQ ID NO: 81711 - DNA, 20 bp, Artificial Sequence
  MKO10081711_B_Dlx4
  gRNA
actcggactcacccaaaccc

SEQ ID NO: 81712 - DNA, 20 bp, Artificial Sequence
  MKO10081712_B_Dlx5
  gRNA
ccaactccgcgcgttctggc

SEQ ID NO: 81713 - DNA, 20 bp, Artificial Sequence
  MKO10081713_B_Dlx5
  gRNA
gtcccccgcgtccagctacc

SEQ ID NO: 81714 - DNA, 20 bp, Artificial Sequence
  MKO10081714_B_Dlx5
  gRNA
cctcgccctgccagaacgcg

SEQ ID NO: 81715 - DNA, 20 bp, Artificial Sequence
  MKO10081715_B_Dlx6
  gRNA
ggaaatcaggttcaacggaa

SEQ ID NO: 81716 - DNA, 20 bp, Artificial Sequence
  MKO10081716_B_Dlx6
  gRNA
ccttcccgagagagccgaac

SEQ ID NO: 81717 - DNA, 20 bp, Artificial Sequence
  MKO10081717_B_Dlx6
  gRNA
gggaggcatactgacgccct

SEQ ID NO: 81718 - DNA, 20 bp, Artificial Sequence
  MKO10081718_B_Dmap1
  gRNA
ttacaaccgaaccccagagc

SEQ ID NO: 81719 - DNA, 20 bp, Artificial Sequence
  MKO10081719_B_Dmap1
  gRNA
tgatcctcagaagcgttctg

SEQ ID NO: 81720 - DNA, 20 bp, Artificial Sequence
  MKO10081720_B_Dmap1
  gRNA
acctcccgatgcatgccctc

SEQ ID NO: 81721 - DNA, 20 bp, Artificial Sequence
  MKO10081721_B_Dmbt1
  gRNA
gccaggtttggacagggctc

SEQ ID NO: 81722 - DNA, 20 bp, Artificial Sequence
  MKO10081722_B_Dmbt1
  gRNA
ccctgagccctgtccaaacc

SEQ ID NO: 81723 - DNA, 20 bp, Artificial Sequence
  MKO10081723_B_Dmbt1
  gRNA
caaacaagcagtcccacacc

SEQ ID NO: 81724 - DNA, 20 bp, Artificial Sequence
  MKO10081724_B_Dmbx1
  gRNA
caagcagcacgccgcatccc

SEQ ID NO: 81725 - DNA, 20 bp, Artificial Sequence
  MKO10081725_B_Dmbx1
  gRNA
ccataacgcccgcagcccca

SEQ ID NO: 81726 - DNA, 20 bp, Artificial Sequence
  MKO10081726_B_Dmbx1
  gRNA
cggcacgggagtcctcttca

SEQ ID NO: 81727 - DNA, 20 bp, Artificial Sequence
  MKO10081727_B_Dmc1
  gRNA
atggtattccatatcactac

SEQ ID NO: 81728 - DNA, 20 bp, Artificial Sequence
  MKO10081728_B_Dmc1
  gRNA
agagccctctgcaatgtcaa

SEQ ID NO: 81729 - DNA, 20 bp, Artificial Sequence
  MKO10081729_B_Dmc1
  gRNA
attgacctgttgcagaagca

SEQ ID NO: 81730 - DNA, 20 bp, Artificial Sequence
  MKO10081730_B_Dmd
  gRNA
tttggaatataatcctccac

SEQ ID NO: 81731 - DNA, 20 bp, Artificial Sequence
  MKO10081731_B_Dmd
  gRNA
aggccttacagggcaaaaac

SEQ ID NO: 81732 - DNA, 20 bp, Artificial Sequence
  MKO10081732_B_Dmd
  gRNA
tgccctgaacaatgtcaaca

SEQ ID NO: 81733 - DNA, 20 bp, Artificial Sequence
  MKO10081733_B_Dmgdh
  gRNA
acagcatcaaactttacgag

SEQ ID NO: 81734 - DNA, 20 bp, Artificial Sequence
  MKO10081734_B_Dmgdh
  gRNA
ttagccggactgtataaccc

SEQ ID NO: 81735 - DNA, 20 bp, Artificial Sequence
  MKO10081735_B_Dmgdh
  gRNA
agctcaccgctggctctacc

SEQ ID NO: 81736 - DNA, 20 bp, Artificial Sequence
  MKO10081736_B_Dmkn
  gRNA
gaaagatcttgtcttgcttc

SEQ ID NO: 81737 - DNA, 20 bp, Artificial Sequence
  MKO10081737_B_Dmkn
  gRNA
tctttcagctgactcatcca

SEQ ID NO: 81738 - DNA, 20 bp, Artificial Sequence
  MKO10081738_B_Dmkn
  gRNA
agtcacaccttcatcttcct

SEQ ID NO: 81739 - DNA, 20 bp, Artificial Sequence
  MKO10081739_B_Dmp1
  gRNA
tctacacagggtgatttggc

SEQ ID NO: 81740 - DNA, 20 bp, Artificial Sequence
  MKO10081740_B_Dmp1
  gRNA
tgtctaattacctgtccctc

SEQ ID NO: 81741 - DNA, 20 bp, Artificial Sequence
  MKO10081741_B_Dmp1
  gRNA
agctttcagattcagtattg

SEQ ID NO: 81742 - DNA, 20 bp, Artificial Sequence
  MKO10081742_B_Dmpk
  gRNA
ctccttaagccttgctgcaa

SEQ ID NO: 81743 - DNA, 20 bp, Artificial Sequence
  MKO10081743_B_Dmpk
  gRNA
gcagctgtgtgatccagcgc

SEQ ID NO: 81744 - DNA, 20 bp, Artificial Sequence
  MKO10081744_B_Dmpk
  gRNA
ttaaggaggtccgactgcag

SEQ ID NO: 81745 - DNA, 20 bp, Artificial Sequence
  MKO10081745_B_Dmrt1
  gRNA
ccttacgtgcctgctcagac

SEQ ID NO: 81746 - DNA, 20 bp, Artificial Sequence
  MKO10081746_B_Dmrt1
  gRNA
tggttgacggcgtagctgct

SEQ ID NO: 81747 - DNA, 20 bp, Artificial Sequence
  MKO10081747_B_Dmrt1
  gRNA
gtcccagatctttaccttcg

SEQ ID NO: 81748 - DNA, 20 bp, Artificial Sequence
  MKO10081748_B_Dmrt2
  gRNA
gccagcgacagaatcgcttg

SEQ ID NO: 81749 - DNA, 20 bp, Artificial Sequence
  MKO10081749_B_Dmrt2
  gRNA
tcggcgccctgacttgcctc

SEQ ID NO: 81750 - DNA, 20 bp, Artificial Sequence
  MKO10081750_B_Dmrt2
  gRNA
ggaaacagaacaatttcgat

SEQ ID NO: 81751 - DNA, 20 bp, Artificial Sequence
  MKO10081751_B_Dmrt3
  gRNA
cccgctgccgctcgatgatc

SEQ ID NO: 81752 - DNA, 20 bp, Artificial Sequence
  MKO10081752_B_Dmrt3
  gRNA
ttcatccacggacacgatct

SEQ ID NO: 81753 - DNA, 20 bp, Artificial Sequence
  MKO10081753_B_Dmrt3
  gRNA
gcctcatcccggactcgctg

SEQ ID NO: 81754 - DNA, 20 bp, Artificial Sequence
  MKO10081754_B_Dmrta1
  gRNA
ttctcctcccgattgatccg

SEQ ID NO: 81755 - DNA, 20 bp, Artificial Sequence
  MKO10081755_B_Dmrta1
  gRNA
ccccgacgacaccgaccgcg

SEQ ID NO: 81756 - DNA, 20 bp, Artificial Sequence
  MKO10081756_B_Dmrta1
  gRNA
ctgcgatcgaccgcaagctc

SEQ ID NO: 81757 - DNA, 20 bp, Artificial Sequence
  MKO10081757_B_Dmrta2
  gRNA
acccgtggcatcggtggcgt

SEQ ID NO: 81758 - DNA, 20 bp, Artificial Sequence
  MKO10081758_B_Dmrta2
  gRNA
gcccttgtcgcccgacggcg

SEQ ID NO: 81759 - DNA, 20 bp, Artificial Sequence
  MKO10081759_B_Dmrta2
  gRNA
cagagggtaggcgcccgcgt

SEQ ID NO: 81760 - DNA, 20 bp, Artificial Sequence
  MKO10081760_B_Dmrtb1
  gRNA
gctgacctacgatacagaca

SEQ ID NO: 81761 - DNA, 20 bp, Artificial Sequence
  MKO10081761_B_Dmrtb1
  gRNA
gaatcctggccttccgaaag

SEQ ID NO: 81762 - DNA, 20 bp, Artificial Sequence
  MKO10081762_B_Dmrtb1
  gRNA
cagcttagttggactgctcc

SEQ ID NO: 81763 - DNA, 20 bp, Artificial Sequence
  MKO10081763_B_Dmrtc1a
  gRNA
ttgcagtagcatagggtcag

SEQ ID NO: 81764 - DNA, 20 bp, Artificial Sequence
  MKO10081764_B_Dmrtc1a
  gRNA
gaggtcccatggggctcccc

SEQ ID NO: 81765 - DNA, 20 bp, Artificial Sequence
  MKO10081765_B_Dmrtc1a
  gRNA
ctacatacctggcatgccac

SEQ ID NO: 81766 - DNA, 20 bp, Artificial Sequence
  MKO10081766_B_Dmrtc1b
  gRNA
tcttacctcccgtggggttt

SEQ ID NO: 81767 - DNA, 20 bp, Artificial Sequence
  MKO10081767_B_Dmrtc1b
  gRNA
ctatgcacaagcatgagacc

SEQ ID NO: 81768 - DNA, 20 bp, Artificial Sequence
  MKO10081768_B_Dmrtc1b
  gRNA
ctcctgcagggaagttccca

SEQ ID NO: 81769 - DNA, 20 bp, Artificial Sequence
  MKO10081769_B_Dmrtc1c1
  gRNA
ctattgaagggaccacggcg

SEQ ID NO: 81770 - DNA, 20 bp, Artificial Sequence
  MKO10081770_B_Dmrtc1c1
  gRNA
acctcctgggggcttgcttg

SEQ ID NO: 81771 - DNA, 20 bp, Artificial Sequence
  MKO10081771_B_Dmrtc1c1
  gRNA
cctgcctcaagcaagccccc

SEQ ID NO: 81772 - DNA, 20 bp, Artificial Sequence
  MKO10081772_B_Dmrtc1c2
  gRNA
ctcacggcgacctcttcctt

SEQ ID NO: 81773 - DNA, 20 bp, Artificial Sequence
  MKO10081773_B_Dmrtc1c2
  gRNA
cctgcctcaagcaagccccc

SEQ ID NO: 81774 - DNA, 20 bp, Artificial Sequence
  MKO10081774_B_Dmrtc1c2
  gRNA
acctcctgggggcttgcttg

SEQ ID NO: 81775 - DNA, 20 bp, Artificial Sequence
  MKO10081775_B_Dmrtc2
  gRNA
ttcctacttacgtgtgaggc

SEQ ID NO: 81776 - DNA, 20 bp, Artificial Sequence
  MKO10081776_B_Dmrtc2
  gRNA
actgctgctcagccgccccc

SEQ ID NO: 81777 - DNA, 20 bp, Artificial Sequence
  MKO10081777_B_Dmrtc2
  gRNA
agctcccctccgtgtcaaga

SEQ ID NO: 81778 - DNA, 20 bp, Artificial Sequence
  MKO10081778_B_Dmtf1
  gRNA
gaccatgacggcaactacag

SEQ ID NO: 81779 - DNA, 20 bp, Artificial Sequence
  MKO10081779_B_Dmtf1
  gRNA
cacctctgtagttgccgtca

SEQ ID NO: 81780 - DNA, 20 bp, Artificial Sequence
  MKO10081780_B_Dmtf1
  gRNA
gtactgaacctccacataag

SEQ ID NO: 81781 - DNA, 20 bp, Artificial Sequence
  MKO10081781_B_Dmtn
  gRNA
gatccttgtagcccaacacc

SEQ ID NO: 81782 - DNA, 20 bp, Artificial Sequence
  MKO10081782_B_Dmtn
  gRNA
atcccccccaccgtctccag

SEQ ID NO: 81783 - DNA, 20 bp, Artificial Sequence
  MKO10081783_B_Dmtn
  gRNA
tctctcaggcttcaacccca

SEQ ID NO: 81784 - DNA, 20 bp, Artificial Sequence
  MKO10081784_B_Dmwd
  gRNA
tcaacaagcccatcgacaag

SEQ ID NO: 81785 - DNA, 20 bp, Artificial Sequence
  MKO10081785_B_Dmwd
  gRNA
acccagcaagtcagttgtag

SEQ ID NO: 81786 - DNA, 20 bp, Artificial Sequence
  MKO10081786_B_Dmwd
  gRNA
gtctccctagttcacagacg

SEQ ID NO: 81787 - DNA, 20 bp, Artificial Sequence
  MKO10081787_B_Dmxl1
  gRNA
atatttccatgcttagcgcc

SEQ ID NO: 81788 - DNA, 20 bp, Artificial Sequence
  MKO10081788_B_Dmxl1
  gRNA
caatagcacataatataacc

SEQ ID NO: 81789 - DNA, 20 bp, Artificial Sequence
  MKO10081789_B_Dmxl1
  gRNA
aacagagataacgttcccat

SEQ ID NO: 81790 - DNA, 20 bp, Artificial Sequence
  MKO10081790_B_Dmxl2
  gRNA
gaacatccaagtcagttgtg

SEQ ID NO: 81791 - DNA, 20 bp, Artificial Sequence
  MKO10081791_B_Dmxl2
  gRNA
ccatgctaagttgtatgtca

SEQ ID NO: 81792 - DNA, 20 bp, Artificial Sequence
  MKO10081792_B_Dmxl2
  gRNA
tcttatgagaatttacaccc

SEQ ID NO: 81793 - DNA, 20 bp, Artificial Sequence
  MKO10081793_B_Dna2
  gRNA
gctgctagcgacgcttgtgc

SEQ ID NO: 81794 - DNA, 20 bp, Artificial Sequence
  MKO10081794_B_Dna2
  gRNA
tcgctttctgaaagacttcg

SEQ ID NO: 81795 - DNA, 20 bp, Artificial Sequence
  MKO10081795_B_Dna2
  gRNA
ggagaagcgcttgcacgtca

SEQ ID NO: 81796 - DNA, 20 bp, Artificial Sequence
  MKO10081796_B_Dnaaf1
  gRNA
ccacaaccgcctggagacgg

SEQ ID NO: 81797 - DNA, 20 bp, Artificial Sequence
  MKO10081797_B_Dnaaf1
  gRNA
cacccttaaagtgcaaatac

SEQ ID NO: 81798 - DNA, 20 bp, Artificial Sequence
  MKO10081798_B_Dnaaf1
  gRNA
cttgggcaggatgttgtgca

SEQ ID NO: 81799 - DNA, 20 bp, Artificial Sequence
  MKO10081799_B_Dnaaf2
  gRNA
tgaagaacctcaatcagcgg

SEQ ID NO: 81800 - DNA, 20 bp, Artificial Sequence
  MKO10081800_B_Dnaaf2
  gRNA
tagtactacctactcgactg

SEQ ID NO: 81801 - DNA, 20 bp, Artificial Sequence
  MKO10081801_B_Dnaaf2
  gRNA
tataaaagagacgaatatgc

SEQ ID NO: 81802 - DNA, 20 bp, Artificial Sequence
  MKO10081802_B_Dnaaf3
  gRNA
acagtcgaaaacagagcgca

SEQ ID NO: 81803 - DNA, 20 bp, Artificial Sequence
  MKO10081803_B_Dnaaf3
  gRNA
agttgctcctccaggcgatc

SEQ ID NO: 81804 - DNA, 20 bp, Artificial Sequence
  MKO10081804_B_Dnaaf3
  gRNA
gaactggatgccctgctgtt

SEQ ID NO: 81805 - DNA, 20 bp, Artificial Sequence
  MKO10081805_B_Dnah10
  gRNA
gagtgactatcaaaaagtag

SEQ ID NO: 81806 - DNA, 20 bp, Artificial Sequence
  MKO10081806_B_Dnah10
  gRNA
aaaacgcatcatcaacaagc

SEQ ID NO: 81807 - DNA, 20 bp, Artificial Sequence
  MKO10081807_B_Dnah10
  gRNA
gtcatccatatcaaatagag

SEQ ID NO: 81808 - DNA, 20 bp, Artificial Sequence
  MKO10081808_B_Dnah11
  gRNA
tacatgtgtaagcaatgacc

SEQ ID NO: 81809 - DNA, 20 bp, Artificial Sequence
  MKO10081809_B_Dnah11
  gRNA
tcagcacaccctctcttgag

SEQ ID NO: 81810 - DNA, 20 bp, Artificial Sequence
  MKO10081810_B_Dnah11
  gRNA
ggctccaattgtcctcaaga

SEQ ID NO: 81811 - DNA, 20 bp, Artificial Sequence
  MKO10081811_B_Dnah17
  gRNA
gctgcctatccccgagcacc

SEQ ID NO: 81812 - DNA, 20 bp, Artificial Sequence
  MKO10081812_B_Dnah17
  gRNA
gaacaagatagttgagatcc

SEQ ID NO: 81813 - DNA, 20 bp, Artificial Sequence
  MKO10081813_B_Dnah17
  gRNA
gaagcccctgcgcatcctgt

SEQ ID NO: 81814 - DNA, 20 bp, Artificial Sequence
  MKO10081814_B_Dnah1
  gRNA
gtgccccagatcgtcgtctg

SEQ ID NO: 81815 - DNA, 20 bp, Artificial Sequence
  MKO10081815_B_Dnah1
  gRNA
ctctcgatctcaatcttccg

SEQ ID NO: 81816 - DNA, 20 bp, Artificial Sequence
  MKO10081816_B_Dnah1
  gRNA
ctcgacaagttcaccccaaa

SEQ ID NO: 81817 - DNA, 20 bp, Artificial Sequence
  MKO10081817_B_Dnah2
  gRNA
catcaccccagagaacttcg

SEQ ID NO: 81818 - DNA, 20 bp, Artificial Sequence
  MKO10081818_B_Dnah2
  gRNA
cctacatcccggctttgctc

SEQ ID NO: 81819 - DNA, 20 bp, Artificial Sequence
  MKO10081819_B_Dnah2
  gRNA
ttagcctctccatgaagcgc

SEQ ID NO: 81820 - DNA, 20 bp, Artificial Sequence
  MKO10081820_B_Dnah5
  gRNA
ttacgcctgagaacatccac

SEQ ID NO: 81821 - DNA, 20 bp, Artificial Sequence
  MKO10081821_B_Dnah5
  gRNA
gccaagagggcccgtctgga

SEQ ID NO: 81822 - DNA, 20 bp, Artificial Sequence
  MKO10081822_B_Dnah5
  gRNA
agtcatgccgcccatccaga

SEQ ID NO: 81823 - DNA, 20 bp, Artificial Sequence
  MKO10081823_B_Dnah6
  gRNA
gaagctctgtcagccgtgct

SEQ ID NO: 81824 - DNA, 20 bp, Artificial Sequence
  MKO10081824_B_Dnah6
  gRNA
gtacggcagagatcatgtaa

SEQ ID NO: 81825 - DNA, 20 bp, Artificial Sequence
  MKO10081825_B_Dnah6
  gRNA
cgatgtcatcattgtaaacg

SEQ ID NO: 81826 - DNA, 20 bp, Artificial Sequence
  MKO10081826_B_Dnah7a
  gRNA
taaattaccaaagataactg

SEQ ID NO: 81827 - DNA, 20 bp, Artificial Sequence
  MKO10081827_B_Dnah7a
  gRNA
cgtctttgatttgcctttag

SEQ ID NO: 81828 - DNA, 20 bp, Artificial Sequence
  MKO10081828_B_Dnah7a
  gRNA
acctttgatcttgaagttga

SEQ ID NO: 81829 - DNA, 20 bp, Artificial Sequence
  MKO10081829_B_Dnah7b
  gRNA
atggagctatctgctgccac

SEQ ID NO: 81830 - DNA, 20 bp, Artificial Sequence
  MKO10081830_B_Dnah7b
  gRNA
caaggacttgcgggccaggc

SEQ ID NO: 81831 - DNA, 20 bp, Artificial Sequence
  MKO10081831_B_Dnah7b
  gRNA
taaattaccgaagttaactg

SEQ ID NO: 81832 - DNA, 20 bp, Artificial Sequence
  MKO10081832_B_Dnah8
  gRNA
ccatccttgcaactagcaac

SEQ ID NO: 81833 - DNA, 20 bp, Artificial Sequence
  MKO10081833_B_Dnah8
  gRNA
agctttaaaccagtccaagc

SEQ ID NO: 81834 - DNA, 20 bp, Artificial Sequence
  MKO10081834_B_Dnah8
  gRNA
tgggttggacttagtaactg

SEQ ID NO: 81835 - DNA, 20 bp, Artificial Sequence
  MKO10081835_B_Dnah9
  gRNA
ggaacggtaccatttgcagg

SEQ ID NO: 81836 - DNA, 20 bp, Artificial Sequence
  MKO10081836_B_Dnah9
  gRNA
actcaagagggagtcttctc

SEQ ID NO: 81837 - DNA, 20 bp, Artificial Sequence
  MKO10081837_B_Dnah9
  gRNA
tgcttcaacgtctctgaaca

SEQ ID NO: 81838 - DNA, 20 bp, Artificial Sequence
  MKO10081838_B_Dnaic1
  gRNA
atgcaccccagaatattgtc

SEQ ID NO: 81839 - DNA, 20 bp, Artificial Sequence
  MKO10081839_B_Dnaic1
  gRNA
agggggtcgcacggtggctt

SEQ ID NO: 81840 - DNA, 20 bp, Artificial Sequence
  MKO10081840_B_Dnaic1
  gRNA
gagggcacatataaacttat

SEQ ID NO: 81841 - DNA, 20 bp, Artificial Sequence
  MKO10081841_B_Dnaic2
  gRNA
ctgtttaggccaacaccgag

SEQ ID NO: 81842 - DNA, 20 bp, Artificial Sequence
  MKO10081842_B_Dnaic2
  gRNA
gttgtctcctctcgtcaccc

SEQ ID NO: 81843 - DNA, 20 bp, Artificial Sequence
  MKO10081843_B_Dnaic2
  gRNA
caacgccatcgacatctacg

SEQ ID NO: 81844 - DNA, 20 bp, Artificial Sequence
  MKO10081844_B_Dnaja1
  gRNA
gaacatatcaaagatatcca

SEQ ID NO: 81845 - DNA, 20 bp, Artificial Sequence
  MKO10081845_B_Dnaja1
  gRNA
ttcttgctgattccaaaaaa

SEQ ID NO: 81846 - DNA, 20 bp, Artificial Sequence
  MKO10081846_B_Dnaja1
  gRNA
accattatataagtcttcta

SEQ ID NO: 81847 - DNA, 20 bp, Artificial Sequence
  MKO10081847_B_Dnaja2
  gRNA
ctccgccgctgccttcccgt

SEQ ID NO: 81848 - DNA, 20 bp, Artificial Sequence
  MKO10081848_B_Dnaja2
  gRNA
attcttgctaagttgtagtt

SEQ ID NO: 81849 - DNA, 20 bp, Artificial Sequence
  MKO10081849_B_Dnaja2
  gRNA
cttatcagggtggtattctt

SEQ ID NO: 81850 - DNA, 20 bp, Artificial Sequence
  MKO10081850_B_Dnaja3
  gRNA
tatgacgcttacggctctgc

SEQ ID NO: 81851 - DNA, 20 bp, Artificial Sequence
  MKO10081851_B_Dnaja3
  gRNA
aggtccctctgttgaccccg

SEQ ID NO: 81852 - DNA, 20 bp, Artificial Sequence
  MKO10081852_B_Dnaja3
  gRNA
agatgattattaccagatcc

SEQ ID NO: 81853 - DNA, 20 bp, Artificial Sequence
  MKO10081853_B_Dnaja4
  gRNA
gataattgtgcttgatcaga

SEQ ID NO: 81854 - DNA, 20 bp, Artificial Sequence
  MKO10081854_B_Dnaja4
  gRNA
taattgcctgttctccacct

SEQ ID NO: 81855 - DNA, 20 bp, Artificial Sequence
  MKO10081855_B_Dnaja4
  gRNA
aaagtttaaacttatatccc

SEQ ID NO: 81856 - DNA, 20 bp, Artificial Sequence
  MKO10081856_B_Dnajb11
  gRNA
actcgtcacaaaccacttcc

SEQ ID NO: 81857 - DNA, 20 bp, Artificial Sequence
  MKO10081857_B_Dnajb11
  gRNA
tggaggaacccctcgtcagc

SEQ ID NO: 81858 - DNA, 20 bp, Artificial Sequence
  MKO10081858_B_Dnajb11
  gRNA
cagttgcatttccgtttgcc

SEQ ID NO: 81859 - DNA, 20 bp, Artificial Sequence
  MKO10081859_B_Dnajb12
  gRNA
accgaaaccccctcagccaa

SEQ ID NO: 81860 - DNA, 20 bp, Artificial Sequence
  MKO10081860_B_Dnajb12
  gRNA
ccagacaagaaccatgcgcc

SEQ ID NO: 81861 - DNA, 20 bp, Artificial Sequence
  MKO10081861_B_Dnajb12
  gRNA
gggtgatcaccggtggactg

SEQ ID NO: 81862 - DNA, 20 bp, Artificial Sequence
  MKO10081862_B_Dnajb13
  gRNA
aaaaaattaagatctcccga

SEQ ID NO: 81863 - DNA, 20 bp, Artificial Sequence
  MKO10081863_B_Dnajb13
  gRNA
catctatgacaagtttggtg

SEQ ID NO: 81864 - DNA, 20 bp, Artificial Sequence
  MKO10081864_B_Dnajb13
  gRNA
ctgaccatcgatgtgagacc

SEQ ID NO: 81865 - DNA, 20 bp, Artificial Sequence
  MKO10081865_B_Dnajb14
  gRNA
caatttccaccggggctgtg

SEQ ID NO: 81866 - DNA, 20 bp, Artificial Sequence
  MKO10081866_B_Dnajb14
  gRNA
ccagacaaaaaccacgcccc

SEQ ID NO: 81867 - DNA, 20 bp, Artificial Sequence
  MKO10081867_B_Dnajb14
  gRNA
ctctttcatgcccactgtgt

SEQ ID NO: 81868 - DNA, 20 bp, Artificial Sequence
  MKO10081868_B_Dnajb1
  gRNA
cccgttgcgctgcccaaaaa

SEQ ID NO: 81869 - DNA, 20 bp, Artificial Sequence
  MKO10081869_B_Dnajb1
  gRNA
ggtatgcggcggaaagtccc

SEQ ID NO: 81870 - DNA, 20 bp, Artificial Sequence
  MKO10081870_B_Dnajb1
  gRNA
cgtctcatccagaaccatcc

SEQ ID NO: 81871 - DNA, 20 bp, Artificial Sequence
  MKO10081871_B_Dnajb2
  gRNA
gacttcctcggggctacgga

SEQ ID NO: 81872 - DNA, 20 bp, Artificial Sequence
  MKO10081872_B_Dnajb2
  gRNA
ttcctgcaggtaccgaaaga

SEQ ID NO: 81873 - DNA, 20 bp, Artificial Sequence
  MKO10081873_B_Dnajb2
  gRNA
cagtgcttaccggagttggc

SEQ ID NO: 81874 - DNA, 20 bp, Artificial Sequence
  MKO10081874_B_Dnajb3
  gRNA
ggccgagaggcggttcaagc

SEQ ID NO: 81875 - DNA, 20 bp, Artificial Sequence
  MKO10081875_B_Dnajb3
  gRNA
accgcaagcttgcgctcaag

SEQ ID NO: 81876 - DNA, 20 bp, Artificial Sequence
  MKO10081876_B_Dnajb3
  gRNA
gcaggcctacgaggtcttat

SEQ ID NO: 81877 - DNA, 20 bp, Artificial Sequence
  MKO10081877_B_Dnajb4
  gRNA
tcttgtccgggtgaaatttg

SEQ ID NO: 81878 - DNA, 20 bp, Artificial Sequence
  MKO10081878_B_Dnajb4
  gRNA
gcaagccctcaaatttcacc

SEQ ID NO: 81879 - DNA, 20 bp, Artificial Sequence
  MKO10081879_B_Dnajb4
  gRNA
aggtttcttccgtccattgt

SEQ ID NO: 81880 - DNA, 20 bp, Artificial Sequence
  MKO10081880_B_Dnajb5
  gRNA
tcgtacaggctccgcttctt

SEQ ID NO: 81881 - DNA, 20 bp, Artificial Sequence
  MKO10081881_B_Dnajb5
  gRNA
caccgtgaaaagactccgtg

SEQ ID NO: 81882 - DNA, 20 bp, Artificial Sequence
  MKO10081882_B_Dnajb5
  gRNA
gtgaacattcccaccattga

SEQ ID NO: 81883 - DNA, 20 bp, Artificial Sequence
  MKO10081883_B_Dnajb6
  gRNA
ggtggattactatgaagtgc

SEQ ID NO: 81884 - DNA, 20 bp, Artificial Sequence
  MKO10081884_B_Dnajb6
  gRNA
gcagagacatgcctcacctg

SEQ ID NO: 81885 - DNA, 20 bp, Artificial Sequence
  MKO10081885_B_Dnajb6
  gRNA
aaaataaagaagaagcagag

SEQ ID NO: 81886 - DNA, 20 bp, Artificial Sequence
  MKO10081886_B_Dnajb7
  gRNA
tatgaccacccagcgctttc

SEQ ID NO: 81887 - DNA, 20 bp, Artificial Sequence
  MKO10081887_B_Dnajb7
  gRNA
agagcccggaaagcgctggg

SEQ ID NO: 81888 - DNA, 20 bp, Artificial Sequence
  MKO10081888_B_Dnajb7
  gRNA
tgaataccctgtgtcgtaag

SEQ ID NO: 81889 - DNA, 20 bp, Artificial Sequence
  MKO10081889_B_Dnajb8
  gRNA
ctccggtcagtaactgtcaa

SEQ ID NO: 81890 - DNA, 20 bp, Artificial Sequence
  MKO10081890_B_Dnajb8
  gRNA
ggccaactactatgaagtgc

SEQ ID NO: 81891 - DNA, 20 bp, Artificial Sequence
  MKO10081891_B_Dnajb8
  gRNA
gttctcaatgattcgcttgg

SEQ ID NO: 81892 - DNA, 20 bp, Artificial Sequence
  MKO10081892_B_Dnajb9
  gRNA
aaaagctactatgatatctt

SEQ ID NO: 81893 - DNA, 20 bp, Artificial Sequence
  MKO10081893_B_Dnajb9
  gRNA
ttcagcgtatgaaacactct

SEQ ID NO: 81894 - DNA, 20 bp, Artificial Sequence
  MKO10081894_B_Dnajb9
  gRNA
aggactgtcactcaacgaag

SEQ ID NO: 81895 - DNA, 20 bp, Artificial Sequence
  MKO10081895_B_Dnajc10
  gRNA
tcaccttaccgaaatcgtaa

SEQ ID NO: 81896 - DNA, 20 bp, Artificial Sequence
  MKO10081896_B_Dnajc10
  gRNA
cggatgctctgccgaatgaa

SEQ ID NO: 81897 - DNA, 20 bp, Artificial Sequence
  MKO10081897_B_Dnajc10
  gRNA
tcagatgctgctgtcaactc

SEQ ID NO: 81898 - DNA, 20 bp, Artificial Sequence
  MKO10081898_B_Dnajc11
  gRNA
cccaccgaccttcataagcc

SEQ ID NO: 81899 - DNA, 20 bp, Artificial Sequence
  MKO10081899_B_Dnajc11
  gRNA
acaacagcgaacgaacccca

SEQ ID NO: 81900 - DNA, 20 bp, Artificial Sequence
  MKO10081900_B_Dnajc11
  gRNA
tccagagagagcgcgaagag

SEQ ID NO: 81901 - DNA, 20 bp, Artificial Sequence
  MKO10081901_B_Dnajc12
  gRNA
caccttcgtttccgctggtc

SEQ ID NO: 81902 - DNA, 20 bp, Artificial Sequence
  MKO10081902_B_Dnajc12
  gRNA
aattaatctagtcgatgcat

SEQ ID NO: 81903 - DNA, 20 bp, Artificial Sequence
  MKO10081903_B_Dnajc12
  gRNA
tgctcactccgttccttgtt

SEQ ID NO: 81904 - DNA, 20 bp, Artificial Sequence
  MKO10081904_B_Dnajc13
  gRNA
ttcaacctcacatttcgtaa

SEQ ID NO: 81905 - DNA, 20 bp, Artificial Sequence
  MKO10081905_B_Dnajc13
  gRNA
gattataggtagtaactgca

SEQ ID NO: 81906 - DNA, 20 bp, Artificial Sequence
  MKO10081906_B_Dnajc13
  gRNA
taccttagaagtaacaaatc

SEQ ID NO: 81907 - DNA, 20 bp, Artificial Sequence
  MKO10081907_B_Dnajc14
  gRNA
cacctacctctgccggccac

SEQ ID NO: 81908 - DNA, 20 bp, Artificial Sequence
  MKO10081908_B_Dnajc14
  gRNA
tcatattccttccgcctctc

SEQ ID NO: 81909 - DNA, 20 bp, Artificial Sequence
  MKO10081909_B_Dnajc14
  gRNA
acagaaactcattcactgac

SEQ ID NO: 81910 - DNA, 20 bp, Artificial Sequence
  MKO10081910_B_Dnajc15
  gRNA
cttgtgtgctgttctaatct

SEQ ID NO: 81911 - DNA, 20 bp, Artificial Sequence
  MKO10081911_B_Dnajc15
  gRNA
gttgcagctgttgcatttgc

SEQ ID NO: 81912 - DNA, 20 bp, Artificial Sequence
  MKO10081912_B_Dnajc15
  gRNA
accacctacctttgtctgga

SEQ ID NO: 81913 - DNA, 20 bp, Artificial Sequence
  MKO10081913_B_Dnajc16
  gRNA
tgaaaacctacggcagttcg

SEQ ID NO: 81914 - DNA, 20 bp, Artificial Sequence
  MKO10081914_B_Dnajc16
  gRNA
ctgctggtgtctggccgaac

SEQ ID NO: 81915 - DNA, 20 bp, Artificial Sequence
  MKO10081915_B_Dnajc16
  gRNA
tccattaccttgtacatcag

SEQ ID NO: 81916 - DNA, 20 bp, Artificial Sequence
  MKO10081916_B_Dnajc17
  gRNA
gctcacctcctgctctagtg

SEQ ID NO: 81917 - DNA, 20 bp, Artificial Sequence
  MKO10081917_B_Dnajc17
  gRNA
ttacctgctctggggttatc

SEQ ID NO: 81918 - DNA, 20 bp, Artificial Sequence
  MKO10081918_B_Dnajc17
  gRNA
cgccaccacactagagcagg

SEQ ID NO: 81919 - DNA, 20 bp, Artificial Sequence
  MKO10081919_B_Dnajc18
  gRNA
gtctcttgtcgggattgctc

SEQ ID NO: 81920 - DNA, 20 bp, Artificial Sequence
  MKO10081920_B_Dnajc18
  gRNA
tacacagaggaacagctacg

SEQ ID NO: 81921 - DNA, 20 bp, Artificial Sequence
  MKO10081921_B_Dnajc18
  gRNA
agactccgctatgatgaata

SEQ ID NO: 81922 - DNA, 20 bp, Artificial Sequence
  MKO10081922_B_Dnajc19
  gRNA
gggttgaccattgctgctgc

SEQ ID NO: 81923 - DNA, 20 bp, Artificial Sequence
  MKO10081923_B_Dnajc19
  gRNA
tttacaagccatgaagcatg

SEQ ID NO: 81924 - DNA, 20 bp, Artificial Sequence
  MKO10081924_B_Dnajc19
  gRNA
tcatggcttgtaaaacataa

SEQ ID NO: 81925 - DNA, 20 bp, Artificial Sequence
  MKO10081925_B_Dnajc1
  gRNA
catggtaaggatgaactgct

SEQ ID NO: 81926 - DNA, 20 bp, Artificial Sequence
  MKO10081926_B_Dnajc1
  gRNA
atcctttaaaacttcataaa

SEQ ID NO: 81927 - DNA, 20 bp, Artificial Sequence
  MKO10081927_B_Dnajc1
  gRNA
tgtggtttggtccatctacc

SEQ ID NO: 81928 - DNA, 20 bp, Artificial Sequence
  MKO10081928_B_Dnajc21
  gRNA
aaatgaactggtgcgccagc

SEQ ID NO: 81929 - DNA, 20 bp, Artificial Sequence
  MKO10081929_B_Dnajc21
  gRNA
ttacttaaaggagggctcga

SEQ ID NO: 81930 - DNA, 20 bp, Artificial Sequence
  MKO10081930_B_Dnajc21
  gRNA
acttaccacgctctttcctg

SEQ ID NO: 81931 - DNA, 20 bp, Artificial Sequence
  MKO10081931_B_Dnajc22
  gRNA
ctgggtgccagactttcacc

SEQ ID NO: 81932 - DNA, 20 bp, Artificial Sequence
  MKO10081932_B_Dnajc22
  gRNA
ctttgtatcgtcgatgcttc

SEQ ID NO: 81933 - DNA, 20 bp, Artificial Sequence
  MKO10081933_B_Dnajc22
  gRNA
agctgccaccattaactacg

SEQ ID NO: 81934 - DNA, 20 bp, Artificial Sequence
  MKO10081934_B_Dnajc24
  gRNA
aggcgcacctgtgcatctac

SEQ ID NO: 81935 - DNA, 20 bp, Artificial Sequence
  MKO10081935_B_Dnajc24
  gRNA
gaagtttattgaaattgatc

SEQ ID NO: 81936 - DNA, 20 bp, Artificial Sequence
  MKO10081936_B_Dnajc24
  gRNA
tgcgccttgaagagatgtcc

SEQ ID NO: 81937 - DNA, 20 bp, Artificial Sequence
  MKO10081937_B_Dnajc25
  gRNA
atagatccacctacaatacc

SEQ ID NO: 81938 - DNA, 20 bp, Artificial Sequence
  MKO10081938_B_Dnajc25
  gRNA
agtgcccaagtaccgcatcc

SEQ ID NO: 81939 - DNA, 20 bp, Artificial Sequence
  MKO10081939_B_Dnajc25
  gRNA
ccaggcgcctgctgtagtag

SEQ ID NO: 81940 - DNA, 20 bp, Artificial Sequence
  MKO10081940_B_Dnajc27
  gRNA
gactccatagtcaatcccga

SEQ ID NO: 81941 - DNA, 20 bp, Artificial Sequence
  MKO10081941_B_Dnajc27
  gRNA
gtgctgatgtttcaaagtac

SEQ ID NO: 81942 - DNA, 20 bp, Artificial Sequence
  MKO10081942_B_Dnajc27
  gRNA
gagatttgtgtctaaatacc

SEQ ID NO: 81943 - DNA, 20 bp, Artificial Sequence
  MKO10081943_B_Dnajc28
  gRNA
ttactgatcctttgaatgta

SEQ ID NO: 81944 - DNA, 20 bp, Artificial Sequence
  MKO10081944_B_Dnajc28
  gRNA
aactcaagccatcgagcgcc

SEQ ID NO: 81945 - DNA, 20 bp, Artificial Sequence
  MKO10081945_B_Dnajc28
  gRNA
cgacattacttaagcttcga

SEQ ID NO: 81946 - DNA, 20 bp, Artificial Sequence
  MKO10081946_B_Dnajc2
  gRNA
agcaaataccttccaatctt

SEQ ID NO: 81947 - DNA, 20 bp, Artificial Sequence
  MKO10081947_B_Dnajc2
  gRNA
tcagaatcaagatcattatg

SEQ ID NO: 81948 - DNA, 20 bp, Artificial Sequence
  MKO10081948_B_Dnajc2
  gRNA
gtgtagctgtgtatctgacg

SEQ ID NO: 81949 - DNA, 20 bp, Artificial Sequence
  MKO10081949_B_Dnajc30
  gRNA
gctgctctccgtagtgcgcc

SEQ ID NO: 81950 - DNA, 20 bp, Artificial Sequence
  MKO10081950_B_Dnajc30
  gRNA
gcgcgtctccgaagcttacc

SEQ ID NO: 81951 - DNA, 20 bp, Artificial Sequence
  MKO10081951_B_Dnajc30
  gRNA
ggagacgcgcgtgaagcgct

SEQ ID NO: 81952 - DNA, 20 bp, Artificial Sequence
  MKO10081952_B_Dnajc3
  gRNA
ataactatatcgcatactat

SEQ ID NO: 81953 - DNA, 20 bp, Artificial Sequence
  MKO10081953_B_Dnajc3
  gRNA
gaggtcgggcagcgctgctt

SEQ ID NO: 81954 - DNA, 20 bp, Artificial Sequence
  MKO10081954_B_Dnajc3
  gRNA
tcacagtttcacgctgcagt

SEQ ID NO: 81955 - DNA, 20 bp, Artificial Sequence
  MKO10081955_B_Dnajc4
  gRNA
acgtttaatctcttcagcgc

SEQ ID NO: 81956 - DNA, 20 bp, Artificial Sequence
  MKO10081956_B_Dnajc4
  gRNA
atatcgagtgctcagtcgtg

SEQ ID NO: 81957 - DNA, 20 bp, Artificial Sequence
  MKO10081957_B_Dnajc4
  gRNA
ctacaccctgatcgagaccc

SEQ ID NO: 81958 - DNA, 20 bp, Artificial Sequence
  MKO10081958_B_Dnajc5b
  gRNA
acgcacccaaccaaagacag

SEQ ID NO: 81959 - DNA, 20 bp, Artificial Sequence
  MKO10081959_B_Dnajc5b
  gRNA
aaaacacagctaatcagaga

SEQ ID NO: 81960 - DNA, 20 bp, Artificial Sequence
  MKO10081960_B_Dnajc5b
  gRNA
gtcatatatgtttctctttg

SEQ ID NO: 81961 - DNA, 20 bp, Artificial Sequence
  MKO10081961_B_Dnajc5g
  gRNA
acccagcgactatctagaac

SEQ ID NO: 81962 - DNA, 20 bp, Artificial Sequence
  MKO10081962_B_Dnajc5g
  gRNA
ttatacctgtatgaccattt

SEQ ID NO: 81963 - DNA, 20 bp, Artificial Sequence
  MKO10081963_B_Dnajc5g
  gRNA
tgttcctcacttgatcttga

SEQ ID NO: 81964 - DNA, 20 bp, Artificial Sequence
  MKO10081964_B_Dnajc5
  gRNA
ctgaatttagttgaacccgt

SEQ ID NO: 81965 - DNA, 20 bp, Artificial Sequence
  MKO10081965_B_Dnajc5
  gRNA
caccccagctatcacaccga

SEQ ID NO: 81966 - DNA, 20 bp, Artificial Sequence
  MKO10081966_B_Dnajc5
  gRNA
gctcaccttggcccaccagc

SEQ ID NO: 81967 - DNA, 20 bp, Artificial Sequence
  MKO10081967_B_Dnajc6
  gRNA
gtacacacctgctaacagac

SEQ ID NO: 81968 - DNA, 20 bp, Artificial Sequence
  MKO10081968_B_Dnajc6
  gRNA
gtctggaatccaaaaagcta

SEQ ID NO: 81969 - DNA, 20 bp, Artificial Sequence
  MKO10081969_B_Dnajc6
  gRNA
acaagttgtatactgtgtag

SEQ ID NO: 81970 - DNA, 20 bp, Artificial Sequence
  MKO10081970_B_Dnajc7
  gRNA
cctaacaatgccagctatta

SEQ ID NO: 81971 - DNA, 20 bp, Artificial Sequence
  MKO10081971_B_Dnajc7
  gRNA
gaatgcatattatgctaaga

SEQ ID NO: 81972 - DNA, 20 bp, Artificial Sequence
  MKO10081972_B_Dnajc7
  gRNA
cctctcacttgggaatgcaa

SEQ ID NO: 81973 - DNA, 20 bp, Artificial Sequence
  MKO10081973_B_Dnajc8
  gRNA
tcaggcaggaaaagaatacg

SEQ ID NO: 81974 - DNA, 20 bp, Artificial Sequence
  MKO10081974_B_Dnajc8
  gRNA
ggaacaaaagaagagggccc

SEQ ID NO: 81975 - DNA, 20 bp, Artificial Sequence
  MKO10081975_B_Dnajc8
  gRNA
tgggttcagattaaagtaag

SEQ ID NO: 81976 - DNA, 20 bp, Artificial Sequence
  MKO10081976_B_Dnajc9
  gRNA
gaaagcagtgtacgatgaac

SEQ ID NO: 81977 - DNA, 20 bp, Artificial Sequence
  MKO10081977_B_Dnajc9
  gRNA
taacttgaaagcactcatcc

SEQ ID NO: 81978 - DNA, 20 bp, Artificial Sequence
  MKO10081978_B_Dnajc9
  gRNA
ttctgtctaggctcaggaag

SEQ ID NO: 81979 - DNA, 20 bp, Artificial Sequence
  MKO10081979_B_Dnal1
  gRNA
gtcacttacttaggccattc

SEQ ID NO: 81980 - DNA, 20 bp, Artificial Sequence
  MKO10081980_B_Dnal1
  gRNA
ggcatacagcttgatttctt

SEQ ID NO: 81981 - DNA, 20 bp, Artificial Sequence
  MKO10081981_B_Dnal1
  gRNA
tttcaatgcagtttgtagac

SEQ ID NO: 81982 - DNA, 20 bp, Artificial Sequence
  MKO10081982_B_Dnal4
  gRNA
ctagcactcggacatgccag

SEQ ID NO: 81983 - DNA, 20 bp, Artificial Sequence
  MKO10081983_B_Dnal4
  gRNA
tgcagaccttccccctggtc

SEQ ID NO: 81984 - DNA, 20 bp, Artificial Sequence
  MKO10081984_B_Dnal4
  gRNA
ctcaggcttaccctgaccag

SEQ ID NO: 81985 - DNA, 20 bp, Artificial Sequence
  MKO10081985_B_Dnali1
  gRNA
tgaacagaaggcgaaatgcg

SEQ ID NO: 81986 - DNA, 20 bp, Artificial Sequence
  MKO10081986_B_Dnali1
  gRNA
tgtcccagatcctaccaaac

SEQ ID NO: 81987 - DNA, 20 bp, Artificial Sequence
  MKO10081987_B_Dnali1
  gRNA
tactagagggtccaggctgc

SEQ ID NO: 81988 - DNA, 20 bp, Artificial Sequence
  MKO10081988_B_Dnase1l1
  gRNA
ctacctcattctgccagcgc

SEQ ID NO: 81989 - DNA, 20 bp, Artificial Sequence
  MKO10081989_B_Dnase1l1
  gRNA
gaagcaccatgatatcacat

SEQ ID NO: 81990 - DNA, 20 bp, Artificial Sequence
  MKO10081990_B_Dnase1l1
  gRNA
tcccaggtctgacaagacac

SEQ ID NO: 81991 - DNA, 20 bp, Artificial Sequence
  MKO10081991_B_Dnase1l2
  gRNA
ggtctcgtacctcttgcacc

SEQ ID NO: 81992 - DNA, 20 bp, Artificial Sequence
  MKO10081992_B_Dnase1l2
  gRNA
cacaaagccgtactcgtgct

SEQ ID NO: 81993 - DNA, 20 bp, Artificial Sequence
  MKO10081993_B_Dnase1l2
  gRNA
cgtcgatctctgccaccgcc

SEQ ID NO: 81994 - DNA, 20 bp, Artificial Sequence
  MKO10081994_B_Dnase1l3
  gRNA
ggtctcgggagttgtgtgca

SEQ ID NO: 81995 - DNA, 20 bp, Artificial Sequence
  MKO10081995_B_Dnase1l3
  gRNA
ataccactaccatgactatc

SEQ ID NO: 81996 - DNA, 20 bp, Artificial Sequence
  MKO10081996_B_Dnase1l3
  gRNA
tggttccattccccctttac

SEQ ID NO: 81997 - DNA, 20 bp, Artificial Sequence
  MKO10081997_B_Dnase1
  gRNA
gcctgaccaggtgtctattc

SEQ ID NO: 81998 - DNA, 20 bp, Artificial Sequence
  MKO10081998_B_Dnase1
  gRNA
ggctttacctgtacacaaaa

SEQ ID NO: 81999 - DNA, 20 bp, Artificial Sequence
  MKO10081999_B_Dnase1
  gRNA
acgatgtttacctagatgtc

SEQ ID NO: 82000 - DNA, 20 bp, Artificial Sequence
  MKO10082000_B_Dnase2a
  gRNA
ccgaaggtttgagcattagg

SEQ ID NO: 82001 - DNA, 20 bp, Artificial Sequence
  MKO10082001_B_Dnase2a
  gRNA
tacatggaccagaactccga

SEQ ID NO: 82002 - DNA, 20 bp, Artificial Sequence
  MKO10082002_B_Dnase2a
  gRNA
ggttcttgatcaccgtctct

SEQ ID NO: 82003 - DNA, 20 bp, Artificial Sequence
  MKO10082003_B_Dnase2b
  gRNA
ttgtccatatcgcctccccg

SEQ ID NO: 82004 - DNA, 20 bp, Artificial Sequence
  MKO10082004_B_Dnase2b
  gRNA
gttccttaaagatccctgtc

SEQ ID NO: 82005 - DNA, 20 bp, Artificial Sequence
  MKO10082005_B_Dnase2b
  gRNA
gtatgacacacataattcca

SEQ ID NO: 82006 - DNA, 20 bp, Artificial Sequence
  MKO10082006_B_Dnd1
  gRNA
gtcaacgggcaaaggaagta

SEQ ID NO: 82007 - DNA, 20 bp, Artificial Sequence
  MKO10082007_B_Dnd1
  gRNA
tccgttgacacagcagttgc

SEQ ID NO: 82008 - DNA, 20 bp, Artificial Sequence
  MKO10082008_B_Dnd1
  gRNA
tcccccagcaatggtgtgag

SEQ ID NO: 82009 - DNA, 20 bp, Artificial Sequence
  MKO10082009_B_Dner
  gRNA
gcgtttaacacttgtggtga

SEQ ID NO: 82010 - DNA, 20 bp, Artificial Sequence
  MKO10082010_B_Dner
  gRNA
caaccgtgacactgccaact

SEQ ID NO: 82011 - DNA, 20 bp, Artificial Sequence
  MKO10082011_B_Dner
  gRNA
cataatcctgccccgctctc

SEQ ID NO: 82012 - DNA, 20 bp, Artificial Sequence
  MKO10082012_B_Dnlz
  gRNA
ggccaactttgagatgcgct

SEQ ID NO: 82013 - DNA, 20 bp, Artificial Sequence
  MKO10082013_B_Dnlz
  gRNA
gaggaggtacgccgagtgtc

SEQ ID NO: 82014 - DNA, 20 bp, Artificial Sequence
  MKO10082014_B_Dnlz
  gRNA
tcggcgtacctcctctcctc

SEQ ID NO: 82015 - DNA, 20 bp, Artificial Sequence
  MKO10082015_B_Dnm1l
  gRNA
ggcagggaccttcttcccag

SEQ ID NO: 82016 - DNA, 20 bp, Artificial Sequence
  MKO10082016_B_Dnm1l
  gRNA
atttcttcacaccaaaaaca

SEQ ID NO: 82017 - DNA, 20 bp, Artificial Sequence
  MKO10082017_B_Dnm1l
  gRNA
taggagttgaagcagaagaa

SEQ ID NO: 82018 - DNA, 20 bp, Artificial Sequence
  MKO10082018_B_Dnm1
  gRNA
agagttggccaaatccgagt

SEQ ID NO: 82019 - DNA, 20 bp, Artificial Sequence
  MKO10082019_B_Dnm1
  gRNA
gctgagaccgatcgagtcac

SEQ ID NO: 82020 - DNA, 20 bp, Artificial Sequence
  MKO10082020_B_Dnm1
  gRNA
caacttggtgatgaccccaa

SEQ ID NO: 82021 - DNA, 20 bp, Artificial Sequence
  MKO10082021_B_Dnm2
  gRNA
gcaggatcatgtccttgatc

SEQ ID NO: 82022 - DNA, 20 bp, Artificial Sequence
  MKO10082022_B_Dnm2
  gRNA
agacatcgagtaccagatca

SEQ ID NO: 82023 - DNA, 20 bp, Artificial Sequence
  MKO10082023_B_Dnm2
  gRNA
gtgacaattcctgatcctcg

SEQ ID NO: 82024 - DNA, 20 bp, Artificial Sequence
  MKO10082024_B_Dnm3
  gRNA
agtgtattacccctgcgaag

SEQ ID NO: 82025 - DNA, 20 bp, Artificial Sequence
  MKO10082025_B_Dnm3
  gRNA
ctttattcattcctgttacg

SEQ ID NO: 82026 - DNA, 20 bp, Artificial Sequence
  MKO10082026_B_Dnm3
  gRNA
ctggagtacaagaggccgtc

SEQ ID NO: 82027 - DNA, 20 bp, Artificial Sequence
  MKO10082027_B_Dnmbp
  gRNA
gctttgcttaccccgatgga

SEQ ID NO: 82028 - DNA, 20 bp, Artificial Sequence
  MKO10082028_B_Dnmbp
  gRNA
caaaagctccgccaccacct

SEQ ID NO: 82029 - DNA, 20 bp, Artificial Sequence
  MKO10082029_B_Dnmbp
  gRNA
ttggaaatcagcgatgctgt

SEQ ID NO: 82030 - DNA, 20 bp, Artificial Sequence
  MKO10082030_B_Dnmt1
  gRNA
caaatagatccccaagatcc

SEQ ID NO: 82031 - DNA, 20 bp, Artificial Sequence
  MKO10082031_B_Dnmt1
  gRNA
tgtgtgacagccccactaaa

SEQ ID NO: 82032 - DNA, 20 bp, Artificial Sequence
  MKO10082032_B_Dnmt1
  gRNA
cgaggcttgggcctggatct

SEQ ID NO: 82033 - DNA, 20 bp, Artificial Sequence
  MKO10082033_B_Dnmt3a
  gRNA
taggtggccagcagccgtgc

SEQ ID NO: 82034 - DNA, 20 bp, Artificial Sequence
  MKO10082034_B_Dnmt3a
  gRNA
cacctggaggacttcgtaga

SEQ ID NO: 82035 - DNA, 20 bp, Artificial Sequence
  MKO10082035_B_Dnmt3a
  gRNA
ctggaaacagcttcccggca

SEQ ID NO: 82036 - DNA, 20 bp, Artificial Sequence
  MKO10082036_B_Dnmt3b
  gRNA
aatgcactcctcatacccgc

SEQ ID NO: 82037 - DNA, 20 bp, Artificial Sequence
  MKO10082037_B_Dnmt3b
  gRNA
gtccgaacccgacatagcaa

SEQ ID NO: 82038 - DNA, 20 bp, Artificial Sequence
  MKO10082038_B_Dnmt3b
  gRNA
caggacgcgctctgaaagcc

SEQ ID NO: 82039 - DNA, 20 bp, Artificial Sequence
  MKO10082039_B_Dnmt3l
  gRNA
actcaccttcaatgctccgt

SEQ ID NO: 82040 - DNA, 20 bp, Artificial Sequence
  MKO10082040_B_Dnmt3l
  gRNA
cactcggcaccccttgtttg

SEQ ID NO: 82041 - DNA, 20 bp, Artificial Sequence
  MKO10082041_B_Dnmt3l
  gRNA
tccccctcctcgcctccgac

SEQ ID NO: 82042 - DNA, 20 bp, Artificial Sequence
  MKO10082042_B_Dnpep
  gRNA
tgtccgtgtgggccccaatg

SEQ ID NO: 82043 - DNA, 20 bp, Artificial Sequence
  MKO10082043_B_Dnpep
  gRNA
cattgatatttcgctgcaga

SEQ ID NO: 82044 - DNA, 20 bp, Artificial Sequence
  MKO10082044_B_Dnpep
  gRNA
cagcctcattggggcccaca

SEQ ID NO: 82045 - DNA, 20 bp, Artificial Sequence
  MKO10082045_B_Dnph1
  gRNA
tcgagccatcggctgctccc

SEQ ID NO: 82046 - DNA, 20 bp, Artificial Sequence
  MKO10082046_B_Dnph1
  gRNA
gataagcctcaaagtaccga

SEQ ID NO: 82047 - DNA, 20 bp, Artificial Sequence
  MKO10082047_B_Dnph1
  gRNA
gtgttggctacgaattgggc

SEQ ID NO: 82048 - DNA, 20 bp, Artificial Sequence
  MKO10082048_B_Dnttip1
  gRNA
gcacattcagcgctgccttc

SEQ ID NO: 82049 - DNA, 20 bp, Artificial Sequence
  MKO10082049_B_Dnttip1
  gRNA
tgtcttcaacaagtacatga

SEQ ID NO: 82050 - DNA, 20 bp, Artificial Sequence
  MKO10082050_B_Dnttip1
  gRNA
tgtacttgttgaagacaccc

SEQ ID NO: 82051 - DNA, 20 bp, Artificial Sequence
  MKO10082051_B_Dnttip2
  gRNA
ctgcttctgaagtcgatgct

SEQ ID NO: 82052 - DNA, 20 bp, Artificial Sequence
  MKO10082052_B_Dnttip2
  gRNA
catgccaaaccaaccattac

SEQ ID NO: 82053 - DNA, 20 bp, Artificial Sequence
  MKO10082053_B_Dnttip2
  gRNA
acaagtagcagcatagaccc

SEQ ID NO: 82054 - DNA, 20 bp, Artificial Sequence
  MKO10082054_B_Dntt
  gRNA
tgattcggtcacccacattg

SEQ ID NO: 82055 - DNA, 20 bp, Artificial Sequence
  MKO10082055_B_Dntt
  gRNA
aactcgaagagccttcctca

SEQ ID NO: 82056 - DNA, 20 bp, Artificial Sequence
  MKO10082056_B_Dntt
  gRNA
tgtttaatgtggttcttcgc

SEQ ID NO: 82057 - DNA, 20 bp, Artificial Sequence
  MKO10082057_B_Doc2a
  gRNA
tgctgcactgtagaatcctc

SEQ ID NO: 82058 - DNA, 20 bp, Artificial Sequence
  MKO10082058_B_Doc2a
  gRNA
taacatctgccttgagcgcc

SEQ ID NO: 82059 - DNA, 20 bp, Artificial Sequence
  MKO10082059_B_Doc2a
  gRNA
caggaggtgaagctttacat

SEQ ID NO: 82060 - DNA, 20 bp, Artificial Sequence
  MKO10082060_B_Doc2b
  gRNA
agtgcagtgcgttgttctcc

SEQ ID NO: 82061 - DNA, 20 bp, Artificial Sequence
  MKO10082061_B_Doc2b
  gRNA
acatggtccgaaagaccctg

SEQ ID NO: 82062 - DNA, 20 bp, Artificial Sequence
  MKO10082062_B_Doc2b
  gRNA
tactcagggcctgaagccga

SEQ ID NO: 82063 - DNA, 20 bp, Artificial Sequence
  MKO10082063_B_Doc2g
  gRNA
cacgcactgttcgaggcacc

SEQ ID NO: 82064 - DNA, 20 bp, Artificial Sequence
  MKO10082064_B_Doc2g
  gRNA
gggagctacgagtgcccctg

SEQ ID NO: 82065 - DNA, 20 bp, Artificial Sequence
  MKO10082065_B_Doc2g
  gRNA
gtcaaagccaacttactacc

SEQ ID NO: 82066 - DNA, 20 bp, Artificial Sequence
  MKO10082066_B_Dock10
  gRNA
acttactgagaagtcatcac

SEQ ID NO: 82067 - DNA, 20 bp, Artificial Sequence
  MKO10082067_B_Dock10
  gRNA
gtaaattctacagttcccag

SEQ ID NO: 82068 - DNA, 20 bp, Artificial Sequence
  MKO10082068_B_Dock10
  gRNA
aagaacttgaaaagacctat

SEQ ID NO: 82069 - DNA, 20 bp, Artificial Sequence
  MKO10082069_B_Dock11
  gRNA
ttaagacctacagcacagat

SEQ ID NO: 82070 - DNA, 20 bp, Artificial Sequence
  MKO10082070_B_Dock11
  gRNA
tgaagattgcgagaaagatg

SEQ ID NO: 82071 - DNA, 20 bp, Artificial Sequence
  MKO10082071_B_Dock11
  gRNA
tcaatctcaaacacatgatt

SEQ ID NO: 82072 - DNA, 20 bp, Artificial Sequence
  MKO10082072_B_Dock1
  gRNA
cctggcatcgtagttgtaaa

SEQ ID NO: 82073 - DNA, 20 bp, Artificial Sequence
  MKO10082073_B_Dock1
  gRNA
cttaaagaagccattgttga

SEQ ID NO: 82074 - DNA, 20 bp, Artificial Sequence
  MKO10082074_B_Dock1
  gRNA
ttaagatgaatatatgaagc

SEQ ID NO: 82075 - DNA, 20 bp, Artificial Sequence
  MKO10082075_B_Dock2
  gRNA
tacatcctttatccatctca

SEQ ID NO: 82076 - DNA, 20 bp, Artificial Sequence
  MKO10082076_B_Dock2
  gRNA
ctctttgcagactggtacag

SEQ ID NO: 82077 - DNA, 20 bp, Artificial Sequence
  MKO10082077_B_Dock2
  gRNA
gtacgaatacaggagacctg

SEQ ID NO: 82078 - DNA, 20 bp, Artificial Sequence
  MKO10082078_B_Dock3
  gRNA
caaggcctggtcttagaaat

SEQ ID NO: 82079 - DNA, 20 bp, Artificial Sequence
  MKO10082079_B_Dock3
  gRNA
gtttccattacctttacatt

SEQ ID NO: 82080 - DNA, 20 bp, Artificial Sequence
  MKO10082080_B_Dock3
  gRNA
aacaaagaagcctaatgtaa

SEQ ID NO: 82081 - DNA, 20 bp, Artificial Sequence
  MKO10082081_B_Dock4
  gRNA
ttctccgcaggctggtacag

SEQ ID NO: 82082 - DNA, 20 bp, Artificial Sequence
  MKO10082082_B_Dock4
  gRNA
ccttaaagttgatgtcatct

SEQ ID NO: 82083 - DNA, 20 bp, Artificial Sequence
  MKO10082083_B_Dock4
  gRNA
ttaccctttgttctttacac

SEQ ID NO: 82084 - DNA, 20 bp, Artificial Sequence
  MKO10082084_B_Dock5
  gRNA
cggcgacaccgtccacatcc

SEQ ID NO: 82085 - DNA, 20 bp, Artificial Sequence
  MKO10082085_B_Dock5
  gRNA
gctccagaacagatctaaaa

SEQ ID NO: 82086 - DNA, 20 bp, Artificial Sequence
  MKO10082086_B_Dock5
  gRNA
ccccccacaggctggtacag

SEQ ID NO: 82087 - DNA, 20 bp, Artificial Sequence
  MKO10082087_B_Dock6
  gRNA
gaagcacatcttcgaagtcc

SEQ ID NO: 82088 - DNA, 20 bp, Artificial Sequence
  MKO10082088_B_Dock6
  gRNA
caggtgtcccgggaacgcag

SEQ ID NO: 82089 - DNA, 20 bp, Artificial Sequence
  MKO10082089_B_Dock6
  gRNA
atcctgctcgaagacttggc

SEQ ID NO: 82090 - DNA, 20 bp, Artificial Sequence
  MKO10082090_B_Dock7
  gRNA
gggggaaccactgtattgtc

SEQ ID NO: 82091 - DNA, 20 bp, Artificial Sequence
  MKO10082091_B_Dock7
  gRNA
taaatcctgttcccagttta

SEQ ID NO: 82092 - DNA, 20 bp, Artificial Sequence
  MKO10082092_B_Dock7
  gRNA
cttatacaatctctaacatg

SEQ ID NO: 82093 - DNA, 20 bp, Artificial Sequence
  MKO10082093_B_Dock8
  gRNA
ggccacatgcaggtcgtcat

SEQ ID NO: 82094 - DNA, 20 bp, Artificial Sequence
  MKO10082094_B_Dock8
  gRNA
tttacgctcccacccaacct

SEQ ID NO: 82095 - DNA, 20 bp, Artificial Sequence
  MKO10082095_B_Dock8
  gRNA
aatcagccactctcgaatat

SEQ ID NO: 82096 - DNA, 20 bp, Artificial Sequence
  MKO10082096_B_Dock9
  gRNA
tctcccgcaggcagtcgttt

SEQ ID NO: 82097 - DNA, 20 bp, Artificial Sequence
  MKO10082097_B_Dock9
  gRNA
cctcatcgacttcatagacg

SEQ ID NO: 82098 - DNA, 20 bp, Artificial Sequence
  MKO10082098_B_Dock9
  gRNA
agatcctaaacgactgcctg

SEQ ID NO: 82099 - DNA, 20 bp, Artificial Sequence
  MKO10082099_B_Dohh
  gRNA
tgcgcactcgtgccgcacca

SEQ ID NO: 82100 - DNA, 20 bp, Artificial Sequence
  MKO10082100_B_Dohh
  gRNA
tggcccgtgcgtccctcatc

SEQ ID NO: 82101 - DNA, 20 bp, Artificial Sequence
  MKO10082101_B_Dohh
  gRNA
ctcagtggtccgcgccaatg

SEQ ID NO: 82102 - DNA, 20 bp, Artificial Sequence
  MKO10082102_B_Dok1
  gRNA
tacactctgttgcgtcgcta

SEQ ID NO: 82103 - DNA, 20 bp, Artificial Sequence
  MKO10082103_B_Dok1
  gRNA
gcagcggcgaccagcttcaa

SEQ ID NO: 82104 - DNA, 20 bp, Artificial Sequence
  MKO10082104_B_Dok1
  gRNA
atagcgacgcaacagagtgt

SEQ ID NO: 82105 - DNA, 20 bp, Artificial Sequence
  MKO10082105_B_Dok2
  gRNA
gtccccgagaagacacggcg

SEQ ID NO: 82106 - DNA, 20 bp, Artificial Sequence
  MKO10082106_B_Dok2
  gRNA
aaagcgtcgaagaaacctgt

SEQ ID NO: 82107 - DNA, 20 bp, Artificial Sequence
  MKO10082107_B_Dok2
  gRNA
tttgagttcgaaacacgaca

SEQ ID NO: 82108 - DNA, 20 bp, Artificial Sequence
  MKO10082108_B_Dok3
  gRNA
ggtaccggagaatgttcgtc

SEQ ID NO: 82109 - DNA, 20 bp, Artificial Sequence
  MKO10082109_B_Dok3
  gRNA
gagtacagtgaccgagtttc

SEQ ID NO: 82110 - DNA, 20 bp, Artificial Sequence
  MKO10082110_B_Dok3
  gRNA
ggaacgccgggtcatacgct

SEQ ID NO: 82111 - DNA, 20 bp, Artificial Sequence
  MKO10082111_B_Dok4
  gRNA
gagaagtccgtgtgcctccg

SEQ ID NO: 82112 - DNA, 20 bp, Artificial Sequence
  MKO10082112_B_Dok4
  gRNA
gacactgtccgtggaatgtc

SEQ ID NO: 82113 - DNA, 20 bp, Artificial Sequence
  MKO10082113_B_Dok4
  gRNA
ggagtcgtctgtgaatatga

SEQ ID NO: 82114 - DNA, 20 bp, Artificial Sequence
  MKO10082114_B_Dok5
  gRNA
gtggtaacacctgaagtacg

SEQ ID NO: 82115 - DNA, 20 bp, Artificial Sequence
  MKO10082115_B_Dok5
  gRNA
gagcctgatttattggctac

SEQ ID NO: 82116 - DNA, 20 bp, Artificial Sequence
  MKO10082116_B_Dok5
  gRNA
gctctgctcgcgttccaccc

SEQ ID NO: 82117 - DNA, 20 bp, Artificial Sequence
  MKO10082117_B_Dok6
  gRNA
gctgcaccccagctgccagt

SEQ ID NO: 82118 - DNA, 20 bp, Artificial Sequence
  MKO10082118_B_Dok6
  gRNA
ttcagatattcagacgatgc

SEQ ID NO: 82119 - DNA, 20 bp, Artificial Sequence
  MKO10082119_B_Dok6
  gRNA
gcatgcttctttgtctctcg

SEQ ID NO: 82120 - DNA, 20 bp, Artificial Sequence
  MKO10082120_B_Dok7
  gRNA
tccccgaccaaaggcccgtt

SEQ ID NO: 82121 - DNA, 20 bp, Artificial Sequence
  MKO10082121_B_Dok7
  gRNA
cacacctcgaagcctgcgcc

SEQ ID NO: 82122 - DNA, 20 bp, Artificial Sequence
  MKO10082122_B_Dok7
  gRNA
cgttacggggctgttccgaa

SEQ ID NO: 82123 - DNA, 20 bp, Artificial Sequence
  MKO10082123_B_Dolk
  gRNA
cagtgtaggcgaggtgatcg

SEQ ID NO: 82124 - DNA, 20 bp, Artificial Sequence
  MKO10082124_B_Dolk
  gRNA
ccgatactcctggtgcgcgg

SEQ ID NO: 82125 - DNA, 20 bp, Artificial Sequence
  MKO10082125_B_Dolk
  gRNA
aagacgaccgcttagcattc

SEQ ID NO: 82126 - DNA, 20 bp, Artificial Sequence
  MKO10082126_B_Dolpp1
  gRNA
gattcagtgccagtccccca

SEQ ID NO: 82127 - DNA, 20 bp, Artificial Sequence
  MKO10082127_B_Dolpp1
  gRNA
taggctctcaccttaaatac

SEQ ID NO: 82128 - DNA, 20 bp, Artificial Sequence
  MKO10082128_B_Dolpp1
  gRNA
cctttctcgtctcctatagc

SEQ ID NO: 82129 - DNA, 20 bp, Artificial Sequence
  MKO10082129_B_Donson
  gRNA
gactttaccccagagtatac

SEQ ID NO: 82130 - DNA, 20 bp, Artificial Sequence
  MKO10082130_B_Donson
  gRNA
agcatgctttaatgagcgac

SEQ ID NO: 82131 - DNA, 20 bp, Artificial Sequence
  MKO10082131_B_Donson
  gRNA
atcagttcaccgtcctgttc

SEQ ID NO: 82132 - DNA, 20 bp, Artificial Sequence
  MKO10082132_B_Dopey1
  gRNA
acttgtacagagaagcacgc

SEQ ID NO: 82133 - DNA, 20 bp, Artificial Sequence
  MKO10082133_B_Dopey1
  gRNA
tccgacccttcttctaagcc

SEQ ID NO: 82134 - DNA, 20 bp, Artificial Sequence
  MKO10082134_B_Dopey1
  gRNA
tgtctgcacccagcattacc

SEQ ID NO: 82135 - DNA, 20 bp, Artificial Sequence
  MKO10082135_B_Dopey2
  gRNA
ttgctgatgatgagccgccg

SEQ ID NO: 82136 - DNA, 20 bp, Artificial Sequence
  MKO10082136_B_Dopey2
  gRNA
gggaatacttcaggttgctc

SEQ ID NO: 82137 - DNA, 20 bp, Artificial Sequence
  MKO10082137_B_Dopey2
  gRNA
ctcaccaggcaggtataaaa

SEQ ID NO: 82138 - DNA, 20 bp, Artificial Sequence
  MKO10082138_B_Dos
  gRNA
gaagaccaccactacttatc

SEQ ID NO: 82139 - DNA, 20 bp, Artificial Sequence
  MKO10082139_B_Dos
  gRNA
tcctcacagaccccgactgc

SEQ ID NO: 82140 - DNA, 20 bp, Artificial Sequence
  MKO10082140_B_Dos
  gRNA
tactatccatgagtgtgatt

SEQ ID NO: 82141 - DNA, 20 bp, Artificial Sequence
  MKO10082141_B_Dot1l
  gRNA
atgagattattgagactatc

SEQ ID NO: 82142 - DNA, 20 bp, Artificial Sequence
  MKO10082142_B_Dot1l
  gRNA
ccatttcaggtgggtctgcg

SEQ ID NO: 82143 - DNA, 20 bp, Artificial Sequence
  MKO10082143_B_Dot1l
  gRNA
catcgacagcatccaccagc

SEQ ID NO: 82144 - DNA, 20 bp, Artificial Sequence
  MKO10082144_B_Doxl2
  gRNA
ctccagcagcccaagacgcc

SEQ ID NO: 82145 - DNA, 20 bp, Artificial Sequence
  MKO10082145_B_Doxl2
  gRNA
tctttaagcgatagctgcgc

SEQ ID NO: 82146 - DNA, 20 bp, Artificial Sequence
  MKO10082146_B_Doxl2
  gRNA
gtgattctggttgtagatgc

SEQ ID NO: 82147 - DNA, 20 bp, Artificial Sequence
  MKO10082147_B_Dpagt1
  gRNA
ctttggcaatacaaccatcg

SEQ ID NO: 82148 - DNA, 20 bp, Artificial Sequence
  MKO10082148_B_Dpagt1
  gRNA
ccccttcctgaactgcttcg

SEQ ID NO: 82149 - DNA, 20 bp, Artificial Sequence
  MKO10082149_B_Dpagt1
  gRNA
cagcaccgctgatcactccc

SEQ ID NO: 82150 - DNA, 20 bp, Artificial Sequence
  MKO10082150_B_Dpcd
  gRNA
gtggcgtgtgaaaaatgccc

SEQ ID NO: 82151 - DNA, 20 bp, Artificial Sequence
  MKO10082151_B_Dpcd
  gRNA
agctggtgtctgtctaggtc

SEQ ID NO: 82152 - DNA, 20 bp, Artificial Sequence
  MKO10082152_B_Dpcd
  gRNA
tctgccatttccttcccgtc

SEQ ID NO: 82153 - DNA, 20 bp, Artificial Sequence
  MKO10082153_B_Dpcr1
  gRNA
gacatggctcagccgaccag

SEQ ID NO: 82154 - DNA, 20 bp, Artificial Sequence
  MKO10082154_B_Dpcr1
  gRNA
ttgcggctccctttgtcttc

SEQ ID NO: 82155 - DNA, 20 bp, Artificial Sequence
  MKO10082155_B_Dpcr1
  gRNA
ctacctgcctcccaagaagc

SEQ ID NO: 82156 - DNA, 20 bp, Artificial Sequence
  MKO10082156_B_Dpep1
  gRNA
atgtgtgttaccaatagttc

SEQ ID NO: 82157 - DNA, 20 bp, Artificial Sequence
  MKO10082157_B_Dpep1
  gRNA
tgggacactacctgaactat

SEQ ID NO: 82158 - DNA, 20 bp, Artificial Sequence
  MKO10082158_B_Dpep1
  gRNA
tcaggcacaacgacttgcct

SEQ ID NO: 82159 - DNA, 20 bp, Artificial Sequence
  MKO10082159_B_Dpep2
  gRNA
gcttcgaagtttctacctgc

SEQ ID NO: 82160 - DNA, 20 bp, Artificial Sequence
  MKO10082160_B_Dpep2
  gRNA
agaaacttcgaagcacagcg

SEQ ID NO: 82161 - DNA, 20 bp, Artificial Sequence
  MKO10082161_B_Dpep2
  gRNA
tcccggtcctgcgtctggca

SEQ ID NO: 82162 - DNA, 20 bp, Artificial Sequence
  MKO10082162_B_Dpep3
  gRNA
ggatgccgtacgcctagccc

SEQ ID NO: 82163 - DNA, 20 bp, Artificial Sequence
  MKO10082163_B_Dpep3
  gRNA
agaaactgcgcaacacagcg

SEQ ID NO: 82164 - DNA, 20 bp, Artificial Sequence
  MKO10082164_B_Dpep3
  gRNA
gaccaccctctacaccaatg

SEQ ID NO: 82165 - DNA, 20 bp, Artificial Sequence
  MKO10082165_B_Dpf1
  gRNA
gccttggcgaggacttctac

SEQ ID NO: 82166 - DNA, 20 bp, Artificial Sequence
  MKO10082166_B_Dpf1
  gRNA
cccggaagggccagtcctcg

SEQ ID NO: 82167 - DNA, 20 bp, Artificial Sequence
  MKO10082167_B_Dpf1
  gRNA
tcttctacctcgagatcatg

SEQ ID NO: 82168 - DNA, 20 bp, Artificial Sequence
  MKO10082168_B_Dpf2
  gRNA
ctttgtagtattgctcgcca

SEQ ID NO: 82169 - DNA, 20 bp, Artificial Sequence
  MKO10082169_B_Dpf2
  gRNA
gaaaagcgacaccggggacc

SEQ ID NO: 82170 - DNA, 20 bp, Artificial Sequence
  MKO10082170_B_Dpf2
  gRNA
ttccccttcccccgacgctt

SEQ ID NO: 82171 - DNA, 20 bp, Artificial Sequence
  MKO10082171_B_Dpf3
  gRNA
gagcgtgcgtctccccttcc

SEQ ID NO: 82172 - DNA, 20 bp, Artificial Sequence
  MKO10082172_B_Dpf3
  gRNA
gtcttacttacgctttcagg

SEQ ID NO: 82173 - DNA, 20 bp, Artificial Sequence
  MKO10082173_B_Dpf3
  gRNA
tctgtccgcaggcctcgctc

SEQ ID NO: 82174 - DNA, 20 bp, Artificial Sequence
  MKO10082174_B_Dph1
  gRNA
cctgaacaacccccagttac

SEQ ID NO: 82175 - DNA, 20 bp, Artificial Sequence
  MKO10082175_B_Dph1
  gRNA
gttgacttcctggtgcacta

SEQ ID NO: 82176 - DNA, 20 bp, Artificial Sequence
  MKO10082176_B_Dph1
  gRNA
gggttgttcaggacctcagg

SEQ ID NO: 82177 - DNA, 20 bp, Artificial Sequence
  MKO10082177_B_Dph2
  gRNA
cttaattccgaggccccaac

SEQ ID NO: 82178 - DNA, 20 bp, Artificial Sequence
  MKO10082178_B_Dph2
  gRNA
ggctcactcagcagtaccac

SEQ ID NO: 82179 - DNA, 20 bp, Artificial Sequence
  MKO10082179_B_Dph2
  gRNA
cgaggctggggggcttaagc

SEQ ID NO: 82180 - DNA, 20 bp, Artificial Sequence
  MKO10082180_B_Dph3
  gRNA
gcatttaactaactccttgt

SEQ ID NO: 82181 - DNA, 20 bp, Artificial Sequence
  MKO10082181_B_Dph3
  gRNA
tttataatgagtgagcagct

SEQ ID NO: 82182 - DNA, 20 bp, Artificial Sequence
  MKO10082182_B_Dph3
  gRNA
ttgtaggaagatttggaaaa

SEQ ID NO: 82183 - DNA, 20 bp, Artificial Sequence
  MKO10082183_B_Dph5
  gRNA
atgcacacgctgtgcttact

SEQ ID NO: 82184 - DNA, 20 bp, Artificial Sequence
  MKO10082184_B_Dph5
  gRNA
agtctctggagaacctcatc

SEQ ID NO: 82185 - DNA, 20 bp, Artificial Sequence
  MKO10082185_B_Dph5
  gRNA
ccctgcagatatcaaagtga

SEQ ID NO: 82186 - DNA, 20 bp, Artificial Sequence
  MKO10082186_B_Dph6
  gRNA
gatgatagcttctaatatca

SEQ ID NO: 82187 - DNA, 20 bp, Artificial Sequence
  MKO10082187_B_Dph6
  gRNA
ctttgccaaagataagctaa

SEQ ID NO: 82188 - DNA, 20 bp, Artificial Sequence
  MKO10082188_B_Dph6
  gRNA
ctaagaccagatgaaaacca

SEQ ID NO: 82189 - DNA, 20 bp, Artificial Sequence
  MKO10082189_B_Dph7
  gRNA
catagggctgctccgcctga

SEQ ID NO: 82190 - DNA, 20 bp, Artificial Sequence
  MKO10082190_B_Dph7
  gRNA
gccaatatccagcctcgccc

SEQ ID NO: 82191 - DNA, 20 bp, Artificial Sequence
  MKO10082191_B_Dph7
  gRNA
cgaggctggatattggctgc

SEQ ID NO: 82192 - DNA, 20 bp, Artificial Sequence
  MKO10082192_B_Dpm1
  gRNA
ctgtgacttacaattctgtc

SEQ ID NO: 82193 - DNA, 20 bp, Artificial Sequence
  MKO10082193_B_Dpm1
  gRNA
ggggaactatgtgatcatca

SEQ ID NO: 82194 - DNA, 20 bp, Artificial Sequence
  MKO10082194_B_Dpm1
  gRNA
aagaccacgagagaaaaagc

SEQ ID NO: 82195 - DNA, 20 bp, Artificial Sequence
  MKO10082195_B_Dpm2
  gRNA
accgggacagaccaagcagt

SEQ ID NO: 82196 - DNA, 20 bp, Artificial Sequence
  MKO10082196_B_Dpm2
  gRNA
ctggctcttcagcatcacat

SEQ ID NO: 82197 - DNA, 20 bp, Artificial Sequence
  MKO10082197_B_Dpm2
  gRNA
gagccagaagataaccaaga

SEQ ID NO: 82198 - DNA, 20 bp, Artificial Sequence
  MKO10082198_B_Dpm3
  gRNA
ccctgcgtgctaaatcagct

SEQ ID NO: 82199 - DNA, 20 bp, Artificial Sequence
  MKO10082199_B_Dpm3
  gRNA
gttgcctttcccctgccgag

SEQ ID NO: 82200 - DNA, 20 bp, Artificial Sequence
  MKO10082200_B_Dpm3
  gRNA
ctccgctggctgctatgccc

SEQ ID NO: 82201 - DNA, 20 bp, Artificial Sequence
  MKO10082201_B_Dpp10
  gRNA
cacctaccattgatccaccg

SEQ ID NO: 82202 - DNA, 20 bp, Artificial Sequence
  MKO10082202_B_Dpp10
  gRNA
tgagttgtccaataacaatg

SEQ ID NO: 82203 - DNA, 20 bp, Artificial Sequence
  MKO10082203_B_Dpp10
  gRNA
agaaacaagactgtcactag

SEQ ID NO: 82204 - DNA, 20 bp, Artificial Sequence
  MKO10082204_B_Dpp3
  gRNA
gtcccactatgaggtgcggc

SEQ ID NO: 82205 - DNA, 20 bp, Artificial Sequence
  MKO10082205_B_Dpp3
  gRNA
atgggcaactacaagtcctt

SEQ ID NO: 82206 - DNA, 20 bp, Artificial Sequence
  MKO10082206_B_Dpp3
  gRNA
ggagaacataaggtccccac

SEQ ID NO: 82207 - DNA, 20 bp, Artificial Sequence
  MKO10082207_B_Dpp4
  gRNA
tcaagtcctactctttgtgg

SEQ ID NO: 82208 - DNA, 20 bp, Artificial Sequence
  MKO10082208_B_Dpp4
  gRNA
ccaatagttctgctgagcaa

SEQ ID NO: 82209 - DNA, 20 bp, Artificial Sequence
  MKO10082209_B_Dpp4
  gRNA
ttgctgctcaatgctgaaca

SEQ ID NO: 82210 - DNA, 20 bp, Artificial Sequence
  MKO10082210_B_Dpp6
  gRNA
ctgcttatccactttgcctc

SEQ ID NO: 82211 - DNA, 20 bp, Artificial Sequence
  MKO10082211_B_Dpp6
  gRNA
cttcaaaatccatgacccag

SEQ ID NO: 82212 - DNA, 20 bp, Artificial Sequence
  MKO10082212_B_Dpp6
  gRNA
tgtgctgttctcctataatg

SEQ ID NO: 82213 - DNA, 20 bp, Artificial Sequence
  MKO10082213_B_Dpp7
  gRNA
tggtccttcgctaacaactc

SEQ ID NO: 82214 - DNA, 20 bp, Artificial Sequence
  MKO10082214_B_Dpp7
  gRNA
ggccagcggttcctagtgtc

SEQ ID NO: 82215 - DNA, 20 bp, Artificial Sequence
  MKO10082215_B_Dpp7
  gRNA
aacagctacaacaggagcgc

SEQ ID NO: 82216 - DNA, 20 bp, Artificial Sequence
  MKO10082216_B_Dpp8
  gRNA
tcctaggcgacactagacta

SEQ ID NO: 82217 - DNA, 20 bp, Artificial Sequence
  MKO10082217_B_Dpp8
  gRNA
tatgccctgctgatccagac

SEQ ID NO: 82218 - DNA, 20 bp, Artificial Sequence
  MKO10082218_B_Dpp8
  gRNA
taagactgctgctctgttga

SEQ ID NO: 82219 - DNA, 20 bp, Artificial Sequence
  MKO10082219_B_Dpp9
  gRNA
cgcaagcgcctgggcgtctt

SEQ ID NO: 82220 - DNA, 20 bp, Artificial Sequence
  MKO10082220_B_Dpp9
  gRNA
ggcaaacatcgagactgggg

SEQ ID NO: 82221 - DNA, 20 bp, Artificial Sequence
  MKO10082221_B_Dpp9
  gRNA
gcaatagcctgttccactgc

SEQ ID NO: 82222 - DNA, 20 bp, Artificial Sequence
  MKO10082222_B_Dppa1
  gRNA
ctccctgaagatctccacta

SEQ ID NO: 82223 - DNA, 20 bp, Artificial Sequence
  MKO10082223_B_Dppa1
  gRNA
cttacagtgtgattattcca

SEQ ID NO: 82224 - DNA, 20 bp, Artificial Sequence
  MKO10082224_B_Dppa1
  gRNA
gtcatgtgaaaatgtcacag

SEQ ID NO: 82225 - DNA, 20 bp, Artificial Sequence
  MKO10082225_B_Dppa2
  gRNA
gaggtcttaccagtggcttg

SEQ ID NO: 82226 - DNA, 20 bp, Artificial Sequence
  MKO10082226_B_Dppa2
  gRNA
tacacattcttgtttagaat

SEQ ID NO: 82227 - DNA, 20 bp, Artificial Sequence
  MKO10082227_B_Dppa2
  gRNA
agtatattcccaatacatct

SEQ ID NO: 82228 - DNA, 20 bp, Artificial Sequence
  MKO10082228_B_Dppa3
  gRNA
tcctcttcatctttcttctg

SEQ ID NO: 82229 - DNA, 20 bp, Artificial Sequence
  MKO10082229_B_Dppa3
  gRNA
agagaaagtcgacccaatga

SEQ ID NO: 82230 - DNA, 20 bp, Artificial Sequence
  MKO10082230_B_Dppa3
  gRNA
ctttctgccattatcaaaga

SEQ ID NO: 82231 - DNA, 20 bp, Artificial Sequence
  MKO10082231_B_Dppa4
  gRNA
accttcctacgagtctgtcc

SEQ ID NO: 82232 - DNA, 20 bp, Artificial Sequence
  MKO10082232_B_Dppa4
  gRNA
gtggagcgcagaagagccga

SEQ ID NO: 82233 - DNA, 20 bp, Artificial Sequence
  MKO10082233_B_Dppa4
  gRNA
attctcaagatggagactgc

SEQ ID NO: 82234 - DNA, 20 bp, Artificial Sequence
  MKO10082234_B_Dppa5a
  gRNA
catgtttgagctgaagaacc

SEQ ID NO: 82235 - DNA, 20 bp, Artificial Sequence
  MKO10082235_B_Dppa5a
  gRNA
tcacgcaggagtgctgaagc

SEQ ID NO: 82236 - DNA, 20 bp, Artificial Sequence
  MKO10082236_B_Dppa5a
  gRNA
actggcttcactcgatacac

SEQ ID NO: 82237 - DNA, 20 bp, Artificial Sequence
  MKO10082237_B_Dpt
  gRNA
ccagcactgattcgaagtag

SEQ ID NO: 82238 - DNA, 20 bp, Artificial Sequence
  MKO10082238_B_Dpt
  gRNA
cctcctacagggatcgccag

SEQ ID NO: 82239 - DNA, 20 bp, Artificial Sequence
  MKO10082239_B_Dpt
  gRNA
tgggtgaatcttaaccgcca

SEQ ID NO: 82240 - DNA, 20 bp, Artificial Sequence
  MKO10082240_B_Dpy19l1
  gRNA
ccagtgcaatagagctgcaa

SEQ ID NO: 82241 - DNA, 20 bp, Artificial Sequence
  MKO10082241_B_Dpy19l1
  gRNA
cagtccgattgagagctgtg

SEQ ID NO: 82242 - DNA, 20 bp, Artificial Sequence
  MKO10082242_B_Dpy19l1
  gRNA
cctttgcagctctattgcac

SEQ ID NO: 82243 - DNA, 20 bp, Artificial Sequence
  MKO10082243_B_Dpy19l2
  gRNA
ttcgataatggtcttgaagt

SEQ ID NO: 82244 - DNA, 20 bp, Artificial Sequence
  MKO10082244_B_Dpy19l2
  gRNA
tctcccgttccaaagatgaa

SEQ ID NO: 82245 - DNA, 20 bp, Artificial Sequence
  MKO10082245_B_Dpy19l2
  gRNA
ttctcttccagctatctttg

SEQ ID NO: 82246 - DNA, 20 bp, Artificial Sequence
  MKO10082246_B_Dpy19l3
  gRNA
aaatgttcatccgttgaagg

SEQ ID NO: 82247 - DNA, 20 bp, Artificial Sequence
  MKO10082247_B_Dpy19l3
  gRNA
ccctctggtacgtcaccaac

SEQ ID NO: 82248 - DNA, 20 bp, Artificial Sequence
  MKO10082248_B_Dpy19l3
  gRNA
cacctggctgtcgggactgt

SEQ ID NO: 82249 - DNA, 20 bp, Artificial Sequence
  MKO10082249_B_Dpy19l4
  gRNA
aaaaccagaatttccgttca

SEQ ID NO: 82250 - DNA, 20 bp, Artificial Sequence
  MKO10082250_B_Dpy19l4
  gRNA
agtgttctctatcaagcaac

SEQ ID NO: 82251 - DNA, 20 bp, Artificial Sequence
  MKO10082251_B_Dpy19l4
  gRNA
catctgtagaaccccgccaa

SEQ ID NO: 82252 - DNA, 20 bp, Artificial Sequence
  MKO10082252_B_Dpy30
  gRNA
cagcatctgctccgactcca

SEQ ID NO: 82253 - DNA, 20 bp, Artificial Sequence
  MKO10082253_B_Dpy30
  gRNA
catggagtcggagcagatgc

SEQ ID NO: 82254 - DNA, 20 bp, Artificial Sequence
  MKO10082254_B_Dpy30
  gRNA
gaaaaccctcactctgagta

SEQ ID NO: 82255 - DNA, 20 bp, Artificial Sequence
  MKO10082255_B_Dpyd
  gRNA
gttgcatgagcttgtactcg

SEQ ID NO: 82256 - DNA, 20 bp, Artificial Sequence
  MKO10082256_B_Dpyd
  gRNA
tgcagcccaccaatattaat

SEQ ID NO: 82257 - DNA, 20 bp, Artificial Sequence
  MKO10082257_B_Dpyd
  gRNA
gagctctccgagaagcagtg

SEQ ID NO: 82258 - DNA, 20 bp, Artificial Sequence
  MKO10082258_B_Dpysl2
  gRNA
aataggctcgtcccgggctc

SEQ ID NO: 82259 - DNA, 20 bp, Artificial Sequence
  MKO10082259_B_Dpysl2
  gRNA
agcgatcgtcttctgatcaa

SEQ ID NO: 82260 - DNA, 20 bp, Artificial Sequence
  MKO10082260_B_Dpysl2
  gRNA
ttacctgggaatccgtcagc

SEQ ID NO: 82261 - DNA, 20 bp, Artificial Sequence
  MKO10082261_B_Dpysl3
  gRNA
catcttcccgttggcctcga

SEQ ID NO: 82262 - DNA, 20 bp, Artificial Sequence
  MKO10082262_B_Dpysl3
  gRNA
acaaaggctgccttagcggg

SEQ ID NO: 82263 - DNA, 20 bp, Artificial Sequence
  MKO10082263_B_Dpysl3
  gRNA
gagtgaccgtcttctaatca

SEQ ID NO: 82264 - DNA, 20 bp, Artificial Sequence
  MKO10082264_B_Dpysl4
  gRNA
gtgtgaacgtcaactccccc

SEQ ID NO: 82265 - DNA, 20 bp, Artificial Sequence
  MKO10082265_B_Dpysl4
  gRNA
tcacctgaccgtcagtacac

SEQ ID NO: 82266 - DNA, 20 bp, Artificial Sequence
  MKO10082266_B_Dpysl4
  gRNA
ctgtgactactccttacatg

SEQ ID NO: 82267 - DNA, 20 bp, Artificial Sequence
  MKO10082267_B_Dpysl5
  gRNA
gctgcttacccggtttgcaa

SEQ ID NO: 82268 - DNA, 20 bp, Artificial Sequence
  MKO10082268_B_Dpysl5
  gRNA
ccccgggtccacgctgaaaa

SEQ ID NO: 82269 - DNA, 20 bp, Artificial Sequence
  MKO10082269_B_Dpysl5
  gRNA
aatcgagatcagccatccag

SEQ ID NO: 82270 - DNA, 20 bp, Artificial Sequence
  MKO10082270_B_Dpys
  gRNA
gaaccaattgcagcgggtct

SEQ ID NO: 82271 - DNA, 20 bp, Artificial Sequence
  MKO10082271_B_Dpys
  gRNA
gtagccgatgcgaggagagc

SEQ ID NO: 82272 - DNA, 20 bp, Artificial Sequence
  MKO10082272_B_Dpys
  gRNA
gctcaggtgcacgccgagaa

SEQ ID NO: 82273 - DNA, 20 bp, Artificial Sequence
  MKO10082273_B_Dqx1
  gRNA
cgggtgctaccccttcaccc

SEQ ID NO: 82274 - DNA, 20 bp, Artificial Sequence
  MKO10082274_B_Dqx1
  gRNA
cactgtccctaccgacctgg

SEQ ID NO: 82275 - DNA, 20 bp, Artificial Sequence
  MKO10082275_B_Dqx1
  gRNA
atccaacacgtcattgactc

SEQ ID NO: 82276 - DNA, 20 bp, Artificial Sequence
  MKO10082276_B_Dr1
  gRNA
ttgtgaagatcctgcttgag

SEQ ID NO: 82277 - DNA, 20 bp, Artificial Sequence
  MKO10082277_B_Dr1
  gRNA
ggaattattgagacagcaac

SEQ ID NO: 82278 - DNA, 20 bp, Artificial Sequence
  MKO10082278_B_Dr1
  gRNA
agttctcgtttggaaaacct

SEQ ID NO: 82279 - DNA, 20 bp, Artificial Sequence
  MKO10082279_B_Dram1
  gRNA
aacgggagtgctgaagtagc

SEQ ID NO: 82280 - DNA, 20 bp, Artificial Sequence
  MKO10082280_B_Dram1
  gRNA
tatagaaatgagtgaagcac

SEQ ID NO: 82281 - DNA, 20 bp, Artificial Sequence
  MKO10082281_B_Dram1
  gRNA
ggaacaactcctccagagag

SEQ ID NO: 82282 - DNA, 20 bp, Artificial Sequence
  MKO10082282_B_Dram2
  gRNA
ttgcttgtaacgaacataca

SEQ ID NO: 82283 - DNA, 20 bp, Artificial Sequence
  MKO10082283_B_Dram2
  gRNA
cttgggatactgagttgttt

SEQ ID NO: 82284 - DNA, 20 bp, Artificial Sequence
  MKO10082284_B_Dram2
  gRNA
tcagggctatgtgcttcacc

SEQ ID NO: 82285 - DNA, 20 bp, Artificial Sequence
  MKO10082285_B_Drap1
  gRNA
atggggacaagggtcctcga

SEQ ID NO: 82286 - DNA, 20 bp, Artificial Sequence
  MKO10082286_B_Drap1
  gRNA
ggccactcacaggtgggacg

SEQ ID NO: 82287 - DNA, 20 bp, Artificial Sequence
  MKO10082287_B_Drap1
  gRNA
agtaggatacagatgatgac

SEQ ID NO: 82288 - DNA, 20 bp, Artificial Sequence
  MKO10082288_B_Draxin
  gRNA
catcacctccccgtcagacc

SEQ ID NO: 82289 - DNA, 20 bp, Artificial Sequence
  MKO10082289_B_Draxin
  gRNA
cgcctactacagaagagtcc

SEQ ID NO: 82290 - DNA, 20 bp, Artificial Sequence
  MKO10082290_B_Draxin
  gRNA
cgtcgaaacatttgttgttg

SEQ ID NO: 82291 - DNA, 20 bp, Artificial Sequence
  MKO10082291_B_Drc1
  gRNA
cagacggaagcggattcccc

SEQ ID NO: 82292 - DNA, 20 bp, Artificial Sequence
  MKO10082292_B_Drc1
  gRNA
tgtgatgaagaacttccgcc

SEQ ID NO: 82293 - DNA, 20 bp, Artificial Sequence
  MKO10082293_B_Drc1
  gRNA
cagacgtcagagagatccac

SEQ ID NO: 82294 - DNA, 20 bp, Artificial Sequence
  MKO10082294_B_Drd1a
  gRNA
taacctctgtgtgatcagcg

SEQ ID NO: 82295 - DNA, 20 bp, Artificial Sequence
  MKO10082295_B_Drd1a
  gRNA
ctgggcaatcctgtagatac

SEQ ID NO: 82296 - DNA, 20 bp, Artificial Sequence
  MKO10082296_B_Drd1a
  gRNA
gaagctgtccccggccttat

SEQ ID NO: 82297 - DNA, 20 bp, Artificial Sequence
  MKO10082297_B_Drd2
  gRNA
ctgtcatgatcgccattgtc

SEQ ID NO: 82298 - DNA, 20 bp, Artificial Sequence
  MKO10082298_B_Drd2
  gRNA
gggcaactgtacccaccctg

SEQ ID NO: 82299 - DNA, 20 bp, Artificial Sequence
  MKO10082299_B_Drd2
  gRNA
accgttatcatgaagtctaa

SEQ ID NO: 82300 - DNA, 20 bp, Artificial Sequence
  MKO10082300_B_Drd3
  gRNA
actggctgttctgtcgagtg

SEQ ID NO: 82301 - DNA, 20 bp, Artificial Sequence
  MKO10082301_B_Drd3
  gRNA
cagtgtatcagcatcagacc

SEQ ID NO: 82302 - DNA, 20 bp, Artificial Sequence
  MKO10082302_B_Drd3
  gRNA
ccttattgaaaactgccgaa

SEQ ID NO: 82303 - DNA, 20 bp, Artificial Sequence
  MKO10082303_B_Drd4
  gRNA
ctttccgcggcctgcggcgc

SEQ ID NO: 82304 - DNA, 20 bp, Artificial Sequence
  MKO10082304_B_Drd4
  gRNA
catcacgcgggcgctgtgtc

SEQ ID NO: 82305 - DNA, 20 bp, Artificial Sequence
  MKO10082305_B_Drd4
  gRNA
gggtgtctgcagcgtgcgct

SEQ ID NO: 82306 - DNA, 20 bp, Artificial Sequence
  MKO10082306_B_Drd5
  gRNA
ccccagccgcgcccgatgtg

SEQ ID NO: 82307 - DNA, 20 bp, Artificial Sequence
  MKO10082307_B_Drd5
  gRNA
gcgcatctaccgcattgcac

SEQ ID NO: 82308 - DNA, 20 bp, Artificial Sequence
  MKO10082308_B_Drd5
  gRNA
ccaccttcgacatattcgtc

SEQ ID NO: 82309 - DNA, 20 bp, Artificial Sequence
  MKO10082309_B_Drg1
  gRNA
caataatacccgggagatcc

SEQ ID NO: 82310 - DNA, 20 bp, Artificial Sequence
  MKO10082310_B_Drg1
  gRNA
actctgctaagtaacttagc

SEQ ID NO: 82311 - DNA, 20 bp, Artificial Sequence
  MKO10082311_B_Drg1
  gRNA
agagaactcatcactcctaa

SEQ ID NO: 82312 - DNA, 20 bp, Artificial Sequence
  MKO10082312_B_Drg2
  gRNA
cgtcagggtggtaaactcat

SEQ ID NO: 82313 - DNA, 20 bp, Artificial Sequence
  MKO10082313_B_Drg2
  gRNA
accaccctgacgtgcatccc

SEQ ID NO: 82314 - DNA, 20 bp, Artificial Sequence
  MKO10082314_B_Drg2
  gRNA
tccaaatccgcctcatccaa

SEQ ID NO: 82315 - DNA, 20 bp, Artificial Sequence
  MKO10082315_B_Drosha
  gRNA
tgtgtacagcgaatccacac

SEQ ID NO: 82316 - DNA, 20 bp, Artificial Sequence
  MKO10082316_B_Drosha
  gRNA
ccagttgctcctgagcccgc

SEQ ID NO: 82317 - DNA, 20 bp, Artificial Sequence
  MKO10082317_B_Drosha
  gRNA
aagagctccttaagcctgtg

SEQ ID NO: 82318 - DNA, 20 bp, Artificial Sequence
  MKO10082318_B_Drp2
  gRNA
ctctgtgcttgaatccgccc

SEQ ID NO: 82319 - DNA, 20 bp, Artificial Sequence
  MKO10082319_B_Drp2
  gRNA
aaaaccttagtcgctttgta

SEQ ID NO: 82320 - DNA, 20 bp, Artificial Sequence
  MKO10082320_B_Drp2
  gRNA
acagtcccgttcaagagctt

SEQ ID NO: 82321 - DNA, 20 bp, Artificial Sequence
  MKO10082321_B_Dsc1
  gRNA
cagacctgctgaatgtgttg

SEQ ID NO: 82322 - DNA, 20 bp, Artificial Sequence
  MKO10082322_B_Dsc1
  gRNA
aaaattggtcatactgttca

SEQ ID NO: 82323 - DNA, 20 bp, Artificial Sequence
  MKO10082323_B_Dsc1
  gRNA
gccgtcttctagaattctga

SEQ ID NO: 82324 - DNA, 20 bp, Artificial Sequence
  MKO10082324_B_Dsc2
  gRNA
actggaaacctgtattgcac

SEQ ID NO: 82325 - DNA, 20 bp, Artificial Sequence
  MKO10082325_B_Dsc2
  gRNA
cctctactgggccctctaaa

SEQ ID NO: 82326 - DNA, 20 bp, Artificial Sequence
  MKO10082326_B_Dsc2
  gRNA
ctacctgccgagaaatttgt

SEQ ID NO: 82327 - DNA, 20 bp, Artificial Sequence
  MKO10082327_B_Dsc3
  gRNA
ttgtctgcctctagtgttga

SEQ ID NO: 82328 - DNA, 20 bp, Artificial Sequence
  MKO10082328_B_Dsc3
  gRNA
cctacctgttgaagaaacaa

SEQ ID NO: 82329 - DNA, 20 bp, Artificial Sequence
  MKO10082329_B_Dsc3
  gRNA
cttcccattgtttcttcaac

SEQ ID NO: 82330 - DNA, 20 bp, Artificial Sequence
  MKO10082330_B_Dscaml1
  gRNA
tcagggaaccctacaccgtc

SEQ ID NO: 82331 - DNA, 20 bp, Artificial Sequence
  MKO10082331_B_Dscaml1
  gRNA
gtacatctcggacgtgcaga

SEQ ID NO: 82332 - DNA, 20 bp, Artificial Sequence
  MKO10082332_B_Dscaml1
  gRNA
cctgctttgatgcgaatgtt

SEQ ID NO: 82333 - DNA, 20 bp, Artificial Sequence
  MKO10082333_B_Dscam
  gRNA
cgtacgtcactgtcgtctca

SEQ ID NO: 82334 - DNA, 20 bp, Artificial Sequence
  MKO10082334_B_Dscam
  gRNA
agcgcgagactgttcgtgtc

SEQ ID NO: 82335 - DNA, 20 bp, Artificial Sequence
  MKO10082335_B_Dscam
  gRNA
gtcctccacacggactgtat

SEQ ID NO: 82336 - DNA, 20 bp, Artificial Sequence
  MKO10082336_B_Dscc1
  gRNA
agatttgcttaatcatattc

SEQ ID NO: 82337 - DNA, 20 bp, Artificial Sequence
  MKO10082337_B_Dscc1
  gRNA
ccccttgactgtgtgcctgc

SEQ ID NO: 82338 - DNA, 20 bp, Artificial Sequence
  MKO10082338_B_Dscc1
  gRNA
gaaccatgtgactcagcttg

SEQ ID NO: 82339 - DNA, 20 bp, Artificial Sequence
  MKO10082339_B_Dscr3
  gRNA
tggtcaggtccttggccaac

SEQ ID NO: 82340 - DNA, 20 bp, Artificial Sequence
  MKO10082340_B_Dscr3
  gRNA
gaatgttgacaaacacgccg

SEQ ID NO: 82341 - DNA, 20 bp, Artificial Sequence
  MKO10082341_B_Dscr3
  gRNA
ttcgaacacacccacacttt

SEQ ID NO: 82342 - DNA, 20 bp, Artificial Sequence
  MKO10082342_B_Dsel
  gRNA
cctgtgctcagcttaagtag

SEQ ID NO: 82343 - DNA, 20 bp, Artificial Sequence
  MKO10082343_B_Dsel
  gRNA
aatattccaagattcgatca

SEQ ID NO: 82344 - DNA, 20 bp, Artificial Sequence
  MKO10082344_B_Dsel
  gRNA
ctgctgaatttaagaaacgg

SEQ ID NO: 82345 - DNA, 20 bp, Artificial Sequence
  MKO10082345_B_Dse
  gRNA
ataaatttgtcatgcgtaac

SEQ ID NO: 82346 - DNA, 20 bp, Artificial Sequence
  MKO10082346_B_Dse
  gRNA
agtttcatacatatagcccg

SEQ ID NO: 82347 - DNA, 20 bp, Artificial Sequence
  MKO10082347_B_Dse
  gRNA
ggttggtgaaagatgcgcct

SEQ ID NO: 82348 - DNA, 20 bp, Artificial Sequence
  MKO10082348_B_Dsg1a
  gRNA
agagatcataacgccaaaaa

SEQ ID NO: 82349 - DNA, 20 bp, Artificial Sequence
  MKO10082349_B_Dsg1a
  gRNA
agtccacttacaatgaaaaa

SEQ ID NO: 82350 - DNA, 20 bp, Artificial Sequence
  MKO10082350_B_Dsg1a
  gRNA
aatgtagtcattgaaaacac

SEQ ID NO: 82351 - DNA, 20 bp, Artificial Sequence
  MKO10082351_B_Dsg1b
  gRNA
taacagtgaatttcaaatcc

SEQ ID NO: 82352 - DNA, 20 bp, Artificial Sequence
  MKO10082352_B_Dsg1b
  gRNA
ttctcacttactttggcaat

SEQ ID NO: 82353 - DNA, 20 bp, Artificial Sequence
  MKO10082353_B_Dsg1b
  gRNA
agtccacttacaatgaaaaa

SEQ ID NO: 82354 - DNA, 20 bp, Artificial Sequence
  MKO10082354_B_Dsg1c
  gRNA
agtccacttacaatgaaaaa

SEQ ID NO: 82355 - DNA, 20 bp, Artificial Sequence
  MKO10082355_B_Dsg1c
  gRNA
accagtgacataccgcatct

SEQ ID NO: 82356 - DNA, 20 bp, Artificial Sequence
  MKO10082356_B_Dsg1c
  gRNA
aatgtagtcattgaaaacac

SEQ ID NO: 82357 - DNA, 20 bp, Artificial Sequence
  MKO10082357_B_Dsg2
  gRNA
cagaaagaacccgattgcca

SEQ ID NO: 82358 - DNA, 20 bp, Artificial Sequence
  MKO10082358_B_Dsg2
  gRNA
ggtctttgttgggtccattg

SEQ ID NO: 82359 - DNA, 20 bp, Artificial Sequence
  MKO10082359_B_Dsg2
  gRNA
cgaaccaagtgagtgtgctt

SEQ ID NO: 82360 - DNA, 20 bp, Artificial Sequence
  MKO10082360_B_Dsg3
  gRNA
aagacgaaacccaattgcca

SEQ ID NO: 82361 - DNA, 20 bp, Artificial Sequence
  MKO10082361_B_Dsg3
  gRNA
atgccgtgcactaaatgccc

SEQ ID NO: 82362 - DNA, 20 bp, Artificial Sequence
  MKO10082362_B_Dsg3
  gRNA
ttcaatttcacccttgaata

SEQ ID NO: 82363 - DNA, 20 bp, Artificial Sequence
  MKO10082363_B_Dsg4
  gRNA
aaacagtgaatttatcgttg

SEQ ID NO: 82364 - DNA, 20 bp, Artificial Sequence
  MKO10082364_B_Dsg4
  gRNA
tcaagtttgcggcagcctgt

SEQ ID NO: 82365 - DNA, 20 bp, Artificial Sequence
  MKO10082365_B_Dsg4
  gRNA
gtcgctgttctcttcaatgt

SEQ ID NO: 82366 - DNA, 20 bp, Artificial Sequence
  MKO10082366_B_Dsn1
  gRNA
ctttcgctctaaaacattca

SEQ ID NO: 82367 - DNA, 20 bp, Artificial Sequence
  MKO10082367_B_Dsn1
  gRNA
tgaagttagcccagagccaa

SEQ ID NO: 82368 - DNA, 20 bp, Artificial Sequence
  MKO10082368_B_Dsn1
  gRNA
acctttcttaaagaacacta

SEQ ID NO: 82369 - DNA, 20 bp, Artificial Sequence
  MKO10082369_B_Dspp
  gRNA
tcctctaccccgttcccgct

SEQ ID NO: 82370 - DNA, 20 bp, Artificial Sequence
  MKO10082370_B_Dspp
  gRNA
catgatggggtacatgcgag

SEQ ID NO: 82371 - DNA, 20 bp, Artificial Sequence
  MKO10082371_B_Dspp
  gRNA
ggttccccagttagtaccac

SEQ ID NO: 82372 - DNA, 20 bp, Artificial Sequence
  MKO10082372_B_Dsp
  gRNA
tgaaccagcgtccacacccc

SEQ ID NO: 82373 - DNA, 20 bp, Artificial Sequence
  MKO10082373_B_Dsp
  gRNA
tatgatttccatctgatcgt

SEQ ID NO: 82374 - DNA, 20 bp, Artificial Sequence
  MKO10082374_B_Dsp
  gRNA
tacacaagccaacgatcaga

SEQ ID NO: 82375 - DNA, 20 bp, Artificial Sequence
  MKO10082375_B_Dstn
  gRNA
tgacgccagctttgagacca

SEQ ID NO: 82376 - DNA, 20 bp, Artificial Sequence
  MKO10082376_B_Dstn
  gRNA
acctgtattgctgaaaagct

SEQ ID NO: 82377 - DNA, 20 bp, Artificial Sequence
  MKO10082377_B_Dstn
  gRNA
gccatcaagaagaaatttcc

SEQ ID NO: 82378 - DNA, 20 bp, Artificial Sequence
  MKO10082378_B_Dstyk
  gRNA
tcatgtgctagctgacctcg

SEQ ID NO: 82379 - DNA, 20 bp, Artificial Sequence
  MKO10082379_B_Dstyk
  gRNA
tcccaacaaagctttcccgc

SEQ ID NO: 82380 - DNA, 20 bp, Artificial Sequence
  MKO10082380_B_Dstyk
  gRNA
actcgggatcctcagttact

SEQ ID NO: 82381 - DNA, 20 bp, Artificial Sequence
  MKO10082381_B_Dst
  gRNA
tcgtacctttgtacctctcc

SEQ ID NO: 82382 - DNA, 20 bp, Artificial Sequence
  MKO10082382_B_Dst
  gRNA
ctgctcctccacgtacatgt

SEQ ID NO: 82383 - DNA, 20 bp, Artificial Sequence
  MKO10082383_B_Dst
  gRNA
gcacaatttgatctccctcc

SEQ ID NO: 82384 - DNA, 20 bp, Artificial Sequence
  MKO10082384_B_Dtd1
  gRNA
gacacagatgccccgtccga

SEQ ID NO: 82385 - DNA, 20 bp, Artificial Sequence
  MKO10082385_B_Dtd1
  gRNA
agggtgacgtgtcttctgag

SEQ ID NO: 82386 - DNA, 20 bp, Artificial Sequence
  MKO10082386_B_Dtd1
  gRNA
gaagaccgcagcgccagcag

SEQ ID NO: 82387 - DNA, 20 bp, Artificial Sequence
  MKO10082387_B_Dtd2
  gRNA
gggatgatcagaacatcgcc

SEQ ID NO: 82388 - DNA, 20 bp, Artificial Sequence
  MKO10082388_B_Dtd2
  gRNA
ctcacagattcggagaggat

SEQ ID NO: 82389 - DNA, 20 bp, Artificial Sequence
  MKO10082389_B_Dtd2
  gRNA
cacagaccttctccccaaaa

SEQ ID NO: 82390 - DNA, 20 bp, Artificial Sequence
  MKO10082390_B_Dtl
  gRNA
ctacagacttgaggctgcac

SEQ ID NO: 82391 - DNA, 20 bp, Artificial Sequence
  MKO10082391_B_Dtl
  gRNA
ctcacaagtttaagttcacc

SEQ ID NO: 82392 - DNA, 20 bp, Artificial Sequence
  MKO10082392_B_Dtl
  gRNA
agctcttacatcccaaaatt

SEQ ID NO: 82393 - DNA, 20 bp, Artificial Sequence
  MKO10082393_B_Dtna
  gRNA
cacagaatgattgaagatag

SEQ ID NO: 82394 - DNA, 20 bp, Artificial Sequence
  MKO10082394_B_Dtna
  gRNA
ctgactaggggctcaagatc

SEQ ID NO: 82395 - DNA, 20 bp, Artificial Sequence
  MKO10082395_B_Dtna
  gRNA
attgtgtggaggaaagatca

SEQ ID NO: 82396 - DNA, 20 bp, Artificial Sequence
  MKO10082396_B_Dtnbp1
  gRNA
gttgcagctggtggacagcg

SEQ ID NO: 82397 - DNA, 20 bp, Artificial Sequence
  MKO10082397_B_Dtnbp1
  gRNA
gccagcgtctgcacactcct

SEQ ID NO: 82398 - DNA, 20 bp, Artificial Sequence
  MKO10082398_B_Dtnbp1
  gRNA
tgcacttcacagaagagcca

SEQ ID NO: 82399 - DNA, 20 bp, Artificial Sequence
  MKO10082399_B_Dtnb
  gRNA
atctctaggatgattgagga

SEQ ID NO: 82400 - DNA, 20 bp, Artificial Sequence
  MKO10082400_B_Dtnb
  gRNA
gagctgcctcttctccgcca

SEQ ID NO: 82401 - DNA, 20 bp, Artificial Sequence
  MKO10082401_B_Dtnb
  gRNA
catagctttaactgaaaaca

SEQ ID NO: 82402 - DNA, 20 bp, Artificial Sequence
  MKO10082402_B_Dtwd1
  gRNA
tgatccttcccttcgtactc

SEQ ID NO: 82403 - DNA, 20 bp, Artificial Sequence
  MKO10082403_B_Dtwd1
  gRNA
aggtcccggtgtcgccaatg

SEQ ID NO: 82404 - DNA, 20 bp, Artificial Sequence
  MKO10082404_B_Dtwd1
  gRNA
aaacttatgcttagcgtctc

SEQ ID NO: 82405 - DNA, 20 bp, Artificial Sequence
  MKO10082405_B_Dtwd2
  gRNA
tgtacaagtgggtagagatc

SEQ ID NO: 82406 - DNA, 20 bp, Artificial Sequence
  MKO10082406_B_Dtwd2
  gRNA
tctgagcgccatgctgaagc

SEQ ID NO: 82407 - DNA, 20 bp, Artificial Sequence
  MKO10082407_B_Dtwd2
  gRNA
agtgggcgcactgggagata

SEQ ID NO: 82408 - DNA, 20 bp, Artificial Sequence
  MKO10082408_B_Dtx1
  gRNA
cggcacacgccgggcactcc

SEQ ID NO: 82409 - DNA, 20 bp, Artificial Sequence
  MKO10082409_B_Dtx1
  gRNA
agcgacgtgaagcctgtgcc

SEQ ID NO: 82410 - DNA, 20 bp, Artificial Sequence
  MKO10082410_B_Dtx1
  gRNA
ggctggctcacctcatcagg

SEQ ID NO: 82411 - DNA, 20 bp, Artificial Sequence
  MKO10082411_B_Dtx2
  gRNA
acctgcggcagagacgagct

SEQ ID NO: 82412 - DNA, 20 bp, Artificial Sequence
  MKO10082412_B_Dtx2
  gRNA
ggtgatcagaaagtacaccg

SEQ ID NO: 82413 - DNA, 20 bp, Artificial Sequence
  MKO10082413_B_Dtx2
  gRNA
acttacctgcaagcgcctgc

SEQ ID NO: 82414 - DNA, 20 bp, Artificial Sequence
  MKO10082414_B_Dtx3l
  gRNA
gctcctccttgacacgtttc

SEQ ID NO: 82415 - DNA, 20 bp, Artificial Sequence
  MKO10082415_B_Dtx3l
  gRNA
aaagagcgaacacgagatgt

SEQ ID NO: 82416 - DNA, 20 bp, Artificial Sequence
  MKO10082416_B_Dtx3l
  gRNA
tgattacctgaaacgtgtca

SEQ ID NO: 82417 - DNA, 20 bp, Artificial Sequence
  MKO10082417_B_Dtx3
  gRNA
ggcgctggtcaaatgccttt

SEQ ID NO: 82418 - DNA, 20 bp, Artificial Sequence
  MKO10082418_B_Dtx3
  gRNA
ttgccccaggtttgggtatc

SEQ ID NO: 82419 - DNA, 20 bp, Artificial Sequence
  MKO10082419_B_Dtx3
  gRNA
gttcctcttgcaccctagtc

SEQ ID NO: 82420 - DNA, 20 bp, Artificial Sequence
  MKO10082420_B_Dtx4
  gRNA
cgctgcactcatgagtatcc

SEQ ID NO: 82421 - DNA, 20 bp, Artificial Sequence
  MKO10082421_B_Dtx4
  gRNA
ccccataggtaaaaccccag

SEQ ID NO: 82422 - DNA, 20 bp, Artificial Sequence
  MKO10082422_B_Dtx4
  gRNA
tacttctttagcacttcctc

SEQ ID NO: 82423 - DNA, 20 bp, Artificial Sequence
  MKO10082423_B_Dtymk
  gRNA
ccggttgtttacaccaatcc

SEQ ID NO: 82424 - DNA, 20 bp, Artificial Sequence
  MKO10082424_B_Dtymk
  gRNA
ttcaacttcgccttaattaa

SEQ ID NO: 82425 - DNA, 20 bp, Artificial Sequence
  MKO10082425_B_Dtymk
  gRNA
aggcgtatctgtccaaaaca

SEQ ID NO: 82426 - DNA, 20 bp, Artificial Sequence
  MKO10082426_B_Duox1
  gRNA
ctcaacatttacatcccgca

SEQ ID NO: 82427 - DNA, 20 bp, Artificial Sequence
  MKO10082427_B_Duox1
  gRNA
aggtacagcgatttgatgga

SEQ ID NO: 82428 - DNA, 20 bp, Artificial Sequence
  MKO10082428_B_Duox1
  gRNA
agccgctgggaccgcaacac

SEQ ID NO: 82429 - DNA, 20 bp, Artificial Sequence
  MKO10082429_B_Duox2
  gRNA
tagcgacagcatcgcttagc

SEQ ID NO: 82430 - DNA, 20 bp, Artificial Sequence
  MKO10082430_B_Duox2
  gRNA
ttccgcgggaaagcagggtc

SEQ ID NO: 82431 - DNA, 20 bp, Artificial Sequence
  MKO10082431_B_Duox2
  gRNA
gcctcaccatacaccccttg

SEQ ID NO: 82432 - DNA, 20 bp, Artificial Sequence
  MKO10082432_B_Duoxa1
  gRNA
gtggtgaccagcttattcat

SEQ ID NO: 82433 - DNA, 20 bp, Artificial Sequence
  MKO10082433_B_Duoxa1
  gRNA
gaaggctttgtacgttgtgt

SEQ ID NO: 82434 - DNA, 20 bp, Artificial Sequence
  MKO10082434_B_Duoxa1
  gRNA
agtgtcctgccaggcggtac

SEQ ID NO: 82435 - DNA, 20 bp, Artificial Sequence
  MKO10082435_B_Duoxa2
  gRNA
aggcgccgtagtaaggcgtg

SEQ ID NO: 82436 - DNA, 20 bp, Artificial Sequence
  MKO10082436_B_Duoxa2
  gRNA
gccccacgtgcagaccgaca

SEQ ID NO: 82437 - DNA, 20 bp, Artificial Sequence
  MKO10082437_B_Duoxa2
  gRNA
gctgtaccaccaatatcacc

SEQ ID NO: 82438 - DNA, 20 bp, Artificial Sequence
  MKO10082438_B_Dupd1
  gRNA
actgtgccatgggccgaagt

SEQ ID NO: 82439 - DNA, 20 bp, Artificial Sequence
  MKO10082439_B_Dupd1
  gRNA
ccagagttgctgaccgactt

SEQ ID NO: 82440 - DNA, 20 bp, Artificial Sequence
  MKO10082440_B_Dupd1
  gRNA
cctcattgacgtgtgtatac

SEQ ID NO: 82441 - DNA, 20 bp, Artificial Sequence
  MKO10082441_B_Dus1l
  gRNA
ctcactgtcttgtcaatttc

SEQ ID NO: 82442 - DNA, 20 bp, Artificial Sequence
  MKO10082442_B_Dus1l
  gRNA
tcctagctgctgactgtgca

SEQ ID NO: 82443 - DNA, 20 bp, Artificial Sequence
  MKO10082443_B_Dus1l
  gRNA
cagaaattgacaagacagtg

SEQ ID NO: 82444 - DNA, 20 bp, Artificial Sequence
  MKO10082444_B_Dus2
  gRNA
tccaaaagagtattccacta

SEQ ID NO: 82445 - DNA, 20 bp, Artificial Sequence
  MKO10082445_B_Dus2
  gRNA
actttgttgctcctgatgac

SEQ ID NO: 82446 - DNA, 20 bp, Artificial Sequence
  MKO10082446_B_Dus2
  gRNA
tctgttctctttcacacgta

SEQ ID NO: 82447 - DNA, 20 bp, Artificial Sequence
  MKO10082447_B_Dus3l
  gRNA
aggggccaaaagaattcgcc

SEQ ID NO: 82448 - DNA, 20 bp, Artificial Sequence
  MKO10082448_B_Dus3l
  gRNA
ccacctcctaccgtggttaa

SEQ ID NO: 82449 - DNA, 20 bp, Artificial Sequence
  MKO10082449_B_Dus3l
  gRNA
tggcaattgaatcccgtgaa

SEQ ID NO: 82450 - DNA, 20 bp, Artificial Sequence
  MKO10082450_B_Dus4l
  gRNA
tctctcaaggtgggcgatgg

SEQ ID NO: 82451 - DNA, 20 bp, Artificial Sequence
  MKO10082451_B_Dus4l
  gRNA
ttaactgtggttgccctcag

SEQ ID NO: 82452 - DNA, 20 bp, Artificial Sequence
  MKO10082452_B_Dus4l
  gRNA
gcagcaaactgaacaatcaa

SEQ ID NO: 82453 - DNA, 20 bp, Artificial Sequence
  MKO10082453_B_Dusp10
  gRNA
aacctacgacaaggatcatc

SEQ ID NO: 82454 - DNA, 20 bp, Artificial Sequence
  MKO10082454_B_Dusp10
  gRNA
atagttaccgatgaactcga

SEQ ID NO: 82455 - DNA, 20 bp, Artificial Sequence
  MKO10082455_B_Dusp10
  gRNA
agctctgcgttctcgatgtc

SEQ ID NO: 82456 - DNA, 20 bp, Artificial Sequence
  MKO10082456_B_Dusp11
  gRNA
agccagtcctatttaagcca

SEQ ID NO: 82457 - DNA, 20 bp, Artificial Sequence
  MKO10082457_B_Dusp11
  gRNA
tgaaagatagtgtcattatc

SEQ ID NO: 82458 - DNA, 20 bp, Artificial Sequence
  MKO10082458_B_Dusp11
  gRNA
tggaaagactatctcccagt

SEQ ID NO: 82459 - DNA, 20 bp, Artificial Sequence
  MKO10082459_B_Dusp12
  gRNA
aaaaagcctacgacatcctc

SEQ ID NO: 82460 - DNA, 20 bp, Artificial Sequence
  MKO10082460_B_Dusp12
  gRNA
caagcagtaccgtttacaaa

SEQ ID NO: 82461 - DNA, 20 bp, Artificial Sequence
  MKO10082461_B_Dusp12
  gRNA
atggcaactgaaactgtatg

SEQ ID NO: 82462 - DNA, 20 bp, Artificial Sequence
  MKO10082462_B_Dusp13
  gRNA
ggggctagcgttctcacaga

SEQ ID NO: 82463 - DNA, 20 bp, Artificial Sequence
  MKO10082463_B_Dusp13
  gRNA
gtgagaacgctagccccact

SEQ ID NO: 82464 - DNA, 20 bp, Artificial Sequence
  MKO10082464_B_Dusp13
  gRNA
cacgattggggaagatccat

SEQ ID NO: 82465 - DNA, 20 bp, Artificial Sequence
  MKO10082465_B_Dusp14
  gRNA
cacgctcccacggactctca

SEQ ID NO: 82466 - DNA, 20 bp, Artificial Sequence
  MKO10082466_B_Dusp14
  gRNA
tgatgacgcaggtgatgccg

SEQ ID NO: 82467 - DNA, 20 bp, Artificial Sequence
  MKO10082467_B_Dusp14
  gRNA
gagccagcgtggcctccaac

SEQ ID NO: 82468 - DNA, 20 bp, Artificial Sequence
  MKO10082468_B_Dusp15
  gRNA
gctcaccaatgaagtttcca

SEQ ID NO: 82469 - DNA, 20 bp, Artificial Sequence
  MKO10082469_B_Dusp15
  gRNA
catggggaatggcatgacca

SEQ ID NO: 82470 - DNA, 20 bp, Artificial Sequence
  MKO10082470_B_Dusp15
  gRNA
tgatatgtgtgatcttattc

SEQ ID NO: 82471 - DNA, 20 bp, Artificial Sequence
  MKO10082471_B_Dusp16
  gRNA
acgacagagaaccaacatct

SEQ ID NO: 82472 - DNA, 20 bp, Artificial Sequence
  MKO10082472_B_Dusp16
  gRNA
tatgaagtcaggctttggac

SEQ ID NO: 82473 - DNA, 20 bp, Artificial Sequence
  MKO10082473_B_Dusp16
  gRNA
tgacattgactgcaatcaga

SEQ ID NO: 82474 - DNA, 20 bp, Artificial Sequence
  MKO10082474_B_Dusp18
  gRNA
agtcatcaacgtctcagtag

SEQ ID NO: 82475 - DNA, 20 bp, Artificial Sequence
  MKO10082475_B_Dusp18
  gRNA
cttacagtgggatcatcaaa

SEQ ID NO: 82476 - DNA, 20 bp, Artificial Sequence
  MKO10082476_B_Dusp18
  gRNA
atactggatatcctcgtaga

SEQ ID NO: 82477 - DNA, 20 bp, Artificial Sequence
  MKO10082477_B_Dusp19
  gRNA
gcttaataacgccaacttgc

SEQ ID NO: 82478 - DNA, 20 bp, Artificial Sequence
  MKO10082478_B_Dusp19
  gRNA
acaggatgctgctcatgacc

SEQ ID NO: 82479 - DNA, 20 bp, Artificial Sequence
  MKO10082479_B_Dusp19
  gRNA
atataagaccatttctatac

SEQ ID NO: 82480 - DNA, 20 bp, Artificial Sequence
  MKO10082480_B_Dusp1
  gRNA
tagtacccctctctacgatc

SEQ ID NO: 82481 - DNA, 20 bp, Artificial Sequence
  MKO10082481_B_Dusp1
  gRNA
gtcaatagcctcgttgaacc

SEQ ID NO: 82482 - DNA, 20 bp, Artificial Sequence
  MKO10082482_B_Dusp1
  gRNA
attggctgagacgttgatca

SEQ ID NO: 82483 - DNA, 20 bp, Artificial Sequence
  MKO10082483_B_Dusp21
  gRNA
acgctgttgcactgtgccgc

SEQ ID NO: 82484 - DNA, 20 bp, Artificial Sequence
  MKO10082484_B_Dusp21
  gRNA
tccgtctcaagctacccaac

SEQ ID NO: 82485 - DNA, 20 bp, Artificial Sequence
  MKO10082485_B_Dusp21
  gRNA
tggggtcgaaaaagtcatag

SEQ ID NO: 82486 - DNA, 20 bp, Artificial Sequence
  MKO10082486_B_Dusp22
  gRNA
ccggcgcggccatggggagt

SEQ ID NO: 82487 - DNA, 20 bp, Artificial Sequence
  MKO10082487_B_Dusp22
  gRNA
ctttgaagttgccaatgtac

SEQ ID NO: 82488 - DNA, 20 bp, Artificial Sequence
  MKO10082488_B_Dusp22
  gRNA
gagatgcagaacagttgagc

SEQ ID NO: 82489 - DNA, 20 bp, Artificial Sequence
  MKO10082489_B_Dusp23
  gRNA
cgaggccaatgcccggggag

SEQ ID NO: 82490 - DNA, 20 bp, Artificial Sequence
  MKO10082490_B_Dusp23
  gRNA
ctcctgttcatacgtctcaa

SEQ ID NO: 82491 - DNA, 20 bp, Artificial Sequence
  MKO10082491_B_Dusp23
  gRNA
gccagtccggccagccgtcc

SEQ ID NO: 82492 - DNA, 20 bp, Artificial Sequence
  MKO10082492_B_Dusp26
  gRNA
ctggctggctcagcgcccga

SEQ ID NO: 82493 - DNA, 20 bp, Artificial Sequence
  MKO10082493_B_Dusp26
  gRNA
cccccaaccggggcttcttg

SEQ ID NO: 82494 - DNA, 20 bp, Artificial Sequence
  MKO10082494_B_Dusp26
  gRNA
agtgagcagatccgctaccc

SEQ ID NO: 82495 - DNA, 20 bp, Artificial Sequence
  MKO10082495_B_Dusp27
  gRNA
accttcgttgatgatctgtt

SEQ ID NO: 82496 - DNA, 20 bp, Artificial Sequence
  MKO10082496_B_Dusp27
  gRNA
caaccgtgtccgtgagaaga

SEQ ID NO: 82497 - DNA, 20 bp, Artificial Sequence
  MKO10082497_B_Dusp27
  gRNA
gcaagaggcccctcggaatg

SEQ ID NO: 82498 - DNA, 20 bp, Artificial Sequence
  MKO10082498_B_Dusp28
  gRNA
ccgagcccaatttggggttc

SEQ ID NO: 82499 - DNA, 20 bp, Artificial Sequence
  MKO10082499_B_Dusp28
  gRNA
cgtgttcgacgacccagctg

SEQ ID NO: 82500 - DNA, 20 bp, Artificial Sequence
  MKO10082500_B_Dusp28
  gRNA
ctcagctgggtcgtcgaaca

SEQ ID NO: 82501 - DNA, 20 bp, Artificial Sequence
  MKO10082501_B_Dusp2
  gRNA
gagaactgctgtgatgccgc

SEQ ID NO: 82502 - DNA, 20 bp, Artificial Sequence
  MKO10082502_B_Dusp2
  gRNA
ttgactttgttaagcaacgt

SEQ ID NO: 82503 - DNA, 20 bp, Artificial Sequence
  MKO10082503_B_Dusp2
  gRNA
ctatgaagctgatagcctcc

SEQ ID NO: 82504 - DNA, 20 bp, Artificial Sequence
  MKO10082504_B_Dusp3
  gRNA
caccgagagttcgaacgagc

SEQ ID NO: 82505 - DNA, 20 bp, Artificial Sequence
  MKO10082505_B_Dusp3
  gRNA
caccagtgctagcttctacg

SEQ ID NO: 82506 - DNA, 20 bp, Artificial Sequence
  MKO10082506_B_Dusp3
  gRNA
ccacgtcctgaatgctgccg

SEQ ID NO: 82507 - DNA, 20 bp, Artificial Sequence
  MKO10082507_B_Dusp4
  gRNA
ccttgtggttgtcttcgacg

SEQ ID NO: 82508 - DNA, 20 bp, Artificial Sequence
  MKO10082508_B_Dusp4
  gRNA
tggaaccccgctgcacgacc

SEQ ID NO: 82509 - DNA, 20 bp, Artificial Sequence
  MKO10082509_B_Dusp4
  gRNA
ttctgccgcagacgcagtaa

SEQ ID NO: 82510 - DNA, 20 bp, Artificial Sequence
  MKO10082510_B_Dusp5
  gRNA
ggaactcgcacttggatgcg

SEQ ID NO: 82511 - DNA, 20 bp, Artificial Sequence
  MKO10082511_B_Dusp5
  gRNA
cctctgcttgacgtaatcga

SEQ ID NO: 82512 - DNA, 20 bp, Artificial Sequence
  MKO10082512_B_Dusp5
  gRNA
ccttcgattacgtcaagcag

SEQ ID NO: 82513 - DNA, 20 bp, Artificial Sequence
  MKO10082513_B_Dusp6
  gRNA
gctgcacgagccgtctagat

SEQ ID NO: 82514 - DNA, 20 bp, Artificial Sequence
  MKO10082514_B_Dusp6
  gRNA
ctcttccaacacgtccaagt

SEQ ID NO: 82515 - DNA, 20 bp, Artificial Sequence
  MKO10082515_B_Dusp6
  gRNA
gtgcctttcacgtagactgc

SEQ ID NO: 82516 - DNA, 20 bp, Artificial Sequence
  MKO10082516_B_Dusp7
  gRNA
gtggactcgagcgtgttgat

SEQ ID NO: 82517 - DNA, 20 bp, Artificial Sequence
  MKO10082517_B_Dusp7
  gRNA
cgtatttgccaagtacatcc

SEQ ID NO: 82518 - DNA, 20 bp, Artificial Sequence
  MKO10082518_B_Dusp7
  gRNA
atccgactcagtggcactgc

SEQ ID NO: 82519 - DNA, 20 bp, Artificial Sequence
  MKO10082519_B_Dusp8
  gRNA
cgcgtacatcatgaaaacca

SEQ ID NO: 82520 - DNA, 20 bp, Artificial Sequence
  MKO10082520_B_Dusp8
  gRNA
gaggctcatggacggtagag

SEQ ID NO: 82521 - DNA, 20 bp, Artificial Sequence
  MKO10082521_B_Dusp8
  gRNA
gacaagtccatcgagtttat

SEQ ID NO: 82522 - DNA, 20 bp, Artificial Sequence
  MKO10082522_B_Dusp9
  gRNA
tcggtgcggtcgctcttgcc

SEQ ID NO: 82523 - DNA, 20 bp, Artificial Sequence
  MKO10082523_B_Dusp9
  gRNA
tgctcgagattcagccaatt

SEQ ID NO: 82524 - DNA, 20 bp, Artificial Sequence
  MKO10082524_B_Dusp9
  gRNA
gaccgtgacaccttgagctg

SEQ ID NO: 82525 - DNA, 20 bp, Artificial Sequence
  MKO10082525_B_Dut
  gRNA
tccagctggtgtcatagacg

SEQ ID NO: 82526 - DNA, 20 bp, Artificial Sequence
  MKO10082526_B_Dut
  gRNA
tgattatacaatatcaccca

SEQ ID NO: 82527 - DNA, 20 bp, Artificial Sequence
  MKO10082527_B_Dut
  gRNA
tttacagccaagccagaacg

SEQ ID NO: 82528 - DNA, 20 bp, Artificial Sequence
  MKO10082528_B_Duxbl1
  gRNA
ttcaaaagcatagaaaaata

SEQ ID NO: 82529 - DNA, 20 bp, Artificial Sequence
  MKO10082529_B_Duxbl1
  gRNA
cgtacatgaatcctggattc

SEQ ID NO: 82530 - DNA, 20 bp, Artificial Sequence
  MKO10082530_B_Duxbl1
  gRNA
aatcagttaaagaagctaga

SEQ ID NO: 82531 - DNA, 20 bp, Artificial Sequence
  MKO10082531_B_Duxbl2
  gRNA
ttcaaaagcatagaaaaata

SEQ ID NO: 82532 - DNA, 20 bp, Artificial Sequence
  MKO10082532_B_Duxbl2
  gRNA
cgtacatgaatcctggattc

SEQ ID NO: 82533 - DNA, 20 bp, Artificial Sequence
  MKO10082533_B_Duxbl2
  gRNA
aatcagttaaagaagctaga

SEQ ID NO: 82534 - DNA, 20 bp, Artificial Sequence
  MKO10082534_B_Duxbl3
  gRNA
ttcaaaagcatagaaaaata

SEQ ID NO: 82535 - DNA, 20 bp, Artificial Sequence
  MKO10082535_B_Duxbl3
  gRNA
cgtacatgaatcctggattc

SEQ ID NO: 82536 - DNA, 20 bp, Artificial Sequence
  MKO10082536_B_Duxbl3
  gRNA
aatcagttaaagaagctaga

SEQ ID NO: 82537 - DNA, 20 bp, Artificial Sequence
  MKO10082537_B_Dux
  gRNA
tgtggcgccgccgagctctt

SEQ ID NO: 82538 - DNA, 20 bp, Artificial Sequence
  MKO10082538_B_Dux
  gRNA
ccgtggagcaggccaacaag

SEQ ID NO: 82539 - DNA, 20 bp, Artificial Sequence
  MKO10082539_B_Dux
  gRNA
cagaaggagggcaagtcgct

SEQ ID NO: 82540 - DNA, 20 bp, Artificial Sequence
  MKO10082540_B_Dvl1
  gRNA
tcccgccgccgatcccctct

SEQ ID NO: 82541 - DNA, 20 bp, Artificial Sequence
  MKO10082541_B_Dvl1
  gRNA
caggcggcattggggactcc

SEQ ID NO: 82542 - DNA, 20 bp, Artificial Sequence
  MKO10082542_B_Dvl1
  gRNA
ccgagtgagcgccctcagcc

SEQ ID NO: 82543 - DNA, 20 bp, Artificial Sequence
  MKO10082543_B_Dvl2
  gRNA
cctcagtgatacgacagatt

SEQ ID NO: 82544 - DNA, 20 bp, Artificial Sequence
  MKO10082544_B_Dvl2
  gRNA
catcctcatccgagtctcct

SEQ ID NO: 82545 - DNA, 20 bp, Artificial Sequence
  MKO10082545_B_Dvl2
  gRNA
ccagtggaattggggactca

SEQ ID NO: 82546 - DNA, 20 bp, Artificial Sequence
  MKO10082546_B_Dvl3
  gRNA
cctcctgtgcgttccatcga

SEQ ID NO: 82547 - DNA, 20 bp, Artificial Sequence
  MKO10082547_B_Dvl3
  gRNA
ccctttagccctcatgctag

SEQ ID NO: 82548 - DNA, 20 bp, Artificial Sequence
  MKO10082548_B_Dvl3
  gRNA
gacgggttgtcagcacagaa

SEQ ID NO: 82549 - DNA, 20 bp, Artificial Sequence
  MKO10082549_B_Dxo
  gRNA
ctctgtgctacgcagccgcc

SEQ ID NO: 82550 - DNA, 20 bp, Artificial Sequence
  MKO10082550_B_Dxo
  gRNA
tttgagcagtacatgtgcgc

SEQ ID NO: 82551 - DNA, 20 bp, Artificial Sequence
  MKO10082551_B_Dxo
  gRNA
cccctccagaatgaccgaga

SEQ ID NO: 82552 - DNA, 20 bp, Artificial Sequence
  MKO10082552_B_Dydc1
  gRNA
acagagagaaatgattacgt

SEQ ID NO: 82553 - DNA, 20 bp, Artificial Sequence
  MKO10082553_B_Dydc1
  gRNA
tgagagagaattagccatga

SEQ ID NO: 82554 - DNA, 20 bp, Artificial Sequence
  MKO10082554_B_Dydc1
  gRNA
gtagcagttggcattccagt

SEQ ID NO: 82555 - DNA, 20 bp, Artificial Sequence
  MKO10082555_B_Dydc2
  gRNA
ctacagttatactcctataa

SEQ ID NO: 82556 - DNA, 20 bp, Artificial Sequence
  MKO10082556_B_Dydc2
  gRNA
cccttgaggagaagactatg

SEQ ID NO: 82557 - DNA, 20 bp, Artificial Sequence
  MKO10082557_B_Dydc2
  gRNA
attaccctagagaaggcaag

SEQ ID NO: 82558 - DNA, 20 bp, Artificial Sequence
  MKO10082558_B_Dym
  gRNA
ctattacttactgtagctgc

SEQ ID NO: 82559 - DNA, 20 bp, Artificial Sequence
  MKO10082559_B_Dym
  gRNA
cagttctgagttgaagctat

SEQ ID NO: 82560 - DNA, 20 bp, Artificial Sequence
  MKO10082560_B_Dym
  gRNA
tgcagagcaactcttccaga

SEQ ID NO: 82561 - DNA, 20 bp, Artificial Sequence
  MKO10082561_B_Dynap
  gRNA
cttgaatgttgagcaaaacg

SEQ ID NO: 82562 - DNA, 20 bp, Artificial Sequence
  MKO10082562_B_Dynap
  gRNA
aaggagtccttactgttcaa

SEQ ID NO: 82563 - DNA, 20 bp, Artificial Sequence
  MKO10082563_B_Dynap
  gRNA
tgtggttggagatgacgtag

SEQ ID NO: 82564 - DNA, 20 bp, Artificial Sequence
  MKO10082564_B_Dync1h1
  gRNA
caaaggtgaccaagcttgac

SEQ ID NO: 82565 - DNA, 20 bp, Artificial Sequence
  MKO10082565_B_Dync1h1
  gRNA
ggcttgtctgcatcaatcac

SEQ ID NO: 82566 - DNA, 20 bp, Artificial Sequence
  MKO10082566_B_Dync1h1
  gRNA
aaagagtgcagtgtctcata

SEQ ID NO: 82567 - DNA, 20 bp, Artificial Sequence
  MKO10082567_B_Dync1i1
  gRNA
gcgcttagcacagataagag

SEQ ID NO: 82568 - DNA, 20 bp, Artificial Sequence
  MKO10082568_B_Dync1i1
  gRNA
gccccagatcgcccgagtct

SEQ ID NO: 82569 - DNA, 20 bp, Artificial Sequence
  MKO10082569_B_Dync1i1
  gRNA
caggagacgactgcacaagc

SEQ ID NO: 82570 - DNA, 20 bp, Artificial Sequence
  MKO10082570_B_Dync1i2
  gRNA
tcaaagcatgggactaacta

SEQ ID NO: 82571 - DNA, 20 bp, Artificial Sequence
  MKO10082571_B_Dync1i2
  gRNA
gtgctcaccgacttggagga

SEQ ID NO: 82572 - DNA, 20 bp, Artificial Sequence
  MKO10082572_B_Dync1i2
  gRNA
aagtgatttaaaagctgagt

SEQ ID NO: 82573 - DNA, 20 bp, Artificial Sequence
  MKO10082573_B_Dync1li1
  gRNA
taaatgtgcacgacgaagac

SEQ ID NO: 82574 - DNA, 20 bp, Artificial Sequence
  MKO10082574_B_Dync1li1
  gRNA
cgtcgtgcacatttaagtac

SEQ ID NO: 82575 - DNA, 20 bp, Artificial Sequence
  MKO10082575_B_Dync1li1
  gRNA
gagcttggagcgcgagcgcg

SEQ ID NO: 82576 - DNA, 20 bp, Artificial Sequence
  MKO10082576_B_Dync1li2
  gRNA
gattatatcgagcctgaaga

SEQ ID NO: 82577 - DNA, 20 bp, Artificial Sequence
  MKO10082577_B_Dync1li2
  gRNA
ggtcctcatcatgaacgctg

SEQ ID NO: 82578 - DNA, 20 bp, Artificial Sequence
  MKO10082578_B_Dync1li2
  gRNA
gcgaagtgtccacccgtgcc

SEQ ID NO: 82579 - DNA, 20 bp, Artificial Sequence
  MKO10082579_B_Dync2h1
  gRNA
agatgcagcatacgtgactc

SEQ ID NO: 82580 - DNA, 20 bp, Artificial Sequence
  MKO10082580_B_Dync2h1
  gRNA
caaacacctgtcgtactgct

SEQ ID NO: 82581 - DNA, 20 bp, Artificial Sequence
  MKO10082581_B_Dync2h1
  gRNA
gtcttccttaagtttcagct

SEQ ID NO: 82582 - DNA, 20 bp, Artificial Sequence
  MKO10082582_B_Dync2li1
  gRNA
gggtggaggaacctccttgc

SEQ ID NO: 82583 - DNA, 20 bp, Artificial Sequence
  MKO10082583_B_Dync2li1
  gRNA
acttatgcagtgaaactctc

SEQ ID NO: 82584 - DNA, 20 bp, Artificial Sequence
  MKO10082584_B_Dync2li1
  gRNA
cttacctgtcaagacacctt

SEQ ID NO: 82585 - DNA, 20 bp, Artificial Sequence
  MKO10082585_B_Dynll1
  gRNA
accagatttgaacagaagaa

SEQ ID NO: 82586 - DNA, 20 bp, Artificial Sequence
  MKO10082586_B_Dynll1
  gRNA
ggagaagtacaacatcgaga

SEQ ID NO: 82587 - DNA, 20 bp, Artificial Sequence
  MKO10082587_B_Dynll1
  gRNA
gatcaaaaatgcagacatgt

SEQ ID NO: 82588 - DNA, 20 bp, Artificial Sequence
  MKO10082588_B_Dynll2
  gRNA
ccagcttaccttcttgatat

SEQ ID NO: 82589 - DNA, 20 bp, Artificial Sequence
  MKO10082589_B_Dynll2
  gRNA
cccacgatacaatgccaggt

SEQ ID NO: 82590 - DNA, 20 bp, Artificial Sequence
  MKO10082590_B_Dynll2
  gRNA
tgcaatcctcctcttcaagt

SEQ ID NO: 82591 - DNA, 20 bp, Artificial Sequence
  MKO10082591_B_Dynlrb1
  gRNA
tgatgccctgcactcctttc

SEQ ID NO: 82592 - DNA, 20 bp, Artificial Sequence
  MKO10082592_B_Dynlrb1
  gRNA
atcatcgtggtgaacacaga

SEQ ID NO: 82593 - DNA, 20 bp, Artificial Sequence
  MKO10082593_B_Dynlrb1
  gRNA
catgcacaacttcatcttga

SEQ ID NO: 82594 - DNA, 20 bp, Artificial Sequence
  MKO10082594_B_Dynlrb2
  gRNA
tcacagcaggtctactcaca

SEQ ID NO: 82595 - DNA, 20 bp, Artificial Sequence
  MKO10082595_B_Dynlrb2
  gRNA
acgatggtggtcaatgcaga

SEQ ID NO: 82596 - DNA, 20 bp, Artificial Sequence
  MKO10082596_B_Dynlrb2
  gRNA
ttgtccagggttgttcggat

SEQ ID NO: 82597 - DNA, 20 bp, Artificial Sequence
  MKO10082597_B_Dynlt1a
  gRNA
tgtgtgatcatgcagaagaa

SEQ ID NO: 82598 - DNA, 20 bp, Artificial Sequence
  MKO10082598_B_Dynlt1a
  gRNA
tgtggagctgtcccagaagc

SEQ ID NO: 82599 - DNA, 20 bp, Artificial Sequence
  MKO10082599_B_Dynlt1a
  gRNA
caggaagctgcacagtccga

SEQ ID NO: 82600 - DNA, 20 bp, Artificial Sequence
  MKO10082600_B_Dynlt1b
  gRNA
tgtggagctgtcccagaagc

SEQ ID NO: 82601 - DNA, 20 bp, Artificial Sequence
  MKO10082601_B_Dynlt1b
  gRNA
tgtgtgatcatgcagaagaa

SEQ ID NO: 82602 - DNA, 20 bp, Artificial Sequence
  MKO10082602_B_Dynlt1b
  gRNA
tggtcagatggacagtccga

SEQ ID NO: 82603 - DNA, 20 bp, Artificial Sequence
  MKO10082603_B_Dynlt1c
  gRNA
tgtggagctgtcccagaagc

SEQ ID NO: 82604 - DNA, 20 bp, Artificial Sequence
  MKO10082604_B_Dynlt1c
  gRNA
tgtgtgatcatgcagaagaa

SEQ ID NO: 82605 - DNA, 20 bp, Artificial Sequence
  MKO10082605_B_Dynlt1c
  gRNA
tggtcagatggacagtccga

SEQ ID NO: 82606 - DNA, 20 bp, Artificial Sequence
  MKO10082606_B_Dynlt1f
  gRNA
tgtgtgatcatgcagaagaa

SEQ ID NO: 82607 - DNA, 20 bp, Artificial Sequence
  MKO10082607_B_Dynlt1f
  gRNA
tgtggagctgtcccagaagc

SEQ ID NO: 82608 - DNA, 20 bp, Artificial Sequence
  MKO10082608_B_Dynlt1f
  gRNA
caggaagctgcacagtccga

SEQ ID NO: 82609 - DNA, 20 bp, Artificial Sequence
  MKO10082609_B_Dynlt3
  gRNA
gttctcccatctgatggtac

SEQ ID NO: 82610 - DNA, 20 bp, Artificial Sequence
  MKO10082610_B_Dynlt3
  gRNA
agatgttgtatcccaaaaac

SEQ ID NO: 82611 - DNA, 20 bp, Artificial Sequence
  MKO10082611_B_Dynlt3
  gRNA
caggaacctgtaccatcaga

SEQ ID NO: 82612 - DNA, 20 bp, Artificial Sequence
  MKO10082612_B_Dyrk1a
  gRNA
caagcagccgcacttctatc

SEQ ID NO: 82613 - DNA, 20 bp, Artificial Sequence
  MKO10082613_B_Dyrk1a
  gRNA
atcaagcccagatagaagtg

SEQ ID NO: 82614 - DNA, 20 bp, Artificial Sequence
  MKO10082614_B_Dyrk1a
  gRNA
gcagcatggaatgagaacga

SEQ ID NO: 82615 - DNA, 20 bp, Artificial Sequence
  MKO10082615_B_Dyrk1b
  gRNA
ggcccaacaggcgccacccc

SEQ ID NO: 82616 - DNA, 20 bp, Artificial Sequence
  MKO10082616_B_Dyrk1b
  gRNA
atggcctggtgggacggcca

SEQ ID NO: 82617 - DNA, 20 bp, Artificial Sequence
  MKO10082617_B_Dyrk1b
  gRNA
cccaccatggccgtcccacc

SEQ ID NO: 82618 - DNA, 20 bp, Artificial Sequence
  MKO10082618_B_Dyrk2
  gRNA
cgaccagggatcgtacgtgc

SEQ ID NO: 82619 - DNA, 20 bp, Artificial Sequence
  MKO10082619_B_Dyrk2
  gRNA
agcggcggccgaaggtttcc

SEQ ID NO: 82620 - DNA, 20 bp, Artificial Sequence
  MKO10082620_B_Dyrk2
  gRNA
caccgccgttcgccagcttc

SEQ ID NO: 82621 - DNA, 20 bp, Artificial Sequence
  MKO10082621_B_Dyrk3
  gRNA
cgtccttcctcccgcgatcg

SEQ ID NO: 82622 - DNA, 20 bp, Artificial Sequence
  MKO10082622_B_Dyrk3
  gRNA
gttgctgaatgtgtccgaat

SEQ ID NO: 82623 - DNA, 20 bp, Artificial Sequence
  MKO10082623_B_Dyrk3
  gRNA
cctacttacatttagccttc

SEQ ID NO: 82624 - DNA, 20 bp, Artificial Sequence
  MKO10082624_B_Dyrk4
  gRNA
aaagtccctcttacagtagc

SEQ ID NO: 82625 - DNA, 20 bp, Artificial Sequence
  MKO10082625_B_Dyrk4
  gRNA
atcttacctgctactgtaag

SEQ ID NO: 82626 - DNA, 20 bp, Artificial Sequence
  MKO10082626_B_Dyrk4
  gRNA
gcagagtttcacctctgtga

SEQ ID NO: 82627 - DNA, 20 bp, Artificial Sequence
  MKO10082627_B_Dysf
  gRNA
tacccccgtgggttgctgct

SEQ ID NO: 82628 - DNA, 20 bp, Artificial Sequence
  MKO10082628_B_Dysf
  gRNA
ccaggcaccagatccatgtc

SEQ ID NO: 82629 - DNA, 20 bp, Artificial Sequence
  MKO10082629_B_Dysf
  gRNA
ggtcaaggaccatgagacga

SEQ ID NO: 82630 - DNA, 20 bp, Artificial Sequence
  MKO10082630_B_Dytn
  gRNA
cagtgcgctgaaacagctcc

SEQ ID NO: 82631 - DNA, 20 bp, Artificial Sequence
  MKO10082631_B_Dytn
  gRNA
tcaaaactcttcgggtcatg

SEQ ID NO: 82632 - DNA, 20 bp, Artificial Sequence
  MKO10082632_B_Dytn
  gRNA
ctgctgtagatctgttagta

SEQ ID NO: 82633 - DNA, 20 bp, Artificial Sequence
  MKO10082633_B_Dyx1c1
  gRNA
acttaccacccggcacagaa

SEQ ID NO: 82634 - DNA, 20 bp, Artificial Sequence
  MKO10082634_B_Dyx1c1
  gRNA
gctgatttgaatactgccag

SEQ ID NO: 82635 - DNA, 20 bp, Artificial Sequence
  MKO10082635_B_Dyx1c1
  gRNA
ctctatgctcctatagatga

SEQ ID NO: 82636 - DNA, 20 bp, Artificial Sequence
  MKO10082636_B_Dzank1
  gRNA
tgtcaacatatattacaccc

SEQ ID NO: 82637 - DNA, 20 bp, Artificial Sequence
  MKO10082637_B_Dzank1
  gRNA
gttaaccttagacggcttgc

SEQ ID NO: 82638 - DNA, 20 bp, Artificial Sequence
  MKO10082638_B_Dzank1
  gRNA
ggactatgaaccaccgaaga

SEQ ID NO: 82639 - DNA, 20 bp, Artificial Sequence
  MKO10082639_B_Dzip1l
  gRNA
cccttgggtccacttgagct

SEQ ID NO: 82640 - DNA, 20 bp, Artificial Sequence
  MKO10082640_B_Dzip1l
  gRNA
cacatccaacgcagacatgc

SEQ ID NO: 82641 - DNA, 20 bp, Artificial Sequence
  MKO10082641_B_Dzip1l
  gRNA
gagaaaggtggcattcatga

SEQ ID NO: 82642 - DNA, 20 bp, Artificial Sequence
  MKO10082642_B_Dzip1
  gRNA
tcatgcagttcgcttctcta

SEQ ID NO: 82643 - DNA, 20 bp, Artificial Sequence
  MKO10082643_B_Dzip1
  gRNA
ttgcacagagtataatacaa

SEQ ID NO: 82644 - DNA, 20 bp, Artificial Sequence
  MKO10082644_B_Dzip1
  gRNA
cgaggtgagagtcttcagta

SEQ ID NO: 82645 - DNA, 20 bp, Artificial Sequence
  MKO10082645_B_Dzip3
  gRNA
ttaaagtggaaatcctgatg

SEQ ID NO: 82646 - DNA, 20 bp, Artificial Sequence
  MKO10082646_B_Dzip3
  gRNA
tttcttaccagctgagtgac

SEQ ID NO: 82647 - DNA, 20 bp, Artificial Sequence
  MKO10082647_B_Dzip3
  gRNA
aaaaaatgtaatgttagagc

SEQ ID NO: 82648 - DNA, 20 bp, Artificial Sequence
  MKO10082648_B_E030002O03Rik
  gRNA
gaacagtcctccagacaccc

SEQ ID NO: 82649 - DNA, 20 bp, Artificial Sequence
  MKO10082649_B_E030002O03Rik
  gRNA
ccctctcacactcacttagt

SEQ ID NO: 82650 - DNA, 20 bp, Artificial Sequence
  MKO10082650_B_E030002O03Rik
  gRNA
tgaaggatggattgtcatat

SEQ ID NO: 82651 - DNA, 20 bp, Artificial Sequence
  MKO10082651_B_E030018B13Rik
  gRNA
gaggccagagatgcagaccg

SEQ ID NO: 82652 - DNA, 20 bp, Artificial Sequence
  MKO10082652_B_E030018B13Rik
  gRNA
tcttagtttgtccttcatcc

SEQ ID NO: 82653 - DNA, 20 bp, Artificial Sequence
  MKO10082653_B_E030018B13Rik
  gRNA
catacttactcaaatctcca

SEQ ID NO: 82654 - DNA, 20 bp, Artificial Sequence
  MKO10082654_B_E030019B06Rik
  gRNA
ggggctctccatgctcaacg

SEQ ID NO: 82655 - DNA, 20 bp, Artificial Sequence
  MKO10082655_B_E030019B06Rik
  gRNA
tgctgagactctgagtgcac

SEQ ID NO: 82656 - DNA, 20 bp, Artificial Sequence
  MKO10082656_B_E030019B06Rik
  gRNA
ggtagtcctccatgtgctcc

SEQ ID NO: 82657 - DNA, 20 bp, Artificial Sequence
  MKO10082657_B_E030030I06Rik
  gRNA
agcctgaaacctgtttgctc

SEQ ID NO: 82658 - DNA, 20 bp, Artificial Sequence
  MKO10082658_B_E030030I06Rik
  gRNA
tctaagcagagcattcatat

SEQ ID NO: 82659 - DNA, 20 bp, Artificial Sequence
  MKO10082659_B_E030030I06Rik
  gRNA
agatgaggaacatgcaaatg

SEQ ID NO: 82660 - DNA, 20 bp, Artificial Sequence
  MKO10082660_B_E130012A19Rik
  gRNA
acactccaagtttgcgccga

SEQ ID NO: 82661 - DNA, 20 bp, Artificial Sequence
  MKO10082661_B_E130012A19Rik
  gRNA
gccggggagctcacgtcgct

SEQ ID NO: 82662 - DNA, 20 bp, Artificial Sequence
  MKO10082662_B_E130012A19Rik
  gRNA
ccgcgacgtctgcatcctcg

SEQ ID NO: 82663 - DNA, 20 bp, Artificial Sequence
  MKO10082663_B_E130308A19Rik
  gRNA
gtgccggccatgcgtaccac

SEQ ID NO: 82664 - DNA, 20 bp, Artificial Sequence
  MKO10082664_B_E130308A19Rik
  gRNA
cagatcgagcttcgctgcaa

SEQ ID NO: 82665 - DNA, 20 bp, Artificial Sequence
  MKO10082665_B_E130308A19Rik
  gRNA
gtgggcccagctgaccaatt

SEQ ID NO: 82666 - DNA, 20 bp, Artificial Sequence
  MKO10082666_B_E130309D02Rik
  gRNA
cgtgtgtcggatccccgtgt

SEQ ID NO: 82667 - DNA, 20 bp, Artificial Sequence
  MKO10082667_B_E130309D02Rik
  gRNA
gctccacctgagcgtcctgc

SEQ ID NO: 82668 - DNA, 20 bp, Artificial Sequence
  MKO10082668_B_E130309D02Rik
  gRNA
cggtcacggacgttatgaac

SEQ ID NO: 82669 - DNA, 20 bp, Artificial Sequence
  MKO10082669_B_E130309D14Rik
  gRNA
atccatgagcgcagctagcg

SEQ ID NO: 82670 - DNA, 20 bp, Artificial Sequence
  MKO10082670_B_E130309D14Rik
  gRNA
ccaggtgcaggtctcgaagc

SEQ ID NO: 82671 - DNA, 20 bp, Artificial Sequence
  MKO10082671_B_E130309D14Rik
  gRNA
cctgcttcgagacctgcacc

SEQ ID NO: 82672 - DNA, 20 bp, Artificial Sequence
  MKO10082672_B_E130309F12Rik
  gRNA
aagtgatagaaaaagctcgg

SEQ ID NO: 82673 - DNA, 20 bp, Artificial Sequence
  MKO10082673_B_E130309F12Rik
  gRNA
gaggagaaaatgatcctgac

SEQ ID NO: 82674 - DNA, 20 bp, Artificial Sequence
  MKO10082674_B_E130309F12Rik
  gRNA
aatgctcagagcagcatgtt

SEQ ID NO: 82675 - DNA, 20 bp, Artificial Sequence
  MKO10082675_B_E130311K13Rik
  gRNA
gagccgaggtctgctccagc

SEQ ID NO: 82676 - DNA, 20 bp, Artificial Sequence
  MKO10082676_B_E130311K13Rik
  gRNA
tacttgccttgttcactagt

SEQ ID NO: 82677 - DNA, 20 bp, Artificial Sequence
  MKO10082677_B_E130311K13Rik
  gRNA
ttacagcggataactgagtg

SEQ ID NO: 82678 - DNA, 20 bp, Artificial Sequence
  MKO10082678_B_E230008N13Rik
  gRNA
gttcacctatgttgtccatg

SEQ ID NO: 82679 - DNA, 20 bp, Artificial Sequence
  MKO10082679_B_E230008N13Rik
  gRNA
gaaagctcgccagtgcgctc

SEQ ID NO: 82680 - DNA, 20 bp, Artificial Sequence
  MKO10082680_B_E230008N13Rik
  gRNA
tgacatgattgcttctcaag

SEQ ID NO: 82681 - DNA, 20 bp, Artificial Sequence
  MKO10082681_B_E230019M04Rik
  gRNA
tgaaattcaaattgacatcc

SEQ ID NO: 82682 - DNA, 20 bp, Artificial Sequence
  MKO10082682_B_E230019M04Rik
  gRNA
tcacagccattcctgaaccc

SEQ ID NO: 82683 - DNA, 20 bp, Artificial Sequence
  MKO10082683_B_E230019M04Rik
  gRNA
gtgatgaaagtgaaaacatc

SEQ ID NO: 82684 - DNA, 20 bp, Artificial Sequence
  MKO10082684_B_E230025N22Rik
  gRNA
ggtcccgagcctgtccaata

SEQ ID NO: 82685 - DNA, 20 bp, Artificial Sequence
  MKO10082685_B_E230025N22Rik
  gRNA
tgcctctgagctgtacctaa

SEQ ID NO: 82686 - DNA, 20 bp, Artificial Sequence
  MKO10082686_B_E230025N22Rik
  gRNA
tgtgctttgcactctcagtc

SEQ ID NO: 82687 - DNA, 20 bp, Artificial Sequence
  MKO10082687_B_E2f1
  gRNA
tctgaccaccaaacgcttct

SEQ ID NO: 82688 - DNA, 20 bp, Artificial Sequence
  MKO10082688_B_E2f1
  gRNA
ctgcaatgctgcgaaggtcc

SEQ ID NO: 82689 - DNA, 20 bp, Artificial Sequence
  MKO10082689_B_E2f1
  gRNA
agtccaagaatcatatccag

SEQ ID NO: 82690 - DNA, 20 bp, Artificial Sequence
  MKO10082690_B_E2f2
  gRNA
gtccggaattcagggaccgt

SEQ ID NO: 82691 - DNA, 20 bp, Artificial Sequence
  MKO10082691_B_E2f2
  gRNA
cttctaacctcggccctgtc

SEQ ID NO: 82692 - DNA, 20 bp, Artificial Sequence
  MKO10082692_B_E2f2
  gRNA
catttacctcctgagcgagt

SEQ ID NO: 82693 - DNA, 20 bp, Artificial Sequence
  MKO10082693_B_E2f3
  gRNA
acttcttggtgagcagaccg

SEQ ID NO: 82694 - DNA, 20 bp, Artificial Sequence
  MKO10082694_B_E2f3
  gRNA
tctgactacaggcaaagcga

SEQ ID NO: 82695 - DNA, 20 bp, Artificial Sequence
  MKO10082695_B_E2f3
  gRNA
gggtctttagaccatctgag

SEQ ID NO: 82696 - DNA, 20 bp, Artificial Sequence
  MKO10082696_B_E2f4
  gRNA
gatgtcttcatgagtcacgt

SEQ ID NO: 82697 - DNA, 20 bp, Artificial Sequence
  MKO10082697_B_E2f4
  gRNA
gccatcgggcaccagtctag

SEQ ID NO: 82698 - DNA, 20 bp, Artificial Sequence
  MKO10082698_B_E2f4
  gRNA
accgatgccttccagcacgt

SEQ ID NO: 82699 - DNA, 20 bp, Artificial Sequence
  MKO10082699_B_E2f5
  gRNA
ctacataccatttctggaat

SEQ ID NO: 82700 - DNA, 20 bp, Artificial Sequence
  MKO10082700_B_E2f5
  gRNA
atcaattccctctaagacat

SEQ ID NO: 82701 - DNA, 20 bp, Artificial Sequence
  MKO10082701_B_E2f5
  gRNA
gacatctgcaattgctttca

SEQ ID NO: 82702 - DNA, 20 bp, Artificial Sequence
  MKO10082702_B_E2f6
  gRNA
aatgccgtgaatatcctgat

SEQ ID NO: 82703 - DNA, 20 bp, Artificial Sequence
  MKO10082703_B_E2f6
  gRNA
actctccgacctgtcggcca

SEQ ID NO: 82704 - DNA, 20 bp, Artificial Sequence
  MKO10082704_B_E2f6
  gRNA
ttcgatgccatccaagacat

SEQ ID NO: 82705 - DNA, 20 bp, Artificial Sequence
  MKO10082705_B_E2f7
  gRNA
ctcatccacagcgccgtcac

SEQ ID NO: 82706 - DNA, 20 bp, Artificial Sequence
  MKO10082706_B_E2f7
  gRNA
agtcgctgcatctggtcagc

SEQ ID NO: 82707 - DNA, 20 bp, Artificial Sequence
  MKO10082707_B_E2f7
  gRNA
catactgattcttagccacc

SEQ ID NO: 82708 - DNA, 20 bp, Artificial Sequence
  MKO10082708_B_E2f8
  gRNA
ccccctgcatccgtcctcga

SEQ ID NO: 82709 - DNA, 20 bp, Artificial Sequence
  MKO10082709_B_E2f8
  gRNA
cgcgtaaggacttgtctttg

SEQ ID NO: 82710 - DNA, 20 bp, Artificial Sequence
  MKO10082710_B_E2f8
  gRNA
ggaagaccacgtggaagatc

SEQ ID NO: 82711 - DNA, 20 bp, Artificial Sequence
  MKO10082711_B_E330009J07Rik
  gRNA
tacatatagcggtgaataga

SEQ ID NO: 82712 - DNA, 20 bp, Artificial Sequence
  MKO10082712_B_E330009J07Rik
  gRNA
gccagatgagagtaatgtcc

SEQ ID NO: 82713 - DNA, 20 bp, Artificial Sequence
  MKO10082713_B_E330009J07Rik
  gRNA
gagttcaagtctatggccag

SEQ ID NO: 82714 - DNA, 20 bp, Artificial Sequence
  MKO10082714_B_E330014E10Rik
  gRNA
ccacaggaggccaaaacttc

SEQ ID NO: 82715 - DNA, 20 bp, Artificial Sequence
  MKO10082715_B_E330014E10Rik
  gRNA
tatccatgtttactgcaaac

SEQ ID NO: 82716 - DNA, 20 bp, Artificial Sequence
  MKO10082716_B_E330014E10Rik
  gRNA
cctaatttcacagacagact

SEQ ID NO: 82717 - DNA, 20 bp, Artificial Sequence
  MKO10082717_B_E330017A01Rik
  gRNA
acctaaaagtgccttactaa

SEQ ID NO: 82718 - DNA, 20 bp, Artificial Sequence
  MKO10082718_B_E330017A01Rik
  gRNA
gtggtggctttatgatctcc

SEQ ID NO: 82719 - DNA, 20 bp, Artificial Sequence
  MKO10082719_B_E330017A01Rik
  gRNA
cacgacgtgcagcagccttt

SEQ ID NO: 82720 - DNA, 20 bp, Artificial Sequence
  MKO10082720_B_E330021D16Rik
  gRNA
cgagtcctacccatcttcac

SEQ ID NO: 82721 - DNA, 20 bp, Artificial Sequence
  MKO10082721_B_E330021D16Rik
  gRNA
tctctgtacaagcaactatc

SEQ ID NO: 82722 - DNA, 20 bp, Artificial Sequence
  MKO10082722_B_E330021D16Rik
  gRNA
aacacgactcgaacaaatgg

SEQ ID NO: 82723 - DNA, 20 bp, Artificial Sequence
  MKO10082723_B_E330034G19Rik
  gRNA
tcacagctgcagacctgaac

SEQ ID NO: 82724 - DNA, 20 bp, Artificial Sequence
  MKO10082724_B_E330034G19Rik
  gRNA
agcaattcctccgttctttc

SEQ ID NO: 82725 - DNA, 20 bp, Artificial Sequence
  MKO10082725_B_E330034G19Rik
  gRNA
aaaacagcagtattactttg

SEQ ID NO: 82726 - DNA, 20 bp, Artificial Sequence
  MKO10082726_B_E430018J23Rik
  gRNA
cagagcgatgcgtgaaagct

SEQ ID NO: 82727 - DNA, 20 bp, Artificial Sequence
  MKO10082727_B_E430018J23Rik
  gRNA
acaaaccagcgctcatctgc

SEQ ID NO: 82728 - DNA, 20 bp, Artificial Sequence
  MKO10082728_B_E430018J23Rik
  gRNA
tccacccagcagatgagcgc

SEQ ID NO: 82729 - DNA, 20 bp, Artificial Sequence
  MKO10082729_B_E430025E21Rik
  gRNA
tacctcgatgacctcaatga

SEQ ID NO: 82730 - DNA, 20 bp, Artificial Sequence
  MKO10082730_B_E430025E21Rik
  gRNA
tgtgaagccctgtacttata

SEQ ID NO: 82731 - DNA, 20 bp, Artificial Sequence
  MKO10082731_B_E430025E21Rik
  gRNA
aatacattgtagacttaaac

SEQ ID NO: 82732 - DNA, 20 bp, Artificial Sequence
  MKO10082732_B_E4f1
  gRNA
ccaagtggaattcactgcct

SEQ ID NO: 82733 - DNA, 20 bp, Artificial Sequence
  MKO10082733_B_E4f1
  gRNA
tctgccatctcgacatcccc

SEQ ID NO: 82734 - DNA, 20 bp, Artificial Sequence
  MKO10082734_B_E4f1
  gRNA
ccaaggcagtgaattccact

SEQ ID NO: 82735 - DNA, 20 bp, Artificial Sequence
  MKO10082735_B_EU599041
  gRNA
atgacactgatttatttata

SEQ ID NO: 82736 - DNA, 20 bp, Artificial Sequence
  MKO10082736_B_EU599041
  gRNA
ttgtaaagtctcttctgaga

SEQ ID NO: 82737 - DNA, 20 bp, Artificial Sequence
  MKO10082737_B_EU599041
  gRNA
atgtgcatgtacacttcact

SEQ ID NO: 82738 - DNA, 20 bp, Artificial Sequence
  MKO10082738_B_Eaf1
  gRNA
ggggtccacgccgccaatga

SEQ ID NO: 82739 - DNA, 20 bp, Artificial Sequence
  MKO10082739_B_Eaf1
  gRNA
gctgctgctccattcgagct

SEQ ID NO: 82740 - DNA, 20 bp, Artificial Sequence
  MKO10082740_B_Eaf1
  gRNA
cagtaaaatccaagctcgaa

SEQ ID NO: 82741 - DNA, 20 bp, Artificial Sequence
  MKO10082741_B_Eaf2
  gRNA
agcaaatgtggaatctgcct

SEQ ID NO: 82742 - DNA, 20 bp, Artificial Sequence
  MKO10082742_B_Eaf2
  gRNA
tgagtcagaaagcgacagtg

SEQ ID NO: 82743 - DNA, 20 bp, Artificial Sequence
  MKO10082743_B_Eaf2
  gRNA
caagaagtatcaatagaagc

SEQ ID NO: 82744 - DNA, 20 bp, Artificial Sequence
  MKO10082744_B_Eapp
  gRNA
acaggctgttgtttctgacg

SEQ ID NO: 82745 - DNA, 20 bp, Artificial Sequence
  MKO10082745_B_Eapp
  gRNA
cctgggttgacgccaagagg

SEQ ID NO: 82746 - DNA, 20 bp, Artificial Sequence
  MKO10082746_B_Eapp
  gRNA
ggtttggtagggtcttcttc

SEQ ID NO: 82747 - DNA, 20 bp, Artificial Sequence
  MKO10082747_B_Ear10
  gRNA
atttgcctcctgctgctgct

SEQ ID NO: 82748 - DNA, 20 bp, Artificial Sequence
  MKO10082748_B_Ear10
  gRNA
aatgtcccatccaagtgaac

SEQ ID NO: 82749 - DNA, 20 bp, Artificial Sequence
  MKO10082749_B_Ear10
  gRNA
attcgggactcaagcagctt

SEQ ID NO: 82750 - DNA, 20 bp, Artificial Sequence
  MKO10082750_B_Ear11
  gRNA
attgtcatgatagttcaaat

SEQ ID NO: 82751 - DNA, 20 bp, Artificial Sequence
  MKO10082751_B_Ear11
  gRNA
cactcctgtgtaactgttaa

SEQ ID NO: 82752 - DNA, 20 bp, Artificial Sequence
  MKO10082752_B_Ear11
  gRNA
aggctctgttatagatatgc

SEQ ID NO: 82753 - DNA, 20 bp, Artificial Sequence
  MKO10082753_B_Ear12
  gRNA
ctgtaaccccagaactccac

SEQ ID NO: 82754 - DNA, 20 bp, Artificial Sequence
  MKO10082754_B_Ear12
  gRNA
aatgtcccatccaagtgaac

SEQ ID NO: 82755 - DNA, 20 bp, Artificial Sequence
  MKO10082755_B_Ear12
  gRNA
ctttgtctcctgctgctgct

SEQ ID NO: 82756 - DNA, 20 bp, Artificial Sequence
  MKO10082756_B_Ear14
  gRNA
ggtgctattatagatatact

SEQ ID NO: 82757 - DNA, 20 bp, Artificial Sequence
  MKO10082757_B_Ear14
  gRNA
ccctcattacagcatcacat

SEQ ID NO: 82758 - DNA, 20 bp, Artificial Sequence
  MKO10082758_B_Ear14
  gRNA
tctgggaaaggatttgtgcc

SEQ ID NO: 82759 - DNA, 20 bp, Artificial Sequence
  MKO10082759_B_Ear1
  gRNA
ctttgtctcctgctgctgct

SEQ ID NO: 82760 - DNA, 20 bp, Artificial Sequence
  MKO10082760_B_Ear1
  gRNA
aatgtcccatccaagtgaac

SEQ ID NO: 82761 - DNA, 20 bp, Artificial Sequence
  MKO10082761_B_Ear1
  gRNA
agtcgggactcaagcagctt

SEQ ID NO: 82762 - DNA, 20 bp, Artificial Sequence
  MKO10082762_B_Ear2
  gRNA
ctgtaaccccagaactccac

SEQ ID NO: 82763 - DNA, 20 bp, Artificial Sequence
  MKO10082763_B_Ear2
  gRNA
aatgtcccatccaagtgaac

SEQ ID NO: 82764 - DNA, 20 bp, Artificial Sequence
  MKO10082764_B_Ear2
  gRNA
ctttgtctcctgctgctgct

SEQ ID NO: 82765 - DNA, 20 bp, Artificial Sequence
  MKO10082765_B_Ear3
  gRNA
ctgtaaccccagaactccac

SEQ ID NO: 82766 - DNA, 20 bp, Artificial Sequence
  MKO10082766_B_Ear3
  gRNA
aatgtcccatccaagtgaac

SEQ ID NO: 82767 - DNA, 20 bp, Artificial Sequence
  MKO10082767_B_Ear3
  gRNA
ctttgtctcctgctgctgct

SEQ ID NO: 82768 - DNA, 20 bp, Artificial Sequence
  MKO10082768_B_Ear4
  gRNA
ggtgctattatagatatact

SEQ ID NO: 82769 - DNA, 20 bp, Artificial Sequence
  MKO10082769_B_Ear4
  gRNA
ccctcattacagcatcacat

SEQ ID NO: 82770 - DNA, 20 bp, Artificial Sequence
  MKO10082770_B_Ear4
  gRNA
tctgggaaaggatttgtgcc

SEQ ID NO: 82771 - DNA, 20 bp, Artificial Sequence
  MKO10082771_B_Ear5
  gRNA
gctggcatgagacaagcgtt

SEQ ID NO: 82772 - DNA, 20 bp, Artificial Sequence
  MKO10082772_B_Ear5
  gRNA
tcccacctatccagtagttc

SEQ ID NO: 82773 - DNA, 20 bp, Artificial Sequence
  MKO10082773_B_Ear5
  gRNA
ccacccaagacttgcaaaga

SEQ ID NO: 82774 - DNA, 20 bp, Artificial Sequence
  MKO10082774_B_Ear6
  gRNA
tggctttataagtgatatgc

SEQ ID NO: 82775 - DNA, 20 bp, Artificial Sequence
  MKO10082775_B_Ear6
  gRNA
ccaatgtaatgttgaaatgc

SEQ ID NO: 82776 - DNA, 20 bp, Artificial Sequence
  MKO10082776_B_Ear6
  gRNA
gtatttaagcccttacatct

SEQ ID NO: 82777 - DNA, 20 bp, Artificial Sequence
  MKO10082777_B_Ear7
  gRNA
tggctttataagtgatatgc

SEQ ID NO: 82778 - DNA, 20 bp, Artificial Sequence
  MKO10082778_B_Ear7
  gRNA
ccaatgtaatgttgaaatgc

SEQ ID NO: 82779 - DNA, 20 bp, Artificial Sequence
  MKO10082779_B_Ear7
  gRNA
gtatttaagcccttacatct

SEQ ID NO: 82780 - DNA, 20 bp, Artificial Sequence
  MKO10082780_B_Ears2
  gRNA
tgctatccgcttccgtctag

SEQ ID NO: 82781 - DNA, 20 bp, Artificial Sequence
  MKO10082781_B_Ears2
  gRNA
aggggcagatgagcaaatcg

SEQ ID NO: 82782 - DNA, 20 bp, Artificial Sequence
  MKO10082782_B_Ears2
  gRNA
ttcagaagctccagccgctg

SEQ ID NO: 82783 - DNA, 20 bp, Artificial Sequence
  MKO10082783_B_Ebag9
  gRNA
gtttctttcagatctggcag

SEQ ID NO: 82784 - DNA, 20 bp, Artificial Sequence
  MKO10082784_B_Ebag9
  gRNA
aattaggtgacttagataca

SEQ ID NO: 82785 - DNA, 20 bp, Artificial Sequence
  MKO10082785_B_Ebag9
  gRNA
ttgtgtagctgccaatctac

SEQ ID NO: 82786 - DNA, 20 bp, Artificial Sequence
  MKO10082786_B_Ebf1
  gRNA
tctcgtgtgtgagcaatact

SEQ ID NO: 82787 - DNA, 20 bp, Artificial Sequence
  MKO10082787_B_Ebf1
  gRNA
cgacagacagggccagcccg

SEQ ID NO: 82788 - DNA, 20 bp, Artificial Sequence
  MKO10082788_B_Ebf1
  gRNA
cccagggatacggacagaac

SEQ ID NO: 82789 - DNA, 20 bp, Artificial Sequence
  MKO10082789_B_Ebf2
  gRNA
gccacttaccgttgctgtaa

SEQ ID NO: 82790 - DNA, 20 bp, Artificial Sequence
  MKO10082790_B_Ebf2
  gRNA
cagagttctgctgacacacg

SEQ ID NO: 82791 - DNA, 20 bp, Artificial Sequence
  MKO10082791_B_Ebf2
  gRNA
gattgagcgcacagccttcg

SEQ ID NO: 82792 - DNA, 20 bp, Artificial Sequence
  MKO10082792_B_Ebf3
  gRNA
cttgtagtgaatgccgttgt

SEQ ID NO: 82793 - DNA, 20 bp, Artificial Sequence
  MKO10082793_B_Ebf3
  gRNA
gtttggtcattgaatctatg

SEQ ID NO: 82794 - DNA, 20 bp, Artificial Sequence
  MKO10082794_B_Ebf3
  gRNA
catagattcaatgaccaaac

SEQ ID NO: 82795 - DNA, 20 bp, Artificial Sequence
  MKO10082795_B_Ebf4
  gRNA
agtcaataaggcgcacgtag

SEQ ID NO: 82796 - DNA, 20 bp, Artificial Sequence
  MKO10082796_B_Ebf4
  gRNA
cattattatacaccagccga

SEQ ID NO: 82797 - DNA, 20 bp, Artificial Sequence
  MKO10082797_B_Ebf4
  gRNA
tccccaggctatcatctatg

SEQ ID NO: 82798 - DNA, 20 bp, Artificial Sequence
  MKO10082798_B_Ebi3
  gRNA
gtgaaagtcgtggcttcaat

SEQ ID NO: 82799 - DNA, 20 bp, Artificial Sequence
  MKO10082799_B_Ebi3
  gRNA
cgtccttcattgccacttac

SEQ ID NO: 82800 - DNA, 20 bp, Artificial Sequence
  MKO10082800_B_Ebi3
  gRNA
cgtggagaacaggtgcacgt

SEQ ID NO: 82801 - DNA, 20 bp, Artificial Sequence
  MKO10082801_B_Ebna1bp2
  gRNA
agctccaagtccctacgaag

SEQ ID NO: 82802 - DNA, 20 bp, Artificial Sequence
  MKO10082802_B_Ebna1bp2
  gRNA
aattcagacgggatctggag

SEQ ID NO: 82803 - DNA, 20 bp, Artificial Sequence
  MKO10082803_B_Ebna1bp2
  gRNA
tctagcacgacattgagacc

SEQ ID NO: 82804 - DNA, 20 bp, Artificial Sequence
  MKO10082804_B_Ebpl
  gRNA
tgatcccaccgttgtgtctt

SEQ ID NO: 82805 - DNA, 20 bp, Artificial Sequence
  MKO10082805_B_Ebpl
  gRNA
caggcccagcgcgcacccta

SEQ ID NO: 82806 - DNA, 20 bp, Artificial Sequence
  MKO10082806_B_Ebpl
  gRNA
tcttcgctaaattagcctct

SEQ ID NO: 82807 - DNA, 20 bp, Artificial Sequence
  MKO10082807_B_Ebp
  gRNA
tgacagcttcgtcgtctgta

SEQ ID NO: 82808 - DNA, 20 bp, Artificial Sequence
  MKO10082808_B_Ebp
  gRNA
acagcacatccccgtatatc

SEQ ID NO: 82809 - DNA, 20 bp, Artificial Sequence
  MKO10082809_B_Ebp
  gRNA
gaaaggcaatcactacccat

SEQ ID NO: 82810 - DNA, 20 bp, Artificial Sequence
  MKO10082810_B_Ecd
  gRNA
accctgttggcactgttatc

SEQ ID NO: 82811 - DNA, 20 bp, Artificial Sequence
  MKO10082811_B_Ecd
  gRNA
tgtgcattattcctgtgccg

SEQ ID NO: 82812 - DNA, 20 bp, Artificial Sequence
  MKO10082812_B_Ecd
  gRNA
agattatactcaaagcttgc

SEQ ID NO: 82813 - DNA, 20 bp, Artificial Sequence
  MKO10082813_B_Ece1
  gRNA
ctggtgacgcttctggcggc

SEQ ID NO: 82814 - DNA, 20 bp, Artificial Sequence
  MKO10082814_B_Ece1
  gRNA
tgcacctacttgtctggtac

SEQ ID NO: 82815 - DNA, 20 bp, Artificial Sequence
  MKO10082815_B_Ece1
  gRNA
gtgcgtgcatgaacgaaact

SEQ ID NO: 82816 - DNA, 20 bp, Artificial Sequence
  MKO10082816_B_Ece2
  gRNA
gtccagtgctcgaacatcca

SEQ ID NO: 82817 - DNA, 20 bp, Artificial Sequence
  MKO10082817_B_Ece2
  gRNA
gtaagccggttgctagttcc

SEQ ID NO: 82818 - DNA, 20 bp, Artificial Sequence
  MKO10082818_B_Ece2
  gRNA
atgctcaatcccgttatgac

SEQ ID NO: 82819 - DNA, 20 bp, Artificial Sequence
  MKO10082819_B_Ecel1
  gRNA
cactctcctcgtcttgagct

SEQ ID NO: 82820 - DNA, 20 bp, Artificial Sequence
  MKO10082820_B_Ecel1
  gRNA
cctgtacctagctcaagacg

SEQ ID NO: 82821 - DNA, 20 bp, Artificial Sequence
  MKO10082821_B_Ecel1
  gRNA
cagagtcactttgttgtacg

SEQ ID NO: 82822 - DNA, 20 bp, Artificial Sequence
  MKO10082822_B_Ech1
  gRNA
ttctccacgtgcagctaaac

SEQ ID NO: 82823 - DNA, 20 bp, Artificial Sequence
  MKO10082823_B_Ech1
  gRNA
gccaatgcagcctccgtgaa

SEQ ID NO: 82824 - DNA, 20 bp, Artificial Sequence
  MKO10082824_B_Ech1
  gRNA
cacggaggtaccaggctatg

SEQ ID NO: 82825 - DNA, 20 bp, Artificial Sequence
  MKO10082825_B_Echdc1
  gRNA
acacgttaacaagatttatg

SEQ ID NO: 82826 - DNA, 20 bp, Artificial Sequence
  MKO10082826_B_Echdc1
  gRNA
gggaaaggcctcattatcca

SEQ ID NO: 82827 - DNA, 20 bp, Artificial Sequence
  MKO10082827_B_Echdc1
  gRNA
tgtcatgatgctacaacttt

SEQ ID NO: 82828 - DNA, 20 bp, Artificial Sequence
  MKO10082828_B_Echdc2
  gRNA
cgaggcctgatgagtgagat

SEQ ID NO: 82829 - DNA, 20 bp, Artificial Sequence
  MKO10082829_B_Echdc2
  gRNA
tctcaccgatctcactcatc

SEQ ID NO: 82830 - DNA, 20 bp, Artificial Sequence
  MKO10082830_B_Echdc2
  gRNA
cttgctggtcttcccgaagc

SEQ ID NO: 82831 - DNA, 20 bp, Artificial Sequence
  MKO10082831_B_Echdc3
  gRNA
ggccagctgtgatattgctg

SEQ ID NO: 82832 - DNA, 20 bp, Artificial Sequence
  MKO10082832_B_Echdc3
  gRNA
aaaagtccaacattcactcc

SEQ ID NO: 82833 - DNA, 20 bp, Artificial Sequence
  MKO10082833_B_Echdc3
  gRNA
acattgtcttaagcaatccc

SEQ ID NO: 82834 - DNA, 20 bp, Artificial Sequence
  MKO10082834_B_Echs1
  gRNA
ctagcgatttgccgactgct

SEQ ID NO: 82835 - DNA, 20 bp, Artificial Sequence
  MKO10082835_B_Echs1
  gRNA
gcactcaatgcactttgcaa

SEQ ID NO: 82836 - DNA, 20 bp, Artificial Sequence
  MKO10082836_B_Echs1
  gRNA
ccattgacagctgcgatgac

SEQ ID NO: 82837 - DNA, 20 bp, Artificial Sequence
  MKO10082837_B_Eci1
  gRNA
ggcagacactaagatcatgt

SEQ ID NO: 82838 - DNA, 20 bp, Artificial Sequence
  MKO10082838_B_Eci1
  gRNA
gggaagcggtggacggcgcg

SEQ ID NO: 82839 - DNA, 20 bp, Artificial Sequence
  MKO10082839_B_Eci1
  gRNA
gacaaccccaaatatactat

SEQ ID NO: 82840 - DNA, 20 bp, Artificial Sequence
  MKO10082840_B_Eci2
  gRNA
ctttgaaaatgcattgaacc

SEQ ID NO: 82841 - DNA, 20 bp, Artificial Sequence
  MKO10082841_B_Eci2
  gRNA
cagcactgataacactgtca

SEQ ID NO: 82842 - DNA, 20 bp, Artificial Sequence
  MKO10082842_B_Eci2
  gRNA
gagatccacatagttctgcc

SEQ ID NO: 82843 - DNA, 20 bp, Artificial Sequence
  MKO10082843_B_Eci3
  gRNA
agacagcatcaaatagtgcc

SEQ ID NO: 82844 - DNA, 20 bp, Artificial Sequence
  MKO10082844_B_Eci3
  gRNA
tatagactttccgaagcctc

SEQ ID NO: 82845 - DNA, 20 bp, Artificial Sequence
  MKO10082845_B_Eci3
  gRNA
gagatccacatagttcttcc

SEQ ID NO: 82846 - DNA, 20 bp, Artificial Sequence
  MKO10082846_B_Ecm1
  gRNA
ccccgactcacctccctcag

SEQ ID NO: 82847 - DNA, 20 bp, Artificial Sequence
  MKO10082847_B_Ecm1
  gRNA
ctaaaccctaatgtagataa

SEQ ID NO: 82848 - DNA, 20 bp, Artificial Sequence
  MKO10082848_B_Ecm1
  gRNA
tctcaccttcatggaggtgc

SEQ ID NO: 82849 - DNA, 20 bp, Artificial Sequence
  MKO10082849_B_Ecm2
  gRNA
agcaccagaagtaacgaacc

SEQ ID NO: 82850 - DNA, 20 bp, Artificial Sequence
  MKO10082850_B_Ecm2
  gRNA
gaattcgatcatctccattc

SEQ ID NO: 82851 - DNA, 20 bp, Artificial Sequence
  MKO10082851_B_Ecm2
  gRNA
gaagttaatgcgtctgaaca

SEQ ID NO: 82852 - DNA, 20 bp, Artificial Sequence
  MKO10082852_B_Ecscr
  gRNA
atcagagtcagtgctaactg

SEQ ID NO: 82853 - DNA, 20 bp, Artificial Sequence
  MKO10082853_B_Ecscr
  gRNA
ttatccatggtgcttgacct

SEQ ID NO: 82854 - DNA, 20 bp, Artificial Sequence
  MKO10082854_B_Ecscr
  gRNA
cacaggctgattggatacca

SEQ ID NO: 82855 - DNA, 20 bp, Artificial Sequence
  MKO10082855_B_Ecsit
  gRNA
tgaaccacagcttcatccgc

SEQ ID NO: 82856 - DNA, 20 bp, Artificial Sequence
  MKO10082856_B_Ecsit
  gRNA
tctttgcccagtgactcgac

SEQ ID NO: 82857 - DNA, 20 bp, Artificial Sequence
  MKO10082857_B_Ecsit
  gRNA
ggggccttacctacaatgtg

SEQ ID NO: 82858 - DNA, 20 bp, Artificial Sequence
  MKO10082858_B_Ect2l
  gRNA
atgccgaaatgcactaagtt

SEQ ID NO: 82859 - DNA, 20 bp, Artificial Sequence
  MKO10082859_B_Ect2l
  gRNA
atgcctcttactcttgcgga

SEQ ID NO: 82860 - DNA, 20 bp, Artificial Sequence
  MKO10082860_B_Ect2l
  gRNA
gtgcagccgctcaagtcagc

SEQ ID NO: 82861 - DNA, 20 bp, Artificial Sequence
  MKO10082861_B_Ect2
  gRNA
cttaatagaagaaatgccgc

SEQ ID NO: 82862 - DNA, 20 bp, Artificial Sequence
  MKO10082862_B_Ect2
  gRNA
gcgtctacttcaaatgttga

SEQ ID NO: 82863 - DNA, 20 bp, Artificial Sequence
  MKO10082863_B_Ect2
  gRNA
gccaagctagttatctcaga

SEQ ID NO: 82864 - DNA, 20 bp, Artificial Sequence
  MKO10082864_B_Eda2r
  gRNA
aggagattcgttgcaatatg

SEQ ID NO: 82865 - DNA, 20 bp, Artificial Sequence
  MKO10082865_B_Eda2r
  gRNA
ctaccttcactaagctcaac

SEQ ID NO: 82866 - DNA, 20 bp, Artificial Sequence
  MKO10082866_B_Eda2r
  gRNA
cccgaaagtataaaagcact

SEQ ID NO: 82867 - DNA, 20 bp, Artificial Sequence
  MKO10082867_B_Edaradd
  gRNA
gttcttacctttagggaggc

SEQ ID NO: 82868 - DNA, 20 bp, Artificial Sequence
  MKO10082868_B_Edaradd
  gRNA
catggcaaaggataaagtgc

SEQ ID NO: 82869 - DNA, 20 bp, Artificial Sequence
  MKO10082869_B_Edaradd
  gRNA
cttcccagatcacatggcaa

SEQ ID NO: 82870 - DNA, 20 bp, Artificial Sequence
  MKO10082870_B_Edar
  gRNA
gaataccacaaccagactac

SEQ ID NO: 82871 - DNA, 20 bp, Artificial Sequence
  MKO10082871_B_Edar
  gRNA
gaccatgccatagatgttcc

SEQ ID NO: 82872 - DNA, 20 bp, Artificial Sequence
  MKO10082872_B_Edar
  gRNA
gtattcgttctcaccacagt

SEQ ID NO: 82873 - DNA, 20 bp, Artificial Sequence
  MKO10082873_B_Eda
  gRNA
cctgggcccaacggcccccc

SEQ ID NO: 82874 - DNA, 20 bp, Artificial Sequence
  MKO10082874_B_Eda
  gRNA
gcaggtgctgctgataaaac

SEQ ID NO: 82875 - DNA, 20 bp, Artificial Sequence
  MKO10082875_B_Eda
  gRNA
cgcaataagagaagcaaaag

SEQ ID NO: 82876 - DNA, 20 bp, Artificial Sequence
  MKO10082876_B_Edc3
  gRNA
tacctagcaggacgttcatt

SEQ ID NO: 82877 - DNA, 20 bp, Artificial Sequence
  MKO10082877_B_Edc3
  gRNA
catctcaagtctccgctcta

SEQ ID NO: 82878 - DNA, 20 bp, Artificial Sequence
  MKO10082878_B_Edc3
  gRNA
ctctccttggaggacccaac

SEQ ID NO: 82879 - DNA, 20 bp, Artificial Sequence
  MKO10082879_B_Edc4
  gRNA
cctaatggcgtatgccaaga

SEQ ID NO: 82880 - DNA, 20 bp, Artificial Sequence
  MKO10082880_B_Edc4
  gRNA
gatgacagctccacctgcat

SEQ ID NO: 82881 - DNA, 20 bp, Artificial Sequence
  MKO10082881_B_Edc4
  gRNA
agcctgtcgccaagtatgac

SEQ ID NO: 82882 - DNA, 20 bp, Artificial Sequence
  MKO10082882_B_Eddm3b
  gRNA
agactcccattaaggtcctc

SEQ ID NO: 82883 - DNA, 20 bp, Artificial Sequence
  MKO10082883_B_Eddm3b
  gRNA
cgacagcatagaggacataa

SEQ ID NO: 82884 - DNA, 20 bp, Artificial Sequence
  MKO10082884_B_Eddm3b
  gRNA
catacccatcagcattgcaa

SEQ ID NO: 82885 - DNA, 20 bp, Artificial Sequence
  MKO10082885_B_Edem1
  gRNA
agaaccggcccccgctgtgc

SEQ ID NO: 82886 - DNA, 20 bp, Artificial Sequence
  MKO10082886_B_Edem1
  gRNA
ctcaattgtcatgtcaccaa

SEQ ID NO: 82887 - DNA, 20 bp, Artificial Sequence
  MKO10082887_B_Edem1
  gRNA
gagtcagagagtaattccct

SEQ ID NO: 82888 - DNA, 20 bp, Artificial Sequence
  MKO10082888_B_Edem2
  gRNA
tctgacgctaattgatgccc

SEQ ID NO: 82889 - DNA, 20 bp, Artificial Sequence
  MKO10082889_B_Edem2
  gRNA
gtgttcgaaaccaacatccg

SEQ ID NO: 82890 - DNA, 20 bp, Artificial Sequence
  MKO10082890_B_Edem2
  gRNA
gcagcccggaaactcctccc

SEQ ID NO: 82891 - DNA, 20 bp, Artificial Sequence
  MKO10082891_B_Edem3
  gRNA
tcatgcttatggcaactata

SEQ ID NO: 82892 - DNA, 20 bp, Artificial Sequence
  MKO10082892_B_Edem3
  gRNA
ccaggtattaaacaaaacta

SEQ ID NO: 82893 - DNA, 20 bp, Artificial Sequence
  MKO10082893_B_Edem3
  gRNA
ccaaagaatcaatcagtgtt

SEQ ID NO: 82894 - DNA, 20 bp, Artificial Sequence
  MKO10082894_B_Edf1
  gRNA
tcaccgtggccaggtccttc

SEQ ID NO: 82895 - DNA, 20 bp, Artificial Sequence
  MKO10082895_B_Edf1
  gRNA
tcgtcgctgagccgctaaga

SEQ ID NO: 82896 - DNA, 20 bp, Artificial Sequence
  MKO10082896_B_Edf1
  gRNA
aaaacacagccaagctcgac

SEQ ID NO: 82897 - DNA, 20 bp, Artificial Sequence
  MKO10082897_B_Edil3
  gRNA
catattccgccatttctgca

SEQ ID NO: 82898 - DNA, 20 bp, Artificial Sequence
  MKO10082898_B_Edil3
  gRNA
ccacctcacctttgccgaac

SEQ ID NO: 82899 - DNA, 20 bp, Artificial Sequence
  MKO10082899_B_Edil3
  gRNA
tccgaactgctctagtgttg

SEQ ID NO: 82900 - DNA, 20 bp, Artificial Sequence
  MKO10082900_B_Edn1
  gRNA
gacacactccttgtccatca

SEQ ID NO: 82901 - DNA, 20 bp, Artificial Sequence
  MKO10082901_B_Edn1
  gRNA
tgccttgatgctattgctga

SEQ ID NO: 82902 - DNA, 20 bp, Artificial Sequence
  MKO10082902_B_Edn1
  gRNA
gatacacttctttcccaact

SEQ ID NO: 82903 - DNA, 20 bp, Artificial Sequence
  MKO10082903_B_Edn2
  gRNA
gcctcggcccttgggtgccg

SEQ ID NO: 82904 - DNA, 20 bp, Artificial Sequence
  MKO10082904_B_Edn2
  gRNA
gcgttgtgagtgctctactg

SEQ ID NO: 82905 - DNA, 20 bp, Artificial Sequence
  MKO10082905_B_Edn2
  gRNA
tagcctggcaaagcggagct

SEQ ID NO: 82906 - DNA, 20 bp, Artificial Sequence
  MKO10082906_B_Edn3
  gRNA
ctgcacgtgcttcacttaca

SEQ ID NO: 82907 - DNA, 20 bp, Artificial Sequence
  MKO10082907_B_Edn3
  gRNA
gaacgggcaccaggcaggtc

SEQ ID NO: 82908 - DNA, 20 bp, Artificial Sequence
  MKO10082908_B_Edn3
  gRNA
cctgtcttcacctttgacgt

SEQ ID NO: 82909 - DNA, 20 bp, Artificial Sequence
  MKO10082909_B_Ednra
  gRNA
cctttcgaccacaatgattt

SEQ ID NO: 82910 - DNA, 20 bp, Artificial Sequence
  MKO10082910_B_Ednra
  gRNA
ttgtcatcttcgccctgtgc

SEQ ID NO: 82911 - DNA, 20 bp, Artificial Sequence
  MKO10082911_B_Ednra
  gRNA
ttgcccttagcgtcgagaag

SEQ ID NO: 82912 - DNA, 20 bp, Artificial Sequence
  MKO10082912_B_Ednrb
  gRNA
actgaacagccaccaatctt

SEQ ID NO: 82913 - DNA, 20 bp, Artificial Sequence
  MKO10082913_B_Ednrb
  gRNA
ctctatgcagttgctcgcag

SEQ ID NO: 82914 - DNA, 20 bp, Artificial Sequence
  MKO10082914_B_Ednrb
  gRNA
tctgtttcagagacgagaag

SEQ ID NO: 82915 - DNA, 20 bp, Artificial Sequence
  MKO10082915_B_Eea1
  gRNA
gtaccgtgtcaaagcaagac

SEQ ID NO: 82916 - DNA, 20 bp, Artificial Sequence
  MKO10082916_B_Eea1
  gRNA
aggccggtcttgctttgaca

SEQ ID NO: 82917 - DNA, 20 bp, Artificial Sequence
  MKO10082917_B_Eea1
  gRNA
agacctacaggcctcactta

SEQ ID NO: 82918 - DNA, 20 bp, Artificial Sequence
  MKO10082918_B_Eed
  gRNA
caccctctattagcagttgc

SEQ ID NO: 82919 - DNA, 20 bp, Artificial Sequence
  MKO10082919_B_Eed
  gRNA
gatccagcaactgctaatag

SEQ ID NO: 82920 - DNA, 20 bp, Artificial Sequence
  MKO10082920_B_Eed
  gRNA
acaaatacgccaaatgcacc

SEQ ID NO: 82921 - DNA, 20 bp, Artificial Sequence
  MKO10082921_B_Eef1a1
  gRNA
gcccctgcgactgcccctcc

SEQ ID NO: 82922 - DNA, 20 bp, Artificial Sequence
  MKO10082922_B_Eef1a1
  gRNA
agggctccttcaagtacgcc

SEQ ID NO: 82923 - DNA, 20 bp, Artificial Sequence
  MKO10082923_B_Eef1a1
  gRNA
ttgatgaagtctctgtgtcc

SEQ ID NO: 82924 - DNA, 20 bp, Artificial Sequence
  MKO10082924_B_Eef1a2
  gRNA
atcaccatcatcgatgctcc

SEQ ID NO: 82925 - DNA, 20 bp, Artificial Sequence
  MKO10082925_B_Eef1a2
  gRNA
attcgccggggcaatgtctg

SEQ ID NO: 82926 - DNA, 20 bp, Artificial Sequence
  MKO10082926_B_Eef1a2
  gRNA
tgcaagcggcgtgtccctgc

SEQ ID NO: 82927 - DNA, 20 bp, Artificial Sequence
  MKO10082927_B_Eef1b2
  gRNA
tcctactagacgtgaagcct

SEQ ID NO: 82928 - DNA, 20 bp, Artificial Sequence
  MKO10082928_B_Eef1b2
  gRNA
gatgacgacattgatctctt

SEQ ID NO: 82929 - DNA, 20 bp, Artificial Sequence
  MKO10082929_B_Eef1b2
  gRNA
agcagtgtagaagacaccac

SEQ ID NO: 82930 - DNA, 20 bp, Artificial Sequence
  MKO10082930_B_Eef1d
  gRNA
cctcaccgcctcgaaggttc

SEQ ID NO: 82931 - DNA, 20 bp, Artificial Sequence
  MKO10082931_B_Eef1d
  gRNA
agtggtgcaagatttgcagc

SEQ ID NO: 82932 - DNA, 20 bp, Artificial Sequence
  MKO10082932_B_Eef1d
  gRNA
tcactccagccaaggatttc

SEQ ID NO: 82933 - DNA, 20 bp, Artificial Sequence
  MKO10082933_B_Eef1e1
  gRNA
aatatcttaatgtgtctcgc

SEQ ID NO: 82934 - DNA, 20 bp, Artificial Sequence
  MKO10082934_B_Eef1e1
  gRNA
ccccagcaagtgctccttac

SEQ ID NO: 82935 - DNA, 20 bp, Artificial Sequence
  MKO10082935_B_Eef1e1
  gRNA
ctccagcagcctcaactccg

SEQ ID NO: 82936 - DNA, 20 bp, Artificial Sequence
  MKO10082936_B_Eef1g
  gRNA
tccccactcaccttgccggc

SEQ ID NO: 82937 - DNA, 20 bp, Artificial Sequence
  MKO10082937_B_Eef1g
  gRNA
tgcctttgcagtaagcaatg

SEQ ID NO: 82938 - DNA, 20 bp, Artificial Sequence
  MKO10082938_B_Eef1g
  gRNA
tgtacacataccctgaaaat

SEQ ID NO: 82939 - DNA, 20 bp, Artificial Sequence
  MKO10082939_B_Eef2k
  gRNA
agacgaggttctgatcaaga

SEQ ID NO: 82940 - DNA, 20 bp, Artificial Sequence
  MKO10082940_B_Eef2k
  gRNA
tcgccacagaacatgctact

SEQ ID NO: 82941 - DNA, 20 bp, Artificial Sequence
  MKO10082941_B_Eef2k
  gRNA
tgtaggtacaacgctgtcac

SEQ ID NO: 82942 - DNA, 20 bp, Artificial Sequence
  MKO10082942_B_Eef2
  gRNA
cacgctcggctgcgctcagc

SEQ ID NO: 82943 - DNA, 20 bp, Artificial Sequence
  MKO10082943_B_Eef2
  gRNA
tcgcaccatgatattgccca

SEQ ID NO: 82944 - DNA, 20 bp, Artificial Sequence
  MKO10082944_B_Eef2
  gRNA
cccactctcgccctcgccgt

SEQ ID NO: 82945 - DNA, 20 bp, Artificial Sequence
  MKO10082945_B_Eefsec
  gRNA
cgcctcgtcatcaccttctg

SEQ ID NO: 82946 - DNA, 20 bp, Artificial Sequence
  MKO10082946_B_Eefsec
  gRNA
aggcgatctggccaatcaca

SEQ ID NO: 82947 - DNA, 20 bp, Artificial Sequence
  MKO10082947_B_Eefsec
  gRNA
cacggtgccttgacccttga

SEQ ID NO: 82948 - DNA, 20 bp, Artificial Sequence
  MKO10082948_B_Eepd1
  gRNA
caggtaccttgaatctggcg

SEQ ID NO: 82949 - DNA, 20 bp, Artificial Sequence
  MKO10082949_B_Eepd1
  gRNA
gaactttgcactaaccctcc

SEQ ID NO: 82950 - DNA, 20 bp, Artificial Sequence
  MKO10082950_B_Eepd1
  gRNA
taacctccagctgacagccc

SEQ ID NO: 82951 - DNA, 20 bp, Artificial Sequence
  MKO10082951_B_Efcab10
  gRNA
aaatgccacgtgtgttgcct

SEQ ID NO: 82952 - DNA, 20 bp, Artificial Sequence
  MKO10082952_B_Efcab10
  gRNA
tgaagctcccggtcagccac

SEQ ID NO: 82953 - DNA, 20 bp, Artificial Sequence
  MKO10082953_B_Efcab10
  gRNA
tttccttaggaacaagagga

SEQ ID NO: 82954 - DNA, 20 bp, Artificial Sequence
  MKO10082954_B_Efcab11
  gRNA
tcgcaaccttaaagtcctct

SEQ ID NO: 82955 - DNA, 20 bp, Artificial Sequence
  MKO10082955_B_Efcab11
  gRNA
acctccagcactgtcctcgc

SEQ ID NO: 82956 - DNA, 20 bp, Artificial Sequence
  MKO10082956_B_Efcab11
  gRNA
tcagtaaatcccaacacttc

SEQ ID NO: 82957 - DNA, 20 bp, Artificial Sequence
  MKO10082957_B_Efcab12
  gRNA
ccttgctggtggtttcatcg

SEQ ID NO: 82958 - DNA, 20 bp, Artificial Sequence
  MKO10082958_B_Efcab12
  gRNA
tccgcctgccaaagagccgc

SEQ ID NO: 82959 - DNA, 20 bp, Artificial Sequence
  MKO10082959_B_Efcab12
  gRNA
tgggcagacggtaccgagag

SEQ ID NO: 82960 - DNA, 20 bp, Artificial Sequence
  MKO10082960_B_Efcab14
  gRNA
actgccctgcagtaacccca

SEQ ID NO: 82961 - DNA, 20 bp, Artificial Sequence
  MKO10082961_B_Efcab14
  gRNA
gagaagttcctcattaagtt

SEQ ID NO: 82962 - DNA, 20 bp, Artificial Sequence
  MKO10082962_B_Efcab14
  gRNA
ggaggatctggatgtcctca

SEQ ID NO: 82963 - DNA, 20 bp, Artificial Sequence
  MKO10082963_B_Efcab1
  gRNA
aacatcttgcatgtgacatt

SEQ ID NO: 82964 - DNA, 20 bp, Artificial Sequence
  MKO10082964_B_Efcab1
  gRNA
aaatacattacgatctagtc

SEQ ID NO: 82965 - DNA, 20 bp, Artificial Sequence
  MKO10082965_B_Efcab1
  gRNA
tttgaagtgtttgatctgaa

SEQ ID NO: 82966 - DNA, 20 bp, Artificial Sequence
  MKO10082966_B_Efcab2
  gRNA
gagagattgggacaattatc

SEQ ID NO: 82967 - DNA, 20 bp, Artificial Sequence
  MKO10082967_B_Efcab2
  gRNA
cgaataatacagtagatgtg

SEQ ID NO: 82968 - DNA, 20 bp, Artificial Sequence
  MKO10082968_B_Efcab2
  gRNA
ttcaaatcgaatgtagccag

SEQ ID NO: 82969 - DNA, 20 bp, Artificial Sequence
  MKO10082969_B_Efcab3
  gRNA
ttagatttagctaacaaccc

SEQ ID NO: 82970 - DNA, 20 bp, Artificial Sequence
  MKO10082970_B_Efcab3
  gRNA
aatacagccagttctatcct

SEQ ID NO: 82971 - DNA, 20 bp, Artificial Sequence
  MKO10082971_B_Efcab3
  gRNA
ctgagtcctgcacaacttga

SEQ ID NO: 82972 - DNA, 20 bp, Artificial Sequence
  MKO10082972_B_Efcab4a
  gRNA
tccacttacgcctgaacagc

SEQ ID NO: 82973 - DNA, 20 bp, Artificial Sequence
  MKO10082973_B_Efcab4a
  gRNA
gcgcggactgtatgaagaac

SEQ ID NO: 82974 - DNA, 20 bp, Artificial Sequence
  MKO10082974_B_Efcab4a
  gRNA
caactcactcgcccaggacc

SEQ ID NO: 82975 - DNA, 20 bp, Artificial Sequence
  MKO10082975_B_Efcab4b
  gRNA
gcccctaagtctagaagaat

SEQ ID NO: 82976 - DNA, 20 bp, Artificial Sequence
  MKO10082976_B_Efcab4b
  gRNA
agcagcagatcaaaagtgag

SEQ ID NO: 82977 - DNA, 20 bp, Artificial Sequence
  MKO10082977_B_Efcab4b
  gRNA
gaaattgtgcttcttcatca

SEQ ID NO: 82978 - DNA, 20 bp, Artificial Sequence
  MKO10082978_B_Efcab5
  gRNA
tcccgcagagtatcacttac

SEQ ID NO: 82979 - DNA, 20 bp, Artificial Sequence
  MKO10082979_B_Efcab5
  gRNA
ctcttcctacagtgcgacag

SEQ ID NO: 82980 - DNA, 20 bp, Artificial Sequence
  MKO10082980_B_Efcab5
  gRNA
attcttctgcgctgtggcac

SEQ ID NO: 82981 - DNA, 20 bp, Artificial Sequence
  MKO10082981_B_Efcab6
  gRNA
acgttacccaagctgctgat

SEQ ID NO: 82982 - DNA, 20 bp, Artificial Sequence
  MKO10082982_B_Efcab6
  gRNA
tgagtactcacttgatgaag

SEQ ID NO: 82983 - DNA, 20 bp, Artificial Sequence
  MKO10082983_B_Efcab6
  gRNA
aaatgtcgattataccagaa

SEQ ID NO: 82984 - DNA, 20 bp, Artificial Sequence
  MKO10082984_B_Efcab7
  gRNA
ttgacgcctcagtttactgt

SEQ ID NO: 82985 - DNA, 20 bp, Artificial Sequence
  MKO10082985_B_Efcab7
  gRNA
tccacttgactcagatataa

SEQ ID NO: 82986 - DNA, 20 bp, Artificial Sequence
  MKO10082986_B_Efcab7
  gRNA
gaaattcccactaactgaac

SEQ ID NO: 82987 - DNA, 20 bp, Artificial Sequence
  MKO10082987_B_Efcab9
  gRNA
atcttctggatgtgcaccac

SEQ ID NO: 82988 - DNA, 20 bp, Artificial Sequence
  MKO10082988_B_Efcab9
  gRNA
attcatctatgttaagccac

SEQ ID NO: 82989 - DNA, 20 bp, Artificial Sequence
  MKO10082989_B_Efcab9
  gRNA
tcccgatctgtgacttgttc

SEQ ID NO: 82990 - DNA, 20 bp, Artificial Sequence
  MKO10082990_B_Efcc1
  gRNA
tggagtagtgtccgaatctc

SEQ ID NO: 82991 - DNA, 20 bp, Artificial Sequence
  MKO10082991_B_Efcc1
  gRNA
agattcggacactactccag

SEQ ID NO: 82992 - DNA, 20 bp, Artificial Sequence
  MKO10082992_B_Efcc1
  gRNA
ccttgagcgtctcagctgtc

SEQ ID NO: 82993 - DNA, 20 bp, Artificial Sequence
  MKO10082993_B_Efemp1
  gRNA
ccagctgcagaagcttcgtc

SEQ ID NO: 82994 - DNA, 20 bp, Artificial Sequence
  MKO10082994_B_Efemp1
  gRNA
ttctactgccagtgcagtcc

SEQ ID NO: 82995 - DNA, 20 bp, Artificial Sequence
  MKO10082995_B_Efemp1
  gRNA
acacatctttggtggcaata

SEQ ID NO: 82996 - DNA, 20 bp, Artificial Sequence
  MKO10082996_B_Efemp2
  gRNA
aaaaattggacccgaatgtg

SEQ ID NO: 82997 - DNA, 20 bp, Artificial Sequence
  MKO10082997_B_Efemp2
  gRNA
gcatgactgtcgccctagtc

SEQ ID NO: 82998 - DNA, 20 bp, Artificial Sequence
  MKO10082998_B_Efemp2
  gRNA
acaaccaaacccttgcccgc

SEQ ID NO: 82999 - DNA, 20 bp, Artificial Sequence
  MKO10082999_B_Efhb
  gRNA
gggaagcttctcagtcaaac

SEQ ID NO: 83000 - DNA, 20 bp, Artificial Sequence
  MKO10083000_B_Efhb
  gRNA
gtttgactgagaagcttccc

SEQ ID NO: 83001 - DNA, 20 bp, Artificial Sequence
  MKO10083001_B_Efhb
  gRNA
cttagtccatgtgtcaaata

SEQ ID NO: 83002 - DNA, 20 bp, Artificial Sequence
  MKO10083002_B_Efhc1
  gRNA
ttgtcaaaagccacatgcgc

SEQ ID NO: 83003 - DNA, 20 bp, Artificial Sequence
  MKO10083003_B_Efhc1
  gRNA
atatgggagaccactaccac

SEQ ID NO: 83004 - DNA, 20 bp, Artificial Sequence
  MKO10083004_B_Efhc1
  gRNA
agtagtaaatgttcacgtgg

SEQ ID NO: 83005 - DNA, 20 bp, Artificial Sequence
  MKO10083005_B_Efhc2
  gRNA
atggaaccgatgcaccatcc

SEQ ID NO: 83006 - DNA, 20 bp, Artificial Sequence
  MKO10083006_B_Efhc2
  gRNA
tcgatccctacatgaagatg

SEQ ID NO: 83007 - DNA, 20 bp, Artificial Sequence
  MKO10083007_B_Efhc2
  gRNA
agtccactatttatcacttc

SEQ ID NO: 83008 - DNA, 20 bp, Artificial Sequence
  MKO10083008_B_Efhd1
  gRNA
gtgcccggctggggcatcgc

SEQ ID NO: 83009 - DNA, 20 bp, Artificial Sequence
  MKO10083009_B_Efhd1
  gRNA
aggtggatgaggacttcgac

SEQ ID NO: 83010 - DNA, 20 bp, Artificial Sequence
  MKO10083010_B_Efhd1
  gRNA
ggacggctttattgacctga

SEQ ID NO: 83011 - DNA, 20 bp, Artificial Sequence
  MKO10083011_B_Efhd2
  gRNA
cgaaatcctcgtccacctcc

SEQ ID NO: 83012 - DNA, 20 bp, Artificial Sequence
  MKO10083012_B_Efhd2
  gRNA
gggcctcaagagtatgatcc

SEQ ID NO: 83013 - DNA, 20 bp, Artificial Sequence
  MKO10083013_B_Efhd2
  gRNA
tggctctggctacttgaacg

SEQ ID NO: 83014 - DNA, 20 bp, Artificial Sequence
  MKO10083014_B_Efna1
  gRNA
agccaaacctatctaccatc

SEQ ID NO: 83015 - DNA, 20 bp, Artificial Sequence
  MKO10083015_B_Efna1
  gRNA
ttcctgatggtagataggtt

SEQ ID NO: 83016 - DNA, 20 bp, Artificial Sequence
  MKO10083016_B_Efna1
  gRNA
ctgtgcaaaacctgtacttc

SEQ ID NO: 83017 - DNA, 20 bp, Artificial Sequence
  MKO10083017_B_Efna2
  gRNA
tgatggcggcggctataccg

SEQ ID NO: 83018 - DNA, 20 bp, Artificial Sequence
  MKO10083018_B_Efna2
  gRNA
cagggtcggtccacgaggtt

SEQ ID NO: 83019 - DNA, 20 bp, Artificial Sequence
  MKO10083019_B_Efna2
  gRNA
gcacataaaccttgagtcgc

SEQ ID NO: 83020 - DNA, 20 bp, Artificial Sequence
  MKO10083020_B_Efna3
  gRNA
aggaggccaagagcgtcatg

SEQ ID NO: 83021 - DNA, 20 bp, Artificial Sequence
  MKO10083021_B_Efna3
  gRNA
aaggcgatgcccacggccag

SEQ ID NO: 83022 - DNA, 20 bp, Artificial Sequence
  MKO10083022_B_Efna3
  gRNA
caatgtgaagatcaacgtgt

SEQ ID NO: 83023 - DNA, 20 bp, Artificial Sequence
  MKO10083023_B_Efna4
  gRNA
cgcgtgtcctccccgccacc

SEQ ID NO: 83024 - DNA, 20 bp, Artificial Sequence
  MKO10083024_B_Efna4
  gRNA
atttgccccctctgccgtgc

SEQ ID NO: 83025 - DNA, 20 bp, Artificial Sequence
  MKO10083025_B_Efna4
  gRNA
gcctccgccacccaatctac

SEQ ID NO: 83026 - DNA, 20 bp, Artificial Sequence
  MKO10083026_B_Efna5
  gRNA
gcctgcgaccacacgtccaa

SEQ ID NO: 83027 - DNA, 20 bp, Artificial Sequence
  MKO10083027_B_Efna5
  gRNA
agaacgcggcgcagacacca

SEQ ID NO: 83028 - DNA, 20 bp, Artificial Sequence
  MKO10083028_B_Efna5
  gRNA
tgagcgctacgtcctgtaca

SEQ ID NO: 83029 - DNA, 20 bp, Artificial Sequence
  MKO10083029_B_Efnb1
  gRNA
cacatgtaatgtagtaatcg

SEQ ID NO: 83030 - DNA, 20 bp, Artificial Sequence
  MKO10083030_B_Efnb1
  gRNA
tttcctacagcaacgtccaa

SEQ ID NO: 83031 - DNA, 20 bp, Artificial Sequence
  MKO10083031_B_Efnb1
  gRNA
ccggctggtagtcaactgct

SEQ ID NO: 83032 - DNA, 20 bp, Artificial Sequence
  MKO10083032_B_Efnb2
  gRNA
gtatagtaccaggccttgtc

SEQ ID NO: 83033 - DNA, 20 bp, Artificial Sequence
  MKO10083033_B_Efnb2
  gRNA
tttcacatcttggtctggtc

SEQ ID NO: 83034 - DNA, 20 bp, Artificial Sequence
  MKO10083034_B_Efnb2
  gRNA
tttggagggcctggataacc

SEQ ID NO: 83035 - DNA, 20 bp, Artificial Sequence
  MKO10083035_B_Efnb3
  gRNA
ttcccgggtcccgtctgatg

SEQ ID NO: 83036 - DNA, 20 bp, Artificial Sequence
  MKO10083036_B_Efnb3
  gRNA
gagacggcgggccaagcctt

SEQ ID NO: 83037 - DNA, 20 bp, Artificial Sequence
  MKO10083037_B_Efnb3
  gRNA
cagaagcaccttcatgcctc

SEQ ID NO: 83038 - DNA, 20 bp, Artificial Sequence
  MKO10083038_B_Efr3a
  gRNA
acatactcggttcgtatttc

SEQ ID NO: 83039 - DNA, 20 bp, Artificial Sequence
  MKO10083039_B_Efr3a
  gRNA
gaagtcataacgtctatgat

SEQ ID NO: 83040 - DNA, 20 bp, Artificial Sequence
  MKO10083040_B_Efr3a
  gRNA
ccagagaaactcgatcgaat

SEQ ID NO: 83041 - DNA, 20 bp, Artificial Sequence
  MKO10083041_B_Efr3b
  gRNA
ctcttaccgagttggtgcca

SEQ ID NO: 83042 - DNA, 20 bp, Artificial Sequence
  MKO10083042_B_Efr3b
  gRNA
ccactcaagccacgatgacc

SEQ ID NO: 83043 - DNA, 20 bp, Artificial Sequence
  MKO10083043_B_Efr3b
  gRNA
ccagagtatcaacctcttcg

SEQ ID NO: 83044 - DNA, 20 bp, Artificial Sequence
  MKO10083044_B_Efs
  gRNA
cagtgttgtcgtacaatgcc

SEQ ID NO: 83045 - DNA, 20 bp, Artificial Sequence
  MKO10083045_B_Efs
  gRNA
agtcccctctccagcaattc

SEQ ID NO: 83046 - DNA, 20 bp, Artificial Sequence
  MKO10083046_B_Efs
  gRNA
ggatctagctggaagtcccg

SEQ ID NO: 83047 - DNA, 20 bp, Artificial Sequence
  MKO10083047_B_Eftud1
  gRNA
gagagtctatcagattaatc

SEQ ID NO: 83048 - DNA, 20 bp, Artificial Sequence
  MKO10083048_B_Eftud1
  gRNA
atcatctccagccgcctggc

SEQ ID NO: 83049 - DNA, 20 bp, Artificial Sequence
  MKO10083049_B_Eftud1
  gRNA
atctcactacattatgcaga

SEQ ID NO: 83050 - DNA, 20 bp, Artificial Sequence
  MKO10083050_B_Eftud2
  gRNA
ctccatctcatacaccgtga

SEQ ID NO: 83051 - DNA, 20 bp, Artificial Sequence
  MKO10083051_B_Eftud2
  gRNA
agcctctcaccttgccgtgg

SEQ ID NO: 83052 - DNA, 20 bp, Artificial Sequence
  MKO10083052_B_Eftud2
  gRNA
atcagaaacgtaaccttgtg

SEQ ID NO: 83053 - DNA, 20 bp, Artificial Sequence
  MKO10083053_B_Egfbp2
  gRNA
ccccacaaatgtgttccttt

SEQ ID NO: 83054 - DNA, 20 bp, Artificial Sequence
  MKO10083054_B_Egfbp2
  gRNA
ggtggctgtgtactaccaaa

SEQ ID NO: 83055 - DNA, 20 bp, Artificial Sequence
  MKO10083055_B_Egfbp2
  gRNA
ggccatttgatgtggttcct

SEQ ID NO: 83056 - DNA, 20 bp, Artificial Sequence
  MKO10083056_B_Egfem1
  gRNA
gcgtctgggccgctgccaac

SEQ ID NO: 83057 - DNA, 20 bp, Artificial Sequence
  MKO10083057_B_Egfem1
  gRNA
tcatcccattggatccaacc

SEQ ID NO: 83058 - DNA, 20 bp, Artificial Sequence
  MKO10083058_B_Egfem1
  gRNA
catggaccccactgtcaata

SEQ ID NO: 83059 - DNA, 20 bp, Artificial Sequence
  MKO10083059_B_Egfl6
  gRNA
ggtgtactgaccttgagtgc

SEQ ID NO: 83060 - DNA, 20 bp, Artificial Sequence
  MKO10083060_B_Egfl6
  gRNA
aacaacaagggagtatgcga

SEQ ID NO: 83061 - DNA, 20 bp, Artificial Sequence
  MKO10083061_B_Egfl6
  gRNA
gttccatactgacagacccc

SEQ ID NO: 83062 - DNA, 20 bp, Artificial Sequence
  MKO10083062_B_Egfl7
  gRNA
ccggagaactgcttgtagca

SEQ ID NO: 83063 - DNA, 20 bp, Artificial Sequence
  MKO10083063_B_Egfl7
  gRNA
actgcctatcgccgtagccc

SEQ ID NO: 83064 - DNA, 20 bp, Artificial Sequence
  MKO10083064_B_Egfl7
  gRNA
ctggtatacacgctgcacaa

SEQ ID NO: 83065 - DNA, 20 bp, Artificial Sequence
  MKO10083065_B_Egfl8
  gRNA
ttctaggaccacataccgtg

SEQ ID NO: 83066 - DNA, 20 bp, Artificial Sequence
  MKO10083066_B_Egfl8
  gRNA
ctcgatggacgcacctgtgc

SEQ ID NO: 83067 - DNA, 20 bp, Artificial Sequence
  MKO10083067_B_Egfl8
  gRNA
aactagatgtcgatgaatgc

SEQ ID NO: 83068 - DNA, 20 bp, Artificial Sequence
  MKO10083068_B_Egflam
  gRNA
cctaatgaattccacagagt

SEQ ID NO: 83069 - DNA, 20 bp, Artificial Sequence
  MKO10083069_B_Egflam
  gRNA
cccaattcagtcctactctg

SEQ ID NO: 83070 - DNA, 20 bp, Artificial Sequence
  MKO10083070_B_Egflam
  gRNA
gtagcagcctacagtcagac

SEQ ID NO: 83071 - DNA, 20 bp, Artificial Sequence
  MKO10083071_B_Egfr
  gRNA
tgaatcgcacagcaccaatc

SEQ ID NO: 83072 - DNA, 20 bp, Artificial Sequence
  MKO10083072_B_Egfr
  gRNA
cctcattgccctcaacaccg

SEQ ID NO: 83073 - DNA, 20 bp, Artificial Sequence
  MKO10083073_B_Egfr
  gRNA
ctgaccgcgctctgcgccgc

SEQ ID NO: 83074 - DNA, 20 bp, Artificial Sequence
  MKO10083074_B_Egf
  gRNA
gaggacgctgctaaggatcc

SEQ ID NO: 83075 - DNA, 20 bp, Artificial Sequence
  MKO10083075_B_Egf
  gRNA
acatccgtcaaatatagcag

SEQ ID NO: 83076 - DNA, 20 bp, Artificial Sequence
  MKO10083076_B_Egf
  gRNA
gggaatatcggtgctgactc

SEQ ID NO: 83077 - DNA, 20 bp, Artificial Sequence
  MKO10083077_B_Egln1
  gRNA
cgtcacgttgataacccaaa

SEQ ID NO: 83078 - DNA, 20 bp, Artificial Sequence
  MKO10083078_B_Egln1
  gRNA
ctaggtacgcaataactgtt

SEQ ID NO: 83079 - DNA, 20 bp, Artificial Sequence
  MKO10083079_B_Egln1
  gRNA
ttgcaggtgagaaaggtgtg

SEQ ID NO: 83080 - DNA, 20 bp, Artificial Sequence
  MKO10083080_B_Egln2
  gRNA
tcacctcatgtgggttccgt

SEQ ID NO: 83081 - DNA, 20 bp, Artificial Sequence
  MKO10083081_B_Egln2
  gRNA
ggccattaggtaggtgtagt

SEQ ID NO: 83082 - DNA, 20 bp, Artificial Sequence
  MKO10083082_B_Egln2
  gRNA
acatcgagccactctttgac

SEQ ID NO: 83083 - DNA, 20 bp, Artificial Sequence
  MKO10083083_B_Egln3
  gRNA
tggcgtcccaattcttattc

SEQ ID NO: 83084 - DNA, 20 bp, Artificial Sequence
  MKO10083084_B_Egln3
  gRNA
acaggtacgctatgactgtc

SEQ ID NO: 83085 - DNA, 20 bp, Artificial Sequence
  MKO10083085_B_Egln3
  gRNA
cagaagccaaaaagaaattc

SEQ ID NO: 83086 - DNA, 20 bp, Artificial Sequence
  MKO10083086_B_Egr1
  gRNA
ctattaccgccgctgccctc

SEQ ID NO: 83087 - DNA, 20 bp, Artificial Sequence
  MKO10083087_B_Egr1
  gRNA
ggtgggcgcagccgagtaga

SEQ ID NO: 83088 - DNA, 20 bp, Artificial Sequence
  MKO10083088_B_Egr1
  gRNA
gctcatccgagcgagaaaag

SEQ ID NO: 83089 - DNA, 20 bp, Artificial Sequence
  MKO10083089_B_Egr2
  gRNA
gacctcgaaagtaccctaac

SEQ ID NO: 83090 - DNA, 20 bp, Artificial Sequence
  MKO10083090_B_Egr2
  gRNA
cagggaaacggctttcgatc

SEQ ID NO: 83091 - DNA, 20 bp, Artificial Sequence
  MKO10083091_B_Egr2
  gRNA
ctgtgcggtaacagcgccat

SEQ ID NO: 83092 - DNA, 20 bp, Artificial Sequence
  MKO10083092_B_Egr3
  gRNA
cagcttctcggcgagtttgc

SEQ ID NO: 83093 - DNA, 20 bp, Artificial Sequence
  MKO10083093_B_Egr3
  gRNA
ctgcgtactgagcgcccctg

SEQ ID NO: 83094 - DNA, 20 bp, Artificial Sequence
  MKO10083094_B_Egr3
  gRNA
gcttggccgattggtaatcc

SEQ ID NO: 83095 - DNA, 20 bp, Artificial Sequence
  MKO10083095_B_Egr4
  gRNA
gcctgctagggacgctccct

SEQ ID NO: 83096 - DNA, 20 bp, Artificial Sequence
  MKO10083096_B_Egr4
  gRNA
catcggggcccgcggggaaa

SEQ ID NO: 83097 - DNA, 20 bp, Artificial Sequence
  MKO10083097_B_Egr4
  gRNA
cgctgcggctgaagttgcgc

SEQ ID NO: 83098 - DNA, 20 bp, Artificial Sequence
  MKO10083098_B_Ehbp1l1
  gRNA
ggcatccagaacccataccg

SEQ ID NO: 83099 - DNA, 20 bp, Artificial Sequence
  MKO10083099_B_Ehbp1l1
  gRNA
cataccaccaccagcttgtc

SEQ ID NO: 83100 - DNA, 20 bp, Artificial Sequence
  MKO10083100_B_Ehbp1l1
  gRNA
tttcatactggtccacatga

SEQ ID NO: 83101 - DNA, 20 bp, Artificial Sequence
  MKO10083101_B_Ehbp1
  gRNA
ctatcaccatggcttcagtt

SEQ ID NO: 83102 - DNA, 20 bp, Artificial Sequence
  MKO10083102_B_Ehbp1
  gRNA
tgataggcaaccagataaac

SEQ ID NO: 83103 - DNA, 20 bp, Artificial Sequence
  MKO10083103_B_Ehbp1
  gRNA
aatcactgtgacgctgttta

SEQ ID NO: 83104 - DNA, 20 bp, Artificial Sequence
  MKO10083104_B_Ehd1
  gRNA
ggaagtcgccggaggagatc

SEQ ID NO: 83105 - DNA, 20 bp, Artificial Sequence
  MKO10083105_B_Ehd1
  gRNA
gttgttcgacgcccacaagc

SEQ ID NO: 83106 - DNA, 20 bp, Artificial Sequence
  MKO10083106_B_Ehd1
  gRNA
gctctctttcccgaaaacat

SEQ ID NO: 83107 - DNA, 20 bp, Artificial Sequence
  MKO10083107_B_Ehd2
  gRNA
ctgagcgatgtcgaccgaga

SEQ ID NO: 83108 - DNA, 20 bp, Artificial Sequence
  MKO10083108_B_Ehd2
  gRNA
catctttgcgaagatccagc

SEQ ID NO: 83109 - DNA, 20 bp, Artificial Sequence
  MKO10083109_B_Ehd2
  gRNA
ggctccgcacctgcatcttc

SEQ ID NO: 83110 - DNA, 20 bp, Artificial Sequence
  MKO10083110_B_Ehd3
  gRNA
tccggccatagatctcagcc

SEQ ID NO: 83111 - DNA, 20 bp, Artificial Sequence
  MKO10083111_B_Ehd3
  gRNA
ttcagaaagctcaacgcctt

SEQ ID NO: 83112 - DNA, 20 bp, Artificial Sequence
  MKO10083112_B_Ehd3
  gRNA
tttctttggatccaccacca

SEQ ID NO: 83113 - DNA, 20 bp, Artificial Sequence
  MKO10083113_B_Ehd4
  gRNA
ttccgaaagcttagtcgctt

SEQ ID NO: 83114 - DNA, 20 bp, Artificial Sequence
  MKO10083114_B_Ehd4
  gRNA
cgagaataccagatttctgc

SEQ ID NO: 83115 - DNA, 20 bp, Artificial Sequence
  MKO10083115_B_Ehd4
  gRNA
ttccaaagcgactaagcttt

SEQ ID NO: 83116 - DNA, 20 bp, Artificial Sequence
  MKO10083116_B_Ehf
  gRNA
tggacagtaagactttctgc

SEQ ID NO: 83117 - DNA, 20 bp, Artificial Sequence
  MKO10083117_B_Ehf
  gRNA
cttaccaactggaaggtgac

SEQ ID NO: 83118 - DNA, 20 bp, Artificial Sequence
  MKO10083118_B_Ehf
  gRNA
acctactgtgctaccatagc

SEQ ID NO: 83119 - DNA, 20 bp, Artificial Sequence
  MKO10083119_B_Ehhadh
  gRNA
gctcttgacttaattacctc

SEQ ID NO: 83120 - DNA, 20 bp, Artificial Sequence
  MKO10083120_B_Ehhadh
  gRNA
aaccgtctgagcaaatttga

SEQ ID NO: 83121 - DNA, 20 bp, Artificial Sequence
  MKO10083121_B_Ehhadh
  gRNA
tatggtccaaactagctttc

SEQ ID NO: 83122 - DNA, 20 bp, Artificial Sequence
  MKO10083122_B_Ehmt1
  gRNA
tatggtcttgaacttctcta

SEQ ID NO: 83123 - DNA, 20 bp, Artificial Sequence
  MKO10083123_B_Ehmt1
  gRNA
tttcatgcagcaatcctgct

SEQ ID NO: 83124 - DNA, 20 bp, Artificial Sequence
  MKO10083124_B_Ehmt1
  gRNA
gcatgaaaactgagctgcta

SEQ ID NO: 83125 - DNA, 20 bp, Artificial Sequence
  MKO10083125_B_Ehmt2
  gRNA
cggggacgaacccgagagcc

SEQ ID NO: 83126 - DNA, 20 bp, Artificial Sequence
  MKO10083126_B_Ehmt2
  gRNA
acttcagggggccgcttctc

SEQ ID NO: 83127 - DNA, 20 bp, Artificial Sequence
  MKO10083127_B_Ehmt2
  gRNA
gggggaggcccccgctgaga

SEQ ID NO: 83128 - DNA, 20 bp, Artificial Sequence
  MKO10083128_B_Ei24
  gRNA
caactttgctaagcacaaac

SEQ ID NO: 83129 - DNA, 20 bp, Artificial Sequence
  MKO10083129_B_Ei24
  gRNA
tacttcagtcagtaacagcc

SEQ ID NO: 83130 - DNA, 20 bp, Artificial Sequence
  MKO10083130_B_Ei24
  gRNA
caccattccaagcacaacac

SEQ ID NO: 83131 - DNA, 20 bp, Artificial Sequence
  MKO10083131_B_Eid1
  gRNA
aatcgactgaccgaagagct

SEQ ID NO: 83132 - DNA, 20 bp, Artificial Sequence
  MKO10083132_B_Eid1
  gRNA
aggtaggccgcggggcccgc

SEQ ID NO: 83133 - DNA, 20 bp, Artificial Sequence
  MKO10083133_B_Eid1
  gRNA
catcaaactcgtcgccttcc

SEQ ID NO: 83134 - DNA, 20 bp, Artificial Sequence
  MKO10083134_B_Eid2b
  gRNA
ggcgtcgaaggccgcctccc

SEQ ID NO: 83135 - DNA, 20 bp, Artificial Sequence
  MKO10083135_B_Eid2b
  gRNA
acgtcgccgacgccgttcat

SEQ ID NO: 83136 - DNA, 20 bp, Artificial Sequence
  MKO10083136_B_Eid2b
  gRNA
ctcacggcctccgacgcccg

SEQ ID NO: 83137 - DNA, 20 bp, Artificial Sequence
  MKO10083137_B_Eid2
  gRNA
gagcagcgagccgcgaccgc

SEQ ID NO: 83138 - DNA, 20 bp, Artificial Sequence
  MKO10083138_B_Eid2
  gRNA
tcgtggaggcctgccgagcc

SEQ ID NO: 83139 - DNA, 20 bp, Artificial Sequence
  MKO10083139_B_Eid2
  gRNA
ggagacccggggacgcccaa

SEQ ID NO: 83140 - DNA, 20 bp, Artificial Sequence
  MKO10083140_B_Eid3
  gRNA
agaagtgccgcaaaatccgc

SEQ ID NO: 83141 - DNA, 20 bp, Artificial Sequence
  MKO10083141_B_Eid3
  gRNA
gtgattcctattcgtactgc

SEQ ID NO: 83142 - DNA, 20 bp, Artificial Sequence
  MKO10083142_B_Eid3
  gRNA
cactccgtcaaacagcacgt

SEQ ID NO: 83143 - DNA, 20 bp, Artificial Sequence
  MKO10083143_B_Eif1ad
  gRNA
acctcatgcagattgttccc

SEQ ID NO: 83144 - DNA, 20 bp, Artificial Sequence
  MKO10083144_B_Eif1ad
  gRNA
ctcatgatactgtctgtgat

SEQ ID NO: 83145 - DNA, 20 bp, Artificial Sequence
  MKO10083145_B_Eif1ad
  gRNA
gaccctccttctgtagagag

SEQ ID NO: 83146 - DNA, 20 bp, Artificial Sequence
  MKO10083146_B_Eif1ax
  gRNA
atgctctggaagctcgccat

SEQ ID NO: 83147 - DNA, 20 bp, Artificial Sequence
  MKO10083147_B_Eif1ax
  gRNA
aaagcgagagcttgtgttca

SEQ ID NO: 83148 - DNA, 20 bp, Artificial Sequence
  MKO10083148_B_Eif1ax
  gRNA
aagagactgtgccacatcag

SEQ ID NO: 83149 - DNA, 20 bp, Artificial Sequence
  MKO10083149_B_Eif1a
  gRNA
tcaaaatgctgggaaatgga

SEQ ID NO: 83150 - DNA, 20 bp, Artificial Sequence
  MKO10083150_B_Eif1a
  gRNA
ggatgggcaggagtatgctc

SEQ ID NO: 83151 - DNA, 20 bp, Artificial Sequence
  MKO10083151_B_Eif1a
  gRNA
aggaggctgtgccatataag

SEQ ID NO: 83152 - DNA, 20 bp, Artificial Sequence
  MKO10083152_B_Eif1b
  gRNA
tgaataacctctccgtactc

SEQ ID NO: 83153 - DNA, 20 bp, Artificial Sequence
  MKO10083153_B_Eif1b
  gRNA
ttcacaggttggcatcgtca

SEQ ID NO: 83154 - DNA, 20 bp, Artificial Sequence
  MKO10083154_B_Eif1b
  gRNA
cactcacctccagaagaaac

SEQ ID NO: 83155 - DNA, 20 bp, Artificial Sequence
  MKO10083155_B_Eif1
  gRNA
atccagaacctccactcttt

SEQ ID NO: 83156 - DNA, 20 bp, Artificial Sequence
  MKO10083156_B_Eif1
  gRNA
catatgccagttcctgatag

SEQ ID NO: 83157 - DNA, 20 bp, Artificial Sequence
  MKO10083157_B_Eif1
  gRNA
cgtaatcatcagcgatccct

SEQ ID NO: 83158 - DNA, 20 bp, Artificial Sequence
  MKO10083158_B_Eif2ak1
  gRNA
tacctgacggactctctctt

SEQ ID NO: 83159 - DNA, 20 bp, Artificial Sequence
  MKO10083159_B_Eif2ak1
  gRNA
gctgaccatctaatttgttc

SEQ ID NO: 83160 - DNA, 20 bp, Artificial Sequence
  MKO10083160_B_Eif2ak1
  gRNA
tttgaagagcttgccatctt

SEQ ID NO: 83161 - DNA, 20 bp, Artificial Sequence
  MKO10083161_B_Eif2ak2
  gRNA
tgtagatgtgacaacgctag

SEQ ID NO: 83162 - DNA, 20 bp, Artificial Sequence
  MKO10083162_B_Eif2ak2
  gRNA
ctcctgctttgatctacctt

SEQ ID NO: 83163 - DNA, 20 bp, Artificial Sequence
  MKO10083163_B_Eif2ak2
  gRNA
aagtatatcaacagctaatt

SEQ ID NO: 83164 - DNA, 20 bp, Artificial Sequence
  MKO10083164_B_Eif2ak3
  gRNA
ccgcctggaatgggagtacc

SEQ ID NO: 83165 - DNA, 20 bp, Artificial Sequence
  MKO10083165_B_Eif2ak3
  gRNA
taaaagtttccgttgctgat

SEQ ID NO: 83166 - DNA, 20 bp, Artificial Sequence
  MKO10083166_B_Eif2ak3
  gRNA
gcactggatgccgagaatga

SEQ ID NO: 83167 - DNA, 20 bp, Artificial Sequence
  MKO10083167_B_Eif2ak4
  gRNA
ctttccttctctgaatctcg

SEQ ID NO: 83168 - DNA, 20 bp, Artificial Sequence
  MKO10083168_B_Eif2ak4
  gRNA
tcctccacgagattcagaga

SEQ ID NO: 83169 - DNA, 20 bp, Artificial Sequence
  MKO10083169_B_Eif2ak4
  gRNA
actcacacatctgggtatgt

SEQ ID NO: 83170 - DNA, 20 bp, Artificial Sequence
  MKO10083170_B_Eif2a
  gRNA
acattgtttgcctggagcaa

SEQ ID NO: 83171 - DNA, 20 bp, Artificial Sequence
  MKO10083171_B_Eif2a
  gRNA
ttctttagtcagaggatcag

SEQ ID NO: 83172 - DNA, 20 bp, Artificial Sequence
  MKO10083172_B_Eif2a
  gRNA
caactttatgacatgaaaac

SEQ ID NO: 83173 - DNA, 20 bp, Artificial Sequence
  MKO10083173_B_Eif2b1
  gRNA
cggggcttacagagtattcc

SEQ ID NO: 83174 - DNA, 20 bp, Artificial Sequence
  MKO10083174_B_Eif2b1
  gRNA
tcgacagggatattcttctc

SEQ ID NO: 83175 - DNA, 20 bp, Artificial Sequence
  MKO10083175_B_Eif2b1
  gRNA
tcctaaaatggcctcagctg

SEQ ID NO: 83176 - DNA, 20 bp, Artificial Sequence
  MKO10083176_B_Eif2b2
  gRNA
cagtgacgagagcgatcagc

SEQ ID NO: 83177 - DNA, 20 bp, Artificial Sequence
  MKO10083177_B_Eif2b2
  gRNA
tgttatgtcgagagtcaaca

SEQ ID NO: 83178 - DNA, 20 bp, Artificial Sequence
  MKO10083178_B_Eif2b2
  gRNA
ggagagtcctcaagatcatc

SEQ ID NO: 83179 - DNA, 20 bp, Artificial Sequence
  MKO10083179_B_Eif2b3
  gRNA
gtggagcagcgtgacttcat

SEQ ID NO: 83180 - DNA, 20 bp, Artificial Sequence
  MKO10083180_B_Eif2b3
  gRNA
caaatccaacacgctcaagc

SEQ ID NO: 83181 - DNA, 20 bp, Artificial Sequence
  MKO10083181_B_Eif2b3
  gRNA
attctgcgcagagagccttt

SEQ ID NO: 83182 - DNA, 20 bp, Artificial Sequence
  MKO10083182_B_Eif2b4
  gRNA
cgccgaaaggagagccaagc

SEQ ID NO: 83183 - DNA, 20 bp, Artificial Sequence
  MKO10083183_B_Eif2b4
  gRNA
ccctcacttaccccgggccg

SEQ ID NO: 83184 - DNA, 20 bp, Artificial Sequence
  MKO10083184_B_Eif2b4
  gRNA
acacagcagagccaatttct

SEQ ID NO: 83185 - DNA, 20 bp, Artificial Sequence
  MKO10083185_B_Eif2b5
  gRNA
aaatgtttcctgtacacccg

SEQ ID NO: 83186 - DNA, 20 bp, Artificial Sequence
  MKO10083186_B_Eif2b5
  gRNA
ggagattcgatatgatttgt

SEQ ID NO: 83187 - DNA, 20 bp, Artificial Sequence
  MKO10083187_B_Eif2b5
  gRNA
ccaatggaaaggaaaagcgc

SEQ ID NO: 83188 - DNA, 20 bp, Artificial Sequence
  MKO10083188_B_Eif2d
  gRNA
tcacctgtccgagcccttga

SEQ ID NO: 83189 - DNA, 20 bp, Artificial Sequence
  MKO10083189_B_Eif2d
  gRNA
cagatctctgaattgatacc

SEQ ID NO: 83190 - DNA, 20 bp, Artificial Sequence
  MKO10083190_B_Eif2d
  gRNA
tgtgttggacttgacccgaa

SEQ ID NO: 83191 - DNA, 20 bp, Artificial Sequence
  MKO10083191_B_Eif2s1
  gRNA
gtacttgtcatcgaagaccc

SEQ ID NO: 83192 - DNA, 20 bp, Artificial Sequence
  MKO10083192_B_Eif2s1
  gRNA
tgcatgcttaaaagcatcgt

SEQ ID NO: 83193 - DNA, 20 bp, Artificial Sequence
  MKO10083193_B_Eif2s1
  gRNA
tctcagagacccatctatct

SEQ ID NO: 83194 - DNA, 20 bp, Artificial Sequence
  MKO10083194_B_Eif2s2
  gRNA
tgaagctgaagaagctataa

SEQ ID NO: 83195 - DNA, 20 bp, Artificial Sequence
  MKO10083195_B_Eif2s2
  gRNA
tcaagagccagccgagccag

SEQ ID NO: 83196 - DNA, 20 bp, Artificial Sequence
  MKO10083196_B_Eif2s2
  gRNA
gaagacagcaaaaaagatga

SEQ ID NO: 83197 - DNA, 20 bp, Artificial Sequence
  MKO10083197_B_Eif2s3x
  gRNA
agacaagctacaattaatat

SEQ ID NO: 83198 - DNA, 20 bp, Artificial Sequence
  MKO10083198_B_Eif2s3x
  gRNA
ctgataacttcatgtgaaag

SEQ ID NO: 83199 - DNA, 20 bp, Artificial Sequence
  MKO10083199_B_Eif2s3x
  gRNA
acaattggtcacgtagctca

SEQ ID NO: 83200 - DNA, 20 bp, Artificial Sequence
  MKO10083200_B_Eif2s3y
  gRNA
aaggaaacttcagactagtc

SEQ ID NO: 83201 - DNA, 20 bp, Artificial Sequence
  MKO10083201_B_Eif2s3y
  gRNA
acagttgtaaaagccatttc

SEQ ID NO: 83202 - DNA, 20 bp, Artificial Sequence
  MKO10083202_B_Eif2s3y
  gRNA
ttgatggcaactatgctgaa

SEQ ID NO: 83203 - DNA, 20 bp, Artificial Sequence
  MKO10083203_B_Eif3a
  gRNA
actcagccttccgagtatac

SEQ ID NO: 83204 - DNA, 20 bp, Artificial Sequence
  MKO10083204_B_Eif3a
  gRNA
gccaattatgctgaaatact

SEQ ID NO: 83205 - DNA, 20 bp, Artificial Sequence
  MKO10083205_B_Eif3a
  gRNA
tccaagtatttcagcataat

SEQ ID NO: 83206 - DNA, 20 bp, Artificial Sequence
  MKO10083206_B_Eif3b
  gRNA
aaacgccgatggctacaagc

SEQ ID NO: 83207 - DNA, 20 bp, Artificial Sequence
  MKO10083207_B_Eif3b
  gRNA
acatgacgatcagcgatgag

SEQ ID NO: 83208 - DNA, 20 bp, Artificial Sequence
  MKO10083208_B_Eif3b
  gRNA
catcttctggaatgacgtca

SEQ ID NO: 83209 - DNA, 20 bp, Artificial Sequence
  MKO10083209_B_Eif3c
  gRNA
gtaccttgcgccagaagatc

SEQ ID NO: 83210 - DNA, 20 bp, Artificial Sequence
  MKO10083210_B_Eif3c
  gRNA
caggcctttgttactgagcg

SEQ ID NO: 83211 - DNA, 20 bp, Artificial Sequence
  MKO10083211_B_Eif3c
  gRNA
ctcgaatcttcatggcatta

SEQ ID NO: 83212 - DNA, 20 bp, Artificial Sequence
  MKO10083212_B_Eif3d
  gRNA
gggacactacctgtgacttc

SEQ ID NO: 83213 - DNA, 20 bp, Artificial Sequence
  MKO10083213_B_Eif3d
  gRNA
gggccacataccaggacaag

SEQ ID NO: 83214 - DNA, 20 bp, Artificial Sequence
  MKO10083214_B_Eif3d
  gRNA
cactcttgggcagggtctgt

SEQ ID NO: 83215 - DNA, 20 bp, Artificial Sequence
  MKO10083215_B_Eif3e
  gRNA
caggatgttatttgactacc

SEQ ID NO: 83216 - DNA, 20 bp, Artificial Sequence
  MKO10083216_B_Eif3e
  gRNA
tttcagctgcgcaacaactg

SEQ ID NO: 83217 - DNA, 20 bp, Artificial Sequence
  MKO10083217_B_Eif3e
  gRNA
catagcaaaatccaccatat

SEQ ID NO: 83218 - DNA, 20 bp, Artificial Sequence
  MKO10083218_B_Eif3f
  gRNA
cccgaaccccattcacctca

SEQ ID NO: 83219 - DNA, 20 bp, Artificial Sequence
  MKO10083219_B_Eif3f
  gRNA
cccttaggtggctgttgaca

SEQ ID NO: 83220 - DNA, 20 bp, Artificial Sequence
  MKO10083220_B_Eif3f
  gRNA
tcatcttctgactcattgtg

SEQ ID NO: 83221 - DNA, 20 bp, Artificial Sequence
  MKO10083221_B_Eif3g
  gRNA
agtgactgagtacaagatag

SEQ ID NO: 83222 - DNA, 20 bp, Artificial Sequence
  MKO10083222_B_Eif3g
  gRNA
agacccgctgccacctccca

SEQ ID NO: 83223 - DNA, 20 bp, Artificial Sequence
  MKO10083223_B_Eif3g
  gRNA
ccacagcctttgatgccttc

SEQ ID NO: 83224 - DNA, 20 bp, Artificial Sequence
  MKO10083224_B_Eif3h
  gRNA
tcctccagtacagtatcaga

SEQ ID NO: 83225 - DNA, 20 bp, Artificial Sequence
  MKO10083225_B_Eif3h
  gRNA
cgtgctcctgggtctggttg

SEQ ID NO: 83226 - DNA, 20 bp, Artificial Sequence
  MKO10083226_B_Eif3h
  gRNA
cagactgactcctaaactga

SEQ ID NO: 83227 - DNA, 20 bp, Artificial Sequence
  MKO10083227_B_Eif3i
  gRNA
cggtcctcaccgatctggct

SEQ ID NO: 83228 - DNA, 20 bp, Artificial Sequence
  MKO10083228_B_Eif3i
  gRNA
gcccccaaagtcaaagccgc

SEQ ID NO: 83229 - DNA, 20 bp, Artificial Sequence
  MKO10083229_B_Eif3i
  gRNA
ctgacaacagctgtcgtctc

SEQ ID NO: 83230 - DNA, 20 bp, Artificial Sequence
  MKO10083230_B_Eif3j1
  gRNA
aaaagataaaagagaaagaa

SEQ ID NO: 83231 - DNA, 20 bp, Artificial Sequence
  MKO10083231_B_Eif3j1
  gRNA
ggcaagaagaaattaaaaag

SEQ ID NO: 83232 - DNA, 20 bp, Artificial Sequence
  MKO10083232_B_Eif3j1
  gRNA
agcaattagcagataaactc

SEQ ID NO: 83233 - DNA, 20 bp, Artificial Sequence
  MKO10083233_B_Eif3j2
  gRNA
ccggttcgagatggcggcgg

SEQ ID NO: 83234 - DNA, 20 bp, Artificial Sequence
  MKO10083234_B_Eif3j2
  gRNA
catatccaccataatctgcc

SEQ ID NO: 83235 - DNA, 20 bp, Artificial Sequence
  MKO10083235_B_Eif3j2
  gRNA
ggcaagaagaaattaaaaag

SEQ ID NO: 83236 - DNA, 20 bp, Artificial Sequence
  MKO10083236_B_Eif3k
  gRNA
tgagggctttcagcagaatc

SEQ ID NO: 83237 - DNA, 20 bp, Artificial Sequence
  MKO10083237_B_Eif3k
  gRNA
caaagagaatgcctatgatc

SEQ ID NO: 83238 - DNA, 20 bp, Artificial Sequence
  MKO10083238_B_Eif3k
  gRNA
cctgccactttcaagccttc

SEQ ID NO: 83239 - DNA, 20 bp, Artificial Sequence
  MKO10083239_B_Eif3l
  gRNA
ctgctcatactgccgctcat

SEQ ID NO: 83240 - DNA, 20 bp, Artificial Sequence
  MKO10083240_B_Eif3l
  gRNA
caagaatacaccgtggcctg

SEQ ID NO: 83241 - DNA, 20 bp, Artificial Sequence
  MKO10083241_B_Eif3l
  gRNA
tacacctaccattgccaact

SEQ ID NO: 83242 - DNA, 20 bp, Artificial Sequence
  MKO10083242_B_Eif3m
  gRNA
ggccatccagtacatcccaa

SEQ ID NO: 83243 - DNA, 20 bp, Artificial Sequence
  MKO10083243_B_Eif3m
  gRNA
tgagctctcagaagaaaact

SEQ ID NO: 83244 - DNA, 20 bp, Artificial Sequence
  MKO10083244_B_Eif3m
  gRNA
ttccttcagacacacatcac

SEQ ID NO: 83245 - DNA, 20 bp, Artificial Sequence
  MKO10083245_B_Eif4a1
  gRNA
ctgcattcagatacaaaagg

SEQ ID NO: 83246 - DNA, 20 bp, Artificial Sequence
  MKO10083246_B_Eif4a1
  gRNA
atcaacagatccagagacaa

SEQ ID NO: 83247 - DNA, 20 bp, Artificial Sequence
  MKO10083247_B_Eif4a1
  gRNA
gagtaactggaacgagattg

SEQ ID NO: 83248 - DNA, 20 bp, Artificial Sequence
  MKO10083248_B_Eif4a2
  gRNA
atggatcaaaatgttcgttt

SEQ ID NO: 83249 - DNA, 20 bp, Artificial Sequence
  MKO10083249_B_Eif4a2
  gRNA
gctattatcccttgtattaa

SEQ ID NO: 83250 - DNA, 20 bp, Artificial Sequence
  MKO10083250_B_Eif4a2
  gRNA
gctctttgctgaatagctga

SEQ ID NO: 83251 - DNA, 20 bp, Artificial Sequence
  MKO10083251_B_Eif4a3
  gRNA
gcacgctgctgaatcgctga

SEQ ID NO: 83252 - DNA, 20 bp, Artificial Sequence
  MKO10083252_B_Eif4a3
  gRNA
ctgcagcactgagacactga

SEQ ID NO: 83253 - DNA, 20 bp, Artificial Sequence
  MKO10083253_B_Eif4a3
  gRNA
tgtctcagtgctgcagtgct

SEQ ID NO: 83254 - DNA, 20 bp, Artificial Sequence
  MKO10083254_B_Eif4b
  gRNA
tcagcgctgtacgcttacca

SEQ ID NO: 83255 - DNA, 20 bp, Artificial Sequence
  MKO10083255_B_Eif4b
  gRNA
gctctcagtctctaggtaac

SEQ ID NO: 83256 - DNA, 20 bp, Artificial Sequence
  MKO10083256_B_Eif4b
  gRNA
tgctctgagtctcaatgaag

SEQ ID NO: 83257 - DNA, 20 bp, Artificial Sequence
  MKO10083257_B_Eif4e1b
  gRNA
taatcctcaggtgggttctg

SEQ ID NO: 83258 - DNA, 20 bp, Artificial Sequence
  MKO10083258_B_Eif4e1b
  gRNA
gcttgctggccagcttgata

SEQ ID NO: 83259 - DNA, 20 bp, Artificial Sequence
  MKO10083259_B_Eif4e1b
  gRNA
agtcaccaagtttaacactg

SEQ ID NO: 83260 - DNA, 20 bp, Artificial Sequence
  MKO10083260_B_Eif4e2
  gRNA
attgctccccgagcatagcc

SEQ ID NO: 83261 - DNA, 20 bp, Artificial Sequence
  MKO10083261_B_Eif4e2
  gRNA
tacagccacatggtacgtcc

SEQ ID NO: 83262 - DNA, 20 bp, Artificial Sequence
  MKO10083262_B_Eif4e2
  gRNA
ggtccccaggacgtaccatg

SEQ ID NO: 83263 - DNA, 20 bp, Artificial Sequence
  MKO10083263_B_Eif4e3
  gRNA
tgtagttatcacttaatgag

SEQ ID NO: 83264 - DNA, 20 bp, Artificial Sequence
  MKO10083264_B_Eif4e3
  gRNA
ggaggaggagagtaatgcga

SEQ ID NO: 83265 - DNA, 20 bp, Artificial Sequence
  MKO10083265_B_Eif4e3
  gRNA
aagtgataactacatctcaa

SEQ ID NO: 83266 - DNA, 20 bp, Artificial Sequence
  MKO10083266_B_Eif4ebp1
  gRNA
gaaccaggattatctatgac

SEQ ID NO: 83267 - DNA, 20 bp, Artificial Sequence
  MKO10083267_B_Eif4ebp1
  gRNA
tgaagagtcacaatttgaga

SEQ ID NO: 83268 - DNA, 20 bp, Artificial Sequence
  MKO10083268_B_Eif4ebp1
  gRNA
ggagctgcacgccatcgccg

SEQ ID NO: 83269 - DNA, 20 bp, Artificial Sequence
  MKO10083269_B_Eif4ebp2
  gRNA
ttcaattaaggcgccaggac

SEQ ID NO: 83270 - DNA, 20 bp, Artificial Sequence
  MKO10083270_B_Eif4ebp2
  gRNA
ggatgaggctcagtttgaga

SEQ ID NO: 83271 - DNA, 20 bp, Artificial Sequence
  MKO10083271_B_Eif4ebp2
  gRNA
accaccggccgacgcggaca

SEQ ID NO: 83272 - DNA, 20 bp, Artificial Sequence
  MKO10083272_B_Eif4ebp3
  gRNA
agcagtaccaccctccaagt

SEQ ID NO: 83273 - DNA, 20 bp, Artificial Sequence
  MKO10083273_B_Eif4ebp3
  gRNA
agatgacgaacagtttgaaa

SEQ ID NO: 83274 - DNA, 20 bp, Artificial Sequence
  MKO10083274_B_Eif4ebp3
  gRNA
ccctggaattgggcaactcg

SEQ ID NO: 83275 - DNA, 20 bp, Artificial Sequence
  MKO10083275_B_Eif4enif1
  gRNA
gctgttagctcccgacgatc

SEQ ID NO: 83276 - DNA, 20 bp, Artificial Sequence
  MKO10083276_B_Eif4enif1
  gRNA
gctattctgcgcaccagaga

SEQ ID NO: 83277 - DNA, 20 bp, Artificial Sequence
  MKO10083277_B_Eif4enif1
  gRNA
gcctctctgaaaaatatgac

SEQ ID NO: 83278 - DNA, 20 bp, Artificial Sequence
  MKO10083278_B_Eif4e
  gRNA
taatcccccacctgcagaag

SEQ ID NO: 83279 - DNA, 20 bp, Artificial Sequence
  MKO10083279_B_Eif4e
  gRNA
caaacttagagatcaatcga

SEQ ID NO: 83280 - DNA, 20 bp, Artificial Sequence
  MKO10083280_B_Eif4e
  gRNA
aaaatgataaaagcaaaact

SEQ ID NO: 83281 - DNA, 20 bp, Artificial Sequence
  MKO10083281_B_Eif4g1
  gRNA
cacgccttctcagccccgcc

SEQ ID NO: 83282 - DNA, 20 bp, Artificial Sequence
  MKO10083282_B_Eif4g1
  gRNA
gtgttcatttgtgtcgcttg

SEQ ID NO: 83283 - DNA, 20 bp, Artificial Sequence
  MKO10083283_B_Eif4g1
  gRNA
ttgattacctgtgggagtcc

SEQ ID NO: 83284 - DNA, 20 bp, Artificial Sequence
  MKO10083284_B_Eif4g2
  gRNA
ccagcagtatgaccccttta

SEQ ID NO: 83285 - DNA, 20 bp, Artificial Sequence
  MKO10083285_B_Eif4g2
  gRNA
gagtctaaactcatccttaa

SEQ ID NO: 83286 - DNA, 20 bp, Artificial Sequence
  MKO10083286_B_Eif4g2
  gRNA
atacctgttgccagcagtct

SEQ ID NO: 83287 - DNA, 20 bp, Artificial Sequence
  MKO10083287_B_Eif4g3
  gRNA
catgccgtaccccgtgaccc

SEQ ID NO: 83288 - DNA, 20 bp, Artificial Sequence
  MKO10083288_B_Eif4g3
  gRNA
gggaggattcagacccatcc

SEQ ID NO: 83289 - DNA, 20 bp, Artificial Sequence
  MKO10083289_B_Eif4g3
  gRNA
tacagtacctgatgatgggc

SEQ ID NO: 83290 - DNA, 20 bp, Artificial Sequence
  MKO10083290_B_Eif4h
  gRNA
tcccgggatgacttcaactc

SEQ ID NO: 83291 - DNA, 20 bp, Artificial Sequence
  MKO10083291_B_Eif4h
  gRNA
cttcgtgtggacattgcaga

SEQ ID NO: 83292 - DNA, 20 bp, Artificial Sequence
  MKO10083292_B_Eif4h
  gRNA
taccagagttgaagtcatcc

SEQ ID NO: 83293 - DNA, 20 bp, Artificial Sequence
  MKO10083293_B_Eif5a2
  gRNA
tacagcgtattcttcactca

SEQ ID NO: 83294 - DNA, 20 bp, Artificial Sequence
  MKO10083294_B_Eif5a2
  gRNA
gcagggcttgtctatttgca

SEQ ID NO: 83295 - DNA, 20 bp, Artificial Sequence
  MKO10083295_B_Eif5a2
  gRNA
ctaatagctcatatgcattc

SEQ ID NO: 83296 - DNA, 20 bp, Artificial Sequence
  MKO10083296_B_Eif5a
  gRNA
ctcgtacctccccactgtcc

SEQ ID NO: 83297 - DNA, 20 bp, Artificial Sequence
  MKO10083297_B_Eif5a
  gRNA
tgggtacctatccctgctcc

SEQ ID NO: 83298 - DNA, 20 bp, Artificial Sequence
  MKO10083298_B_Eif5a
  gRNA
agctgttgcaatcaaggcca

SEQ ID NO: 83299 - DNA, 20 bp, Artificial Sequence
  MKO10083299_B_Eif5b
  gRNA
cagagacgccgctgcagtca

SEQ ID NO: 83300 - DNA, 20 bp, Artificial Sequence
  MKO10083300_B_Eif5b
  gRNA
gcccaaatcagtatcatcct

SEQ ID NO: 83301 - DNA, 20 bp, Artificial Sequence
  MKO10083301_B_Eif5b
  gRNA
atctactgttaaagctatcc

SEQ ID NO: 83302 - DNA, 20 bp, Artificial Sequence
  MKO10083302_B_Eif5
  gRNA
ttcctttaggttgagggcaa

SEQ ID NO: 83303 - DNA, 20 bp, Artificial Sequence
  MKO10083303_B_Eif5
  gRNA
cctgtagagaatagtgacat

SEQ ID NO: 83304 - DNA, 20 bp, Artificial Sequence
  MKO10083304_B_Eif5
  gRNA
ttcattctcaaaaacccacc

SEQ ID NO: 83305 - DNA, 20 bp, Artificial Sequence
  MKO10083305_B_Eif6
  gRNA
ctccacccgccgtatctgca

SEQ ID NO: 83306 - DNA, 20 bp, Artificial Sequence
  MKO10083306_B_Eif6
  gRNA
acccaacaacaccaccgacc

SEQ ID NO: 83307 - DNA, 20 bp, Artificial Sequence
  MKO10083307_B_Eif6
  gRNA
agtagcttcctactagcacc

SEQ ID NO: 83308 - DNA, 20 bp, Artificial Sequence
  MKO10083308_B_Elac1
  gRNA
gataaagtcccgaagcccga

SEQ ID NO: 83309 - DNA, 20 bp, Artificial Sequence
  MKO10083309_B_Elac1
  gRNA
actagctcgtgaaccacgta

SEQ ID NO: 83310 - DNA, 20 bp, Artificial Sequence
  MKO10083310_B_Elac1
  gRNA
caaagctgtgccgtgccaag

SEQ ID NO: 83311 - DNA, 20 bp, Artificial Sequence
  MKO10083311_B_Elac2
  gRNA
tgtgttcctgcataagtcgt

SEQ ID NO: 83312 - DNA, 20 bp, Artificial Sequence
  MKO10083312_B_Elac2
  gRNA
tccattgaaaggaatagaac

SEQ ID NO: 83313 - DNA, 20 bp, Artificial Sequence
  MKO10083313_B_Elac2
  gRNA
cttcccaaatgtgttctgtc

SEQ ID NO: 83314 - DNA, 20 bp, Artificial Sequence
  MKO10083314_B_Elane
  gRNA
ccggccaccaacaatctctg

SEQ ID NO: 83315 - DNA, 20 bp, Artificial Sequence
  MKO10083315_B_Elane
  gRNA
attgactccttcatccgagg

SEQ ID NO: 83316 - DNA, 20 bp, Artificial Sequence
  MKO10083316_B_Elane
  gRNA
gaacgacattgtgattatcc

SEQ ID NO: 83317 - DNA, 20 bp, Artificial Sequence
  MKO10083317_B_Elavl1
  gRNA
gtagccgttcagacttgcta

SEQ ID NO: 83318 - DNA, 20 bp, Artificial Sequence
  MKO10083318_B_Elavl1
  gRNA
agctgtaccactcgcctgct

SEQ ID NO: 83319 - DNA, 20 bp, Artificial Sequence
  MKO10083319_B_Elavl1
  gRNA
gtccttgtggatcagaccac

SEQ ID NO: 83320 - DNA, 20 bp, Artificial Sequence
  MKO10083320_B_Elavl2
  gRNA
aaggtagttgactattaggt

SEQ ID NO: 83321 - DNA, 20 bp, Artificial Sequence
  MKO10083321_B_Elavl2
  gRNA
tgctcctcaccagttgactc

SEQ ID NO: 83322 - DNA, 20 bp, Artificial Sequence
  MKO10083322_B_Elavl2
  gRNA
cgctgtgcctgctgagctag

SEQ ID NO: 83323 - DNA, 20 bp, Artificial Sequence
  MKO10083323_B_Elavl3
  gRNA
atcccggatagaggcagaac

SEQ ID NO: 83324 - DNA, 20 bp, Artificial Sequence
  MKO10083324_B_Elavl3
  gRNA
cagggggccggcgtagcgcc

SEQ ID NO: 83325 - DNA, 20 bp, Artificial Sequence
  MKO10083325_B_Elavl3
  gRNA
cttatcccgaaccaacttgc

SEQ ID NO: 83326 - DNA, 20 bp, Artificial Sequence
  MKO10083326_B_Elavl4
  gRNA
ggggtaaatagttgacgatg

SEQ ID NO: 83327 - DNA, 20 bp, Artificial Sequence
  MKO10083327_B_Elavl4
  gRNA
ccgacatccaatacaagcaa

SEQ ID NO: 83328 - DNA, 20 bp, Artificial Sequence
  MKO10083328_B_Elavl4
  gRNA
agggccagggtatcgcctgt

SEQ ID NO: 83329 - DNA, 20 bp, Artificial Sequence
  MKO10083329_B_Elf1
  gRNA
ggcaacgatgtcatcttcag

SEQ ID NO: 83330 - DNA, 20 bp, Artificial Sequence
  MKO10083330_B_Elf1
  gRNA
ctattgagaatatcagcacc

SEQ ID NO: 83331 - DNA, 20 bp, Artificial Sequence
  MKO10083331_B_Elf1
  gRNA
gttgaggcttcttgtcataa

SEQ ID NO: 83332 - DNA, 20 bp, Artificial Sequence
  MKO10083332_B_Elf2
  gRNA
agtttatccatgctgcgatg

SEQ ID NO: 83333 - DNA, 20 bp, Artificial Sequence
  MKO10083333_B_Elf2
  gRNA
atcgcagcatggataaactc

SEQ ID NO: 83334 - DNA, 20 bp, Artificial Sequence
  MKO10083334_B_Elf2
  gRNA
tgctgaagccctgcttcata

SEQ ID NO: 83335 - DNA, 20 bp, Artificial Sequence
  MKO10083335_B_Elf3
  gRNA
actcctggatgatggccgcc

SEQ ID NO: 83336 - DNA, 20 bp, Artificial Sequence
  MKO10083336_B_Elf3
  gRNA
ccctactactgcagtaccta

SEQ ID NO: 83337 - DNA, 20 bp, Artificial Sequence
  MKO10083337_B_Elf3
  gRNA
cctggacctcaccgagagca

SEQ ID NO: 83338 - DNA, 20 bp, Artificial Sequence
  MKO10083338_B_Elf4
  gRNA
ctgaccctagcatgcctata

SEQ ID NO: 83339 - DNA, 20 bp, Artificial Sequence
  MKO10083339_B_Elf4
  gRNA
ttcttccgtataggcatgct

SEQ ID NO: 83340 - DNA, 20 bp, Artificial Sequence
  MKO10083340_B_Elf4
  gRNA
tgggagttgccacattgaat

SEQ ID NO: 83341 - DNA, 20 bp, Artificial Sequence
  MKO10083341_B_Elf5
  gRNA
agtctctgacaaattcccac

SEQ ID NO: 83342 - DNA, 20 bp, Artificial Sequence
  MKO10083342_B_Elf5
  gRNA
agtggttaagtcagaagccc

SEQ ID NO: 83343 - DNA, 20 bp, Artificial Sequence
  MKO10083343_B_Elf5
  gRNA
acagtctttgatgccagtct

SEQ ID NO: 83344 - DNA, 20 bp, Artificial Sequence
  MKO10083344_B_Elfn1
  gRNA
gccgacaagagtcgccagta

SEQ ID NO: 83345 - DNA, 20 bp, Artificial Sequence
  MKO10083345_B_Elfn1
  gRNA
cccacccgcgtgcagtaacg

SEQ ID NO: 83346 - DNA, 20 bp, Artificial Sequence
  MKO10083346_B_Elfn1
  gRNA
accatcatcgagcttaagta

SEQ ID NO: 83347 - DNA, 20 bp, Artificial Sequence
  MKO10083347_B_Elfn2
  gRNA
ccatgtatacctcctcgcga

SEQ ID NO: 83348 - DNA, 20 bp, Artificial Sequence
  MKO10083348_B_Elfn2
  gRNA
gaacgagatttcctacatcg

SEQ ID NO: 83349 - DNA, 20 bp, Artificial Sequence
  MKO10083349_B_Elfn2
  gRNA
actatcttagagatgcgcta

SEQ ID NO: 83350 - DNA, 20 bp, Artificial Sequence
  MKO10083350_B_Elk1
  gRNA
ggcactcaccaaggtatgtg

SEQ ID NO: 83351 - DNA, 20 bp, Artificial Sequence
  MKO10083351_B_Elk1
  gRNA
acccccgtggtgctctcccc

SEQ ID NO: 83352 - DNA, 20 bp, Artificial Sequence
  MKO10083352_B_Elk1
  gRNA
tgccccctagcatccatttc

SEQ ID NO: 83353 - DNA, 20 bp, Artificial Sequence
  MKO10083353_B_Elk3
  gRNA
cgttcgatgtccagcagatg

SEQ ID NO: 83354 - DNA, 20 bp, Artificial Sequence
  MKO10083354_B_Elk3
  gRNA
tggagagtgcaatcacgctg

SEQ ID NO: 83355 - DNA, 20 bp, Artificial Sequence
  MKO10083355_B_Elk3
  gRNA
catgtgaccgttgagcagtg

SEQ ID NO: 83356 - DNA, 20 bp, Artificial Sequence
  MKO10083356_B_Elk4
  gRNA
cgtattagcaccttgcagtc

SEQ ID NO: 83357 - DNA, 20 bp, Artificial Sequence
  MKO10083357_B_Elk4
  gRNA
gtcctgggaggctcctttag

SEQ ID NO: 83358 - DNA, 20 bp, Artificial Sequence
  MKO10083358_B_Elk4
  gRNA
tggagaaaatgggcccggag

SEQ ID NO: 83359 - DNA, 20 bp, Artificial Sequence
  MKO10083359_B_Ell2
  gRNA
taacttctacttgtcaaacg

SEQ ID NO: 83360 - DNA, 20 bp, Artificial Sequence
  MKO10083360_B_Ell2
  gRNA
agcctcccagctcaattgcc

SEQ ID NO: 83361 - DNA, 20 bp, Artificial Sequence
  MKO10083361_B_Ell2
  gRNA
tactcaccccttggagtcct

SEQ ID NO: 83362 - DNA, 20 bp, Artificial Sequence
  MKO10083362_B_Ell3
  gRNA
aaatagtgagtcgctctcta

SEQ ID NO: 83363 - DNA, 20 bp, Artificial Sequence
  MKO10083363_B_Ell3
  gRNA
caccatgaacagtcactccc

SEQ ID NO: 83364 - DNA, 20 bp, Artificial Sequence
  MKO10083364_B_Ell3
  gRNA
gccgaactgtctccactgcc

SEQ ID NO: 83365 - DNA, 20 bp, Artificial Sequence
  MKO10083365_B_Ell
  gRNA
taatgggggtagcacgcttc

SEQ ID NO: 83366 - DNA, 20 bp, Artificial Sequence
  MKO10083366_B_Ell
  gRNA
gcctccagccttaatgacga

SEQ ID NO: 83367 - DNA, 20 bp, Artificial Sequence
  MKO10083367_B_Ell
  gRNA
agaccttccatccgatttga

SEQ ID NO: 83368 - DNA, 20 bp, Artificial Sequence
  MKO10083368_B_Elmo1
  gRNA
gctgcagtgcaaaatattca

SEQ ID NO: 83369 - DNA, 20 bp, Artificial Sequence
  MKO10083369_B_Elmo1
  gRNA
gccactgtctgccattataa

SEQ ID NO: 83370 - DNA, 20 bp, Artificial Sequence
  MKO10083370_B_Elmo1
  gRNA
aatcgcaacgaaataaaaaa

SEQ ID NO: 83371 - DNA, 20 bp, Artificial Sequence
  MKO10083371_B_Elmo2
  gRNA
tcagctctacgtcacggagc

SEQ ID NO: 83372 - DNA, 20 bp, Artificial Sequence
  MKO10083372_B_Elmo2
  gRNA
cttacaactggccgtctccc

SEQ ID NO: 83373 - DNA, 20 bp, Artificial Sequence
  MKO10083373_B_Elmo2
  gRNA
actttgacaatgtcagacgg

SEQ ID NO: 83374 - DNA, 20 bp, Artificial Sequence
  MKO10083374_B_Elmo3
  gRNA
caggtggagcctgactcatc

SEQ ID NO: 83375 - DNA, 20 bp, Artificial Sequence
  MKO10083375_B_Elmo3
  gRNA
gcagtctacccagtagctgc

SEQ ID NO: 83376 - DNA, 20 bp, Artificial Sequence
  MKO10083376_B_Elmo3
  gRNA
ccacttacaggcaaagcccc

SEQ ID NO: 83377 - DNA, 20 bp, Artificial Sequence
  MKO10083377_B_Elmod1
  gRNA
taggttggggatctctctcc

SEQ ID NO: 83378 - DNA, 20 bp, Artificial Sequence
  MKO10083378_B_Elmod1
  gRNA
tcttactgtggattgatgtc

SEQ ID NO: 83379 - DNA, 20 bp, Artificial Sequence
  MKO10083379_B_Elmod1
  gRNA
aaagactattgatgacatca

SEQ ID NO: 83380 - DNA, 20 bp, Artificial Sequence
  MKO10083380_B_Elmod2
  gRNA
caactcgtgttgcattctgt

SEQ ID NO: 83381 - DNA, 20 bp, Artificial Sequence
  MKO10083381_B_Elmod2
  gRNA
accacgatgtagaaaatgtg

SEQ ID NO: 83382 - DNA, 20 bp, Artificial Sequence
  MKO10083382_B_Elmod2
  gRNA
cttgacatattccaagaata

SEQ ID NO: 83383 - DNA, 20 bp, Artificial Sequence
  MKO10083383_B_Elmod3
  gRNA
ctcttcatcgtacaaggaca

SEQ ID NO: 83384 - DNA, 20 bp, Artificial Sequence
  MKO10083384_B_Elmod3
  gRNA
cctcgttgaaggagatgagc

SEQ ID NO: 83385 - DNA, 20 bp, Artificial Sequence
  MKO10083385_B_Elmod3
  gRNA
cacacttacctatgtctgga

SEQ ID NO: 83386 - DNA, 20 bp, Artificial Sequence
  MKO10083386_B_Elmsan1
  gRNA
ggcgatgaaagtgcccgcct

SEQ ID NO: 83387 - DNA, 20 bp, Artificial Sequence
  MKO10083387_B_Elmsan1
  gRNA
atgatgaggggctccggccg

SEQ ID NO: 83388 - DNA, 20 bp, Artificial Sequence
  MKO10083388_B_Elmsan1
  gRNA
catgatgagagaccgagcgc

SEQ ID NO: 83389 - DNA, 20 bp, Artificial Sequence
  MKO10083389_B_Eln
  gRNA
tggctcttacctggcttagg

SEQ ID NO: 83390 - DNA, 20 bp, Artificial Sequence
  MKO10083390_B_Eln
  gRNA
tccaaacgttcccagaagtc

SEQ ID NO: 83391 - DNA, 20 bp, Artificial Sequence
  MKO10083391_B_Eln
  gRNA
cacacaacaggggctggtat

SEQ ID NO: 83392 - DNA, 20 bp, Artificial Sequence
  MKO10083392_B_Elof1
  gRNA
tcacatcacaagacttctcg

SEQ ID NO: 83393 - DNA, 20 bp, Artificial Sequence
  MKO10083393_B_Elof1
  gRNA
ctactgattggctgcctcgc

SEQ ID NO: 83394 - DNA, 20 bp, Artificial Sequence
  MKO10083394_B_Elof1
  gRNA
acaggtatgtgatgggtgtc

SEQ ID NO: 83395 - DNA, 20 bp, Artificial Sequence
  MKO10083395_B_Elovl1
  gRNA
tcacttgcccgtccttcttc

SEQ ID NO: 83396 - DNA, 20 bp, Artificial Sequence
  MKO10083396_B_Elovl1
  gRNA
gcaccgagtggtggaagaca

SEQ ID NO: 83397 - DNA, 20 bp, Artificial Sequence
  MKO10083397_B_Elovl1
  gRNA
gtccatcagctcaatgacct

SEQ ID NO: 83398 - DNA, 20 bp, Artificial Sequence
  MKO10083398_B_Elovl2
  gRNA
acgcgtggtgatagacatga

SEQ ID NO: 83399 - DNA, 20 bp, Artificial Sequence
  MKO10083399_B_Elovl2
  gRNA
tgtcagaatctcgacagtgc

SEQ ID NO: 83400 - DNA, 20 bp, Artificial Sequence
  MKO10083400_B_Elovl2
  gRNA
ggcagctcatcctctccagc

SEQ ID NO: 83401 - DNA, 20 bp, Artificial Sequence
  MKO10083401_B_Elovl3
  gRNA
atgacgccgtagtcagattc

SEQ ID NO: 83402 - DNA, 20 bp, Artificial Sequence
  MKO10083402_B_Elovl3
  gRNA
tcttccaccgagcctacctc

SEQ ID NO: 83403 - DNA, 20 bp, Artificial Sequence
  MKO10083403_B_Elovl3
  gRNA
tatctgttgctcatcgttgt

SEQ ID NO: 83404 - DNA, 20 bp, Artificial Sequence
  MKO10083404_B_Elovl4
  gRNA
ttatgagtactaagcgcatt

SEQ ID NO: 83405 - DNA, 20 bp, Artificial Sequence
  MKO10083405_B_Elovl4
  gRNA
tacagatagctggcgccctg

SEQ ID NO: 83406 - DNA, 20 bp, Artificial Sequence
  MKO10083406_B_Elovl4
  gRNA
gaacgcagtcagcccatagt

SEQ ID NO: 83407 - DNA, 20 bp, Artificial Sequence
  MKO10083407_B_Elovl5
  gRNA
ctcggcaagagaacggctgc

SEQ ID NO: 83408 - DNA, 20 bp, Artificial Sequence
  MKO10083408_B_Elovl5
  gRNA
gtccaaggttatacaactgc

SEQ ID NO: 83409 - DNA, 20 bp, Artificial Sequence
  MKO10083409_B_Elovl5
  gRNA
ccattactcacaatggccgc

SEQ ID NO: 83410 - DNA, 20 bp, Artificial Sequence
  MKO10083410_B_Elovl6
  gRNA
ctgtacattctgatgaccaa

SEQ ID NO: 83411 - DNA, 20 bp, Artificial Sequence
  MKO10083411_B_Elovl6
  gRNA
atattcggtgctcttcgaac

SEQ ID NO: 83412 - DNA, 20 bp, Artificial Sequence
  MKO10083412_B_Elovl6
  gRNA
acgagaacgaagccatccaa

SEQ ID NO: 83413 - DNA, 20 bp, Artificial Sequence
  MKO10083413_B_Elovl7
  gRNA
ctcagtcgccaagagcaatg

SEQ ID NO: 83414 - DNA, 20 bp, Artificial Sequence
  MKO10083414_B_Elovl7
  gRNA
ttccggttctccatgagctt

SEQ ID NO: 83415 - DNA, 20 bp, Artificial Sequence
  MKO10083415_B_Elovl7
  gRNA
aaacttaccctcattgctct

SEQ ID NO: 83416 - DNA, 20 bp, Artificial Sequence
  MKO10083416_B_Elp2
  gRNA
gtggttattaccaatctgaa

SEQ ID NO: 83417 - DNA, 20 bp, Artificial Sequence
  MKO10083417_B_Elp2
  gRNA
atagcgtgcacagcacaaac

SEQ ID NO: 83418 - DNA, 20 bp, Artificial Sequence
  MKO10083418_B_Elp2
  gRNA
tccagccccttccaatgagc

SEQ ID NO: 83419 - DNA, 20 bp, Artificial Sequence
  MKO10083419_B_Elp3
  gRNA
cctcatagcccgtgtaagac

SEQ ID NO: 83420 - DNA, 20 bp, Artificial Sequence
  MKO10083420_B_Elp3
  gRNA
tgtccacacatcagtttcac

SEQ ID NO: 83421 - DNA, 20 bp, Artificial Sequence
  MKO10083421_B_Elp3
  gRNA
ctctgcaggggacctcagcc

SEQ ID NO: 83422 - DNA, 20 bp, Artificial Sequence
  MKO10083422_B_Elp4
  gRNA
catcaatgggcatactctgt

SEQ ID NO: 83423 - DNA, 20 bp, Artificial Sequence
  MKO10083423_B_Elp4
  gRNA
ttactattatcatcaagtag

SEQ ID NO: 83424 - DNA, 20 bp, Artificial Sequence
  MKO10083424_B_Elp4
  gRNA
ccaggtggagggttagctgt

SEQ ID NO: 83425 - DNA, 20 bp, Artificial Sequence
  MKO10083425_B_Elp5
  gRNA
tggggagcaggtccacgttc

SEQ ID NO: 83426 - DNA, 20 bp, Artificial Sequence
  MKO10083426_B_Elp5
  gRNA
tctccccagattccgtggag

SEQ ID NO: 83427 - DNA, 20 bp, Artificial Sequence
  MKO10083427_B_Elp5
  gRNA
ccaggctttgaccagttaag

SEQ ID NO: 83428 - DNA, 20 bp, Artificial Sequence
  MKO10083428_B_Elp6
  gRNA
tcacatacctttcaggtaga

SEQ ID NO: 83429 - DNA, 20 bp, Artificial Sequence
  MKO10083429_B_Elp6
  gRNA
tctgtcccacaatattgtaa

SEQ ID NO: 83430 - DNA, 20 bp, Artificial Sequence
  MKO10083430_B_Elp6
  gRNA
cttcagccattacaatattg

SEQ ID NO: 83431 - DNA, 20 bp, Artificial Sequence
  MKO10083431_B_Eltd1
  gRNA
aaggttatcagaccgccacg

SEQ ID NO: 83432 - DNA, 20 bp, Artificial Sequence
  MKO10083432_B_Eltd1
  gRNA
aaggttatcagaccgctacg

SEQ ID NO: 83433 - DNA, 20 bp, Artificial Sequence
  MKO10083433_B_Eltd1
  gRNA
gaactgtgacttccccgtag

SEQ ID NO: 83434 - DNA, 20 bp, Artificial Sequence
  MKO10083434_B_Emb
  gRNA
atgcgtgtacacagcaacta

SEQ ID NO: 83435 - DNA, 20 bp, Artificial Sequence
  MKO10083435_B_Emb
  gRNA
tgaagtcacccgtagtctca

SEQ ID NO: 83436 - DNA, 20 bp, Artificial Sequence
  MKO10083436_B_Emb
  gRNA
gccatcatttcttctcgaac

SEQ ID NO: 83437 - DNA, 20 bp, Artificial Sequence
  MKO10083437_B_Emc10
  gRNA
cccttgcagaccggggccga

SEQ ID NO: 83438 - DNA, 20 bp, Artificial Sequence
  MKO10083438_B_Emc10
  gRNA
gctgtcgctgtgttgccgac

SEQ ID NO: 83439 - DNA, 20 bp, Artificial Sequence
  MKO10083439_B_Emc10
  gRNA
ggaccagctgaccttgcacg

SEQ ID NO: 83440 - DNA, 20 bp, Artificial Sequence
  MKO10083440_B_Emc1
  gRNA
ccaacatcgggggcctgaac

SEQ ID NO: 83441 - DNA, 20 bp, Artificial Sequence
  MKO10083441_B_Emc1
  gRNA
acaaccaacttcttggatcc

SEQ ID NO: 83442 - DNA, 20 bp, Artificial Sequence
  MKO10083442_B_Emc1
  gRNA
ttcccctggatccaagaagt

SEQ ID NO: 83443 - DNA, 20 bp, Artificial Sequence
  MKO10083443_B_Emc2
  gRNA
aggcatgcgatttgaagcta

SEQ ID NO: 83444 - DNA, 20 bp, Artificial Sequence
  MKO10083444_B_Emc2
  gRNA
aatgattatgcttctaagct

SEQ ID NO: 83445 - DNA, 20 bp, Artificial Sequence
  MKO10083445_B_Emc2
  gRNA
aagaaatagtgaacaaatta

SEQ ID NO: 83446 - DNA, 20 bp, Artificial Sequence
  MKO10083446_B_Emc3
  gRNA
taattcgaagcagagtcctc

SEQ ID NO: 83447 - DNA, 20 bp, Artificial Sequence
  MKO10083447_B_Emc3
  gRNA
atattacttcaacaacccag

SEQ ID NO: 83448 - DNA, 20 bp, Artificial Sequence
  MKO10083448_B_Emc3
  gRNA
aagcgaagtgtcagtggaaa

SEQ ID NO: 83449 - DNA, 20 bp, Artificial Sequence
  MKO10083449_B_Emc4
  gRNA
gcgctgctgggacatcgcct

SEQ ID NO: 83450 - DNA, 20 bp, Artificial Sequence
  MKO10083450_B_Emc4
  gRNA
tacctcagggggctcaataa

SEQ ID NO: 83451 - DNA, 20 bp, Artificial Sequence
  MKO10083451_B_Emc4
  gRNA
cccaacagctttcaagatgc

SEQ ID NO: 83452 - DNA, 20 bp, Artificial Sequence
  MKO10083452_B_Emc6
  gRNA
gccggcatcctcggcctcac

SEQ ID NO: 83453 - DNA, 20 bp, Artificial Sequence
  MKO10083453_B_Emc6
  gRNA
ttcccgcttggccaccaccg

SEQ ID NO: 83454 - DNA, 20 bp, Artificial Sequence
  MKO10083454_B_Emc6
  gRNA
agacgtgcaccatgccatag

SEQ ID NO: 83455 - DNA, 20 bp, Artificial Sequence
  MKO10083455_B_Emc7
  gRNA
ttacatcaaaacgtcagaag

SEQ ID NO: 83456 - DNA, 20 bp, Artificial Sequence
  MKO10083456_B_Emc7
  gRNA
acagggtcaaacttgtaagc

SEQ ID NO: 83457 - DNA, 20 bp, Artificial Sequence
  MKO10083457_B_Emc7
  gRNA
caagtgatcctgacatgaga

SEQ ID NO: 83458 - DNA, 20 bp, Artificial Sequence
  MKO10083458_B_Emc8
  gRNA
tgtacgagcagcacgagaac

SEQ ID NO: 83459 - DNA, 20 bp, Artificial Sequence
  MKO10083459_B_Emc8
  gRNA
accgaagccctctgcgatcc

SEQ ID NO: 83460 - DNA, 20 bp, Artificial Sequence
  MKO10083460_B_Emc8
  gRNA
ataatcatctggacgacatt

SEQ ID NO: 83461 - DNA, 20 bp, Artificial Sequence
  MKO10083461_B_Emc9
  gRNA
ctggtcatccaaaaccgcat

SEQ ID NO: 83462 - DNA, 20 bp, Artificial Sequence
  MKO10083462_B_Emc9
  gRNA
cctgccgaatgtcatcaaga

SEQ ID NO: 83463 - DNA, 20 bp, Artificial Sequence
  MKO10083463_B_Emc9
  gRNA
caccataataagcactgccc

SEQ ID NO: 83464 - DNA, 20 bp, Artificial Sequence
  MKO10083464_B_Emcn
  gRNA
tgacgtatcccaaacatctt

SEQ ID NO: 83465 - DNA, 20 bp, Artificial Sequence
  MKO10083465_B_Emcn
  gRNA
tttgtcactgacacgatgcc

SEQ ID NO: 83466 - DNA, 20 bp, Artificial Sequence
  MKO10083466_B_Emcn
  gRNA
caatactcaccttcatgttt

SEQ ID NO: 83467 - DNA, 20 bp, Artificial Sequence
  MKO10083467_B_Emd
  gRNA
tatttgaccaccaagacata

SEQ ID NO: 83468 - DNA, 20 bp, Artificial Sequence
  MKO10083468_B_Emd
  gRNA
gtccaagagcttccgccagc

SEQ ID NO: 83469 - DNA, 20 bp, Artificial Sequence
  MKO10083469_B_Emd
  gRNA
ggggtaagagtctccttctc

SEQ ID NO: 83470 - DNA, 20 bp, Artificial Sequence
  MKO10083470_B_Eme1
  gRNA
agagtctagcacgggactca

SEQ ID NO: 83471 - DNA, 20 bp, Artificial Sequence
  MKO10083471_B_Eme1
  gRNA
agcattgtcactggtgattg

SEQ ID NO: 83472 - DNA, 20 bp, Artificial Sequence
  MKO10083472_B_Eme1
  gRNA
acctacctgctttaagttgt

SEQ ID NO: 83473 - DNA, 20 bp, Artificial Sequence
  MKO10083473_B_Eme2
  gRNA
gagtctcacccgctcccatc

SEQ ID NO: 83474 - DNA, 20 bp, Artificial Sequence
  MKO10083474_B_Eme2
  gRNA
cagcaccctgaagaaattcc

SEQ ID NO: 83475 - DNA, 20 bp, Artificial Sequence
  MKO10083475_B_Eme2
  gRNA
tcccctataggtgcctctgg

SEQ ID NO: 83476 - DNA, 20 bp, Artificial Sequence
  MKO10083476_B_Emg1
  gRNA
gatacctggtgggtgatgtc

SEQ ID NO: 83477 - DNA, 20 bp, Artificial Sequence
  MKO10083477_B_Emg1
  gRNA
acgagctactcaactgtgac

SEQ ID NO: 83478 - DNA, 20 bp, Artificial Sequence
  MKO10083478_B_Emg1
  gRNA
cacccatgaggccacaaaat

SEQ ID NO: 83479 - DNA, 20 bp, Artificial Sequence
  MKO10083479_B_Emid1
  gRNA
ggcagttctgtagcactcgc

SEQ ID NO: 83480 - DNA, 20 bp, Artificial Sequence
  MKO10083480_B_Emid1
  gRNA
cagggcagcacctccattct

SEQ ID NO: 83481 - DNA, 20 bp, Artificial Sequence
  MKO10083481_B_Emid1
  gRNA
ttctttcagctacagaaccg

SEQ ID NO: 83482 - DNA, 20 bp, Artificial Sequence
  MKO10083482_B_Emilin1
  gRNA
caacatacctggtgggccaa

SEQ ID NO: 83483 - DNA, 20 bp, Artificial Sequence
  MKO10083483_B_Emilin1
  gRNA
caggaactggtgtgcctacg

SEQ ID NO: 83484 - DNA, 20 bp, Artificial Sequence
  MKO10083484_B_Emilin1
  gRNA
gacagtgagctgcgtccttg

SEQ ID NO: 83485 - DNA, 20 bp, Artificial Sequence
  MKO10083485_B_Emilin2
  gRNA
cacgttcttattcacgatgt

SEQ ID NO: 83486 - DNA, 20 bp, Artificial Sequence
  MKO10083486_B_Emilin2
  gRNA
aagggcaaccccgtgcgacc

SEQ ID NO: 83487 - DNA, 20 bp, Artificial Sequence
  MKO10083487_B_Emilin2
  gRNA
acggggttgcccttcttgcc

SEQ ID NO: 83488 - DNA, 20 bp, Artificial Sequence
  MKO10083488_B_Emilin3
  gRNA
agggcacccctctcctcgcg

SEQ ID NO: 83489 - DNA, 20 bp, Artificial Sequence
  MKO10083489_B_Emilin3
  gRNA
ctacaagaccgtgacagacc

SEQ ID NO: 83490 - DNA, 20 bp, Artificial Sequence
  MKO10083490_B_Emilin3
  gRNA
ccaactgcccttcaacagtc

SEQ ID NO: 83491 - DNA, 20 bp, Artificial Sequence
  MKO10083491_B_Eml1
  gRNA
agctactggttgagcccgtg

SEQ ID NO: 83492 - DNA, 20 bp, Artificial Sequence
  MKO10083492_B_Eml1
  gRNA
ttgagaaccaccgtcaacaa

SEQ ID NO: 83493 - DNA, 20 bp, Artificial Sequence
  MKO10083493_B_Eml1
  gRNA
ttctcttgcagcgaggccac

SEQ ID NO: 83494 - DNA, 20 bp, Artificial Sequence
  MKO10083494_B_Eml2
  gRNA
acacccagtctagctttagc

SEQ ID NO: 83495 - DNA, 20 bp, Artificial Sequence
  MKO10083495_B_Eml2
  gRNA
tgccacctgtcctgtggcga

SEQ ID NO: 83496 - DNA, 20 bp, Artificial Sequence
  MKO10083496_B_Eml2
  gRNA
tctggctgtccatccagata

SEQ ID NO: 83497 - DNA, 20 bp, Artificial Sequence
  MKO10083497_B_Eml3
  gRNA
tacgtgtcagaacgctgaag

SEQ ID NO: 83498 - DNA, 20 bp, Artificial Sequence
  MKO10083498_B_Eml3
  gRNA
tgctccctgaccgcaatagc

SEQ ID NO: 83499 - DNA, 20 bp, Artificial Sequence
  MKO10083499_B_Eml3
  gRNA
cctcagctaacctgctattg

SEQ ID NO: 83500 - DNA, 20 bp, Artificial Sequence
  MKO10083500_B_Eml4
  gRNA
gccggactcaccgaggctgc

SEQ ID NO: 83501 - DNA, 20 bp, Artificial Sequence
  MKO10083501_B_Eml4
  gRNA
acatagaaatagcttctcga

SEQ ID NO: 83502 - DNA, 20 bp, Artificial Sequence
  MKO10083502_B_Eml4
  gRNA
ctaattacctttacttggca

SEQ ID NO: 83503 - DNA, 20 bp, Artificial Sequence
  MKO10083503_B_Eml5
  gRNA
aacatccttcagaaccgaca

SEQ ID NO: 83504 - DNA, 20 bp, Artificial Sequence
  MKO10083504_B_Eml5
  gRNA
aatcttatacgaacaataca

SEQ ID NO: 83505 - DNA, 20 bp, Artificial Sequence
  MKO10083505_B_Eml5
  gRNA
atccagcgcttggtttcagt

SEQ ID NO: 83506 - DNA, 20 bp, Artificial Sequence
  MKO10083506_B_Eml6
  gRNA
ctgcggagtgaagcatataa

SEQ ID NO: 83507 - DNA, 20 bp, Artificial Sequence
  MKO10083507_B_Eml6
  gRNA
aaggtcttacccggtcagaa

SEQ ID NO: 83508 - DNA, 20 bp, Artificial Sequence
  MKO10083508_B_Eml6
  gRNA
ccgcagctaaccattctgtt

SEQ ID NO: 83509 - DNA, 20 bp, Artificial Sequence
  MKO10083509_B_Emp1
  gRNA
atgcataccttcattgccgt

SEQ ID NO: 83510 - DNA, 20 bp, Artificial Sequence
  MKO10083510_B_Emp1
  gRNA
cgtgttccagctcttcacta

SEQ ID NO: 83511 - DNA, 20 bp, Artificial Sequence
  MKO10083511_B_Emp1
  gRNA
tgtagattgacactccaacc

SEQ ID NO: 83512 - DNA, 20 bp, Artificial Sequence
  MKO10083512_B_Emp2
  gRNA
gaagctgtcgcctacccacc

SEQ ID NO: 83513 - DNA, 20 bp, Artificial Sequence
  MKO10083513_B_Emp2
  gRNA
tgtcttccacatcgtgtcca

SEQ ID NO: 83514 - DNA, 20 bp, Artificial Sequence
  MKO10083514_B_Emp2
  gRNA
ttcacttacaggacatgagc

SEQ ID NO: 83515 - DNA, 20 bp, Artificial Sequence
  MKO10083515_B_Emp3
  gRNA
attctcactgacgttactgc

SEQ ID NO: 83516 - DNA, 20 bp, Artificial Sequence
  MKO10083516_B_Emp3
  gRNA
ggagggctcttctacgctac

SEQ ID NO: 83517 - DNA, 20 bp, Artificial Sequence
  MKO10083517_B_Emp3
  gRNA
tccacgtgcagtcataccac

SEQ ID NO: 83518 - DNA, 20 bp, Artificial Sequence
  MKO10083518_B_Emr1
  gRNA
gccaagtgcagctgtcttag

SEQ ID NO: 83519 - DNA, 20 bp, Artificial Sequence
  MKO10083519_B_Emr1
  gRNA
gtgttgcaaaccttcacaaa

SEQ ID NO: 83520 - DNA, 20 bp, Artificial Sequence
  MKO10083520_B_Emr1
  gRNA
ctcagtctgcaccaatatcc

SEQ ID NO: 83521 - DNA, 20 bp, Artificial Sequence
  MKO10083521_B_Emr4
  gRNA
gaccagataagcagcattcc

SEQ ID NO: 83522 - DNA, 20 bp, Artificial Sequence
  MKO10083522_B_Emr4
  gRNA
acccactgtgtttgtaaaga

SEQ ID NO: 83523 - DNA, 20 bp, Artificial Sequence
  MKO10083523_B_Emr4
  gRNA
gagccccatgagaaatgtca

SEQ ID NO: 83524 - DNA, 20 bp, Artificial Sequence
  MKO10083524_B_Emx1
  gRNA
cgtgcaaaagcagcccgtcc

SEQ ID NO: 83525 - DNA, 20 bp, Artificial Sequence
  MKO10083525_B_Emx1
  gRNA
agctcacctgcgtctcggag

SEQ ID NO: 83526 - DNA, 20 bp, Artificial Sequence
  MKO10083526_B_Emx1
  gRNA
atcgccacgaagcaggccaa

SEQ ID NO: 83527 - DNA, 20 bp, Artificial Sequence
  MKO10083527_B_Emx2
  gRNA
caattctccaccggttaatg

SEQ ID NO: 83528 - DNA, 20 bp, Artificial Sequence
  MKO10083528_B_Emx2
  gRNA
aaggcggttcgaatccgctt

SEQ ID NO: 83529 - DNA, 20 bp, Artificial Sequence
  MKO10083529_B_Emx2
  gRNA
ttcctccggactcgcctgct

SEQ ID NO: 83530 - DNA, 20 bp, Artificial Sequence
  MKO10083530_B_En1
  gRNA
gcggcgacagaccctcgccc

SEQ ID NO: 83531 - DNA, 20 bp, Artificial Sequence
  MKO10083531_B_En1
  gRNA
ggtctactgcacacgctatt

SEQ ID NO: 83532 - DNA, 20 bp, Artificial Sequence
  MKO10083532_B_En1
  gRNA
cgttagccgaacccatgagt

SEQ ID NO: 83533 - DNA, 20 bp, Artificial Sequence
  MKO10083533_B_En2
  gRNA
gggcaagtcggacagcgagt

SEQ ID NO: 83534 - DNA, 20 bp, Artificial Sequence
  MKO10083534_B_En2
  gRNA
ggagagcgttcctcccgcgc

SEQ ID NO: 83535 - DNA, 20 bp, Artificial Sequence
  MKO10083535_B_En2
  gRNA
gccaaaaaacccggcgatcc

SEQ ID NO: 83536 - DNA, 20 bp, Artificial Sequence
  MKO10083536_B_Enah
  gRNA
gtgccagctggtggctcaac

SEQ ID NO: 83537 - DNA, 20 bp, Artificial Sequence
  MKO10083537_B_Enah
  gRNA
ctacctgctcaagttcaaaa

SEQ ID NO: 83538 - DNA, 20 bp, Artificial Sequence
  MKO10083538_B_Enah
  gRNA
aagagctggaaatccagaga

SEQ ID NO: 83539 - DNA, 20 bp, Artificial Sequence
  MKO10083539_B_Enam
  gRNA
aggagactcatctttacatt

SEQ ID NO: 83540 - DNA, 20 bp, Artificial Sequence
  MKO10083540_B_Enam
  gRNA
atttagcagtaaaagtgaag

SEQ ID NO: 83541 - DNA, 20 bp, Artificial Sequence
  MKO10083541_B_Enam
  gRNA
cagagacaccaagcagaccc

SEQ ID NO: 83542 - DNA, 20 bp, Artificial Sequence
  MKO10083542_B_Enc1
  gRNA
gggaacaagctttacgtagt

SEQ ID NO: 83543 - DNA, 20 bp, Artificial Sequence
  MKO10083543_B_Enc1
  gRNA
cattcagcgctgcaagactt

SEQ ID NO: 83544 - DNA, 20 bp, Artificial Sequence
  MKO10083544_B_Enc1
  gRNA
agtgagaacgctgtccgcgt

SEQ ID NO: 83545 - DNA, 20 bp, Artificial Sequence
  MKO10083545_B_Endod1
  gRNA
cagcccccgtgaggatatac

SEQ ID NO: 83546 - DNA, 20 bp, Artificial Sequence
  MKO10083546_B_Endod1
  gRNA
cgcgtttcgcgctgcgcgcc

SEQ ID NO: 83547 - DNA, 20 bp, Artificial Sequence
  MKO10083547_B_Endod1
  gRNA
gtacagagtggcgaagcgct

SEQ ID NO: 83548 - DNA, 20 bp, Artificial Sequence
  MKO10083548_B_Endog
  gRNA
ggcccgctcgatgctctcga

SEQ ID NO: 83549 - DNA, 20 bp, Artificial Sequence
  MKO10083549_B_Endog
  gRNA
agctgcggctgtacctctca

SEQ ID NO: 83550 - DNA, 20 bp, Artificial Sequence
  MKO10083550_B_Endog
  gRNA
tgttccaggcattctggttg

SEQ ID NO: 83551 - DNA, 20 bp, Artificial Sequence
  MKO10083551_B_Endou
  gRNA
aatgaccgctgcccagagtt

SEQ ID NO: 83552 - DNA, 20 bp, Artificial Sequence
  MKO10083552_B_Endou
  gRNA
acttactcaacaattaccag

SEQ ID NO: 83553 - DNA, 20 bp, Artificial Sequence
  MKO10083553_B_Endou
  gRNA
gaaatgctccccgtggcctg

SEQ ID NO: 83554 - DNA, 20 bp, Artificial Sequence
  MKO10083554_B_Endov
  gRNA
gccgctgtaccaactccacc

SEQ ID NO: 83555 - DNA, 20 bp, Artificial Sequence
  MKO10083555_B_Endov
  gRNA
atgtgtctcctccggcctgc

SEQ ID NO: 83556 - DNA, 20 bp, Artificial Sequence
  MKO10083556_B_Endov
  gRNA
ttcttggccaccccgatgca

SEQ ID NO: 83557 - DNA, 20 bp, Artificial Sequence
  MKO10083557_B_Engase
  gRNA
cctgctgtgccacgacatga

SEQ ID NO: 83558 - DNA, 20 bp, Artificial Sequence
  MKO10083558_B_Engase
  gRNA
ttcaccccggatcctttacc

SEQ ID NO: 83559 - DNA, 20 bp, Artificial Sequence
  MKO10083559_B_Engase
  gRNA
aggagggctcatccccggcc

SEQ ID NO: 83560 - DNA, 20 bp, Artificial Sequence
  MKO10083560_B_Eng
  gRNA
ccaaagcatcgtcctccagt

SEQ ID NO: 83561 - DNA, 20 bp, Artificial Sequence
  MKO10083561_B_Eng
  gRNA
ctcacgtaggccaagtgcaa

SEQ ID NO: 83562 - DNA, 20 bp, Artificial Sequence
  MKO10083562_B_Eng
  gRNA
cccggaaatcccattgcact

SEQ ID NO: 83563 - DNA, 20 bp, Artificial Sequence
  MKO10083563_B_Enho
  gRNA
gtagcagcaagaagcctacg

SEQ ID NO: 83564 - DNA, 20 bp, Artificial Sequence
  MKO10083564_B_Enho
  gRNA
tggtggcgccttctcaggac

SEQ ID NO: 83565 - DNA, 20 bp, Artificial Sequence
  MKO10083565_B_Enho
  gRNA
atgggggcagccatctccca

SEQ ID NO: 83566 - DNA, 20 bp, Artificial Sequence
  MKO10083566_B_Enkd1
  gRNA
tctctgcagggacccggcct

SEQ ID NO: 83567 - DNA, 20 bp, Artificial Sequence
  MKO10083567_B_Enkd1
  gRNA
gggagtgtgcccgcagaaag

SEQ ID NO: 83568 - DNA, 20 bp, Artificial Sequence
  MKO10083568_B_Enkd1
  gRNA
cctgttcccggctgcgttcc

SEQ ID NO: 83569 - DNA, 20 bp, Artificial Sequence
  MKO10083569_B_Enkur
  gRNA
agagactctctgacgaagaa

SEQ ID NO: 83570 - DNA, 20 bp, Artificial Sequence
  MKO10083570_B_Enkur
  gRNA
gaagattcgcaagcagaagc

SEQ ID NO: 83571 - DNA, 20 bp, Artificial Sequence
  MKO10083571_B_Enkur
  gRNA
cagaatcaatgaagaccgag

SEQ ID NO: 83572 - DNA, 20 bp, Artificial Sequence
  MKO10083572_B_Eno1
  gRNA
cctaccttgctaaccagagc

SEQ ID NO: 83573 - DNA, 20 bp, Artificial Sequence
  MKO10083573_B_Eno1
  gRNA
ccttacccttccccatgaag

SEQ ID NO: 83574 - DNA, 20 bp, Artificial Sequence
  MKO10083574_B_Eno1
  gRNA
gttccttctaggtgtctcac

SEQ ID NO: 83575 - DNA, 20 bp, Artificial Sequence
  MKO10083575_B_Eno2
  gRNA
cgccacattgctcagctagc

SEQ ID NO: 83576 - DNA, 20 bp, Artificial Sequence
  MKO10083576_B_Eno2
  gRNA
cgggcctcactgagctgatg

SEQ ID NO: 83577 - DNA, 20 bp, Artificial Sequence
  MKO10083577_B_Eno2
  gRNA
gtgcaatcctgctgttgatg

SEQ ID NO: 83578 - DNA, 20 bp, Artificial Sequence
  MKO10083578_B_Eno3
  gRNA
cagtgcttcatagatacccg

SEQ ID NO: 83579 - DNA, 20 bp, Artificial Sequence
  MKO10083579_B_Eno3
  gRNA
cttccagaaactaagtgttg

SEQ ID NO: 83580 - DNA, 20 bp, Artificial Sequence
  MKO10083580_B_Eno3
  gRNA
acctcactcacacttattct

SEQ ID NO: 83581 - DNA, 20 bp, Artificial Sequence
  MKO10083581_B_Eno4
  gRNA
ggcggcggcagcgttactgg

SEQ ID NO: 83582 - DNA, 20 bp, Artificial Sequence
  MKO10083582_B_Eno4
  gRNA
ggccaaagccagcgcaacct

SEQ ID NO: 83583 - DNA, 20 bp, Artificial Sequence
  MKO10083583_B_Eno4
  gRNA
gtgcgggaaccagctcctcc

SEQ ID NO: 83584 - DNA, 20 bp, Artificial Sequence
  MKO10083584_B_Enoph1
  gRNA
gtccactttgtgtccaatct

SEQ ID NO: 83585 - DNA, 20 bp, Artificial Sequence
  MKO10083585_B_Enoph1
  gRNA
aaggtatacatctattcttc

SEQ ID NO: 83586 - DNA, 20 bp, Artificial Sequence
  MKO10083586_B_Enoph1
  gRNA
ctcaagaatgtctccctctg

SEQ ID NO: 83587 - DNA, 20 bp, Artificial Sequence
  MKO10083587_B_Enox1
  gRNA
gcaagcaaaggatgcgcgcc

SEQ ID NO: 83588 - DNA, 20 bp, Artificial Sequence
  MKO10083588_B_Enox1
  gRNA
tccacaagagaacgacctcc

SEQ ID NO: 83589 - DNA, 20 bp, Artificial Sequence
  MKO10083589_B_Enox1
  gRNA
ccaggctgtgggatcggtga

SEQ ID NO: 83590 - DNA, 20 bp, Artificial Sequence
  MKO10083590_B_Enox2
  gRNA
catataagtcatcccgagcc

SEQ ID NO: 83591 - DNA, 20 bp, Artificial Sequence
  MKO10083591_B_Enox2
  gRNA
tcagacttcgatcctgccct

SEQ ID NO: 83592 - DNA, 20 bp, Artificial Sequence
  MKO10083592_B_Enox2
  gRNA
caccacctgcaacacgagaa

SEQ ID NO: 83593 - DNA, 20 bp, Artificial Sequence
  MKO10083593_B_Enpep
  gRNA
tgtcccaatgagcacttacc

SEQ ID NO: 83594 - DNA, 20 bp, Artificial Sequence
  MKO10083594_B_Enpep
  gRNA
actcactggtttgccgctcc

SEQ ID NO: 83595 - DNA, 20 bp, Artificial Sequence
  MKO10083595_B_Enpep
  gRNA
accatgaaccaacagatgcc

SEQ ID NO: 83596 - DNA, 20 bp, Artificial Sequence
  MKO10083596_B_Enpp1
  gRNA
tgcacaggagcacacgaacc

SEQ ID NO: 83597 - DNA, 20 bp, Artificial Sequence
  MKO10083597_B_Enpp1
  gRNA
tatggacttgcaacaaattc

SEQ ID NO: 83598 - DNA, 20 bp, Artificial Sequence
  MKO10083598_B_Enpp1
  gRNA
acacttacttggttccacac

SEQ ID NO: 83599 - DNA, 20 bp, Artificial Sequence
  MKO10083599_B_Enpp2
  gRNA
ctgctgtaccaactaccaag

SEQ ID NO: 83600 - DNA, 20 bp, Artificial Sequence
  MKO10083600_B_Enpp2
  gRNA
gttgatttcagctcgaggct

SEQ ID NO: 83601 - DNA, 20 bp, Artificial Sequence
  MKO10083601_B_Enpp2
  gRNA
cagtgttatctgactctcca

SEQ ID NO: 83602 - DNA, 20 bp, Artificial Sequence
  MKO10083602_B_Enpp3
  gRNA
gctttgcaggcgaaagccca

SEQ ID NO: 83603 - DNA, 20 bp, Artificial Sequence
  MKO10083603_B_Enpp3
  gRNA
aggcttaccctggtggacac

SEQ ID NO: 83604 - DNA, 20 bp, Artificial Sequence
  MKO10083604_B_Enpp3
  gRNA
tgattgtatcgcttggattg

SEQ ID NO: 83605 - DNA, 20 bp, Artificial Sequence
  MKO10083605_B_Enpp4
  gRNA
aattgttgttagtgcactat

SEQ ID NO: 83606 - DNA, 20 bp, Artificial Sequence
  MKO10083606_B_Enpp4
  gRNA
tcgaattcagcccattattt

SEQ ID NO: 83607 - DNA, 20 bp, Artificial Sequence
  MKO10083607_B_Enpp4
  gRNA
gctgaattcgactgctgtgt

SEQ ID NO: 83608 - DNA, 20 bp, Artificial Sequence
  MKO10083608_B_Enpp5
  gRNA
tgatgaagtctatgatgcgc

SEQ ID NO: 83609 - DNA, 20 bp, Artificial Sequence
  MKO10083609_B_Enpp5
  gRNA
ggaccgtgggctaaaaatat

SEQ ID NO: 83610 - DNA, 20 bp, Artificial Sequence
  MKO10083610_B_Enpp5
  gRNA
aagcactaagcttggagtaa

SEQ ID NO: 83611 - DNA, 20 bp, Artificial Sequence
  MKO10083611_B_Enpp6
  gRNA
agatgatcggcaactacatg

SEQ ID NO: 83612 - DNA, 20 bp, Artificial Sequence
  MKO10083612_B_Enpp6
  gRNA
ttcgcaaagttgatatctgt

SEQ ID NO: 83613 - DNA, 20 bp, Artificial Sequence
  MKO10083613_B_Enpp6
  gRNA
ctgagaagaggatgacgttt

SEQ ID NO: 83614 - DNA, 20 bp, Artificial Sequence
  MKO10083614_B_Enpp7
  gRNA
ggccgtaacgatgagccgga

SEQ ID NO: 83615 - DNA, 20 bp, Artificial Sequence
  MKO10083615_B_Enpp7
  gRNA
gaagaccatcttccgggccg

SEQ ID NO: 83616 - DNA, 20 bp, Artificial Sequence
  MKO10083616_B_Enpp7
  gRNA
tgccgttgtcccaccacctc

SEQ ID NO: 83617 - DNA, 20 bp, Artificial Sequence
  MKO10083617_B_Ensa
  gRNA
cctcacctgcttctcctcgc

SEQ ID NO: 83618 - DNA, 20 bp, Artificial Sequence
  MKO10083618_B_Ensa
  gRNA
ggagaccggcgaggagaagc

SEQ ID NO: 83619 - DNA, 20 bp, Artificial Sequence
  MKO10083619_B_Ensa
  gRNA
ctcatgaagagactccagaa

SEQ ID NO: 83620 - DNA, 20 bp, Artificial Sequence
  MKO10083620_B_Enthd1
  gRNA
caacacctttaccagcattc

SEQ ID NO: 83621 - DNA, 20 bp, Artificial Sequence
  MKO10083621_B_Enthd1
  gRNA
atccgaagcaacctgtgaca

SEQ ID NO: 83622 - DNA, 20 bp, Artificial Sequence
  MKO10083622_B_Enthd1
  gRNA
cgcttccccttctgacagcc

SEQ ID NO: 83623 - DNA, 20 bp, Artificial Sequence
  MKO10083623_B_Enthd2
  gRNA
gggcagccgcccgcaccttc

SEQ ID NO: 83624 - DNA, 20 bp, Artificial Sequence
  MKO10083624_B_Enthd2
  gRNA
acatgggatgctatcatctg

SEQ ID NO: 83625 - DNA, 20 bp, Artificial Sequence
  MKO10083625_B_Enthd2
  gRNA
tttccatacccgtggcttct

SEQ ID NO: 83626 - DNA, 20 bp, Artificial Sequence
  MKO10083626_B_Entpd1
  gRNA
tagaatggaaagcgaacaat

SEQ ID NO: 83627 - DNA, 20 bp, Artificial Sequence
  MKO10083627_B_Entpd1
  gRNA
acagttccatgcattcggcc

SEQ ID NO: 83628 - DNA, 20 bp, Artificial Sequence
  MKO10083628_B_Entpd1
  gRNA
ccctcagtatgggattgtgt

SEQ ID NO: 83629 - DNA, 20 bp, Artificial Sequence
  MKO10083629_B_Entpd2
  gRNA
ccggtggatacggccaagga

SEQ ID NO: 83630 - DNA, 20 bp, Artificial Sequence
  MKO10083630_B_Entpd2
  gRNA
gctacgcaaatgacccttct

SEQ ID NO: 83631 - DNA, 20 bp, Artificial Sequence
  MKO10083631_B_Entpd2
  gRNA
gcgggcaccacggaagtcaa

SEQ ID NO: 83632 - DNA, 20 bp, Artificial Sequence
  MKO10083632_B_Entpd3
  gRNA
aaatgcgggtggatccgtgg

SEQ ID NO: 83633 - DNA, 20 bp, Artificial Sequence
  MKO10083633_B_Entpd3
  gRNA
ttgggggttattctcatagc

SEQ ID NO: 83634 - DNA, 20 bp, Artificial Sequence
  MKO10083634_B_Entpd3
  gRNA
ccactgatacacgtagacag

SEQ ID NO: 83635 - DNA, 20 bp, Artificial Sequence
  MKO10083635_B_Entpd4
  gRNA
ggcccgagtcacagacgttg

SEQ ID NO: 83636 - DNA, 20 bp, Artificial Sequence
  MKO10083636_B_Entpd4
  gRNA
aggaagatcacctttcagga

SEQ ID NO: 83637 - DNA, 20 bp, Artificial Sequence
  MKO10083637_B_Entpd4
  gRNA
ttgctgcagaacatgtgcct

SEQ ID NO: 83638 - DNA, 20 bp, Artificial Sequence
  MKO10083638_B_Entpd5
  gRNA
gccgttgctttcagaaccac

SEQ ID NO: 83639 - DNA, 20 bp, Artificial Sequence
  MKO10083639_B_Entpd5
  gRNA
aataggacagctcccctttc

SEQ ID NO: 83640 - DNA, 20 bp, Artificial Sequence
  MKO10083640_B_Entpd5
  gRNA
agatggcagcgttagcatca

SEQ ID NO: 83641 - DNA, 20 bp, Artificial Sequence
  MKO10083641_B_Entpd6
  gRNA
cagcaggcgcaaaccagctg

SEQ ID NO: 83642 - DNA, 20 bp, Artificial Sequence
  MKO10083642_B_Entpd6
  gRNA
gctggtttgcgcctgctgcc

SEQ ID NO: 83643 - DNA, 20 bp, Artificial Sequence
  MKO10083643_B_Entpd6
  gRNA
ttacgctgatgatgttgaaa

SEQ ID NO: 83644 - DNA, 20 bp, Artificial Sequence
  MKO10083644_B_Entpd7
  gRNA
tgagcccgtttctccgtcag

SEQ ID NO: 83645 - DNA, 20 bp, Artificial Sequence
  MKO10083645_B_Entpd7
  gRNA
acgagtccataattcagatt

SEQ ID NO: 83646 - DNA, 20 bp, Artificial Sequence
  MKO10083646_B_Entpd7
  gRNA
gcctcatgcccgcagtgcag

SEQ ID NO: 83647 - DNA, 20 bp, Artificial Sequence
  MKO10083647_B_Entpd8
  gRNA
gcagatcagcttcgtgcctc

SEQ ID NO: 83648 - DNA, 20 bp, Artificial Sequence
  MKO10083648_B_Entpd8
  gRNA
gttgatggtgatccaaccaa

SEQ ID NO: 83649 - DNA, 20 bp, Artificial Sequence
  MKO10083649_B_Entpd8
  gRNA
gatcaccatcaactatgtcc

SEQ ID NO: 83650 - DNA, 20 bp, Artificial Sequence
  MKO10083650_B_Eny2
  gRNA
agctccttctttacactgtc

SEQ ID NO: 83651 - DNA, 20 bp, Artificial Sequence
  MKO10083651_B_Eny2
  gRNA
ctccagtttctattaacttt

SEQ ID NO: 83652 - DNA, 20 bp, Artificial Sequence
  MKO10083652_B_Eny2
  gRNA
aaccaaaagttaatagaaac

SEQ ID NO: 83653 - DNA, 20 bp, Artificial Sequence
  MKO10083653_B_Eogt
  gRNA
atttcagagcgactcaagtc

SEQ ID NO: 83654 - DNA, 20 bp, Artificial Sequence
  MKO10083654_B_Eogt
  gRNA
tgcgcaccagagtttagatt

SEQ ID NO: 83655 - DNA, 20 bp, Artificial Sequence
  MKO10083655_B_Eogt
  gRNA
aatcacgttaccaagactgc

SEQ ID NO: 83656 - DNA, 20 bp, Artificial Sequence
  MKO10083656_B_Eomes
  gRNA
gggcactcacatccgtgttt

SEQ ID NO: 83657 - DNA, 20 bp, Artificial Sequence
  MKO10083657_B_Eomes
  gRNA
tgcccccctggaagcgccag

SEQ ID NO: 83658 - DNA, 20 bp, Artificial Sequence
  MKO10083658_B_Eomes
  gRNA
gcacatcgtggaagtgacag

SEQ ID NO: 83659 - DNA, 20 bp, Artificial Sequence
  MKO10083659_B_Ep300
  gRNA
atgctcacaagtgccagcgc

SEQ ID NO: 83660 - DNA, 20 bp, Artificial Sequence
  MKO10083660_B_Ep300
  gRNA
tcaccatacactcagaattc

SEQ ID NO: 83661 - DNA, 20 bp, Artificial Sequence
  MKO10083661_B_Ep300
  gRNA
ctcgacaaatcatttcacac

SEQ ID NO: 83662 - DNA, 20 bp, Artificial Sequence
  MKO10083662_B_Ep400
  gRNA
gtttatcctgagaaccgtcc

SEQ ID NO: 83663 - DNA, 20 bp, Artificial Sequence
  MKO10083663_B_Ep400
  gRNA
tcggaacatgtagggccggc

SEQ ID NO: 83664 - DNA, 20 bp, Artificial Sequence
  MKO10083664_B_Ep400
  gRNA
cagaagccgacccctttaag

SEQ ID NO: 83665 - DNA, 20 bp, Artificial Sequence
  MKO10083665_B_Epas1
  gRNA
caaagcctccatcatgcgcc

SEQ ID NO: 83666 - DNA, 20 bp, Artificial Sequence
  MKO10083666_B_Epas1
  gRNA
cggatctcctcatggtcgca

SEQ ID NO: 83667 - DNA, 20 bp, Artificial Sequence
  MKO10083667_B_Epas1
  gRNA
ggtacaagttatccatttgc

SEQ ID NO: 83668 - DNA, 20 bp, Artificial Sequence
  MKO10083668_B_Epb4.1l1
  gRNA
gaccgaagtagtccttctcc

SEQ ID NO: 83669 - DNA, 20 bp, Artificial Sequence
  MKO10083669_B_Epb4.1l1
  gRNA
ctgtgagcaccttaacctcc

SEQ ID NO: 83670 - DNA, 20 bp, Artificial Sequence
  MKO10083670_B_Epb4.1l1
  gRNA
agggtagaacttgactgtga

SEQ ID NO: 83671 - DNA, 20 bp, Artificial Sequence
  MKO10083671_B_Epb4.1l2
  gRNA
gtgcgagcacctgaacctct

SEQ ID NO: 83672 - DNA, 20 bp, Artificial Sequence
  MKO10083672_B_Epb4.1l2
  gRNA
gaactggctagatcctgcaa

SEQ ID NO: 83673 - DNA, 20 bp, Artificial Sequence
  MKO10083673_B_Epb4.1l2
  gRNA
caagaagaccaagactgtcc

SEQ ID NO: 83674 - DNA, 20 bp, Artificial Sequence
  MKO10083674_B_Epb4.1l3
  gRNA
gcagtgcaaagtgacgcttc

SEQ ID NO: 83675 - DNA, 20 bp, Artificial Sequence
  MKO10083675_B_Epb4.1l3
  gRNA
ccccgctgaagatcgtgaaa

SEQ ID NO: 83676 - DNA, 20 bp, Artificial Sequence
  MKO10083676_B_Epb4.1l3
  gRNA
agctatcagaagatatcacc

SEQ ID NO: 83677 - DNA, 20 bp, Artificial Sequence
  MKO10083677_B_Epb4.1l4a
  gRNA
gcaaggcagccggccctgaa

SEQ ID NO: 83678 - DNA, 20 bp, Artificial Sequence
  MKO10083678_B_Epb4.1l4a
  gRNA
tcagctccttgtgttctgca

SEQ ID NO: 83679 - DNA, 20 bp, Artificial Sequence
  MKO10083679_B_Epb4.1l4a
  gRNA
aaaaacccttgcagaacaca

SEQ ID NO: 83680 - DNA, 20 bp, Artificial Sequence
  MKO10083680_B_Epb4.1l4b
  gRNA
agaaccaaacaaccttcgag

SEQ ID NO: 83681 - DNA, 20 bp, Artificial Sequence
  MKO10083681_B_Epb4.1l4b
  gRNA
gcctgagttgtaaaacaaac

SEQ ID NO: 83682 - DNA, 20 bp, Artificial Sequence
  MKO10083682_B_Epb4.1l4b
  gRNA
acctttcatctgtttcttta

SEQ ID NO: 83683 - DNA, 20 bp, Artificial Sequence
  MKO10083683_B_Epb4.1l5
  gRNA
tgtttacagcattggttgga

SEQ ID NO: 83684 - DNA, 20 bp, Artificial Sequence
  MKO10083684_B_Epb4.1l5
  gRNA
tgaccaaatcatgtatcacc

SEQ ID NO: 83685 - DNA, 20 bp, Artificial Sequence
  MKO10083685_B_Epb4.1l5
  gRNA
aactcgaagatgaagacaat

SEQ ID NO: 83686 - DNA, 20 bp, Artificial Sequence
  MKO10083686_B_Epb4.1
  gRNA
ctcccaagcggccgcagctg

SEQ ID NO: 83687 - DNA, 20 bp, Artificial Sequence
  MKO10083687_B_Epb4.1
  gRNA
gtgcgagcacctcaaccttt

SEQ ID NO: 83688 - DNA, 20 bp, Artificial Sequence
  MKO10083688_B_Epb4.1
  gRNA
atgtgttggagtgtccccat

SEQ ID NO: 83689 - DNA, 20 bp, Artificial Sequence
  MKO10083689_B_Epb4.2
  gRNA
ccacgcagcagaaaacaacg

SEQ ID NO: 83690 - DNA, 20 bp, Artificial Sequence
  MKO10083690_B_Epb4.2
  gRNA
ccactactcactcttgcttc

SEQ ID NO: 83691 - DNA, 20 bp, Artificial Sequence
  MKO10083691_B_Epb4.2
  gRNA
gaatgcagtcagctgtgccc

SEQ ID NO: 83692 - DNA, 20 bp, Artificial Sequence
  MKO10083692_B_Epc1
  gRNA
tcagaatccagatcgtaatc

SEQ ID NO: 83693 - DNA, 20 bp, Artificial Sequence
  MKO10083693_B_Epc1
  gRNA
agctgcgccgcgatctcagc

SEQ ID NO: 83694 - DNA, 20 bp, Artificial Sequence
  MKO10083694_B_Epc1
  gRNA
tgacagcccggctgagatcg

SEQ ID NO: 83695 - DNA, 20 bp, Artificial Sequence
  MKO10083695_B_Epc2
  gRNA
gcgctgaaatagctcgctgt

SEQ ID NO: 83696 - DNA, 20 bp, Artificial Sequence
  MKO10083696_B_Epc2
  gRNA
tattacaatcgcttgtacaa

SEQ ID NO: 83697 - DNA, 20 bp, Artificial Sequence
  MKO10083697_B_Epc2
  gRNA
ttaaagctgtatatgactac

SEQ ID NO: 83698 - DNA, 20 bp, Artificial Sequence
  MKO10083698_B_Epcam
  gRNA
ctcacgtctgcaagctctga

SEQ ID NO: 83699 - DNA, 20 bp, Artificial Sequence
  MKO10083699_B_Epcam
  gRNA
tgtctgtgacaactacaagc

SEQ ID NO: 83700 - DNA, 20 bp, Artificial Sequence
  MKO10083700_B_Epcam
  gRNA
gaatgccagtgtacttccta

SEQ ID NO: 83701 - DNA, 20 bp, Artificial Sequence
  MKO10083701_B_Epdr1
  gRNA
cgtccagcacccgcacgcgc

SEQ ID NO: 83702 - DNA, 20 bp, Artificial Sequence
  MKO10083702_B_Epdr1
  gRNA
ctgctcctgaggccctccga

SEQ ID NO: 83703 - DNA, 20 bp, Artificial Sequence
  MKO10083703_B_Epdr1
  gRNA
gatctttgcacactgtttgg

SEQ ID NO: 83704 - DNA, 20 bp, Artificial Sequence
  MKO10083704_B_Epg5
  gRNA
ggatgaaggtcccccggtac

SEQ ID NO: 83705 - DNA, 20 bp, Artificial Sequence
  MKO10083705_B_Epg5
  gRNA
tttcattcatctctactcgc

SEQ ID NO: 83706 - DNA, 20 bp, Artificial Sequence
  MKO10083706_B_Epg5
  gRNA
gagatctttagcagtttatc

SEQ ID NO: 83707 - DNA, 20 bp, Artificial Sequence
  MKO10083707_B_Epgn
  gRNA
ccctccagagcagatgatgt

SEQ ID NO: 83708 - DNA, 20 bp, Artificial Sequence
  MKO10083708_B_Epgn
  gRNA
cattaatgcagtaactatta

SEQ ID NO: 83709 - DNA, 20 bp, Artificial Sequence
  MKO10083709_B_Epgn
  gRNA
tcaccctacatcatctgctc

SEQ ID NO: 83710 - DNA, 20 bp, Artificial Sequence
  MKO10083710_B_Epha10
  gRNA
gtggtatcaggcagacgaac

SEQ ID NO: 83711 - DNA, 20 bp, Artificial Sequence
  MKO10083711_B_Epha10
  gRNA
cctccccttagttatcctcc

SEQ ID NO: 83712 - DNA, 20 bp, Artificial Sequence
  MKO10083712_B_Epha10
  gRNA
tggactgcactgccaagcac

SEQ ID NO: 83713 - DNA, 20 bp, Artificial Sequence
  MKO10083713_B_Epha1
  gRNA
gaatgtagaacgctgctcgt

SEQ ID NO: 83714 - DNA, 20 bp, Artificial Sequence
  MKO10083714_B_Epha1
  gRNA
acattatcgagcccctgggg

SEQ ID NO: 83715 - DNA, 20 bp, Artificial Sequence
  MKO10083715_B_Epha1
  gRNA
tccactcgatagaaaccagt

SEQ ID NO: 83716 - DNA, 20 bp, Artificial Sequence
  MKO10083716_B_Epha2
  gRNA
gtgccaaagtagaactgcgt

SEQ ID NO: 83717 - DNA, 20 bp, Artificial Sequence
  MKO10083717_B_Epha2
  gRNA
ctcacgcacccctatggcaa

SEQ ID NO: 83718 - DNA, 20 bp, Artificial Sequence
  MKO10083718_B_Epha2
  gRNA
tttactcacccctttgccat

SEQ ID NO: 83719 - DNA, 20 bp, Artificial Sequence
  MKO10083719_B_Epha3
  gRNA
actccagtccaggataaccg

SEQ ID NO: 83720 - DNA, 20 bp, Artificial Sequence
  MKO10083720_B_Epha3
  gRNA
atttaactcaccccatggga

SEQ ID NO: 83721 - DNA, 20 bp, Artificial Sequence
  MKO10083721_B_Epha3
  gRNA
ttgtctgcagcttgtcgacc

SEQ ID NO: 83722 - DNA, 20 bp, Artificial Sequence
  MKO10083722_B_Epha4
  gRNA
gtagtggactccacttccac

SEQ ID NO: 83723 - DNA, 20 bp, Artificial Sequence
  MKO10083723_B_Epha4
  gRNA
tcaggacatttcttacaacg

SEQ ID NO: 83724 - DNA, 20 bp, Artificial Sequence
  MKO10083724_B_Epha4
  gRNA
cttggcacaggaggcgtccg

SEQ ID NO: 83725 - DNA, 20 bp, Artificial Sequence
  MKO10083725_B_Epha5
  gRNA
aaagaacttaccccgttctt

SEQ ID NO: 83726 - DNA, 20 bp, Artificial Sequence
  MKO10083726_B_Epha5
  gRNA
agagaccagtattacagccg

SEQ ID NO: 83727 - DNA, 20 bp, Artificial Sequence
  MKO10083727_B_Epha5
  gRNA
cgcactgtcatgggggacct

SEQ ID NO: 83728 - DNA, 20 bp, Artificial Sequence
  MKO10083728_B_Epha6
  gRNA
gactgacgttgcttccacgt

SEQ ID NO: 83729 - DNA, 20 bp, Artificial Sequence
  MKO10083729_B_Epha6
  gRNA
acagtgactacagatcacga

SEQ ID NO: 83730 - DNA, 20 bp, Artificial Sequence
  MKO10083730_B_Epha6
  gRNA
caacaattctgtggtagtac

SEQ ID NO: 83731 - DNA, 20 bp, Artificial Sequence
  MKO10083731_B_Epha7
  gRNA
cactccgataagaacatacc

SEQ ID NO: 83732 - DNA, 20 bp, Artificial Sequence
  MKO10083732_B_Epha7
  gRNA
tttgtagaacctgcggccac

SEQ ID NO: 83733 - DNA, 20 bp, Artificial Sequence
  MKO10083733_B_Epha7
  gRNA
gcaccatggttgttcaaact

SEQ ID NO: 83734 - DNA, 20 bp, Artificial Sequence
  MKO10083734_B_Epha8
  gRNA
aggccgcgcggtagtagctg

SEQ ID NO: 83735 - DNA, 20 bp, Artificial Sequence
  MKO10083735_B_Epha8
  gRNA
tgacctcagctactaccgcg

SEQ ID NO: 83736 - DNA, 20 bp, Artificial Sequence
  MKO10083736_B_Epha8
  gRNA
tggctcacgtatcccgctca

SEQ ID NO: 83737 - DNA, 20 bp, Artificial Sequence
  MKO10083737_B_Ephb1
  gRNA
gttcgaagacgttgcacact

SEQ ID NO: 83738 - DNA, 20 bp, Artificial Sequence
  MKO10083738_B_Ephb1
  gRNA
cagctcggtaatagccagtc

SEQ ID NO: 83739 - DNA, 20 bp, Artificial Sequence
  MKO10083739_B_Ephb1
  gRNA
gcgatactcaccccagaggc

SEQ ID NO: 83740 - DNA, 20 bp, Artificial Sequence
  MKO10083740_B_Ephb2
  gRNA
cgcagcgcgtgcatgcgccc

SEQ ID NO: 83741 - DNA, 20 bp, Artificial Sequence
  MKO10083741_B_Ephb2
  gRNA
gcaggcttcgtccccttggt

SEQ ID NO: 83742 - DNA, 20 bp, Artificial Sequence
  MKO10083742_B_Ephb2
  gRNA
cggccctgtagtagccgttg

SEQ ID NO: 83743 - DNA, 20 bp, Artificial Sequence
  MKO10083743_B_Ephb3
  gRNA
tgccgggcgtgtcaacacca

SEQ ID NO: 83744 - DNA, 20 bp, Artificial Sequence
  MKO10083744_B_Ephb3
  gRNA
caatagccgcaccacctcgc

SEQ ID NO: 83745 - DNA, 20 bp, Artificial Sequence
  MKO10083745_B_Ephb3
  gRNA
cgaggtggtgcggctattgg

SEQ ID NO: 83746 - DNA, 20 bp, Artificial Sequence
  MKO10083746_B_Ephb4
  gRNA
gagctcccgaggcaccgtct

SEQ ID NO: 83747 - DNA, 20 bp, Artificial Sequence
  MKO10083747_B_Ephb4
  gRNA
gaaatgggtgacttaccctc

SEQ ID NO: 83748 - DNA, 20 bp, Artificial Sequence
  MKO10083748_B_Ephb4
  gRNA
tccctcgccactgctttaga

SEQ ID NO: 83749 - DNA, 20 bp, Artificial Sequence
  MKO10083749_B_Ephb6
  gRNA
ggggatgtgtcgccgctgca

SEQ ID NO: 83750 - DNA, 20 bp, Artificial Sequence
  MKO10083750_B_Ephb6
  gRNA
tggctcacctacccgccagg

SEQ ID NO: 83751 - DNA, 20 bp, Artificial Sequence
  MKO10083751_B_Ephb6
  gRNA
ggccagttcggacccaccag

SEQ ID NO: 83752 - DNA, 20 bp, Artificial Sequence
  MKO10083752_B_Ephx1
  gRNA
caagaaatctcccaaaacgt

SEQ ID NO: 83753 - DNA, 20 bp, Artificial Sequence
  MKO10083753_B_Ephx1
  gRNA
gaggtttcacgtggatgaag

SEQ ID NO: 83754 - DNA, 20 bp, Artificial Sequence
  MKO10083754_B_Ephx1
  gRNA
gttccgggcatccccacctt

SEQ ID NO: 83755 - DNA, 20 bp, Artificial Sequence
  MKO10083755_B_Ephx2
  gRNA
gtaccagacggaattcccag

SEQ ID NO: 83756 - DNA, 20 bp, Artificial Sequence
  MKO10083756_B_Ephx2
  gRNA
gtccctctgggaattccgtc

SEQ ID NO: 83757 - DNA, 20 bp, Artificial Sequence
  MKO10083757_B_Ephx2
  gRNA
catcaaccgccccatgcttc

SEQ ID NO: 83758 - DNA, 20 bp, Artificial Sequence
  MKO10083758_B_Ephx3
  gRNA
gcatgtctacagccacgaca

SEQ ID NO: 83759 - DNA, 20 bp, Artificial Sequence
  MKO10083759_B_Ephx3
  gRNA
ccatgcagaaatagcatgag

SEQ ID NO: 83760 - DNA, 20 bp, Artificial Sequence
  MKO10083760_B_Ephx3
  gRNA
cgtctgcactatgtctctgc

SEQ ID NO: 83761 - DNA, 20 bp, Artificial Sequence
  MKO10083761_B_Ephx4
  gRNA
ctatttcagagtatatactg

SEQ ID NO: 83762 - DNA, 20 bp, Artificial Sequence
  MKO10083762_B_Ephx4
  gRNA
ttgtaactctcttgatgagc

SEQ ID NO: 83763 - DNA, 20 bp, Artificial Sequence
  MKO10083763_B_Ephx4
  gRNA
aacatagtgaaatcttaacc

SEQ ID NO: 83764 - DNA, 20 bp, Artificial Sequence
  MKO10083764_B_Epm2aip1
  gRNA
cacgtcgcgttcccgagtag

SEQ ID NO: 83765 - DNA, 20 bp, Artificial Sequence
  MKO10083765_B_Epm2aip1
  gRNA
ccgtggcgtcggccgcgacc

SEQ ID NO: 83766 - DNA, 20 bp, Artificial Sequence
  MKO10083766_B_Epm2aip1
  gRNA
cctggtcgagcgtctgcggc

SEQ ID NO: 83767 - DNA, 20 bp, Artificial Sequence
  MKO10083767_B_Epm2a
  gRNA
tcctcgtcaatgtagaccgc

SEQ ID NO: 83768 - DNA, 20 bp, Artificial Sequence
  MKO10083768_B_Epm2a
  gRNA
tcacatgttccagttggcga

SEQ ID NO: 83769 - DNA, 20 bp, Artificial Sequence
  MKO10083769_B_Epm2a
  gRNA
gggtagctgccctcgccaac

SEQ ID NO: 83770 - DNA, 20 bp, Artificial Sequence
  MKO10083770_B_Epn1
  gRNA
gagccgagaggagcacgata

SEQ ID NO: 83771 - DNA, 20 bp, Artificial Sequence
  MKO10083771_B_Epn1
  gRNA
tgaccttatcgtgctcctct

SEQ ID NO: 83772 - DNA, 20 bp, Artificial Sequence
  MKO10083772_B_Epn1
  gRNA
catgcctgctccgcctcggg

SEQ ID NO: 83773 - DNA, 20 bp, Artificial Sequence
  MKO10083773_B_Epn2
  gRNA
cttcgaacattactgacccg

SEQ ID NO: 83774 - DNA, 20 bp, Artificial Sequence
  MKO10083774_B_Epn2
  gRNA
ctgctaaccagaccaacccc

SEQ ID NO: 83775 - DNA, 20 bp, Artificial Sequence
  MKO10083775_B_Epn2
  gRNA
ccgggcctgctctaactcag

SEQ ID NO: 83776 - DNA, 20 bp, Artificial Sequence
  MKO10083776_B_Epn3
  gRNA
ctgctggccaacgtcgtcaa

SEQ ID NO: 83777 - DNA, 20 bp, Artificial Sequence
  MKO10083777_B_Epn3
  gRNA
tgacatcttcgcacctgccc

SEQ ID NO: 83778 - DNA, 20 bp, Artificial Sequence
  MKO10083778_B_Epn3
  gRNA
cgaagatgtcagccaagtcc

SEQ ID NO: 83779 - DNA, 20 bp, Artificial Sequence
  MKO10083779_B_Epor
  gRNA
tccgcggctccgtgcgtttc

SEQ ID NO: 83780 - DNA, 20 bp, Artificial Sequence
  MKO10083780_B_Epor
  gRNA
cacccacatccgatatgaag

SEQ ID NO: 83781 - DNA, 20 bp, Artificial Sequence
  MKO10083781_B_Epor
  gRNA
aaactcgatgtgtccgctgt

SEQ ID NO: 83782 - DNA, 20 bp, Artificial Sequence
  MKO10083782_B_Epo
  gRNA
actgaagctgtacacgggag

SEQ ID NO: 83783 - DNA, 20 bp, Artificial Sequence
  MKO10083783_B_Epo
  gRNA
ccaagcatagaagttgactt

SEQ ID NO: 83784 - DNA, 20 bp, Artificial Sequence
  MKO10083784_B_Epo
  gRNA
actcccctaggtggaagaac

SEQ ID NO: 83785 - DNA, 20 bp, Artificial Sequence
  MKO10083785_B_Eppin
  gRNA
aacagcaagtcagctagact

SEQ ID NO: 83786 - DNA, 20 bp, Artificial Sequence
  MKO10083786_B_Eppin
  gRNA
aaatgcttaaacccccaaca

SEQ ID NO: 83787 - DNA, 20 bp, Artificial Sequence
  MKO10083787_B_Eppin
  gRNA
ctcgccagaatgaagctttc

SEQ ID NO: 83788 - DNA, 20 bp, Artificial Sequence
  MKO10083788_B_Eppk1
  gRNA
cgcgccacaagcatttaaat

SEQ ID NO: 83789 - DNA, 20 bp, Artificial Sequence
  MKO10083789_B_Eppk1
  gRNA
ggcagctcctgcaacgttat

SEQ ID NO: 83790 - DNA, 20 bp, Artificial Sequence
  MKO10083790_B_Eppk1
  gRNA
ttccagataacgtcgcacct

SEQ ID NO: 83791 - DNA, 20 bp, Artificial Sequence
  MKO10083791_B_Eprs
  gRNA
gaattcaatcctgcgctacc

SEQ ID NO: 83792 - DNA, 20 bp, Artificial Sequence
  MKO10083792_B_Eprs
  gRNA
ctagaattgcaactacgtct

SEQ ID NO: 83793 - DNA, 20 bp, Artificial Sequence
  MKO10083793_B_Eprs
  gRNA
tctctgagaacatacctagt

SEQ ID NO: 83794 - DNA, 20 bp, Artificial Sequence
  MKO10083794_B_Eps15l1
  gRNA
taggtggaccctgcctacac

SEQ ID NO: 83795 - DNA, 20 bp, Artificial Sequence
  MKO10083795_B_Eps15l1
  gRNA
gtccaagaaccctttacctt

SEQ ID NO: 83796 - DNA, 20 bp, Artificial Sequence
  MKO10083796_B_Eps15l1
  gRNA
ccccgaaggtaaagggttct

SEQ ID NO: 83797 - DNA, 20 bp, Artificial Sequence
  MKO10083797_B_Eps15
  gRNA
caacagttcttcctcataac

SEQ ID NO: 83798 - DNA, 20 bp, Artificial Sequence
  MKO10083798_B_Eps15
  gRNA
tattaatctacaaaaactgc

SEQ ID NO: 83799 - DNA, 20 bp, Artificial Sequence
  MKO10083799_B_Eps15
  gRNA
tctgctcatccagttcaccc

SEQ ID NO: 83800 - DNA, 20 bp, Artificial Sequence
  MKO10083800_B_Eps8l1
  gRNA
gagaaaacgttactccaccg

SEQ ID NO: 83801 - DNA, 20 bp, Artificial Sequence
  MKO10083801_B_Eps8l1
  gRNA
cctgtgcccagacacgcccc

SEQ ID NO: 83802 - DNA, 20 bp, Artificial Sequence
  MKO10083802_B_Eps8l1
  gRNA
ccaagtgcaaagtctatcta

SEQ ID NO: 83803 - DNA, 20 bp, Artificial Sequence
  MKO10083803_B_Eps8l2
  gRNA
tgtgcccaggatgagcgcaa

SEQ ID NO: 83804 - DNA, 20 bp, Artificial Sequence
  MKO10083804_B_Eps8l2
  gRNA
acttgtcgttcacctgcagc

SEQ ID NO: 83805 - DNA, 20 bp, Artificial Sequence
  MKO10083805_B_Eps8l2
  gRNA
agtctcatgcatgatgacgt

SEQ ID NO: 83806 - DNA, 20 bp, Artificial Sequence
  MKO10083806_B_Eps8l3
  gRNA
gagtcaagacctgttcctgc

SEQ ID NO: 83807 - DNA, 20 bp, Artificial Sequence
  MKO10083807_B_Eps8l3
  gRNA
agttataggagcaggtgtta

SEQ ID NO: 83808 - DNA, 20 bp, Artificial Sequence
  MKO10083808_B_Eps8l3
  gRNA
aacctaccctcctacagcac

SEQ ID NO: 83809 - DNA, 20 bp, Artificial Sequence
  MKO10083809_B_Eps8
  gRNA
agatgcaatgatcactgtcg

SEQ ID NO: 83810 - DNA, 20 bp, Artificial Sequence
  MKO10083810_B_Eps8
  gRNA
tttgcataccaaggcgagaa

SEQ ID NO: 83811 - DNA, 20 bp, Artificial Sequence
  MKO10083811_B_Eps8
  gRNA
ttcaccaccctattcccaga

SEQ ID NO: 83812 - DNA, 20 bp, Artificial Sequence
  MKO10083812_B_Epsti1
  gRNA
gcgttctaaataccagcaaa

SEQ ID NO: 83813 - DNA, 20 bp, Artificial Sequence
  MKO10083813_B_Epsti1
  gRNA
tagcaccaaacgagagcaga

SEQ ID NO: 83814 - DNA, 20 bp, Artificial Sequence
  MKO10083814_B_Epsti1
  gRNA
gtctgacttcagcctcagac

SEQ ID NO: 83815 - DNA, 20 bp, Artificial Sequence
  MKO10083815_B_Ept1
  gRNA
accaattccagcaccccgtt

SEQ ID NO: 83816 - DNA, 20 bp, Artificial Sequence
  MKO10083816_B_Ept1
  gRNA
gtcataagcatgtgcctgac

SEQ ID NO: 83817 - DNA, 20 bp, Artificial Sequence
  MKO10083817_B_Ept1
  gRNA
ttacctgaagcatagaagtc

SEQ ID NO: 83818 - DNA, 20 bp, Artificial Sequence
  MKO10083818_B_Epx
  gRNA
ccttcgagactgcatagcag

SEQ ID NO: 83819 - DNA, 20 bp, Artificial Sequence
  MKO10083819_B_Epx
  gRNA
aagccattacgcctctttcc

SEQ ID NO: 83820 - DNA, 20 bp, Artificial Sequence
  MKO10083820_B_Epx
  gRNA
gttgttgcatctccctgtta

SEQ ID NO: 83821 - DNA, 20 bp, Artificial Sequence
  MKO10083821_B_Epyc
  gRNA
tgaagagcccgcagactttc

SEQ ID NO: 83822 - DNA, 20 bp, Artificial Sequence
  MKO10083822_B_Epyc
  gRNA
atttgaccttcgttggtgtg

SEQ ID NO: 83823 - DNA, 20 bp, Artificial Sequence
  MKO10083823_B_Epyc
  gRNA
gaggaatagcgtccagttca

SEQ ID NO: 83824 - DNA, 20 bp, Artificial Sequence
  MKO10083824_B_Eqtn
  gRNA
tcatctgaaagtgtcacacc

SEQ ID NO: 83825 - DNA, 20 bp, Artificial Sequence
  MKO10083825_B_Eqtn
  gRNA
ttctgttgctttacataaat

SEQ ID NO: 83826 - DNA, 20 bp, Artificial Sequence
  MKO10083826_B_Eqtn
  gRNA
cccccaatatacctgcattt

SEQ ID NO: 83827 - DNA, 20 bp, Artificial Sequence
  MKO10083827_B_Eral1
  gRNA
ccccagagcttgacatcgag

SEQ ID NO: 83828 - DNA, 20 bp, Artificial Sequence
  MKO10083828_B_Eral1
  gRNA
ccgtggattctcaggcatgt

SEQ ID NO: 83829 - DNA, 20 bp, Artificial Sequence
  MKO10083829_B_Eral1
  gRNA
caccactcgatgtcaagctc

SEQ ID NO: 83830 - DNA, 20 bp, Artificial Sequence
  MKO10083830_B_Erap1
  gRNA
gaagatgagtacctacctag

SEQ ID NO: 83831 - DNA, 20 bp, Artificial Sequence
  MKO10083831_B_Erap1
  gRNA
gcaatcccagactttcagtc

SEQ ID NO: 83832 - DNA, 20 bp, Artificial Sequence
  MKO10083832_B_Erap1
  gRNA
ggccatctccaacatgcccc

SEQ ID NO: 83833 - DNA, 20 bp, Artificial Sequence
  MKO10083833_B_Eras
  gRNA
catctgggcaggatattcac

SEQ ID NO: 83834 - DNA, 20 bp, Artificial Sequence
  MKO10083834_B_Eras
  gRNA
ccactatccaagattcctac

SEQ ID NO: 83835 - DNA, 20 bp, Artificial Sequence
  MKO10083835_B_Eras
  gRNA
ttgttgcccactagtaccag

SEQ ID NO: 83836 - DNA, 20 bp, Artificial Sequence
  MKO10083836_B_Erbb2ip
  gRNA
agcagctgagaaaacccatc

SEQ ID NO: 83837 - DNA, 20 bp, Artificial Sequence
  MKO10083837_B_Erbb2ip
  gRNA
gagagacttacttagaaata

SEQ ID NO: 83838 - DNA, 20 bp, Artificial Sequence
  MKO10083838_B_Erbb2ip
  gRNA
tttctctaagttctagaatc

SEQ ID NO: 83839 - DNA, 20 bp, Artificial Sequence
  MKO10083839_B_Erbb2
  gRNA
tgacgttgtccaaagggtct

SEQ ID NO: 83840 - DNA, 20 bp, Artificial Sequence
  MKO10083840_B_Erbb2
  gRNA
catgcttcgccacctctacc

SEQ ID NO: 83841 - DNA, 20 bp, Artificial Sequence
  MKO10083841_B_Erbb2
  gRNA
agggagtcgcaacttcatgt

SEQ ID NO: 83842 - DNA, 20 bp, Artificial Sequence
  MKO10083842_B_Erbb3
  gRNA
ctcagcccgtttagagtccc

SEQ ID NO: 83843 - DNA, 20 bp, Artificial Sequence
  MKO10083843_B_Erbb3
  gRNA
gtcccgtaagcacaatctcc

SEQ ID NO: 83844 - DNA, 20 bp, Artificial Sequence
  MKO10083844_B_Erbb3
  gRNA
ttgactggagggacatcgtg

SEQ ID NO: 83845 - DNA, 20 bp, Artificial Sequence
  MKO10083845_B_Erbb4
  gRNA
atcggccagtgcaagactta

SEQ ID NO: 83846 - DNA, 20 bp, Artificial Sequence
  MKO10083846_B_Erbb4
  gRNA
gctcgatgctggtgatctcc

SEQ ID NO: 83847 - DNA, 20 bp, Artificial Sequence
  MKO10083847_B_Erbb4
  gRNA
gtatagtgtcagcataacat

SEQ ID NO: 83848 - DNA, 20 bp, Artificial Sequence
  MKO10083848_B_Erc1
  gRNA
gcccgctctttctttaactc

SEQ ID NO: 83849 - DNA, 20 bp, Artificial Sequence
  MKO10083849_B_Erc1
  gRNA
tgggctccgagacctggaag

SEQ ID NO: 83850 - DNA, 20 bp, Artificial Sequence
  MKO10083850_B_Erc1
  gRNA
attcagatgctgaagtcaaa

SEQ ID NO: 83851 - DNA, 20 bp, Artificial Sequence
  MKO10083851_B_Erc2
  gRNA
ggaggagatcaaacaaatcg

SEQ ID NO: 83852 - DNA, 20 bp, Artificial Sequence
  MKO10083852_B_Erc2
  gRNA
tattgccgctctcttgctgc

SEQ ID NO: 83853 - DNA, 20 bp, Artificial Sequence
  MKO10083853_B_Erc2
  gRNA
gcgtaacatccgggacctgg

SEQ ID NO: 83854 - DNA, 20 bp, Artificial Sequence
  MKO10083854_B_Ercc1
  gRNA
cttgaaccagcagcacacga

SEQ ID NO: 83855 - DNA, 20 bp, Artificial Sequence
  MKO10083855_B_Ercc1
  gRNA
aatcacctcaccgaattccc

SEQ ID NO: 83856 - DNA, 20 bp, Artificial Sequence
  MKO10083856_B_Ercc1
  gRNA
ggtgattcccgattatgtgc

SEQ ID NO: 83857 - DNA, 20 bp, Artificial Sequence
  MKO10083857_B_Ercc2
  gRNA
ccgtgagcagtagataagtt

SEQ ID NO: 83858 - DNA, 20 bp, Artificial Sequence
  MKO10083858_B_Ercc2
  gRNA
tcacctcgggatgaatgcac

SEQ ID NO: 83859 - DNA, 20 bp, Artificial Sequence
  MKO10083859_B_Ercc2
  gRNA
cccgctgataggccacaatc

SEQ ID NO: 83860 - DNA, 20 bp, Artificial Sequence
  MKO10083860_B_Ercc3
  gRNA
cgttcctcaagcgacattcc

SEQ ID NO: 83861 - DNA, 20 bp, Artificial Sequence
  MKO10083861_B_Ercc3
  gRNA
cgcctactccctctatgcag

SEQ ID NO: 83862 - DNA, 20 bp, Artificial Sequence
  MKO10083862_B_Ercc3
  gRNA
gaggcggtgccctccgccgc

SEQ ID NO: 83863 - DNA, 20 bp, Artificial Sequence
  MKO10083863_B_Ercc4
  gRNA
tgcaacaagccgaatactcg

SEQ ID NO: 83864 - DNA, 20 bp, Artificial Sequence
  MKO10083864_B_Ercc4
  gRNA
aagaagtggaccttgtcgaa

SEQ ID NO: 83865 - DNA, 20 bp, Artificial Sequence
  MKO10083865_B_Ercc4
  gRNA
ttgtcactagaaaacgctct

SEQ ID NO: 83866 - DNA, 20 bp, Artificial Sequence
  MKO10083866_B_Ercc5
  gRNA
ctcggactcctttaagtgct

SEQ ID NO: 83867 - DNA, 20 bp, Artificial Sequence
  MKO10083867_B_Ercc5
  gRNA
tctttgaacctgagtgagac

SEQ ID NO: 83868 - DNA, 20 bp, Artificial Sequence
  MKO10083868_B_Ercc5
  gRNA
aaactgctttcagaagctca

SEQ ID NO: 83869 - DNA, 20 bp, Artificial Sequence
  MKO10083869_B_Ercc6l2
  gRNA
ccgagttacagaagttatga

SEQ ID NO: 83870 - DNA, 20 bp, Artificial Sequence
  MKO10083870_B_Ercc6l2
  gRNA
agtaactctgaaatatcccc

SEQ ID NO: 83871 - DNA, 20 bp, Artificial Sequence
  MKO10083871_B_Ercc6l2
  gRNA
tgaaacactgcgcttgtgtc

SEQ ID NO: 83872 - DNA, 20 bp, Artificial Sequence
  MKO10083872_B_Ercc6l
  gRNA
aacatacctcaggtaactct

SEQ ID NO: 83873 - DNA, 20 bp, Artificial Sequence
  MKO10083873_B_Ercc6l
  gRNA
aaggacgtattcacttcacc

SEQ ID NO: 83874 - DNA, 20 bp, Artificial Sequence
  MKO10083874_B_Ercc6l
  gRNA
tatgagagtcttgtagctcg

SEQ ID NO: 83875 - DNA, 20 bp, Artificial Sequence
  MKO10083875_B_Ercc6
  gRNA
tcatcgtcgatctcctgaac

SEQ ID NO: 83876 - DNA, 20 bp, Artificial Sequence
  MKO10083876_B_Ercc6
  gRNA
cagcccctccgagaatggcc

SEQ ID NO: 83877 - DNA, 20 bp, Artificial Sequence
  MKO10083877_B_Ercc6
  gRNA
cggaggggctggggtccaag

SEQ ID NO: 83878 - DNA, 20 bp, Artificial Sequence
  MKO10083878_B_Ercc8
  gRNA
tgtaaagcagtgtgttccgt

SEQ ID NO: 83879 - DNA, 20 bp, Artificial Sequence
  MKO10083879_B_Ercc8
  gRNA
cacgctgtatttgtgaacat

SEQ ID NO: 83880 - DNA, 20 bp, Artificial Sequence
  MKO10083880_B_Ercc8
  gRNA
gggtgttaaccccactgcca

SEQ ID NO: 83881 - DNA, 20 bp, Artificial Sequence
  MKO10083881_B_Erdr1
  gRNA
cgaaagcacacacgtagaag

SEQ ID NO: 83882 - DNA, 20 bp, Artificial Sequence
  MKO10083882_B_Erdr1
  gRNA
tccaggtgcgcgtgtcgccg

SEQ ID NO: 83883 - DNA, 20 bp, Artificial Sequence
  MKO10083883_B_Erdr1
  gRNA
ggacatttctgtacgcagtc

SEQ ID NO: 83884 - DNA, 20 bp, Artificial Sequence
  MKO10083884_B_Ereg
  gRNA
gaggataactgtaccgcctt

SEQ ID NO: 83885 - DNA, 20 bp, Artificial Sequence
  MKO10083885_B_Ereg
  gRNA
ctgtttctcatcataaccgc

SEQ ID NO: 83886 - DNA, 20 bp, Artificial Sequence
  MKO10083886_B_Ereg
  gRNA
gcatggccagtgcatctacc

SEQ ID NO: 83887 - DNA, 20 bp, Artificial Sequence
  MKO10083887_B_Erf
  gRNA
tcagcttgtcatagttcatc

SEQ ID NO: 83888 - DNA, 20 bp, Artificial Sequence
  MKO10083888_B_Erf
  gRNA
tgcacttgcggaccccccag

SEQ ID NO: 83889 - DNA, 20 bp, Artificial Sequence
  MKO10083889_B_Erf
  gRNA
caattaccctttcatcgata

SEQ ID NO: 83890 - DNA, 20 bp, Artificial Sequence
  MKO10083890_B_Ergic1
  gRNA
tgaatccagtgagctccgac

SEQ ID NO: 83891 - DNA, 20 bp, Artificial Sequence
  MKO10083891_B_Ergic1
  gRNA
cagccggctccattattcag

SEQ ID NO: 83892 - DNA, 20 bp, Artificial Sequence
  MKO10083892_B_Ergic1
  gRNA
ctcacacagccgacatatac

SEQ ID NO: 83893 - DNA, 20 bp, Artificial Sequence
  MKO10083893_B_Ergic2
  gRNA
agatgttggagcagatgtac

SEQ ID NO: 83894 - DNA, 20 bp, Artificial Sequence
  MKO10083894_B_Ergic2
  gRNA
tctcagtctatcaagataca

SEQ ID NO: 83895 - DNA, 20 bp, Artificial Sequence
  MKO10083895_B_Ergic2
  gRNA
accatggttgcttctgcaga

SEQ ID NO: 83896 - DNA, 20 bp, Artificial Sequence
  MKO10083896_B_Ergic3
  gRNA
gacttgtccacgtagagctc

SEQ ID NO: 83897 - DNA, 20 bp, Artificial Sequence
  MKO10083897_B_Ergic3
  gRNA
tggcgtccccgtgagctcag

SEQ ID NO: 83898 - DNA, 20 bp, Artificial Sequence
  MKO10083898_B_Ergic3
  gRNA
agacttgagcatcgatgcca

SEQ ID NO: 83899 - DNA, 20 bp, Artificial Sequence
  MKO10083899_B_Erg
  gRNA
taaagccttatcaacgtcat

SEQ ID NO: 83900 - DNA, 20 bp, Artificial Sequence
  MKO10083900_B_Erg
  gRNA
agaatgtcggcattgtagct

SEQ ID NO: 83901 - DNA, 20 bp, Artificial Sequence
  MKO10083901_B_Erg
  gRNA
cgcagagtgatcgtccctgc

SEQ ID NO: 83902 - DNA, 20 bp, Artificial Sequence
  MKO10083902_B_Erh
  gRNA
tgtatgaagaacatctgaag

SEQ ID NO: 83903 - DNA, 20 bp, Artificial Sequence
  MKO10083903_B_Erh
  gRNA
accagccgtataacaaagac

SEQ ID NO: 83904 - DNA, 20 bp, Artificial Sequence
  MKO10083904_B_Erh
  gRNA
tcaattacttcccagcctgt

SEQ ID NO: 83905 - DNA, 20 bp, Artificial Sequence
  MKO10083905_B_Eri1
  gRNA
gaaagctgatcattgacttc

SEQ ID NO: 83906 - DNA, 20 bp, Artificial Sequence
  MKO10083906_B_Eri1
  gRNA
aagtactgtatactaacaga

SEQ ID NO: 83907 - DNA, 20 bp, Artificial Sequence
  MKO10083907_B_Eri1
  gRNA
atgctgaaagagagctccgc

SEQ ID NO: 83908 - DNA, 20 bp, Artificial Sequence
  MKO10083908_B_Eri2
  gRNA
cacttatttcagggctactg

SEQ ID NO: 83909 - DNA, 20 bp, Artificial Sequence
  MKO10083909_B_Eri2
  gRNA
agtttcacttcagaagtaga

SEQ ID NO: 83910 - DNA, 20 bp, Artificial Sequence
  MKO10083910_B_Eri2
  gRNA
gtgcaaaattcagaaagaat

SEQ ID NO: 83911 - DNA, 20 bp, Artificial Sequence
  MKO10083911_B_Eri3
  gRNA
ccggccatttaacttcagga

SEQ ID NO: 83912 - DNA, 20 bp, Artificial Sequence
  MKO10083912_B_Eri3
  gRNA
tacttcgaagatgccaagac

SEQ ID NO: 83913 - DNA, 20 bp, Artificial Sequence
  MKO10083913_B_Eri3
  gRNA
caccgggatcattcaagcca

SEQ ID NO: 83914 - DNA, 20 bp, Artificial Sequence
  MKO10083914_B_Erich1
  gRNA
gcacacagctggatcgtctc

SEQ ID NO: 83915 - DNA, 20 bp, Artificial Sequence
  MKO10083915_B_Erich1
  gRNA
gccttacaataacgtcactg

SEQ ID NO: 83916 - DNA, 20 bp, Artificial Sequence
  MKO10083916_B_Erich1
  gRNA
gcccgaaccgaccagctgtg

SEQ ID NO: 83917 - DNA, 20 bp, Artificial Sequence
  MKO10083917_B_Erich2
  gRNA
gtcacactaccttaagcaac

SEQ ID NO: 83918 - DNA, 20 bp, Artificial Sequence
  MKO10083918_B_Erich2
  gRNA
actacatacctgggaatttc

SEQ ID NO: 83919 - DNA, 20 bp, Artificial Sequence
  MKO10083919_B_Erich2
  gRNA
tttccttcaacgtgttctcc

SEQ ID NO: 83920 - DNA, 20 bp, Artificial Sequence
  MKO10083920_B_Erlec1
  gRNA
ccccaatccaagagagcttt

SEQ ID NO: 83921 - DNA, 20 bp, Artificial Sequence
  MKO10083921_B_Erlec1
  gRNA
aatattcatgaatactacct

SEQ ID NO: 83922 - DNA, 20 bp, Artificial Sequence
  MKO10083922_B_Erlec1
  gRNA
tcatccccacttgtcacaag

SEQ ID NO: 83923 - DNA, 20 bp, Artificial Sequence
  MKO10083923_B_Erlin1
  gRNA
tgcaaaactggttcagctca

SEQ ID NO: 83924 - DNA, 20 bp, Artificial Sequence
  MKO10083924_B_Erlin1
  gRNA
gatctgaatgttgtaatgaa

SEQ ID NO: 83925 - DNA, 20 bp, Artificial Sequence
  MKO10083925_B_Erlin1
  gRNA
gctttgctaacgagccccag

SEQ ID NO: 83926 - DNA, 20 bp, Artificial Sequence
  MKO10083926_B_Erlin2
  gRNA
tgatgaacgggagcatgaga

SEQ ID NO: 83927 - DNA, 20 bp, Artificial Sequence
  MKO10083927_B_Erlin2
  gRNA
gagtatgaacgctgcagaac

SEQ ID NO: 83928 - DNA, 20 bp, Artificial Sequence
  MKO10083928_B_Erlin2
  gRNA
cgttcttcacttcatcagtt

SEQ ID NO: 83929 - DNA, 20 bp, Artificial Sequence
  MKO10083929_B_Ermap
  gRNA
accacagaaagagccaccgc

SEQ ID NO: 83930 - DNA, 20 bp, Artificial Sequence
  MKO10083930_B_Ermap
  gRNA
tcccaaagccgtggactgag

SEQ ID NO: 83931 - DNA, 20 bp, Artificial Sequence
  MKO10083931_B_Ermap
  gRNA
ttctgtggtcttgcccgtct

SEQ ID NO: 83932 - DNA, 20 bp, Artificial Sequence
  MKO10083932_B_Ermard
  gRNA
atccaagccatttatagcac

SEQ ID NO: 83933 - DNA, 20 bp, Artificial Sequence
  MKO10083933_B_Ermard
  gRNA
cgcccttatcacgaacagca

SEQ ID NO: 83934 - DNA, 20 bp, Artificial Sequence
  MKO10083934_B_Ermard
  gRNA
cttgctaattaaagagttgc

SEQ ID NO: 83935 - DNA, 20 bp, Artificial Sequence
  MKO10083935_B_Ermn
  gRNA
ttcggaggaatcttcttcca

SEQ ID NO: 83936 - DNA, 20 bp, Artificial Sequence
  MKO10083936_B_Ermn
  gRNA
aactgatgcagatgagaccc

SEQ ID NO: 83937 - DNA, 20 bp, Artificial Sequence
  MKO10083937_B_Ermn
  gRNA
acaacgaagaggttctcttc

SEQ ID NO: 83938 - DNA, 20 bp, Artificial Sequence
  MKO10083938_B_Ermp1
  gRNA
gcatctccgtagatatacag

SEQ ID NO: 83939 - DNA, 20 bp, Artificial Sequence
  MKO10083939_B_Ermp1
  gRNA
ggtgggccgctgtatatcta

SEQ ID NO: 83940 - DNA, 20 bp, Artificial Sequence
  MKO10083940_B_Ermp1
  gRNA
gttcctctttaatggcgcag

SEQ ID NO: 83941 - DNA, 20 bp, Artificial Sequence
  MKO10083941_B_Ern1
  gRNA
tccccatgccgaagttcaga

SEQ ID NO: 83942 - DNA, 20 bp, Artificial Sequence
  MKO10083942_B_Ern1
  gRNA
ggggaggcctgaaccaattc

SEQ ID NO: 83943 - DNA, 20 bp, Artificial Sequence
  MKO10083943_B_Ern1
  gRNA
ttcctcccagatcccaatga

SEQ ID NO: 83944 - DNA, 20 bp, Artificial Sequence
  MKO10083944_B_Ern2
  gRNA
ccctacagaccccatcatcc

SEQ ID NO: 83945 - DNA, 20 bp, Artificial Sequence
  MKO10083945_B_Ern2
  gRNA
ccatcagcccctgttgtttc

SEQ ID NO: 83946 - DNA, 20 bp, Artificial Sequence
  MKO10083946_B_Ern2
  gRNA
acttactctgtgacatacat

SEQ ID NO: 83947 - DNA, 20 bp, Artificial Sequence
  MKO10083947_B_Ero1lb
  gRNA
tgaaacgaccatgtcctttc

SEQ ID NO: 83948 - DNA, 20 bp, Artificial Sequence
  MKO10083948_B_Ero1lb
  gRNA
ttgccttagcgtgctgttga

SEQ ID NO: 83949 - DNA, 20 bp, Artificial Sequence
  MKO10083949_B_Ero1lb
  gRNA
catactcttacttctggaca

SEQ ID NO: 83950 - DNA, 20 bp, Artificial Sequence
  MKO10083950_B_Ero1l
  gRNA
aattaagtctgcgagctaca

SEQ ID NO: 83951 - DNA, 20 bp, Artificial Sequence
  MKO10083951_B_Ero1l
  gRNA
tgactactttagatattaca

SEQ ID NO: 83952 - DNA, 20 bp, Artificial Sequence
  MKO10083952_B_Ero1l
  gRNA
cttgctcacattcttcaatg

SEQ ID NO: 83953 - DNA, 20 bp, Artificial Sequence
  MKO10083953_B_Erp27
  gRNA
cacagacgtcccagccaccg

SEQ ID NO: 83954 - DNA, 20 bp, Artificial Sequence
  MKO10083954_B_Erp27
  gRNA
ggttgttcacgtgaataaaa

SEQ ID NO: 83955 - DNA, 20 bp, Artificial Sequence
  MKO10083955_B_Erp27
  gRNA
cgcatgctctcttcatactc

SEQ ID NO: 83956 - DNA, 20 bp, Artificial Sequence
  MKO10083956_B_Erp29
  gRNA
ccaagtccccatcccggaat

SEQ ID NO: 83957 - DNA, 20 bp, Artificial Sequence
  MKO10083957_B_Erp29
  gRNA
tcccaaaagcaagttcgtct

SEQ ID NO: 83958 - DNA, 20 bp, Artificial Sequence
  MKO10083958_B_Erp29
  gRNA
gcaagatgagttcaagcgtc

SEQ ID NO: 83959 - DNA, 20 bp, Artificial Sequence
  MKO10083959_B_Erp44
  gRNA
cttgctatttcagctgttat

SEQ ID NO: 83960 - DNA, 20 bp, Artificial Sequence
  MKO10083960_B_Erp44
  gRNA
tcagatgcttcctcaaaaat

SEQ ID NO: 83961 - DNA, 20 bp, Artificial Sequence
  MKO10083961_B_Erp44
  gRNA
accctgaaattatttcgtaa

SEQ ID NO: 83962 - DNA, 20 bp, Artificial Sequence
  MKO10083962_B_Errfi1
  gRNA
agcaggggagttcagattgt

SEQ ID NO: 83963 - DNA, 20 bp, Artificial Sequence
  MKO10083963_B_Errfi1
  gRNA
tccccaaggcctgaccatta

SEQ ID NO: 83964 - DNA, 20 bp, Artificial Sequence
  MKO10083964_B_Errfi1
  gRNA
caatctgaactcccctgctc

SEQ ID NO: 83965 - DNA, 20 bp, Artificial Sequence
  MKO10083965_B_Erv3
  gRNA
tgtattcgatccctgacccc

SEQ ID NO: 83966 - DNA, 20 bp, Artificial Sequence
  MKO10083966_B_Erv3
  gRNA
acagaccagaccatccccta

SEQ ID NO: 83967 - DNA, 20 bp, Artificial Sequence
  MKO10083967_B_Erv3
  gRNA
taagcctcacctttgatata

SEQ ID NO: 83968 - DNA, 20 bp, Artificial Sequence
  MKO10083968_B_Esam
  gRNA
acggaatgtgtccctgcgcc

SEQ ID NO: 83969 - DNA, 20 bp, Artificial Sequence
  MKO10083969_B_Esam
  gRNA
gcccccgggcctcaacaaat

SEQ ID NO: 83970 - DNA, 20 bp, Artificial Sequence
  MKO10083970_B_Esam
  gRNA
gggtacaccctgtaaactac

SEQ ID NO: 83971 - DNA, 20 bp, Artificial Sequence
  MKO10083971_B_Esco1
  gRNA
actttacagcgcttataaac

SEQ ID NO: 83972 - DNA, 20 bp, Artificial Sequence
  MKO10083972_B_Esco1
  gRNA
tataagcgctgtaaagtatg

SEQ ID NO: 83973 - DNA, 20 bp, Artificial Sequence
  MKO10083973_B_Esco1
  gRNA
cgtctatcaacagaaagaac

SEQ ID NO: 83974 - DNA, 20 bp, Artificial Sequence
  MKO10083974_B_Esco2
  gRNA
caagaagttagtacatgcag

SEQ ID NO: 83975 - DNA, 20 bp, Artificial Sequence
  MKO10083975_B_Esco2
  gRNA
aggtgcagtagtttcttcaa

SEQ ID NO: 83976 - DNA, 20 bp, Artificial Sequence
  MKO10083976_B_Esco2
  gRNA
tgaagaaactactgcacctg

SEQ ID NO: 83977 - DNA, 20 bp, Artificial Sequence
  MKO10083977_B_Esd
  gRNA
gaccacaaggccgtgctctg

SEQ ID NO: 83978 - DNA, 20 bp, Artificial Sequence
  MKO10083978_B_Esd
  gRNA
ccagacagccagtaaagcgc

SEQ ID NO: 83979 - DNA, 20 bp, Artificial Sequence
  MKO10083979_B_Esd
  gRNA
tgctgtctacctaccacccc

SEQ ID NO: 83980 - DNA, 20 bp, Artificial Sequence
  MKO10083980_B_Esf1
  gRNA
tgtagtggttccagtcataa

SEQ ID NO: 83981 - DNA, 20 bp, Artificial Sequence
  MKO10083981_B_Esf1
  gRNA
agtagagttactaagtattc

SEQ ID NO: 83982 - DNA, 20 bp, Artificial Sequence
  MKO10083982_B_Esf1
  gRNA
attaaaggcgaaagatttgc

SEQ ID NO: 83983 - DNA, 20 bp, Artificial Sequence
  MKO10083983_B_Esm1
  gRNA
ctctttgcattccatcccga

SEQ ID NO: 83984 - DNA, 20 bp, Artificial Sequence
  MKO10083984_B_Esm1
  gRNA
ctcggccctccgtgatgaaa

SEQ ID NO: 83985 - DNA, 20 bp, Artificial Sequence
  MKO10083985_B_Esm1
  gRNA
tctcacagcgttgccatctc

SEQ ID NO: 83986 - DNA, 20 bp, Artificial Sequence
  MKO10083986_B_Esp15
  gRNA
attccttcaagaagtattgt

SEQ ID NO: 83987 - DNA, 20 bp, Artificial Sequence
  MKO10083987_B_Esp15
  gRNA
acatagttaaactacattca

SEQ ID NO: 83988 - DNA, 20 bp, Artificial Sequence
  MKO10083988_B_Esp15
  gRNA
atgatgagaaaatacatcag

SEQ ID NO: 83989 - DNA, 20 bp, Artificial Sequence
  MKO10083989_B_Esp16
  gRNA
tttaaacttaccattccttc

SEQ ID NO: 83990 - DNA, 20 bp, Artificial Sequence
  MKO10083990_B_Esp16
  gRNA
acatagttaaactatattca

SEQ ID NO: 83991 - DNA, 20 bp, Artificial Sequence
  MKO10083991_B_Esp16
  gRNA
tttccaacaatacttcctga

SEQ ID NO: 83992 - DNA, 20 bp, Artificial Sequence
  MKO10083992_B_Esp18
  gRNA
tttgatacaccagaatgatg

SEQ ID NO: 83993 - DNA, 20 bp, Artificial Sequence
  MKO10083993_B_Esp18
  gRNA
tttcagatcagcagatatct

SEQ ID NO: 83994 - DNA, 20 bp, Artificial Sequence
  MKO10083994_B_Esp18
  gRNA
gcctcgaataaagtttaact

SEQ ID NO: 83995 - DNA, 20 bp, Artificial Sequence
  MKO10083995_B_Esp1
  gRNA
attatgagaaataacaacac

SEQ ID NO: 83996 - DNA, 20 bp, Artificial Sequence
  MKO10083996_B_Esp1
  gRNA
ccaacttgtctaattcacca

SEQ ID NO: 83997 - DNA, 20 bp, Artificial Sequence
  MKO10083997_B_Esp1
  gRNA
ctagtgaacgacatttgctc

SEQ ID NO: 83998 - DNA, 20 bp, Artificial Sequence
  MKO10083998_B_Esp23
  gRNA
tcaatttgaatataatgaac

SEQ ID NO: 83999 - DNA, 20 bp, Artificial Sequence
  MKO10083999_B_Esp23
  gRNA
ttcattatattcaaattgat

SEQ ID NO: 84000 - DNA, 20 bp, Artificial Sequence
  MKO10084000_B_Esp23
  gRNA
ctcaggttctgccagatcct

SEQ ID NO: 84001 - DNA, 20 bp, Artificial Sequence
  MKO10084001_B_Esp24
  gRNA
ctgatgagaaaagacatcac

SEQ ID NO: 84002 - DNA, 20 bp, Artificial Sequence
  MKO10084002_B_Esp24
  gRNA
tatgttgacaactaattaag

SEQ ID NO: 84003 - DNA, 20 bp, Artificial Sequence
  MKO10084003_B_Esp24
  gRNA
cacgtgatcagcagatatgg

SEQ ID NO: 84004 - DNA, 20 bp, Artificial Sequence
  MKO10084004_B_Esp31
  gRNA
catcactgggaatgagtcca

SEQ ID NO: 84005 - DNA, 20 bp, Artificial Sequence
  MKO10084005_B_Esp31
  gRNA
caattgatctttattgaatg

SEQ ID NO: 84006 - DNA, 20 bp, Artificial Sequence
  MKO10084006_B_Esp31
  gRNA
cctaacaaaagtcccttgat

SEQ ID NO: 84007 - DNA, 20 bp, Artificial Sequence
  MKO10084007_B_Esp34
  gRNA
ttaccatcaatgttcactga

SEQ ID NO: 84008 - DNA, 20 bp, Artificial Sequence
  MKO10084008_B_Esp34
  gRNA
tgtttgaaaagataattgat

SEQ ID NO: 84009 - DNA, 20 bp, Artificial Sequence
  MKO10084009_B_Esp34
  gRNA
ttaagaattcttgtatatat

SEQ ID NO: 84010 - DNA, 20 bp, Artificial Sequence
  MKO10084010_B_Esp36
  gRNA
ctaccatcaatgctcactga

SEQ ID NO: 84011 - DNA, 20 bp, Artificial Sequence
  MKO10084011_B_Esp36
  gRNA
cttgtgatcagcagatattt

SEQ ID NO: 84012 - DNA, 20 bp, Artificial Sequence
  MKO10084012_B_Esp36
  gRNA
caaattaatatacagtttca

SEQ ID NO: 84013 - DNA, 20 bp, Artificial Sequence
  MKO10084013_B_Esp38
  gRNA
atgatgaagaaatacatcag

SEQ ID NO: 84014 - DNA, 20 bp, Artificial Sequence
  MKO10084014_B_Esp38
  gRNA
gtgtgtaaaacaaatctgaa

SEQ ID NO: 84015 - DNA, 20 bp, Artificial Sequence
  MKO10084015_B_Esp38
  gRNA
ccatatatctgctgatctca

SEQ ID NO: 84016 - DNA, 20 bp, Artificial Sequence
  MKO10084016_B_Esp3
  gRNA
tcaaagtcctcttgaatgtt

SEQ ID NO: 84017 - DNA, 20 bp, Artificial Sequence
  MKO10084017_B_Esp3
  gRNA
ggagacaagtgtgacagcct

SEQ ID NO: 84018 - DNA, 20 bp, Artificial Sequence
  MKO10084018_B_Esp3
  gRNA
agcaactcctgctaagacta

SEQ ID NO: 84019 - DNA, 20 bp, Artificial Sequence
  MKO10084019_B_Esp4
  gRNA
cacccttccttcagtgagca

SEQ ID NO: 84020 - DNA, 20 bp, Artificial Sequence
  MKO10084020_B_Esp4
  gRNA
tttactgccctgagtaaatg

SEQ ID NO: 84021 - DNA, 20 bp, Artificial Sequence
  MKO10084021_B_Esp4
  gRNA
tctgagcaccacatttactc

SEQ ID NO: 84022 - DNA, 20 bp, Artificial Sequence
  MKO10084022_B_Esp5
  gRNA
cagaagtggttctgcatcat

SEQ ID NO: 84023 - DNA, 20 bp, Artificial Sequence
  MKO10084023_B_Esp5
  gRNA
cttccatcagtgtgcattga

SEQ ID NO: 84024 - DNA, 20 bp, Artificial Sequence
  MKO10084024_B_Esp5
  gRNA
ttaccatcaatgcacactga

SEQ ID NO: 84025 - DNA, 20 bp, Artificial Sequence
  MKO10084025_B_Esp6-esp5
  gRNA
tcattgattagtttaagcca

SEQ ID NO: 84026 - DNA, 20 bp, Artificial Sequence
  MKO10084026_B_Esp6-esp5
  gRNA
ttaccatcaatgcacactga

SEQ ID NO: 84027 - DNA, 20 bp, Artificial Sequence
  MKO10084027_B_Esp6-esp5
  gRNA
aggccatctgtgcttactga

SEQ ID NO: 84028 - DNA, 20 bp, Artificial Sequence
  MKO10084028_B_Esp6
  gRNA
attacaagaaatatcatcat

SEQ ID NO: 84029 - DNA, 20 bp, Artificial Sequence
  MKO10084029_B_Esp6
  gRNA
tcaatggcctctttgatgct

SEQ ID NO: 84030 - DNA, 20 bp, Artificial Sequence
  MKO10084030_B_Esp6
  gRNA
tttctggtcagcagatatag

SEQ ID NO: 84031 - DNA, 20 bp, Artificial Sequence
  MKO10084031_B_Esp8
  gRNA
ctttcttcagagcaaattga

SEQ ID NO: 84032 - DNA, 20 bp, Artificial Sequence
  MKO10084032_B_Esp8
  gRNA
atttcagaagaatgccccat

SEQ ID NO: 84033 - DNA, 20 bp, Artificial Sequence
  MKO10084033_B_Esp8
  gRNA
tctgagtacaacatttgctc

SEQ ID NO: 84034 - DNA, 20 bp, Artificial Sequence
  MKO10084034_B_Espl1
  gRNA
gctgactacctgagcatgac

SEQ ID NO: 84035 - DNA, 20 bp, Artificial Sequence
  MKO10084035_B_Espl1
  gRNA
ggcactaaccagtcatgctc

SEQ ID NO: 84036 - DNA, 20 bp, Artificial Sequence
  MKO10084036_B_Espl1
  gRNA
agcaaagtcatacacaatcc

SEQ ID NO: 84037 - DNA, 20 bp, Artificial Sequence
  MKO10084037_B_Espnl
  gRNA
cggccccgcagtctttcacc

SEQ ID NO: 84038 - DNA, 20 bp, Artificial Sequence
  MKO10084038_B_Espnl
  gRNA
gccacacacctattctcgac

SEQ ID NO: 84039 - DNA, 20 bp, Artificial Sequence
  MKO10084039_B_Espnl
  gRNA
cacggagtaaccactccacc

SEQ ID NO: 84040 - DNA, 20 bp, Artificial Sequence
  MKO10084040_B_Espn
  gRNA
agctctgagttatcacccgt

SEQ ID NO: 84041 - DNA, 20 bp, Artificial Sequence
  MKO10084041_B_Espn
  gRNA
gggcgggcggcggcgaactc

SEQ ID NO: 84042 - DNA, 20 bp, Artificial Sequence
  MKO10084042_B_Espn
  gRNA
attgatcccgggacaagact

SEQ ID NO: 84043 - DNA, 20 bp, Artificial Sequence
  MKO10084043_B_Esr1
  gRNA
agctggttcatatgatcaac

SEQ ID NO: 84044 - DNA, 20 bp, Artificial Sequence
  MKO10084044_B_Esr1
  gRNA
tatggggtctggtcctgcga

SEQ ID NO: 84045 - DNA, 20 bp, Artificial Sequence
  MKO10084045_B_Esr1
  gRNA
ttctgatgattggtctcgtc

SEQ ID NO: 84046 - DNA, 20 bp, Artificial Sequence
  MKO10084046_B_Esr2
  gRNA
gctgagacctacgcaagaca

SEQ ID NO: 84047 - DNA, 20 bp, Artificial Sequence
  MKO10084047_B_Esr2
  gRNA
gtctatggtacactgattcg

SEQ ID NO: 84048 - DNA, 20 bp, Artificial Sequence
  MKO10084048_B_Esr2
  gRNA
gatgatgtccctcacgaagc

SEQ ID NO: 84049 - DNA, 20 bp, Artificial Sequence
  MKO10084049_B_Esrp1
  gRNA
taggcagatcttgcatcccg

SEQ ID NO: 84050 - DNA, 20 bp, Artificial Sequence
  MKO10084050_B_Esrp1
  gRNA
gcacgaagtactagttagac

SEQ ID NO: 84051 - DNA, 20 bp, Artificial Sequence
  MKO10084051_B_Esrp1
  gRNA
ccagctgcggcgcggaagac

SEQ ID NO: 84052 - DNA, 20 bp, Artificial Sequence
  MKO10084052_B_Esrp2
  gRNA
ttctctgcggaggtcgtaga

SEQ ID NO: 84053 - DNA, 20 bp, Artificial Sequence
  MKO10084053_B_Esrp2
  gRNA
gttattctccacctacttga

SEQ ID NO: 84054 - DNA, 20 bp, Artificial Sequence
  MKO10084054_B_Esrp2
  gRNA
aggtgcttgggtgctgcata

SEQ ID NO: 84055 - DNA, 20 bp, Artificial Sequence
  MKO10084055_B_Esrra
  gRNA
ccactatctctcgatcaaaa

SEQ ID NO: 84056 - DNA, 20 bp, Artificial Sequence
  MKO10084056_B_Esrra
  gRNA
tacaattcaaggtgtgcgtc

SEQ ID NO: 84057 - DNA, 20 bp, Artificial Sequence
  MKO10084057_B_Esrra
  gRNA
gagcatcgagtacagctgtc

SEQ ID NO: 84058 - DNA, 20 bp, Artificial Sequence
  MKO10084058_B_Esrrb
  gRNA
gtgcgccttgaccgagttcg

SEQ ID NO: 84059 - DNA, 20 bp, Artificial Sequence
  MKO10084059_B_Esrrb
  gRNA
gcctcccaacgatatccccg

SEQ ID NO: 84060 - DNA, 20 bp, Artificial Sequence
  MKO10084060_B_Esrrb
  gRNA
aagatcgtctcgaatctact

SEQ ID NO: 84061 - DNA, 20 bp, Artificial Sequence
  MKO10084061_B_Esrrg
  gRNA
cgagagttggtggttatcat

SEQ ID NO: 84062 - DNA, 20 bp, Artificial Sequence
  MKO10084062_B_Esrrg
  gRNA
caagattgtctcgcatttgt

SEQ ID NO: 84063 - DNA, 20 bp, Artificial Sequence
  MKO10084063_B_Esrrg
  gRNA
gcgcagacgcaaatcctgcc

SEQ ID NO: 84064 - DNA, 20 bp, Artificial Sequence
  MKO10084064_B_Esx1
  gRNA
agtggagcttgcccgacgcc

SEQ ID NO: 84065 - DNA, 20 bp, Artificial Sequence
  MKO10084065_B_Esx1
  gRNA
tagcttgagctcaacgcttt

SEQ ID NO: 84066 - DNA, 20 bp, Artificial Sequence
  MKO10084066_B_Esx1
  gRNA
ggtggaggcattctgaatcc

SEQ ID NO: 84067 - DNA, 20 bp, Artificial Sequence
  MKO10084067_B_Esyt1
  gRNA
ttcctcccagatcgtggctc

SEQ ID NO: 84068 - DNA, 20 bp, Artificial Sequence
  MKO10084068_B_Esyt1
  gRNA
gcccttcctaggccagtata

SEQ ID NO: 84069 - DNA, 20 bp, Artificial Sequence
  MKO10084069_B_Esyt1
  gRNA
aaaggccgaatggctgaaca

SEQ ID NO: 84070 - DNA, 20 bp, Artificial Sequence
  MKO10084070_B_Esyt2
  gRNA
aggaaattgtgagattgatt

SEQ ID NO: 84071 - DNA, 20 bp, Artificial Sequence
  MKO10084071_B_Esyt2
  gRNA
taaaaacttacctaatctga

SEQ ID NO: 84072 - DNA, 20 bp, Artificial Sequence
  MKO10084072_B_Esyt2
  gRNA
cattctgctctttcagtgtc

SEQ ID NO: 84073 - DNA, 20 bp, Artificial Sequence
  MKO10084073_B_Esyt3
  gRNA
atgctcttctcccggatctt

SEQ ID NO: 84074 - DNA, 20 bp, Artificial Sequence
  MKO10084074_B_Esyt3
  gRNA
cggggactgtgagatcagcg

SEQ ID NO: 84075 - DNA, 20 bp, Artificial Sequence
  MKO10084075_B_Esyt3
  gRNA
tacacacggacaaacgcaac

SEQ ID NO: 84076 - DNA, 20 bp, Artificial Sequence
  MKO10084076_B_Etaa1
  gRNA
tacttacctgaggagcaata

SEQ ID NO: 84077 - DNA, 20 bp, Artificial Sequence
  MKO10084077_B_Etaa1
  gRNA
tgttaaccgtattgctcctc

SEQ ID NO: 84078 - DNA, 20 bp, Artificial Sequence
  MKO10084078_B_Etaa1
  gRNA
actgctattccttgtactcc

SEQ ID NO: 84079 - DNA, 20 bp, Artificial Sequence
  MKO10084079_B_Etf1
  gRNA
tttattgtaatagacggaag

SEQ ID NO: 84080 - DNA, 20 bp, Artificial Sequence
  MKO10084080_B_Etf1
  gRNA
gatccacagtgaatttgtgc

SEQ ID NO: 84081 - DNA, 20 bp, Artificial Sequence
  MKO10084081_B_Etf1
  gRNA
cagtaaacaaccagaccatt

SEQ ID NO: 84082 - DNA, 20 bp, Artificial Sequence
  MKO10084082_B_Etfa
  gRNA
agttacacacacatctgtgc

SEQ ID NO: 84083 - DNA, 20 bp, Artificial Sequence
  MKO10084083_B_Etfa
  gRNA
ttctgagtttccaaaatcaa

SEQ ID NO: 84084 - DNA, 20 bp, Artificial Sequence
  MKO10084084_B_Etfa
  gRNA
ctaaatactatcactgcagc

SEQ ID NO: 84085 - DNA, 20 bp, Artificial Sequence
  MKO10084085_B_Etfb
  gRNA
gatgatgactgtaaccagac

SEQ ID NO: 84086 - DNA, 20 bp, Artificial Sequence
  MKO10084086_B_Etfb
  gRNA
gtgaccactccagacttgtc

SEQ ID NO: 84087 - DNA, 20 bp, Artificial Sequence
  MKO10084087_B_Etfb
  gRNA
ccagggtacattcgcctctc

SEQ ID NO: 84088 - DNA, 20 bp, Artificial Sequence
  MKO10084088_B_Etfdh
  gRNA
agctattcggctaaagcagc

SEQ ID NO: 84089 - DNA, 20 bp, Artificial Sequence
  MKO10084089_B_Etfdh
  gRNA
ctcactacactgttcatccc

SEQ ID NO: 84090 - DNA, 20 bp, Artificial Sequence
  MKO10084090_B_Etfdh
  gRNA
tctgttacaggagtattaag

SEQ ID NO: 84091 - DNA, 20 bp, Artificial Sequence
  MKO10084091_B_Ethe1
  gRNA
ggaccggagaacccccgtgc

SEQ ID NO: 84092 - DNA, 20 bp, Artificial Sequence
  MKO10084092_B_Ethe1
  gRNA
agttctgatcgaccccgttc

SEQ ID NO: 84093 - DNA, 20 bp, Artificial Sequence
  MKO10084093_B_Ethe1
  gRNA
gaaggtgattccatccgctt

SEQ ID NO: 84094 - DNA, 20 bp, Artificial Sequence
  MKO10084094_B_Etl4
  gRNA
tccattagaaaggcgttccc

SEQ ID NO: 84095 - DNA, 20 bp, Artificial Sequence
  MKO10084095_B_Etl4
  gRNA
gcctttctaatggaaacgcc

SEQ ID NO: 84096 - DNA, 20 bp, Artificial Sequence
  MKO10084096_B_Etl4
  gRNA
gggcgactccagcatcttca

SEQ ID NO: 84097 - DNA, 20 bp, Artificial Sequence
  MKO10084097_B_Etnk1
  gRNA
cattgtgcgcatgaatagca

SEQ ID NO: 84098 - DNA, 20 bp, Artificial Sequence
  MKO10084098_B_Etnk1
  gRNA
aactacctggcatatgatat

SEQ ID NO: 84099 - DNA, 20 bp, Artificial Sequence
  MKO10084099_B_Etnk1
  gRNA
tcgttatggcaaaggaccac

SEQ ID NO: 84100 - DNA, 20 bp, Artificial Sequence
  MKO10084100_B_Etnk2
  gRNA
ggacaggtgttccttcaacc

SEQ ID NO: 84101 - DNA, 20 bp, Artificial Sequence
  MKO10084101_B_Etnk2
  gRNA
gcctgcctaagcccacgctc

SEQ ID NO: 84102 - DNA, 20 bp, Artificial Sequence
  MKO10084102_B_Etnk2
  gRNA
aactaccaggcatttgacat

SEQ ID NO: 84103 - DNA, 20 bp, Artificial Sequence
  MKO10084103_B_Etnppl
  gRNA
caatgacttagccttacgtc

SEQ ID NO: 84104 - DNA, 20 bp, Artificial Sequence
  MKO10084104_B_Etnppl
  gRNA
caaactcaatgatgttgtcg

SEQ ID NO: 84105 - DNA, 20 bp, Artificial Sequence
  MKO10084105_B_Etnppl
  gRNA
caaagctgccgcgaaacaga

SEQ ID NO: 84106 - DNA, 20 bp, Artificial Sequence
  MKO10084106_B_Etohi1
  gRNA
gttcacatgtacgtcatcat

SEQ ID NO: 84107 - DNA, 20 bp, Artificial Sequence
  MKO10084107_B_Etohi1
  gRNA
tatagctgtgagattcctat

SEQ ID NO: 84108 - DNA, 20 bp, Artificial Sequence
  MKO10084108_B_Etohi1
  gRNA
ttccatgacttctagaagtt

SEQ ID NO: 84109 - DNA, 20 bp, Artificial Sequence
  MKO10084109_B_Ets1
  gRNA
ttggctccattaacctgata

SEQ ID NO: 84110 - DNA, 20 bp, Artificial Sequence
  MKO10084110_B_Ets1
  gRNA
catctagagatcctgcagaa

SEQ ID NO: 84111 - DNA, 20 bp, Artificial Sequence
  MKO10084111_B_Ets1
  gRNA
cacaaaagaacagcagcgac

SEQ ID NO: 84112 - DNA, 20 bp, Artificial Sequence
  MKO10084112_B_Ets2
  gRNA
cgttcatgccaaactggtgc

SEQ ID NO: 84113 - DNA, 20 bp, Artificial Sequence
  MKO10084113_B_Ets2
  gRNA
ggccaccaacgagttcagcc

SEQ ID NO: 84114 - DNA, 20 bp, Artificial Sequence
  MKO10084114_B_Ets2
  gRNA
ccagcctttgacaccttcga

SEQ ID NO: 84115 - DNA, 20 bp, Artificial Sequence
  MKO10084115_B_Etv1
  gRNA
caactttcagcctgatagtc

SEQ ID NO: 84116 - DNA, 20 bp, Artificial Sequence
  MKO10084116_B_Etv1
  gRNA
gcagtttgttccagactatc

SEQ ID NO: 84117 - DNA, 20 bp, Artificial Sequence
  MKO10084117_B_Etv1
  gRNA
ctatgatcagaagccacaag

SEQ ID NO: 84118 - DNA, 20 bp, Artificial Sequence
  MKO10084118_B_Etv2
  gRNA
tacgtcttcgtgaggtaaag

SEQ ID NO: 84119 - DNA, 20 bp, Artificial Sequence
  MKO10084119_B_Etv2
  gRNA
cgccccttcaaagccgacga

SEQ ID NO: 84120 - DNA, 20 bp, Artificial Sequence
  MKO10084120_B_Etv2
  gRNA
agctgctgcgagccccgtcg

SEQ ID NO: 84121 - DNA, 20 bp, Artificial Sequence
  MKO10084121_B_Etv3
  gRNA
ctcgagcgaatgttgatgaa

SEQ ID NO: 84122 - DNA, 20 bp, Artificial Sequence
  MKO10084122_B_Etv3
  gRNA
ctacaaagccgagtcgtcgc

SEQ ID NO: 84123 - DNA, 20 bp, Artificial Sequence
  MKO10084123_B_Etv3
  gRNA
cggcgacgactcggctttgt

SEQ ID NO: 84124 - DNA, 20 bp, Artificial Sequence
  MKO10084124_B_Etv4
  gRNA
tcagtcacttccaagagacg

SEQ ID NO: 84125 - DNA, 20 bp, Artificial Sequence
  MKO10084125_B_Etv4
  gRNA
ctgccgccttccgactcaga

SEQ ID NO: 84126 - DNA, 20 bp, Artificial Sequence
  MKO10084126_B_Etv4
  gRNA
ctggggctcacctggagtaa

SEQ ID NO: 84127 - DNA, 20 bp, Artificial Sequence
  MKO10084127_B_Etv5
  gRNA
gatctggctcacgattctga

SEQ ID NO: 84128 - DNA, 20 bp, Artificial Sequence
  MKO10084128_B_Etv5
  gRNA
ctaaccaagcctcctgcagc

SEQ ID NO: 84129 - DNA, 20 bp, Artificial Sequence
  MKO10084129_B_Etv5
  gRNA
cagttatcagactgaaaatc

SEQ ID NO: 84130 - DNA, 20 bp, Artificial Sequence
  MKO10084130_B_Etv6
  gRNA
caggtttgcagccgatttac

SEQ ID NO: 84131 - DNA, 20 bp, Artificial Sequence
  MKO10084131_B_Etv6
  gRNA
acacagtgcctcgagcgctc

SEQ ID NO: 84132 - DNA, 20 bp, Artificial Sequence
  MKO10084132_B_Etv6
  gRNA
cgctaccgatctcctcattc

SEQ ID NO: 84133 - DNA, 20 bp, Artificial Sequence
  MKO10084133_B_Eva1a
  gRNA
cccacctgagatataagacc

SEQ ID NO: 84134 - DNA, 20 bp, Artificial Sequence
  MKO10084134_B_Eva1a
  gRNA
gagcctgaaccgatactact

SEQ ID NO: 84135 - DNA, 20 bp, Artificial Sequence
  MKO10084135_B_Eva1a
  gRNA
actgccggcgaggtccccgg

SEQ ID NO: 84136 - DNA, 20 bp, Artificial Sequence
  MKO10084136_B_Eva1b
  gRNA
ggagctactcagcaacagcc

SEQ ID NO: 84137 - DNA, 20 bp, Artificial Sequence
  MKO10084137_B_Eva1b
  gRNA
agacgccaagcacgaagtag

SEQ ID NO: 84138 - DNA, 20 bp, Artificial Sequence
  MKO10084138_B_Eva1b
  gRNA
gggtcccgatgacacgctgc

SEQ ID NO: 84139 - DNA, 20 bp, Artificial Sequence
  MKO10084139_B_Eva1c
  gRNA
acacttattgttgaatgccg

SEQ ID NO: 84140 - DNA, 20 bp, Artificial Sequence
  MKO10084140_B_Eva1c
  gRNA
attcagatagtccccgtcac

SEQ ID NO: 84141 - DNA, 20 bp, Artificial Sequence
  MKO10084141_B_Eva1c
  gRNA
ctggtcaatagccgagtctt

SEQ ID NO: 84142 - DNA, 20 bp, Artificial Sequence
  MKO10084142_B_Evc2
  gRNA
gatatttcaagagaagcccg

SEQ ID NO: 84143 - DNA, 20 bp, Artificial Sequence
  MKO10084143_B_Evc2
  gRNA
catctttcagagcccctcac

SEQ ID NO: 84144 - DNA, 20 bp, Artificial Sequence
  MKO10084144_B_Evc2
  gRNA
agccccctttaccatcacag

SEQ ID NO: 84145 - DNA, 20 bp, Artificial Sequence
  MKO10084145_B_Evc
  gRNA
gcgccgtgtctacctgaagc

SEQ ID NO: 84146 - DNA, 20 bp, Artificial Sequence
  MKO10084146_B_Evc
  gRNA
tgccgtgatgttgccactca

SEQ ID NO: 84147 - DNA, 20 bp, Artificial Sequence
  MKO10084147_B_Evc
  gRNA
aggggcgtcttcatcccgag

SEQ ID NO: 84148 - DNA, 20 bp, Artificial Sequence
  MKO10084148_B_Evi2a-evi2b
  gRNA
gtgtgccataccacgaagac

SEQ ID NO: 84149 - DNA, 20 bp, Artificial Sequence
  MKO10084149_B_Evi2a-evi2b
  gRNA
tggcttacgaagtgacggct

SEQ ID NO: 84150 - DNA, 20 bp, Artificial Sequence
  MKO10084150_B_Evi2a-evi2b
  gRNA
gacatgtagttgagttgcag

SEQ ID NO: 84151 - DNA, 20 bp, Artificial Sequence
  MKO10084151_B_Evi2a
  gRNA
aagtaggcaagcgccagccg

SEQ ID NO: 84152 - DNA, 20 bp, Artificial Sequence
  MKO10084152_B_Evi2a
  gRNA
ggcgctcaccttgtgaccca

SEQ ID NO: 84153 - DNA, 20 bp, Artificial Sequence
  MKO10084153_B_Evi2a
  gRNA
aacctcctattgcaatctcc

SEQ ID NO: 84154 - DNA, 20 bp, Artificial Sequence
  MKO10084154_B_Evi2b
  gRNA
gcaattgctgccatattaat

SEQ ID NO: 84155 - DNA, 20 bp, Artificial Sequence
  MKO10084155_B_Evi2b
  gRNA
ctgagaaaaacgtattgtcc

SEQ ID NO: 84156 - DNA, 20 bp, Artificial Sequence
  MKO10084156_B_Evi2b
  gRNA
ttggtcaaagtgaacccaga

SEQ ID NO: 84157 - DNA, 20 bp, Artificial Sequence
  MKO10084157_B_Evi5l
  gRNA
agcccacctcccgatcaacc

SEQ ID NO: 84158 - DNA, 20 bp, Artificial Sequence
  MKO10084158_B_Evi5l
  gRNA
ccgaattgccaacgagtggg

SEQ ID NO: 84159 - DNA, 20 bp, Artificial Sequence
  MKO10084159_B_Evi5l
  gRNA
ccagtttgaatacatgctac

SEQ ID NO: 84160 - DNA, 20 bp, Artificial Sequence
  MKO10084160_B_Evi5
  gRNA
atcacttcagagcaatagtg

SEQ ID NO: 84161 - DNA, 20 bp, Artificial Sequence
  MKO10084161_B_Evi5
  gRNA
tccttaaaaaagttgtgttc

SEQ ID NO: 84162 - DNA, 20 bp, Artificial Sequence
  MKO10084162_B_Evi5
  gRNA
ctaagctggaggaacaaaac

SEQ ID NO: 84163 - DNA, 20 bp, Artificial Sequence
  MKO10084163_B_Evl
  gRNA
agtttaagccatagacctga

SEQ ID NO: 84164 - DNA, 20 bp, Artificial Sequence
  MKO10084164_B_Evl
  gRNA
acgatgacaccagtaagaag

SEQ ID NO: 84165 - DNA, 20 bp, Artificial Sequence
  MKO10084165_B_Evl
  gRNA
aggcccctccacacagcgtc

SEQ ID NO: 84166 - DNA, 20 bp, Artificial Sequence
  MKO10084166_B_Evpl
  gRNA
ttccgcctgatgtggggccc

SEQ ID NO: 84167 - DNA, 20 bp, Artificial Sequence
  MKO10084167_B_Evpl
  gRNA
catgcaagccaacgctgacc

SEQ ID NO: 84168 - DNA, 20 bp, Artificial Sequence
  MKO10084168_B_Evpl
  gRNA
tctgcagaatctggtccgtg

SEQ ID NO: 84169 - DNA, 20 bp, Artificial Sequence
  MKO10084169_B_Evx1
  gRNA
gcgttcccggtggcgcagtc

SEQ ID NO: 84170 - DNA, 20 bp, Artificial Sequence
  MKO10084170_B_Evx1
  gRNA
ggttgcctgagcccgcgagc

SEQ ID NO: 84171 - DNA, 20 bp, Artificial Sequence
  MKO10084171_B_Evx1
  gRNA
gctgccagttcgcatctccg

SEQ ID NO: 84172 - DNA, 20 bp, Artificial Sequence
  MKO10084172_B_Evx2
  gRNA
ctccggttccggcgccgatc

SEQ ID NO: 84173 - DNA, 20 bp, Artificial Sequence
  MKO10084173_B_Evx2
  gRNA
tccagtttgtccgattcagc

SEQ ID NO: 84174 - DNA, 20 bp, Artificial Sequence
  MKO10084174_B_Evx2
  gRNA
ggccgacatgagcagcgacg

SEQ ID NO: 84175 - DNA, 20 bp, Artificial Sequence
  MKO10084175_B_Ewsr1
  gRNA
tactgatgtcagctatactc

SEQ ID NO: 84176 - DNA, 20 bp, Artificial Sequence
  MKO10084176_B_Ewsr1
  gRNA
tagtcaagctgcagcccagc

SEQ ID NO: 84177 - DNA, 20 bp, Artificial Sequence
  MKO10084177_B_Ewsr1
  gRNA
ctgggctgcagcttgactat

SEQ ID NO: 84178 - DNA, 20 bp, Artificial Sequence
  MKO10084178_B_Exd1
  gRNA
atgaagcagaaggtgcatcg

SEQ ID NO: 84179 - DNA, 20 bp, Artificial Sequence
  MKO10084179_B_Exd1
  gRNA
ccaggggtgaaagtgttctt

SEQ ID NO: 84180 - DNA, 20 bp, Artificial Sequence
  MKO10084180_B_Exd1
  gRNA
gatcagttccagcagaagtt

SEQ ID NO: 84181 - DNA, 20 bp, Artificial Sequence
  MKO10084181_B_Exd2
  gRNA
ttctacttcgttgcagcaac

SEQ ID NO: 84182 - DNA, 20 bp, Artificial Sequence
  MKO10084182_B_Exd2
  gRNA
cgcttgcccaggctgatata

SEQ ID NO: 84183 - DNA, 20 bp, Artificial Sequence
  MKO10084183_B_Exd2
  gRNA
ccttgtgcacctgtgaccgc

SEQ ID NO: 84184 - DNA, 20 bp, Artificial Sequence
  MKO10084184_B_Exo1
  gRNA
ctcccctaccttcacgatat

SEQ ID NO: 84185 - DNA, 20 bp, Artificial Sequence
  MKO10084185_B_Exo1
  gRNA
tagagcgagcgaagcagtct

SEQ ID NO: 84186 - DNA, 20 bp, Artificial Sequence
  MKO10084186_B_Exo1
  gRNA
gactctgacctcctcgcatt

SEQ ID NO: 84187 - DNA, 20 bp, Artificial Sequence
  MKO10084187_B_Exo5
  gRNA
tcctccacatcaacgccttg

SEQ ID NO: 84188 - DNA, 20 bp, Artificial Sequence
  MKO10084188_B_Exo5
  gRNA
aagcaaggtgcagcattacg

SEQ ID NO: 84189 - DNA, 20 bp, Artificial Sequence
  MKO10084189_B_Exo5
  gRNA
tcaagagactgccactatac

SEQ ID NO: 84190 - DNA, 20 bp, Artificial Sequence
  MKO10084190_B_Exoc1
  gRNA
gttcttctcagccgtgctgc

SEQ ID NO: 84191 - DNA, 20 bp, Artificial Sequence
  MKO10084191_B_Exoc1
  gRNA
gagaatcagagtgtagcggg

SEQ ID NO: 84192 - DNA, 20 bp, Artificial Sequence
  MKO10084192_B_Exoc1
  gRNA
taatgttagctcgcagcttt

SEQ ID NO: 84193 - DNA, 20 bp, Artificial Sequence
  MKO10084193_B_Exoc2
  gRNA
gagtaaaattgtctgtcgag

SEQ ID NO: 84194 - DNA, 20 bp, Artificial Sequence
  MKO10084194_B_Exoc2
  gRNA
attcgcaggacggagagaca

SEQ ID NO: 84195 - DNA, 20 bp, Artificial Sequence
  MKO10084195_B_Exoc2
  gRNA
ggtcaccaacctcaaaaggc

SEQ ID NO: 84196 - DNA, 20 bp, Artificial Sequence
  MKO10084196_B_Exoc3l4
  gRNA
gaatcgctgggaagccgacg

SEQ ID NO: 84197 - DNA, 20 bp, Artificial Sequence
  MKO10084197_B_Exoc3l4
  gRNA
gcgcacgcgcgcagatctgc

SEQ ID NO: 84198 - DNA, 20 bp, Artificial Sequence
  MKO10084198_B_Exoc3l4
  gRNA
gcgcaccatgtgcacatcga

SEQ ID NO: 84199 - DNA, 20 bp, Artificial Sequence
  MKO10084199_B_Exoc3l
  gRNA
aactcgtgaagctttgagcc

SEQ ID NO: 84200 - DNA, 20 bp, Artificial Sequence
  MKO10084200_B_Exoc3l
  gRNA
gtcagtggtgcagtcctacc

SEQ ID NO: 84201 - DNA, 20 bp, Artificial Sequence
  MKO10084201_B_Exoc3l
  gRNA
aatagttacgctgtatttca

SEQ ID NO: 84202 - DNA, 20 bp, Artificial Sequence
  MKO10084202_B_Exoc3
  gRNA
gtaccccatctagttgagac

SEQ ID NO: 84203 - DNA, 20 bp, Artificial Sequence
  MKO10084203_B_Exoc3
  gRNA
tagtctgatagtaaccatcc

SEQ ID NO: 84204 - DNA, 20 bp, Artificial Sequence
  MKO10084204_B_Exoc3
  gRNA
ttccagtgctttccgaagcc

SEQ ID NO: 84205 - DNA, 20 bp, Artificial Sequence
  MKO10084205_B_Exoc4
  gRNA
tgatgcgttctgtgatactc

SEQ ID NO: 84206 - DNA, 20 bp, Artificial Sequence
  MKO10084206_B_Exoc4
  gRNA
ggtacagcgtaacaaggaaa

SEQ ID NO: 84207 - DNA, 20 bp, Artificial Sequence
  MKO10084207_B_Exoc4
  gRNA
tgtatatcaaatccactagc

SEQ ID NO: 84208 - DNA, 20 bp, Artificial Sequence
  MKO10084208_B_Exoc5
  gRNA
gagacgttcaatgtattcat

SEQ ID NO: 84209 - DNA, 20 bp, Artificial Sequence
  MKO10084209_B_Exoc5
  gRNA
tggaaggggtaaacacacct

SEQ ID NO: 84210 - DNA, 20 bp, Artificial Sequence
  MKO10084210_B_Exoc5
  gRNA
agctaaggagtttgctaaga

SEQ ID NO: 84211 - DNA, 20 bp, Artificial Sequence
  MKO10084211_B_Exoc6b
  gRNA
aatgtgcaactttcactacc

SEQ ID NO: 84212 - DNA, 20 bp, Artificial Sequence
  MKO10084212_B_Exoc6b
  gRNA
taataggaaactgcagcacg

SEQ ID NO: 84213 - DNA, 20 bp, Artificial Sequence
  MKO10084213_B_Exoc6b
  gRNA
tcagtttgctgtacatctct

SEQ ID NO: 84214 - DNA, 20 bp, Artificial Sequence
  MKO10084214_B_Exoc6
  gRNA
accgaataatatcttctgtt

SEQ ID NO: 84215 - DNA, 20 bp, Artificial Sequence
  MKO10084215_B_Exoc6
  gRNA
aaattacagttatgcctccc

SEQ ID NO: 84216 - DNA, 20 bp, Artificial Sequence
  MKO10084216_B_Exoc6
  gRNA
ggagatgtacagtaagctga

SEQ ID NO: 84217 - DNA, 20 bp, Artificial Sequence
  MKO10084217_B_Exoc7
  gRNA
cgcccggcggcgggagatcg

SEQ ID NO: 84218 - DNA, 20 bp, Artificial Sequence
  MKO10084218_B_Exoc7
  gRNA
cgctgctatgattcccccgc

SEQ ID NO: 84219 - DNA, 20 bp, Artificial Sequence
  MKO10084219_B_Exoc7
  gRNA
gtactcttccagcctacctg

SEQ ID NO: 84220 - DNA, 20 bp, Artificial Sequence
  MKO10084220_B_Exoc8
  gRNA
ggtccgcatcgtattccacc

SEQ ID NO: 84221 - DNA, 20 bp, Artificial Sequence
  MKO10084221_B_Exoc8
  gRNA
tcgcactcgttcgtccactt

SEQ ID NO: 84222 - DNA, 20 bp, Artificial Sequence
  MKO10084222_B_Exoc8
  gRNA
atgccaagatcaagcgcgag

SEQ ID NO: 84223 - DNA, 20 bp, Artificial Sequence
  MKO10084223_B_Exog
  gRNA
tcccgatatagtcttcattg

SEQ ID NO: 84224 - DNA, 20 bp, Artificial Sequence
  MKO10084224_B_Exog
  gRNA
gccctcaatgaagactatat

SEQ ID NO: 84225 - DNA, 20 bp, Artificial Sequence
  MKO10084225_B_Exog
  gRNA
cctaccgatgatcttgtcct

SEQ ID NO: 84226 - DNA, 20 bp, Artificial Sequence
  MKO10084226_B_Exosc10
  gRNA
agtcgggtaatgcagtacca

SEQ ID NO: 84227 - DNA, 20 bp, Artificial Sequence
  MKO10084227_B_Exosc10
  gRNA
acatcgtgcgacctcagctc

SEQ ID NO: 84228 - DNA, 20 bp, Artificial Sequence
  MKO10084228_B_Exosc10
  gRNA
gtggcagttaccaaggcatc

SEQ ID NO: 84229 - DNA, 20 bp, Artificial Sequence
  MKO10084229_B_Exosc1
  gRNA
gtgacgacagctcccacatc

SEQ ID NO: 84230 - DNA, 20 bp, Artificial Sequence
  MKO10084230_B_Exosc1
  gRNA
ttggccaaaactatgtcacc

SEQ ID NO: 84231 - DNA, 20 bp, Artificial Sequence
  MKO10084231_B_Exosc1
  gRNA
ggtggcaagcatggcaccac

SEQ ID NO: 84232 - DNA, 20 bp, Artificial Sequence
  MKO10084232_B_Exosc2
  gRNA
tctcacaggttcaacagaag

SEQ ID NO: 84233 - DNA, 20 bp, Artificial Sequence
  MKO10084233_B_Exosc2
  gRNA
caggggccatgggacataca

SEQ ID NO: 84234 - DNA, 20 bp, Artificial Sequence
  MKO10084234_B_Exosc2
  gRNA
tgtagtggggagaatcacag

SEQ ID NO: 84235 - DNA, 20 bp, Artificial Sequence
  MKO10084235_B_Exosc3
  gRNA
cgatcactatgccaatcacg

SEQ ID NO: 84236 - DNA, 20 bp, Artificial Sequence
  MKO10084236_B_Exosc3
  gRNA
ctttattagcgaccacacac

SEQ ID NO: 84237 - DNA, 20 bp, Artificial Sequence
  MKO10084237_B_Exosc3
  gRNA
tgtggtcgctaataaagaca

SEQ ID NO: 84238 - DNA, 20 bp, Artificial Sequence
  MKO10084238_B_Exosc4
  gRNA
gcgcatacaaagtcccgcat

SEQ ID NO: 84239 - DNA, 20 bp, Artificial Sequence
  MKO10084239_B_Exosc4
  gRNA
tcagatcgacatctacgtgc

SEQ ID NO: 84240 - DNA, 20 bp, Artificial Sequence
  MKO10084240_B_Exosc4
  gRNA
gggctcgagaccgggagccc

SEQ ID NO: 84241 - DNA, 20 bp, Artificial Sequence
  MKO10084241_B_Exosc5
  gRNA
gcaagcagcgttcaagcaac

SEQ ID NO: 84242 - DNA, 20 bp, Artificial Sequence
  MKO10084242_B_Exosc5
  gRNA
ctcaatcaccgtggtgctgc

SEQ ID NO: 84243 - DNA, 20 bp, Artificial Sequence
  MKO10084243_B_Exosc5
  gRNA
cccatgcgagccctcttctg

SEQ ID NO: 84244 - DNA, 20 bp, Artificial Sequence
  MKO10084244_B_Exosc6
  gRNA
tcctcgaatcctcgtcgctc

SEQ ID NO: 84245 - DNA, 20 bp, Artificial Sequence
  MKO10084245_B_Exosc6
  gRNA
ccgctgctcgcgacccgacg

SEQ ID NO: 84246 - DNA, 20 bp, Artificial Sequence
  MKO10084246_B_Exosc6
  gRNA
tacaccgggcggagccgcgt

SEQ ID NO: 84247 - DNA, 20 bp, Artificial Sequence
  MKO10084247_B_Exosc7
  gRNA
acaagagcagcgtagacctg

SEQ ID NO: 84248 - DNA, 20 bp, Artificial Sequence
  MKO10084248_B_Exosc7
  gRNA
tgggtctgccagagtcaagc

SEQ ID NO: 84249 - DNA, 20 bp, Artificial Sequence
  MKO10084249_B_Exosc7
  gRNA
aagctgctctcttcaacaca

SEQ ID NO: 84250 - DNA, 20 bp, Artificial Sequence
  MKO10084250_B_Exosc8
  gRNA
tttcagaactgtggagccgc

SEQ ID NO: 84251 - DNA, 20 bp, Artificial Sequence
  MKO10084251_B_Exosc8
  gRNA
tggctctgctctcgtgaagc

SEQ ID NO: 84252 - DNA, 20 bp, Artificial Sequence
  MKO10084252_B_Exosc8
  gRNA
aaggaaaactgccgtcctga

SEQ ID NO: 84253 - DNA, 20 bp, Artificial Sequence
  MKO10084253_B_Exosc9
  gRNA
aggtcttcggaagtgacaca

SEQ ID NO: 84254 - DNA, 20 bp, Artificial Sequence
  MKO10084254_B_Exosc9
  gRNA
agctgaatcgactcttagaa

SEQ ID NO: 84255 - DNA, 20 bp, Artificial Sequence
  MKO10084255_B_Exosc9
  gRNA
tccgttgccctattgagttt

SEQ ID NO: 84256 - DNA, 20 bp, Artificial Sequence
  MKO10084256_B_Exph5
  gRNA
taaactcaccggtttggtct

SEQ ID NO: 84257 - DNA, 20 bp, Artificial Sequence
  MKO10084257_B_Exph5
  gRNA
aaaatatacaattcacctgt

SEQ ID NO: 84258 - DNA, 20 bp, Artificial Sequence
  MKO10084258_B_Exph5
  gRNA
agatggcttcaaggagcaac

SEQ ID NO: 84259 - DNA, 20 bp, Artificial Sequence
  MKO10084259_B_Ext1
  gRNA
ccttactactatgctaattt

SEQ ID NO: 84260 - DNA, 20 bp, Artificial Sequence
  MKO10084260_B_Ext1
  gRNA
ttcctcgtggtcgcaggctt

SEQ ID NO: 84261 - DNA, 20 bp, Artificial Sequence
  MKO10084261_B_Ext1
  gRNA
accgcagtattcatcttacc

SEQ ID NO: 84262 - DNA, 20 bp, Artificial Sequence
  MKO10084262_B_Ext2
  gRNA
tttctcaataggtgggatcg

SEQ ID NO: 84263 - DNA, 20 bp, Artificial Sequence
  MKO10084263_B_Ext2
  gRNA
cccagattacaacactgccc

SEQ ID NO: 84264 - DNA, 20 bp, Artificial Sequence
  MKO10084264_B_Ext2
  gRNA
ggtgctgagcgatgtcctac

SEQ ID NO: 84265 - DNA, 20 bp, Artificial Sequence
  MKO10084265_B_Extl1
  gRNA
caggtcacccctcactgatg

SEQ ID NO: 84266 - DNA, 20 bp, Artificial Sequence
  MKO10084266_B_Extl1
  gRNA
ctttctctgaagtcatcgac

SEQ ID NO: 84267 - DNA, 20 bp, Artificial Sequence
  MKO10084267_B_Extl1
  gRNA
ccgtgctcctcagcccccgc

SEQ ID NO: 84268 - DNA, 20 bp, Artificial Sequence
  MKO10084268_B_Extl2
  gRNA
ttccatcgcagcggtgttga

SEQ ID NO: 84269 - DNA, 20 bp, Artificial Sequence
  MKO10084269_B_Extl2
  gRNA
tcatggggattcgagtgctc

SEQ ID NO: 84270 - DNA, 20 bp, Artificial Sequence
  MKO10084270_B_Extl2
  gRNA
acgatcaccttgtgcagact

SEQ ID NO: 84271 - DNA, 20 bp, Artificial Sequence
  MKO10084271_B_Extl3
  gRNA
atgggacgcaccttgatggg

SEQ ID NO: 84272 - DNA, 20 bp, Artificial Sequence
  MKO10084272_B_Extl3
  gRNA
tgtactcgtccaccatgtcc

SEQ ID NO: 84273 - DNA, 20 bp, Artificial Sequence
  MKO10084273_B_Extl3
  gRNA
ctagatgaacttgaagcact

SEQ ID NO: 84274 - DNA, 20 bp, Artificial Sequence
  MKO10084274_B_Eya1
  gRNA
cagacgggatttcttagcta

SEQ ID NO: 84275 - DNA, 20 bp, Artificial Sequence
  MKO10084275_B_Eya1
  gRNA
gagaacgggtgagctggtct

SEQ ID NO: 84276 - DNA, 20 bp, Artificial Sequence
  MKO10084276_B_Eya1
  gRNA
gctatttcactgctgctcat

SEQ ID NO: 84277 - DNA, 20 bp, Artificial Sequence
  MKO10084277_B_Eya2
  gRNA
tccaggcatcgccaaatcag

SEQ ID NO: 84278 - DNA, 20 bp, Artificial Sequence
  MKO10084278_B_Eya2
  gRNA
ggcgccttgatagagcccag

SEQ ID NO: 84279 - DNA, 20 bp, Artificial Sequence
  MKO10084279_B_Eya2
  gRNA
ggggctctgtccagcaggcg

SEQ ID NO: 84280 - DNA, 20 bp, Artificial Sequence
  MKO10084280_B_Eya3
  gRNA
accggagggaagcctctgtg

SEQ ID NO: 84281 - DNA, 20 bp, Artificial Sequence
  MKO10084281_B_Eya3
  gRNA
agctgatgccagctcttccc

SEQ ID NO: 84282 - DNA, 20 bp, Artificial Sequence
  MKO10084282_B_Eya3
  gRNA
ggacaaaggtgggcttgcag

SEQ ID NO: 84283 - DNA, 20 bp, Artificial Sequence
  MKO10084283_B_Eya4
  gRNA
tacttggaggggtacagctg

SEQ ID NO: 84284 - DNA, 20 bp, Artificial Sequence
  MKO10084284_B_Eya4
  gRNA
agctccaagctggataaatc

SEQ ID NO: 84285 - DNA, 20 bp, Artificial Sequence
  MKO10084285_B_Eya4
  gRNA
tgtatcactgcctccaacca

SEQ ID NO: 84286 - DNA, 20 bp, Artificial Sequence
  MKO10084286_B_Ezh1
  gRNA
acagccaggatatgttgatg

SEQ ID NO: 84287 - DNA, 20 bp, Artificial Sequence
  MKO10084287_B_Ezh1
  gRNA
gagctgatcaataactatga

SEQ ID NO: 84288 - DNA, 20 bp, Artificial Sequence
  MKO10084288_B_Ezh1
  gRNA
cctttgctcccatatttgcc

SEQ ID NO: 84289 - DNA, 20 bp, Artificial Sequence
  MKO10084289_B_Ezh2
  gRNA
agagtacattataggcaccg

SEQ ID NO: 84290 - DNA, 20 bp, Artificial Sequence
  MKO10084290_B_Ezh2
  gRNA
agaataatcatgggccagac

SEQ ID NO: 84291 - DNA, 20 bp, Artificial Sequence
  MKO10084291_B_Ezh2
  gRNA
gaccctgaatgcagtcgcct

SEQ ID NO: 84292 - DNA, 20 bp, Artificial Sequence
  MKO10084292_B_Ezr
  gRNA
ccagtgggaggaccggatcc

SEQ ID NO: 84293 - DNA, 20 bp, Artificial Sequence
  MKO10084293_B_Ezr
  gRNA
ctccgggaagtgtggtactt

SEQ ID NO: 84294 - DNA, 20 bp, Artificial Sequence
  MKO10084294_B_Ezr
  gRNA
gaccaccatggatgccgagc

SEQ ID NO: 84295 - DNA, 20 bp, Artificial Sequence
  MKO10084295_B_F10
  gRNA
gagttgcaccgggctcccca

SEQ ID NO: 84296 - DNA, 20 bp, Artificial Sequence
  MKO10084296_B_F10
  gRNA
cttcgaggacgacgagaaga

SEQ ID NO: 84297 - DNA, 20 bp, Artificial Sequence
  MKO10084297_B_F10
  gRNA
agatgtctcacctttatatt

SEQ ID NO: 84298 - DNA, 20 bp, Artificial Sequence
  MKO10084298_B_F11r
  gRNA
tgctgacctccccgtagttc

SEQ ID NO: 84299 - DNA, 20 bp, Artificial Sequence
  MKO10084299_B_F11r
  gRNA
gcccaactcacactcgttct

SEQ ID NO: 84300 - DNA, 20 bp, Artificial Sequence
  MKO10084300_B_F11r
  gRNA
attcactattgatccaaagt

SEQ ID NO: 84301 - DNA, 20 bp, Artificial Sequence
  MKO10084301_B_F11
  gRNA
cttcacagaatgcgttacta

SEQ ID NO: 84302 - DNA, 20 bp, Artificial Sequence
  MKO10084302_B_F11
  gRNA
gcgcctgtcatgtttaccat

SEQ ID NO: 84303 - DNA, 20 bp, Artificial Sequence
  MKO10084303_B_F11
  gRNA
cactcaccgatggtccacac

SEQ ID NO: 84304 - DNA, 20 bp, Artificial Sequence
  MKO10084304_B_F12
  gRNA
acatgtatcaacacccccaa

SEQ ID NO: 84305 - DNA, 20 bp, Artificial Sequence
  MKO10084305_B_F12
  gRNA
tagctgacggtggtactgaa

SEQ ID NO: 84306 - DNA, 20 bp, Artificial Sequence
  MKO10084306_B_F12
  gRNA
aaacacaacccgtgccacaa

SEQ ID NO: 84307 - DNA, 20 bp, Artificial Sequence
  MKO10084307_B_F13a1
  gRNA
acagttcgaagacggcatcc

SEQ ID NO: 84308 - DNA, 20 bp, Artificial Sequence
  MKO10084308_B_F13a1
  gRNA
agggacggttgaagtcaatc

SEQ ID NO: 84309 - DNA, 20 bp, Artificial Sequence
  MKO10084309_B_F13a1
  gRNA
aataagttgattgtccgcag

SEQ ID NO: 84310 - DNA, 20 bp, Artificial Sequence
  MKO10084310_B_F13b
  gRNA
acgtagccattccttaggtc

SEQ ID NO: 84311 - DNA, 20 bp, Artificial Sequence
  MKO10084311_B_F13b
  gRNA
tgagggaccagccattagcc

SEQ ID NO: 84312 - DNA, 20 bp, Artificial Sequence
  MKO10084312_B_F13b
  gRNA
actgacttactgtagcacct

SEQ ID NO: 84313 - DNA, 20 bp, Artificial Sequence
  MKO10084313_B_F2rl1
  gRNA
ctcacccggtgcaaggttct

SEQ ID NO: 84314 - DNA, 20 bp, Artificial Sequence
  MKO10084314_B_F2rl1
  gRNA
cgtcttgatcatgagcacgt

SEQ ID NO: 84315 - DNA, 20 bp, Artificial Sequence
  MKO10084315_B_F2rl1
  gRNA
acaccccgccgtgatttaca

SEQ ID NO: 84316 - DNA, 20 bp, Artificial Sequence
  MKO10084316_B_F2rl2
  gRNA
ccactttggcaaacagtgac

SEQ ID NO: 84317 - DNA, 20 bp, Artificial Sequence
  MKO10084317_B_F2rl2
  gRNA
tggtgatctcggagtggacg

SEQ ID NO: 84318 - DNA, 20 bp, Artificial Sequence
  MKO10084318_B_F2rl2
  gRNA
gacgaagtagtagaatcgga

SEQ ID NO: 84319 - DNA, 20 bp, Artificial Sequence
  MKO10084319_B_F2rl3
  gRNA
ctctacatcatcgtagatgc

SEQ ID NO: 84320 - DNA, 20 bp, Artificial Sequence
  MKO10084320_B_F2rl3
  gRNA
cgactggcttaccacttgcg

SEQ ID NO: 84321 - DNA, 20 bp, Artificial Sequence
  MKO10084321_B_F2rl3
  gRNA
ttgcgggcccgtgcactgcg

SEQ ID NO: 84322 - DNA, 20 bp, Artificial Sequence
  MKO10084322_B_F2r
  gRNA
cgcttgctgatcgtcgccct

SEQ ID NO: 84323 - DNA, 20 bp, Artificial Sequence
  MKO10084323_B_F2r
  gRNA
cctcaagacgaacactgcga

SEQ ID NO: 84324 - DNA, 20 bp, Artificial Sequence
  MKO10084324_B_F2r
  gRNA
catgttcccgtaaaacgctg

SEQ ID NO: 84325 - DNA, 20 bp, Artificial Sequence
  MKO10084325_B_F2
  gRNA
atctgggtgtgaactacctt

SEQ ID NO: 84326 - DNA, 20 bp, Artificial Sequence
  MKO10084326_B_F2
  gRNA
tgttggctctgcggacccgc

SEQ ID NO: 84327 - DNA, 20 bp, Artificial Sequence
  MKO10084327_B_F2
  gRNA
ttgctttgtaggacgtgttc

SEQ ID NO: 84328 - DNA, 20 bp, Artificial Sequence
  MKO10084328_B_F3
  gRNA
gtacagtgtgcaccgagcaa

SEQ ID NO: 84329 - DNA, 20 bp, Artificial Sequence
  MKO10084329_B_F3
  gRNA
caatgaattctcgattgatg

SEQ ID NO: 84330 - DNA, 20 bp, Artificial Sequence
  MKO10084330_B_F3
  gRNA
ccttgccaaagacttgccgc

SEQ ID NO: 84331 - DNA, 20 bp, Artificial Sequence
  MKO10084331_B_F5
  gRNA
ccaacttcagcgtataaagt

SEQ ID NO: 84332 - DNA, 20 bp, Artificial Sequence
  MKO10084332_B_F5
  gRNA
tttgtgaataagacgatgcc

SEQ ID NO: 84333 - DNA, 20 bp, Artificial Sequence
  MKO10084333_B_F5
  gRNA
tctctcaggcaccctgaccg

SEQ ID NO: 84334 - DNA, 20 bp, Artificial Sequence
  MKO10084334_B_F7
  gRNA
gcctcgaatccatgtcagaa

SEQ ID NO: 84335 - DNA, 20 bp, Artificial Sequence
  MKO10084335_B_F7
  gRNA
ggggcactcacggtcctctc

SEQ ID NO: 84336 - DNA, 20 bp, Artificial Sequence
  MKO10084336_B_F7
  gRNA
tgactgtgaccagtactgca

SEQ ID NO: 84337 - DNA, 20 bp, Artificial Sequence
  MKO10084337_B_F830016B08Rik
  gRNA
agttgtaaataatagattgc

SEQ ID NO: 84338 - DNA, 20 bp, Artificial Sequence
  MKO10084338_B_F830016B08Rik
  gRNA
aatccttagccaccaactcc

SEQ ID NO: 84339 - DNA, 20 bp, Artificial Sequence
  MKO10084339_B_F830016B08Rik
  gRNA
tggctagaagccttcaagat

SEQ ID NO: 84340 - DNA, 20 bp, Artificial Sequence
  MKO10084340_B_F830045P16Rik
  gRNA
gttgacatgtaccacgtgtg

SEQ ID NO: 84341 - DNA, 20 bp, Artificial Sequence
  MKO10084341_B_F830045P16Rik
  gRNA
tgatcaagtactcacttgca

SEQ ID NO: 84342 - DNA, 20 bp, Artificial Sequence
  MKO10084342_B_F830045P16Rik
  gRNA
gcaagtgacagtcaccaaac

SEQ ID NO: 84343 - DNA, 20 bp, Artificial Sequence
  MKO10084343_B_F8a
  gRNA
gcgcgactacacaggcgccc

SEQ ID NO: 84344 - DNA, 20 bp, Artificial Sequence
  MKO10084344_B_F8a
  gRNA
gggacttcttggcacgctat

SEQ ID NO: 84345 - DNA, 20 bp, Artificial Sequence
  MKO10084345_B_F8a
  gRNA
gtgcgcttgcacctcgagct

SEQ ID NO: 84346 - DNA, 20 bp, Artificial Sequence
  MKO10084346_B_F8
  gRNA
ttactcatatatgtctcatg

SEQ ID NO: 84347 - DNA, 20 bp, Artificial Sequence
  MKO10084347_B_F8
  gRNA
accctcagaagctttccagt

SEQ ID NO: 84348 - DNA, 20 bp, Artificial Sequence
  MKO10084348_B_F8
  gRNA
gccatcagaagatactacct

SEQ ID NO: 84349 - DNA, 20 bp, Artificial Sequence
  MKO10084349_B_F9
  gRNA
atattagttcctatgaatgc

SEQ ID NO: 84350 - DNA, 20 bp, Artificial Sequence
  MKO10084350_B_F9
  gRNA
gaacaaattaccttgttatc

SEQ ID NO: 84351 - DNA, 20 bp, Artificial Sequence
  MKO10084351_B_F9
  gRNA
gccaagttggatttgaagga

SEQ ID NO: 84352 - DNA, 20 bp, Artificial Sequence
  MKO10084352_B_Fa2h
  gRNA
cttccactcagacctcatcg

SEQ ID NO: 84353 - DNA, 20 bp, Artificial Sequence
  MKO10084353_B_Fa2h
  gRNA
ctcttcgcatcactcacaag

SEQ ID NO: 84354 - DNA, 20 bp, Artificial Sequence
  MKO10084354_B_Fa2h
  gRNA
gtggatgacgtattccacaa

SEQ ID NO: 84355 - DNA, 20 bp, Artificial Sequence
  MKO10084355_B_Faah
  gRNA
ttacccgcagaatcctgacc

SEQ ID NO: 84356 - DNA, 20 bp, Artificial Sequence
  MKO10084356_B_Faah
  gRNA
gttcatggtctggccaaaga

SEQ ID NO: 84357 - DNA, 20 bp, Artificial Sequence
  MKO10084357_B_Faah
  gRNA
tcacggggacgccatagagc

SEQ ID NO: 84358 - DNA, 20 bp, Artificial Sequence
  MKO10084358_B_Fabp12
  gRNA
tttgaggaaaccacaccaag

SEQ ID NO: 84359 - DNA, 20 bp, Artificial Sequence
  MKO10084359_B_Fabp12
  gRNA
aaactcctctcccagcttga

SEQ ID NO: 84360 - DNA, 20 bp, Artificial Sequence
  MKO10084360_B_Fabp12
  gRNA
atctaccagtctcctgcaga

SEQ ID NO: 84361 - DNA, 20 bp, Artificial Sequence
  MKO10084361_B_Fabp1
  gRNA
gtgtcagaaatcgtgcatga

SEQ ID NO: 84362 - DNA, 20 bp, Artificial Sequence
  MKO10084362_B_Fabp1
  gRNA
gacaatgtcgcccaatgtca

SEQ ID NO: 84363 - DNA, 20 bp, Artificial Sequence
  MKO10084363_B_Fabp1
  gRNA
tcacctattgccttcatgaa

SEQ ID NO: 84364 - DNA, 20 bp, Artificial Sequence
  MKO10084364_B_Fabp2
  gRNA
gctgagatcatggcattcga

SEQ ID NO: 84365 - DNA, 20 bp, Artificial Sequence
  MKO10084365_B_Fabp2
  gRNA
ttctggtaatgaactaatcc

SEQ ID NO: 84366 - DNA, 20 bp, Artificial Sequence
  MKO10084366_B_Fabp2
  gRNA
ttccttcttaaagaatcgct

SEQ ID NO: 84367 - DNA, 20 bp, Artificial Sequence
  MKO10084367_B_Fabp3
  gRNA
tctttctagactctcactca

SEQ ID NO: 84368 - DNA, 20 bp, Artificial Sequence
  MKO10084368_B_Fabp3
  gRNA
cttgctgtccactagcttcc

SEQ ID NO: 84369 - DNA, 20 bp, Artificial Sequence
  MKO10084369_B_Fabp3
  gRNA
taggtgtgggctttgccacc

SEQ ID NO: 84370 - DNA, 20 bp, Artificial Sequence
  MKO10084370_B_Fabp4
  gRNA
cagagcatcataaccctaga

SEQ ID NO: 84371 - DNA, 20 bp, Artificial Sequence
  MKO10084371_B_Fabp4
  gRNA
gtctaggaatgtgttatgaa

SEQ ID NO: 84372 - DNA, 20 bp, Artificial Sequence
  MKO10084372_B_Fabp4
  gRNA
cgatgattacatgaaagaag

SEQ ID NO: 84373 - DNA, 20 bp, Artificial Sequence
  MKO10084373_B_Fabp5
  gRNA
gactgtgttctcttgtaacc

SEQ ID NO: 84374 - DNA, 20 bp, Artificial Sequence
  MKO10084374_B_Fabp5
  gRNA
tctccttcccgtcccattgc

SEQ ID NO: 84375 - DNA, 20 bp, Artificial Sequence
  MKO10084375_B_Fabp5
  gRNA
acggtctgcaccttccaaga

SEQ ID NO: 84376 - DNA, 20 bp, Artificial Sequence
  MKO10084376_B_Fabp6
  gRNA
cctcttgcttacgcgctcat

SEQ ID NO: 84377 - DNA, 20 bp, Artificial Sequence
  MKO10084377_B_Fabp6
  gRNA
cgatgagttcatgaagcgcc

SEQ ID NO: 84378 - DNA, 20 bp, Artificial Sequence
  MKO10084378_B_Fabp6
  gRNA
cccctttcaatcacgtctcc

SEQ ID NO: 84379 - DNA, 20 bp, Artificial Sequence
  MKO10084379_B_Fabp7
  gRNA
tcctgactgataatcacagt

SEQ ID NO: 84380 - DNA, 20 bp, Artificial Sequence
  MKO10084380_B_Fabp7
  gRNA
ctatttcagactcttacctt

SEQ ID NO: 84381 - DNA, 20 bp, Artificial Sequence
  MKO10084381_B_Fabp7
  gRNA
tgatgagtacatgaaagctc

SEQ ID NO: 84382 - DNA, 20 bp, Artificial Sequence
  MKO10084382_B_Fabp9
  gRNA
ttattaaacatgcgactttc

SEQ ID NO: 84383 - DNA, 20 bp, Artificial Sequence
  MKO10084383_B_Fabp9
  gRNA
acgatgattgagcccttctt

SEQ ID NO: 84384 - DNA, 20 bp, Artificial Sequence
  MKO10084384_B_Fabp9
  gRNA
cagtttccaggtgcctaaga

SEQ ID NO: 84385 - DNA, 20 bp, Artificial Sequence
  MKO10084385_B_Fadd
  gRNA
ccatcagatcgttgcccgac

SEQ ID NO: 84386 - DNA, 20 bp, Artificial Sequence
  MKO10084386_B_Fadd
  gRNA
cgggctgctgcgcgagttgc

SEQ ID NO: 84387 - DNA, 20 bp, Artificial Sequence
  MKO10084387_B_Fadd
  gRNA
gcgcgtgagcaaacgaaagc

SEQ ID NO: 84388 - DNA, 20 bp, Artificial Sequence
  MKO10084388_B_Fads1
  gRNA
caagcctaactgcttccgca

SEQ ID NO: 84389 - DNA, 20 bp, Artificial Sequence
  MKO10084389_B_Fads1
  gRNA
aagcgctaactgatgaattc

SEQ ID NO: 84390 - DNA, 20 bp, Artificial Sequence
  MKO10084390_B_Fads1
  gRNA
caatcacaaaatgatgtagc

SEQ ID NO: 84391 - DNA, 20 bp, Artificial Sequence
  MKO10084391_B_Fads2
  gRNA
ggctttccatgacgatgatg

SEQ ID NO: 84392 - DNA, 20 bp, Artificial Sequence
  MKO10084392_B_Fads2
  gRNA
ttcttgaagcccctgctgat

SEQ ID NO: 84393 - DNA, 20 bp, Artificial Sequence
  MKO10084393_B_Fads2
  gRNA
catgttgcagccatccagct

SEQ ID NO: 84394 - DNA, 20 bp, Artificial Sequence
  MKO10084394_B_Fads3
  gRNA
gggctagctctccaatcaac

SEQ ID NO: 84395 - DNA, 20 bp, Artificial Sequence
  MKO10084395_B_Fads3
  gRNA
actgccccatcacgaactgc

SEQ ID NO: 84396 - DNA, 20 bp, Artificial Sequence
  MKO10084396_B_Fads3
  gRNA
tcaggaacttgcgcacaaaa

SEQ ID NO: 84397 - DNA, 20 bp, Artificial Sequence
  MKO10084397_B_Fads6
  gRNA
acccaagattgtgatgcccg

SEQ ID NO: 84398 - DNA, 20 bp, Artificial Sequence
  MKO10084398_B_Fads6
  gRNA
gaacccccagggtcatcatg

SEQ ID NO: 84399 - DNA, 20 bp, Artificial Sequence
  MKO10084399_B_Fads6
  gRNA
caagaaccccagttcagcac

SEQ ID NO: 84400 - DNA, 20 bp, Artificial Sequence
  MKO10084400_B_Faf1
  gRNA
cactgcttgagcaaaataac

SEQ ID NO: 84401 - DNA, 20 bp, Artificial Sequence
  MKO10084401_B_Faf1
  gRNA
gtgcctaaaatgctgttaaa

SEQ ID NO: 84402 - DNA, 20 bp, Artificial Sequence
  MKO10084402_B_Faf1
  gRNA
aggaaaatggcattctacaa

SEQ ID NO: 84403 - DNA, 20 bp, Artificial Sequence
  MKO10084403_B_Faf2
  gRNA
tcagctgtattaacctgtag

SEQ ID NO: 84404 - DNA, 20 bp, Artificial Sequence
  MKO10084404_B_Faf2
  gRNA
aggttaatacagctgaccac

SEQ ID NO: 84405 - DNA, 20 bp, Artificial Sequence
  MKO10084405_B_Faf2
  gRNA
ttgctttggagcagcataac

SEQ ID NO: 84406 - DNA, 20 bp, Artificial Sequence
  MKO10084406_B_Fahd1
  gRNA
cacgaaggcactgaccgggc

SEQ ID NO: 84407 - DNA, 20 bp, Artificial Sequence
  MKO10084407_B_Fahd1
  gRNA
ctgccgcaacctccaccacg

SEQ ID NO: 84408 - DNA, 20 bp, Artificial Sequence
  MKO10084408_B_Fahd1
  gRNA
ccaaaccgctgtctcgtttc

SEQ ID NO: 84409 - DNA, 20 bp, Artificial Sequence
  MKO10084409_B_Fahd2a
  gRNA
cccacacatatcaccttgtc

SEQ ID NO: 84410 - DNA, 20 bp, Artificial Sequence
  MKO10084410_B_Fahd2a
  gRNA
ccactttgcaggaagttgac

SEQ ID NO: 84411 - DNA, 20 bp, Artificial Sequence
  MKO10084411_B_Fahd2a
  gRNA
gttaccaaggataccatagc

SEQ ID NO: 84412 - DNA, 20 bp, Artificial Sequence
  MKO10084412_B_Fah
  gRNA
aaagggcaggtccggtaaag

SEQ ID NO: 84413 - DNA, 20 bp, Artificial Sequence
  MKO10084413_B_Fah
  gRNA
atgcaccttcctgctaccat

SEQ ID NO: 84414 - DNA, 20 bp, Artificial Sequence
  MKO10084414_B_Fah
  gRNA
tctgaacataatgccaacat

SEQ ID NO: 84415 - DNA, 20 bp, Artificial Sequence
  MKO10084415_B_Faim2
  gRNA
ctcggcgccaccctcctatg

SEQ ID NO: 84416 - DNA, 20 bp, Artificial Sequence
  MKO10084416_B_Faim2
  gRNA
tgaagagccgacgaactttc

SEQ ID NO: 84417 - DNA, 20 bp, Artificial Sequence
  MKO10084417_B_Faim2
  gRNA
atgtccaggctaaccccggc

SEQ ID NO: 84418 - DNA, 20 bp, Artificial Sequence
  MKO10084418_B_Faim3
  gRNA
atgttcactcccgtggagcc

SEQ ID NO: 84419 - DNA, 20 bp, Artificial Sequence
  MKO10084419_B_Faim3
  gRNA
cggtcttctctcccatagtg

SEQ ID NO: 84420 - DNA, 20 bp, Artificial Sequence
  MKO10084420_B_Faim3
  gRNA
cttccactcagcaagcaatc

SEQ ID NO: 84421 - DNA, 20 bp, Artificial Sequence
  MKO10084421_B_Faim
  gRNA
aggcaagcgggttgtgtacg

SEQ ID NO: 84422 - DNA, 20 bp, Artificial Sequence
  MKO10084422_B_Faim
  gRNA
atggtgcaatggtcagaaaa

SEQ ID NO: 84423 - DNA, 20 bp, Artificial Sequence
  MKO10084423_B_Faim
  gRNA
tacataaaagctgtgagcag

SEQ ID NO: 84424 - DNA, 20 bp, Artificial Sequence
  MKO10084424_B_Fam101a
  gRNA
ttgctggacagtcccgattc

SEQ ID NO: 84425 - DNA, 20 bp, Artificial Sequence
  MKO10084425_B_Fam101a
  gRNA
acgcgggagcagagccgcga

SEQ ID NO: 84426 - DNA, 20 bp, Artificial Sequence
  MKO10084426_B_Fam101a
  gRNA
cgtgacctcatctccagagc

SEQ ID NO: 84427 - DNA, 20 bp, Artificial Sequence
  MKO10084427_B_Fam101b
  gRNA
aaactcaactccttcgccga

SEQ ID NO: 84428 - DNA, 20 bp, Artificial Sequence
  MKO10084428_B_Fam101b
  gRNA
atagtttcgccaagtgcagt

SEQ ID NO: 84429 - DNA, 20 bp, Artificial Sequence
  MKO10084429_B_Fam101b
  gRNA
gtttgaccccttgccaccaa

SEQ ID NO: 84430 - DNA, 20 bp, Artificial Sequence
  MKO10084430_B_Fam102a
  gRNA
ctttcgagtgtctgtgcgca

SEQ ID NO: 84431 - DNA, 20 bp, Artificial Sequence
  MKO10084431_B_Fam102a
  gRNA
caccgtccgctgctgcctat

SEQ ID NO: 84432 - DNA, 20 bp, Artificial Sequence
  MKO10084432_B_Fam102a
  gRNA
tctctgcaggagctgaaagg

SEQ ID NO: 84433 - DNA, 20 bp, Artificial Sequence
  MKO10084433_B_Fam102b
  gRNA
atcagtatgcagctgatgtc

SEQ ID NO: 84434 - DNA, 20 bp, Artificial Sequence
  MKO10084434_B_Fam102b
  gRNA
gggctttgcagatctaaacc

SEQ ID NO: 84435 - DNA, 20 bp, Artificial Sequence
  MKO10084435_B_Fam102b
  gRNA
tgtttgcaggaattaaaagg

SEQ ID NO: 84436 - DNA, 20 bp, Artificial Sequence
  MKO10084436_B_Fam103a1
  gRNA
caagacaacagacaatttag

SEQ ID NO: 84437 - DNA, 20 bp, Artificial Sequence
  MKO10084437_B_Fam103a1
  gRNA
ctattccattcctcaacaat

SEQ ID NO: 84438 - DNA, 20 bp, Artificial Sequence
  MKO10084438_B_Fam103a1
  gRNA
tgagtcccctccaattgttg

SEQ ID NO: 84439 - DNA, 20 bp, Artificial Sequence
  MKO10084439_B_Fam104a
  gRNA
cagtcttcaagcagcgacag

SEQ ID NO: 84440 - DNA, 20 bp, Artificial Sequence
  MKO10084440_B_Fam104a
  gRNA
ttcagaaaaaggagaagaaa

SEQ ID NO: 84441 - DNA, 20 bp, Artificial Sequence
  MKO10084441_B_Fam104a
  gRNA
tctgcctacctctgtgtccc

SEQ ID NO: 84442 - DNA, 20 bp, Artificial Sequence
  MKO10084442_B_Fam105a
  gRNA
caggcccgaaactgtactgc

SEQ ID NO: 84443 - DNA, 20 bp, Artificial Sequence
  MKO10084443_B_Fam105a
  gRNA
acataccttccgcatcagtc

SEQ ID NO: 84444 - DNA, 20 bp, Artificial Sequence
  MKO10084444_B_Fam105a
  gRNA
tggatccagcagtacagttt

SEQ ID NO: 84445 - DNA, 20 bp, Artificial Sequence
  MKO10084445_B_Fam105b
  gRNA
tagtccatgatatccatttc

SEQ ID NO: 84446 - DNA, 20 bp, Artificial Sequence
  MKO10084446_B_Fam105b
  gRNA
gtgataactactgtgcactg

SEQ ID NO: 84447 - DNA, 20 bp, Artificial Sequence
  MKO10084447_B_Fam105b
  gRNA
gaattgctaatacatgaaag

SEQ ID NO: 84448 - DNA, 20 bp, Artificial Sequence
  MKO10084448_B_Fam107a
  gRNA
tacccgcaggggcttgggta

SEQ ID NO: 84449 - DNA, 20 bp, Artificial Sequence
  MKO10084449_B_Fam107a
  gRNA
gcgtggtcctcgtctctctg

SEQ ID NO: 84450 - DNA, 20 bp, Artificial Sequence
  MKO10084450_B_Fam107a
  gRNA
ggctgacatcgagggactca

SEQ ID NO: 84451 - DNA, 20 bp, Artificial Sequence
  MKO10084451_B_Fam107b
  gRNA
aaatgccccagagtttgtga

SEQ ID NO: 84452 - DNA, 20 bp, Artificial Sequence
  MKO10084452_B_Fam107b
  gRNA
gctttaatagttctatttcc

SEQ ID NO: 84453 - DNA, 20 bp, Artificial Sequence
  MKO10084453_B_Fam107b
  gRNA
ccaagaggtggctcaggccc

SEQ ID NO: 84454 - DNA, 20 bp, Artificial Sequence
  MKO10084454_B_Fam109a
  gRNA
gtccatatcgcgcatgcagc

SEQ ID NO: 84455 - DNA, 20 bp, Artificial Sequence
  MKO10084455_B_Fam109a
  gRNA
ctacgcaacctgcgatgccc

SEQ ID NO: 84456 - DNA, 20 bp, Artificial Sequence
  MKO10084456_B_Fam109a
  gRNA
ctcagcggccaacgggccct

SEQ ID NO: 84457 - DNA, 20 bp, Artificial Sequence
  MKO10084457_B_Fam109b
  gRNA
acactggctttctgcgtagt

SEQ ID NO: 84458 - DNA, 20 bp, Artificial Sequence
  MKO10084458_B_Fam109b
  gRNA
gcgacttgtggtgcgagaat

SEQ ID NO: 84459 - DNA, 20 bp, Artificial Sequence
  MKO10084459_B_Fam109b
  gRNA
tgcatcgctgtgcatcccag

SEQ ID NO: 84460 - DNA, 20 bp, Artificial Sequence
  MKO10084460_B_Fam110a
  gRNA
cccaatcctcgcgcttcctc

SEQ ID NO: 84461 - DNA, 20 bp, Artificial Sequence
  MKO10084461_B_Fam110a
  gRNA
gccggcggccagaacagggc

SEQ ID NO: 84462 - DNA, 20 bp, Artificial Sequence
  MKO10084462_B_Fam110a
  gRNA
ggcgggtgttggccacacgc

SEQ ID NO: 84463 - DNA, 20 bp, Artificial Sequence
  MKO10084463_B_Fam110b
  gRNA
acccgactacttccgcaggc

SEQ ID NO: 84464 - DNA, 20 bp, Artificial Sequence
  MKO10084464_B_Fam110b
  gRNA
ctcctggctcttgacgtatt

SEQ ID NO: 84465 - DNA, 20 bp, Artificial Sequence
  MKO10084465_B_Fam110b
  gRNA
ggctttaaggggcttcacac

SEQ ID NO: 84466 - DNA, 20 bp, Artificial Sequence
  MKO10084466_B_Fam110c
  gRNA
gcgatagccctgcgtgctac

SEQ ID NO: 84467 - DNA, 20 bp, Artificial Sequence
  MKO10084467_B_Fam110c
  gRNA
cagaaatgtgaattcgtacg

SEQ ID NO: 84468 - DNA, 20 bp, Artificial Sequence
  MKO10084468_B_Fam110c
  gRNA
gcaccgcaacccgatccctt

SEQ ID NO: 84469 - DNA, 20 bp, Artificial Sequence
  MKO10084469_B_Fam111a
  gRNA
ccaaaatgagctgtaagaag

SEQ ID NO: 84470 - DNA, 20 bp, Artificial Sequence
  MKO10084470_B_Fam111a
  gRNA
gtctattgattgctgtacag

SEQ ID NO: 84471 - DNA, 20 bp, Artificial Sequence
  MKO10084471_B_Fam111a
  gRNA
gacaaaatgtaatgacgaca

SEQ ID NO: 84472 - DNA, 20 bp, Artificial Sequence
  MKO10084472_B_Fam114a1
  gRNA
ggctgtggacccctcatcac

SEQ ID NO: 84473 - DNA, 20 bp, Artificial Sequence
  MKO10084473_B_Fam114a1
  gRNA
gccccaactgatgctgaaaa

SEQ ID NO: 84474 - DNA, 20 bp, Artificial Sequence
  MKO10084474_B_Fam114a1
  gRNA
gctgtcagccctcaccaatg

SEQ ID NO: 84475 - DNA, 20 bp, Artificial Sequence
  MKO10084475_B_Fam114a2
  gRNA
tgagaatggaagcttactag

SEQ ID NO: 84476 - DNA, 20 bp, Artificial Sequence
  MKO10084476_B_Fam114a2
  gRNA
ccagagtctccagtggtaac

SEQ ID NO: 84477 - DNA, 20 bp, Artificial Sequence
  MKO10084477_B_Fam114a2
  gRNA
gacttcagctgaaatttcag

SEQ ID NO: 84478 - DNA, 20 bp, Artificial Sequence
  MKO10084478_B_Fam115a
  gRNA
agcaccggactctacatacc

SEQ ID NO: 84479 - DNA, 20 bp, Artificial Sequence
  MKO10084479_B_Fam115a
  gRNA
gaggcccccttgtgattaac

SEQ ID NO: 84480 - DNA, 20 bp, Artificial Sequence
  MKO10084480_B_Fam115a
  gRNA
cagcgttcgaagatttgcag

SEQ ID NO: 84481 - DNA, 20 bp, Artificial Sequence
  MKO10084481_B_Fam115c
  gRNA
acatcagcgacaattctctc

SEQ ID NO: 84482 - DNA, 20 bp, Artificial Sequence
  MKO10084482_B_Fam115c
  gRNA
tgccaggtgaccgtgatgtc

SEQ ID NO: 84483 - DNA, 20 bp, Artificial Sequence
  MKO10084483_B_Fam115c
  gRNA
ggcaggcactgcattcgtga

SEQ ID NO: 84484 - DNA, 20 bp, Artificial Sequence
  MKO10084484_B_Fam115e
  gRNA
tacttacccagcctgaagta

SEQ ID NO: 84485 - DNA, 20 bp, Artificial Sequence
  MKO10084485_B_Fam115e
  gRNA
agcagatacagccccacgga

SEQ ID NO: 84486 - DNA, 20 bp, Artificial Sequence
  MKO10084486_B_Fam115e
  gRNA
ggtaagggctgtagccaagc

SEQ ID NO: 84487 - DNA, 20 bp, Artificial Sequence
  MKO10084487_B_Fam117a
  gRNA
cagcacagaccaccgaaaag

SEQ ID NO: 84488 - DNA, 20 bp, Artificial Sequence
  MKO10084488_B_Fam117a
  gRNA
gaccatgctgcgctgggagc

SEQ ID NO: 84489 - DNA, 20 bp, Artificial Sequence
  MKO10084489_B_Fam117a
  gRNA
gagcggagctgccctgtcca

SEQ ID NO: 84490 - DNA, 20 bp, Artificial Sequence
  MKO10084490_B_Fam117b
  gRNA
tatccagggaagatgtgcgt

SEQ ID NO: 84491 - DNA, 20 bp, Artificial Sequence
  MKO10084491_B_Fam117b
  gRNA
tacaatagaccgagagtgca

SEQ ID NO: 84492 - DNA, 20 bp, Artificial Sequence
  MKO10084492_B_Fam117b
  gRNA
ctcataagcgctcatcatcc

SEQ ID NO: 84493 - DNA, 20 bp, Artificial Sequence
  MKO10084493_B_Fam118a
  gRNA
caccaactacgacaacctgc

SEQ ID NO: 84494 - DNA, 20 bp, Artificial Sequence
  MKO10084494_B_Fam118a
  gRNA
cgttgctgagttccggagga

SEQ ID NO: 84495 - DNA, 20 bp, Artificial Sequence
  MKO10084495_B_Fam118a
  gRNA
gtgacatctttatagcccga

SEQ ID NO: 84496 - DNA, 20 bp, Artificial Sequence
  MKO10084496_B_Fam118b
  gRNA
aaagcctcgagaacttgtgc

SEQ ID NO: 84497 - DNA, 20 bp, Artificial Sequence
  MKO10084497_B_Fam118b
  gRNA
atttatgcttgacggcctct

SEQ ID NO: 84498 - DNA, 20 bp, Artificial Sequence
  MKO10084498_B_Fam118b
  gRNA
agcacattctgatatccagc

SEQ ID NO: 84499 - DNA, 20 bp, Artificial Sequence
  MKO10084499_B_Fam120a
  gRNA
tcaggtccgagcccaccagc

SEQ ID NO: 84500 - DNA, 20 bp, Artificial Sequence
  MKO10084500_B_Fam120a
  gRNA
gcatccactcgcctcactga

SEQ ID NO: 84501 - DNA, 20 bp, Artificial Sequence
  MKO10084501_B_Fam120a
  gRNA
tgtaccttcagtgaggcgag

SEQ ID NO: 84502 - DNA, 20 bp, Artificial Sequence
  MKO10084502_B_Fam120b
  gRNA
tttagggggaacacctagct

SEQ ID NO: 84503 - DNA, 20 bp, Artificial Sequence
  MKO10084503_B_Fam120b
  gRNA
cctctgcagatgaccgttca

SEQ ID NO: 84504 - DNA, 20 bp, Artificial Sequence
  MKO10084504_B_Fam120b
  gRNA
ccttgaacggtcatctgcag

SEQ ID NO: 84505 - DNA, 20 bp, Artificial Sequence
  MKO10084505_B_Fam120c
  gRNA
acatcctcttgcatcactta

SEQ ID NO: 84506 - DNA, 20 bp, Artificial Sequence
  MKO10084506_B_Fam120c
  gRNA
attaccttaagtgatgcaag

SEQ ID NO: 84507 - DNA, 20 bp, Artificial Sequence
  MKO10084507_B_Fam120c
  gRNA
tccagctcagcttcagcgca

SEQ ID NO: 84508 - DNA, 20 bp, Artificial Sequence
  MKO10084508_B_Fam122a
  gRNA
gaacgtcgtgctgttccgtc

SEQ ID NO: 84509 - DNA, 20 bp, Artificial Sequence
  MKO10084509_B_Fam122a
  gRNA
ccgaggcgcccagcgccaga

SEQ ID NO: 84510 - DNA, 20 bp, Artificial Sequence
  MKO10084510_B_Fam122a
  gRNA
agagaccgttcacgagcgcg

SEQ ID NO: 84511 - DNA, 20 bp, Artificial Sequence
  MKO10084511_B_Fam122b
  gRNA
tgatacttaccaagctatga

SEQ ID NO: 84512 - DNA, 20 bp, Artificial Sequence
  MKO10084512_B_Fam122b
  gRNA
gatgcagataagccagtcat

SEQ ID NO: 84513 - DNA, 20 bp, Artificial Sequence
  MKO10084513_B_Fam122b
  gRNA
atccttataggaagaaggcc

SEQ ID NO: 84514 - DNA, 20 bp, Artificial Sequence
  MKO10084514_B_Fam122c
  gRNA
ggttggcagatgtacgactg

SEQ ID NO: 84515 - DNA, 20 bp, Artificial Sequence
  MKO10084515_B_Fam122c
  gRNA
caatccatgctgattcagaa

SEQ ID NO: 84516 - DNA, 20 bp, Artificial Sequence
  MKO10084516_B_Fam122c
  gRNA
atactgcaatgcagataagt

SEQ ID NO: 84517 - DNA, 20 bp, Artificial Sequence
  MKO10084517_B_Fam124a
  gRNA
ctgccagcgcccctcgctga

SEQ ID NO: 84518 - DNA, 20 bp, Artificial Sequence
  MKO10084518_B_Fam124a
  gRNA
gcccatccaaccagatagcc

SEQ ID NO: 84519 - DNA, 20 bp, Artificial Sequence
  MKO10084519_B_Fam124a
  gRNA
tcttcctcaccgcccgcctt

SEQ ID NO: 84520 - DNA, 20 bp, Artificial Sequence
  MKO10084520_B_Fam124b
  gRNA
acttcctacggcgttcaccc

SEQ ID NO: 84521 - DNA, 20 bp, Artificial Sequence
  MKO10084521_B_Fam124b
  gRNA
tctgctcggaaaagatcgcc

SEQ ID NO: 84522 - DNA, 20 bp, Artificial Sequence
  MKO10084522_B_Fam124b
  gRNA
tcataggtccatccgaagcc

SEQ ID NO: 84523 - DNA, 20 bp, Artificial Sequence
  MKO10084523_B_Fam126a
  gRNA
ttatcaaaagtcgtgtacag

SEQ ID NO: 84524 - DNA, 20 bp, Artificial Sequence
  MKO10084524_B_Fam126a
  gRNA
aatgtacttacctcactctg

SEQ ID NO: 84525 - DNA, 20 bp, Artificial Sequence
  MKO10084525_B_Fam126a
  gRNA
cttacttcatgatatacaga

SEQ ID NO: 84526 - DNA, 20 bp, Artificial Sequence
  MKO10084526_B_Fam126b
  gRNA
gttatgcagcaaccttgcac

SEQ ID NO: 84527 - DNA, 20 bp, Artificial Sequence
  MKO10084527_B_Fam126b
  gRNA
tatgtcagcatgatctcatc

SEQ ID NO: 84528 - DNA, 20 bp, Artificial Sequence
  MKO10084528_B_Fam126b
  gRNA
taactggtaatctgagtgtc

SEQ ID NO: 84529 - DNA, 20 bp, Artificial Sequence
  MKO10084529_B_Fam129a
  gRNA
gcttcatacaaaaccgttcc

SEQ ID NO: 84530 - DNA, 20 bp, Artificial Sequence
  MKO10084530_B_Fam129a
  gRNA
tcttcctaggcctatcagag

SEQ ID NO: 84531 - DNA, 20 bp, Artificial Sequence
  MKO10084531_B_Fam129a
  gRNA
tttaagcccccactggaacc

SEQ ID NO: 84532 - DNA, 20 bp, Artificial Sequence
  MKO10084532_B_Fam129b
  gRNA
tagcatgcgccatgagatcg

SEQ ID NO: 84533 - DNA, 20 bp, Artificial Sequence
  MKO10084533_B_Fam129b
  gRNA
acagggaccacatcgaaatc

SEQ ID NO: 84534 - DNA, 20 bp, Artificial Sequence
  MKO10084534_B_Fam129b
  gRNA
gcccggtgccctcgatctca

SEQ ID NO: 84535 - DNA, 20 bp, Artificial Sequence
  MKO10084535_B_Fam129c
  gRNA
tgcagaagctgcctcgagtc

SEQ ID NO: 84536 - DNA, 20 bp, Artificial Sequence
  MKO10084536_B_Fam129c
  gRNA
ctcactacaggtcaggtgaa

SEQ ID NO: 84537 - DNA, 20 bp, Artificial Sequence
  MKO10084537_B_Fam129c
  gRNA
ccttcctgccctgttaccgt

SEQ ID NO: 84538 - DNA, 20 bp, Artificial Sequence
  MKO10084538_B_Fam131a
  gRNA
cataccatgcagggacgatc

SEQ ID NO: 84539 - DNA, 20 bp, Artificial Sequence
  MKO10084539_B_Fam131a
  gRNA
ggatctgctcgaactctccg

SEQ ID NO: 84540 - DNA, 20 bp, Artificial Sequence
  MKO10084540_B_Fam131a
  gRNA
catccaggagatcgctgcac

SEQ ID NO: 84541 - DNA, 20 bp, Artificial Sequence
  MKO10084541_B_Fam131b
  gRNA
agggatctcgaggagcatga

SEQ ID NO: 84542 - DNA, 20 bp, Artificial Sequence
  MKO10084542_B_Fam131b
  gRNA
tccagccttacctctgtcga

SEQ ID NO: 84543 - DNA, 20 bp, Artificial Sequence
  MKO10084543_B_Fam131b
  gRNA
ttagagtttcgcttaagctt

SEQ ID NO: 84544 - DNA, 20 bp, Artificial Sequence
  MKO10084544_B_Fam131c
  gRNA
tggagggcaggtcccgattc

SEQ ID NO: 84545 - DNA, 20 bp, Artificial Sequence
  MKO10084545_B_Fam131c
  gRNA
cctggctacgtcatcccttg

SEQ ID NO: 84546 - DNA, 20 bp, Artificial Sequence
  MKO10084546_B_Fam131c
  gRNA
gtgcccacaaaaacagcccc

SEQ ID NO: 84547 - DNA, 20 bp, Artificial Sequence
  MKO10084547_B_Fam132a
  gRNA
gccttaccgacttcttgtcc

SEQ ID NO: 84548 - DNA, 20 bp, Artificial Sequence
  MKO10084548_B_Fam132a
  gRNA
atttccacagcctactactc

SEQ ID NO: 84549 - DNA, 20 bp, Artificial Sequence
  MKO10084549_B_Fam132a
  gRNA
tctggggtaacgcccacacc

SEQ ID NO: 84550 - DNA, 20 bp, Artificial Sequence
  MKO10084550_B_Fam132b
  gRNA
cagtacaccgcacctgtggc

SEQ ID NO: 84551 - DNA, 20 bp, Artificial Sequence
  MKO10084551_B_Fam132b
  gRNA
gttcgtcaagcagagtgaca

SEQ ID NO: 84552 - DNA, 20 bp, Artificial Sequence
  MKO10084552_B_Fam132b
  gRNA
cattgcgcatgcacacagtg

SEQ ID NO: 84553 - DNA, 20 bp, Artificial Sequence
  MKO10084553_B_Fam133b
  gRNA
ttcaaactcagccaaagcct

SEQ ID NO: 84554 - DNA, 20 bp, Artificial Sequence
  MKO10084554_B_Fam133b
  gRNA
tgttctaagggaggaagtca

SEQ ID NO: 84555 - DNA, 20 bp, Artificial Sequence
  MKO10084555_B_Fam133b
  gRNA
catagagaaaaattattaag

SEQ ID NO: 84556 - DNA, 20 bp, Artificial Sequence
  MKO10084556_B_Fam134a
  gRNA
ctgaagaaccacactctgac

SEQ ID NO: 84557 - DNA, 20 bp, Artificial Sequence
  MKO10084557_B_Fam134a
  gRNA
tgtgttgggacactatgttc

SEQ ID NO: 84558 - DNA, 20 bp, Artificial Sequence
  MKO10084558_B_Fam134a
  gRNA
tatactcacctgtcagagtg

SEQ ID NO: 84559 - DNA, 20 bp, Artificial Sequence
  MKO10084559_B_Fam134b
  gRNA
ctgtttaaatgtaatgatat

SEQ ID NO: 84560 - DNA, 20 bp, Artificial Sequence
  MKO10084560_B_Fam134b
  gRNA
aggtagctgagtatgacccc

SEQ ID NO: 84561 - DNA, 20 bp, Artificial Sequence
  MKO10084561_B_Fam134b
  gRNA
atgtgcacacactgcagacc

SEQ ID NO: 84562 - DNA, 20 bp, Artificial Sequence
  MKO10084562_B_Fam134c
  gRNA
atctgtgatagccaattccc

SEQ ID NO: 84563 - DNA, 20 bp, Artificial Sequence
  MKO10084563_B_Fam134c
  gRNA
ggcacatttaacctgtcaag

SEQ ID NO: 84564 - DNA, 20 bp, Artificial Sequence
  MKO10084564_B_Fam134c
  gRNA
cataggctcgatcccacaga

SEQ ID NO: 84565 - DNA, 20 bp, Artificial Sequence
  MKO10084565_B_Fam135a
  gRNA
acctgttgcgtgtaacaaac

SEQ ID NO: 84566 - DNA, 20 bp, Artificial Sequence
  MKO10084566_B_Fam135a
  gRNA
agcttccgttcatgatgctc

SEQ ID NO: 84567 - DNA, 20 bp, Artificial Sequence
  MKO10084567_B_Fam135a
  gRNA
cttcaaagttaaaatgctgt

SEQ ID NO: 84568 - DNA, 20 bp, Artificial Sequence
  MKO10084568_B_Fam135b
  gRNA
ggtagaagatgcgctgagtg

SEQ ID NO: 84569 - DNA, 20 bp, Artificial Sequence
  MKO10084569_B_Fam135b
  gRNA
cgatagaagcactcagcctg

SEQ ID NO: 84570 - DNA, 20 bp, Artificial Sequence
  MKO10084570_B_Fam135b
  gRNA
gactgtgcacagcactctcg

SEQ ID NO: 84571 - DNA, 20 bp, Artificial Sequence
  MKO10084571_B_Fam136a
  gRNA
ttgttgggatgaggtgcatg

SEQ ID NO: 84572 - DNA, 20 bp, Artificial Sequence
  MKO10084572_B_Fam136a
  gRNA
ggtgcagcaactccgagtgc

SEQ ID NO: 84573 - DNA, 20 bp, Artificial Sequence
  MKO10084573_B_Fam136a
  gRNA
tgacaaagccaaagactcaa

SEQ ID NO: 84574 - DNA, 20 bp, Artificial Sequence
  MKO10084574_B_Fam13a
  gRNA
gtcagcaatgtttcaacaac

SEQ ID NO: 84575 - DNA, 20 bp, Artificial Sequence
  MKO10084575_B_Fam13a
  gRNA
gactcttagaaagaaccatc

SEQ ID NO: 84576 - DNA, 20 bp, Artificial Sequence
  MKO10084576_B_Fam13a
  gRNA
aatacatacctcagatagaa

SEQ ID NO: 84577 - DNA, 20 bp, Artificial Sequence
  MKO10084577_B_Fam13b
  gRNA
ctccctgagcccgtcatacc

SEQ ID NO: 84578 - DNA, 20 bp, Artificial Sequence
  MKO10084578_B_Fam13b
  gRNA
gtaggttaatgaactttctg

SEQ ID NO: 84579 - DNA, 20 bp, Artificial Sequence
  MKO10084579_B_Fam13b
  gRNA
tttgagttcaattactgagc

SEQ ID NO: 84580 - DNA, 20 bp, Artificial Sequence
  MKO10084580_B_Fam13c
  gRNA
ctccgcgtttctgacgaccc

SEQ ID NO: 84581 - DNA, 20 bp, Artificial Sequence
  MKO10084581_B_Fam13c
  gRNA
tccgaccactctcggctctg

SEQ ID NO: 84582 - DNA, 20 bp, Artificial Sequence
  MKO10084582_B_Fam13c
  gRNA
tcggaaccacggagaaagcc

SEQ ID NO: 84583 - DNA, 20 bp, Artificial Sequence
  MKO10084583_B_Fam149a
  gRNA
ccgctccgtagacaatcccg

SEQ ID NO: 84584 - DNA, 20 bp, Artificial Sequence
  MKO10084584_B_Fam149a
  gRNA
ctcgtcccacccaccgatga

SEQ ID NO: 84585 - DNA, 20 bp, Artificial Sequence
  MKO10084585_B_Fam149a
  gRNA
cccattcgctgcattcagcc

SEQ ID NO: 84586 - DNA, 20 bp, Artificial Sequence
  MKO10084586_B_Fam149b
  gRNA
cccagtgtcagttgatgtaa

SEQ ID NO: 84587 - DNA, 20 bp, Artificial Sequence
  MKO10084587_B_Fam149b
  gRNA
gaaatgtcatccagtcgctc

SEQ ID NO: 84588 - DNA, 20 bp, Artificial Sequence
  MKO10084588_B_Fam149b
  gRNA
ccacccccttccagagcgac

SEQ ID NO: 84589 - DNA, 20 bp, Artificial Sequence
  MKO10084589_B_Fam150a
  gRNA
cacgcgctgccaagcttctc

SEQ ID NO: 84590 - DNA, 20 bp, Artificial Sequence
  MKO10084590_B_Fam150a
  gRNA
tcctaggtctgggagcatag

SEQ ID NO: 84591 - DNA, 20 bp, Artificial Sequence
  MKO10084591_B_Fam150a
  gRNA
tccactatgctcccagacct

SEQ ID NO: 84592 - DNA, 20 bp, Artificial Sequence
  MKO10084592_B_Fam150b
  gRNA
agattgttcctcgagatcta

SEQ ID NO: 84593 - DNA, 20 bp, Artificial Sequence
  MKO10084593_B_Fam150b
  gRNA
tccttcatccttagatctcg

SEQ ID NO: 84594 - DNA, 20 bp, Artificial Sequence
  MKO10084594_B_Fam150b
  gRNA
ggcggtcagtcccatgtgca

SEQ ID NO: 84595 - DNA, 20 bp, Artificial Sequence
  MKO10084595_B_Fam151a
  gRNA
acataaagagtggtaaagcc

SEQ ID NO: 84596 - DNA, 20 bp, Artificial Sequence
  MKO10084596_B_Fam151a
  gRNA
cctccttcggcagctgactg

SEQ ID NO: 84597 - DNA, 20 bp, Artificial Sequence
  MKO10084597_B_Fam151a
  gRNA
cgtgtcatgacagctctcac

SEQ ID NO: 84598 - DNA, 20 bp, Artificial Sequence
  MKO10084598_B_Fam151b
  gRNA
agtcgtgtcctcagttgctc

SEQ ID NO: 84599 - DNA, 20 bp, Artificial Sequence
  MKO10084599_B_Fam151b
  gRNA
gcatcaagttggatttcaag

SEQ ID NO: 84600 - DNA, 20 bp, Artificial Sequence
  MKO10084600_B_Fam151b
  gRNA
attaatgccgatattcttcc

SEQ ID NO: 84601 - DNA, 20 bp, Artificial Sequence
  MKO10084601_B_Fam154a
  gRNA
taccttacccgcaggagcac

SEQ ID NO: 84602 - DNA, 20 bp, Artificial Sequence
  MKO10084602_B_Fam154a
  gRNA
tgttccgagtcaagagacta

SEQ ID NO: 84603 - DNA, 20 bp, Artificial Sequence
  MKO10084603_B_Fam154a
  gRNA
ctgatagatcggataattct

SEQ ID NO: 84604 - DNA, 20 bp, Artificial Sequence
  MKO10084604_B_Fam154b
  gRNA
gacaggttacctttataagt

SEQ ID NO: 84605 - DNA, 20 bp, Artificial Sequence
  MKO10084605_B_Fam154b
  gRNA
tacagcctttgataaaagtc

SEQ ID NO: 84606 - DNA, 20 bp, Artificial Sequence
  MKO10084606_B_Fam154b
  gRNA
ctgtgccagatttgcacctg

SEQ ID NO: 84607 - DNA, 20 bp, Artificial Sequence
  MKO10084607_B_Fam155a
  gRNA
gggtggcctccccacgctcg

SEQ ID NO: 84608 - DNA, 20 bp, Artificial Sequence
  MKO10084608_B_Fam155a
  gRNA
gacaatgacgaagtcattta

SEQ ID NO: 84609 - DNA, 20 bp, Artificial Sequence
  MKO10084609_B_Fam155a
  gRNA
gtaaatgacttcgtcattgt

SEQ ID NO: 84610 - DNA, 20 bp, Artificial Sequence
  MKO10084610_B_Fam159a
  gRNA
tgccggggagagcttacccc

SEQ ID NO: 84611 - DNA, 20 bp, Artificial Sequence
  MKO10084611_B_Fam159a
  gRNA
gtggggacagagatctcgtc

SEQ ID NO: 84612 - DNA, 20 bp, Artificial Sequence
  MKO10084612_B_Fam159a
  gRNA
gaggctttgagctgatgaac

SEQ ID NO: 84613 - DNA, 20 bp, Artificial Sequence
  MKO10084613_B_Fam159b
  gRNA
gagacatcttctaccctaga

SEQ ID NO: 84614 - DNA, 20 bp, Artificial Sequence
  MKO10084614_B_Fam159b
  gRNA
ttgaatttgatactgcattg

SEQ ID NO: 84615 - DNA, 20 bp, Artificial Sequence
  MKO10084615_B_Fam159b
  gRNA
cccatcgtcagcttcataga

SEQ ID NO: 84616 - DNA, 20 bp, Artificial Sequence
  MKO10084616_B_Fam160a1
  gRNA
ttggtcgcaggtgacggtgg

SEQ ID NO: 84617 - DNA, 20 bp, Artificial Sequence
  MKO10084617_B_Fam160a1
  gRNA
gcgagttcatgaactgcacg

SEQ ID NO: 84618 - DNA, 20 bp, Artificial Sequence
  MKO10084618_B_Fam160a1
  gRNA
tccgaatcaggtgcttgcaa

SEQ ID NO: 84619 - DNA, 20 bp, Artificial Sequence
  MKO10084619_B_Fam160a2
  gRNA
ctcactgcctcgaaagattg

SEQ ID NO: 84620 - DNA, 20 bp, Artificial Sequence
  MKO10084620_B_Fam160a2
  gRNA
aaccttaccttgtgcagggc

SEQ ID NO: 84621 - DNA, 20 bp, Artificial Sequence
  MKO10084621_B_Fam160a2
  gRNA
catctaggtagctcacccgc

SEQ ID NO: 84622 - DNA, 20 bp, Artificial Sequence
  MKO10084622_B_Fam160b1
  gRNA
tgaggtccttgcaacgccaa

SEQ ID NO: 84623 - DNA, 20 bp, Artificial Sequence
  MKO10084623_B_Fam160b1
  gRNA
gggatgtttgtgtcggtcac

SEQ ID NO: 84624 - DNA, 20 bp, Artificial Sequence
  MKO10084624_B_Fam160b1
  gRNA
ggcctgtgtacgttgatgtg

SEQ ID NO: 84625 - DNA, 20 bp, Artificial Sequence
  MKO10084625_B_Fam160b2
  gRNA
gcctttccaatgttccacga

SEQ ID NO: 84626 - DNA, 20 bp, Artificial Sequence
  MKO10084626_B_Fam160b2
  gRNA
agcgcttacctctagaatat

SEQ ID NO: 84627 - DNA, 20 bp, Artificial Sequence
  MKO10084627_B_Fam160b2
  gRNA
cctctgctctaagatacagc

SEQ ID NO: 84628 - DNA, 20 bp, Artificial Sequence
  MKO10084628_B_Fam161a
  gRNA
catccctgatgaaccccgcc

SEQ ID NO: 84629 - DNA, 20 bp, Artificial Sequence
  MKO10084629_B_Fam161a
  gRNA
gtgactctttcaaacaacat

SEQ ID NO: 84630 - DNA, 20 bp, Artificial Sequence
  MKO10084630_B_Fam161a
  gRNA
cctaaccaataaacacaacc

SEQ ID NO: 84631 - DNA, 20 bp, Artificial Sequence
  MKO10084631_B_Fam161b
  gRNA
agattctacttccgactcca

SEQ ID NO: 84632 - DNA, 20 bp, Artificial Sequence
  MKO10084632_B_Fam161b
  gRNA
tcacgcagtgtcatgcggaa

SEQ ID NO: 84633 - DNA, 20 bp, Artificial Sequence
  MKO10084633_B_Fam161b
  gRNA
cagtgatctgaacgacgctg

SEQ ID NO: 84634 - DNA, 20 bp, Artificial Sequence
  MKO10084634_B_Fam162a
  gRNA
tggattctgcaccaagccac

SEQ ID NO: 84635 - DNA, 20 bp, Artificial Sequence
  MKO10084635_B_Fam162a
  gRNA
gtctttaacaagcttgaacc

SEQ ID NO: 84636 - DNA, 20 bp, Artificial Sequence
  MKO10084636_B_Fam162a
  gRNA
atgctgcgaagaacaagctc

SEQ ID NO: 84637 - DNA, 20 bp, Artificial Sequence
  MKO10084637_B_Fam162b
  gRNA
agcctagtcgcagaacgctg

SEQ ID NO: 84638 - DNA, 20 bp, Artificial Sequence
  MKO10084638_B_Fam162b
  gRNA
tgccagattccaacttgtta

SEQ ID NO: 84639 - DNA, 20 bp, Artificial Sequence
  MKO10084639_B_Fam162b
  gRNA
atccttaacaagttggaatc

SEQ ID NO: 84640 - DNA, 20 bp, Artificial Sequence
  MKO10084640_B_Fam163a
  gRNA
cgggcggatgacagcgggaa

SEQ ID NO: 84641 - DNA, 20 bp, Artificial Sequence
  MKO10084641_B_Fam163a
  gRNA
caggtcaccgggtaattctg

SEQ ID NO: 84642 - DNA, 20 bp, Artificial Sequence
  MKO10084642_B_Fam163a
  gRNA
cgcccctacacactacaaag

SEQ ID NO: 84643 - DNA, 20 bp, Artificial Sequence
  MKO10084643_B_Fam163b
  gRNA
tcgctgttctgtgctactgt

SEQ ID NO: 84644 - DNA, 20 bp, Artificial Sequence
  MKO10084644_B_Fam163b
  gRNA
ggttggggttgagcgcctgc

SEQ ID NO: 84645 - DNA, 20 bp, Artificial Sequence
  MKO10084645_B_Fam163b
  gRNA
tttcagccaaaagtccccgc

SEQ ID NO: 84646 - DNA, 20 bp, Artificial Sequence
  MKO10084646_B_Fam166a
  gRNA
gttatgccggcttcgtcccc

SEQ ID NO: 84647 - DNA, 20 bp, Artificial Sequence
  MKO10084647_B_Fam166a
  gRNA
tacctgagatggccttgcgt

SEQ ID NO: 84648 - DNA, 20 bp, Artificial Sequence
  MKO10084648_B_Fam166a
  gRNA
catgccgggtagggtggata

SEQ ID NO: 84649 - DNA, 20 bp, Artificial Sequence
  MKO10084649_B_Fam166b
  gRNA
ctatgagtgaatttacacga

SEQ ID NO: 84650 - DNA, 20 bp, Artificial Sequence
  MKO10084650_B_Fam166b
  gRNA
tcttaccctggaatataatg

SEQ ID NO: 84651 - DNA, 20 bp, Artificial Sequence
  MKO10084651_B_Fam166b
  gRNA
gcaaaaatgaactgtgcccg

SEQ ID NO: 84652 - DNA, 20 bp, Artificial Sequence
  MKO10084652_B_Fam167a
  gRNA
cggcatcgttgagcatcctc

SEQ ID NO: 84653 - DNA, 20 bp, Artificial Sequence
  MKO10084653_B_Fam167a
  gRNA
ctcccaccttccgcgagtgc

SEQ ID NO: 84654 - DNA, 20 bp, Artificial Sequence
  MKO10084654_B_Fam167a
  gRNA
gtgacgccaatgagcttgag

SEQ ID NO: 84655 - DNA, 20 bp, Artificial Sequence
  MKO10084655_B_Fam167b
  gRNA
gtgagtcccagatgccgcag

SEQ ID NO: 84656 - DNA, 20 bp, Artificial Sequence
  MKO10084656_B_Fam167b
  gRNA
tcgggtctgcagttgaagct

SEQ ID NO: 84657 - DNA, 20 bp, Artificial Sequence
  MKO10084657_B_Fam167b
  gRNA
cgactggctcaggtctagct

SEQ ID NO: 84658 - DNA, 20 bp, Artificial Sequence
  MKO10084658_B_Fam168a
  gRNA
gtatttactgaaagccgcag

SEQ ID NO: 84659 - DNA, 20 bp, Artificial Sequence
  MKO10084659_B_Fam168a
  gRNA
aacagccctagttatgctcc

SEQ ID NO: 84660 - DNA, 20 bp, Artificial Sequence
  MKO10084660_B_Fam168a
  gRNA
gctggacaaccgtggtgtgg

SEQ ID NO: 84661 - DNA, 20 bp, Artificial Sequence
  MKO10084661_B_Fam168b
  gRNA
gccattgggctgcaccaccg

SEQ ID NO: 84662 - DNA, 20 bp, Artificial Sequence
  MKO10084662_B_Fam168b
  gRNA
ttcgctccagggtacatgtt

SEQ ID NO: 84663 - DNA, 20 bp, Artificial Sequence
  MKO10084663_B_Fam168b
  gRNA
ggagcagggtagactgttgc

SEQ ID NO: 84664 - DNA, 20 bp, Artificial Sequence
  MKO10084664_B_Fam169a
  gRNA
tagcatagtcagtactgcta

SEQ ID NO: 84665 - DNA, 20 bp, Artificial Sequence
  MKO10084665_B_Fam169a
  gRNA
gctgtggcactttaccttgt

SEQ ID NO: 84666 - DNA, 20 bp, Artificial Sequence
  MKO10084666_B_Fam169a
  gRNA
tgcttcagcccctctctaga

SEQ ID NO: 84667 - DNA, 20 bp, Artificial Sequence
  MKO10084667_B_Fam169b
  gRNA
atcttagcttgctccttcgc

SEQ ID NO: 84668 - DNA, 20 bp, Artificial Sequence
  MKO10084668_B_Fam169b
  gRNA
agccctccgcgtcatcctcc

SEQ ID NO: 84669 - DNA, 20 bp, Artificial Sequence
  MKO10084669_B_Fam169b
  gRNA
tcctacagaggcttaccctg

SEQ ID NO: 84670 - DNA, 20 bp, Artificial Sequence
  MKO10084670_B_Fam170a
  gRNA
ccatgaaacggcgacaaaag

SEQ ID NO: 84671 - DNA, 20 bp, Artificial Sequence
  MKO10084671_B_Fam170a
  gRNA
aaagctcatccatcgtagta

SEQ ID NO: 84672 - DNA, 20 bp, Artificial Sequence
  MKO10084672_B_Fam170a
  gRNA
tcttcaaccgcgggagaccc

SEQ ID NO: 84673 - DNA, 20 bp, Artificial Sequence
  MKO10084673_B_Fam170b
  gRNA
ggccagcccagacgccgcag

SEQ ID NO: 84674 - DNA, 20 bp, Artificial Sequence
  MKO10084674_B_Fam170b
  gRNA
ctgagttcatcaagcgtcag

SEQ ID NO: 84675 - DNA, 20 bp, Artificial Sequence
  MKO10084675_B_Fam170b
  gRNA
actgatactcggaggacgac

SEQ ID NO: 84676 - DNA, 20 bp, Artificial Sequence
  MKO10084676_B_Fam171a1
  gRNA
aaaccgccatgctgcgacat

SEQ ID NO: 84677 - DNA, 20 bp, Artificial Sequence
  MKO10084677_B_Fam171a1
  gRNA
gatgtcgtccaaatagtctc

SEQ ID NO: 84678 - DNA, 20 bp, Artificial Sequence
  MKO10084678_B_Fam171a1
  gRNA
acgtgccaaactctgccccg

SEQ ID NO: 84679 - DNA, 20 bp, Artificial Sequence
  MKO10084679_B_Fam171a2
  gRNA
actcttggggtcaaacctcc

SEQ ID NO: 84680 - DNA, 20 bp, Artificial Sequence
  MKO10084680_B_Fam171a2
  gRNA
cacatcctcctaggctcgcc

SEQ ID NO: 84681 - DNA, 20 bp, Artificial Sequence
  MKO10084681_B_Fam171a2
  gRNA
tctacgctggaactgcaccc

SEQ ID NO: 84682 - DNA, 20 bp, Artificial Sequence
  MKO10084682_B_Fam171b
  gRNA
ttataagtgactccagtcgc

SEQ ID NO: 84683 - DNA, 20 bp, Artificial Sequence
  MKO10084683_B_Fam171b
  gRNA
cgcaaagccaagcaaatata

SEQ ID NO: 84684 - DNA, 20 bp, Artificial Sequence
  MKO10084684_B_Fam171b
  gRNA
ttcatatcaaatgtccaagc

SEQ ID NO: 84685 - DNA, 20 bp, Artificial Sequence
  MKO10084685_B_Fam172a
  gRNA
tcaaagccttccagtgtatc

SEQ ID NO: 84686 - DNA, 20 bp, Artificial Sequence
  MKO10084686_B_Fam172a
  gRNA
aagatatgtttatgagctcc

SEQ ID NO: 84687 - DNA, 20 bp, Artificial Sequence
  MKO10084687_B_Fam172a
  gRNA
tccacctgtgtaagtcttct

SEQ ID NO: 84688 - DNA, 20 bp, Artificial Sequence
  MKO10084688_B_Fam173a
  gRNA
aacgtgctgtcactgttgcg

SEQ ID NO: 84689 - DNA, 20 bp, Artificial Sequence
  MKO10084689_B_Fam173a
  gRNA
ggaatcgtccagataccaca

SEQ ID NO: 84690 - DNA, 20 bp, Artificial Sequence
  MKO10084690_B_Fam173a
  gRNA
gacgattcccccttcccacc

SEQ ID NO: 84691 - DNA, 20 bp, Artificial Sequence
  MKO10084691_B_Fam173b
  gRNA
tggccgacccactcctgatt

SEQ ID NO: 84692 - DNA, 20 bp, Artificial Sequence
  MKO10084692_B_Fam173b
  gRNA
cgtgcctgcaacttcgaagc

SEQ ID NO: 84693 - DNA, 20 bp, Artificial Sequence
  MKO10084693_B_Fam173b
  gRNA
ttcaattcataccccaccgc

SEQ ID NO: 84694 - DNA, 20 bp, Artificial Sequence
  MKO10084694_B_Fam174a
  gRNA
acctttagagcaagacgatg

SEQ ID NO: 84695 - DNA, 20 bp, Artificial Sequence
  MKO10084695_B_Fam174a
  gRNA
cgccccggacccgctcagag

SEQ ID NO: 84696 - DNA, 20 bp, Artificial Sequence
  MKO10084696_B_Fam174a
  gRNA
tctgaggcggacggcctcga

SEQ ID NO: 84697 - DNA, 20 bp, Artificial Sequence
  MKO10084697_B_Fam174b
  gRNA
tcatcgtcctcctcattcag

SEQ ID NO: 84698 - DNA, 20 bp, Artificial Sequence
  MKO10084698_B_Fam174b
  gRNA
ctccaacagcagcgtcgacg

SEQ ID NO: 84699 - DNA, 20 bp, Artificial Sequence
  MKO10084699_B_Fam174b
  gRNA
gtctgctgctgcgcgtcttc

SEQ ID NO: 84700 - DNA, 20 bp, Artificial Sequence
  MKO10084700_B_Fam175a
  gRNA
tagcattactgattcacaga

SEQ ID NO: 84701 - DNA, 20 bp, Artificial Sequence
  MKO10084701_B_Fam175a
  gRNA
aaacgaacatgcactgaaga

SEQ ID NO: 84702 - DNA, 20 bp, Artificial Sequence
  MKO10084702_B_Fam175a
  gRNA
ctattactcacctaaaaagc

SEQ ID NO: 84703 - DNA, 20 bp, Artificial Sequence
  MKO10084703_B_Fam175b
  gRNA
acagagtttctgcaagtaat

SEQ ID NO: 84704 - DNA, 20 bp, Artificial Sequence
  MKO10084704_B_Fam175b
  gRNA
agccttgttcacaactcttc

SEQ ID NO: 84705 - DNA, 20 bp, Artificial Sequence
  MKO10084705_B_Fam175b
  gRNA
tacctgaagagttgtgaaca

SEQ ID NO: 84706 - DNA, 20 bp, Artificial Sequence
  MKO10084706_B_Fam177a
  gRNA
tgttgcagacaaaacttacc

SEQ ID NO: 84707 - DNA, 20 bp, Artificial Sequence
  MKO10084707_B_Fam177a
  gRNA
gacacacctccttcttcatc

SEQ ID NO: 84708 - DNA, 20 bp, Artificial Sequence
  MKO10084708_B_Fam177a
  gRNA
tctctagtgtgtgactttct

SEQ ID NO: 84709 - DNA, 20 bp, Artificial Sequence
  MKO10084709_B_Fam178a
  gRNA
ctgtttctaatgaatcgtca

SEQ ID NO: 84710 - DNA, 20 bp, Artificial Sequence
  MKO10084710_B_Fam178a
  gRNA
aaagatcatcttcagactcg

SEQ ID NO: 84711 - DNA, 20 bp, Artificial Sequence
  MKO10084711_B_Fam178a
  gRNA
ttcaagccagctgcaaaaca

SEQ ID NO: 84712 - DNA, 20 bp, Artificial Sequence
  MKO10084712_B_Fam178b
  gRNA
ggtccttctccaagtcctca

SEQ ID NO: 84713 - DNA, 20 bp, Artificial Sequence
  MKO10084713_B_Fam178b
  gRNA
ggagagctgctcgggcagcg

SEQ ID NO: 84714 - DNA, 20 bp, Artificial Sequence
  MKO10084714_B_Fam178b
  gRNA
gtagcattgtgagctcccag

SEQ ID NO: 84715 - DNA, 20 bp, Artificial Sequence
  MKO10084715_B_Fam179a
  gRNA
gcctcccaccggatccagag

SEQ ID NO: 84716 - DNA, 20 bp, Artificial Sequence
  MKO10084716_B_Fam179a
  gRNA
gcatcggcctgggtaccctc

SEQ ID NO: 84717 - DNA, 20 bp, Artificial Sequence
  MKO10084717_B_Fam179a
  gRNA
agtcttcttgctcacgatga

SEQ ID NO: 84718 - DNA, 20 bp, Artificial Sequence
  MKO10084718_B_Fam179b
  gRNA
gaacgaacttcttcatactc

SEQ ID NO: 84719 - DNA, 20 bp, Artificial Sequence
  MKO10084719_B_Fam179b
  gRNA
ccttgagagggctttaattt

SEQ ID NO: 84720 - DNA, 20 bp, Artificial Sequence
  MKO10084720_B_Fam179b
  gRNA
cagcttggattgtcacagat

SEQ ID NO: 84721 - DNA, 20 bp, Artificial Sequence
  MKO10084721_B_Fam180a
  gRNA
acaaggacctctttggccga

SEQ ID NO: 84722 - DNA, 20 bp, Artificial Sequence
  MKO10084722_B_Fam180a
  gRNA
gtctgcaggactggattcaa

SEQ ID NO: 84723 - DNA, 20 bp, Artificial Sequence
  MKO10084723_B_Fam180a
  gRNA
gctggtattctccagcaccc

SEQ ID NO: 84724 - DNA, 20 bp, Artificial Sequence
  MKO10084724_B_Fam181a
  gRNA
aactacgggtctgtacactt

SEQ ID NO: 84725 - DNA, 20 bp, Artificial Sequence
  MKO10084725_B_Fam181a
  gRNA
gacagctgcccgcctcgttc

SEQ ID NO: 84726 - DNA, 20 bp, Artificial Sequence
  MKO10084726_B_Fam181a
  gRNA
cctccctaaagggggtcccc

SEQ ID NO: 84727 - DNA, 20 bp, Artificial Sequence
  MKO10084727_B_Fam181b
  gRNA
cgagcagacagcgcctcgcc

SEQ ID NO: 84728 - DNA, 20 bp, Artificial Sequence
  MKO10084728_B_Fam181b
  gRNA
ggcggcggcaacgcacaatc

SEQ ID NO: 84729 - DNA, 20 bp, Artificial Sequence
  MKO10084729_B_Fam181b
  gRNA
agaggctggggtaaaccgcg

SEQ ID NO: 84730 - DNA, 20 bp, Artificial Sequence
  MKO10084730_B_Fam183b
  gRNA
ggccagctcacccttgcgca

SEQ ID NO: 84731 - DNA, 20 bp, Artificial Sequence
  MKO10084731_B_Fam183b
  gRNA
cagaccgaagcccaagaaat

SEQ ID NO: 84732 - DNA, 20 bp, Artificial Sequence
  MKO10084732_B_Fam183b
  gRNA
ttctagttcacacaattacc

SEQ ID NO: 84733 - DNA, 20 bp, Artificial Sequence
  MKO10084733_B_Fam184a
  gRNA
taagaacctgcaaaatcgat

SEQ ID NO: 84734 - DNA, 20 bp, Artificial Sequence
  MKO10084734_B_Fam184a
  gRNA
agaggtggctcagttaaacg

SEQ ID NO: 84735 - DNA, 20 bp, Artificial Sequence
  MKO10084735_B_Fam184a
  gRNA
cttgctcttgcaatcgctcc

SEQ ID NO: 84736 - DNA, 20 bp, Artificial Sequence
  MKO10084736_B_Fam184b
  gRNA
agttggctattgccaaagac

SEQ ID NO: 84737 - DNA, 20 bp, Artificial Sequence
  MKO10084737_B_Fam184b
  gRNA
gcacaccgacttcatttcca

SEQ ID NO: 84738 - DNA, 20 bp, Artificial Sequence
  MKO10084738_B_Fam184b
  gRNA
cctggggaaaagagatgacc

SEQ ID NO: 84739 - DNA, 20 bp, Artificial Sequence
  MKO10084739_B_Fam185a
  gRNA
tatcatcttacaaagcaaga

SEQ ID NO: 84740 - DNA, 20 bp, Artificial Sequence
  MKO10084740_B_Fam185a
  gRNA
aagttgcatgttcaaaccaa

SEQ ID NO: 84741 - DNA, 20 bp, Artificial Sequence
  MKO10084741_B_Fam185a
  gRNA
attgcactaggaaatgttca

SEQ ID NO: 84742 - DNA, 20 bp, Artificial Sequence
  MKO10084742_B_Fam186b
  gRNA
tcacttcgatccattcgtct

SEQ ID NO: 84743 - DNA, 20 bp, Artificial Sequence
  MKO10084743_B_Fam186b
  gRNA
ctgtgccatcaaccgcttcc

SEQ ID NO: 84744 - DNA, 20 bp, Artificial Sequence
  MKO10084744_B_Fam186b
  gRNA
ggtaactcttgtttgtcgaa

SEQ ID NO: 84745 - DNA, 20 bp, Artificial Sequence
  MKO10084745_B_Fam187a
  gRNA
cgtggagaacagtggcgctt

SEQ ID NO: 84746 - DNA, 20 bp, Artificial Sequence
  MKO10084746_B_Fam187a
  gRNA
gaccgagtcttaatgtagcg

SEQ ID NO: 84747 - DNA, 20 bp, Artificial Sequence
  MKO10084747_B_Fam187a
  gRNA
gctgcctacgcgaacgtgag

SEQ ID NO: 84748 - DNA, 20 bp, Artificial Sequence
  MKO10084748_B_Fam187b
  gRNA
gtctctcagtggggttgaac

SEQ ID NO: 84749 - DNA, 20 bp, Artificial Sequence
  MKO10084749_B_Fam187b
  gRNA
ggtctccgtggcggtgtcac

SEQ ID NO: 84750 - DNA, 20 bp, Artificial Sequence
  MKO10084750_B_Fam187b
  gRNA
caacggttacaatcttgcca

SEQ ID NO: 84751 - DNA, 20 bp, Artificial Sequence
  MKO10084751_B_Fam188a
  gRNA
ggacccccgaggaagcggct

SEQ ID NO: 84752 - DNA, 20 bp, Artificial Sequence
  MKO10084752_B_Fam188a
  gRNA
gacaggtgcaataacagcac

SEQ ID NO: 84753 - DNA, 20 bp, Artificial Sequence
  MKO10084753_B_Fam188a
  gRNA
tctcctccgagaagtcgtcc

SEQ ID NO: 84754 - DNA, 20 bp, Artificial Sequence
  MKO10084754_B_Fam188b
  gRNA
tccgcaaacgctctctgaga

SEQ ID NO: 84755 - DNA, 20 bp, Artificial Sequence
  MKO10084755_B_Fam188b
  gRNA
cggacatcatggtcagaagc

SEQ ID NO: 84756 - DNA, 20 bp, Artificial Sequence
  MKO10084756_B_Fam188b
  gRNA
tctccgcaaagttctgcatc

SEQ ID NO: 84757 - DNA, 20 bp, Artificial Sequence
  MKO10084757_B_Fam189a1
  gRNA
cagctcgtcagctccctcga

SEQ ID NO: 84758 - DNA, 20 bp, Artificial Sequence
  MKO10084758_B_Fam189a1
  gRNA
tcaccaactggcagccttcg

SEQ ID NO: 84759 - DNA, 20 bp, Artificial Sequence
  MKO10084759_B_Fam189a1
  gRNA
ctccaccattgtgtgtgcct

SEQ ID NO: 84760 - DNA, 20 bp, Artificial Sequence
  MKO10084760_B_Fam189a2
  gRNA
caaagatctggaggtagcgc

SEQ ID NO: 84761 - DNA, 20 bp, Artificial Sequence
  MKO10084761_B_Fam189a2
  gRNA
gccatcataccttaagcaga

SEQ ID NO: 84762 - DNA, 20 bp, Artificial Sequence
  MKO10084762_B_Fam189a2
  gRNA
ttggattgacgacttggaaa

SEQ ID NO: 84763 - DNA, 20 bp, Artificial Sequence
  MKO10084763_B_Fam189b
  gRNA
cttcaccttgagggcccctc

SEQ ID NO: 84764 - DNA, 20 bp, Artificial Sequence
  MKO10084764_B_Fam189b
  gRNA
agccagctgagcattcttac

SEQ ID NO: 84765 - DNA, 20 bp, Artificial Sequence
  MKO10084765_B_Fam189b
  gRNA
ggacttccgagagtgctcca

SEQ ID NO: 84766 - DNA, 20 bp, Artificial Sequence
  MKO10084766_B_Fam192a
  gRNA
agaccccgacccagatgaca

SEQ ID NO: 84767 - DNA, 20 bp, Artificial Sequence
  MKO10084767_B_Fam192a
  gRNA
caggagctgtgaaacataag

SEQ ID NO: 84768 - DNA, 20 bp, Artificial Sequence
  MKO10084768_B_Fam192a
  gRNA
aactcacagtaatctcaaca

SEQ ID NO: 84769 - DNA, 20 bp, Artificial Sequence
  MKO10084769_B_Fam193a
  gRNA
aggacaccaccctaccccgc

SEQ ID NO: 84770 - DNA, 20 bp, Artificial Sequence
  MKO10084770_B_Fam193a
  gRNA
agttaagactgcgagcaaat

SEQ ID NO: 84771 - DNA, 20 bp, Artificial Sequence
  MKO10084771_B_Fam193a
  gRNA
cgtggtgcctagccctgatg

SEQ ID NO: 84772 - DNA, 20 bp, Artificial Sequence
  MKO10084772_B_Fam193b
  gRNA
aatttgtgccccttgcaccc

SEQ ID NO: 84773 - DNA, 20 bp, Artificial Sequence
  MKO10084773_B_Fam193b
  gRNA
tgggtaggacgccgagctga

SEQ ID NO: 84774 - DNA, 20 bp, Artificial Sequence
  MKO10084774_B_Fam193b
  gRNA
tggctgcaccccgagagtgg

SEQ ID NO: 84775 - DNA, 20 bp, Artificial Sequence
  MKO10084775_B_Fam194a
  gRNA
tgaactctttcatacaaact

SEQ ID NO: 84776 - DNA, 20 bp, Artificial Sequence
  MKO10084776_B_Fam194a
  gRNA
ctcacataaaatgcttagct

SEQ ID NO: 84777 - DNA, 20 bp, Artificial Sequence
  MKO10084777_B_Fam194a
  gRNA
tacaaacagaagatgaaagt

SEQ ID NO: 84778 - DNA, 20 bp, Artificial Sequence
  MKO10084778_B_Fam195a
  gRNA
tcttgggtcccctcgaggga

SEQ ID NO: 84779 - DNA, 20 bp, Artificial Sequence
  MKO10084779_B_Fam195a
  gRNA
cgtgggccactctcatcggc

SEQ ID NO: 84780 - DNA, 20 bp, Artificial Sequence
  MKO10084780_B_Fam195a
  gRNA
ggcggccctgccgatgagag

SEQ ID NO: 84781 - DNA, 20 bp, Artificial Sequence
  MKO10084781_B_Fam195b
  gRNA
aatgtgcgcttcatttatga

SEQ ID NO: 84782 - DNA, 20 bp, Artificial Sequence
  MKO10084782_B_Fam195b
  gRNA
gtctcgctcaacaccctgcc

SEQ ID NO: 84783 - DNA, 20 bp, Artificial Sequence
  MKO10084783_B_Fam195b
  gRNA
gtgcctagtggaggagtatg

SEQ ID NO: 84784 - DNA, 20 bp, Artificial Sequence
  MKO10084784_B_Fam196a
  gRNA
atgacctgagtttcctcgac

SEQ ID NO: 84785 - DNA, 20 bp, Artificial Sequence
  MKO10084785_B_Fam196a
  gRNA
gagaaaactgcaccctgtcg

SEQ ID NO: 84786 - DNA, 20 bp, Artificial Sequence
  MKO10084786_B_Fam196a
  gRNA
tatcttgtaggctttcatat

SEQ ID NO: 84787 - DNA, 20 bp, Artificial Sequence
  MKO10084787_B_Fam196b
  gRNA
ccgccgtaagtcctgtttct

SEQ ID NO: 84788 - DNA, 20 bp, Artificial Sequence
  MKO10084788_B_Fam196b
  gRNA
acacagcatgcatcatatac

SEQ ID NO: 84789 - DNA, 20 bp, Artificial Sequence
  MKO10084789_B_Fam196b
  gRNA
ccagtgtagagtatgatttc

SEQ ID NO: 84790 - DNA, 20 bp, Artificial Sequence
  MKO10084790_B_Fam198a
  gRNA
tctatatacaccaagcgaga

SEQ ID NO: 84791 - DNA, 20 bp, Artificial Sequence
  MKO10084791_B_Fam198a
  gRNA
caagctcaactttcggctgc

SEQ ID NO: 84792 - DNA, 20 bp, Artificial Sequence
  MKO10084792_B_Fam198a
  gRNA
agccacagcagtagcgatcc

SEQ ID NO: 84793 - DNA, 20 bp, Artificial Sequence
  MKO10084793_B_Fam198b
  gRNA
caaccgctgataagttcccc

SEQ ID NO: 84794 - DNA, 20 bp, Artificial Sequence
  MKO10084794_B_Fam198b
  gRNA
agccccgtgtgcgttgatgt

SEQ ID NO: 84795 - DNA, 20 bp, Artificial Sequence
  MKO10084795_B_Fam198b
  gRNA
agcttatcgacgtgatagag

SEQ ID NO: 84796 - DNA, 20 bp, Artificial Sequence
  MKO10084796_B_Fam199x
  gRNA
gccttcgtcagcggcctaca

SEQ ID NO: 84797 - DNA, 20 bp, Artificial Sequence
  MKO10084797_B_Fam199x
  gRNA
tgcgatgacaaatgatgagc

SEQ ID NO: 84798 - DNA, 20 bp, Artificial Sequence
  MKO10084798_B_Fam199x
  gRNA
caaggtgaacttggaatact

SEQ ID NO: 84799 - DNA, 20 bp, Artificial Sequence
  MKO10084799_B_Fam19a1
  gRNA
ccaccatttcccaattacta

SEQ ID NO: 84800 - DNA, 20 bp, Artificial Sequence
  MKO10084800_B_Fam19a1
  gRNA
aagacactccctgacaattc

SEQ ID NO: 84801 - DNA, 20 bp, Artificial Sequence
  MKO10084801_B_Fam19a1
  gRNA
caatggtctctgcaatgtcc

SEQ ID NO: 84802 - DNA, 20 bp, Artificial Sequence
  MKO10084802_B_Fam19a2
  gRNA
aaagtccttccagatcgcaa

SEQ ID NO: 84803 - DNA, 20 bp, Artificial Sequence
  MKO10084803_B_Fam19a2
  gRNA
tccagcgccaaccatcacaa

SEQ ID NO: 84804 - DNA, 20 bp, Artificial Sequence
  MKO10084804_B_Fam19a2
  gRNA
agcaggagcacttgaccgtt

SEQ ID NO: 84805 - DNA, 20 bp, Artificial Sequence
  MKO10084805_B_Fam19a3
  gRNA
tgcttgcactgtgcctcgcc

SEQ ID NO: 84806 - DNA, 20 bp, Artificial Sequence
  MKO10084806_B_Fam19a3
  gRNA
cctccatcgtcctgcagaag

SEQ ID NO: 84807 - DNA, 20 bp, Artificial Sequence
  MKO10084807_B_Fam19a3
  gRNA
tgctgcagctccaccctgac

SEQ ID NO: 84808 - DNA, 20 bp, Artificial Sequence
  MKO10084808_B_Fam19a4
  gRNA
gtgccacatgaatccttgct

SEQ ID NO: 84809 - DNA, 20 bp, Artificial Sequence
  MKO10084809_B_Fam19a4
  gRNA
ccgcctcgagccagcacctc

SEQ ID NO: 84810 - DNA, 20 bp, Artificial Sequence
  MKO10084810_B_Fam19a4
  gRNA
gactttattgccactgctac

SEQ ID NO: 84811 - DNA, 20 bp, Artificial Sequence
  MKO10084811_B_Fam19a5
  gRNA
ctcttaccgtccacacaagc

SEQ ID NO: 84812 - DNA, 20 bp, Artificial Sequence
  MKO10084812_B_Fam19a5
  gRNA
ctccgcgatgcagctcctga

SEQ ID NO: 84813 - DNA, 20 bp, Artificial Sequence
  MKO10084813_B_Fam19a5
  gRNA
gctgtgacttgttaatcaac

SEQ ID NO: 84814 - DNA, 20 bp, Artificial Sequence
  MKO10084814_B_Fam203a
  gRNA
gccagagcccgatgtgcgga

SEQ ID NO: 84815 - DNA, 20 bp, Artificial Sequence
  MKO10084815_B_Fam203a
  gRNA
tccggctcccgttgcttgtc

SEQ ID NO: 84816 - DNA, 20 bp, Artificial Sequence
  MKO10084816_B_Fam203a
  gRNA
aaaaggggagaatgtcgact

SEQ ID NO: 84817 - DNA, 20 bp, Artificial Sequence
  MKO10084817_B_Fam207a
  gRNA
taggcgacctgcaccccctg

SEQ ID NO: 84818 - DNA, 20 bp, Artificial Sequence
  MKO10084818_B_Fam207a
  gRNA
gccgaatgaccacagtacag

SEQ ID NO: 84819 - DNA, 20 bp, Artificial Sequence
  MKO10084819_B_Fam207a
  gRNA
tactctgtaaccatcgctca

SEQ ID NO: 84820 - DNA, 20 bp, Artificial Sequence
  MKO10084820_B_Fam209
  gRNA
tcaccaattccatctcgagc

SEQ ID NO: 84821 - DNA, 20 bp, Artificial Sequence
  MKO10084821_B_Fam209
  gRNA
tgccttgcggcggacacttc

SEQ ID NO: 84822 - DNA, 20 bp, Artificial Sequence
  MKO10084822_B_Fam209
  gRNA
ccgccgcaaggcaccttccc

SEQ ID NO: 84823 - DNA, 20 bp, Artificial Sequence
  MKO10084823_B_Fam20a
  gRNA
aagccatgttcaaacccatg

SEQ ID NO: 84824 - DNA, 20 bp, Artificial Sequence
  MKO10084824_B_Fam20a
  gRNA
ctcacagttgtgaaacccag

SEQ ID NO: 84825 - DNA, 20 bp, Artificial Sequence
  MKO10084825_B_Fam20a
  gRNA
tgagatcgcagctttccacc

SEQ ID NO: 84826 - DNA, 20 bp, Artificial Sequence
  MKO10084826_B_Fam20b
  gRNA
tggcggccttccatttggac

SEQ ID NO: 84827 - DNA, 20 bp, Artificial Sequence
  MKO10084827_B_Fam20b
  gRNA
gggtttccgccgcgctccct

SEQ ID NO: 84828 - DNA, 20 bp, Artificial Sequence
  MKO10084828_B_Fam20b
  gRNA
tgtctgtcataaccagcgta

SEQ ID NO: 84829 - DNA, 20 bp, Artificial Sequence
  MKO10084829_B_Fam20c
  gRNA
tctcagaagatcaccagcgt

SEQ ID NO: 84830 - DNA, 20 bp, Artificial Sequence
  MKO10084830_B_Fam20c
  gRNA
atagcgcctgcccgtaattc

SEQ ID NO: 84831 - DNA, 20 bp, Artificial Sequence
  MKO10084831_B_Fam20c
  gRNA
cctcctgcagccatgaagtc

SEQ ID NO: 84832 - DNA, 20 bp, Artificial Sequence
  MKO10084832_B_Fam210a
  gRNA
tgcccgctacaccgtgacct

SEQ ID NO: 84833 - DNA, 20 bp, Artificial Sequence
  MKO10084833_B_Fam210a
  gRNA
acccaccttaaacatggcgt

SEQ ID NO: 84834 - DNA, 20 bp, Artificial Sequence
  MKO10084834_B_Fam210a
  gRNA
aggatgtccacgatactgtc

SEQ ID NO: 84835 - DNA, 20 bp, Artificial Sequence
  MKO10084835_B_Fam210b
  gRNA
gtttaaagagtccaacgctg

SEQ ID NO: 84836 - DNA, 20 bp, Artificial Sequence
  MKO10084836_B_Fam210b
  gRNA
gtgcgcagcagtcgggcgtc

SEQ ID NO: 84837 - DNA, 20 bp, Artificial Sequence
  MKO10084837_B_Fam210b
  gRNA
aatgcacattgggatctccc

SEQ ID NO: 84838 - DNA, 20 bp, Artificial Sequence
  MKO10084838_B_Fam211a
  gRNA
accgatcagcaggaccctat

SEQ ID NO: 84839 - DNA, 20 bp, Artificial Sequence
  MKO10084839_B_Fam211a
  gRNA
agccttaaggccctcctatc

SEQ ID NO: 84840 - DNA, 20 bp, Artificial Sequence
  MKO10084840_B_Fam211a
  gRNA
agcggtacagcacatcatcc

SEQ ID NO: 84841 - DNA, 20 bp, Artificial Sequence
  MKO10084841_B_Fam211b
  gRNA
ctgccgacagatcttgtccg

SEQ ID NO: 84842 - DNA, 20 bp, Artificial Sequence
  MKO10084842_B_Fam211b
  gRNA
ttcgcttggagtgcggagtg

SEQ ID NO: 84843 - DNA, 20 bp, Artificial Sequence
  MKO10084843_B_Fam211b
  gRNA
cactgccaagttccccgtgt

SEQ ID NO: 84844 - DNA, 20 bp, Artificial Sequence
  MKO10084844_B_Fam212a
  gRNA
gcaccagcatgcacagcgct

SEQ ID NO: 84845 - DNA, 20 bp, Artificial Sequence
  MKO10084845_B_Fam212a
  gRNA
tctctgagcagctacggcgt

SEQ ID NO: 84846 - DNA, 20 bp, Artificial Sequence
  MKO10084846_B_Fam212a
  gRNA
gcaaatcgtgagatgtctgc

SEQ ID NO: 84847 - DNA, 20 bp, Artificial Sequence
  MKO10084847_B_Fam212b
  gRNA
gcgaatgacaaaggagagca

SEQ ID NO: 84848 - DNA, 20 bp, Artificial Sequence
  MKO10084848_B_Fam212b
  gRNA
aatctagccagttacccacc

SEQ ID NO: 84849 - DNA, 20 bp, Artificial Sequence
  MKO10084849_B_Fam212b
  gRNA
ccaatgccgtctgcacttgt

SEQ ID NO: 84850 - DNA, 20 bp, Artificial Sequence
  MKO10084850_B_Fam213a
  gRNA
gacacctagctcatccaact

SEQ ID NO: 84851 - DNA, 20 bp, Artificial Sequence
  MKO10084851_B_Fam213a
  gRNA
aagctacagactccagcgtc

SEQ ID NO: 84852 - DNA, 20 bp, Artificial Sequence
  MKO10084852_B_Fam213a
  gRNA
agtgaacccactctctgttc

SEQ ID NO: 84853 - DNA, 20 bp, Artificial Sequence
  MKO10084853_B_Fam213b
  gRNA
tgttcgtgatgtagcctcca

SEQ ID NO: 84854 - DNA, 20 bp, Artificial Sequence
  MKO10084854_B_Fam213b
  gRNA
tctggtgacctgctgcaaag

SEQ ID NO: 84855 - DNA, 20 bp, Artificial Sequence
  MKO10084855_B_Fam213b
  gRNA
agatttgcttgctctcatca

SEQ ID NO: 84856 - DNA, 20 bp, Artificial Sequence
  MKO10084856_B_Fam214a
  gRNA
gtgccttctcttcgatgaag

SEQ ID NO: 84857 - DNA, 20 bp, Artificial Sequence
  MKO10084857_B_Fam214a
  gRNA
acaactcactgtcggggaac

SEQ ID NO: 84858 - DNA, 20 bp, Artificial Sequence
  MKO10084858_B_Fam214a
  gRNA
acatgaatgcagcgacaagc

SEQ ID NO: 84859 - DNA, 20 bp, Artificial Sequence
  MKO10084859_B_Fam214b
  gRNA
agtcgtggacctgactcctc

SEQ ID NO: 84860 - DNA, 20 bp, Artificial Sequence
  MKO10084860_B_Fam214b
  gRNA
gtccggctgacagcaggggt

SEQ ID NO: 84861 - DNA, 20 bp, Artificial Sequence
  MKO10084861_B_Fam214b
  gRNA
gcctttcagcctccgcccca

SEQ ID NO: 84862 - DNA, 20 bp, Artificial Sequence
  MKO10084862_B_Fam216a
  gRNA
gtgagtagcgagagctcata

SEQ ID NO: 84863 - DNA, 20 bp, Artificial Sequence
  MKO10084863_B_Fam216a
  gRNA
ggtgtgctcactcaccacag

SEQ ID NO: 84864 - DNA, 20 bp, Artificial Sequence
  MKO10084864_B_Fam216a
  gRNA
catgtactgcctcttcatca

SEQ ID NO: 84865 - DNA, 20 bp, Artificial Sequence
  MKO10084865_B_Fam216b
  gRNA
ttctgacaggacctaaatca

SEQ ID NO: 84866 - DNA, 20 bp, Artificial Sequence
  MKO10084866_B_Fam216b
  gRNA
gaattgtcagcagccgctgc

SEQ ID NO: 84867 - DNA, 20 bp, Artificial Sequence
  MKO10084867_B_Fam216b
  gRNA
acccgctacattcacagcct

SEQ ID NO: 84868 - DNA, 20 bp, Artificial Sequence
  MKO10084868_B_Fam217a
  gRNA
gtagagccatctggaaaatc

SEQ ID NO: 84869 - DNA, 20 bp, Artificial Sequence
  MKO10084869_B_Fam217a
  gRNA
caaagagttcttctgcatcc

SEQ ID NO: 84870 - DNA, 20 bp, Artificial Sequence
  MKO10084870_B_Fam217a
  gRNA
accttctcatctgaaaatga

SEQ ID NO: 84871 - DNA, 20 bp, Artificial Sequence
  MKO10084871_B_Fam217b
  gRNA
ttgagctctggaggcgtgaa

SEQ ID NO: 84872 - DNA, 20 bp, Artificial Sequence
  MKO10084872_B_Fam217b
  gRNA
ttgccgttggcttccattgc

SEQ ID NO: 84873 - DNA, 20 bp, Artificial Sequence
  MKO10084873_B_Fam217b
  gRNA
tgaggccctgcctcgggcca

SEQ ID NO: 84874 - DNA, 20 bp, Artificial Sequence
  MKO10084874_B_Fam219a
  gRNA
tctgtgtcaagagctaccag

SEQ ID NO: 84875 - DNA, 20 bp, Artificial Sequence
  MKO10084875_B_Fam219a
  gRNA
cctcccgggcgtcacagtct

SEQ ID NO: 84876 - DNA, 20 bp, Artificial Sequence
  MKO10084876_B_Fam219a
  gRNA
tctgagatagaggctgcggc

SEQ ID NO: 84877 - DNA, 20 bp, Artificial Sequence
  MKO10084877_B_Fam219b
  gRNA
accatgccaaggccgttctg

SEQ ID NO: 84878 - DNA, 20 bp, Artificial Sequence
  MKO10084878_B_Fam219b
  gRNA
gcactcacctgtcagagtcg

SEQ ID NO: 84879 - DNA, 20 bp, Artificial Sequence
  MKO10084879_B_Fam219b
  gRNA
caggtcagtgaagtttaaca

SEQ ID NO: 84880 - DNA, 20 bp, Artificial Sequence
  MKO10084880_B_Fam21
  gRNA
gcgggtgtacgatgaagaag

SEQ ID NO: 84881 - DNA, 20 bp, Artificial Sequence
  MKO10084881_B_Fam21
  gRNA
gagctttgacccgatgagat

SEQ ID NO: 84882 - DNA, 20 bp, Artificial Sequence
  MKO10084882_B_Fam21
  gRNA
catcgggtcaaagctcttca

SEQ ID NO: 84883 - DNA, 20 bp, Artificial Sequence
  MKO10084883_B_Fam220a
  gRNA
agaggtgaaccaccaagtgc

SEQ ID NO: 84884 - DNA, 20 bp, Artificial Sequence
  MKO10084884_B_Fam220a
  gRNA
acacacctcagctcgccttc

SEQ ID NO: 84885 - DNA, 20 bp, Artificial Sequence
  MKO10084885_B_Fam220a
  gRNA
aaactctcaagttcttcaga

SEQ ID NO: 84886 - DNA, 20 bp, Artificial Sequence
  MKO10084886_B_Fam221a
  gRNA
gagcggctgacgttgcctcc

SEQ ID NO: 84887 - DNA, 20 bp, Artificial Sequence
  MKO10084887_B_Fam221a
  gRNA
aaacctcccattgccgcata

SEQ ID NO: 84888 - DNA, 20 bp, Artificial Sequence
  MKO10084888_B_Fam221a
  gRNA
aggcaacgtcagccgctcca

SEQ ID NO: 84889 - DNA, 20 bp, Artificial Sequence
  MKO10084889_B_Fam221b
  gRNA
gagtgtgtttacagcgacat

SEQ ID NO: 84890 - DNA, 20 bp, Artificial Sequence
  MKO10084890_B_Fam221b
  gRNA
catgagacgttctttgagac

SEQ ID NO: 84891 - DNA, 20 bp, Artificial Sequence
  MKO10084891_B_Fam221b
  gRNA
agagttaccacggtgcctgc

SEQ ID NO: 84892 - DNA, 20 bp, Artificial Sequence
  MKO10084892_B_Fam222a
  gRNA
gaacccaccaggccaacacc

SEQ ID NO: 84893 - DNA, 20 bp, Artificial Sequence
  MKO10084893_B_Fam222a
  gRNA
gttggctaccttctccgcgt

SEQ ID NO: 84894 - DNA, 20 bp, Artificial Sequence
  MKO10084894_B_Fam222a
  gRNA
aggcccgagagtacgtctcc

SEQ ID NO: 84895 - DNA, 20 bp, Artificial Sequence
  MKO10084895_B_Fam222b
  gRNA
gccatgctagcctgtctccc

SEQ ID NO: 84896 - DNA, 20 bp, Artificial Sequence
  MKO10084896_B_Fam222b
  gRNA
cttagcatacgcgtccaatt

SEQ ID NO: 84897 - DNA, 20 bp, Artificial Sequence
  MKO10084897_B_Fam222b
  gRNA
atgagcagactgcgactaat

SEQ ID NO: 84898 - DNA, 20 bp, Artificial Sequence
  MKO10084898_B_Fam227a
  gRNA
ttaccaaggtgctgatcatc

SEQ ID NO: 84899 - DNA, 20 bp, Artificial Sequence
  MKO10084899_B_Fam227a
  gRNA
ggcaattgaagactatgagt

SEQ ID NO: 84900 - DNA, 20 bp, Artificial Sequence
  MKO10084900_B_Fam227a
  gRNA
ccataatcctctgattcacc

SEQ ID NO: 84901 - DNA, 20 bp, Artificial Sequence
  MKO10084901_B_Fam227b
  gRNA
tttccagctttcagatcgaa

SEQ ID NO: 84902 - DNA, 20 bp, Artificial Sequence
  MKO10084902_B_Fam227b
  gRNA
taaagggtcatatacaaacc

SEQ ID NO: 84903 - DNA, 20 bp, Artificial Sequence
  MKO10084903_B_Fam227b
  gRNA
caaatgctttgtagcgttcc

SEQ ID NO: 84904 - DNA, 20 bp, Artificial Sequence
  MKO10084904_B_Fam228a
  gRNA
gcaaagcacctctgccatgt

SEQ ID NO: 84905 - DNA, 20 bp, Artificial Sequence
  MKO10084905_B_Fam228a
  gRNA
accagttaccaacatggcag

SEQ ID NO: 84906 - DNA, 20 bp, Artificial Sequence
  MKO10084906_B_Fam228a
  gRNA
tagagaaaactatgttgtga

SEQ ID NO: 84907 - DNA, 20 bp, Artificial Sequence
  MKO10084907_B_Fam228b
  gRNA
cctgcctaccttcagaaaat

SEQ ID NO: 84908 - DNA, 20 bp, Artificial Sequence
  MKO10084908_B_Fam228b
  gRNA
aagagatgctgtataaaaag

SEQ ID NO: 84909 - DNA, 20 bp, Artificial Sequence
  MKO10084909_B_Fam228b
  gRNA
tagagaaaattatattatga

SEQ ID NO: 84910 - DNA, 20 bp, Artificial Sequence
  MKO10084910_B_Fam229a
  gRNA
atggggaatcttcgaccctg

SEQ ID NO: 84911 - DNA, 20 bp, Artificial Sequence
  MKO10084911_B_Fam229a
  gRNA
cgtgcccatcgacgtctacc

SEQ ID NO: 84912 - DNA, 20 bp, Artificial Sequence
  MKO10084912_B_Fam229a
  gRNA
cgaagattccccattgaggc

SEQ ID NO: 84913 - DNA, 20 bp, Artificial Sequence
  MKO10084913_B_Fam229b
  gRNA
aggcaactccgaagatgccc

SEQ ID NO: 84914 - DNA, 20 bp, Artificial Sequence
  MKO10084914_B_Fam229b
  gRNA
tacaggaagcactagagctc

SEQ ID NO: 84915 - DNA, 20 bp, Artificial Sequence
  MKO10084915_B_Fam229b
  gRNA
cattgttgcatagacagtga

SEQ ID NO: 84916 - DNA, 20 bp, Artificial Sequence
  MKO10084916_B_Fam24a
  gRNA
caagactcacttcagggcct

SEQ ID NO: 84917 - DNA, 20 bp, Artificial Sequence
  MKO10084917_B_Fam24a
  gRNA
tgacgactgtagcatctata

SEQ ID NO: 84918 - DNA, 20 bp, Artificial Sequence
  MKO10084918_B_Fam24a
  gRNA
tcatttgtgacacaatagca

SEQ ID NO: 84919 - DNA, 20 bp, Artificial Sequence
  MKO10084919_B_Fam25c
  gRNA
tctctttccagttcacgcag

SEQ ID NO: 84920 - DNA, 20 bp, Artificial Sequence
  MKO10084920_B_Fam25c
  gRNA
cactgatgctgttacccatg

SEQ ID NO: 84921 - DNA, 20 bp, Artificial Sequence
  MKO10084921_B_Fam25c
  gRNA
agaggtggtgagcgaggtgg

SEQ ID NO: 84922 - DNA, 20 bp, Artificial Sequence
  MKO10084922_B_Fam26d
  gRNA
caaagagcactctctcgttg

SEQ ID NO: 84923 - DNA, 20 bp, Artificial Sequence
  MKO10084923_B_Fam26d
  gRNA
ttcagttgtccgtgtcaagt

SEQ ID NO: 84924 - DNA, 20 bp, Artificial Sequence
  MKO10084924_B_Fam26d
  gRNA
gctgcagcagcagtactcgc

SEQ ID NO: 84925 - DNA, 20 bp, Artificial Sequence
  MKO10084925_B_Fam26e
  gRNA
tagcgaacgtctcttctcgc

SEQ ID NO: 84926 - DNA, 20 bp, Artificial Sequence
  MKO10084926_B_Fam26e
  gRNA
tgtagtgctcacggtcttga

SEQ ID NO: 84927 - DNA, 20 bp, Artificial Sequence
  MKO10084927_B_Fam26e
  gRNA
gtgctaacaagttaagtgag

SEQ ID NO: 84928 - DNA, 20 bp, Artificial Sequence
  MKO10084928_B_Fam26f
  gRNA
tagttcgtgagtgttagtca

SEQ ID NO: 84929 - DNA, 20 bp, Artificial Sequence
  MKO10084929_B_Fam26f
  gRNA
ctgcaatgccacgctaccgc

SEQ ID NO: 84930 - DNA, 20 bp, Artificial Sequence
  MKO10084930_B_Fam26f
  gRNA
gagaaagcaccgcaacgccc

SEQ ID NO: 84931 - DNA, 20 bp, Artificial Sequence
  MKO10084931_B_Fam32a
  gRNA
acaggacttcaaccgacacc

SEQ ID NO: 84932 - DNA, 20 bp, Artificial Sequence
  MKO10084932_B_Fam32a
  gRNA
tcacctccactctctgtttg

SEQ ID NO: 84933 - DNA, 20 bp, Artificial Sequence
  MKO10084933_B_Fam32a
  gRNA
gcgccggcgtgcgcttgtcc

SEQ ID NO: 84934 - DNA, 20 bp, Artificial Sequence
  MKO10084934_B_Fam35a
  gRNA
taagtcctgaagtataacat

SEQ ID NO: 84935 - DNA, 20 bp, Artificial Sequence
  MKO10084935_B_Fam35a
  gRNA
ctcttgtgtcatcatcaaat

SEQ ID NO: 84936 - DNA, 20 bp, Artificial Sequence
  MKO10084936_B_Fam35a
  gRNA
aagaaaagttgtgttaaccg

SEQ ID NO: 84937 - DNA, 20 bp, Artificial Sequence
  MKO10084937_B_Fam3a
  gRNA
cgggcccaagatctgcctcg

SEQ ID NO: 84938 - DNA, 20 bp, Artificial Sequence
  MKO10084938_B_Fam3a
  gRNA
tgagacccataatgatgatt

SEQ ID NO: 84939 - DNA, 20 bp, Artificial Sequence
  MKO10084939_B_Fam3a
  gRNA
ggtggactcaccattcacca

SEQ ID NO: 84940 - DNA, 20 bp, Artificial Sequence
  MKO10084940_B_Fam3b
  gRNA
gtatgccaagatctgctttg

SEQ ID NO: 84941 - DNA, 20 bp, Artificial Sequence
  MKO10084941_B_Fam3b
  gRNA
aagtactttgatatgtatga

SEQ ID NO: 84942 - DNA, 20 bp, Artificial Sequence
  MKO10084942_B_Fam3b
  gRNA
caggctaataggagagaaga

SEQ ID NO: 84943 - DNA, 20 bp, Artificial Sequence
  MKO10084943_B_Fam3c
  gRNA
gagatcccacacttgtacct

SEQ ID NO: 84944 - DNA, 20 bp, Artificial Sequence
  MKO10084944_B_Fam3c
  gRNA
gtgaagaataatgtcggaag

SEQ ID NO: 84945 - DNA, 20 bp, Artificial Sequence
  MKO10084945_B_Fam3c
  gRNA
gcaagtttaggaaatctatt

SEQ ID NO: 84946 - DNA, 20 bp, Artificial Sequence
  MKO10084946_B_Fam43a
  gRNA
tctggcagcttagcccgagt

SEQ ID NO: 84947 - DNA, 20 bp, Artificial Sequence
  MKO10084947_B_Fam43a
  gRNA
atccaggcctccgccctcga

SEQ ID NO: 84948 - DNA, 20 bp, Artificial Sequence
  MKO10084948_B_Fam43a
  gRNA
gcttggacaccagcaccgcg

SEQ ID NO: 84949 - DNA, 20 bp, Artificial Sequence
  MKO10084949_B_Fam43b
  gRNA
gcacgtggcgcgcatcgctc

SEQ ID NO: 84950 - DNA, 20 bp, Artificial Sequence
  MKO10084950_B_Fam43b
  gRNA
gctccgcgaccgcgctcgcc

SEQ ID NO: 84951 - DNA, 20 bp, Artificial Sequence
  MKO10084951_B_Fam43b
  gRNA
gccgcgcatcacctactgcg

SEQ ID NO: 84952 - DNA, 20 bp, Artificial Sequence
  MKO10084952_B_Fam45a
  gRNA
cttctccaccctttcgtctt

SEQ ID NO: 84953 - DNA, 20 bp, Artificial Sequence
  MKO10084953_B_Fam45a
  gRNA
gaccatcaaagtctctacta

SEQ ID NO: 84954 - DNA, 20 bp, Artificial Sequence
  MKO10084954_B_Fam45a
  gRNA
ccccaaaatagaagctgtcc

SEQ ID NO: 84955 - DNA, 20 bp, Artificial Sequence
  MKO10084955_B_Fam46a
  gRNA
atagacactctcaccgatga

SEQ ID NO: 84956 - DNA, 20 bp, Artificial Sequence
  MKO10084956_B_Fam46a
  gRNA
agatgcatcagagatacttt

SEQ ID NO: 84957 - DNA, 20 bp, Artificial Sequence
  MKO10084957_B_Fam46a
  gRNA
cggcggcccttacatccccc

SEQ ID NO: 84958 - DNA, 20 bp, Artificial Sequence
  MKO10084958_B_Fam46b
  gRNA
gaagttgcctcgtccgtgaa

SEQ ID NO: 84959 - DNA, 20 bp, Artificial Sequence
  MKO10084959_B_Fam46b
  gRNA
ccgtttcttcatcgactttc

SEQ ID NO: 84960 - DNA, 20 bp, Artificial Sequence
  MKO10084960_B_Fam46b
  gRNA
gccttccaccctacggtgac

SEQ ID NO: 84961 - DNA, 20 bp, Artificial Sequence
  MKO10084961_B_Fam46c
  gRNA
cgctgaactcaaactgccgc

SEQ ID NO: 84962 - DNA, 20 bp, Artificial Sequence
  MKO10084962_B_Fam46c
  gRNA
catcgacttccccgacatcc

SEQ ID NO: 84963 - DNA, 20 bp, Artificial Sequence
  MKO10084963_B_Fam46c
  gRNA
cgttgtctttgaccaaaacg

SEQ ID NO: 84964 - DNA, 20 bp, Artificial Sequence
  MKO10084964_B_Fam46d
  gRNA
gcaagttacgttgtctgtac

SEQ ID NO: 84965 - DNA, 20 bp, Artificial Sequence
  MKO10084965_B_Fam46d
  gRNA
cccagatgctacataataac

SEQ ID NO: 84966 - DNA, 20 bp, Artificial Sequence
  MKO10084966_B_Fam46d
  gRNA
aaattgccccttccatgaat

SEQ ID NO: 84967 - DNA, 20 bp, Artificial Sequence
  MKO10084967_B_Fam47c
  gRNA
cgaatgatcataccttcact

SEQ ID NO: 84968 - DNA, 20 bp, Artificial Sequence
  MKO10084968_B_Fam47c
  gRNA
atactgtatttacgtgaccc

SEQ ID NO: 84969 - DNA, 20 bp, Artificial Sequence
  MKO10084969_B_Fam47c
  gRNA
aaaactgacccagcgtcctt

SEQ ID NO: 84970 - DNA, 20 bp, Artificial Sequence
  MKO10084970_B_Fam47e
  gRNA
gcatagccgaagccacgcaa

SEQ ID NO: 84971 - DNA, 20 bp, Artificial Sequence
  MKO10084971_B_Fam47e
  gRNA
ttgcatcatccgtgagcacc

SEQ ID NO: 84972 - DNA, 20 bp, Artificial Sequence
  MKO10084972_B_Fam47e
  gRNA
tcattctaagcaggggctac

SEQ ID NO: 84973 - DNA, 20 bp, Artificial Sequence
  MKO10084973_B_Fam49a
  gRNA
tacgaattctccatccgtct

SEQ ID NO: 84974 - DNA, 20 bp, Artificial Sequence
  MKO10084974_B_Fam49a
  gRNA
agtatactcaccaagacgga

SEQ ID NO: 84975 - DNA, 20 bp, Artificial Sequence
  MKO10084975_B_Fam49a
  gRNA
cctggaggacagcactgatc

SEQ ID NO: 84976 - DNA, 20 bp, Artificial Sequence
  MKO10084976_B_Fam49b
  gRNA
cgagtatggcgtactagtca

SEQ ID NO: 84977 - DNA, 20 bp, Artificial Sequence
  MKO10084977_B_Fam49b
  gRNA
ccaacatctagagcgagagc

SEQ ID NO: 84978 - DNA, 20 bp, Artificial Sequence
  MKO10084978_B_Fam49b
  gRNA
cgatgagaagttgcaagaga

SEQ ID NO: 84979 - DNA, 20 bp, Artificial Sequence
  MKO10084979_B_Fam50a
  gRNA
acacaagcttcttgcctgac

SEQ ID NO: 84980 - DNA, 20 bp, Artificial Sequence
  MKO10084980_B_Fam50a
  gRNA
gtcctgctcacccacagtac

SEQ ID NO: 84981 - DNA, 20 bp, Artificial Sequence
  MKO10084981_B_Fam50a
  gRNA
aagaagcttgtgtccacatc

SEQ ID NO: 84982 - DNA, 20 bp, Artificial Sequence
  MKO10084982_B_Fam50b
  gRNA
tgctcatgcgcaccgtgcgc

SEQ ID NO: 84983 - DNA, 20 bp, Artificial Sequence
  MKO10084983_B_Fam50b
  gRNA
ggaggagaaccggttgcgcg

SEQ ID NO: 84984 - DNA, 20 bp, Artificial Sequence
  MKO10084984_B_Fam50b
  gRNA
gccgcagttcctcgcgcaac

SEQ ID NO: 84985 - DNA, 20 bp, Artificial Sequence
  MKO10084985_B_Fam53a
  gRNA
cacttaccgctgatctccaa

SEQ ID NO: 84986 - DNA, 20 bp, Artificial Sequence
  MKO10084986_B_Fam53a
  gRNA
gccctgacagccccagtatc

SEQ ID NO: 84987 - DNA, 20 bp, Artificial Sequence
  MKO10084987_B_Fam53a
  gRNA
actcaccgggccagcctcac

SEQ ID NO: 84988 - DNA, 20 bp, Artificial Sequence
  MKO10084988_B_Fam53b
  gRNA
agggggatccggccacatcc

SEQ ID NO: 84989 - DNA, 20 bp, Artificial Sequence
  MKO10084989_B_Fam53b
  gRNA
gtaggtccttgactcatctt

SEQ ID NO: 84990 - DNA, 20 bp, Artificial Sequence
  MKO10084990_B_Fam53b
  gRNA
cacacgccaaagatgagtca

SEQ ID NO: 84991 - DNA, 20 bp, Artificial Sequence
  MKO10084991_B_Fam53c
  gRNA
tgcttcctgcagtcccgtcg

SEQ ID NO: 84992 - DNA, 20 bp, Artificial Sequence
  MKO10084992_B_Fam53c
  gRNA
gcgtgcatttcagctcatcc

SEQ ID NO: 84993 - DNA, 20 bp, Artificial Sequence
  MKO10084993_B_Fam53c
  gRNA
tgaaccctcgacgggactgc

SEQ ID NO: 84994 - DNA, 20 bp, Artificial Sequence
  MKO10084994_B_Fam57a
  gRNA
gcagcatacgcttctttaca

SEQ ID NO: 84995 - DNA, 20 bp, Artificial Sequence
  MKO10084995_B_Fam57a
  gRNA
catcatctcctgcaagaacg

SEQ ID NO: 84996 - DNA, 20 bp, Artificial Sequence
  MKO10084996_B_Fam57a
  gRNA
acagaaaggtggtcaccgtg

SEQ ID NO: 84997 - DNA, 20 bp, Artificial Sequence
  MKO10084997_B_Fam57b
  gRNA
cgaggagcagtgcggcgccc

SEQ ID NO: 84998 - DNA, 20 bp, Artificial Sequence
  MKO10084998_B_Fam57b
  gRNA
cagcactcctttcgtctgcc

SEQ ID NO: 84999 - DNA, 20 bp, Artificial Sequence
  MKO10084999_B_Fam57b
  gRNA
ttcccctaggtgtggcgaca

SEQ ID NO: 85000 - DNA, 20 bp, Artificial Sequence
  MKO10085000_B_Fam58b
  gRNA
aatggtgcaagcggtggcga

SEQ ID NO: 85001 - DNA, 20 bp, Artificial Sequence
  MKO10085001_B_Fam58b
  gRNA
agacagctgcgaaagcgggc

SEQ ID NO: 85002 - DNA, 20 bp, Artificial Sequence
  MKO10085002_B_Fam58b
  gRNA
cggcgccgcgagccgaggag

SEQ ID NO: 85003 - DNA, 20 bp, Artificial Sequence
  MKO10085003_B_Fam60a
  gRNA
gtgtgctgcttgtgaaaaga

SEQ ID NO: 85004 - DNA, 20 bp, Artificial Sequence
  MKO10085004_B_Fam60a
  gRNA
ccttctgcagtttgctgatc

SEQ ID NO: 85005 - DNA, 20 bp, Artificial Sequence
  MKO10085005_B_Fam60a
  gRNA
ctacagtaaccagtcagatg

SEQ ID NO: 85006 - DNA, 20 bp, Artificial Sequence
  MKO10085006_B_Fam63a
  gRNA
ccttcaacttaactttcagc

SEQ ID NO: 85007 - DNA, 20 bp, Artificial Sequence
  MKO10085007_B_Fam63a
  gRNA
cggggtccgttctcccttcc

SEQ ID NO: 85008 - DNA, 20 bp, Artificial Sequence
  MKO10085008_B_Fam63a
  gRNA
atcactcaccaaggtgtgtc

SEQ ID NO: 85009 - DNA, 20 bp, Artificial Sequence
  MKO10085009_B_Fam63b
  gRNA
gacgtgaatgtcaggttcac

SEQ ID NO: 85010 - DNA, 20 bp, Artificial Sequence
  MKO10085010_B_Fam63b
  gRNA
cataactgcggagcagctga

SEQ ID NO: 85011 - DNA, 20 bp, Artificial Sequence
  MKO10085011_B_Fam63b
  gRNA
ggtgaaacttccaccaatga

SEQ ID NO: 85012 - DNA, 20 bp, Artificial Sequence
  MKO10085012_B_Fam64a
  gRNA
cgcatgcccatcgccgtcag

SEQ ID NO: 85013 - DNA, 20 bp, Artificial Sequence
  MKO10085013_B_Fam64a
  gRNA
gtctcccttatccgtgaatg

SEQ ID NO: 85014 - DNA, 20 bp, Artificial Sequence
  MKO10085014_B_Fam64a
  gRNA
gctgtcctcattcacggata

SEQ ID NO: 85015 - DNA, 20 bp, Artificial Sequence
  MKO10085015_B_Fam65a
  gRNA
cactaggcgggaattccttt

SEQ ID NO: 85016 - DNA, 20 bp, Artificial Sequence
  MKO10085016_B_Fam65a
  gRNA
gtagggcttcctgtatgact

SEQ ID NO: 85017 - DNA, 20 bp, Artificial Sequence
  MKO10085017_B_Fam65a
  gRNA
ttaccttgtccaagtcatac

SEQ ID NO: 85018 - DNA, 20 bp, Artificial Sequence
  MKO10085018_B_Fam65b
  gRNA
tatgaagagaaactctcgcc

SEQ ID NO: 85019 - DNA, 20 bp, Artificial Sequence
  MKO10085019_B_Fam65b
  gRNA
tagacctcctccactctctt

SEQ ID NO: 85020 - DNA, 20 bp, Artificial Sequence
  MKO10085020_B_Fam65b
  gRNA
ctgaggcttcttgagagccg

SEQ ID NO: 85021 - DNA, 20 bp, Artificial Sequence
  MKO10085021_B_Fam65c
  gRNA
gcaggccttctactatgacc

SEQ ID NO: 85022 - DNA, 20 bp, Artificial Sequence
  MKO10085022_B_Fam65c
  gRNA
atctttgacgctttgaagag

SEQ ID NO: 85023 - DNA, 20 bp, Artificial Sequence
  MKO10085023_B_Fam65c
  gRNA
ctgggggaagcaactgcgcc

SEQ ID NO: 85024 - DNA, 20 bp, Artificial Sequence
  MKO10085024_B_Fam69a
  gRNA
tgcaggtccgtcaataactc

SEQ ID NO: 85025 - DNA, 20 bp, Artificial Sequence
  MKO10085025_B_Fam69a
  gRNA
tgctatttgataaaccaacc

SEQ ID NO: 85026 - DNA, 20 bp, Artificial Sequence
  MKO10085026_B_Fam69a
  gRNA
tttctgtacagtagttcccc

SEQ ID NO: 85027 - DNA, 20 bp, Artificial Sequence
  MKO10085027_B_Fam69b
  gRNA
catctcccggaactccttga

SEQ ID NO: 85028 - DNA, 20 bp, Artificial Sequence
  MKO10085028_B_Fam69b
  gRNA
gcagacttacgatcaccacc

SEQ ID NO: 85029 - DNA, 20 bp, Artificial Sequence
  MKO10085029_B_Fam69b
  gRNA
actccttctaggtgtacagt

SEQ ID NO: 85030 - DNA, 20 bp, Artificial Sequence
  MKO10085030_B_Fam69c
  gRNA
ctgagaacttcgccatcaag

SEQ ID NO: 85031 - DNA, 20 bp, Artificial Sequence
  MKO10085031_B_Fam69c
  gRNA
gcttcggctgcagctacagc

SEQ ID NO: 85032 - DNA, 20 bp, Artificial Sequence
  MKO10085032_B_Fam69c
  gRNA
ggctgtccaggaattccccg

SEQ ID NO: 85033 - DNA, 20 bp, Artificial Sequence
  MKO10085033_B_Fam71a
  gRNA
gcccaccctcttgctcgtag

SEQ ID NO: 85034 - DNA, 20 bp, Artificial Sequence
  MKO10085034_B_Fam71a
  gRNA
tgccgacttcagcaccactc

SEQ ID NO: 85035 - DNA, 20 bp, Artificial Sequence
  MKO10085035_B_Fam71a
  gRNA
gctgaagtcggcatgttcaa

SEQ ID NO: 85036 - DNA, 20 bp, Artificial Sequence
  MKO10085036_B_Fam71b
  gRNA
ggaaaagttcccaccaccgc

SEQ ID NO: 85037 - DNA, 20 bp, Artificial Sequence
  MKO10085037_B_Fam71b
  gRNA
gtcaacgcttgtctcgccag

SEQ ID NO: 85038 - DNA, 20 bp, Artificial Sequence
  MKO10085038_B_Fam71b
  gRNA
gtgcatcgcatctaccagcc

SEQ ID NO: 85039 - DNA, 20 bp, Artificial Sequence
  MKO10085039_B_Fam71d
  gRNA
cgcaggctcgatggacatca

SEQ ID NO: 85040 - DNA, 20 bp, Artificial Sequence
  MKO10085040_B_Fam71d
  gRNA
tgctactgacctggattccg

SEQ ID NO: 85041 - DNA, 20 bp, Artificial Sequence
  MKO10085041_B_Fam71d
  gRNA
cttgtagactcctatgtttc

SEQ ID NO: 85042 - DNA, 20 bp, Artificial Sequence
  MKO10085042_B_Fam71e1
  gRNA
tgttggcgacttctccaaac

SEQ ID NO: 85043 - DNA, 20 bp, Artificial Sequence
  MKO10085043_B_Fam71e1
  gRNA
aggtggcgttggaggcgccc

SEQ ID NO: 85044 - DNA, 20 bp, Artificial Sequence
  MKO10085044_B_Fam71e1
  gRNA
ggcagcctctagtcctgccc

SEQ ID NO: 85045 - DNA, 20 bp, Artificial Sequence
  MKO10085045_B_Fam71e2
  gRNA
gacacccatagtcagcttgt

SEQ ID NO: 85046 - DNA, 20 bp, Artificial Sequence
  MKO10085046_B_Fam71e2
  gRNA
gaccaagatgaagctgacca

SEQ ID NO: 85047 - DNA, 20 bp, Artificial Sequence
  MKO10085047_B_Fam71e2
  gRNA
caccttggtcagcttcatct

SEQ ID NO: 85048 - DNA, 20 bp, Artificial Sequence
  MKO10085048_B_Fam71f1
  gRNA
ccttatgcagaatttgaacc

SEQ ID NO: 85049 - DNA, 20 bp, Artificial Sequence
  MKO10085049_B_Fam71f1
  gRNA
ttagtgcagaagaaatcgaa

SEQ ID NO: 85050 - DNA, 20 bp, Artificial Sequence
  MKO10085050_B_Fam71f1
  gRNA
ctgtttctgctgatgcaagt

SEQ ID NO: 85051 - DNA, 20 bp, Artificial Sequence
  MKO10085051_B_Fam71f2
  gRNA
gcattatggcctcgctgttc

SEQ ID NO: 85052 - DNA, 20 bp, Artificial Sequence
  MKO10085052_B_Fam71f2
  gRNA
ggcaccaagtgtgctacagg

SEQ ID NO: 85053 - DNA, 20 bp, Artificial Sequence
  MKO10085053_B_Fam71f2
  gRNA
ctccctaggagagaacttgt

SEQ ID NO: 85054 - DNA, 20 bp, Artificial Sequence
  MKO10085054_B_Fam72a
  gRNA
ccagaagtgtccattgttgc

SEQ ID NO: 85055 - DNA, 20 bp, Artificial Sequence
  MKO10085055_B_Fam72a
  gRNA
caggtgtaaacctcctactt

SEQ ID NO: 85056 - DNA, 20 bp, Artificial Sequence
  MKO10085056_B_Fam72a
  gRNA
tccagcacagtggatttcat

SEQ ID NO: 85057 - DNA, 20 bp, Artificial Sequence
  MKO10085057_B_Fam73a
  gRNA
atcatcgtctgctttgtccc

SEQ ID NO: 85058 - DNA, 20 bp, Artificial Sequence
  MKO10085058_B_Fam73a
  gRNA
aggaggtgctcgggttccca

SEQ ID NO: 85059 - DNA, 20 bp, Artificial Sequence
  MKO10085059_B_Fam73a
  gRNA
atgaacagcttcttagctac

SEQ ID NO: 85060 - DNA, 20 bp, Artificial Sequence
  MKO10085060_B_Fam73b
  gRNA
aagagcaacgacactcttag

SEQ ID NO: 85061 - DNA, 20 bp, Artificial Sequence
  MKO10085061_B_Fam73b
  gRNA
gggttctggaggctgtcgcc

SEQ ID NO: 85062 - DNA, 20 bp, Artificial Sequence
  MKO10085062_B_Fam73b
  gRNA
agccctacagctgcgtgctc

SEQ ID NO: 85063 - DNA, 20 bp, Artificial Sequence
  MKO10085063_B_Fam76a
  gRNA
gctcagaatgtacagttgta

SEQ ID NO: 85064 - DNA, 20 bp, Artificial Sequence
  MKO10085064_B_Fam76a
  gRNA
acaaattcagagaagaagta

SEQ ID NO: 85065 - DNA, 20 bp, Artificial Sequence
  MKO10085065_B_Fam76a
  gRNA
tcaggggcagcagctgtgca

SEQ ID NO: 85066 - DNA, 20 bp, Artificial Sequence
  MKO10085066_B_Fam76b
  gRNA
taaaactctcttgtatgaca

SEQ ID NO: 85067 - DNA, 20 bp, Artificial Sequence
  MKO10085067_B_Fam76b
  gRNA
attatgttacagtactgaca

SEQ ID NO: 85068 - DNA, 20 bp, Artificial Sequence
  MKO10085068_B_Fam76b
  gRNA
ctgcagatcagaatttcagc

SEQ ID NO: 85069 - DNA, 20 bp, Artificial Sequence
  MKO10085069_B_Fam78a
  gRNA
ggtgggccccacaatcgtgc

SEQ ID NO: 85070 - DNA, 20 bp, Artificial Sequence
  MKO10085070_B_Fam78a
  gRNA
acatgccctgctccccgtac

SEQ ID NO: 85071 - DNA, 20 bp, Artificial Sequence
  MKO10085071_B_Fam78a
  gRNA
gctctggtcccggtagatgt

SEQ ID NO: 85072 - DNA, 20 bp, Artificial Sequence
  MKO10085072_B_Fam78b
  gRNA
tctgtcgtgttcccgtacca

SEQ ID NO: 85073 - DNA, 20 bp, Artificial Sequence
  MKO10085073_B_Fam78b
  gRNA
acaccacgatgttctcgcgc

SEQ ID NO: 85074 - DNA, 20 bp, Artificial Sequence
  MKO10085074_B_Fam78b
  gRNA
ccagtgccccacgcgcatcg

SEQ ID NO: 85075 - DNA, 20 bp, Artificial Sequence
  MKO10085075_B_Fam81a
  gRNA
taattctgccttaaagacgc

SEQ ID NO: 85076 - DNA, 20 bp, Artificial Sequence
  MKO10085076_B_Fam81a
  gRNA
ccgattcagttgcttcacaa

SEQ ID NO: 85077 - DNA, 20 bp, Artificial Sequence
  MKO10085077_B_Fam81a
  gRNA
gggtggcttacttagtgtcc

SEQ ID NO: 85078 - DNA, 20 bp, Artificial Sequence
  MKO10085078_B_Fam83a
  gRNA
cagtactcacctgtatgatc

SEQ ID NO: 85079 - DNA, 20 bp, Artificial Sequence
  MKO10085079_B_Fam83a
  gRNA
caccgcttgccccgtgaact

SEQ ID NO: 85080 - DNA, 20 bp, Artificial Sequence
  MKO10085080_B_Fam83a
  gRNA
cgccccgttccaacccaaca

SEQ ID NO: 85081 - DNA, 20 bp, Artificial Sequence
  MKO10085081_B_Fam83b
  gRNA
tacgtgatgcccggactctt

SEQ ID NO: 85082 - DNA, 20 bp, Artificial Sequence
  MKO10085082_B_Fam83b
  gRNA
gttgtcaaattcaacgtctc

SEQ ID NO: 85083 - DNA, 20 bp, Artificial Sequence
  MKO10085083_B_Fam83b
  gRNA
aattgcagaacattcgcata

SEQ ID NO: 85084 - DNA, 20 bp, Artificial Sequence
  MKO10085084_B_Fam83c
  gRNA
gatctgaaagttgacgatac

SEQ ID NO: 85085 - DNA, 20 bp, Artificial Sequence
  MKO10085085_B_Fam83c
  gRNA
caacggccgcgtggaaggct

SEQ ID NO: 85086 - DNA, 20 bp, Artificial Sequence
  MKO10085086_B_Fam83c
  gRNA
aggcctccatcaggtcgcac

SEQ ID NO: 85087 - DNA, 20 bp, Artificial Sequence
  MKO10085087_B_Fam83d
  gRNA
cgacatcttccgagacctgc

SEQ ID NO: 85088 - DNA, 20 bp, Artificial Sequence
  MKO10085088_B_Fam83d
  gRNA
tgggcaatctgctgcgaatg

SEQ ID NO: 85089 - DNA, 20 bp, Artificial Sequence
  MKO10085089_B_Fam83d
  gRNA
gggtggcaacaggctcttac

SEQ ID NO: 85090 - DNA, 20 bp, Artificial Sequence
  MKO10085090_B_Fam83e
  gRNA
ggagtgactcacgcctgcac

SEQ ID NO: 85091 - DNA, 20 bp, Artificial Sequence
  MKO10085091_B_Fam83e
  gRNA
tggatgctgctacccgccga

SEQ ID NO: 85092 - DNA, 20 bp, Artificial Sequence
  MKO10085092_B_Fam83e
  gRNA
cgggctggaatcgagggtag

SEQ ID NO: 85093 - DNA, 20 bp, Artificial Sequence
  MKO10085093_B_Fam83f
  gRNA
tacaggaacccggcgtttac

SEQ ID NO: 85094 - DNA, 20 bp, Artificial Sequence
  MKO10085094_B_Fam83f
  gRNA
ctttgtccccatcgaccatc

SEQ ID NO: 85095 - DNA, 20 bp, Artificial Sequence
  MKO10085095_B_Fam83f
  gRNA
aattgggttctacatgccca

SEQ ID NO: 85096 - DNA, 20 bp, Artificial Sequence
  MKO10085096_B_Fam83g
  gRNA
gcccgggatggtagtgatat

SEQ ID NO: 85097 - DNA, 20 bp, Artificial Sequence
  MKO10085097_B_Fam83g
  gRNA
catgcacctggggcacctca

SEQ ID NO: 85098 - DNA, 20 bp, Artificial Sequence
  MKO10085098_B_Fam83g
  gRNA
gggccgtgtgtggctcctac

SEQ ID NO: 85099 - DNA, 20 bp, Artificial Sequence
  MKO10085099_B_Fam83h
  gRNA
gactgtgccgtagtgatgag

SEQ ID NO: 85100 - DNA, 20 bp, Artificial Sequence
  MKO10085100_B_Fam83h
  gRNA
gatgatccgctctgcccagc

SEQ ID NO: 85101 - DNA, 20 bp, Artificial Sequence
  MKO10085101_B_Fam83h
  gRNA
tggcggcggctgtaccagtg

SEQ ID NO: 85102 - DNA, 20 bp, Artificial Sequence
  MKO10085102_B_Fam84a
  gRNA
aagcgtcgcatagacgccag

SEQ ID NO: 85103 - DNA, 20 bp, Artificial Sequence
  MKO10085103_B_Fam84a
  gRNA
tgtcctggcggatctcgcct

SEQ ID NO: 85104 - DNA, 20 bp, Artificial Sequence
  MKO10085104_B_Fam84a
  gRNA
gaccgcgtagacactcaagt

SEQ ID NO: 85105 - DNA, 20 bp, Artificial Sequence
  MKO10085105_B_Fam84b
  gRNA
gcaccgccgcgcgtccgatc

SEQ ID NO: 85106 - DNA, 20 bp, Artificial Sequence
  MKO10085106_B_Fam84b
  gRNA
tgaactcgcgtttgccatag

SEQ ID NO: 85107 - DNA, 20 bp, Artificial Sequence
  MKO10085107_B_Fam84b
  gRNA
cgagacgatgggccccgcat

SEQ ID NO: 85108 - DNA, 20 bp, Artificial Sequence
  MKO10085108_B_Fam86
  gRNA
agcactgccatcgtgtccca

SEQ ID NO: 85109 - DNA, 20 bp, Artificial Sequence
  MKO10085109_B_Fam86
  gRNA
caccacaggcttggttacat

SEQ ID NO: 85110 - DNA, 20 bp, Artificial Sequence
  MKO10085110_B_Fam86
  gRNA
cagcaacagctcagaacccg

SEQ ID NO: 85111 - DNA, 20 bp, Artificial Sequence
  MKO10085111_B_Fam89a
  gRNA
gaagccattctccagcgcat

SEQ ID NO: 85112 - DNA, 20 bp, Artificial Sequence
  MKO10085112_B_Fam89a
  gRNA
ccgagtgcagcagcccgctc

SEQ ID NO: 85113 - DNA, 20 bp, Artificial Sequence
  MKO10085113_B_Fam89a
  gRNA
cgcgctggcgctgttgcgca

SEQ ID NO: 85114 - DNA, 20 bp, Artificial Sequence
  MKO10085114_B_Fam89b
  gRNA
ctcacaatgcccgtgaccag

SEQ ID NO: 85115 - DNA, 20 bp, Artificial Sequence
  MKO10085115_B_Fam89b
  gRNA
tgcactagccgcgctgcgca

SEQ ID NO: 85116 - DNA, 20 bp, Artificial Sequence
  MKO10085116_B_Fam89b
  gRNA
ccgctgaggccgcgcggtag

SEQ ID NO: 85117 - DNA, 20 bp, Artificial Sequence
  MKO10085117_B_Fam92a
  gRNA
ttctaactgagatagctgtt

SEQ ID NO: 85118 - DNA, 20 bp, Artificial Sequence
  MKO10085118_B_Fam92a
  gRNA
tactcgcttcatctttacaa

SEQ ID NO: 85119 - DNA, 20 bp, Artificial Sequence
  MKO10085119_B_Fam92a
  gRNA
tttcaaaggttcaactactt

SEQ ID NO: 85120 - DNA, 20 bp, Artificial Sequence
  MKO10085120_B_Fam92b
  gRNA
tcacccgggtctgctttatt

SEQ ID NO: 85121 - DNA, 20 bp, Artificial Sequence
  MKO10085121_B_Fam92b
  gRNA
gttgtttaatctcgttattt

SEQ ID NO: 85122 - DNA, 20 bp, Artificial Sequence
  MKO10085122_B_Fam92b
  gRNA
tgcccaaataaagcagaccc

SEQ ID NO: 85123 - DNA, 20 bp, Artificial Sequence
  MKO10085123_B_Fam96a
  gRNA
tagatttgattcgaactatc

SEQ ID NO: 85124 - DNA, 20 bp, Artificial Sequence
  MKO10085124_B_Fam96a
  gRNA
ttccagttcttctaaagtat

SEQ ID NO: 85125 - DNA, 20 bp, Artificial Sequence
  MKO10085125_B_Fam96a
  gRNA
cttcttaccttgtgtttgaa

SEQ ID NO: 85126 - DNA, 20 bp, Artificial Sequence
  MKO10085126_B_Fam96b
  gRNA
tccacactaacctgcatgct

SEQ ID NO: 85127 - DNA, 20 bp, Artificial Sequence
  MKO10085127_B_Fam96b
  gRNA
ggagaatacacacctgcttg

SEQ ID NO: 85128 - DNA, 20 bp, Artificial Sequence
  MKO10085128_B_Fam96b
  gRNA
gctccgggtcattaatggag

SEQ ID NO: 85129 - DNA, 20 bp, Artificial Sequence
  MKO10085129_B_Fam98a
  gRNA
aaaagttccgcctaatcatg

SEQ ID NO: 85130 - DNA, 20 bp, Artificial Sequence
  MKO10085130_B_Fam98a
  gRNA
ccgtatccttctctgacatc

SEQ ID NO: 85131 - DNA, 20 bp, Artificial Sequence
  MKO10085131_B_Fam98a
  gRNA
cttctcaacaagaaggcgct

SEQ ID NO: 85132 - DNA, 20 bp, Artificial Sequence
  MKO10085132_B_Fam98b
  gRNA
taaagagcgcctcacaaaga

SEQ ID NO: 85133 - DNA, 20 bp, Artificial Sequence
  MKO10085133_B_Fam98b
  gRNA
cttaaatcaacctttagcaa

SEQ ID NO: 85134 - DNA, 20 bp, Artificial Sequence
  MKO10085134_B_Fam98b
  gRNA
caagctgtatgtgatgccct

SEQ ID NO: 85135 - DNA, 20 bp, Artificial Sequence
  MKO10085135_B_Fam98c
  gRNA
ccgccgcagagcgcgcgatc

SEQ ID NO: 85136 - DNA, 20 bp, Artificial Sequence
  MKO10085136_B_Fam98c
  gRNA
gacgctaactcttcaagccc

SEQ ID NO: 85137 - DNA, 20 bp, Artificial Sequence
  MKO10085137_B_Fam98c
  gRNA
gtgcaacgcccgcagccagc

SEQ ID NO: 85138 - DNA, 20 bp, Artificial Sequence
  MKO10085138_B_Fan1
  gRNA
aacagcgctcagtctgcacg

SEQ ID NO: 85139 - DNA, 20 bp, Artificial Sequence
  MKO10085139_B_Fan1
  gRNA
tctttcaacgtaaattaacc

SEQ ID NO: 85140 - DNA, 20 bp, Artificial Sequence
  MKO10085140_B_Fan1
  gRNA
cgtgcagactgagcgctgtt

SEQ ID NO: 85141 - DNA, 20 bp, Artificial Sequence
  MKO10085141_B_Fanca
  gRNA
cacactgcgagcaaacactt

SEQ ID NO: 85142 - DNA, 20 bp, Artificial Sequence
  MKO10085142_B_Fanca
  gRNA
cttccttactaatgattgcc

SEQ ID NO: 85143 - DNA, 20 bp, Artificial Sequence
  MKO10085143_B_Fanca
  gRNA
ctcccgtctcaccttctgtc

SEQ ID NO: 85144 - DNA, 20 bp, Artificial Sequence
  MKO10085144_B_Fancb
  gRNA
ctaagtcatcatctagtaca

SEQ ID NO: 85145 - DNA, 20 bp, Artificial Sequence
  MKO10085145_B_Fancb
  gRNA
tgaagaccctttggctgaag

SEQ ID NO: 85146 - DNA, 20 bp, Artificial Sequence
  MKO10085146_B_Fancb
  gRNA
tctttcaggttgttgctaag

SEQ ID NO: 85147 - DNA, 20 bp, Artificial Sequence
  MKO10085147_B_Fancc
  gRNA
gtctgatgaacaaagaacct

SEQ ID NO: 85148 - DNA, 20 bp, Artificial Sequence
  MKO10085148_B_Fancc
  gRNA
ctcagagagagtcatcttaa

SEQ ID NO: 85149 - DNA, 20 bp, Artificial Sequence
  MKO10085149_B_Fancc
  gRNA
agactcatatccaagacttt

SEQ ID NO: 85150 - DNA, 20 bp, Artificial Sequence
  MKO10085150_B_Fancd2os
  gRNA
tgtaagtcgcatacagcaag

SEQ ID NO: 85151 - DNA, 20 bp, Artificial Sequence
  MKO10085151_B_Fancd2os
  gRNA
cacccctttcttgttactca

SEQ ID NO: 85152 - DNA, 20 bp, Artificial Sequence
  MKO10085152_B_Fancd2os
  gRNA
tgtcctagacagaccacttg

SEQ ID NO: 85153 - DNA, 20 bp, Artificial Sequence
  MKO10085153_B_Fancd2
  gRNA
aagtagcttgatcagactct

SEQ ID NO: 85154 - DNA, 20 bp, Artificial Sequence
  MKO10085154_B_Fancd2
  gRNA
gtgagacttctttgccagct

SEQ ID NO: 85155 - DNA, 20 bp, Artificial Sequence
  MKO10085155_B_Fancd2
  gRNA
gctgtcttgtgagcgcctgc

SEQ ID NO: 85156 - DNA, 20 bp, Artificial Sequence
  MKO10085156_B_Fance
  gRNA
accggaggagagacccacgc

SEQ ID NO: 85157 - DNA, 20 bp, Artificial Sequence
  MKO10085157_B_Fance
  gRNA
tcatgaatgtagtcccagcg

SEQ ID NO: 85158 - DNA, 20 bp, Artificial Sequence
  MKO10085158_B_Fance
  gRNA
agagcttgtcacctcctgga

SEQ ID NO: 85159 - DNA, 20 bp, Artificial Sequence
  MKO10085159_B_Fancf
  gRNA
ccgcgaagcgtcggtacacg

SEQ ID NO: 85160 - DNA, 20 bp, Artificial Sequence
  MKO10085160_B_Fancf
  gRNA
cagatcatagtgcagccgcg

SEQ ID NO: 85161 - DNA, 20 bp, Artificial Sequence
  MKO10085161_B_Fancf
  gRNA
acgtcgagcacgtgctcccg

SEQ ID NO: 85162 - DNA, 20 bp, Artificial Sequence
  MKO10085162_B_Fancg
  gRNA
cgattgctgtcgcctcagag

SEQ ID NO: 85163 - DNA, 20 bp, Artificial Sequence
  MKO10085163_B_Fancg
  gRNA
ctctctgaggcgacagcaat

SEQ ID NO: 85164 - DNA, 20 bp, Artificial Sequence
  MKO10085164_B_Fancg
  gRNA
gattgctagaccttggcggc

SEQ ID NO: 85165 - DNA, 20 bp, Artificial Sequence
  MKO10085165_B_Fanci
  gRNA
cagctcttcctttcaccgct

SEQ ID NO: 85166 - DNA, 20 bp, Artificial Sequence
  MKO10085166_B_Fanci
  gRNA
aatcacctttcccacaagcg

SEQ ID NO: 85167 - DNA, 20 bp, Artificial Sequence
  MKO10085167_B_Fanci
  gRNA
gcgccaatcacctttgagga

SEQ ID NO: 85168 - DNA, 20 bp, Artificial Sequence
  MKO10085168_B_Fancl
  gRNA
accttgccttcttgagctgc

SEQ ID NO: 85169 - DNA, 20 bp, Artificial Sequence
  MKO10085169_B_Fancl
  gRNA
gacatacttatcccaaccaa

SEQ ID NO: 85170 - DNA, 20 bp, Artificial Sequence
  MKO10085170_B_Fancl
  gRNA
atcataaaactcattagatc

SEQ ID NO: 85171 - DNA, 20 bp, Artificial Sequence
  MKO10085171_B_Fancm
  gRNA
caccactcactttcgtatct

SEQ ID NO: 85172 - DNA, 20 bp, Artificial Sequence
  MKO10085172_B_Fancm
  gRNA
ttctgtataggctgtgcaac

SEQ ID NO: 85173 - DNA, 20 bp, Artificial Sequence
  MKO10085173_B_Fancm
  gRNA
cacgccaggtagtgatatca

SEQ ID NO: 85174 - DNA, 20 bp, Artificial Sequence
  MKO10085174_B_Fank1
  gRNA
agatctcctgcttcgaattt

SEQ ID NO: 85175 - DNA, 20 bp, Artificial Sequence
  MKO10085175_B_Fank1
  gRNA
atcacagcatcgaattgtac

SEQ ID NO: 85176 - DNA, 20 bp, Artificial Sequence
  MKO10085176_B_Fank1
  gRNA
tgggcacgtcaatcatgaca

SEQ ID NO: 85177 - DNA, 20 bp, Artificial Sequence
  MKO10085177_B_Fap
  gRNA
ccatttacctgaaatccagt

SEQ ID NO: 85178 - DNA, 20 bp, Artificial Sequence
  MKO10085178_B_Fap
  gRNA
agtgtgaatgctacagatta

SEQ ID NO: 85179 - DNA, 20 bp, Artificial Sequence
  MKO10085179_B_Fap
  gRNA
agaatatcttcatcaatctg

SEQ ID NO: 85180 - DNA, 20 bp, Artificial Sequence
  MKO10085180_B_Far1
  gRNA
gtgtagctatcacatttaac

SEQ ID NO: 85181 - DNA, 20 bp, Artificial Sequence
  MKO10085181_B_Far1
  gRNA
accgcaatgaagagaccact

SEQ ID NO: 85182 - DNA, 20 bp, Artificial Sequence
  MKO10085182_B_Far1
  gRNA
tgaacttacccaacctaaac

SEQ ID NO: 85183 - DNA, 20 bp, Artificial Sequence
  MKO10085183_B_Far2
  gRNA
gagatcactcctaagctgat

SEQ ID NO: 85184 - DNA, 20 bp, Artificial Sequence
  MKO10085184_B_Far2
  gRNA
ggtagatgacctcatcaatg

SEQ ID NO: 85185 - DNA, 20 bp, Artificial Sequence
  MKO10085185_B_Far2
  gRNA
gcgtgacttcgccatcagca

SEQ ID NO: 85186 - DNA, 20 bp, Artificial Sequence
  MKO10085186_B_Farp1
  gRNA
gcttcacctgcagagcgaac

SEQ ID NO: 85187 - DNA, 20 bp, Artificial Sequence
  MKO10085187_B_Farp1
  gRNA
acttcgaatctgcttcacaa

SEQ ID NO: 85188 - DNA, 20 bp, Artificial Sequence
  MKO10085188_B_Farp1
  gRNA
caggtacctgttcgctctgc

SEQ ID NO: 85189 - DNA, 20 bp, Artificial Sequence
  MKO10085189_B_Farp2
  gRNA
acttcgtacttgcctaatga

SEQ ID NO: 85190 - DNA, 20 bp, Artificial Sequence
  MKO10085190_B_Farp2
  gRNA
aacctatgaaacccatcatt

SEQ ID NO: 85191 - DNA, 20 bp, Artificial Sequence
  MKO10085191_B_Farp2
  gRNA
gcaactcaagagagacctcc

SEQ ID NO: 85192 - DNA, 20 bp, Artificial Sequence
  MKO10085192_B_Fars2
  gRNA
gcctagtcagtacttgttta

SEQ ID NO: 85193 - DNA, 20 bp, Artificial Sequence
  MKO10085193_B_Fars2
  gRNA
gctccatcacaccgcagcca

SEQ ID NO: 85194 - DNA, 20 bp, Artificial Sequence
  MKO10085194_B_Fars2
  gRNA
agatcaacttccgtggagaa

SEQ ID NO: 85195 - DNA, 20 bp, Artificial Sequence
  MKO10085195_B_Farsa
  gRNA
cttagacacgcttgtgctga

SEQ ID NO: 85196 - DNA, 20 bp, Artificial Sequence
  MKO10085196_B_Farsa
  gRNA
agtgcagaagcggttgcagc

SEQ ID NO: 85197 - DNA, 20 bp, Artificial Sequence
  MKO10085197_B_Farsa
  gRNA
gtttagaagcatccctctcg

SEQ ID NO: 85198 - DNA, 20 bp, Artificial Sequence
  MKO10085198_B_Farsb
  gRNA
cagatacgacctcctgtgtc

SEQ ID NO: 85199 - DNA, 20 bp, Artificial Sequence
  MKO10085199_B_Farsb
  gRNA
atataagcgagtgatgccca

SEQ ID NO: 85200 - DNA, 20 bp, Artificial Sequence
  MKO10085200_B_Farsb
  gRNA
aggactggctcggggcctcc

SEQ ID NO: 85201 - DNA, 20 bp, Artificial Sequence
  MKO10085201_B_Fasl
  gRNA
cctctgaaaaaaaagagccg

SEQ ID NO: 85202 - DNA, 20 bp, Artificial Sequence
  MKO10085202_B_Fasl
  gRNA
gtaattcatgggctgctgca

SEQ ID NO: 85203 - DNA, 20 bp, Artificial Sequence
  MKO10085203_B_Fasl
  gRNA
cagacacaaacctgttaaat

SEQ ID NO: 85204 - DNA, 20 bp, Artificial Sequence
  MKO10085204_B_Fasn
  gRNA
gcctaccaggccatccgtag

SEQ ID NO: 85205 - DNA, 20 bp, Artificial Sequence
  MKO10085205_B_Fasn
  gRNA
aaaaaaggaggcgtcgaact

SEQ ID NO: 85206 - DNA, 20 bp, Artificial Sequence
  MKO10085206_B_Fasn
  gRNA
ggctctatggattacccaag

SEQ ID NO: 85207 - DNA, 20 bp, Artificial Sequence
  MKO10085207_B_Fastkd1
  gRNA
gtcattacccactgttagag

SEQ ID NO: 85208 - DNA, 20 bp, Artificial Sequence
  MKO10085208_B_Fastkd1
  gRNA
tcacccactaatcgaagcac

SEQ ID NO: 85209 - DNA, 20 bp, Artificial Sequence
  MKO10085209_B_Fastkd1
  gRNA
gtaaccagtgcttcgattag

SEQ ID NO: 85210 - DNA, 20 bp, Artificial Sequence
  MKO10085210_B_Fastkd2
  gRNA
ctaagacttcaaacatgtgc

SEQ ID NO: 85211 - DNA, 20 bp, Artificial Sequence
  MKO10085211_B_Fastkd2
  gRNA
tcctagttgatcagcaagtt

SEQ ID NO: 85212 - DNA, 20 bp, Artificial Sequence
  MKO10085212_B_Fastkd2
  gRNA
ccttctgaatgaatgcagta

SEQ ID NO: 85213 - DNA, 20 bp, Artificial Sequence
  MKO10085213_B_Fastkd3
  gRNA
ctgctccttagagacgcccc

SEQ ID NO: 85214 - DNA, 20 bp, Artificial Sequence
  MKO10085214_B_Fastkd3
  gRNA
cctagagtgtccgttctata

SEQ ID NO: 85215 - DNA, 20 bp, Artificial Sequence
  MKO10085215_B_Fastkd3
  gRNA
atatcctcatccactgtaca

SEQ ID NO: 85216 - DNA, 20 bp, Artificial Sequence
  MKO10085216_B_Fastkd5
  gRNA
tgaaaatcgtcaagtaccac

SEQ ID NO: 85217 - DNA, 20 bp, Artificial Sequence
  MKO10085217_B_Fastkd5
  gRNA
cttgagagcggctgacattc

SEQ ID NO: 85218 - DNA, 20 bp, Artificial Sequence
  MKO10085218_B_Fastkd5
  gRNA
atagctagcttcactaatgg

SEQ ID NO: 85219 - DNA, 20 bp, Artificial Sequence
  MKO10085219_B_Fastk
  gRNA
gaagttggggttcccgcaag

SEQ ID NO: 85220 - DNA, 20 bp, Artificial Sequence
  MKO10085220_B_Fastk
  gRNA
ctgccatctatggtggtcaa

SEQ ID NO: 85221 - DNA, 20 bp, Artificial Sequence
  MKO10085221_B_Fastk
  gRNA
aatttatgccctgccttgag

SEQ ID NO: 85222 - DNA, 20 bp, Artificial Sequence
  MKO10085222_B_Fas
  gRNA
cagttaagagttcatactca

SEQ ID NO: 85223 - DNA, 20 bp, Artificial Sequence
  MKO10085223_B_Fas
  gRNA
ctgcagacatgctgtggatc

SEQ ID NO: 85224 - DNA, 20 bp, Artificial Sequence
  MKO10085224_B_Fas
  gRNA
cctcctcagctttaaactct

SEQ ID NO: 85225 - DNA, 20 bp, Artificial Sequence
  MKO10085225_B_Fat1
  gRNA
ccgggtcaaaagcctcaatc

SEQ ID NO: 85226 - DNA, 20 bp, Artificial Sequence
  MKO10085226_B_Fat1
  gRNA
gagagtcgacttcccactac

SEQ ID NO: 85227 - DNA, 20 bp, Artificial Sequence
  MKO10085227_B_Fat1
  gRNA
gtctcatcacaaccacgtcg

SEQ ID NO: 85228 - DNA, 20 bp, Artificial Sequence
  MKO10085228_B_Fat2
  gRNA
acaatggggaccccccacta

SEQ ID NO: 85229 - DNA, 20 bp, Artificial Sequence
  MKO10085229_B_Fat2
  gRNA
gaatccactcgatgtgtagc

SEQ ID NO: 85230 - DNA, 20 bp, Artificial Sequence
  MKO10085230_B_Fat2
  gRNA
cccaggaatgctcgagactc

SEQ ID NO: 85231 - DNA, 20 bp, Artificial Sequence
  MKO10085231_B_Fat3
  gRNA
ccgacgatgtcaaaccatag

SEQ ID NO: 85232 - DNA, 20 bp, Artificial Sequence
  MKO10085232_B_Fat3
  gRNA
cagaacgtgaccgcaagaag

SEQ ID NO: 85233 - DNA, 20 bp, Artificial Sequence
  MKO10085233_B_Fat3
  gRNA
ttctggatgaaaacgacaac

SEQ ID NO: 85234 - DNA, 20 bp, Artificial Sequence
  MKO10085234_B_Fat4
  gRNA
tatgtaccgagtgcagatta

SEQ ID NO: 85235 - DNA, 20 bp, Artificial Sequence
  MKO10085235_B_Fat4
  gRNA
gacgttaaacacaaggaccg

SEQ ID NO: 85236 - DNA, 20 bp, Artificial Sequence
  MKO10085236_B_Fat4
  gRNA
cgacataccatcatctgcat

SEQ ID NO: 85237 - DNA, 20 bp, Artificial Sequence
  MKO10085237_B_Fau
  gRNA
agcactcacctcccagcatg

SEQ ID NO: 85238 - DNA, 20 bp, Artificial Sequence
  MKO10085238_B_Fau
  gRNA
tgatctgggcgaccgtctcc

SEQ ID NO: 85239 - DNA, 20 bp, Artificial Sequence
  MKO10085239_B_Fau
  gRNA
gcagctctttgtccgcgccc

SEQ ID NO: 85240 - DNA, 20 bp, Artificial Sequence
  MKO10085240_B_Faxc
  gRNA
ccacggcattggccgcttct

SEQ ID NO: 85241 - DNA, 20 bp, Artificial Sequence
  MKO10085241_B_Faxc
  gRNA
ctcaagagccgtgaccaaga

SEQ ID NO: 85242 - DNA, 20 bp, Artificial Sequence
  MKO10085242_B_Faxc
  gRNA
agaattcataatcgactttc

SEQ ID NO: 85243 - DNA, 20 bp, Artificial Sequence
  MKO10085243_B_Fbf1
  gRNA
acacagcgagctcacctcag

SEQ ID NO: 85244 - DNA, 20 bp, Artificial Sequence
  MKO10085244_B_Fbf1
  gRNA
gggacttactgtcatctccc

SEQ ID NO: 85245 - DNA, 20 bp, Artificial Sequence
  MKO10085245_B_Fbf1
  gRNA
gtctccaaggacatcctcaa

SEQ ID NO: 85246 - DNA, 20 bp, Artificial Sequence
  MKO10085246_B_Fblim1
  gRNA
tcacgccataccctcggaag

SEQ ID NO: 85247 - DNA, 20 bp, Artificial Sequence
  MKO10085247_B_Fblim1
  gRNA
tcgtctgtccaccctccgcc

SEQ ID NO: 85248 - DNA, 20 bp, Artificial Sequence
  MKO10085248_B_Fblim1
  gRNA
tcaaagtttacctgtggcgg

SEQ ID NO: 85249 - DNA, 20 bp, Artificial Sequence
  MKO10085249_B_Fbll1
  gRNA
ccgtcgtcgtcggggtctat

SEQ ID NO: 85250 - DNA, 20 bp, Artificial Sequence
  MKO10085250_B_Fbll1
  gRNA
gccacgatgcgcgactgatc

SEQ ID NO: 85251 - DNA, 20 bp, Artificial Sequence
  MKO10085251_B_Fbll1
  gRNA
gagggcgtgttcatctaccg

SEQ ID NO: 85252 - DNA, 20 bp, Artificial Sequence
  MKO10085252_B_Fbln1
  gRNA
tatcatgacaatgggttcac

SEQ ID NO: 85253 - DNA, 20 bp, Artificial Sequence
  MKO10085253_B_Fbln1
  gRNA
gtcatgataagctaccagtg

SEQ ID NO: 85254 - DNA, 20 bp, Artificial Sequence
  MKO10085254_B_Fbln1
  gRNA
gccgtacacctcagaatcca

SEQ ID NO: 85255 - DNA, 20 bp, Artificial Sequence
  MKO10085255_B_Fbln2
  gRNA
cattgtcgatggcccactgc

SEQ ID NO: 85256 - DNA, 20 bp, Artificial Sequence
  MKO10085256_B_Fbln2
  gRNA
ctgcacaacaggtctcgatt

SEQ ID NO: 85257 - DNA, 20 bp, Artificial Sequence
  MKO10085257_B_Fbln2
  gRNA
gggactccgagtgcgggctg

SEQ ID NO: 85258 - DNA, 20 bp, Artificial Sequence
  MKO10085258_B_Fbln5
  gRNA
ttccagaagccagtacccat

SEQ ID NO: 85259 - DNA, 20 bp, Artificial Sequence
  MKO10085259_B_Fbln5
  gRNA
tacacctgctcctgcaccga

SEQ ID NO: 85260 - DNA, 20 bp, Artificial Sequence
  MKO10085260_B_Fbln5
  gRNA
gatactcactgttaccatct

SEQ ID NO: 85261 - DNA, 20 bp, Artificial Sequence
  MKO10085261_B_Fbln7
  gRNA
gcggctgaaggcggggtcac

SEQ ID NO: 85262 - DNA, 20 bp, Artificial Sequence
  MKO10085262_B_Fbln7
  gRNA
ccgaaacatgaagagccggc

SEQ ID NO: 85263 - DNA, 20 bp, Artificial Sequence
  MKO10085263_B_Fbln7
  gRNA
agcaagacacaccacgctgc

SEQ ID NO: 85264 - DNA, 20 bp, Artificial Sequence
  MKO10085264_B_Fbl
  gRNA
ccaggtgtctttatctgtcg

SEQ ID NO: 85265 - DNA, 20 bp, Artificial Sequence
  MKO10085265_B_Fbl
  gRNA
ggcggtggacgaggaggctt

SEQ ID NO: 85266 - DNA, 20 bp, Artificial Sequence
  MKO10085266_B_Fbl
  gRNA
tctccatacacagactctcc

SEQ ID NO: 85267 - DNA, 20 bp, Artificial Sequence
  MKO10085267_B_Fbn1
  gRNA
aatatgtgcacttgcccgtc

SEQ ID NO: 85268 - DNA, 20 bp, Artificial Sequence
  MKO10085268_B_Fbn1
  gRNA
tgcagcatccgctgtatgaa

SEQ ID NO: 85269 - DNA, 20 bp, Artificial Sequence
  MKO10085269_B_Fbn1
  gRNA
cgagcagaatccatccccac

SEQ ID NO: 85270 - DNA, 20 bp, Artificial Sequence
  MKO10085270_B_Fbn2
  gRNA
aagttccgatgtatcccttc

SEQ ID NO: 85271 - DNA, 20 bp, Artificial Sequence
  MKO10085271_B_Fbn2
  gRNA
ctctacaggcccaacgtgtg

SEQ ID NO: 85272 - DNA, 20 bp, Artificial Sequence
  MKO10085272_B_Fbn2
  gRNA
cttgatttggctccgcatgt

SEQ ID NO: 85273 - DNA, 20 bp, Artificial Sequence
  MKO10085273_B_Fbp1
  gRNA
actgccatagagcgcatacc

SEQ ID NO: 85274 - DNA, 20 bp, Artificial Sequence
  MKO10085274_B_Fbp1
  gRNA
gtctgtttcgatccccttga

SEQ ID NO: 85275 - DNA, 20 bp, Artificial Sequence
  MKO10085275_B_Fbp1
  gRNA
taacatctacagccttaatg

SEQ ID NO: 85276 - DNA, 20 bp, Artificial Sequence
  MKO10085276_B_Fbp2
  gRNA
tcttggagaattcgtgctag

SEQ ID NO: 85277 - DNA, 20 bp, Artificial Sequence
  MKO10085277_B_Fbp2
  gRNA
ggacgtgctgtccaactccc

SEQ ID NO: 85278 - DNA, 20 bp, Artificial Sequence
  MKO10085278_B_Fbp2
  gRNA
tgtgatgtaggggaaatatg

SEQ ID NO: 85279 - DNA, 20 bp, Artificial Sequence
  MKO10085279_B_Fbrsl1
  gRNA
aagtgtgaactgcactcgac

SEQ ID NO: 85280 - DNA, 20 bp, Artificial Sequence
  MKO10085280_B_Fbrsl1
  gRNA
aggctgctggcgggcaacgc

SEQ ID NO: 85281 - DNA, 20 bp, Artificial Sequence
  MKO10085281_B_Fbrsl1
  gRNA
tcaaactcaatcgaaataac

SEQ ID NO: 85282 - DNA, 20 bp, Artificial Sequence
  MKO10085282_B_Fbrs
  gRNA
gctgagcgggctaccccaga

SEQ ID NO: 85283 - DNA, 20 bp, Artificial Sequence
  MKO10085283_B_Fbrs
  gRNA
cccagatccctgatcatttc

SEQ ID NO: 85284 - DNA, 20 bp, Artificial Sequence
  MKO10085284_B_Fbrs
  gRNA
accaaactcaccctcaaagg

SEQ ID NO: 85285 - DNA, 20 bp, Artificial Sequence
  MKO10085285_B_Fbxl12
  gRNA
cgcataccgtgtagagcgtc

SEQ ID NO: 85286 - DNA, 20 bp, Artificial Sequence
  MKO10085286_B_Fbxl12
  gRNA
gaggtcaaacagagtcgcca

SEQ ID NO: 85287 - DNA, 20 bp, Artificial Sequence
  MKO10085287_B_Fbxl12
  gRNA
atctccaagagcaccaagtc

SEQ ID NO: 85288 - DNA, 20 bp, Artificial Sequence
  MKO10085288_B_Fbxl13
  gRNA
cgaactcttgacttcagtga

SEQ ID NO: 85289 - DNA, 20 bp, Artificial Sequence
  MKO10085289_B_Fbxl13
  gRNA
atcctagctatcattaaaag

SEQ ID NO: 85290 - DNA, 20 bp, Artificial Sequence
  MKO10085290_B_Fbxl13
  gRNA
aagactgtctgaaacttact

SEQ ID NO: 85291 - DNA, 20 bp, Artificial Sequence
  MKO10085291_B_Fbxl14
  gRNA
ggcgacagctgcggagatta

SEQ ID NO: 85292 - DNA, 20 bp, Artificial Sequence
  MKO10085292_B_Fbxl14
  gRNA
gcgccgcgcgacccttgtct

SEQ ID NO: 85293 - DNA, 20 bp, Artificial Sequence
  MKO10085293_B_Fbxl14
  gRNA
ggcagcgctgcgcgtcatgc

SEQ ID NO: 85294 - DNA, 20 bp, Artificial Sequence
  MKO10085294_B_Fbxl15
  gRNA
caccgcctgtcgtcaactca

SEQ ID NO: 85295 - DNA, 20 bp, Artificial Sequence
  MKO10085295_B_Fbxl15
  gRNA
ccacaccacgcttccgcaag

SEQ ID NO: 85296 - DNA, 20 bp, Artificial Sequence
  MKO10085296_B_Fbxl15
  gRNA
acccgcagagagcgcagcgc

SEQ ID NO: 85297 - DNA, 20 bp, Artificial Sequence
  MKO10085297_B_Fbxl16
  gRNA
ccagctcttgcagttgcacg

SEQ ID NO: 85298 - DNA, 20 bp, Artificial Sequence
  MKO10085298_B_Fbxl16
  gRNA
gtacctggcagcaccatcgc

SEQ ID NO: 85299 - DNA, 20 bp, Artificial Sequence
  MKO10085299_B_Fbxl16
  gRNA
ccacaggtgtgtacgcatca

SEQ ID NO: 85300 - DNA, 20 bp, Artificial Sequence
  MKO10085300_B_Fbxl17
  gRNA
gcttgtcctggttgcctacg

SEQ ID NO: 85301 - DNA, 20 bp, Artificial Sequence
  MKO10085301_B_Fbxl17
  gRNA
aacccatgaagccaacatac

SEQ ID NO: 85302 - DNA, 20 bp, Artificial Sequence
  MKO10085302_B_Fbxl17
  gRNA
ggttaagtgaatgactcctt

SEQ ID NO: 85303 - DNA, 20 bp, Artificial Sequence
  MKO10085303_B_Fbxl18
  gRNA
gggtgccgctgcgagatacc

SEQ ID NO: 85304 - DNA, 20 bp, Artificial Sequence
  MKO10085304_B_Fbxl18
  gRNA
tccggaggagcgactgctgc

SEQ ID NO: 85305 - DNA, 20 bp, Artificial Sequence
  MKO10085305_B_Fbxl18
  gRNA
ctgaggaaccgcccaaccta

SEQ ID NO: 85306 - DNA, 20 bp, Artificial Sequence
  MKO10085306_B_Fbxl19
  gRNA
tgcagattgtacactccatg

SEQ ID NO: 85307 - DNA, 20 bp, Artificial Sequence
  MKO10085307_B_Fbxl19
  gRNA
tcgggggcactcccagcagt

SEQ ID NO: 85308 - DNA, 20 bp, Artificial Sequence
  MKO10085308_B_Fbxl19
  gRNA
ttccagcctccccgcacaag

SEQ ID NO: 85309 - DNA, 20 bp, Artificial Sequence
  MKO10085309_B_Fbxl20
  gRNA
agttactgccatccagagct

SEQ ID NO: 85310 - DNA, 20 bp, Artificial Sequence
  MKO10085310_B_Fbxl20
  gRNA
agacctgagcacagcgacac

SEQ ID NO: 85311 - DNA, 20 bp, Artificial Sequence
  MKO10085311_B_Fbxl20
  gRNA
gatgttctcaaacagtgatg

SEQ ID NO: 85312 - DNA, 20 bp, Artificial Sequence
  MKO10085312_B_Fbxl21
  gRNA
ctaccatcagatgaaacgtg

SEQ ID NO: 85313 - DNA, 20 bp, Artificial Sequence
  MKO10085313_B_Fbxl21
  gRNA
gtagtgaaacagcccaaacg

SEQ ID NO: 85314 - DNA, 20 bp, Artificial Sequence
  MKO10085314_B_Fbxl21
  gRNA
gttatcatcgattaaaattg

SEQ ID NO: 85315 - DNA, 20 bp, Artificial Sequence
  MKO10085315_B_Fbxl22
  gRNA
gcagacactcccgattgagc

SEQ ID NO: 85316 - DNA, 20 bp, Artificial Sequence
  MKO10085316_B_Fbxl22
  gRNA
gcgcgttaccaaccgcacgc

SEQ ID NO: 85317 - DNA, 20 bp, Artificial Sequence
  MKO10085317_B_Fbxl22
  gRNA
ccacgtcacggacgactgcc

SEQ ID NO: 85318 - DNA, 20 bp, Artificial Sequence
  MKO10085318_B_Fbxl2
  gRNA
tagagttacgatgtccaaga

SEQ ID NO: 85319 - DNA, 20 bp, Artificial Sequence
  MKO10085319_B_Fbxl2
  gRNA
aacttacctctacatctgtc

SEQ ID NO: 85320 - DNA, 20 bp, Artificial Sequence
  MKO10085320_B_Fbxl2
  gRNA
tatcaacaagaagctaccca

SEQ ID NO: 85321 - DNA, 20 bp, Artificial Sequence
  MKO10085321_B_Fbxl3
  gRNA
gctttcaagtaagatgtcgc

SEQ ID NO: 85322 - DNA, 20 bp, Artificial Sequence
  MKO10085322_B_Fbxl3
  gRNA
tttggtagatccataaagct

SEQ ID NO: 85323 - DNA, 20 bp, Artificial Sequence
  MKO10085323_B_Fbxl3
  gRNA
gagcgctcctgtgtcgtcct

SEQ ID NO: 85324 - DNA, 20 bp, Artificial Sequence
  MKO10085324_B_Fbxl4
  gRNA
ccagtgacgtgtcgtccagc

SEQ ID NO: 85325 - DNA, 20 bp, Artificial Sequence
  MKO10085325_B_Fbxl4
  gRNA
ctgcgataaactcccacctc

SEQ ID NO: 85326 - DNA, 20 bp, Artificial Sequence
  MKO10085326_B_Fbxl4
  gRNA
tctctatcggacaaaagtag

SEQ ID NO: 85327 - DNA, 20 bp, Artificial Sequence
  MKO10085327_B_Fbxl5
  gRNA
agcacggaagtcattgttgt

SEQ ID NO: 85328 - DNA, 20 bp, Artificial Sequence
  MKO10085328_B_Fbxl5
  gRNA
gaaagttctcaagtactctg

SEQ ID NO: 85329 - DNA, 20 bp, Artificial Sequence
  MKO10085329_B_Fbxl5
  gRNA
gtctttatatgctactttca

SEQ ID NO: 85330 - DNA, 20 bp, Artificial Sequence
  MKO10085330_B_Fbxl6
  gRNA
taccagcagtgcgcccaaga

SEQ ID NO: 85331 - DNA, 20 bp, Artificial Sequence
  MKO10085331_B_Fbxl6
  gRNA
agtgtacttgagacttccag

SEQ ID NO: 85332 - DNA, 20 bp, Artificial Sequence
  MKO10085332_B_Fbxl6
  gRNA
tggttagcaagttctgccct

SEQ ID NO: 85333 - DNA, 20 bp, Artificial Sequence
  MKO10085333_B_Fbxl7
  gRNA
gacaggatgggcgcgaacaa

SEQ ID NO: 85334 - DNA, 20 bp, Artificial Sequence
  MKO10085334_B_Fbxl7
  gRNA
caaagtcggtgggcatatca

SEQ ID NO: 85335 - DNA, 20 bp, Artificial Sequence
  MKO10085335_B_Fbxl7
  gRNA
atctgtgcttgaactcacgt

SEQ ID NO: 85336 - DNA, 20 bp, Artificial Sequence
  MKO10085336_B_Fbxl8
  gRNA
attgtcgaccagctccccca

SEQ ID NO: 85337 - DNA, 20 bp, Artificial Sequence
  MKO10085337_B_Fbxl8
  gRNA
atgcggacgcgcgcacctcg

SEQ ID NO: 85338 - DNA, 20 bp, Artificial Sequence
  MKO10085338_B_Fbxl8
  gRNA
tcggaaggcgtccagtaccg

SEQ ID NO: 85339 - DNA, 20 bp, Artificial Sequence
  MKO10085339_B_Fbxo10
  gRNA
ctgtttagatcgtcatgctc

SEQ ID NO: 85340 - DNA, 20 bp, Artificial Sequence
  MKO10085340_B_Fbxo10
  gRNA
ctgcgcgccccttgaagatg

SEQ ID NO: 85341 - DNA, 20 bp, Artificial Sequence
  MKO10085341_B_Fbxo10
  gRNA
cgatctggcattgttgtcct

SEQ ID NO: 85342 - DNA, 20 bp, Artificial Sequence
  MKO10085342_B_Fbxo11
  gRNA
acccgctgaacagtatcttc

SEQ ID NO: 85343 - DNA, 20 bp, Artificial Sequence
  MKO10085343_B_Fbxo11
  gRNA
gcaaagcgtgcaagagtgtc

SEQ ID NO: 85344 - DNA, 20 bp, Artificial Sequence
  MKO10085344_B_Fbxo11
  gRNA
gtgtcctacaaagagcagta

SEQ ID NO: 85345 - DNA, 20 bp, Artificial Sequence
  MKO10085345_B_Fbxo15
  gRNA
agcaacgcttctcgctgtgc

SEQ ID NO: 85346 - DNA, 20 bp, Artificial Sequence
  MKO10085346_B_Fbxo15
  gRNA
cttacagtcttatttgggtc

SEQ ID NO: 85347 - DNA, 20 bp, Artificial Sequence
  MKO10085347_B_Fbxo15
  gRNA
tgtggcaccatacaaatcca

SEQ ID NO: 85348 - DNA, 20 bp, Artificial Sequence
  MKO10085348_B_Fbxo16
  gRNA
ctccccaacgccctttgaac

SEQ ID NO: 85349 - DNA, 20 bp, Artificial Sequence
  MKO10085349_B_Fbxo16
  gRNA
gccgatgttcagccaattcc

SEQ ID NO: 85350 - DNA, 20 bp, Artificial Sequence
  MKO10085350_B_Fbxo16
  gRNA
acagggaacagcgctctagt

SEQ ID NO: 85351 - DNA, 20 bp, Artificial Sequence
  MKO10085351_B_Fbxo17
  gRNA
gaagtggagcacggcggaaa

SEQ ID NO: 85352 - DNA, 20 bp, Artificial Sequence
  MKO10085352_B_Fbxo17
  gRNA
ctcccaggtggtgctccaag

SEQ ID NO: 85353 - DNA, 20 bp, Artificial Sequence
  MKO10085353_B_Fbxo17
  gRNA
gactggtcggctaggacaga

SEQ ID NO: 85354 - DNA, 20 bp, Artificial Sequence
  MKO10085354_B_Fbxo18
  gRNA
gagggatcatcctctacttt

SEQ ID NO: 85355 - DNA, 20 bp, Artificial Sequence
  MKO10085355_B_Fbxo18
  gRNA
agtggtcgactgccatcatt

SEQ ID NO: 85356 - DNA, 20 bp, Artificial Sequence
  MKO10085356_B_Fbxo18
  gRNA
ctaggatagagaccatggtt

SEQ ID NO: 85357 - DNA, 20 bp, Artificial Sequence
  MKO10085357_B_Fbxo21
  gRNA
gcagtactggtcgatgtaaa

SEQ ID NO: 85358 - DNA, 20 bp, Artificial Sequence
  MKO10085358_B_Fbxo21
  gRNA
gccccaccgactacgtcaat

SEQ ID NO: 85359 - DNA, 20 bp, Artificial Sequence
  MKO10085359_B_Fbxo21
  gRNA
ggtggcggctgttgatgcca

SEQ ID NO: 85360 - DNA, 20 bp, Artificial Sequence
  MKO10085360_B_Fbxo22
  gRNA
cgattgctacctgatcccat

SEQ ID NO: 85361 - DNA, 20 bp, Artificial Sequence
  MKO10085361_B_Fbxo22
  gRNA
atcaggtagcaatcgacctc

SEQ ID NO: 85362 - DNA, 20 bp, Artificial Sequence
  MKO10085362_B_Fbxo22
  gRNA
gattgtgaccccgggaattg

SEQ ID NO: 85363 - DNA, 20 bp, Artificial Sequence
  MKO10085363_B_Fbxo24
  gRNA
tgtggaggcgcatctgtcga

SEQ ID NO: 85364 - DNA, 20 bp, Artificial Sequence
  MKO10085364_B_Fbxo24
  gRNA
gagcttcaagcagatcgtgc

SEQ ID NO: 85365 - DNA, 20 bp, Artificial Sequence
  MKO10085365_B_Fbxo24
  gRNA
tactcgggaacagccggcag

SEQ ID NO: 85366 - DNA, 20 bp, Artificial Sequence
  MKO10085366_B_Fbxo25
  gRNA
cgtccataaggaaagcacaa

SEQ ID NO: 85367 - DNA, 20 bp, Artificial Sequence
  MKO10085367_B_Fbxo25
  gRNA
tcccagttaacctcactgag

SEQ ID NO: 85368 - DNA, 20 bp, Artificial Sequence
  MKO10085368_B_Fbxo25
  gRNA
ctgtgccactccactcagtg

SEQ ID NO: 85369 - DNA, 20 bp, Artificial Sequence
  MKO10085369_B_Fbxo27
  gRNA
ctacagaaggcctgcgcaaa

SEQ ID NO: 85370 - DNA, 20 bp, Artificial Sequence
  MKO10085370_B_Fbxo27
  gRNA
tggggagctcgacatgacag

SEQ ID NO: 85371 - DNA, 20 bp, Artificial Sequence
  MKO10085371_B_Fbxo27
  gRNA
agaacttatctatgacgttc

SEQ ID NO: 85372 - DNA, 20 bp, Artificial Sequence
  MKO10085372_B_Fbxo28
  gRNA
agcacctcgtgagctcgctg

SEQ ID NO: 85373 - DNA, 20 bp, Artificial Sequence
  MKO10085373_B_Fbxo28
  gRNA
tcaacattctctgacagacc

SEQ ID NO: 85374 - DNA, 20 bp, Artificial Sequence
  MKO10085374_B_Fbxo28
  gRNA
ctgcatgacgagctaaagaa

SEQ ID NO: 85375 - DNA, 20 bp, Artificial Sequence
  MKO10085375_B_Fbxo2
  gRNA
ttctccttactcgaaggagg

SEQ ID NO: 85376 - DNA, 20 bp, Artificial Sequence
  MKO10085376_B_Fbxo2
  gRNA
gtcggagaacgaagatgtgc

SEQ ID NO: 85377 - DNA, 20 bp, Artificial Sequence
  MKO10085377_B_Fbxo2
  gRNA
gccgcctggtgtgcctgcgc

SEQ ID NO: 85378 - DNA, 20 bp, Artificial Sequence
  MKO10085378_B_Fbxo30
  gRNA
actcgagagcttacaaaaga

SEQ ID NO: 85379 - DNA, 20 bp, Artificial Sequence
  MKO10085379_B_Fbxo30
  gRNA
tcatacatgatcgccattta

SEQ ID NO: 85380 - DNA, 20 bp, Artificial Sequence
  MKO10085380_B_Fbxo30
  gRNA
ggcagtttacttcagtctcg

SEQ ID NO: 85381 - DNA, 20 bp, Artificial Sequence
  MKO10085381_B_Fbxo31
  gRNA
gtggacggactgttcatcat

SEQ ID NO: 85382 - DNA, 20 bp, Artificial Sequence
  MKO10085382_B_Fbxo31
  gRNA
tcacgcggaagattgtgaag

SEQ ID NO: 85383 - DNA, 20 bp, Artificial Sequence
  MKO10085383_B_Fbxo31
  gRNA
ctgtgatctccagcttccgc

SEQ ID NO: 85384 - DNA, 20 bp, Artificial Sequence
  MKO10085384_B_Fbxo32
  gRNA
ccattccagttactgcaaca

SEQ ID NO: 85385 - DNA, 20 bp, Artificial Sequence
  MKO10085385_B_Fbxo32
  gRNA
tagacttccatcaagaaaag

SEQ ID NO: 85386 - DNA, 20 bp, Artificial Sequence
  MKO10085386_B_Fbxo32
  gRNA
aaatgacttacactgagttt

SEQ ID NO: 85387 - DNA, 20 bp, Artificial Sequence
  MKO10085387_B_Fbxo33
  gRNA
agtacagaaccttattgagc

SEQ ID NO: 85388 - DNA, 20 bp, Artificial Sequence
  MKO10085388_B_Fbxo33
  gRNA
caaccgaaacgaagatccat

SEQ ID NO: 85389 - DNA, 20 bp, Artificial Sequence
  MKO10085389_B_Fbxo33
  gRNA
agctacgtcacttgtgtctc

SEQ ID NO: 85390 - DNA, 20 bp, Artificial Sequence
  MKO10085390_B_Fbxo34
  gRNA
accaggagctcagcgctgag

SEQ ID NO: 85391 - DNA, 20 bp, Artificial Sequence
  MKO10085391_B_Fbxo34
  gRNA
gccgctcagcgctgagctcc

SEQ ID NO: 85392 - DNA, 20 bp, Artificial Sequence
  MKO10085392_B_Fbxo34
  gRNA
gcaatccataagaagacgag

SEQ ID NO: 85393 - DNA, 20 bp, Artificial Sequence
  MKO10085393_B_Fbxo36
  gRNA
gagtccgggtgatcaacaac

SEQ ID NO: 85394 - DNA, 20 bp, Artificial Sequence
  MKO10085394_B_Fbxo36
  gRNA
ccttggcgaaaaacatgggc

SEQ ID NO: 85395 - DNA, 20 bp, Artificial Sequence
  MKO10085395_B_Fbxo36
  gRNA
cttggagatgagagttatct

SEQ ID NO: 85396 - DNA, 20 bp, Artificial Sequence
  MKO10085396_B_Fbxo38
  gRNA
aagttcgcaagctgatgcaa

SEQ ID NO: 85397 - DNA, 20 bp, Artificial Sequence
  MKO10085397_B_Fbxo38
  gRNA
acctaggtacctgccactac

SEQ ID NO: 85398 - DNA, 20 bp, Artificial Sequence
  MKO10085398_B_Fbxo38
  gRNA
gtctcacccacttcatgtac

SEQ ID NO: 85399 - DNA, 20 bp, Artificial Sequence
  MKO10085399_B_Fbxo39
  gRNA
gctccacaaacttaacgtcc

SEQ ID NO: 85400 - DNA, 20 bp, Artificial Sequence
  MKO10085400_B_Fbxo39
  gRNA
ggaccctacgggaaatttac

SEQ ID NO: 85401 - DNA, 20 bp, Artificial Sequence
  MKO10085401_B_Fbxo39
  gRNA
atttcctgtaaatttcccgt

SEQ ID NO: 85402 - DNA, 20 bp, Artificial Sequence
  MKO10085402_B_Fbxo3
  gRNA
cgagacggggctgctgaccc

SEQ ID NO: 85403 - DNA, 20 bp, Artificial Sequence
  MKO10085403_B_Fbxo3
  gRNA
gtacctccccacgtctgagt

SEQ ID NO: 85404 - DNA, 20 bp, Artificial Sequence
  MKO10085404_B_Fbxo3
  gRNA
atgattatcgctgttcatac

SEQ ID NO: 85405 - DNA, 20 bp, Artificial Sequence
  MKO10085405_B_Fbxo40
  gRNA
ttccgctccacgatgttgaa

SEQ ID NO: 85406 - DNA, 20 bp, Artificial Sequence
  MKO10085406_B_Fbxo40
  gRNA
accagccatcgagactcgac

SEQ ID NO: 85407 - DNA, 20 bp, Artificial Sequence
  MKO10085407_B_Fbxo40
  gRNA
gatgcctgcttgtacgccca

SEQ ID NO: 85408 - DNA, 20 bp, Artificial Sequence
  MKO10085408_B_Fbxo41
  gRNA
cgtcttaggcctgaactacg

SEQ ID NO: 85409 - DNA, 20 bp, Artificial Sequence
  MKO10085409_B_Fbxo41
  gRNA
cgtgatacggcgtatgtgct

SEQ ID NO: 85410 - DNA, 20 bp, Artificial Sequence
  MKO10085410_B_Fbxo41
  gRNA
cccgagctgccgtctccttc

SEQ ID NO: 85411 - DNA, 20 bp, Artificial Sequence
  MKO10085411_B_Fbxo42
  gRNA
gtccttgtacacgaccagag

SEQ ID NO: 85412 - DNA, 20 bp, Artificial Sequence
  MKO10085412_B_Fbxo42
  gRNA
aactgcattgtcaccacgca

SEQ ID NO: 85413 - DNA, 20 bp, Artificial Sequence
  MKO10085413_B_Fbxo42
  gRNA
ttcccggataagggtaagtc

SEQ ID NO: 85414 - DNA, 20 bp, Artificial Sequence
  MKO10085414_B_Fbxo43
  gRNA
actgttcctgtttactccgt

SEQ ID NO: 85415 - DNA, 20 bp, Artificial Sequence
  MKO10085415_B_Fbxo43
  gRNA
ttatgtctgtgcgcttatca

SEQ ID NO: 85416 - DNA, 20 bp, Artificial Sequence
  MKO10085416_B_Fbxo43
  gRNA
ttagcaggggattggcacct

SEQ ID NO: 85417 - DNA, 20 bp, Artificial Sequence
  MKO10085417_B_Fbxo44
  gRNA
ctggcgagacctcattgacc

SEQ ID NO: 85418 - DNA, 20 bp, Artificial Sequence
  MKO10085418_B_Fbxo44
  gRNA
tggtacttggacccgcagtc

SEQ ID NO: 85419 - DNA, 20 bp, Artificial Sequence
  MKO10085419_B_Fbxo44
  gRNA
aggcgtggacactcactact

SEQ ID NO: 85420 - DNA, 20 bp, Artificial Sequence
  MKO10085420_B_Fbxo45
  gRNA
caacaacgcaccaaagtatc

SEQ ID NO: 85421 - DNA, 20 bp, Artificial Sequence
  MKO10085421_B_Fbxo45
  gRNA
ttcctgggggttgcctttcg

SEQ ID NO: 85422 - DNA, 20 bp, Artificial Sequence
  MKO10085422_B_Fbxo45
  gRNA
agagagaatccgagtcatcc

SEQ ID NO: 85423 - DNA, 20 bp, Artificial Sequence
  MKO10085423_B_Fbxo46
  gRNA
tggggcgcggataactctgc

SEQ ID NO: 85424 - DNA, 20 bp, Artificial Sequence
  MKO10085424_B_Fbxo46
  gRNA
cgtgtgacacatgccggtac

SEQ ID NO: 85425 - DNA, 20 bp, Artificial Sequence
  MKO10085425_B_Fbxo46
  gRNA
gataagctggtacaagtcgc

SEQ ID NO: 85426 - DNA, 20 bp, Artificial Sequence
  MKO10085426_B_Fbxo47
  gRNA
tttcatgaccttgatctgcc

SEQ ID NO: 85427 - DNA, 20 bp, Artificial Sequence
  MKO10085427_B_Fbxo47
  gRNA
aattatatctcaacatcatc

SEQ ID NO: 85428 - DNA, 20 bp, Artificial Sequence
  MKO10085428_B_Fbxo47
  gRNA
gtatcctgctttaaattcag

SEQ ID NO: 85429 - DNA, 20 bp, Artificial Sequence
  MKO10085429_B_Fbxo48
  gRNA
cccccacgtatctgcatcca

SEQ ID NO: 85430 - DNA, 20 bp, Artificial Sequence
  MKO10085430_B_Fbxo48
  gRNA
attccaacctgtgcatgtcc

SEQ ID NO: 85431 - DNA, 20 bp, Artificial Sequence
  MKO10085431_B_Fbxo48
  gRNA
ataaactctgaatgtctagc

SEQ ID NO: 85432 - DNA, 20 bp, Artificial Sequence
  MKO10085432_B_Fbxo4
  gRNA
gaacatcttgttaacggtgc

SEQ ID NO: 85433 - DNA, 20 bp, Artificial Sequence
  MKO10085433_B_Fbxo4
  gRNA
aaagccagccgtcctatgta

SEQ ID NO: 85434 - DNA, 20 bp, Artificial Sequence
  MKO10085434_B_Fbxo4
  gRNA
gtaatcaagacaagtgctgt

SEQ ID NO: 85435 - DNA, 20 bp, Artificial Sequence
  MKO10085435_B_Fbxo5
  gRNA
cctggagcacctagacatcc

SEQ ID NO: 85436 - DNA, 20 bp, Artificial Sequence
  MKO10085436_B_Fbxo5
  gRNA
ttgcagtctaaagttcccgc

SEQ ID NO: 85437 - DNA, 20 bp, Artificial Sequence
  MKO10085437_B_Fbxo5
  gRNA
agggaaattacagcgaacac

SEQ ID NO: 85438 - DNA, 20 bp, Artificial Sequence
  MKO10085438_B_Fbxo6
  gRNA
ctctgcggactacattgtct

SEQ ID NO: 85439 - DNA, 20 bp, Artificial Sequence
  MKO10085439_B_Fbxo6
  gRNA
caaagctgagggctactgcg

SEQ ID NO: 85440 - DNA, 20 bp, Artificial Sequence
  MKO10085440_B_Fbxo6
  gRNA
tccccctgccagaactctac

SEQ ID NO: 85441 - DNA, 20 bp, Artificial Sequence
  MKO10085441_B_Fbxo7
  gRNA
ttctactccagcagcaacgt

SEQ ID NO: 85442 - DNA, 20 bp, Artificial Sequence
  MKO10085442_B_Fbxo7
  gRNA
catctcctgatgctcgagtc

SEQ ID NO: 85443 - DNA, 20 bp, Artificial Sequence
  MKO10085443_B_Fbxo7
  gRNA
caccatactgtcatcagtcc

SEQ ID NO: 85444 - DNA, 20 bp, Artificial Sequence
  MKO10085444_B_Fbxo8
  gRNA
tacaataagaacccaccttt

SEQ ID NO: 85445 - DNA, 20 bp, Artificial Sequence
  MKO10085445_B_Fbxo8
  gRNA
agtgagctactttatgtcca

SEQ ID NO: 85446 - DNA, 20 bp, Artificial Sequence
  MKO10085446_B_Fbxo8
  gRNA
tatgacaacatctaccttat

SEQ ID NO: 85447 - DNA, 20 bp, Artificial Sequence
  MKO10085447_B_Fbxo9
  gRNA
tgccagttcctgtcgtcctt

SEQ ID NO: 85448 - DNA, 20 bp, Artificial Sequence
  MKO10085448_B_Fbxo9
  gRNA
ccatgactggagcctacacc

SEQ ID NO: 85449 - DNA, 20 bp, Artificial Sequence
  MKO10085449_B_Fbxo9
  gRNA
caaaatggagctctctatga

SEQ ID NO: 85450 - DNA, 20 bp, Artificial Sequence
  MKO10085450_B_Fbxw10
  gRNA
gtgcccaagatagtagatga

SEQ ID NO: 85451 - DNA, 20 bp, Artificial Sequence
  MKO10085451_B_Fbxw10
  gRNA
aggacacctcatatgtctct

SEQ ID NO: 85452 - DNA, 20 bp, Artificial Sequence
  MKO10085452_B_Fbxw10
  gRNA
aaaagggggcatgtccaggc

SEQ ID NO: 85453 - DNA, 20 bp, Artificial Sequence
  MKO10085453_B_Fbxw11
  gRNA
gtgcgcacatgctctctacc

SEQ ID NO: 85454 - DNA, 20 bp, Artificial Sequence
  MKO10085454_B_Fbxw11
  gRNA
tggtgcgcaccgaccctctc

SEQ ID NO: 85455 - DNA, 20 bp, Artificial Sequence
  MKO10085455_B_Fbxw11
  gRNA
tggcagcgagtgatctcaga

SEQ ID NO: 85456 - DNA, 20 bp, Artificial Sequence
  MKO10085456_B_Fbxw13
  gRNA
ccacgccctgagatataaca

SEQ ID NO: 85457 - DNA, 20 bp, Artificial Sequence
  MKO10085457_B_Fbxw13
  gRNA
tgaaatcttctcgaattgcc

SEQ ID NO: 85458 - DNA, 20 bp, Artificial Sequence
  MKO10085458_B_Fbxw13
  gRNA
agttcttcgtttcccgaaca

SEQ ID NO: 85459 - DNA, 20 bp, Artificial Sequence
  MKO10085459_B_Fbxw14
  gRNA
ttgcaagcagtgatgtcctg

SEQ ID NO: 85460 - DNA, 20 bp, Artificial Sequence
  MKO10085460_B_Fbxw14
  gRNA
cagaatttcgggcacatcca

SEQ ID NO: 85461 - DNA, 20 bp, Artificial Sequence
  MKO10085461_B_Fbxw14
  gRNA
actcacctcgtgaatatccc

SEQ ID NO: 85462 - DNA, 20 bp, Artificial Sequence
  MKO10085462_B_Fbxw15
  gRNA
ggatatgcatgttatatctc

SEQ ID NO: 85463 - DNA, 20 bp, Artificial Sequence
  MKO10085463_B_Fbxw15
  gRNA
ttgccagcagtgatgtcctg

SEQ ID NO: 85464 - DNA, 20 bp, Artificial Sequence
  MKO10085464_B_Fbxw15
  gRNA
cctccacaggacatcactgc

SEQ ID NO: 85465 - DNA, 20 bp, Artificial Sequence
  MKO10085465_B_Fbxw16
  gRNA
cttatgcatattatatctca

SEQ ID NO: 85466 - DNA, 20 bp, Artificial Sequence
  MKO10085466_B_Fbxw16
  gRNA
ttgccagcagtgatgtcctg

SEQ ID NO: 85467 - DNA, 20 bp, Artificial Sequence
  MKO10085467_B_Fbxw16
  gRNA
cctccacaggacatcactgc

SEQ ID NO: 85468 - DNA, 20 bp, Artificial Sequence
  MKO10085468_B_Fbxw17
  gRNA
gaagaaggcccactcagacc

SEQ ID NO: 85469 - DNA, 20 bp, Artificial Sequence
  MKO10085469_B_Fbxw17
  gRNA
accttgccccttcatcaaag

SEQ ID NO: 85470 - DNA, 20 bp, Artificial Sequence
  MKO10085470_B_Fbxw17
  gRNA
cagactgtactgtgcgtgcc

SEQ ID NO: 85471 - DNA, 20 bp, Artificial Sequence
  MKO10085471_B_Fbxw18
  gRNA
ctgtaatagcagtgatgctc

SEQ ID NO: 85472 - DNA, 20 bp, Artificial Sequence
  MKO10085472_B_Fbxw18
  gRNA
ccatgaccaagatttccacc

SEQ ID NO: 85473 - DNA, 20 bp, Artificial Sequence
  MKO10085473_B_Fbxw18
  gRNA
gcatatgcatgttatatctc

SEQ ID NO: 85474 - DNA, 20 bp, Artificial Sequence
  MKO10085474_B_Fbxw19
  gRNA
gtatggtgacttccacgaat

SEQ ID NO: 85475 - DNA, 20 bp, Artificial Sequence
  MKO10085475_B_Fbxw19
  gRNA
ttcgacctgggatgttcacg

SEQ ID NO: 85476 - DNA, 20 bp, Artificial Sequence
  MKO10085476_B_Fbxw19
  gRNA
ggcgtgttcttgccatgttc

SEQ ID NO: 85477 - DNA, 20 bp, Artificial Sequence
  MKO10085477_B_Fbxw20
  gRNA
cacagctttcagtaatttac

SEQ ID NO: 85478 - DNA, 20 bp, Artificial Sequence
  MKO10085478_B_Fbxw20
  gRNA
gcttccatgtctctgtgccc

SEQ ID NO: 85479 - DNA, 20 bp, Artificial Sequence
  MKO10085479_B_Fbxw20
  gRNA
ttgcaagcagtgatgtcctg

SEQ ID NO: 85480 - DNA, 20 bp, Artificial Sequence
  MKO10085480_B_Fbxw21
  gRNA
gcatgttatatctcagagca

SEQ ID NO: 85481 - DNA, 20 bp, Artificial Sequence
  MKO10085481_B_Fbxw21
  gRNA
gtatggcgacttccatgaac

SEQ ID NO: 85482 - DNA, 20 bp, Artificial Sequence
  MKO10085482_B_Fbxw21
  gRNA
agttcttcatttaccgaaca

SEQ ID NO: 85483 - DNA, 20 bp, Artificial Sequence
  MKO10085483_B_Fbxw22
  gRNA
gtatggtgacttccgtgaac

SEQ ID NO: 85484 - DNA, 20 bp, Artificial Sequence
  MKO10085484_B_Fbxw22
  gRNA
aagcttataccaaacttcac

SEQ ID NO: 85485 - DNA, 20 bp, Artificial Sequence
  MKO10085485_B_Fbxw22
  gRNA
atggtcaccctaccgctcca

SEQ ID NO: 85486 - DNA, 20 bp, Artificial Sequence
  MKO10085486_B_Fbxw24
  gRNA
gtcaacaacttgatgcttgc

SEQ ID NO: 85487 - DNA, 20 bp, Artificial Sequence
  MKO10085487_B_Fbxw24
  gRNA
agttctttgtttaccgaaca

SEQ ID NO: 85488 - DNA, 20 bp, Artificial Sequence
  MKO10085488_B_Fbxw24
  gRNA
ttgcaagcaatgatttcctg

SEQ ID NO: 85489 - DNA, 20 bp, Artificial Sequence
  MKO10085489_B_Fbxw26
  gRNA
agttcttcgtttaccgaacc

SEQ ID NO: 85490 - DNA, 20 bp, Artificial Sequence
  MKO10085490_B_Fbxw26
  gRNA
gcatattatatctcaaaaca

SEQ ID NO: 85491 - DNA, 20 bp, Artificial Sequence
  MKO10085491_B_Fbxw26
  gRNA
ttgcaagcagtgatgtcctg

SEQ ID NO: 85492 - DNA, 20 bp, Artificial Sequence
  MKO10085492_B_Fbxw28
  gRNA
ggatgcctacagtttgctac

SEQ ID NO: 85493 - DNA, 20 bp, Artificial Sequence
  MKO10085493_B_Fbxw28
  gRNA
ttgcaagcagtgatgtcctg

SEQ ID NO: 85494 - DNA, 20 bp, Artificial Sequence
  MKO10085494_B_Fbxw28
  gRNA
ggaagttgtgtcagaagaga

SEQ ID NO: 85495 - DNA, 20 bp, Artificial Sequence
  MKO10085495_B_Fbxw2
  gRNA
tatgcccagtgagtgtattc

SEQ ID NO: 85496 - DNA, 20 bp, Artificial Sequence
  MKO10085496_B_Fbxw2
  gRNA
ttgacaacactgtggcctgc

SEQ ID NO: 85497 - DNA, 20 bp, Artificial Sequence
  MKO10085497_B_Fbxw2
  gRNA
cacccgcccccgtgtgcccc

SEQ ID NO: 85498 - DNA, 20 bp, Artificial Sequence
  MKO10085498_B_Fbxw4
  gRNA
ggctggggcgctgccgagat

SEQ ID NO: 85499 - DNA, 20 bp, Artificial Sequence
  MKO10085499_B_Fbxw4
  gRNA
atggtgcaagcttgaaccga

SEQ ID NO: 85500 - DNA, 20 bp, Artificial Sequence
  MKO10085500_B_Fbxw4
  gRNA
gtctcccttacctgagtaat

SEQ ID NO: 85501 - DNA, 20 bp, Artificial Sequence
  MKO10085501_B_Fbxw5
  gRNA
gtaccatgtcatagagccgc

SEQ ID NO: 85502 - DNA, 20 bp, Artificial Sequence
  MKO10085502_B_Fbxw5
  gRNA
caccttcaccgtgcagtcct

SEQ ID NO: 85503 - DNA, 20 bp, Artificial Sequence
  MKO10085503_B_Fbxw5
  gRNA
gatgacagctatctcgcctg

SEQ ID NO: 85504 - DNA, 20 bp, Artificial Sequence
  MKO10085504_B_Fbxw7
  gRNA
ttgtcgatactggagaattt

SEQ ID NO: 85505 - DNA, 20 bp, Artificial Sequence
  MKO10085505_B_Fbxw7
  gRNA
catctccttgcttcctaaag

SEQ ID NO: 85506 - DNA, 20 bp, Artificial Sequence
  MKO10085506_B_Fbxw7
  gRNA
agatgaagtctcgctggaac

SEQ ID NO: 85507 - DNA, 20 bp, Artificial Sequence
  MKO10085507_B_Fbxw8
  gRNA
taccggctgtgccgacagga

SEQ ID NO: 85508 - DNA, 20 bp, Artificial Sequence
  MKO10085508_B_Fbxw8
  gRNA
caaaggtgccgtgagcgagc

SEQ ID NO: 85509 - DNA, 20 bp, Artificial Sequence
  MKO10085509_B_Fbxw8
  gRNA
ttctcttccagatacacgtc

SEQ ID NO: 85510 - DNA, 20 bp, Artificial Sequence
  MKO10085510_B_Fbxw9
  gRNA
gagcagcaacaccgcatcaa

SEQ ID NO: 85511 - DNA, 20 bp, Artificial Sequence
  MKO10085511_B_Fbxw9
  gRNA
tgtcataggtaccagtcacc

SEQ ID NO: 85512 - DNA, 20 bp, Artificial Sequence
  MKO10085512_B_Fbxw9
  gRNA
gcggctgatgggcagcagtt

SEQ ID NO: 85513 - DNA, 20 bp, Artificial Sequence
  MKO10085513_B_Fcamr
  gRNA
caggacccatctctacaatg

SEQ ID NO: 85514 - DNA, 20 bp, Artificial Sequence
  MKO10085514_B_Fcamr
  gRNA
gtgcttccacattgtagaga

SEQ ID NO: 85515 - DNA, 20 bp, Artificial Sequence
  MKO10085515_B_Fcamr
  gRNA
agctaagcccagtgaacaaa

SEQ ID NO: 85516 - DNA, 20 bp, Artificial Sequence
  MKO10085516_B_Fcer1a
  gRNA
ccacaatggtaccgtctctg

SEQ ID NO: 85517 - DNA, 20 bp, Artificial Sequence
  MKO10085517_B_Fcer1a
  gRNA
gctcttgatgtcattctgac

SEQ ID NO: 85518 - DNA, 20 bp, Artificial Sequence
  MKO10085518_B_Fcer1a
  gRNA
aacagaatcgccaccaacaa

SEQ ID NO: 85519 - DNA, 20 bp, Artificial Sequence
  MKO10085519_B_Fcer1g
  gRNA
ctgttctgaagctactgggg

SEQ ID NO: 85520 - DNA, 20 bp, Artificial Sequence
  MKO10085520_B_Fcer1g
  gRNA
ggctggctatagctgccttt

SEQ ID NO: 85521 - DNA, 20 bp, Artificial Sequence
  MKO10085521_B_Fcer1g
  gRNA
tcagagtctcatatgtctcc

SEQ ID NO: 85522 - DNA, 20 bp, Artificial Sequence
  MKO10085522_B_Fcer2a
  gRNA
ctggctcaccctgggacttc

SEQ ID NO: 85523 - DNA, 20 bp, Artificial Sequence
  MKO10085523_B_Fcer2a
  gRNA
cttccccctagactgggaaa

SEQ ID NO: 85524 - DNA, 20 bp, Artificial Sequence
  MKO10085524_B_Fcer2a
  gRNA
tcatttgcttctgttcagct

SEQ ID NO: 85525 - DNA, 20 bp, Artificial Sequence
  MKO10085525_B_Fcf1
  gRNA
tttgcagtaaagaaaaggat

SEQ ID NO: 85526 - DNA, 20 bp, Artificial Sequence
  MKO10085526_B_Fcf1
  gRNA
aggggaagcaaaagaaaaca

SEQ ID NO: 85527 - DNA, 20 bp, Artificial Sequence
  MKO10085527_B_Fcf1
  gRNA
tctctttccttcagcgcgct

SEQ ID NO: 85528 - DNA, 20 bp, Artificial Sequence
  MKO10085528_B_Fcgbp
  gRNA
gaagattcaggtgtaccgcc

SEQ ID NO: 85529 - DNA, 20 bp, Artificial Sequence
  MKO10085529_B_Fcgbp
  gRNA
tacaagggagaccgtctctg

SEQ ID NO: 85530 - DNA, 20 bp, Artificial Sequence
  MKO10085530_B_Fcgbp
  gRNA
acattgcagcgctcaccact

SEQ ID NO: 85531 - DNA, 20 bp, Artificial Sequence
  MKO10085531_B_Fcgr1
  gRNA
tcacccacttccccaccgac

SEQ ID NO: 85532 - DNA, 20 bp, Artificial Sequence
  MKO10085532_B_Fcgr1
  gRNA
tgggatgctataactaggcg

SEQ ID NO: 85533 - DNA, 20 bp, Artificial Sequence
  MKO10085533_B_Fcgr1
  gRNA
agacaccgctacacatctgc

SEQ ID NO: 85534 - DNA, 20 bp, Artificial Sequence
  MKO10085534_B_Fcgr2b
  gRNA
cggctgtccacagtagcata

SEQ ID NO: 85535 - DNA, 20 bp, Artificial Sequence
  MKO10085535_B_Fcgr2b
  gRNA
ccacttaccttggacagtga

SEQ ID NO: 85536 - DNA, 20 bp, Artificial Sequence
  MKO10085536_B_Fcgr2b
  gRNA
actgtagtgatgatacctca

SEQ ID NO: 85537 - DNA, 20 bp, Artificial Sequence
  MKO10085537_B_Fcgr3
  gRNA
tggtgaaactggacccccca

SEQ ID NO: 85538 - DNA, 20 bp, Artificial Sequence
  MKO10085538_B_Fcgr3
  gRNA
ccttccagaaacacccgctg

SEQ ID NO: 85539 - DNA, 20 bp, Artificial Sequence
  MKO10085539_B_Fcgr3
  gRNA
tttgtagtgatgatacctca

SEQ ID NO: 85540 - DNA, 20 bp, Artificial Sequence
  MKO10085540_B_Fcgr4
  gRNA
gatgaatggggtccccctcc

SEQ ID NO: 85541 - DNA, 20 bp, Artificial Sequence
  MKO10085541_B_Fcgr4
  gRNA
ctccatccatgtttccaccg

SEQ ID NO: 85542 - DNA, 20 bp, Artificial Sequence
  MKO10085542_B_Fcgr4
  gRNA
acccaagattcaatggagca

SEQ ID NO: 85543 - DNA, 20 bp, Artificial Sequence
  MKO10085543_B_Fcgrt
  gRNA
ctgaggctagcccattgcgc

SEQ ID NO: 85544 - DNA, 20 bp, Artificial Sequence
  MKO10085544_B_Fcgrt
  gRNA
aggatgcgcagcggtctgcc

SEQ ID NO: 85545 - DNA, 20 bp, Artificial Sequence
  MKO10085545_B_Fcgrt
  gRNA
gccgtgagatgatacatcag

SEQ ID NO: 85546 - DNA, 20 bp, Artificial Sequence
  MKO10085546_B_Fcho1
  gRNA
cttaaggatgtgctgcgcta

SEQ ID NO: 85547 - DNA, 20 bp, Artificial Sequence
  MKO10085547_B_Fcho1
  gRNA
cgagtatgtctcctcgatgt

SEQ ID NO: 85548 - DNA, 20 bp, Artificial Sequence
  MKO10085548_B_Fcho1
  gRNA
gatgcagtgcagatgttgtc

SEQ ID NO: 85549 - DNA, 20 bp, Artificial Sequence
  MKO10085549_B_Fcho2
  gRNA
taacagagctacaatagaag

SEQ ID NO: 85550 - DNA, 20 bp, Artificial Sequence
  MKO10085550_B_Fcho2
  gRNA
tctgtccatgcttcatatta

SEQ ID NO: 85551 - DNA, 20 bp, Artificial Sequence
  MKO10085551_B_Fcho2
  gRNA
ctgtaccataatatgaagca

SEQ ID NO: 85552 - DNA, 20 bp, Artificial Sequence
  MKO10085552_B_Fchsd1
  gRNA
gcagccattgaacgggagta

SEQ ID NO: 85553 - DNA, 20 bp, Artificial Sequence
  MKO10085553_B_Fchsd1
  gRNA
aaaagcgaagtttaacctcc

SEQ ID NO: 85554 - DNA, 20 bp, Artificial Sequence
  MKO10085554_B_Fchsd1
  gRNA
atggcccagccagcttctgg

SEQ ID NO: 85555 - DNA, 20 bp, Artificial Sequence
  MKO10085555_B_Fchsd2
  gRNA
tattgaaagagagtatgcac

SEQ ID NO: 85556 - DNA, 20 bp, Artificial Sequence
  MKO10085556_B_Fchsd2
  gRNA
gtcaatacctgaagagagat

SEQ ID NO: 85557 - DNA, 20 bp, Artificial Sequence
  MKO10085557_B_Fchsd2
  gRNA
gtcacattctgcctgatgtt

SEQ ID NO: 85558 - DNA, 20 bp, Artificial Sequence
  MKO10085558_B_Fcna
  gRNA
tacaggagaacggggctttc

SEQ ID NO: 85559 - DNA, 20 bp, Artificial Sequence
  MKO10085559_B_Fcna
  gRNA
ccaggaaagatgggacctgc

SEQ ID NO: 85560 - DNA, 20 bp, Artificial Sequence
  MKO10085560_B_Fcna
  gRNA
ctaggctcacctttaactcc

SEQ ID NO: 85561 - DNA, 20 bp, Artificial Sequence
  MKO10085561_B_Fcnb
  gRNA
agaactgaaggtcctagatc

SEQ ID NO: 85562 - DNA, 20 bp, Artificial Sequence
  MKO10085562_B_Fcnb
  gRNA
ccctctcagtcatgtgctac

SEQ ID NO: 85563 - DNA, 20 bp, Artificial Sequence
  MKO10085563_B_Fcnb
  gRNA
cctggaaaagaaggaccaac

SEQ ID NO: 85564 - DNA, 20 bp, Artificial Sequence
  MKO10085564_B_Fcrl1
  gRNA
gctctaccgtgtgaacctgc

SEQ ID NO: 85565 - DNA, 20 bp, Artificial Sequence
  MKO10085565_B_Fcrl1
  gRNA
ctgggaatataacttacttc

SEQ ID NO: 85566 - DNA, 20 bp, Artificial Sequence
  MKO10085566_B_Fcrl1
  gRNA
gcctggtcctcatgctacct

SEQ ID NO: 85567 - DNA, 20 bp, Artificial Sequence
  MKO10085567_B_Fcrl5
  gRNA
tattcatcgtgcaaatctga

SEQ ID NO: 85568 - DNA, 20 bp, Artificial Sequence
  MKO10085568_B_Fcrl5
  gRNA
tcaccatgctgtccattgac

SEQ ID NO: 85569 - DNA, 20 bp, Artificial Sequence
  MKO10085569_B_Fcrl5
  gRNA
acagatgtggctgactctac

SEQ ID NO: 85570 - DNA, 20 bp, Artificial Sequence
  MKO10085570_B_Fcrl6
  gRNA
tagcatgttgctcttgatcc

SEQ ID NO: 85571 - DNA, 20 bp, Artificial Sequence
  MKO10085571_B_Fcrl6
  gRNA
tgagctcaagaagttcccct

SEQ ID NO: 85572 - DNA, 20 bp, Artificial Sequence
  MKO10085572_B_Fcrl6
  gRNA
agagcaacatgctacctatc

SEQ ID NO: 85573 - DNA, 20 bp, Artificial Sequence
  MKO10085573_B_Fcrla
  gRNA
accttctagtgagccccaag

SEQ ID NO: 85574 - DNA, 20 bp, Artificial Sequence
  MKO10085574_B_Fcrla
  gRNA
gttactgagcctccctcttg

SEQ ID NO: 85575 - DNA, 20 bp, Artificial Sequence
  MKO10085575_B_Fcrla
  gRNA
ttccatctcagcgtgtccta

SEQ ID NO: 85576 - DNA, 20 bp, Artificial Sequence
  MKO10085576_B_Fcrlb
  gRNA
tcgcccaccttgcacggtca

SEQ ID NO: 85577 - DNA, 20 bp, Artificial Sequence
  MKO10085577_B_Fcrlb
  gRNA
gtgtatcgatgtcagacacg

SEQ ID NO: 85578 - DNA, 20 bp, Artificial Sequence
  MKO10085578_B_Fcrlb
  gRNA
cattagcactctctggtacc

SEQ ID NO: 85579 - DNA, 20 bp, Artificial Sequence
  MKO10085579_B_Fcrls
  gRNA
gtgcttcaagctacaccatt

SEQ ID NO: 85580 - DNA, 20 bp, Artificial Sequence
  MKO10085580_B_Fcrls
  gRNA
tccagcccgattgcaaagtg

SEQ ID NO: 85581 - DNA, 20 bp, Artificial Sequence
  MKO10085581_B_Fcrls
  gRNA
ggctccccttcaacgaccag

SEQ ID NO: 85582 - DNA, 20 bp, Artificial Sequence
  MKO10085582_B_Fdft1
  gRNA
aaccttgtcccagtcctgtt

SEQ ID NO: 85583 - DNA, 20 bp, Artificial Sequence
  MKO10085583_B_Fdft1
  gRNA
ctctcagtgaaccgccactc

SEQ ID NO: 85584 - DNA, 20 bp, Artificial Sequence
  MKO10085584_B_Fdft1
  gRNA
ctgccatcccacaccccatc

SEQ ID NO: 85585 - DNA, 20 bp, Artificial Sequence
  MKO10085585_B_Fdps
  gRNA
cctgcagaaagagctccagc

SEQ ID NO: 85586 - DNA, 20 bp, Artificial Sequence
  MKO10085586_B_Fdps
  gRNA
gtcctagagtacaatgcctt

SEQ ID NO: 85587 - DNA, 20 bp, Artificial Sequence
  MKO10085587_B_Fdps
  gRNA
ccttgtgtcagatgacatca

SEQ ID NO: 85588 - DNA, 20 bp, Artificial Sequence
  MKO10085588_B_Fdx1l
  gRNA
taccttccaggtccaccccg

SEQ ID NO: 85589 - DNA, 20 bp, Artificial Sequence
  MKO10085589_B_Fdx1l
  gRNA
acaggccagggatgcttcgc

SEQ ID NO: 85590 - DNA, 20 bp, Artificial Sequence
  MKO10085590_B_Fdx1l
  gRNA
aattcaactccctctagctc

SEQ ID NO: 85591 - DNA, 20 bp, Artificial Sequence
  MKO10085591_B_Fdx1
  gRNA
gagaacaacttagatatcga

SEQ ID NO: 85592 - DNA, 20 bp, Artificial Sequence
  MKO10085592_B_Fdx1
  gRNA
tttccttacaggtcaaggtt

SEQ ID NO: 85593 - DNA, 20 bp, Artificial Sequence
  MKO10085593_B_Fdx1
  gRNA
agtcatattgtccatagcct

SEQ ID NO: 85594 - DNA, 20 bp, Artificial Sequence
  MKO10085594_B_Fdxacb1
  gRNA
actaacgtcatgcacatagc

SEQ ID NO: 85595 - DNA, 20 bp, Artificial Sequence
  MKO10085595_B_Fdxacb1
  gRNA
tacccagtgcacttgtatcc

SEQ ID NO: 85596 - DNA, 20 bp, Artificial Sequence
  MKO10085596_B_Fdxacb1
  gRNA
agctctcaaagggtaagctc

SEQ ID NO: 85597 - DNA, 20 bp, Artificial Sequence
  MKO10085597_B_Fdxr
  gRNA
gcttctcgtagatgtctacg

SEQ ID NO: 85598 - DNA, 20 bp, Artificial Sequence
  MKO10085598_B_Fdxr
  gRNA
tcgggaagcctaccatgctg

SEQ ID NO: 85599 - DNA, 20 bp, Artificial Sequence
  MKO10085599_B_Fdxr
  gRNA
ctgccagaagttctccacac

SEQ ID NO: 85600 - DNA, 20 bp, Artificial Sequence
  MKO10085600_B_Fech
  gRNA
gatgagttatcccctgccac

SEQ ID NO: 85601 - DNA, 20 bp, Artificial Sequence
  MKO10085601_B_Fech
  gRNA
gtggtggagcagctatactg

SEQ ID NO: 85602 - DNA, 20 bp, Artificial Sequence
  MKO10085602_B_Fech
  gRNA
cgtccatcccctgacagaag

SEQ ID NO: 85603 - DNA, 20 bp, Artificial Sequence
  MKO10085603_B_Fem1a
  gRNA
agcggctccgtgcacttcga

SEQ ID NO: 85604 - DNA, 20 bp, Artificial Sequence
  MKO10085604_B_Fem1a
  gRNA
ggcgatggaactccgtcacc

SEQ ID NO: 85605 - DNA, 20 bp, Artificial Sequence
  MKO10085605_B_Fem1a
  gRNA
cacacgataccggcccacgt

SEQ ID NO: 85606 - DNA, 20 bp, Artificial Sequence
  MKO10085606_B_Fem1b
  gRNA
aaatccgttcccgaactata

SEQ ID NO: 85607 - DNA, 20 bp, Artificial Sequence
  MKO10085607_B_Fem1b
  gRNA
gatgtacctacccgtcgaag

SEQ ID NO: 85608 - DNA, 20 bp, Artificial Sequence
  MKO10085608_B_Fem1b
  gRNA
tgttgtactggacgataatg

SEQ ID NO: 85609 - DNA, 20 bp, Artificial Sequence
  MKO10085609_B_Fem1c
  gRNA
ttaagcgatgcatcaaccta

SEQ ID NO: 85610 - DNA, 20 bp, Artificial Sequence
  MKO10085610_B_Fem1c
  gRNA
tcgagggggcccccccttta

SEQ ID NO: 85611 - DNA, 20 bp, Artificial Sequence
  MKO10085611_B_Fem1c
  gRNA
gggctctgttaactttgacg

SEQ ID NO: 85612 - DNA, 20 bp, Artificial Sequence
  MKO10085612_B_Fen1
  gRNA
gcggctgagtaagagccgcc

SEQ ID NO: 85613 - DNA, 20 bp, Artificial Sequence
  MKO10085613_B_Fen1
  gRNA
ttgccatcaaagacgtacac

SEQ ID NO: 85614 - DNA, 20 bp, Artificial Sequence
  MKO10085614_B_Fen1
  gRNA
ccatctgagccgcgtcctgc

SEQ ID NO: 85615 - DNA, 20 bp, Artificial Sequence
  MKO10085615_B_Fer1l4
  gRNA
gtccacttaccggggacacc

SEQ ID NO: 85616 - DNA, 20 bp, Artificial Sequence
  MKO10085616_B_Fer1l4
  gRNA
gctgctgcagcgaaatcacc

SEQ ID NO: 85617 - DNA, 20 bp, Artificial Sequence
  MKO10085617_B_Fer1l4
  gRNA
cctgttcctagctgtttcgt

SEQ ID NO: 85618 - DNA, 20 bp, Artificial Sequence
  MKO10085618_B_Fer1l5
  gRNA
ctttgtgccagccgcttgag

SEQ ID NO: 85619 - DNA, 20 bp, Artificial Sequence
  MKO10085619_B_Fer1l5
  gRNA
tatgatgaaaagaactcgag

SEQ ID NO: 85620 - DNA, 20 bp, Artificial Sequence
  MKO10085620_B_Fer1l5
  gRNA
gtgtactgtcaccctacatg

SEQ ID NO: 85621 - DNA, 20 bp, Artificial Sequence
  MKO10085621_B_Ferd3l
  gRNA
cttcgaccagctgcgcagaa

SEQ ID NO: 85622 - DNA, 20 bp, Artificial Sequence
  MKO10085622_B_Ferd3l
  gRNA
ccaacattcgcgagaggaag

SEQ ID NO: 85623 - DNA, 20 bp, Artificial Sequence
  MKO10085623_B_Ferd3l
  gRNA
cagtctcttctcataagcga

SEQ ID NO: 85624 - DNA, 20 bp, Artificial Sequence
  MKO10085624_B_Fermt1
  gRNA
tgtcaaccaaagatcgaggc

SEQ ID NO: 85625 - DNA, 20 bp, Artificial Sequence
  MKO10085625_B_Fermt1
  gRNA
aacatgtcggcaaggacatc

SEQ ID NO: 85626 - DNA, 20 bp, Artificial Sequence
  MKO10085626_B_Fermt1
  gRNA
cctgaatgctttgctccata

SEQ ID NO: 85627 - DNA, 20 bp, Artificial Sequence
  MKO10085627_B_Fermt2
  gRNA
tgaagacgaagcgcttgagc

SEQ ID NO: 85628 - DNA, 20 bp, Artificial Sequence
  MKO10085628_B_Fermt2
  gRNA
cttctctgaccgagtcttca

SEQ ID NO: 85629 - DNA, 20 bp, Artificial Sequence
  MKO10085629_B_Fermt2
  gRNA
cttggctgcttaagacacac

SEQ ID NO: 85630 - DNA, 20 bp, Artificial Sequence
  MKO10085630_B_Fermt3
  gRNA
cagctaagacaacctttgtc

SEQ ID NO: 85631 - DNA, 20 bp, Artificial Sequence
  MKO10085631_B_Fermt3
  gRNA
gtggcacccactttattcag

SEQ ID NO: 85632 - DNA, 20 bp, Artificial Sequence
  MKO10085632_B_Fermt3
  gRNA
tcgcagccaaagcacatccc

SEQ ID NO: 85633 - DNA, 20 bp, Artificial Sequence
  MKO10085633_B_Fert2
  gRNA
ggcccctggcggagcatgac

SEQ ID NO: 85634 - DNA, 20 bp, Artificial Sequence
  MKO10085634_B_Fert2
  gRNA
tctattcgtcattcaattgc

SEQ ID NO: 85635 - DNA, 20 bp, Artificial Sequence
  MKO10085635_B_Fert2
  gRNA
ctccgccctacctttgggat

SEQ ID NO: 85636 - DNA, 20 bp, Artificial Sequence
  MKO10085636_B_Fes
  gRNA
cctgggtgctatctcgtacc

SEQ ID NO: 85637 - DNA, 20 bp, Artificial Sequence
  MKO10085637_B_Fes
  gRNA
caggcagcatgaaccggtgg

SEQ ID NO: 85638 - DNA, 20 bp, Artificial Sequence
  MKO10085638_B_Fes
  gRNA
cctggtacgagatagcaccc

SEQ ID NO: 85639 - DNA, 20 bp, Artificial Sequence
  MKO10085639_B_Fetub
  gRNA
tgaactcgtcaaagtcacca

SEQ ID NO: 85640 - DNA, 20 bp, Artificial Sequence
  MKO10085640_B_Fetub
  gRNA
cacagaaggactgcaaaccg

SEQ ID NO: 85641 - DNA, 20 bp, Artificial Sequence
  MKO10085641_B_Fetub
  gRNA
accgactcatagaacatcct

SEQ ID NO: 85642 - DNA, 20 bp, Artificial Sequence
  MKO10085642_B_Fev
  gRNA
gccgcagatcccgtcggaga

SEQ ID NO: 85643 - DNA, 20 bp, Artificial Sequence
  MKO10085643_B_Fev
  gRNA
ccggcagcgatgagacagag

SEQ ID NO: 85644 - DNA, 20 bp, Artificial Sequence
  MKO10085644_B_Fev
  gRNA
ctgatcaacatgtacctgcc

SEQ ID NO: 85645 - DNA, 20 bp, Artificial Sequence
  MKO10085645_B_Fez1
  gRNA
ataggaccagttgttgttga

SEQ ID NO: 85646 - DNA, 20 bp, Artificial Sequence
  MKO10085646_B_Fez1
  gRNA
tggaggagaaatctcatccc

SEQ ID NO: 85647 - DNA, 20 bp, Artificial Sequence
  MKO10085647_B_Fez1
  gRNA
ccttctacagattcatgaga

SEQ ID NO: 85648 - DNA, 20 bp, Artificial Sequence
  MKO10085648_B_Fez2
  gRNA
agatgaactcgagttcgaga

SEQ ID NO: 85649 - DNA, 20 bp, Artificial Sequence
  MKO10085649_B_Fez2
  gRNA
gcaaatgcaaggtccttgta

SEQ ID NO: 85650 - DNA, 20 bp, Artificial Sequence
  MKO10085650_B_Fez2
  gRNA
cacttacccctttctccgag

SEQ ID NO: 85651 - DNA, 20 bp, Artificial Sequence
  MKO10085651_B_Fezf1
  gRNA
taacttaacccgtcacatgc

SEQ ID NO: 85652 - DNA, 20 bp, Artificial Sequence
  MKO10085652_B_Fezf1
  gRNA
cagcctacattgccgcctcc

SEQ ID NO: 85653 - DNA, 20 bp, Artificial Sequence
  MKO10085653_B_Fezf1
  gRNA
cacacatacccgaattcacg

SEQ ID NO: 85654 - DNA, 20 bp, Artificial Sequence
  MKO10085654_B_Fezf2
  gRNA
gcttgtagcccgcgtggatg

SEQ ID NO: 85655 - DNA, 20 bp, Artificial Sequence
  MKO10085655_B_Fezf2
  gRNA
gcaaaaacctttgccgcaag

SEQ ID NO: 85656 - DNA, 20 bp, Artificial Sequence
  MKO10085656_B_Fezf2
  gRNA
gccacaaaactcgcagacga

SEQ ID NO: 85657 - DNA, 20 bp, Artificial Sequence
  MKO10085657_B_Ffar1
  gRNA
ctgccctgagcttccgtttg

SEQ ID NO: 85658 - DNA, 20 bp, Artificial Sequence
  MKO10085658_B_Ffar1
  gRNA
cactttgctcccctctacgc

SEQ ID NO: 85659 - DNA, 20 bp, Artificial Sequence
  MKO10085659_B_Ffar1
  gRNA
agtttcataaacccggacct

SEQ ID NO: 85660 - DNA, 20 bp, Artificial Sequence
  MKO10085660_B_Ffar2
  gRNA
agttctcgtagcaggttatt

SEQ ID NO: 85661 - DNA, 20 bp, Artificial Sequence
  MKO10085661_B_Ffar2
  gRNA
gtcagcgcgcacacgatctt

SEQ ID NO: 85662 - DNA, 20 bp, Artificial Sequence
  MKO10085662_B_Ffar2
  gRNA
gtcgcctctgagccccaacg

SEQ ID NO: 85663 - DNA, 20 bp, Artificial Sequence
  MKO10085663_B_Ffar3
  gRNA
cactacagtgagccgatgcc

SEQ ID NO: 85664 - DNA, 20 bp, Artificial Sequence
  MKO10085664_B_Ffar3
  gRNA
gggactccccctcaacgtga

SEQ ID NO: 85665 - DNA, 20 bp, Artificial Sequence
  MKO10085665_B_Ffar3
  gRNA
gttcgatgctcaccgccgtc

SEQ ID NO: 85666 - DNA, 20 bp, Artificial Sequence
  MKO10085666_B_Ffar4
  gRNA
ccaggtcctgccggaagttt

SEQ ID NO: 85667 - DNA, 20 bp, Artificial Sequence
  MKO10085667_B_Ffar4
  gRNA
ggaaattccgatttgcacat

SEQ ID NO: 85668 - DNA, 20 bp, Artificial Sequence
  MKO10085668_B_Ffar4
  gRNA
ctgatcacaatgaccagtcc

SEQ ID NO: 85669 - DNA, 20 bp, Artificial Sequence
  MKO10085669_B_Fga
  gRNA
ggcgcagaattgagatcctg

SEQ ID NO: 85670 - DNA, 20 bp, Artificial Sequence
  MKO10085670_B_Fga
  gRNA
cacctgcctcatcttgagcg

SEQ ID NO: 85671 - DNA, 20 bp, Artificial Sequence
  MKO10085671_B_Fga
  gRNA
actacagataccgaagataa

SEQ ID NO: 85672 - DNA, 20 bp, Artificial Sequence
  MKO10085672_B_Fgb
  gRNA
tcgtgtgctccgctcaatcc

SEQ ID NO: 85673 - DNA, 20 bp, Artificial Sequence
  MKO10085673_B_Fgb
  gRNA
gcaacaaacgttgttaaacc

SEQ ID NO: 85674 - DNA, 20 bp, Artificial Sequence
  MKO10085674_B_Fgb
  gRNA
agcggagcacacgaagatta

SEQ ID NO: 85675 - DNA, 20 bp, Artificial Sequence
  MKO10085675_B_Fgd1
  gRNA
agaaattccagtgcccccga

SEQ ID NO: 85676 - DNA, 20 bp, Artificial Sequence
  MKO10085676_B_Fgd1
  gRNA
cataggccttctcagtttgc

SEQ ID NO: 85677 - DNA, 20 bp, Artificial Sequence
  MKO10085677_B_Fgd1
  gRNA
agctctggggacgagtccct

SEQ ID NO: 85678 - DNA, 20 bp, Artificial Sequence
  MKO10085678_B_Fgd2
  gRNA
ctcaagaacaagttatcgag

SEQ ID NO: 85679 - DNA, 20 bp, Artificial Sequence
  MKO10085679_B_Fgd2
  gRNA
agggcagccacgccccgcat

SEQ ID NO: 85680 - DNA, 20 bp, Artificial Sequence
  MKO10085680_B_Fgd2
  gRNA
cactcgataacttgttcttg

SEQ ID NO: 85681 - DNA, 20 bp, Artificial Sequence
  MKO10085681_B_Fgd3
  gRNA
gaagctgcttcatattgccc

SEQ ID NO: 85682 - DNA, 20 bp, Artificial Sequence
  MKO10085682_B_Fgd3
  gRNA
actacctaaagaggctcccc

SEQ ID NO: 85683 - DNA, 20 bp, Artificial Sequence
  MKO10085683_B_Fgd3
  gRNA
ggaggaactgcccatggaaa

SEQ ID NO: 85684 - DNA, 20 bp, Artificial Sequence
  MKO10085684_B_Fgd4
  gRNA
aaggatggaggagtctaatc

SEQ ID NO: 85685 - DNA, 20 bp, Artificial Sequence
  MKO10085685_B_Fgd4
  gRNA
taaattcctattacctgagc

SEQ ID NO: 85686 - DNA, 20 bp, Artificial Sequence
  MKO10085686_B_Fgd4
  gRNA
taataggaatttactatgga

SEQ ID NO: 85687 - DNA, 20 bp, Artificial Sequence
  MKO10085687_B_Fgd5
  gRNA
gatgttgcagcacttaagcc

SEQ ID NO: 85688 - DNA, 20 bp, Artificial Sequence
  MKO10085688_B_Fgd5
  gRNA
gcagctcctgagcgatgaca

SEQ ID NO: 85689 - DNA, 20 bp, Artificial Sequence
  MKO10085689_B_Fgd5
  gRNA
ctcacatcagacgaagaaca

SEQ ID NO: 85690 - DNA, 20 bp, Artificial Sequence
  MKO10085690_B_Fgd6
  gRNA
atgcagttctggaacatccc

SEQ ID NO: 85691 - DNA, 20 bp, Artificial Sequence
  MKO10085691_B_Fgd6
  gRNA
ctcggagctcatgatctcct

SEQ ID NO: 85692 - DNA, 20 bp, Artificial Sequence
  MKO10085692_B_Fgd6
  gRNA
caaagttcatcatattgcca

SEQ ID NO: 85693 - DNA, 20 bp, Artificial Sequence
  MKO10085693_B_Fgf10
  gRNA
tttccactgatgttatctcc

SEQ ID NO: 85694 - DNA, 20 bp, Artificial Sequence
  MKO10085694_B_Fgf10
  gRNA
ctgccagttaaaagatgcat

SEQ ID NO: 85695 - DNA, 20 bp, Artificial Sequence
  MKO10085695_B_Fgf10
  gRNA
tgtcctggagataacatcag

SEQ ID NO: 85696 - DNA, 20 bp, Artificial Sequence
  MKO10085696_B_Fgf11
  gRNA
caatagcccctcagcgttca

SEQ ID NO: 85697 - DNA, 20 bp, Artificial Sequence
  MKO10085697_B_Fgf11
  gRNA
ctacatggccatgaacgctg

SEQ ID NO: 85698 - DNA, 20 bp, Artificial Sequence
  MKO10085698_B_Fgf11
  gRNA
ggtgccctggatactcccat

SEQ ID NO: 85699 - DNA, 20 bp, Artificial Sequence
  MKO10085699_B_Fgf12
  gRNA
gccaccacacgcagtcctac

SEQ ID NO: 85700 - DNA, 20 bp, Artificial Sequence
  MKO10085700_B_Fgf12
  gRNA
ggttaaagccagcctttatg

SEQ ID NO: 85701 - DNA, 20 bp, Artificial Sequence
  MKO10085701_B_Fgf12
  gRNA
tctccaatttcgtgtagtga

SEQ ID NO: 85702 - DNA, 20 bp, Artificial Sequence
  MKO10085702_B_Fgf13
  gRNA
atctaccgtcagcagcaatc

SEQ ID NO: 85703 - DNA, 20 bp, Artificial Sequence
  MKO10085703_B_Fgf13
  gRNA
gccttgtcggctgtatagtt

SEQ ID NO: 85704 - DNA, 20 bp, Artificial Sequence
  MKO10085704_B_Fgf13
  gRNA
accaaactatacagccgaca

SEQ ID NO: 85705 - DNA, 20 bp, Artificial Sequence
  MKO10085705_B_Fgf14
  gRNA
gcaacaacgcgcagtcccac

SEQ ID NO: 85706 - DNA, 20 bp, Artificial Sequence
  MKO10085706_B_Fgf14
  gRNA
gactctttaaacttgcattc

SEQ ID NO: 85707 - DNA, 20 bp, Artificial Sequence
  MKO10085707_B_Fgf14
  gRNA
tgaaacagtcccgaaagctg

SEQ ID NO: 85708 - DNA, 20 bp, Artificial Sequence
  MKO10085708_B_Fgf15
  gRNA
gtgacagcatggatccgttc

SEQ ID NO: 85709 - DNA, 20 bp, Artificial Sequence
  MKO10085709_B_Fgf15
  gRNA
ttctccaaagattcgctact

SEQ ID NO: 85710 - DNA, 20 bp, Artificial Sequence
  MKO10085710_B_Fgf15
  gRNA
cagcggagtacaggtactgc

SEQ ID NO: 85711 - DNA, 20 bp, Artificial Sequence
  MKO10085711_B_Fgf16
  gRNA
agtagagctggcggcgccgc

SEQ ID NO: 85712 - DNA, 20 bp, Artificial Sequence
  MKO10085712_B_Fgf16
  gRNA
aatgagcgaggagagctcta

SEQ ID NO: 85713 - DNA, 20 bp, Artificial Sequence
  MKO10085713_B_Fgf16
  gRNA
ctgtggggctgatcagcatc

SEQ ID NO: 85714 - DNA, 20 bp, Artificial Sequence
  MKO10085714_B_Fgf17
  gRNA
cggcagcagagtccgcatca

SEQ ID NO: 85715 - DNA, 20 bp, Artificial Sequence
  MKO10085715_B_Fgf17
  gRNA
cgctctctgcccccttgatg

SEQ ID NO: 85716 - DNA, 20 bp, Artificial Sequence
  MKO10085716_B_Fgf17
  gRNA
cgccctggtccctcacgtac

SEQ ID NO: 85717 - DNA, 20 bp, Artificial Sequence
  MKO10085717_B_Fgf18
  gRNA
cttcatgaagcgttacccca

SEQ ID NO: 85718 - DNA, 20 bp, Artificial Sequence
  MKO10085718_B_Fgf18
  gRNA
tacctgtgtatgaaccgaaa

SEQ ID NO: 85719 - DNA, 20 bp, Artificial Sequence
  MKO10085719_B_Fgf18
  gRNA
ataccttcgggagtcaagtc

SEQ ID NO: 85720 - DNA, 20 bp, Artificial Sequence
  MKO10085720_B_Fgf1
  gRNA
cctctcggtcagggctgcga

SEQ ID NO: 85721 - DNA, 20 bp, Artificial Sequence
  MKO10085721_B_Fgf1
  gRNA
tacggagaccggccagtact

SEQ ID NO: 85722 - DNA, 20 bp, Artificial Sequence
  MKO10085722_B_Fgf1
  gRNA
gttcttctccgcatgcttct

SEQ ID NO: 85723 - DNA, 20 bp, Artificial Sequence
  MKO10085723_B_Fgf20
  gRNA
ctactggtcttggtaaaaag

SEQ ID NO: 85724 - DNA, 20 bp, Artificial Sequence
  MKO10085724_B_Fgf20
  gRNA
gtgggactggtcagtatcag

SEQ ID NO: 85725 - DNA, 20 bp, Artificial Sequence
  MKO10085725_B_Fgf20
  gRNA
gtggacagtggcctgtacct

SEQ ID NO: 85726 - DNA, 20 bp, Artificial Sequence
  MKO10085726_B_Fgf21
  gRNA
atgcttggtagacccccagc

SEQ ID NO: 85727 - DNA, 20 bp, Artificial Sequence
  MKO10085727_B_Fgf21
  gRNA
cccaggatttgaatgacccc

SEQ ID NO: 85728 - DNA, 20 bp, Artificial Sequence
  MKO10085728_B_Fgf21
  gRNA
tcctgggtgtcaaagcctct

SEQ ID NO: 85729 - DNA, 20 bp, Artificial Sequence
  MKO10085729_B_Fgf22
  gRNA
acacatacgcctcgcgacgt

SEQ ID NO: 85730 - DNA, 20 bp, Artificial Sequence
  MKO10085730_B_Fgf22
  gRNA
tctatgtggccatgaatcgc

SEQ ID NO: 85731 - DNA, 20 bp, Artificial Sequence
  MKO10085731_B_Fgf22
  gRNA
ggagatccgttctgtccgtg

SEQ ID NO: 85732 - DNA, 20 bp, Artificial Sequence
  MKO10085732_B_Fgf23
  gRNA
ccggacacttccccattgct

SEQ ID NO: 85733 - DNA, 20 bp, Artificial Sequence
  MKO10085733_B_Fgf23
  gRNA
acaaaggaaccttcgagtca

SEQ ID NO: 85734 - DNA, 20 bp, Artificial Sequence
  MKO10085734_B_Fgf23
  gRNA
actcactgtagatggtctga

SEQ ID NO: 85735 - DNA, 20 bp, Artificial Sequence
  MKO10085735_B_Fgf2
  gRNA
tttcagtgccacataccaac

SEQ ID NO: 85736 - DNA, 20 bp, Artificial Sequence
  MKO10085736_B_Fgf2
  gRNA
tcaagggagtgtgtgccaac

SEQ ID NO: 85737 - DNA, 20 bp, Artificial Sequence
  MKO10085737_B_Fgf2
  gRNA
gtccatcttccttcatagca

SEQ ID NO: 85738 - DNA, 20 bp, Artificial Sequence
  MKO10085738_B_Fgf3
  gRNA
gcttcccgcctgtaccgcac

SEQ ID NO: 85739 - DNA, 20 bp, Artificial Sequence
  MKO10085739_B_Fgf3
  gRNA
cttccaccgcagtaatctcc

SEQ ID NO: 85740 - DNA, 20 bp, Artificial Sequence
  MKO10085740_B_Fgf3
  gRNA
gagaggacggctgtatgctt

SEQ ID NO: 85741 - DNA, 20 bp, Artificial Sequence
  MKO10085741_B_Fgf4
  gRNA
ccgagtgtcgcctaccatga

SEQ ID NO: 85742 - DNA, 20 bp, Artificial Sequence
  MKO10085742_B_Fgf4
  gRNA
agtggccagccggttcttcg

SEQ ID NO: 85743 - DNA, 20 bp, Artificial Sequence
  MKO10085743_B_Fgf4
  gRNA
ctcaccacgcctcgctgcac

SEQ ID NO: 85744 - DNA, 20 bp, Artificial Sequence
  MKO10085744_B_Fgf5
  gRNA
gaaggaaagttccggttgct

SEQ ID NO: 85745 - DNA, 20 bp, Artificial Sequence
  MKO10085745_B_Fgf5
  gRNA
ggaaatatttgctgtgtctc

SEQ ID NO: 85746 - DNA, 20 bp, Artificial Sequence
  MKO10085746_B_Fgf5
  gRNA
acgtcgcgctacttctgccc

SEQ ID NO: 85747 - DNA, 20 bp, Artificial Sequence
  MKO10085747_B_Fgf6
  gRNA
caccacaccccgttctaccg

SEQ ID NO: 85748 - DNA, 20 bp, Artificial Sequence
  MKO10085748_B_Fgf6
  gRNA
tctgtacaggtctgactcgt

SEQ ID NO: 85749 - DNA, 20 bp, Artificial Sequence
  MKO10085749_B_Fgf6
  gRNA
gagcactcttcaccccgaag

SEQ ID NO: 85750 - DNA, 20 bp, Artificial Sequence
  MKO10085750_B_Fgf7
  gRNA
acacctatgcatcagctaaa

SEQ ID NO: 85751 - DNA, 20 bp, Artificial Sequence
  MKO10085751_B_Fgf7
  gRNA
tgccacaattccaactgcca

SEQ ID NO: 85752 - DNA, 20 bp, Artificial Sequence
  MKO10085752_B_Fgf7
  gRNA
gttggaattgtggcaatcaa

SEQ ID NO: 85753 - DNA, 20 bp, Artificial Sequence
  MKO10085753_B_Fgf8
  gRNA
cctgacagcgaagctcattg

SEQ ID NO: 85754 - DNA, 20 bp, Artificial Sequence
  MKO10085754_B_Fgf8
  gRNA
tactcacaggcagctcagcg

SEQ ID NO: 85755 - DNA, 20 bp, Artificial Sequence
  MKO10085755_B_Fgf8
  gRNA
ccacaggctgttgcacttgc

SEQ ID NO: 85756 - DNA, 20 bp, Artificial Sequence
  MKO10085756_B_Fgf9
  gRNA
cccccttctcgttcatgccg

SEQ ID NO: 85757 - DNA, 20 bp, Artificial Sequence
  MKO10085757_B_Fgf9
  gRNA
tttctggtgccgtttagtcc

SEQ ID NO: 85758 - DNA, 20 bp, Artificial Sequence
  MKO10085758_B_Fgf9
  gRNA
ttgtcagggtccactggtct

SEQ ID NO: 85759 - DNA, 20 bp, Artificial Sequence
  MKO10085759_B_Fgfbp1
  gRNA
gagggttcagctccctcgtt

SEQ ID NO: 85760 - DNA, 20 bp, Artificial Sequence
  MKO10085760_B_Fgfbp1
  gRNA
ctgagaacgcctgagtagcc

SEQ ID NO: 85761 - DNA, 20 bp, Artificial Sequence
  MKO10085761_B_Fgfbp1
  gRNA
acatctaaatctctgacgca

SEQ ID NO: 85762 - DNA, 20 bp, Artificial Sequence
  MKO10085762_B_Fgfbp3
  gRNA
cgctttcctcccgcccgagt

SEQ ID NO: 85763 - DNA, 20 bp, Artificial Sequence
  MKO10085763_B_Fgfbp3
  gRNA
gagagcgacgcccgcggcct

SEQ ID NO: 85764 - DNA, 20 bp, Artificial Sequence
  MKO10085764_B_Fgfbp3
  gRNA
ggcgcgcgcactactggaga

SEQ ID NO: 85765 - DNA, 20 bp, Artificial Sequence
  MKO10085765_B_Fgfr1op2
  gRNA
tattgaaattgacgagcagc

SEQ ID NO: 85766 - DNA, 20 bp, Artificial Sequence
  MKO10085766_B_Fgfr1op2
  gRNA
ttaatgaagtagcaagacat

SEQ ID NO: 85767 - DNA, 20 bp, Artificial Sequence
  MKO10085767_B_Fgfr1op2
  gRNA
gaattacaacaagaaaacaa

SEQ ID NO: 85768 - DNA, 20 bp, Artificial Sequence
  MKO10085768_B_Fgfr1op
  gRNA
tttgaaggctgaactcagag

SEQ ID NO: 85769 - DNA, 20 bp, Artificial Sequence
  MKO10085769_B_Fgfr1op
  gRNA
tctccagcgtctgcaccagc

SEQ ID NO: 85770 - DNA, 20 bp, Artificial Sequence
  MKO10085770_B_Fgfr1op
  gRNA
gatggcggcgactaccgccg

SEQ ID NO: 85771 - DNA, 20 bp, Artificial Sequence
  MKO10085771_B_Fgfr1
  gRNA
tttaagcctgaccaccgaat

SEQ ID NO: 85772 - DNA, 20 bp, Artificial Sequence
  MKO10085772_B_Fgfr1
  gRNA
cacctaccagcttgacgtcg

SEQ ID NO: 85773 - DNA, 20 bp, Artificial Sequence
  MKO10085773_B_Fgfr1
  gRNA
tcttacccacgacgtcaagc

SEQ ID NO: 85774 - DNA, 20 bp, Artificial Sequence
  MKO10085774_B_Fgfr2
  gRNA
caaactcaccaacgacatcg

SEQ ID NO: 85775 - DNA, 20 bp, Artificial Sequence
  MKO10085775_B_Fgfr2
  gRNA
ctgactcaggagcaccgtac

SEQ ID NO: 85776 - DNA, 20 bp, Artificial Sequence
  MKO10085776_B_Fgfr2
  gRNA
cacatcccctccgaccaccg

SEQ ID NO: 85777 - DNA, 20 bp, Artificial Sequence
  MKO10085777_B_Fgfr3
  gRNA
agcaggtggccttcggcagt

SEQ ID NO: 85778 - DNA, 20 bp, Artificial Sequence
  MKO10085778_B_Fgfr3
  gRNA
gcggaagcggacagtgtttg

SEQ ID NO: 85779 - DNA, 20 bp, Artificial Sequence
  MKO10085779_B_Fgfr3
  gRNA
cacgcagaacactagcacgc

SEQ ID NO: 85780 - DNA, 20 bp, Artificial Sequence
  MKO10085780_B_Fgfr4
  gRNA
tgggtagacatgaccactcg

SEQ ID NO: 85781 - DNA, 20 bp, Artificial Sequence
  MKO10085781_B_Fgfr4
  gRNA
ctccaatacgattctccccg

SEQ ID NO: 85782 - DNA, 20 bp, Artificial Sequence
  MKO10085782_B_Fgfr4
  gRNA
ggggtcttcatcattactga

SEQ ID NO: 85783 - DNA, 20 bp, Artificial Sequence
  MKO10085783_B_Fgfrl1
  gRNA
aatcactcggcgcctcatct

SEQ ID NO: 85784 - DNA, 20 bp, Artificial Sequence
  MKO10085784_B_Fgfrl1
  gRNA
ccgtgaccacacatcacccg

SEQ ID NO: 85785 - DNA, 20 bp, Artificial Sequence
  MKO10085785_B_Fgfrl1
  gRNA
tggccccccgaagaaccacc

SEQ ID NO: 85786 - DNA, 20 bp, Artificial Sequence
  MKO10085786_B_Fggy
  gRNA
cctctcgaaacgttatcatg

SEQ ID NO: 85787 - DNA, 20 bp, Artificial Sequence
  MKO10085787_B_Fggy
  gRNA
attgatgcacatcgaatccg

SEQ ID NO: 85788 - DNA, 20 bp, Artificial Sequence
  MKO10085788_B_Fggy
  gRNA
cctttaccagtaaaccatga

SEQ ID NO: 85789 - DNA, 20 bp, Artificial Sequence
  MKO10085789_B_Fgg
  gRNA
tacttacgaatctctcatct

SEQ ID NO: 85790 - DNA, 20 bp, Artificial Sequence
  MKO10085790_B_Fgg
  gRNA
taacccacgagacaagcatt

SEQ ID NO: 85791 - DNA, 20 bp, Artificial Sequence
  MKO10085791_B_Fgg
  gRNA
gtgcaaatccatgacacaac

SEQ ID NO: 85792 - DNA, 20 bp, Artificial Sequence
  MKO10085792_B_Fgl1
  gRNA
gtaattcagagacgatctga

SEQ ID NO: 85793 - DNA, 20 bp, Artificial Sequence
  MKO10085793_B_Fgl1
  gRNA
ggttggaatgactatgaaaa

SEQ ID NO: 85794 - DNA, 20 bp, Artificial Sequence
  MKO10085794_B_Fgl1
  gRNA
gtttattgtgacatgtctga

SEQ ID NO: 85795 - DNA, 20 bp, Artificial Sequence
  MKO10085795_B_Fgl2
  gRNA
taccgatcgttgtctctgtc

SEQ ID NO: 85796 - DNA, 20 bp, Artificial Sequence
  MKO10085796_B_Fgl2
  gRNA
cgctgaccatccagctcccg

SEQ ID NO: 85797 - DNA, 20 bp, Artificial Sequence
  MKO10085797_B_Fgl2
  gRNA
ccaaccaaaattctcgttca

SEQ ID NO: 85798 - DNA, 20 bp, Artificial Sequence
  MKO10085798_B_Fgr
  gRNA
cacccatgtagtgccgcact

SEQ ID NO: 85799 - DNA, 20 bp, Artificial Sequence
  MKO10085799_B_Fgr
  gRNA
gaggctcgctccctgagctc

SEQ ID NO: 85800 - DNA, 20 bp, Artificial Sequence
  MKO10085800_B_Fgr
  gRNA
gtgtctacagggagtatgac

SEQ ID NO: 85801 - DNA, 20 bp, Artificial Sequence
  MKO10085801_B_Fh1
  gRNA
atgccgaaagcttgaatgac

SEQ ID NO: 85802 - DNA, 20 bp, Artificial Sequence
  MKO10085802_B_Fh1
  gRNA
gttccaaccgataagtatta

SEQ ID NO: 85803 - DNA, 20 bp, Artificial Sequence
  MKO10085803_B_Fh1
  gRNA
agctgctgctgaagtaaacc

SEQ ID NO: 85804 - DNA, 20 bp, Artificial Sequence
  MKO10085804_B_Fhad1
  gRNA
cgttgacaaacgtgccgttg

SEQ ID NO: 85805 - DNA, 20 bp, Artificial Sequence
  MKO10085805_B_Fhad1
  gRNA
cgcagtgtgggccaacgcta

SEQ ID NO: 85806 - DNA, 20 bp, Artificial Sequence
  MKO10085806_B_Fhad1
  gRNA
cacataccttggttgatgac

SEQ ID NO: 85807 - DNA, 20 bp, Artificial Sequence
  MKO10085807_B_Fhdc1
  gRNA
gcaaagcgaagtatgaacat

SEQ ID NO: 85808 - DNA, 20 bp, Artificial Sequence
  MKO10085808_B_Fhdc1
  gRNA
acttcgctttgcatccaaga

SEQ ID NO: 85809 - DNA, 20 bp, Artificial Sequence
  MKO10085809_B_Fhdc1
  gRNA
ccttatgtctttgaacagag

SEQ ID NO: 85810 - DNA, 20 bp, Artificial Sequence
  MKO10085810_B_Fhit
  gRNA
tacatgtccacgttcttccc

SEQ ID NO: 85811 - DNA, 20 bp, Artificial Sequence
  MKO10085811_B_Fhit
  gRNA
ttctaggatggtcctgaagc

SEQ ID NO: 85812 - DNA, 20 bp, Artificial Sequence
  MKO10085812_B_Fhit
  gRNA
ctccttctcagatctccaaa

SEQ ID NO: 85813 - DNA, 20 bp, Artificial Sequence
  MKO10085813_B_Fhl1
  gRNA
tgtgcaacaagtgcgctact

SEQ ID NO: 85814 - DNA, 20 bp, Artificial Sequence
  MKO10085814_B_Fhl1
  gRNA
tgcattataagaatcgctac

SEQ ID NO: 85815 - DNA, 20 bp, Artificial Sequence
  MKO10085815_B_Fhl1
  gRNA
cacaaagcactcggcatgcc

SEQ ID NO: 85816 - DNA, 20 bp, Artificial Sequence
  MKO10085816_B_Fhl2
  gRNA
acacttaccactaatggggt

SEQ ID NO: 85817 - DNA, 20 bp, Artificial Sequence
  MKO10085817_B_Fhl2
  gRNA
tgcgttctgacctggcatga

SEQ ID NO: 85818 - DNA, 20 bp, Artificial Sequence
  MKO10085818_B_Fhl2
  gRNA
ccggtaagtaacacctcctg

SEQ ID NO: 85819 - DNA, 20 bp, Artificial Sequence
  MKO10085819_B_Fhl3
  gRNA
gtccccacagacgctgaccc

SEQ ID NO: 85820 - DNA, 20 bp, Artificial Sequence
  MKO10085820_B_Fhl3
  gRNA
ccccacagggtcccggaagc

SEQ ID NO: 85821 - DNA, 20 bp, Artificial Sequence
  MKO10085821_B_Fhl3
  gRNA
tgtccttcgaagaccgacat

SEQ ID NO: 85822 - DNA, 20 bp, Artificial Sequence
  MKO10085822_B_Fhl4
  gRNA
ctccttataacacacctcct

SEQ ID NO: 85823 - DNA, 20 bp, Artificial Sequence
  MKO10085823_B_Fhl4
  gRNA
tggacagcgtttcactgcta

SEQ ID NO: 85824 - DNA, 20 bp, Artificial Sequence
  MKO10085824_B_Fhl4
  gRNA
gttgaagcagtagtcatgcc

SEQ ID NO: 85825 - DNA, 20 bp, Artificial Sequence
  MKO10085825_B_Fhl5
  gRNA
tctgctttcaagaccgccag

SEQ ID NO: 85826 - DNA, 20 bp, Artificial Sequence
  MKO10085826_B_Fhl5
  gRNA
ccggatctcacctggcatga

SEQ ID NO: 85827 - DNA, 20 bp, Artificial Sequence
  MKO10085827_B_Fhl5
  gRNA
taaccttccgtgatcagata

SEQ ID NO: 85828 - DNA, 20 bp, Artificial Sequence
  MKO10085828_B_Fhod1
  gRNA
ctccgggtccaggtagtatc

SEQ ID NO: 85829 - DNA, 20 bp, Artificial Sequence
  MKO10085829_B_Fhod1
  gRNA
cgtgagggtcaatgctatct

SEQ ID NO: 85830 - DNA, 20 bp, Artificial Sequence
  MKO10085830_B_Fhod1
  gRNA
gcatctcccgctgttcttct

SEQ ID NO: 85831 - DNA, 20 bp, Artificial Sequence
  MKO10085831_B_Fhod3
  gRNA
gtgagggtccatgcctgcat

SEQ ID NO: 85832 - DNA, 20 bp, Artificial Sequence
  MKO10085832_B_Fhod3
  gRNA
gaaaagctgtacaactccag

SEQ ID NO: 85833 - DNA, 20 bp, Artificial Sequence
  MKO10085833_B_Fhod3
  gRNA
ccttcttagatctcggccac

SEQ ID NO: 85834 - DNA, 20 bp, Artificial Sequence
  MKO10085834_B_Fibcd1
  gRNA
ccttgcaggtatttcagcgc

SEQ ID NO: 85835 - DNA, 20 bp, Artificial Sequence
  MKO10085835_B_Fibcd1
  gRNA
ccttgacacggggccggcct

SEQ ID NO: 85836 - DNA, 20 bp, Artificial Sequence
  MKO10085836_B_Fibcd1
  gRNA
agaacatccaggcagtcccg

SEQ ID NO: 85837 - DNA, 20 bp, Artificial Sequence
  MKO10085837_B_Fibin
  gRNA
gttcacagtactgggccgcc

SEQ ID NO: 85838 - DNA, 20 bp, Artificial Sequence
  MKO10085838_B_Fibin
  gRNA
catcaaagtagcctcgacac

SEQ ID NO: 85839 - DNA, 20 bp, Artificial Sequence
  MKO10085839_B_Fibin
  gRNA
tggtgttcccgaagttgatc

SEQ ID NO: 85840 - DNA, 20 bp, Artificial Sequence
  MKO10085840_B_Fibp
  gRNA
gcccaagacctcccgaacaa

SEQ ID NO: 85841 - DNA, 20 bp, Artificial Sequence
  MKO10085841_B_Fibp
  gRNA
gggcctcaccgacggctcca

SEQ ID NO: 85842 - DNA, 20 bp, Artificial Sequence
  MKO10085842_B_Fibp
  gRNA
ctggtgagcacctctcgatg

SEQ ID NO: 85843 - DNA, 20 bp, Artificial Sequence
  MKO10085843_B_Ficd
  gRNA
actgccaccaccgacgccat

SEQ ID NO: 85844 - DNA, 20 bp, Artificial Sequence
  MKO10085844_B_Ficd
  gRNA
gagacccgctacgccgtgcc

SEQ ID NO: 85845 - DNA, 20 bp, Artificial Sequence
  MKO10085845_B_Ficd
  gRNA
gccagggccgcgaactcgac

SEQ ID NO: 85846 - DNA, 20 bp, Artificial Sequence
  MKO10085846_B_Fig4
  gRNA
aattgatagaacagaaccga

SEQ ID NO: 85847 - DNA, 20 bp, Artificial Sequence
  MKO10085847_B_Fig4
  gRNA
tttcgagccgtctcagcttt

SEQ ID NO: 85848 - DNA, 20 bp, Artificial Sequence
  MKO10085848_B_Fig4
  gRNA
acaacccggaggatcctttc

SEQ ID NO: 85849 - DNA, 20 bp, Artificial Sequence
  MKO10085849_B_Figf
  gRNA
tggaggctgctgcaacgaag

SEQ ID NO: 85850 - DNA, 20 bp, Artificial Sequence
  MKO10085850_B_Figf
  gRNA
cgtagaagtcgccagtgagc

SEQ ID NO: 85851 - DNA, 20 bp, Artificial Sequence
  MKO10085851_B_Figf
  gRNA
ttatcccacagcatgtcaat

SEQ ID NO: 85852 - DNA, 20 bp, Artificial Sequence
  MKO10085852_B_Figla
  gRNA
caacctaccagctgtgcgag

SEQ ID NO: 85853 - DNA, 20 bp, Artificial Sequence
  MKO10085853_B_Figla
  gRNA
tgccgtttctaccacagagc

SEQ ID NO: 85854 - DNA, 20 bp, Artificial Sequence
  MKO10085854_B_Figla
  gRNA
ctgtgttctggaagaagcga

SEQ ID NO: 85855 - DNA, 20 bp, Artificial Sequence
  MKO10085855_B_Fignl1
  gRNA
aggcggtgggctctttacac

SEQ ID NO: 85856 - DNA, 20 bp, Artificial Sequence
  MKO10085856_B_Fignl1
  gRNA
taaagagcccaccgcctttg

SEQ ID NO: 85857 - DNA, 20 bp, Artificial Sequence
  MKO10085857_B_Fignl1
  gRNA
gggactggtaaaactctgat

SEQ ID NO: 85858 - DNA, 20 bp, Artificial Sequence
  MKO10085858_B_Fignl2
  gRNA
gctcgtttgcgcgcagtagc

SEQ ID NO: 85859 - DNA, 20 bp, Artificial Sequence
  MKO10085859_B_Fignl2
  gRNA
gtagcccgccgcgtactcag

SEQ ID NO: 85860 - DNA, 20 bp, Artificial Sequence
  MKO10085860_B_Fignl2
  gRNA
cgctacgccgagaagtactc

SEQ ID NO: 85861 - DNA, 20 bp, Artificial Sequence
  MKO10085861_B_Fign
  gRNA
atcagtagcaccagtgttta

SEQ ID NO: 85862 - DNA, 20 bp, Artificial Sequence
  MKO10085862_B_Fign
  gRNA
cgaccattcacgagtcctga

SEQ ID NO: 85863 - DNA, 20 bp, Artificial Sequence
  MKO10085863_B_Fign
  gRNA
cctggtgaaggcggttatta

SEQ ID NO: 85864 - DNA, 20 bp, Artificial Sequence
  MKO10085864_B_Filip1l
  gRNA
gaccccttctgactcacacg

SEQ ID NO: 85865 - DNA, 20 bp, Artificial Sequence
  MKO10085865_B_Filip1l
  gRNA
atcccaccggcaaaccataa

SEQ ID NO: 85866 - DNA, 20 bp, Artificial Sequence
  MKO10085866_B_Filip1l
  gRNA
gacccctcgtgtgagtcaga

SEQ ID NO: 85867 - DNA, 20 bp, Artificial Sequence
  MKO10085867_B_Filip1
  gRNA
ataatgcgcctccagaacct

SEQ ID NO: 85868 - DNA, 20 bp, Artificial Sequence
  MKO10085868_B_Filip1
  gRNA
gaagaccaagcccgaggttc

SEQ ID NO: 85869 - DNA, 20 bp, Artificial Sequence
  MKO10085869_B_Filip1
  gRNA
gtcgctcttgttcatgtagt

SEQ ID NO: 85870 - DNA, 20 bp, Artificial Sequence
  MKO10085870_B_Fip1l1
  gRNA
ctgtgcacatgcacgtccca

SEQ ID NO: 85871 - DNA, 20 bp, Artificial Sequence
  MKO10085871_B_Fip1l1
  gRNA
gcttcttcttcaattccaga

SEQ ID NO: 85872 - DNA, 20 bp, Artificial Sequence
  MKO10085872_B_Fip1l1
  gRNA
cgtgcatgtgcacagtgact

SEQ ID NO: 85873 - DNA, 20 bp, Artificial Sequence
  MKO10085873_B_Fis1
  gRNA
aatcaggcgttccagctcct

SEQ ID NO: 85874 - DNA, 20 bp, Artificial Sequence
  MKO10085874_B_Fis1
  gRNA
atattcaaattgcgtgctct

SEQ ID NO: 85875 - DNA, 20 bp, Artificial Sequence
  MKO10085875_B_Fis1
  gRNA
cattgtatttgcttcgaacc

SEQ ID NO: 85876 - DNA, 20 bp, Artificial Sequence
  MKO10085876_B_Fitm1
  gRNA
tgaacaagccgcccgcctcc

SEQ ID NO: 85877 - DNA, 20 bp, Artificial Sequence
  MKO10085877_B_Fitm1
  gRNA
ccgtcaggtcctcgatgagt

SEQ ID NO: 85878 - DNA, 20 bp, Artificial Sequence
  MKO10085878_B_Fitm1
  gRNA
agacgcagtggggcgccagc

SEQ ID NO: 85879 - DNA, 20 bp, Artificial Sequence
  MKO10085879_B_Fitm2
  gRNA
tcgccctcaccagcgtcccg

SEQ ID NO: 85880 - DNA, 20 bp, Artificial Sequence
  MKO10085880_B_Fitm2
  gRNA
tccaacattgagcactatac

SEQ ID NO: 85881 - DNA, 20 bp, Artificial Sequence
  MKO10085881_B_Fitm2
  gRNA
gctggcgggctcggtcgtca

SEQ ID NO: 85882 - DNA, 20 bp, Artificial Sequence
  MKO10085882_B_Fiz1
  gRNA
gcctcaggtctgatcggtaa

SEQ ID NO: 85883 - DNA, 20 bp, Artificial Sequence
  MKO10085883_B_Fiz1
  gRNA
gccgcttgagatggcggccc

SEQ ID NO: 85884 - DNA, 20 bp, Artificial Sequence
  MKO10085884_B_Fiz1
  gRNA
gttccgttcacctcgagacc

SEQ ID NO: 85885 - DNA, 20 bp, Artificial Sequence
  MKO10085885_B_Fjx1
  gRNA
gcggttcgtggcgactgtag

SEQ ID NO: 85886 - DNA, 20 bp, Artificial Sequence
  MKO10085886_B_Fjx1
  gRNA
gctacgagcaacctgcaccg

SEQ ID NO: 85887 - DNA, 20 bp, Artificial Sequence
  MKO10085887_B_Fjx1
  gRNA
ctaccgggtagccggcatgt

SEQ ID NO: 85888 - DNA, 20 bp, Artificial Sequence
  MKO10085888_B_Fkbp10
  gRNA
tgtccacaacccgaaggaca

SEQ ID NO: 85889 - DNA, 20 bp, Artificial Sequence
  MKO10085889_B_Fkbp10
  gRNA
ggcacttatgacacctacat

SEQ ID NO: 85890 - DNA, 20 bp, Artificial Sequence
  MKO10085890_B_Fkbp10
  gRNA
ctttgttccacacgtccagc

SEQ ID NO: 85891 - DNA, 20 bp, Artificial Sequence
  MKO10085891_B_Fkbp11
  gRNA
accctcgctttccataagcc

SEQ ID NO: 85892 - DNA, 20 bp, Artificial Sequence
  MKO10085892_B_Fkbp11
  gRNA
tacctggaatcacctgcttt

SEQ ID NO: 85893 - DNA, 20 bp, Artificial Sequence
  MKO10085893_B_Fkbp11
  gRNA
ttctatgaccagaggatctc

SEQ ID NO: 85894 - DNA, 20 bp, Artificial Sequence
  MKO10085894_B_Fkbp14
  gRNA
tgaaagccatcacgatgctt

SEQ ID NO: 85895 - DNA, 20 bp, Artificial Sequence
  MKO10085895_B_Fkbp14
  gRNA
ttacttacgtggaatgaaac

SEQ ID NO: 85896 - DNA, 20 bp, Artificial Sequence
  MKO10085896_B_Fkbp14
  gRNA
tttctaaatagccttcgtag

SEQ ID NO: 85897 - DNA, 20 bp, Artificial Sequence
  MKO10085897_B_Fkbp15
  gRNA
aaatggtcaatatgcaaagc

SEQ ID NO: 85898 - DNA, 20 bp, Artificial Sequence
  MKO10085898_B_Fkbp15
  gRNA
gcggtatgcatgcactgcag

SEQ ID NO: 85899 - DNA, 20 bp, Artificial Sequence
  MKO10085899_B_Fkbp15
  gRNA
tcatctgaactttgagctaa

SEQ ID NO: 85900 - DNA, 20 bp, Artificial Sequence
  MKO10085900_B_Fkbp1a
  gRNA
cgccgccgccatgggagtgc

SEQ ID NO: 85901 - DNA, 20 bp, Artificial Sequence
  MKO10085901_B_Fkbp1a
  gRNA
atctcctcagactatgccta

SEQ ID NO: 85902 - DNA, 20 bp, Artificial Sequence
  MKO10085902_B_Fkbp1a
  gRNA
ggctccataggcatagtctg

SEQ ID NO: 85903 - DNA, 20 bp, Artificial Sequence
  MKO10085903_B_Fkbp1b
  gRNA
gagatcgagaccatctcccc

SEQ ID NO: 85904 - DNA, 20 bp, Artificial Sequence
  MKO10085904_B_Fkbp1b
  gRNA
aggaaggacattccctaaga

SEQ ID NO: 85905 - DNA, 20 bp, Artificial Sequence
  MKO10085905_B_Fkbp1b
  gRNA
atatgtgtggtgcactacac

SEQ ID NO: 85906 - DNA, 20 bp, Artificial Sequence
  MKO10085906_B_Fkbp2
  gRNA
ggagcccccccaaagatccc

SEQ ID NO: 85907 - DNA, 20 bp, Artificial Sequence
  MKO10085907_B_Fkbp2
  gRNA
tgataacctggccagtgcca

SEQ ID NO: 85908 - DNA, 20 bp, Artificial Sequence
  MKO10085908_B_Fkbp2
  gRNA
gcagctccacctcaaacacc

SEQ ID NO: 85909 - DNA, 20 bp, Artificial Sequence
  MKO10085909_B_Fkbp3
  gRNA
atggtccttattagcagtct

SEQ ID NO: 85910 - DNA, 20 bp, Artificial Sequence
  MKO10085910_B_Fkbp3
  gRNA
tataagtaaagtgtctgaac

SEQ ID NO: 85911 - DNA, 20 bp, Artificial Sequence
  MKO10085911_B_Fkbp3
  gRNA
taaaaccaactttcctaaaa

SEQ ID NO: 85912 - DNA, 20 bp, Artificial Sequence
  MKO10085912_B_Fkbp4
  gRNA
caacgccacacttgtatttg

SEQ ID NO: 85913 - DNA, 20 bp, Artificial Sequence
  MKO10085913_B_Fkbp4
  gRNA
tttgtccttgcggtccagac

SEQ ID NO: 85914 - DNA, 20 bp, Artificial Sequence
  MKO10085914_B_Fkbp4
  gRNA
ccatcgtgtacctcaaacct

SEQ ID NO: 85915 - DNA, 20 bp, Artificial Sequence
  MKO10085915_B_Fkbp5
  gRNA
ggatactcaaacccaaacga

SEQ ID NO: 85916 - DNA, 20 bp, Artificial Sequence
  MKO10085916_B_Fkbp5
  gRNA
tttaccgttgctccttcgtt

SEQ ID NO: 85917 - DNA, 20 bp, Artificial Sequence
  MKO10085917_B_Fkbp5
  gRNA
taggccaggttatcaaagcc

SEQ ID NO: 85918 - DNA, 20 bp, Artificial Sequence
  MKO10085918_B_Fkbp6
  gRNA
caatcagctcgatctcaaac

SEQ ID NO: 85919 - DNA, 20 bp, Artificial Sequence
  MKO10085919_B_Fkbp6
  gRNA
tacccgcttgtatctcactt

SEQ ID NO: 85920 - DNA, 20 bp, Artificial Sequence
  MKO10085920_B_Fkbp6
  gRNA
catcacagaagcgattctgg

SEQ ID NO: 85921 - DNA, 20 bp, Artificial Sequence
  MKO10085921_B_Fkbp7
  gRNA
ccgtgacaagtcatatcaga

SEQ ID NO: 85922 - DNA, 20 bp, Artificial Sequence
  MKO10085922_B_Fkbp7
  gRNA
ataccgccttcgtttgcata

SEQ ID NO: 85923 - DNA, 20 bp, Artificial Sequence
  MKO10085923_B_Fkbp7
  gRNA
ttgctaaatgcccattacga

SEQ ID NO: 85924 - DNA, 20 bp, Artificial Sequence
  MKO10085924_B_Fkbp8
  gRNA
cggctagagcctttcgggcc

SEQ ID NO: 85925 - DNA, 20 bp, Artificial Sequence
  MKO10085925_B_Fkbp8
  gRNA
ggacctcagtgtcccgctca

SEQ ID NO: 85926 - DNA, 20 bp, Artificial Sequence
  MKO10085926_B_Fkbp8
  gRNA
gctgactccaagtactgcta

SEQ ID NO: 85927 - DNA, 20 bp, Artificial Sequence
  MKO10085927_B_Fkbp9
  gRNA
ttgggatgtgcgtaaacgag

SEQ ID NO: 85928 - DNA, 20 bp, Artificial Sequence
  MKO10085928_B_Fkbp9
  gRNA
ccactacaacggaacgttct

SEQ ID NO: 85929 - DNA, 20 bp, Artificial Sequence
  MKO10085929_B_Fkbp9
  gRNA
acggcactctctttgactcc

SEQ ID NO: 85930 - DNA, 20 bp, Artificial Sequence
  MKO10085930_B_Fkbpl
  gRNA
tcaccaatggccgggactcc

SEQ ID NO: 85931 - DNA, 20 bp, Artificial Sequence
  MKO10085931_B_Fkbpl
  gRNA
tataccgaaggggggttgct

SEQ ID NO: 85932 - DNA, 20 bp, Artificial Sequence
  MKO10085932_B_Fkbpl
  gRNA
cagcccgagcaacccccctt

SEQ ID NO: 85933 - DNA, 20 bp, Artificial Sequence
  MKO10085933_B_Fkrp
  gRNA
agggagcagcgcgcgcctag

SEQ ID NO: 85934 - DNA, 20 bp, Artificial Sequence
  MKO10085934_B_Fkrp
  gRNA
gctggacttgaccttcgccg

SEQ ID NO: 85935 - DNA, 20 bp, Artificial Sequence
  MKO10085935_B_Fkrp
  gRNA
tgccgaagctggctcggtag

SEQ ID NO: 85936 - DNA, 20 bp, Artificial Sequence
  MKO10085936_B_Fktn
  gRNA
aaatccaactcgattccctt

SEQ ID NO: 85937 - DNA, 20 bp, Artificial Sequence
  MKO10085937_B_Fktn
  gRNA
ccaaactgtaactttcgaaa

SEQ ID NO: 85938 - DNA, 20 bp, Artificial Sequence
  MKO10085938_B_Fktn
  gRNA
tcgcactgcagtatcacctg

SEQ ID NO: 85939 - DNA, 20 bp, Artificial Sequence
  MKO10085939_B_Flad1
  gRNA
gcgagatgctacgaatgtac

SEQ ID NO: 85940 - DNA, 20 bp, Artificial Sequence
  MKO10085940_B_Flad1
  gRNA
cattgaagcccacgcagagc

SEQ ID NO: 85941 - DNA, 20 bp, Artificial Sequence
  MKO10085941_B_Flad1
  gRNA
ctgtcctgatgggcactcga

SEQ ID NO: 85942 - DNA, 20 bp, Artificial Sequence
  MKO10085942_B_Flcn
  gRNA
cgatgatgctgtaccagcgc

SEQ ID NO: 85943 - DNA, 20 bp, Artificial Sequence
  MKO10085943_B_Flcn
  gRNA
gggcagcgttgccgttcctc

SEQ ID NO: 85944 - DNA, 20 bp, Artificial Sequence
  MKO10085944_B_Flcn
  gRNA
gcctgctaccgcatgccttc

SEQ ID NO: 85945 - DNA, 20 bp, Artificial Sequence
  MKO10085945_B_Flg2
  gRNA
gcacttctggtctgactggt

SEQ ID NO: 85946 - DNA, 20 bp, Artificial Sequence
  MKO10085946_B_Flg2
  gRNA
tttgtagaatacatcaatga

SEQ ID NO: 85947 - DNA, 20 bp, Artificial Sequence
  MKO10085947_B_Flg2
  gRNA
cagaccagaagtgcccactc

SEQ ID NO: 85948 - DNA, 20 bp, Artificial Sequence
  MKO10085948_B_Fli1
  gRNA
cacaggagcacgttcgacag

SEQ ID NO: 85949 - DNA, 20 bp, Artificial Sequence
  MKO10085949_B_Fli1
  gRNA
ccaacatgaccaccaacgaa

SEQ ID NO: 85950 - DNA, 20 bp, Artificial Sequence
  MKO10085950_B_Fli1
  gRNA
tgtcgcacctcagttacctc

SEQ ID NO: 85951 - DNA, 20 bp, Artificial Sequence
  MKO10085951_B_Flii
  gRNA
tgtctagcctgccttcgctt

SEQ ID NO: 85952 - DNA, 20 bp, Artificial Sequence
  MKO10085952_B_Flii
  gRNA
gattcagctttagccatcgc

SEQ ID NO: 85953 - DNA, 20 bp, Artificial Sequence
  MKO10085953_B_Flii
  gRNA
tgctcaacctcagccacaac

SEQ ID NO: 85954 - DNA, 20 bp, Artificial Sequence
  MKO10085954_B_Flna
  gRNA
gggagaagtgcttgtatatg

SEQ ID NO: 85955 - DNA, 20 bp, Artificial Sequence
  MKO10085955_B_Flna
  gRNA
ttgtaggcctatgtcctgac

SEQ ID NO: 85956 - DNA, 20 bp, Artificial Sequence
  MKO10085956_B_Flna
  gRNA
aacagaatgctcatctacat

SEQ ID NO: 85957 - DNA, 20 bp, Artificial Sequence
  MKO10085957_B_Flnb
  gRNA
tgggacgcccagccagtcat

SEQ ID NO: 85958 - DNA, 20 bp, Artificial Sequence
  MKO10085958_B_Flnb
  gRNA
actccatctccatgcccgta

SEQ ID NO: 85959 - DNA, 20 bp, Artificial Sequence
  MKO10085959_B_Flnb
  gRNA
cccagacagtaaagccatcg

SEQ ID NO: 85960 - DNA, 20 bp, Artificial Sequence
  MKO10085960_B_Flnc
  gRNA
tccacgcgtaccaggcccat

SEQ ID NO: 85961 - DNA, 20 bp, Artificial Sequence
  MKO10085961_B_Flnc
  gRNA
ttcagctgcttagagcgaac

SEQ ID NO: 85962 - DNA, 20 bp, Artificial Sequence
  MKO10085962_B_Flnc
  gRNA
tacctcctccgtgtgtccct

SEQ ID NO: 85963 - DNA, 20 bp, Artificial Sequence
  MKO10085963_B_Flot1
  gRNA
caaagtggcctcctccgacc

SEQ ID NO: 85964 - DNA, 20 bp, Artificial Sequence
  MKO10085964_B_Flot1
  gRNA
cggggtccccatctcagtca

SEQ ID NO: 85965 - DNA, 20 bp, Artificial Sequence
  MKO10085965_B_Flot1
  gRNA
ggcaatgcccgtgactgaga

SEQ ID NO: 85966 - DNA, 20 bp, Artificial Sequence
  MKO10085966_B_Flot2
  gRNA
tagagcgtagatgcccctcc

SEQ ID NO: 85967 - DNA, 20 bp, Artificial Sequence
  MKO10085967_B_Flot2
  gRNA
gacgttgcagccccgctgtg

SEQ ID NO: 85968 - DNA, 20 bp, Artificial Sequence
  MKO10085968_B_Flot2
  gRNA
gggggtagctttaactgtga

SEQ ID NO: 85969 - DNA, 20 bp, Artificial Sequence
  MKO10085969_B_Flrt1
  gRNA
tttggctcgcatcccgctgc

SEQ ID NO: 85970 - DNA, 20 bp, Artificial Sequence
  MKO10085970_B_Flrt1
  gRNA
caacccgtaccgctccaaag

SEQ ID NO: 85971 - DNA, 20 bp, Artificial Sequence
  MKO10085971_B_Flrt1
  gRNA
gattgatagggaactcgtcc

SEQ ID NO: 85972 - DNA, 20 bp, Artificial Sequence
  MKO10085972_B_Flrt2
  gRNA
gagtagaagacggagcgttc

SEQ ID NO: 85973 - DNA, 20 bp, Artificial Sequence
  MKO10085973_B_Flrt2
  gRNA
tgcgttcaactaccgcactg

SEQ ID NO: 85974 - DNA, 20 bp, Artificial Sequence
  MKO10085974_B_Flrt2
  gRNA
tccgcgcagtgagttgtttc

SEQ ID NO: 85975 - DNA, 20 bp, Artificial Sequence
  MKO10085975_B_Flrt3
  gRNA
ttcctcatcgggactaaaat

SEQ ID NO: 85976 - DNA, 20 bp, Artificial Sequence
  MKO10085976_B_Flrt3
  gRNA
tgattcttcgcaacaatcct

SEQ ID NO: 85977 - DNA, 20 bp, Artificial Sequence
  MKO10085977_B_Flrt3
  gRNA
tctgtatgtcgctgtgacgc

SEQ ID NO: 85978 - DNA, 20 bp, Artificial Sequence
  MKO10085978_B_Flt1
  gRNA
tttgatactcttacccctga

SEQ ID NO: 85979 - DNA, 20 bp, Artificial Sequence
  MKO10085979_B_Flt1
  gRNA
ttccgtcatgtgcacaagtt

SEQ ID NO: 85980 - DNA, 20 bp, Artificial Sequence
  MKO10085980_B_Flt1
  gRNA
acccaaacttgtgcacatga

SEQ ID NO: 85981 - DNA, 20 bp, Artificial Sequence
  MKO10085981_B_Flt3l
  gRNA
tggacgaatcgcagacattc

SEQ ID NO: 85982 - DNA, 20 bp, Artificial Sequence
  MKO10085982_B_Flt3l
  gRNA
gtctaagatgcaaacgcttc

SEQ ID NO: 85983 - DNA, 20 bp, Artificial Sequence
  MKO10085983_B_Flt3l
  gRNA
tgactgggtaatctttaagc

SEQ ID NO: 85984 - DNA, 20 bp, Artificial Sequence
  MKO10085984_B_Flt3
  gRNA
aagacctccagtgtgccccg

SEQ ID NO: 85985 - DNA, 20 bp, Artificial Sequence
  MKO10085985_B_Flt3
  gRNA
ccgcagaggaatcgtttcca

SEQ ID NO: 85986 - DNA, 20 bp, Artificial Sequence
  MKO10085986_B_Flt3
  gRNA
cgcactgctctgcatctccg

SEQ ID NO: 85987 - DNA, 20 bp, Artificial Sequence
  MKO10085987_B_Flt4
  gRNA
cagctgtggtgccctcaatc

SEQ ID NO: 85988 - DNA, 20 bp, Artificial Sequence
  MKO10085988_B_Flt4
  gRNA
caacaaacctgacacgctcc

SEQ ID NO: 85989 - DNA, 20 bp, Artificial Sequence
  MKO10085989_B_Flt4
  gRNA
ccgagcgcagtgtgatgttg

SEQ ID NO: 85990 - DNA, 20 bp, Artificial Sequence
  MKO10085990_B_Flywch1
  gRNA
gctccacagggtacaaccat

SEQ ID NO: 85991 - DNA, 20 bp, Artificial Sequence
  MKO10085991_B_Flywch1
  gRNA
tacccccatagcaagtcttc

SEQ ID NO: 85992 - DNA, 20 bp, Artificial Sequence
  MKO10085992_B_Flywch1
  gRNA
tcttggacttcagcgccctc

SEQ ID NO: 85993 - DNA, 20 bp, Artificial Sequence
  MKO10085993_B_Flywch2
  gRNA
cctgaccctccattgtcttc

SEQ ID NO: 85994 - DNA, 20 bp, Artificial Sequence
  MKO10085994_B_Flywch2
  gRNA
agtgcactgcatcatgtccc

SEQ ID NO: 85995 - DNA, 20 bp, Artificial Sequence
  MKO10085995_B_Flywch2
  gRNA
agggccttagccaaggtggc

SEQ ID NO: 85996 - DNA, 20 bp, Artificial Sequence
  MKO10085996_B_Fmn1
  gRNA
ccaaacccctccatccttat

SEQ ID NO: 85997 - DNA, 20 bp, Artificial Sequence
  MKO10085997_B_Fmn1
  gRNA
ctgctatcctacatctgaag

SEQ ID NO: 85998 - DNA, 20 bp, Artificial Sequence
  MKO10085998_B_Fmn1
  gRNA
tgtgctccctcttcagatgt

SEQ ID NO: 85999 - DNA, 20 bp, Artificial Sequence
  MKO10085999_B_Fmn2
  gRNA
gaagacccatggcgatgatc

SEQ ID NO: 86000 - DNA, 20 bp, Artificial Sequence
  MKO10086000_B_Fmn2
  gRNA
ggaggtggaacccccatacc

SEQ ID NO: 86001 - DNA, 20 bp, Artificial Sequence
  MKO10086001_B_Fmn2
  gRNA
agaacctaaatcctctattt

SEQ ID NO: 86002 - DNA, 20 bp, Artificial Sequence
  MKO10086002_B_Fmnl1
  gRNA
taccggtggggtcagccgaa

SEQ ID NO: 86003 - DNA, 20 bp, Artificial Sequence
  MKO10086003_B_Fmnl1
  gRNA
atctgattggatgtccaacc

SEQ ID NO: 86004 - DNA, 20 bp, Artificial Sequence
  MKO10086004_B_Fmnl1
  gRNA
tacacaggtgctgcgggaac

SEQ ID NO: 86005 - DNA, 20 bp, Artificial Sequence
  MKO10086005_B_Fmnl2
  gRNA
acctacctcctgacaaagcc

SEQ ID NO: 86006 - DNA, 20 bp, Artificial Sequence
  MKO10086006_B_Fmnl2
  gRNA
tcattaagaaccaaccacat

SEQ ID NO: 86007 - DNA, 20 bp, Artificial Sequence
  MKO10086007_B_Fmnl2
  gRNA
acgtacatacagaagctcaa

SEQ ID NO: 86008 - DNA, 20 bp, Artificial Sequence
  MKO10086008_B_Fmnl3
  gRNA
ctttaccttccgtgttacat

SEQ ID NO: 86009 - DNA, 20 bp, Artificial Sequence
  MKO10086009_B_Fmnl3
  gRNA
tgtcatactgtcgcagcagc

SEQ ID NO: 86010 - DNA, 20 bp, Artificial Sequence
  MKO10086010_B_Fmnl3
  gRNA
gtacttacatgacagaacac

SEQ ID NO: 86011 - DNA, 20 bp, Artificial Sequence
  MKO10086011_B_Fmo1
  gRNA
gagctacaccgtaattcacg

SEQ ID NO: 86012 - DNA, 20 bp, Artificial Sequence
  MKO10086012_B_Fmo1
  gRNA
gcgagtccttgtagttggaa

SEQ ID NO: 86013 - DNA, 20 bp, Artificial Sequence
  MKO10086013_B_Fmo1
  gRNA
tgtgccaaattctctattcc

SEQ ID NO: 86014 - DNA, 20 bp, Artificial Sequence
  MKO10086014_B_Fmo2
  gRNA
agagattcgactcatgaccc

SEQ ID NO: 86015 - DNA, 20 bp, Artificial Sequence
  MKO10086015_B_Fmo2
  gRNA
tgcccagaagatgcgaagtc

SEQ ID NO: 86016 - DNA, 20 bp, Artificial Sequence
  MKO10086016_B_Fmo2
  gRNA
acttcgcatcttctgggcaa

SEQ ID NO: 86017 - DNA, 20 bp, Artificial Sequence
  MKO10086017_B_Fmo3
  gRNA
gatgctacaatgatttgttc

SEQ ID NO: 86018 - DNA, 20 bp, Artificial Sequence
  MKO10086018_B_Fmo3
  gRNA
ttcacaggaccatatagaag

SEQ ID NO: 86019 - DNA, 20 bp, Artificial Sequence
  MKO10086019_B_Fmo3
  gRNA
tgtcacagcctgagttcccc

SEQ ID NO: 86020 - DNA, 20 bp, Artificial Sequence
  MKO10086020_B_Fmo4
  gRNA
cttccggggcaagcgcatcc

SEQ ID NO: 86021 - DNA, 20 bp, Artificial Sequence
  MKO10086021_B_Fmo4
  gRNA
gtccagtttataaaacgtga

SEQ ID NO: 86022 - DNA, 20 bp, Artificial Sequence
  MKO10086022_B_Fmo4
  gRNA
gtgtttctcagcactagaac

SEQ ID NO: 86023 - DNA, 20 bp, Artificial Sequence
  MKO10086023_B_Fmo5
  gRNA
gcttggatcttgaaccgtgt

SEQ ID NO: 86024 - DNA, 20 bp, Artificial Sequence
  MKO10086024_B_Fmo5
  gRNA
tactacttgtcacgtatctg

SEQ ID NO: 86025 - DNA, 20 bp, Artificial Sequence
  MKO10086025_B_Fmo5
  gRNA
ggtgtgcacgggtcatcaca

SEQ ID NO: 86026 - DNA, 20 bp, Artificial Sequence
  MKO10086026_B_Fmo6
  gRNA
ttaggtctagagcactttcg

SEQ ID NO: 86027 - DNA, 20 bp, Artificial Sequence
  MKO10086027_B_Fmo6
  gRNA
cacgtcgttcgctcagaaga

SEQ ID NO: 86028 - DNA, 20 bp, Artificial Sequence
  MKO10086028_B_Fmo6
  gRNA
tgctgttgagctcagtcgtc

SEQ ID NO: 86029 - DNA, 20 bp, Artificial Sequence
  MKO10086029_B_Fmo9
  gRNA
tggcattgggaattccggtg

SEQ ID NO: 86030 - DNA, 20 bp, Artificial Sequence
  MKO10086030_B_Fmo9
  gRNA
cgccaagcgcttcagtcttc

SEQ ID NO: 86031 - DNA, 20 bp, Artificial Sequence
  MKO10086031_B_Fmo9
  gRNA
atccagaagactgaagcgct

SEQ ID NO: 86032 - DNA, 20 bp, Artificial Sequence
  MKO10086032_B_Fmod
  gRNA
gcttgatctcgttcccatcc

SEQ ID NO: 86033 - DNA, 20 bp, Artificial Sequence
  MKO10086033_B_Fmod
  gRNA
gtagacgtacttcatgcggg

SEQ ID NO: 86034 - DNA, 20 bp, Artificial Sequence
  MKO10086034_B_Fmod
  gRNA
aggcccctcagatctcgatg

SEQ ID NO: 86035 - DNA, 20 bp, Artificial Sequence
  MKO10086035_B_Fmr1nb
  gRNA
ggcctccgagtgccgaccag

SEQ ID NO: 86036 - DNA, 20 bp, Artificial Sequence
  MKO10086036_B_Fmr1nb
  gRNA
tctgacgccttccttccttt

SEQ ID NO: 86037 - DNA, 20 bp, Artificial Sequence
  MKO10086037_B_Fmr1nb
  gRNA
ctttaaggaagaggatgaac

SEQ ID NO: 86038 - DNA, 20 bp, Artificial Sequence
  MKO10086038_B_Fmr1
  gRNA
tactttccataagatcaagc

SEQ ID NO: 86039 - DNA, 20 bp, Artificial Sequence
  MKO10086039_B_Fmr1
  gRNA
gtgagattcccaccacctgt

SEQ ID NO: 86040 - DNA, 20 bp, Artificial Sequence
  MKO10086040_B_Fmr1
  gRNA
agctaaagtgaggatgataa

SEQ ID NO: 86041 - DNA, 20 bp, Artificial Sequence
  MKO10086041_B_Fn1
  gRNA
cctacgtcgtgggggagacc

SEQ ID NO: 86042 - DNA, 20 bp, Artificial Sequence
  MKO10086042_B_Fn1
  gRNA
gactgtacctgcatcggggc

SEQ ID NO: 86043 - DNA, 20 bp, Artificial Sequence
  MKO10086043_B_Fn1
  gRNA
ccacttacctataggtttgc

SEQ ID NO: 86044 - DNA, 20 bp, Artificial Sequence
  MKO10086044_B_Fn3krp
  gRNA
catgctcgtgatggagcatt

SEQ ID NO: 86045 - DNA, 20 bp, Artificial Sequence
  MKO10086045_B_Fn3krp
  gRNA
tttagtcatgccaccaagct

SEQ ID NO: 86046 - DNA, 20 bp, Artificial Sequence
  MKO10086046_B_Fn3krp
  gRNA
cacttgtgcaggtaaatgac

SEQ ID NO: 86047 - DNA, 20 bp, Artificial Sequence
  MKO10086047_B_Fn3k
  gRNA
ctggaggccctccgcaacac

SEQ ID NO: 86048 - DNA, 20 bp, Artificial Sequence
  MKO10086048_B_Fn3k
  gRNA
ccccagggtgtgaccaagtt

SEQ ID NO: 86049 - DNA, 20 bp, Artificial Sequence
  MKO10086049_B_Fn3k
  gRNA
cactgtgttctgccgagtct

SEQ ID NO: 86050 - DNA, 20 bp, Artificial Sequence
  MKO10086050_B_Fnbp1l
  gRNA
tgagctggggcaccgagctg

SEQ ID NO: 86051 - DNA, 20 bp, Artificial Sequence
  MKO10086051_B_Fnbp1l
  gRNA
catagtcgtttaactcatta

SEQ ID NO: 86052 - DNA, 20 bp, Artificial Sequence
  MKO10086052_B_Fnbp1l
  gRNA
cagctcggtgccccagctca

SEQ ID NO: 86053 - DNA, 20 bp, Artificial Sequence
  MKO10086053_B_Fnbp1
  gRNA
ggtagtattcccattgctcc

SEQ ID NO: 86054 - DNA, 20 bp, Artificial Sequence
  MKO10086054_B_Fnbp1
  gRNA
tctcgaagtactgctgtgcc

SEQ ID NO: 86055 - DNA, 20 bp, Artificial Sequence
  MKO10086055_B_Fnbp1
  gRNA
gctgagccttccgtccatca

SEQ ID NO: 86056 - DNA, 20 bp, Artificial Sequence
  MKO10086056_B_Fnbp4
  gRNA
gtcggtctggtggtcatgac

SEQ ID NO: 86057 - DNA, 20 bp, Artificial Sequence
  MKO10086057_B_Fnbp4
  gRNA
gcaggtgttgccgcttcttt

SEQ ID NO: 86058 - DNA, 20 bp, Artificial Sequence
  MKO10086058_B_Fnbp4
  gRNA
cagtgtgctgtcaatgtcag

SEQ ID NO: 86059 - DNA, 20 bp, Artificial Sequence
  MKO10086059_B_Fnd3c2
  gRNA
taattctatgtcatttgaat

SEQ ID NO: 86060 - DNA, 20 bp, Artificial Sequence
  MKO10086060_B_Fnd3c2
  gRNA
ttagaacacaatacagagaa

SEQ ID NO: 86061 - DNA, 20 bp, Artificial Sequence
  MKO10086061_B_Fnd3c2
  gRNA
cccgatctgctactgtttca

SEQ ID NO: 86062 - DNA, 20 bp, Artificial Sequence
  MKO10086062_B_Fndc1
  gRNA
agaaaaccccgagatcttcg

SEQ ID NO: 86063 - DNA, 20 bp, Artificial Sequence
  MKO10086063_B_Fndc1
  gRNA
acccggacactaatgtcttc

SEQ ID NO: 86064 - DNA, 20 bp, Artificial Sequence
  MKO10086064_B_Fndc1
  gRNA
ggcagagtcagcccgtctat

SEQ ID NO: 86065 - DNA, 20 bp, Artificial Sequence
  MKO10086065_B_Fndc3a
  gRNA
gaagggcatttctgcggtga

SEQ ID NO: 86066 - DNA, 20 bp, Artificial Sequence
  MKO10086066_B_Fndc3a
  gRNA
gacatcattggaacctgagc

SEQ ID NO: 86067 - DNA, 20 bp, Artificial Sequence
  MKO10086067_B_Fndc3a
  gRNA
catacctgtggggcatatcc

SEQ ID NO: 86068 - DNA, 20 bp, Artificial Sequence
  MKO10086068_B_Fndc3b
  gRNA
cccacaatatatagcgagcc

SEQ ID NO: 86069 - DNA, 20 bp, Artificial Sequence
  MKO10086069_B_Fndc3b
  gRNA
attcttgtccaagtgaaccc

SEQ ID NO: 86070 - DNA, 20 bp, Artificial Sequence
  MKO10086070_B_Fndc3b
  gRNA
gacctttaccatcagagccg

SEQ ID NO: 86071 - DNA, 20 bp, Artificial Sequence
  MKO10086071_B_Fndc3c1
  gRNA
gtatttgttcaagttaaccc

SEQ ID NO: 86072 - DNA, 20 bp, Artificial Sequence
  MKO10086072_B_Fndc3c1
  gRNA
aatagaaatgttgccgctgg

SEQ ID NO: 86073 - DNA, 20 bp, Artificial Sequence
  MKO10086073_B_Fndc3c1
  gRNA
catcatcagcctttatggta

SEQ ID NO: 86074 - DNA, 20 bp, Artificial Sequence
  MKO10086074_B_Fndc4
  gRNA
ggagagcggccattgcagac

SEQ ID NO: 86075 - DNA, 20 bp, Artificial Sequence
  MKO10086075_B_Fndc4
  gRNA
tctctgattacacgctgccc

SEQ ID NO: 86076 - DNA, 20 bp, Artificial Sequence
  MKO10086076_B_Fndc4
  gRNA
cttcttaggtgatattacag

SEQ ID NO: 86077 - DNA, 20 bp, Artificial Sequence
  MKO10086077_B_Fndc5
  gRNA
agaatatatcgtccatgtgc

SEQ ID NO: 86078 - DNA, 20 bp, Artificial Sequence
  MKO10086078_B_Fndc5
  gRNA
cccctgtgaacgtgaccgtc

SEQ ID NO: 86079 - DNA, 20 bp, Artificial Sequence
  MKO10086079_B_Fndc5
  gRNA
cctcccccgttcgcagctgc

SEQ ID NO: 86080 - DNA, 20 bp, Artificial Sequence
  MKO10086080_B_Fndc7
  gRNA
gcaatagtatcaccgtagaa

SEQ ID NO: 86081 - DNA, 20 bp, Artificial Sequence
  MKO10086081_B_Fndc7
  gRNA
caggttatttcatctaaaac

SEQ ID NO: 86082 - DNA, 20 bp, Artificial Sequence
  MKO10086082_B_Fndc7
  gRNA
cactctcctctgtctgaaaa

SEQ ID NO: 86083 - DNA, 20 bp, Artificial Sequence
  MKO10086083_B_Fndc8
  gRNA
ttgggcgtgtccttgtcagc

SEQ ID NO: 86084 - DNA, 20 bp, Artificial Sequence
  MKO10086084_B_Fndc8
  gRNA
ttcatcagagtggacggaat

SEQ ID NO: 86085 - DNA, 20 bp, Artificial Sequence
  MKO10086085_B_Fndc8
  gRNA
atgaggttgtttgcgttgca

SEQ ID NO: 86086 - DNA, 20 bp, Artificial Sequence
  MKO10086086_B_Fndc9
  gRNA
gtcttacagagccggccaaa

SEQ ID NO: 86087 - DNA, 20 bp, Artificial Sequence
  MKO10086087_B_Fndc9
  gRNA
acagtagtgactatacggga

SEQ ID NO: 86088 - DNA, 20 bp, Artificial Sequence
  MKO10086088_B_Fndc9
  gRNA
gaactgccacgaaagaactc

SEQ ID NO: 86089 - DNA, 20 bp, Artificial Sequence
  MKO10086089_B_Fnip1
  gRNA
catcatctctccaagcatat

SEQ ID NO: 86090 - DNA, 20 bp, Artificial Sequence
  MKO10086090_B_Fnip1
  gRNA
ccttaaaaattcatcagatc

SEQ ID NO: 86091 - DNA, 20 bp, Artificial Sequence
  MKO10086091_B_Fnip1
  gRNA
agtgatagagctatccaaag

SEQ ID NO: 86092 - DNA, 20 bp, Artificial Sequence
  MKO10086092_B_Fnip2
  gRNA
actttactaatcatcagttg

SEQ ID NO: 86093 - DNA, 20 bp, Artificial Sequence
  MKO10086093_B_Fnip2
  gRNA
acatgtcttacttggtactt

SEQ ID NO: 86094 - DNA, 20 bp, Artificial Sequence
  MKO10086094_B_Fnip2
  gRNA
gcatctgatgtcagcatgct

SEQ ID NO: 86095 - DNA, 20 bp, Artificial Sequence
  MKO10086095_B_Fnta
  gRNA
catcgcgctgcagaacagct

SEQ ID NO: 86096 - DNA, 20 bp, Artificial Sequence
  MKO10086096_B_Fnta
  gRNA
ctgggttagggccgtcattc

SEQ ID NO: 86097 - DNA, 20 bp, Artificial Sequence
  MKO10086097_B_Fnta
  gRNA
ctacatcactgcgataattg

SEQ ID NO: 86098 - DNA, 20 bp, Artificial Sequence
  MKO10086098_B_Fntb
  gRNA
cgaacccatcccccagatag

SEQ ID NO: 86099 - DNA, 20 bp, Artificial Sequence
  MKO10086099_B_Fntb
  gRNA
gtctggatgccagccgcccc

SEQ ID NO: 86100 - DNA, 20 bp, Artificial Sequence
  MKO10086100_B_Fntb
  gRNA
agtttaaccaccttgtacca

SEQ ID NO: 86101 - DNA, 20 bp, Artificial Sequence
  MKO10086101_B_Focad
  gRNA
gatacaccaatccacaaacc

SEQ ID NO: 86102 - DNA, 20 bp, Artificial Sequence
  MKO10086102_B_Focad
  gRNA
gttacctttcagggcattgc

SEQ ID NO: 86103 - DNA, 20 bp, Artificial Sequence
  MKO10086103_B_Focad
  gRNA
aagcggggaaaaggacattc

SEQ ID NO: 86104 - DNA, 20 bp, Artificial Sequence
  MKO10086104_B_Folh1
  gRNA
aacattaccagtagcttcat

SEQ ID NO: 86105 - DNA, 20 bp, Artificial Sequence
  MKO10086105_B_Folh1
  gRNA
aggacagcaagacatcgtaa

SEQ ID NO: 86106 - DNA, 20 bp, Artificial Sequence
  MKO10086106_B_Folh1
  gRNA
ccttcaccagcaatttcaca

SEQ ID NO: 86107 - DNA, 20 bp, Artificial Sequence
  MKO10086107_B_Folr1
  gRNA
agtggcgaggttctatgccg

SEQ ID NO: 86108 - DNA, 20 bp, Artificial Sequence
  MKO10086108_B_Folr1
  gRNA
agggcataacgagtgtcctg

SEQ ID NO: 86109 - DNA, 20 bp, Artificial Sequence
  MKO10086109_B_Folr1
  gRNA
tccgctctttgcgccagctc

SEQ ID NO: 86110 - DNA, 20 bp, Artificial Sequence
  MKO10086110_B_Folr2
  gRNA
gtagtactcaaacgtgtgac

SEQ ID NO: 86111 - DNA, 20 bp, Artificial Sequence
  MKO10086111_B_Folr2
  gRNA
aacttcaccacgtcctcatt

SEQ ID NO: 86112 - DNA, 20 bp, Artificial Sequence
  MKO10086112_B_Folr2
  gRNA
catccatgcaaacgttgagt

SEQ ID NO: 86113 - DNA, 20 bp, Artificial Sequence
  MKO10086113_B_Folr4
  gRNA
aagcgccacaagcaagaacc

SEQ ID NO: 86114 - DNA, 20 bp, Artificial Sequence
  MKO10086114_B_Folr4
  gRNA
gctgcacacgttccacaagt

SEQ ID NO: 86115 - DNA, 20 bp, Artificial Sequence
  MKO10086115_B_Folr4
  gRNA
aaggtgggcttcccaacttg

SEQ ID NO: 86116 - DNA, 20 bp, Artificial Sequence
  MKO10086116_B_Fopnl
  gRNA
cagctgagatgcttggttgc

SEQ ID NO: 86117 - DNA, 20 bp, Artificial Sequence
  MKO10086117_B_Fopnl
  gRNA
acagcctctgtcctcatagc

SEQ ID NO: 86118 - DNA, 20 bp, Artificial Sequence
  MKO10086118_B_Fopnl
  gRNA
tggtcaacctgtagttccat

SEQ ID NO: 86119 - DNA, 20 bp, Artificial Sequence
  MKO10086119_B_Fosb
  gRNA
gagccggagtcgtagtctcc

SEQ ID NO: 86120 - DNA, 20 bp, Artificial Sequence
  MKO10086120_B_Fosb
  gRNA
ccgtaggagtgcgccggtct

SEQ ID NO: 86121 - DNA, 20 bp, Artificial Sequence
  MKO10086121_B_Fosb
  gRNA
cgaaggagtccaccgaagac

SEQ ID NO: 86122 - DNA, 20 bp, Artificial Sequence
  MKO10086122_B_Fosl1
  gRNA
cctagggctcgtatgactcc

SEQ ID NO: 86123 - DNA, 20 bp, Artificial Sequence
  MKO10086123_B_Fosl1
  gRNA
cagggcatgtaccgagacta

SEQ ID NO: 86124 - DNA, 20 bp, Artificial Sequence
  MKO10086124_B_Fosl1
  gRNA
tggtgggctgctagcaccgc

SEQ ID NO: 86125 - DNA, 20 bp, Artificial Sequence
  MKO10086125_B_Fosl2
  gRNA
cacgccgagtcctactccag

SEQ ID NO: 86126 - DNA, 20 bp, Artificial Sequence
  MKO10086126_B_Fosl2
  gRNA
aagttccgggtagatatgcc

SEQ ID NO: 86127 - DNA, 20 bp, Artificial Sequence
  MKO10086127_B_Fosl2
  gRNA
gaactttgacacctcgtccc

SEQ ID NO: 86128 - DNA, 20 bp, Artificial Sequence
  MKO10086128_B_Fos
  gRNA
ccgctgcagtagcgcctccc

SEQ ID NO: 86129 - DNA, 20 bp, Artificial Sequence
  MKO10086129_B_Fos
  gRNA
ctgtgccgctgcccaccgaa

SEQ ID NO: 86130 - DNA, 20 bp, Artificial Sequence
  MKO10086130_B_Fos
  gRNA
gttgaaacccgagaacatca

SEQ ID NO: 86131 - DNA, 20 bp, Artificial Sequence
  MKO10086131_B_Foxa1
  gRNA
aagggcatgagagcaacgac

SEQ ID NO: 86132 - DNA, 20 bp, Artificial Sequence
  MKO10086132_B_Foxa1
  gRNA
gggcgtcacggccatgggta

SEQ ID NO: 86133 - DNA, 20 bp, Artificial Sequence
  MKO10086133_B_Foxa1
  gRNA
cgggctcagcgccgtaccca

SEQ ID NO: 86134 - DNA, 20 bp, Artificial Sequence
  MKO10086134_B_Foxa2
  gRNA
cagctactacgcggagcccg

SEQ ID NO: 86135 - DNA, 20 bp, Artificial Sequence
  MKO10086135_B_Foxa2
  gRNA
caggccggcctgcccgtaca

SEQ ID NO: 86136 - DNA, 20 bp, Artificial Sequence
  MKO10086136_B_Foxa2
  gRNA
gaacaggtcatgcactaccc

SEQ ID NO: 86137 - DNA, 20 bp, Artificial Sequence
  MKO10086137_B_Foxa3
  gRNA
ctactacccggaggcgggcg

SEQ ID NO: 86138 - DNA, 20 bp, Artificial Sequence
  MKO10086138_B_Foxa3
  gRNA
gacatcgacaccttccaaac

SEQ ID NO: 86139 - DNA, 20 bp, Artificial Sequence
  MKO10086139_B_Foxa3
  gRNA
ccagcaggaatggtactgcg

SEQ ID NO: 86140 - DNA, 20 bp, Artificial Sequence
  MKO10086140_B_Foxb1
  gRNA
ctcgaacatgtccccgcagc

SEQ ID NO: 86141 - DNA, 20 bp, Artificial Sequence
  MKO10086141_B_Foxb1
  gRNA
gtgcacggccaccgagtgca

SEQ ID NO: 86142 - DNA, 20 bp, Artificial Sequence
  MKO10086142_B_Foxb1
  gRNA
aacttgtagatctcgctgag

SEQ ID NO: 86143 - DNA, 20 bp, Artificial Sequence
  MKO10086143_B_Foxb2
  gRNA
acccgtgaccacgctgccgc

SEQ ID NO: 86144 - DNA, 20 bp, Artificial Sequence
  MKO10086144_B_Foxb2
  gRNA
gtcccggtaggcccggagta

SEQ ID NO: 86145 - DNA, 20 bp, Artificial Sequence
  MKO10086145_B_Foxb2
  gRNA
ccgcccgatgatgttctcta

SEQ ID NO: 86146 - DNA, 20 bp, Artificial Sequence
  MKO10086146_B_Foxc1
  gRNA
cgaacatttcccgcaccgag

SEQ ID NO: 86147 - DNA, 20 bp, Artificial Sequence
  MKO10086147_B_Foxc1
  gRNA
agtagctctgctcgccgccg

SEQ ID NO: 86148 - DNA, 20 bp, Artificial Sequence
  MKO10086148_B_Foxc1
  gRNA
gggcggctacaccgccatgc

SEQ ID NO: 86149 - DNA, 20 bp, Artificial Sequence
  MKO10086149_B_Foxc2
  gRNA
gttgaacatctcccggacgt

SEQ ID NO: 86150 - DNA, 20 bp, Artificial Sequence
  MKO10086150_B_Foxc2
  gRNA
caccacgccgcggcgcctaa

SEQ ID NO: 86151 - DNA, 20 bp, Artificial Sequence
  MKO10086151_B_Foxc2
  gRNA
tccttgggcccgtcagctac

SEQ ID NO: 86152 - DNA, 20 bp, Artificial Sequence
  MKO10086152_B_Foxd1
  gRNA
gccgcgtggggagcgagtag

SEQ ID NO: 86153 - DNA, 20 bp, Artificial Sequence
  MKO10086153_B_Foxd1
  gRNA
cgtgtcctcgtccgccgcgc

SEQ ID NO: 86154 - DNA, 20 bp, Artificial Sequence
  MKO10086154_B_Foxd1
  gRNA
gagctggcgcggaccgcctt

SEQ ID NO: 86155 - DNA, 20 bp, Artificial Sequence
  MKO10086155_B_Foxd2
  gRNA
cgcgactttgctggcaaacg

SEQ ID NO: 86156 - DNA, 20 bp, Artificial Sequence
  MKO10086156_B_Foxd2
  gRNA
caccacgtctatgtctgcgt

SEQ ID NO: 86157 - DNA, 20 bp, Artificial Sequence
  MKO10086157_B_Foxd2
  gRNA
tcgccattcgccgcagccgc

SEQ ID NO: 86158 - DNA, 20 bp, Artificial Sequence
  MKO10086158_B_Foxd3
  gRNA
tttgcggcccagctcgcccg

SEQ ID NO: 86159 - DNA, 20 bp, Artificial Sequence
  MKO10086159_B_Foxd3
  gRNA
cagtcgtccggctcagcgac

SEQ ID NO: 86160 - DNA, 20 bp, Artificial Sequence
  MKO10086160_B_Foxd3
  gRNA
ggccgcaaagcggccgcctt

SEQ ID NO: 86161 - DNA, 20 bp, Artificial Sequence
  MKO10086161_B_Foxd4
  gRNA
ggggaacttacggcggtaat

SEQ ID NO: 86162 - DNA, 20 bp, Artificial Sequence
  MKO10086162_B_Foxd4
  gRNA
ttgcctcagcagcgccgcaa

SEQ ID NO: 86163 - DNA, 20 bp, Artificial Sequence
  MKO10086163_B_Foxd4
  gRNA
caatattgtccgggaacctg

SEQ ID NO: 86164 - DNA, 20 bp, Artificial Sequence
  MKO10086164_B_Foxe1
  gRNA
cccgacggcgcgtacccgca

SEQ ID NO: 86165 - DNA, 20 bp, Artificial Sequence
  MKO10086165_B_Foxe1
  gRNA
gtagtagaccggcggaggcg

SEQ ID NO: 86166 - DNA, 20 bp, Artificial Sequence
  MKO10086166_B_Foxe1
  gRNA
cacgaaccgatccaccgcgc

SEQ ID NO: 86167 - DNA, 20 bp, Artificial Sequence
  MKO10086167_B_Foxe3
  gRNA
ggttcggctcccgccagcgt

SEQ ID NO: 86168 - DNA, 20 bp, Artificial Sequence
  MKO10086168_B_Foxe3
  gRNA
gcaaggcggctcgggcgcca

SEQ ID NO: 86169 - DNA, 20 bp, Artificial Sequence
  MKO10086169_B_Foxe3
  gRNA
accgcgacagcccgcgcaag

SEQ ID NO: 86170 - DNA, 20 bp, Artificial Sequence
  MKO10086170_B_Foxf1
  gRNA
aggatcttactatcaccagc

SEQ ID NO: 86171 - DNA, 20 bp, Artificial Sequence
  MKO10086171_B_Foxf1
  gRNA
ggctagcgagtttatgttcg

SEQ ID NO: 86172 - DNA, 20 bp, Artificial Sequence
  MKO10086172_B_Foxf1
  gRNA
cgcagccacccatgtacgag

SEQ ID NO: 86173 - DNA, 20 bp, Artificial Sequence
  MKO10086173_B_Foxf2
  gRNA
actccactccagtgtgcgac

SEQ ID NO: 86174 - DNA, 20 bp, Artificial Sequence
  MKO10086174_B_Foxf2
  gRNA
cacttccgcctgaagccgcg

SEQ ID NO: 86175 - DNA, 20 bp, Artificial Sequence
  MKO10086175_B_Foxf2
  gRNA
actccgccgcgcgtgcagcc

SEQ ID NO: 86176 - DNA, 20 bp, Artificial Sequence
  MKO10086176_B_Foxg1
  gRNA
gtcctcctctacgtcgccgc

SEQ ID NO: 86177 - DNA, 20 bp, Artificial Sequence
  MKO10086177_B_Foxg1
  gRNA
gggggcctgcggcgacgtag

SEQ ID NO: 86178 - DNA, 20 bp, Artificial Sequence
  MKO10086178_B_Foxg1
  gRNA
gaggcgcgccccgcgcttaa

SEQ ID NO: 86179 - DNA, 20 bp, Artificial Sequence
  MKO10086179_B_Foxh1
  gRNA
tactacattgggcgtataga

SEQ ID NO: 86180 - DNA, 20 bp, Artificial Sequence
  MKO10086180_B_Foxh1
  gRNA
gggtgcggcctgaattacca

SEQ ID NO: 86181 - DNA, 20 bp, Artificial Sequence
  MKO10086181_B_Foxh1
  gRNA
ctgatttcagattatccgtc

SEQ ID NO: 86182 - DNA, 20 bp, Artificial Sequence
  MKO10086182_B_Foxi1
  gRNA
gaaaacggagaacggtctcc

SEQ ID NO: 86183 - DNA, 20 bp, Artificial Sequence
  MKO10086183_B_Foxi1
  gRNA
gggcgcaccgtggattgcca

SEQ ID NO: 86184 - DNA, 20 bp, Artificial Sequence
  MKO10086184_B_Foxi1
  gRNA
ccccgagatgaggacgaccc

SEQ ID NO: 86185 - DNA, 20 bp, Artificial Sequence
  MKO10086185_B_Foxi2
  gRNA
gcgaagcctggcgcggtgtt

SEQ ID NO: 86186 - DNA, 20 bp, Artificial Sequence
  MKO10086186_B_Foxi2
  gRNA
cgccctacgcgacgggacca

SEQ ID NO: 86187 - DNA, 20 bp, Artificial Sequence
  MKO10086187_B_Foxi2
  gRNA
gtagctcgggggatgcgcga

SEQ ID NO: 86188 - DNA, 20 bp, Artificial Sequence
  MKO10086188_B_Foxi3
  gRNA
ggttactgctggcctccgcg

SEQ ID NO: 86189 - DNA, 20 bp, Artificial Sequence
  MKO10086189_B_Foxi3
  gRNA
gccgacatggccctgtattg

SEQ ID NO: 86190 - DNA, 20 bp, Artificial Sequence
  MKO10086190_B_Foxi3
  gRNA
cggcgacgaactggtaaatg

SEQ ID NO: 86191 - DNA, 20 bp, Artificial Sequence
  MKO10086191_B_Foxj1
  gRNA
tgagcaggcgctctgcgtac

SEQ ID NO: 86192 - DNA, 20 bp, Artificial Sequence
  MKO10086192_B_Foxj1
  gRNA
gagtagggtggcttcacgtg

SEQ ID NO: 86193 - DNA, 20 bp, Artificial Sequence
  MKO10086193_B_Foxj1
  gRNA
ctccgggacccgctccgcag

SEQ ID NO: 86194 - DNA, 20 bp, Artificial Sequence
  MKO10086194_B_Foxj2
  gRNA
agtcatggttggtgttgtag

SEQ ID NO: 86195 - DNA, 20 bp, Artificial Sequence
  MKO10086195_B_Foxj2
  gRNA
acttcagagcccctcctccg

SEQ ID NO: 86196 - DNA, 20 bp, Artificial Sequence
  MKO10086196_B_Foxj2
  gRNA
cttctcttccgggaaatgtc

SEQ ID NO: 86197 - DNA, 20 bp, Artificial Sequence
  MKO10086197_B_Foxj3
  gRNA
tacctttccgggatcatcct

SEQ ID NO: 86198 - DNA, 20 bp, Artificial Sequence
  MKO10086198_B_Foxj3
  gRNA
gtaaccagtccatagatgtt

SEQ ID NO: 86199 - DNA, 20 bp, Artificial Sequence
  MKO10086199_B_Foxj3
  gRNA
gggaagtgcctctccaactc

SEQ ID NO: 86200 - DNA, 20 bp, Artificial Sequence
  MKO10086200_B_Foxk1
  gRNA
cccgaagggggtgcggaagc

SEQ ID NO: 86201 - DNA, 20 bp, Artificial Sequence
  MKO10086201_B_Foxk1
  gRNA
tatggtatagcgatgtgaac

SEQ ID NO: 86202 - DNA, 20 bp, Artificial Sequence
  MKO10086202_B_Foxk1
  gRNA
tgtgacctccgaccttcagc

SEQ ID NO: 86203 - DNA, 20 bp, Artificial Sequence
  MKO10086203_B_Foxk2
  gRNA
catcaacattccagacacga

SEQ ID NO: 86204 - DNA, 20 bp, Artificial Sequence
  MKO10086204_B_Foxk2
  gRNA
ctaaaaactatccatactac

SEQ ID NO: 86205 - DNA, 20 bp, Artificial Sequence
  MKO10086205_B_Foxk2
  gRNA
catcaaagtgccacgttccc

SEQ ID NO: 86206 - DNA, 20 bp, Artificial Sequence
  MKO10086206_B_Foxl1
  gRNA
gagcgatccggcgcgcgcgt

SEQ ID NO: 86207 - DNA, 20 bp, Artificial Sequence
  MKO10086207_B_Foxl1
  gRNA
ggccgcgcggtgcctactgc

SEQ ID NO: 86208 - DNA, 20 bp, Artificial Sequence
  MKO10086208_B_Foxl1
  gRNA
gcttctgcgggggctcgacg

SEQ ID NO: 86209 - DNA, 20 bp, Artificial Sequence
  MKO10086209_B_Foxl2
  gRNA
tgcgcggggtctggtttctc

SEQ ID NO: 86210 - DNA, 20 bp, Artificial Sequence
  MKO10086210_B_Foxl2
  gRNA
atgctctgcacgcgcgagta

SEQ ID NO: 86211 - DNA, 20 bp, Artificial Sequence
  MKO10086211_B_Foxl2
  gRNA
ttgactgcgcgtccgctctc

SEQ ID NO: 86212 - DNA, 20 bp, Artificial Sequence
  MKO10086212_B_Foxm1
  gRNA
cagttcctgcttaacgctgc

SEQ ID NO: 86213 - DNA, 20 bp, Artificial Sequence
  MKO10086213_B_Foxm1
  gRNA
ggacactcaccttaaacact

SEQ ID NO: 86214 - DNA, 20 bp, Artificial Sequence
  MKO10086214_B_Foxm1
  gRNA
ctacaggttgaggagccctc

SEQ ID NO: 86215 - DNA, 20 bp, Artificial Sequence
  MKO10086215_B_Foxn1
  gRNA
cccctacagtactccccggg

SEQ ID NO: 86216 - DNA, 20 bp, Artificial Sequence
  MKO10086216_B_Foxn1
  gRNA
ggctggtagcagtacatccc

SEQ ID NO: 86217 - DNA, 20 bp, Artificial Sequence
  MKO10086217_B_Foxn1
  gRNA
ttccggtcttactgttctta

SEQ ID NO: 86218 - DNA, 20 bp, Artificial Sequence
  MKO10086218_B_Foxn2
  gRNA
agccaagtgcaaactctcca

SEQ ID NO: 86219 - DNA, 20 bp, Artificial Sequence
  MKO10086219_B_Foxn2
  gRNA
taccttggagagtttgcact

SEQ ID NO: 86220 - DNA, 20 bp, Artificial Sequence
  MKO10086220_B_Foxn2
  gRNA
tacctttgtggagaagaaaa

SEQ ID NO: 86221 - DNA, 20 bp, Artificial Sequence
  MKO10086221_B_Foxn3
  gRNA
ctgagtcgagggctgtttcc

SEQ ID NO: 86222 - DNA, 20 bp, Artificial Sequence
  MKO10086222_B_Foxn3
  gRNA
acttacctttgataagcctg

SEQ ID NO: 86223 - DNA, 20 bp, Artificial Sequence
  MKO10086223_B_Foxn3
  gRNA
tagacacctaccttgcagga

SEQ ID NO: 86224 - DNA, 20 bp, Artificial Sequence
  MKO10086224_B_Foxn4
  gRNA
taggaaggccgagccgaaaa

SEQ ID NO: 86225 - DNA, 20 bp, Artificial Sequence
  MKO10086225_B_Foxn4
  gRNA
gtgctgggcttgagccctat

SEQ ID NO: 86226 - DNA, 20 bp, Artificial Sequence
  MKO10086226_B_Foxn4
  gRNA
gtggggccgcacccacatgc

SEQ ID NO: 86227 - DNA, 20 bp, Artificial Sequence
  MKO10086227_B_Foxo1
  gRNA
tacgctggcatgaccgaatt

SEQ ID NO: 86228 - DNA, 20 bp, Artificial Sequence
  MKO10086228_B_Foxo1
  gRNA
cgcgttgcggcgcgacgagc

SEQ ID NO: 86229 - DNA, 20 bp, Artificial Sequence
  MKO10086229_B_Foxo1
  gRNA
aattcggtcatgccagcgta

SEQ ID NO: 86230 - DNA, 20 bp, Artificial Sequence
  MKO10086230_B_Foxo3
  gRNA
gctcctcgcggcggaatgcc

SEQ ID NO: 86231 - DNA, 20 bp, Artificial Sequence
  MKO10086231_B_Foxo3
  gRNA
cgttggaattggtgcgcgag

SEQ ID NO: 86232 - DNA, 20 bp, Artificial Sequence
  MKO10086232_B_Foxo3
  gRNA
tgtccgcccagaatgcccgc

SEQ ID NO: 86233 - DNA, 20 bp, Artificial Sequence
  MKO10086233_B_Foxo4
  gRNA
cctgtgtcctacgccgctag

SEQ ID NO: 86234 - DNA, 20 bp, Artificial Sequence
  MKO10086234_B_Foxo4
  gRNA
gccacacgaaccgtccgagg

SEQ ID NO: 86235 - DNA, 20 bp, Artificial Sequence
  MKO10086235_B_Foxo4
  gRNA
tccacctcggacggttcgtg

SEQ ID NO: 86236 - DNA, 20 bp, Artificial Sequence
  MKO10086236_B_Foxo6
  gRNA
tgcgctgcccgggccctacg

SEQ ID NO: 86237 - DNA, 20 bp, Artificial Sequence
  MKO10086237_B_Foxo6
  gRNA
ggcttcgggccgcccgctct

SEQ ID NO: 86238 - DNA, 20 bp, Artificial Sequence
  MKO10086238_B_Foxo6
  gRNA
ttcatccgcgtgcagaacga

SEQ ID NO: 86239 - DNA, 20 bp, Artificial Sequence
  MKO10086239_B_Foxp1
  gRNA
ttgttaggaggccttggcgc

SEQ ID NO: 86240 - DNA, 20 bp, Artificial Sequence
  MKO10086240_B_Foxp1
  gRNA
agtggctatgatgacacctc

SEQ ID NO: 86241 - DNA, 20 bp, Artificial Sequence
  MKO10086241_B_Foxp1
  gRNA
gcaggccctcatgcttcaac

SEQ ID NO: 86242 - DNA, 20 bp, Artificial Sequence
  MKO10086242_B_Foxp2
  gRNA
gcaagctgtgatgttgcagc

SEQ ID NO: 86243 - DNA, 20 bp, Artificial Sequence
  MKO10086243_B_Foxp2
  gRNA
ttgttacagcagcaaaccag

SEQ ID NO: 86244 - DNA, 20 bp, Artificial Sequence
  MKO10086244_B_Foxp2
  gRNA
gatcacttggggagtcatca

SEQ ID NO: 86245 - DNA, 20 bp, Artificial Sequence
  MKO10086245_B_Foxp3
  gRNA
ggacctagtcgggccccaga

SEQ ID NO: 86246 - DNA, 20 bp, Artificial Sequence
  MKO10086246_B_Foxp3
  gRNA
tcgaagaccttctcacaacc

SEQ ID NO: 86247 - DNA, 20 bp, Artificial Sequence
  MKO10086247_B_Foxp3
  gRNA
cctggacacccattccagac

SEQ ID NO: 86248 - DNA, 20 bp, Artificial Sequence
  MKO10086248_B_Foxp4
  gRNA
cctgctcacctgcaccgcag

SEQ ID NO: 86249 - DNA, 20 bp, Artificial Sequence
  MKO10086249_B_Foxp4
  gRNA
cctgcagctgaggtggcgac

SEQ ID NO: 86250 - DNA, 20 bp, Artificial Sequence
  MKO10086250_B_Foxp4
  gRNA
tgtcttacaggctctccagg

SEQ ID NO: 86251 - DNA, 20 bp, Artificial Sequence
  MKO10086251_B_Foxq1
  gRNA
cgcgggcggacgcctgacac

SEQ ID NO: 86252 - DNA, 20 bp, Artificial Sequence
  MKO10086252_B_Foxq1
  gRNA
ggcttgggccgccgcgtgta

SEQ ID NO: 86253 - DNA, 20 bp, Artificial Sequence
  MKO10086253_B_Foxq1
  gRNA
tccggtggctgaggcgcttg

SEQ ID NO: 86254 - DNA, 20 bp, Artificial Sequence
  MKO10086254_B_Foxr1
  gRNA
ggaaggcagacagcgcactc

SEQ ID NO: 86255 - DNA, 20 bp, Artificial Sequence
  MKO10086255_B_Foxr1
  gRNA
atggcttgcggaagcctcca

SEQ ID NO: 86256 - DNA, 20 bp, Artificial Sequence
  MKO10086256_B_Foxr1
  gRNA
cagacattaagcccaatctg

SEQ ID NO: 86257 - DNA, 20 bp, Artificial Sequence
  MKO10086257_B_Foxr2
  gRNA
cccaccgggagaaggagtcc

SEQ ID NO: 86258 - DNA, 20 bp, Artificial Sequence
  MKO10086258_B_Foxr2
  gRNA
ctgtagttgagtggagggcg

SEQ ID NO: 86259 - DNA, 20 bp, Artificial Sequence
  MKO10086259_B_Foxr2
  gRNA
tgtgtgccccatcaacagca

SEQ ID NO: 86260 - DNA, 20 bp, Artificial Sequence
  MKO10086260_B_Foxred1
  gRNA
atgaccacatccgcctgttc

SEQ ID NO: 86261 - DNA, 20 bp, Artificial Sequence
  MKO10086261_B_Foxred1
  gRNA
tgccaaatcccgcccacaga

SEQ ID NO: 86262 - DNA, 20 bp, Artificial Sequence
  MKO10086262_B_Foxred1
  gRNA
gatgtggtcatcataggagg

SEQ ID NO: 86263 - DNA, 20 bp, Artificial Sequence
  MKO10086263_B_Foxred2
  gRNA
gggctactcactccttcaac

SEQ ID NO: 86264 - DNA, 20 bp, Artificial Sequence
  MKO10086264_B_Foxred2
  gRNA
cgaccgtgtcatccgctgcc

SEQ ID NO: 86265 - DNA, 20 bp, Artificial Sequence
  MKO10086265_B_Foxred2
  gRNA
ggggtacgagtctgtgtccg

SEQ ID NO: 86266 - DNA, 20 bp, Artificial Sequence
  MKO10086266_B_Foxs1
  gRNA
tgccacgacatgttccagca

SEQ ID NO: 86267 - DNA, 20 bp, Artificial Sequence
  MKO10086267_B_Foxs1
  gRNA
agacgcttcaccaaacgcac

SEQ ID NO: 86268 - DNA, 20 bp, Artificial Sequence
  MKO10086268_B_Foxs1
  gRNA
accctcaaagcttaagccct

SEQ ID NO: 86269 - DNA, 20 bp, Artificial Sequence
  MKO10086269_B_Fpgs
  gRNA
gcgccaacggagtgaccccc

SEQ ID NO: 86270 - DNA, 20 bp, Artificial Sequence
  MKO10086270_B_Fpgs
  gRNA
ctaaacattattcatgtcac

SEQ ID NO: 86271 - DNA, 20 bp, Artificial Sequence
  MKO10086271_B_Fpgs
  gRNA
tgacatgaataatgtttagc

SEQ ID NO: 86272 - DNA, 20 bp, Artificial Sequence
  MKO10086272_B_Fpgt
  gRNA
cttagcccatccgtctagtc

SEQ ID NO: 86273 - DNA, 20 bp, Artificial Sequence
  MKO10086273_B_Fpgt
  gRNA
aaggtcctgctaatccactc

SEQ ID NO: 86274 - DNA, 20 bp, Artificial Sequence
  MKO10086274_B_Fpgt
  gRNA
acatggtattgaactccaag

SEQ ID NO: 86275 - DNA, 20 bp, Artificial Sequence
  MKO10086275_B_Fpr-rs3
  gRNA
tggagagaactatcactgag

SEQ ID NO: 86276 - DNA, 20 bp, Artificial Sequence
  MKO10086276_B_Fpr-rs3
  gRNA
atattccctgtctgccagtc

SEQ ID NO: 86277 - DNA, 20 bp, Artificial Sequence
  MKO10086277_B_Fpr-rs3
  gRNA
tcgcagcgccctctccagac

SEQ ID NO: 86278 - DNA, 20 bp, Artificial Sequence
  MKO10086278_B_Fpr-rs4
  gRNA
taaagagaaccactaatgag

SEQ ID NO: 86279 - DNA, 20 bp, Artificial Sequence
  MKO10086279_B_Fpr-rs4
  gRNA
ctctgtatgccagtctagag

SEQ ID NO: 86280 - DNA, 20 bp, Artificial Sequence
  MKO10086280_B_Fpr-rs4
  gRNA
cctaatcactcttattgcca

SEQ ID NO: 86281 - DNA, 20 bp, Artificial Sequence
  MKO10086281_B_Fpr-rs6
  gRNA
tctttgtgaagacaagtttc

SEQ ID NO: 86282 - DNA, 20 bp, Artificial Sequence
  MKO10086282_B_Fpr-rs6
  gRNA
gtaaccatcagtttcattat

SEQ ID NO: 86283 - DNA, 20 bp, Artificial Sequence
  MKO10086283_B_Fpr-rs6
  gRNA
attgtctgacttctcttaca

SEQ ID NO: 86284 - DNA, 20 bp, Artificial Sequence
  MKO10086284_B_Fpr1
  gRNA
tacagcggtccagtgcaatg

SEQ ID NO: 86285 - DNA, 20 bp, Artificial Sequence
  MKO10086285_B_Fpr1
  gRNA
tgggcaacgggctcgtgatc

SEQ ID NO: 86286 - DNA, 20 bp, Artificial Sequence
  MKO10086286_B_Fpr1
  gRNA
tcatgttcttcaaccgttca

SEQ ID NO: 86287 - DNA, 20 bp, Artificial Sequence
  MKO10086287_B_Fpr2
  gRNA
agaactggtgcttgaatcac

SEQ ID NO: 86288 - DNA, 20 bp, Artificial Sequence
  MKO10086288_B_Fpr2
  gRNA
actgctgtaaggactcgtaa

SEQ ID NO: 86289 - DNA, 20 bp, Artificial Sequence
  MKO10086289_B_Fpr2
  gRNA
tgttaacccaacaagctcat

SEQ ID NO: 86290 - DNA, 20 bp, Artificial Sequence
  MKO10086290_B_Fpr3
  gRNA
tctatgattctaccatctcc

SEQ ID NO: 86291 - DNA, 20 bp, Artificial Sequence
  MKO10086291_B_Fpr3
  gRNA
gaaatgtggttgttgggtcc

SEQ ID NO: 86292 - DNA, 20 bp, Artificial Sequence
  MKO10086292_B_Fpr3
  gRNA
cgtcctttccgagttcttac

SEQ ID NO: 86293 - DNA, 20 bp, Artificial Sequence
  MKO10086293_B_Fra10ac1
  gRNA
ggagaatgataagacagatc

SEQ ID NO: 86294 - DNA, 20 bp, Artificial Sequence
  MKO10086294_B_Fra10ac1
  gRNA
gcaaaagagaggactttaag

SEQ ID NO: 86295 - DNA, 20 bp, Artificial Sequence
  MKO10086295_B_Fra10ac1
  gRNA
cttcatcctcctcattccaa

SEQ ID NO: 86296 - DNA, 20 bp, Artificial Sequence
  MKO10086296_B_Fras1
  gRNA
atgataatggggtgcattgt

SEQ ID NO: 86297 - DNA, 20 bp, Artificial Sequence
  MKO10086297_B_Fras1
  gRNA
cacaggtgcttgtctgtatc

SEQ ID NO: 86298 - DNA, 20 bp, Artificial Sequence
  MKO10086298_B_Fras1
  gRNA
gctgcccacagtgtgcaccc

SEQ ID NO: 86299 - DNA, 20 bp, Artificial Sequence
  MKO10086299_B_Frat1
  gRNA
tggtggactcgagcattatt

SEQ ID NO: 86300 - DNA, 20 bp, Artificial Sequence
  MKO10086300_B_Frat1
  gRNA
ggtcgtcgtcgtcgccagtg

SEQ ID NO: 86301 - DNA, 20 bp, Artificial Sequence
  MKO10086301_B_Frat1
  gRNA
ctgagtgtgcttcccgtccg

SEQ ID NO: 86302 - DNA, 20 bp, Artificial Sequence
  MKO10086302_B_Frat2
  gRNA
ggcgatctccgcaacgcagt

SEQ ID NO: 86303 - DNA, 20 bp, Artificial Sequence
  MKO10086303_B_Frat2
  gRNA
cgggggtggccgaagcggac

SEQ ID NO: 86304 - DNA, 20 bp, Artificial Sequence
  MKO10086304_B_Frat2
  gRNA
ctgcgttgcggagatcgccc

SEQ ID NO: 86305 - DNA, 20 bp, Artificial Sequence
  MKO10086305_B_Frem1
  gRNA
aaggagcaaaaccgtataca

SEQ ID NO: 86306 - DNA, 20 bp, Artificial Sequence
  MKO10086306_B_Frem1
  gRNA
aatggggatgtaatcaatgt

SEQ ID NO: 86307 - DNA, 20 bp, Artificial Sequence
  MKO10086307_B_Frem1
  gRNA
tgaacgagcccgtaacccag

SEQ ID NO: 86308 - DNA, 20 bp, Artificial Sequence
  MKO10086308_B_Frem2
  gRNA
cccaattcagtcgaaaatgc

SEQ ID NO: 86309 - DNA, 20 bp, Artificial Sequence
  MKO10086309_B_Frem2
  gRNA
cttcaacagagtactcagac

SEQ ID NO: 86310 - DNA, 20 bp, Artificial Sequence
  MKO10086310_B_Frem2
  gRNA
cgtcatcttccactatgaaa

SEQ ID NO: 86311 - DNA, 20 bp, Artificial Sequence
  MKO10086311_B_Frem3
  gRNA
aactccagtgcagccgcgcc

SEQ ID NO: 86312 - DNA, 20 bp, Artificial Sequence
  MKO10086312_B_Frem3
  gRNA
tacttctctgttgaaacccg

SEQ ID NO: 86313 - DNA, 20 bp, Artificial Sequence
  MKO10086313_B_Frem3
  gRNA
gtctactacatcctgaacaa

SEQ ID NO: 86314 - DNA, 20 bp, Artificial Sequence
  MKO10086314_B_Frg1
  gRNA
tggtggactgtatccaactt

SEQ ID NO: 86315 - DNA, 20 bp, Artificial Sequence
  MKO10086315_B_Frg1
  gRNA
ggagacccaacttgatattg

SEQ ID NO: 86316 - DNA, 20 bp, Artificial Sequence
  MKO10086316_B_Frg1
  gRNA
ttgacagcagtaaactgctc

SEQ ID NO: 86317 - DNA, 20 bp, Artificial Sequence
  MKO10086317_B_Frk
  gRNA
tactacaccacaacaagtga

SEQ ID NO: 86318 - DNA, 20 bp, Artificial Sequence
  MKO10086318_B_Frk
  gRNA
tggatccaaatgacttcctg

SEQ ID NO: 86319 - DNA, 20 bp, Artificial Sequence
  MKO10086319_B_Frk
  gRNA
tactttggagatattcttgc

SEQ ID NO: 86320 - DNA, 20 bp, Artificial Sequence
  MKO10086320_B_Frmd3
  gRNA
cctttacagagggaaacgaa

SEQ ID NO: 86321 - DNA, 20 bp, Artificial Sequence
  MKO10086321_B_Frmd3
  gRNA
gagctcttctttaatcttca

SEQ ID NO: 86322 - DNA, 20 bp, Artificial Sequence
  MKO10086322_B_Frmd3
  gRNA
gaatttcactctaaagcaca

SEQ ID NO: 86323 - DNA, 20 bp, Artificial Sequence
  MKO10086323_B_Frmd4a
  gRNA
ccaattctcctccgaacaat

SEQ ID NO: 86324 - DNA, 20 bp, Artificial Sequence
  MKO10086324_B_Frmd4a
  gRNA
tggttcctcgcctggatcca

SEQ ID NO: 86325 - DNA, 20 bp, Artificial Sequence
  MKO10086325_B_Frmd4a
  gRNA
tggaggagacgctgcgccag

SEQ ID NO: 86326 - DNA, 20 bp, Artificial Sequence
  MKO10086326_B_Frmd4b
  gRNA
cgagagcatatccttcctaa

SEQ ID NO: 86327 - DNA, 20 bp, Artificial Sequence
  MKO10086327_B_Frmd4b
  gRNA
cagtgagaccatcttcaagt

SEQ ID NO: 86328 - DNA, 20 bp, Artificial Sequence
  MKO10086328_B_Frmd4b
  gRNA
ctcgcaggggtcaagagaac

SEQ ID NO: 86329 - DNA, 20 bp, Artificial Sequence
  MKO10086329_B_Frmd5
  gRNA
ttagcggcctatatccttca

SEQ ID NO: 86330 - DNA, 20 bp, Artificial Sequence
  MKO10086330_B_Frmd5
  gRNA
gtcattaccttgaaggatat

SEQ ID NO: 86331 - DNA, 20 bp, Artificial Sequence
  MKO10086331_B_Frmd5
  gRNA
ggtggcaaaggaggtcaaac

SEQ ID NO: 86332 - DNA, 20 bp, Artificial Sequence
  MKO10086332_B_Frmd6
  gRNA
aaaaggaggccagcaaggta

SEQ ID NO: 86333 - DNA, 20 bp, Artificial Sequence
  MKO10086333_B_Frmd6
  gRNA
gtataacactgagaccaaag

SEQ ID NO: 86334 - DNA, 20 bp, Artificial Sequence
  MKO10086334_B_Frmd6
  gRNA
aattctgtgtcaccagttgc

SEQ ID NO: 86335 - DNA, 20 bp, Artificial Sequence
  MKO10086335_B_Frmd7
  gRNA
cacttacattatttccagaa

SEQ ID NO: 86336 - DNA, 20 bp, Artificial Sequence
  MKO10086336_B_Frmd7
  gRNA
gctgtgcagttgtcactgca

SEQ ID NO: 86337 - DNA, 20 bp, Artificial Sequence
  MKO10086337_B_Frmd7
  gRNA
tgacaactgcacagctttaa

SEQ ID NO: 86338 - DNA, 20 bp, Artificial Sequence
  MKO10086338_B_Frmd8
  gRNA
agcggtcagcacattgccct

SEQ ID NO: 86339 - DNA, 20 bp, Artificial Sequence
  MKO10086339_B_Frmd8
  gRNA
ggtcttgcggctgctctatg

SEQ ID NO: 86340 - DNA, 20 bp, Artificial Sequence
  MKO10086340_B_Frmd8
  gRNA
ctccgatgatgatgtcgcca

SEQ ID NO: 86341 - DNA, 20 bp, Artificial Sequence
  MKO10086341_B_Frmpd1
  gRNA
agacctttcctgtgaacgag

SEQ ID NO: 86342 - DNA, 20 bp, Artificial Sequence
  MKO10086342_B_Frmpd1
  gRNA
gatgtcctcctccagaacta

SEQ ID NO: 86343 - DNA, 20 bp, Artificial Sequence
  MKO10086343_B_Frmpd1
  gRNA
ccgcttctcctcagtcaaga

SEQ ID NO: 86344 - DNA, 20 bp, Artificial Sequence
  MKO10086344_B_Frmpd3
  gRNA
catgtaccttaacagtggtc

SEQ ID NO: 86345 - DNA, 20 bp, Artificial Sequence
  MKO10086345_B_Frmpd3
  gRNA
cctcatccccaacgtcctga

SEQ ID NO: 86346 - DNA, 20 bp, Artificial Sequence
  MKO10086346_B_Frmpd3
  gRNA
gctcttgtgcttgagtatac

SEQ ID NO: 86347 - DNA, 20 bp, Artificial Sequence
  MKO10086347_B_Frmpd4
  gRNA
aagagagagagtcatcgacc

SEQ ID NO: 86348 - DNA, 20 bp, Artificial Sequence
  MKO10086348_B_Frmpd4
  gRNA
aggtcgatgactctctctct

SEQ ID NO: 86349 - DNA, 20 bp, Artificial Sequence
  MKO10086349_B_Frmpd4
  gRNA
caatcccatttgatgaccct

SEQ ID NO: 86350 - DNA, 20 bp, Artificial Sequence
  MKO10086350_B_Frrs1l
  gRNA
tcacgacatagactctccac

SEQ ID NO: 86351 - DNA, 20 bp, Artificial Sequence
  MKO10086351_B_Frrs1l
  gRNA
ctgacaacgcgctctgaagc

SEQ ID NO: 86352 - DNA, 20 bp, Artificial Sequence
  MKO10086352_B_Frrs1l
  gRNA
cccattcgccaaaatcaagg

SEQ ID NO: 86353 - DNA, 20 bp, Artificial Sequence
  MKO10086353_B_Frrs1
  gRNA
cttcttgttcccacactcga

SEQ ID NO: 86354 - DNA, 20 bp, Artificial Sequence
  MKO10086354_B_Frrs1
  gRNA
cacagaaatcgtatgtgatc

SEQ ID NO: 86355 - DNA, 20 bp, Artificial Sequence
  MKO10086355_B_Frrs1
  gRNA
gattagctgtgagtcataca

SEQ ID NO: 86356 - DNA, 20 bp, Artificial Sequence
  MKO10086356_B_Frs2
  gRNA
aaatagactattcgaagcgc

SEQ ID NO: 86357 - DNA, 20 bp, Artificial Sequence
  MKO10086357_B_Frs2
  gRNA
tactcacttgtaggtgtccg

SEQ ID NO: 86358 - DNA, 20 bp, Artificial Sequence
  MKO10086358_B_Frs2
  gRNA
tatccccgctacccctcgtt

SEQ ID NO: 86359 - DNA, 20 bp, Artificial Sequence
  MKO10086359_B_Frs3
  gRNA
tacctctgcctgcggcgcta

SEQ ID NO: 86360 - DNA, 20 bp, Artificial Sequence
  MKO10086360_B_Frs3
  gRNA
gacgttctcgtaggtgcatt

SEQ ID NO: 86361 - DNA, 20 bp, Artificial Sequence
  MKO10086361_B_Frs3
  gRNA
ctgctccgcgtgatgatgac

SEQ ID NO: 86362 - DNA, 20 bp, Artificial Sequence
  MKO10086362_B_Fryl
  gRNA
gtacccgtaggattcatcgt

SEQ ID NO: 86363 - DNA, 20 bp, Artificial Sequence
  MKO10086363_B_Fryl
  gRNA
ctaaatcccgccgctccagg

SEQ ID NO: 86364 - DNA, 20 bp, Artificial Sequence
  MKO10086364_B_Fryl
  gRNA
ttcacccctctgaagagatc

SEQ ID NO: 86365 - DNA, 20 bp, Artificial Sequence
  MKO10086365_B_Fry
  gRNA
cgctgcagagacttcgtcaa

SEQ ID NO: 86366 - DNA, 20 bp, Artificial Sequence
  MKO10086366_B_Fry
  gRNA
gcgtaagattcgaatcatca

SEQ ID NO: 86367 - DNA, 20 bp, Artificial Sequence
  MKO10086367_B_Fry
  gRNA
gatgattcgaatcttacgct

SEQ ID NO: 86368 - DNA, 20 bp, Artificial Sequence
  MKO10086368_B_Frzb
  gRNA
tgcaggttactcttggtaga

SEQ ID NO: 86369 - DNA, 20 bp, Artificial Sequence
  MKO10086369_B_Frzb
  gRNA
ctctatagctgagaagtgga

SEQ ID NO: 86370 - DNA, 20 bp, Artificial Sequence
  MKO10086370_B_Frzb
  gRNA
tcaagtactggacactgcag

SEQ ID NO: 86371 - DNA, 20 bp, Artificial Sequence
  MKO10086371_B_Fsbp
  gRNA
gcctacgcagcctttacaaa

SEQ ID NO: 86372 - DNA, 20 bp, Artificial Sequence
  MKO10086372_B_Fsbp
  gRNA
ttgctgcaatagctcctgtt

SEQ ID NO: 86373 - DNA, 20 bp, Artificial Sequence
  MKO10086373_B_Fsbp
  gRNA
cgtaggccctgagctgtgcg

SEQ ID NO: 86374 - DNA, 20 bp, Artificial Sequence
  MKO10086374_B_Fscb
  gRNA
cggttgaagagagccctaaa

SEQ ID NO: 86375 - DNA, 20 bp, Artificial Sequence
  MKO10086375_B_Fscb
  gRNA
tacaactgcaaaagacgttg

SEQ ID NO: 86376 - DNA, 20 bp, Artificial Sequence
  MKO10086376_B_Fscb
  gRNA
gcagtggactcacctgataa

SEQ ID NO: 86377 - DNA, 20 bp, Artificial Sequence
  MKO10086377_B_Fscn1
  gRNA
ggggtcgatagtctccgcgc

SEQ ID NO: 86378 - DNA, 20 bp, Artificial Sequence
  MKO10086378_B_Fscn1
  gRNA
ggtgggcggccgctacctga

SEQ ID NO: 86379 - DNA, 20 bp, Artificial Sequence
  MKO10086379_B_Fscn1
  gRNA
aggcacactttcttgtgtcg

SEQ ID NO: 86380 - DNA, 20 bp, Artificial Sequence
  MKO10086380_B_Fscn2
  gRNA
gcacacaaaacgcccgttgc

SEQ ID NO: 86381 - DNA, 20 bp, Artificial Sequence
  MKO10086381_B_Fscn2
  gRNA
ggccgccatcagcgactttg

SEQ ID NO: 86382 - DNA, 20 bp, Artificial Sequence
  MKO10086382_B_Fscn2
  gRNA
gctcatcaatcgacccctcc

SEQ ID NO: 86383 - DNA, 20 bp, Artificial Sequence
  MKO10086383_B_Fscn3
  gRNA
ttgcaacttcgttcagccaa

SEQ ID NO: 86384 - DNA, 20 bp, Artificial Sequence
  MKO10086384_B_Fscn3
  gRNA
cgcccctttctcgtcttacg

SEQ ID NO: 86385 - DNA, 20 bp, Artificial Sequence
  MKO10086385_B_Fscn3
  gRNA
catcgctgacggacacccca

SEQ ID NO: 86386 - DNA, 20 bp, Artificial Sequence
  MKO10086386_B_Fsd1l
  gRNA
gcgcaagtcccaggagttac

SEQ ID NO: 86387 - DNA, 20 bp, Artificial Sequence
  MKO10086387_B_Fsd1l
  gRNA
cagtcaatgtaacaatgccc

SEQ ID NO: 86388 - DNA, 20 bp, Artificial Sequence
  MKO10086388_B_Fsd1l
  gRNA
acaaagaatcatttcaactc

SEQ ID NO: 86389 - DNA, 20 bp, Artificial Sequence
  MKO10086389_B_Fsd1
  gRNA
agacagcgaggacttcagtc

SEQ ID NO: 86390 - DNA, 20 bp, Artificial Sequence
  MKO10086390_B_Fsd1
  gRNA
gccgccaaggaaatcaaaga

SEQ ID NO: 86391 - DNA, 20 bp, Artificial Sequence
  MKO10086391_B_Fsd1
  gRNA
gcagatgttgctgaatgtag

SEQ ID NO: 86392 - DNA, 20 bp, Artificial Sequence
  MKO10086392_B_Fsd2
  gRNA
tacggacaactggtcagctg

SEQ ID NO: 86393 - DNA, 20 bp, Artificial Sequence
  MKO10086393_B_Fsd2
  gRNA
aaccccaatcagcaaagctc

SEQ ID NO: 86394 - DNA, 20 bp, Artificial Sequence
  MKO10086394_B_Fsd2
  gRNA
atgcagtggctatgactgac

SEQ ID NO: 86395 - DNA, 20 bp, Artificial Sequence
  MKO10086395_B_Fshb
  gRNA
ttctgggtattgggccgagc

SEQ ID NO: 86396 - DNA, 20 bp, Artificial Sequence
  MKO10086396_B_Fshb
  gRNA
gtgcgggctactgctacact

SEQ ID NO: 86397 - DNA, 20 bp, Artificial Sequence
  MKO10086397_B_Fshb
  gRNA
ctcgtataccagctccttga

SEQ ID NO: 86398 - DNA, 20 bp, Artificial Sequence
  MKO10086398_B_Fshr
  gRNA
gactggatcttgtgaaaggc

SEQ ID NO: 86399 - DNA, 20 bp, Artificial Sequence
  MKO10086399_B_Fshr
  gRNA
tgcttacatttcatgcaagt

SEQ ID NO: 86400 - DNA, 20 bp, Artificial Sequence
  MKO10086400_B_Fshr
  gRNA
gatctctcagaatgatgtct

SEQ ID NO: 86401 - DNA, 20 bp, Artificial Sequence
  MKO10086401_B_Fsip1
  gRNA
gcacagactcgacaagctat

SEQ ID NO: 86402 - DNA, 20 bp, Artificial Sequence
  MKO10086402_B_Fsip1
  gRNA
tgaagacttagaaaatgacg

SEQ ID NO: 86403 - DNA, 20 bp, Artificial Sequence
  MKO10086403_B_Fsip1
  gRNA
tgcttgacttcagaatctgc

SEQ ID NO: 86404 - DNA, 20 bp, Artificial Sequence
  MKO10086404_B_Fstl1
  gRNA
gcccacgtgcctctgcattg

SEQ ID NO: 86405 - DNA, 20 bp, Artificial Sequence
  MKO10086405_B_Fstl1
  gRNA
aagatccaggttgattatga

SEQ ID NO: 86406 - DNA, 20 bp, Artificial Sequence
  MKO10086406_B_Fstl1
  gRNA
ggaatgtgccgtcacagaga

SEQ ID NO: 86407 - DNA, 20 bp, Artificial Sequence
  MKO10086407_B_Fstl3
  gRNA
ctcgtcgtgtcacctgcgcc

SEQ ID NO: 86408 - DNA, 20 bp, Artificial Sequence
  MKO10086408_B_Fstl3
  gRNA
ccggcaacatcaacaccgcc

SEQ ID NO: 86409 - DNA, 20 bp, Artificial Sequence
  MKO10086409_B_Fstl3
  gRNA
tccaaataggtggcgtgtgc

SEQ ID NO: 86410 - DNA, 20 bp, Artificial Sequence
  MKO10086410_B_Fstl4
  gRNA
cgcctcacagtatgtgctaa

SEQ ID NO: 86411 - DNA, 20 bp, Artificial Sequence
  MKO10086411_B_Fstl4
  gRNA
ctcccgtcggagccacacac

SEQ ID NO: 86412 - DNA, 20 bp, Artificial Sequence
  MKO10086412_B_Fstl4
  gRNA
cgcctcccagaagcgcctct

SEQ ID NO: 86413 - DNA, 20 bp, Artificial Sequence
  MKO10086413_B_Fstl5
  gRNA
tgttacaggggacaactgca

SEQ ID NO: 86414 - DNA, 20 bp, Artificial Sequence
  MKO10086414_B_Fstl5
  gRNA
ttgaacatttgatccaccaa

SEQ ID NO: 86415 - DNA, 20 bp, Artificial Sequence
  MKO10086415_B_Fstl5
  gRNA
ctgtttacaaaggtccatgc

SEQ ID NO: 86416 - DNA, 20 bp, Artificial Sequence
  MKO10086416_B_Fst
  gRNA
caacgaatgtgcactcctca

SEQ ID NO: 86417 - DNA, 20 bp, Artificial Sequence
  MKO10086417_B_Fst
  gRNA
tgaggagtgcacattcgttg

SEQ ID NO: 86418 - DNA, 20 bp, Artificial Sequence
  MKO10086418_B_Fst
  gRNA
cgccagcgagtgtgccatga

SEQ ID NO: 86419 - DNA, 20 bp, Artificial Sequence
  MKO10086419_B_Ftcd
  gRNA
cgcaggtgagcaccctcgaa

SEQ ID NO: 86420 - DNA, 20 bp, Artificial Sequence
  MKO10086420_B_Ftcd
  gRNA
cccgcaggttaagagcaata

SEQ ID NO: 86421 - DNA, 20 bp, Artificial Sequence
  MKO10086421_B_Ftcd
  gRNA
ctcatactctccagcccgga

SEQ ID NO: 86422 - DNA, 20 bp, Artificial Sequence
  MKO10086422_B_Fth1
  gRNA
caccatagacagatagacgt

SEQ ID NO: 86423 - DNA, 20 bp, Artificial Sequence
  MKO10086423_B_Fth1
  gRNA
aatcttcctgcaggatataa

SEQ ID NO: 86424 - DNA, 20 bp, Artificial Sequence
  MKO10086424_B_Fth1
  gRNA
gcccgctctcccagtcatca

SEQ ID NO: 86425 - DNA, 20 bp, Artificial Sequence
  MKO10086425_B_Fthl17
  gRNA
agaaacgcttgaagttctcc

SEQ ID NO: 86426 - DNA, 20 bp, Artificial Sequence
  MKO10086426_B_Fthl17
  gRNA
cctgaccaacctgcgccaga

SEQ ID NO: 86427 - DNA, 20 bp, Artificial Sequence
  MKO10086427_B_Fthl17
  gRNA
tgccatcgacatgtactcgt

SEQ ID NO: 86428 - DNA, 20 bp, Artificial Sequence
  MKO10086428_B_Ftl1
  gRNA
gctgctcaccagagagaggt

SEQ ID NO: 86429 - DNA, 20 bp, Artificial Sequence
  MKO10086429_B_Ftl1
  gRNA
tttacagctctgtgacttcc

SEQ ID NO: 86430 - DNA, 20 bp, Artificial Sequence
  MKO10086430_B_Ftl1
  gRNA
gatactcgcccagagacccc

SEQ ID NO: 86431 - DNA, 20 bp, Artificial Sequence
  MKO10086431_B_Ftmt
  gRNA
ttgatagcagcctccgagtc

SEQ ID NO: 86432 - DNA, 20 bp, Artificial Sequence
  MKO10086432_B_Ftmt
  gRNA
gtgaaagttctggcggaccc

SEQ ID NO: 86433 - DNA, 20 bp, Artificial Sequence
  MKO10086433_B_Ftmt
  gRNA
accgaggccaggaggcgtcg

SEQ ID NO: 86434 - DNA, 20 bp, Artificial Sequence
  MKO10086434_B_Fto
  gRNA
tgaagagggattgttaatcc

SEQ ID NO: 86435 - DNA, 20 bp, Artificial Sequence
  MKO10086435_B_Fto
  gRNA
agatgatgagttctatcagc

SEQ ID NO: 86436 - DNA, 20 bp, Artificial Sequence
  MKO10086436_B_Fto
  gRNA
attaacaatccctcttcacc

SEQ ID NO: 86437 - DNA, 20 bp, Artificial Sequence
  MKO10086437_B_Ftsj1
  gRNA
agtcactggtctccatgatg

SEQ ID NO: 86438 - DNA, 20 bp, Artificial Sequence
  MKO10086438_B_Ftsj1
  gRNA
agccatagcctgtaagtcca

SEQ ID NO: 86439 - DNA, 20 bp, Artificial Sequence
  MKO10086439_B_Ftsj1
  gRNA
gcatgtactcatccacatca

SEQ ID NO: 86440 - DNA, 20 bp, Artificial Sequence
  MKO10086440_B_Ftsj2
  gRNA
tgtgtaacctccgaacctta

SEQ ID NO: 86441 - DNA, 20 bp, Artificial Sequence
  MKO10086441_B_Ftsj2
  gRNA
tgcccttccccccacggtac

SEQ ID NO: 86442 - DNA, 20 bp, Artificial Sequence
  MKO10086442_B_Ftsj2
  gRNA
ctgttagccacccagtaccg

SEQ ID NO: 86443 - DNA, 20 bp, Artificial Sequence
  MKO10086443_B_Ftsj3
  gRNA
gtccatgacgcttactccca

SEQ ID NO: 86444 - DNA, 20 bp, Artificial Sequence
  MKO10086444_B_Ftsj3
  gRNA
atatcacaacagaacgctgt

SEQ ID NO: 86445 - DNA, 20 bp, Artificial Sequence
  MKO10086445_B_Ftsj3
  gRNA
gttctgttgtgatatcctcc

SEQ ID NO: 86446 - DNA, 20 bp, Artificial Sequence
  MKO10086446_B_Fubp1
  gRNA
tttaagattgcagcaaaaat

SEQ ID NO: 86447 - DNA, 20 bp, Artificial Sequence
  MKO10086447_B_Fubp1
  gRNA
ctccaatgcatcagcagcaa

SEQ ID NO: 86448 - DNA, 20 bp, Artificial Sequence
  MKO10086448_B_Fubp1
  gRNA
gaagaatacaaagtcccaga

SEQ ID NO: 86449 - DNA, 20 bp, Artificial Sequence
  MKO10086449_B_Fubp3
  gRNA
tttcattgcagttattggca

SEQ ID NO: 86450 - DNA, 20 bp, Artificial Sequence
  MKO10086450_B_Fubp3
  gRNA
tgcttacctttgatgtacca

SEQ ID NO: 86451 - DNA, 20 bp, Artificial Sequence
  MKO10086451_B_Fubp3
  gRNA
attcaaagtgcctgataaaa

SEQ ID NO: 86452 - DNA, 20 bp, Artificial Sequence
  MKO10086452_B_Fuca1
  gRNA
ccgtgatttggtcggtgagt

SEQ ID NO: 86453 - DNA, 20 bp, Artificial Sequence
  MKO10086453_B_Fuca1
  gRNA
gtagtaccctccatgatgac

SEQ ID NO: 86454 - DNA, 20 bp, Artificial Sequence
  MKO10086454_B_Fuca1
  gRNA
aactggaactcgaaggacgt

SEQ ID NO: 86455 - DNA, 20 bp, Artificial Sequence
  MKO10086455_B_Fuca2
  gRNA
cttgtggaaacagtcgcatg

SEQ ID NO: 86456 - DNA, 20 bp, Artificial Sequence
  MKO10086456_B_Fuca2
  gRNA
cagtcgatgaggggccaaag

SEQ ID NO: 86457 - DNA, 20 bp, Artificial Sequence
  MKO10086457_B_Fuca2
  gRNA
ttcacttctaaacatcacga

SEQ ID NO: 86458 - DNA, 20 bp, Artificial Sequence
  MKO10086458_B_Fuk
  gRNA
gcatgctcaccagggtttgg

SEQ ID NO: 86459 - DNA, 20 bp, Artificial Sequence
  MKO10086459_B_Fuk
  gRNA
ggtgggtcatgatatccaac

SEQ ID NO: 86460 - DNA, 20 bp, Artificial Sequence
  MKO10086460_B_Fuk
  gRNA
tgcttaccatgtgcaagatg

SEQ ID NO: 86461 - DNA, 20 bp, Artificial Sequence
  MKO10086461_B_Fundc1
  gRNA
aaacttgctgcaactgcagt

SEQ ID NO: 86462 - DNA, 20 bp, Artificial Sequence
  MKO10086462_B_Fundc1
  gRNA
cagaacattgtgatatccag

SEQ ID NO: 86463 - DNA, 20 bp, Artificial Sequence
  MKO10086463_B_Fundc1
  gRNA
ctgtacatagccactgtgac

SEQ ID NO: 86464 - DNA, 20 bp, Artificial Sequence
  MKO10086464_B_Fundc2
  gRNA
ccaaacagcttacgccacca

SEQ ID NO: 86465 - DNA, 20 bp, Artificial Sequence
  MKO10086465_B_Fundc2
  gRNA
caactttgatgtatccagta

SEQ ID NO: 86466 - DNA, 20 bp, Artificial Sequence
  MKO10086466_B_Fundc2
  gRNA
taacacccccaattaccagc

SEQ ID NO: 86467 - DNA, 20 bp, Artificial Sequence
  MKO10086467_B_Fuom
  gRNA
ccgtctgctcggatctccac

SEQ ID NO: 86468 - DNA, 20 bp, Artificial Sequence
  MKO10086468_B_Fuom
  gRNA
catttgctgtggttgcaacc

SEQ ID NO: 86469 - DNA, 20 bp, Artificial Sequence
  MKO10086469_B_Fuom
  gRNA
caaatctctctagcttcatc

SEQ ID NO: 86470 - DNA, 20 bp, Artificial Sequence
  MKO10086470_B_Furin
  gRNA
ctggtcattcacgtcaaaac

SEQ ID NO: 86471 - DNA, 20 bp, Artificial Sequence
  MKO10086471_B_Furin
  gRNA
ctcctgatacacgtccctct

SEQ ID NO: 86472 - DNA, 20 bp, Artificial Sequence
  MKO10086472_B_Furin
  gRNA
tcggtgactattaccacttc

SEQ ID NO: 86473 - DNA, 20 bp, Artificial Sequence
  MKO10086473_B_Fus
  gRNA
cataagaagattgtgaactt

SEQ ID NO: 86474 - DNA, 20 bp, Artificial Sequence
  MKO10086474_B_Fus
  gRNA
ctccactgctactgttgtac

SEQ ID NO: 86475 - DNA, 20 bp, Artificial Sequence
  MKO10086475_B_Fus
  gRNA
aaccagtacaacagtagcag

SEQ ID NO: 86476 - DNA, 20 bp, Artificial Sequence
  MKO10086476_B_Fut10
  gRNA
gttctgtaaacactcgccat

SEQ ID NO: 86477 - DNA, 20 bp, Artificial Sequence
  MKO10086477_B_Fut10
  gRNA
gtagctaccccatcgtgctg

SEQ ID NO: 86478 - DNA, 20 bp, Artificial Sequence
  MKO10086478_B_Fut10
  gRNA
gacagcgactgtctttctga

SEQ ID NO: 86479 - DNA, 20 bp, Artificial Sequence
  MKO10086479_B_Fut11
  gRNA
agagggtgatccacgataca

SEQ ID NO: 86480 - DNA, 20 bp, Artificial Sequence
  MKO10086480_B_Fut11
  gRNA
ttattggcaaggtctctatc

SEQ ID NO: 86481 - DNA, 20 bp, Artificial Sequence
  MKO10086481_B_Fut11
  gRNA
acaacaatgagacacagcag

SEQ ID NO: 86482 - DNA, 20 bp, Artificial Sequence
  MKO10086482_B_Fut1
  gRNA
ggtgatgcccaatcgctgga

SEQ ID NO: 86483 - DNA, 20 bp, Artificial Sequence
  MKO10086483_B_Fut1
  gRNA
ggggcagtatgctacattgc

SEQ ID NO: 86484 - DNA, 20 bp, Artificial Sequence
  MKO10086484_B_Fut1
  gRNA
atgtagcatactgccccatc

SEQ ID NO: 86485 - DNA, 20 bp, Artificial Sequence
  MKO10086485_B_Fut2
  gRNA
ggagcttcactattcgttgc

SEQ ID NO: 86486 - DNA, 20 bp, Artificial Sequence
  MKO10086486_B_Fut2
  gRNA
ggcaagccgaccgttcatcc

SEQ ID NO: 86487 - DNA, 20 bp, Artificial Sequence
  MKO10086487_B_Fut2
  gRNA
agaatccggaagggtgtagt

SEQ ID NO: 86488 - DNA, 20 bp, Artificial Sequence
  MKO10086488_B_Fut4
  gRNA
tatgagcgcttcgtgcctcg

SEQ ID NO: 86489 - DNA, 20 bp, Artificial Sequence
  MKO10086489_B_Fut4
  gRNA
actgtcctaccggaccgact

SEQ ID NO: 86490 - DNA, 20 bp, Artificial Sequence
  MKO10086490_B_Fut4
  gRNA
ccacgcgtccaccgtccgtg

SEQ ID NO: 86491 - DNA, 20 bp, Artificial Sequence
  MKO10086491_B_Fut7
  gRNA
aggctccagatgaattgtat

SEQ ID NO: 86492 - DNA, 20 bp, Artificial Sequence
  MKO10086492_B_Fut7
  gRNA
gcatacaaaccttgaactgt

SEQ ID NO: 86493 - DNA, 20 bp, Artificial Sequence
  MKO10086493_B_Fut7
  gRNA
atgaatgagagtcgttatcg

SEQ ID NO: 86494 - DNA, 20 bp, Artificial Sequence
  MKO10086494_B_Fut8
  gRNA
ggagatatgttattctccgc

SEQ ID NO: 86495 - DNA, 20 bp, Artificial Sequence
  MKO10086495_B_Fut8
  gRNA
attgaccaggggacagctac

SEQ ID NO: 86496 - DNA, 20 bp, Artificial Sequence
  MKO10086496_B_Fut8
  gRNA
aaaatggagctaaagagctc

SEQ ID NO: 86497 - DNA, 20 bp, Artificial Sequence
  MKO10086497_B_Fut9
  gRNA
ctcgttgtaatacttgaccc

SEQ ID NO: 86498 - DNA, 20 bp, Artificial Sequence
  MKO10086498_B_Fut9
  gRNA
ctcaccgtcaagaagccata

SEQ ID NO: 86499 - DNA, 20 bp, Artificial Sequence
  MKO10086499_B_Fut9
  gRNA
tggttcagtacctgttgtcc

SEQ ID NO: 86500 - DNA, 20 bp, Artificial Sequence
  MKO10086500_B_Fuz
  gRNA
atggaagttcttccacacta

SEQ ID NO: 86501 - DNA, 20 bp, Artificial Sequence
  MKO10086501_B_Fuz
  gRNA
agaatgctccacatggtgtt

SEQ ID NO: 86502 - DNA, 20 bp, Artificial Sequence
  MKO10086502_B_Fuz
  gRNA
gctgtcgatgagacagtagc

SEQ ID NO: 86503 - DNA, 20 bp, Artificial Sequence
  MKO10086503_B_Fv1
  gRNA
cctcaatagaataccactcc

SEQ ID NO: 86504 - DNA, 20 bp, Artificial Sequence
  MKO10086504_B_Fv1
  gRNA
gcccgcactgttgaagataa

SEQ ID NO: 86505 - DNA, 20 bp, Artificial Sequence
  MKO10086505_B_Fv1
  gRNA
gagaaaccagcaagcgcacg

SEQ ID NO: 86506 - DNA, 20 bp, Artificial Sequence
  MKO10086506_B_Fxn
  gRNA
cgagacagcgtatgaaagac

SEQ ID NO: 86507 - DNA, 20 bp, Artificial Sequence
  MKO10086507_B_Fxn
  gRNA
gcggccccaagcgctatgac

SEQ ID NO: 86508 - DNA, 20 bp, Artificial Sequence
  MKO10086508_B_Fxn
  gRNA
gacagccagatttgcttgtt

SEQ ID NO: 86509 - DNA, 20 bp, Artificial Sequence
  MKO10086509_B_Fxr1
  gRNA
cagttggcaaccagaacgcc

SEQ ID NO: 86510 - DNA, 20 bp, Artificial Sequence
  MKO10086510_B_Fxr1
  gRNA
taccttgtagaaagccccgt

SEQ ID NO: 86511 - DNA, 20 bp, Artificial Sequence
  MKO10086511_B_Fxr1
  gRNA
ttagccagccaccatccaca

SEQ ID NO: 86512 - DNA, 20 bp, Artificial Sequence
  MKO10086512_B_Fxr2
  gRNA
ctattcgagagccaatgaac

SEQ ID NO: 86513 - DNA, 20 bp, Artificial Sequence
  MKO10086513_B_Fxr2
  gRNA
ctacaatgagattgtcactc

SEQ ID NO: 86514 - DNA, 20 bp, Artificial Sequence
  MKO10086514_B_Fxr2
  gRNA
gcctccagctgactacaata

SEQ ID NO: 86515 - DNA, 20 bp, Artificial Sequence
  MKO10086515_B_Fxyd1
  gRNA
agaggatcccagcgatagtg

SEQ ID NO: 86516 - DNA, 20 bp, Artificial Sequence
  MKO10086516_B_Fxyd1
  gRNA
aaagttccctcctcttcgtc

SEQ ID NO: 86517 - DNA, 20 bp, Artificial Sequence
  MKO10086517_B_Fxyd1
  gRNA
ggaccactcacctctgctgt

SEQ ID NO: 86518 - DNA, 20 bp, Artificial Sequence
  MKO10086518_B_Fxyd2
  gRNA
gtttcttaccgcccccacag

SEQ ID NO: 86519 - DNA, 20 bp, Artificial Sequence
  MKO10086519_B_Fxyd2
  gRNA
acagagaatcccttcgagta

SEQ ID NO: 86520 - DNA, 20 bp, Artificial Sequence
  MKO10086520_B_Fxyd2
  gRNA
caaggcaaaaggttccgctg

SEQ ID NO: 86521 - DNA, 20 bp, Artificial Sequence
  MKO10086521_B_Fxyd3
  gRNA
ccctgcaggcctgcctactt

SEQ ID NO: 86522 - DNA, 20 bp, Artificial Sequence
  MKO10086522_B_Fxyd3
  gRNA
gcaagttcagacagaaaccc

SEQ ID NO: 86523 - DNA, 20 bp, Artificial Sequence
  MKO10086523_B_Fxyd3
  gRNA
aaaaatgatcctttctacta

SEQ ID NO: 86524 - DNA, 20 bp, Artificial Sequence
  MKO10086524_B_Fxyd4
  gRNA
tactgtcttacctgggctta

SEQ ID NO: 86525 - DNA, 20 bp, Artificial Sequence
  MKO10086525_B_Fxyd4
  gRNA
tcacccaggtctgccggcct

SEQ ID NO: 86526 - DNA, 20 bp, Artificial Sequence
  MKO10086526_B_Fxyd4
  gRNA
aaagacagtcccttctacta

SEQ ID NO: 86527 - DNA, 20 bp, Artificial Sequence
  MKO10086527_B_Fxyd5
  gRNA
tggatctgacactggattcg

SEQ ID NO: 86528 - DNA, 20 bp, Artificial Sequence
  MKO10086528_B_Fxyd5
  gRNA
acccagtggatgttcaatgt

SEQ ID NO: 86529 - DNA, 20 bp, Artificial Sequence
  MKO10086529_B_Fxyd5
  gRNA
cacgagtagtcgcagaagtc

SEQ ID NO: 86530 - DNA, 20 bp, Artificial Sequence
  MKO10086530_B_Fxyd6
  gRNA
gaaaaggatcctttctatta

SEQ ID NO: 86531 - DNA, 20 bp, Artificial Sequence
  MKO10086531_B_Fxyd6
  gRNA
gcagtttcaatcagaagccc

SEQ ID NO: 86532 - DNA, 20 bp, Artificial Sequence
  MKO10086532_B_Fxyd6
  gRNA
acaccaaccccccaatcctc

SEQ ID NO: 86533 - DNA, 20 bp, Artificial Sequence
  MKO10086533_B_Fxyd7
  gRNA
aggcggattccaggtctgag

SEQ ID NO: 86534 - DNA, 20 bp, Artificial Sequence
  MKO10086534_B_Fxyd7
  gRNA
ccccagcacgaacatgatag

SEQ ID NO: 86535 - DNA, 20 bp, Artificial Sequence
  MKO10086535_B_Fxyd7
  gRNA
caacactcaccatagaaaaa

SEQ ID NO: 86536 - DNA, 20 bp, Artificial Sequence
  MKO10086536_B_Fyb
  gRNA
ataaatgacgaaaatcaaga

SEQ ID NO: 86537 - DNA, 20 bp, Artificial Sequence
  MKO10086537_B_Fyb
  gRNA
tgacaggaacaagagagtga

SEQ ID NO: 86538 - DNA, 20 bp, Artificial Sequence
  MKO10086538_B_Fyb
  gRNA
ctggctggatgtgtaggcgg

SEQ ID NO: 86539 - DNA, 20 bp, Artificial Sequence
  MKO10086539_B_Fyco1
  gRNA
caaccagaccttgtagatca

SEQ ID NO: 86540 - DNA, 20 bp, Artificial Sequence
  MKO10086540_B_Fyco1
  gRNA
cactgaagtgatagcctgct

SEQ ID NO: 86541 - DNA, 20 bp, Artificial Sequence
  MKO10086541_B_Fyco1
  gRNA
ctccgccttccttaaattca

SEQ ID NO: 86542 - DNA, 20 bp, Artificial Sequence
  MKO10086542_B_Fyn
  gRNA
ctgtccctcctctcgtgcgt

SEQ ID NO: 86543 - DNA, 20 bp, Artificial Sequence
  MKO10086543_B_Fyn
  gRNA
ctttggtggtttcgctctcg

SEQ ID NO: 86544 - DNA, 20 bp, Artificial Sequence
  MKO10086544_B_Fyn
  gRNA
accagtttccccggttgtca

SEQ ID NO: 86545 - DNA, 20 bp, Artificial Sequence
  MKO10086545_B_Fyttd1
  gRNA
ctaccaaccgggtgccaaac

SEQ ID NO: 86546 - DNA, 20 bp, Artificial Sequence
  MKO10086546_B_Fyttd1
  gRNA
gtactctcatcctgaattgc

SEQ ID NO: 86547 - DNA, 20 bp, Artificial Sequence
  MKO10086547_B_Fyttd1
  gRNA
tggagtcttctatttagtct

SEQ ID NO: 86548 - DNA, 20 bp, Artificial Sequence
  MKO10086548_B_Fzd10
  gRNA
gcacgagttcgcgccgctcg

SEQ ID NO: 86549 - DNA, 20 bp, Artificial Sequence
  MKO10086549_B_Fzd10
  gRNA
agaagctcatggtacgcata

SEQ ID NO: 86550 - DNA, 20 bp, Artificial Sequence
  MKO10086550_B_Fzd10
  gRNA
tgggcgcgtacagcgaacac

SEQ ID NO: 86551 - DNA, 20 bp, Artificial Sequence
  MKO10086551_B_Fzd1
  gRNA
acttgtcgttgcacaccacc

SEQ ID NO: 86552 - DNA, 20 bp, Artificial Sequence
  MKO10086552_B_Fzd1
  gRNA
cacggaccagatgcctatcc

SEQ ID NO: 86553 - DNA, 20 bp, Artificial Sequence
  MKO10086553_B_Fzd1
  gRNA
gcagcagtacaacggcgaac

SEQ ID NO: 86554 - DNA, 20 bp, Artificial Sequence
  MKO10086554_B_Fzd2
  gRNA
gccggaccggcccagttcca

SEQ ID NO: 86555 - DNA, 20 bp, Artificial Sequence
  MKO10086555_B_Fzd2
  gRNA
cggttatcgcacggtggtgc

SEQ ID NO: 86556 - DNA, 20 bp, Artificial Sequence
  MKO10086556_B_Fzd2
  gRNA
atctgctccgcgccgtgacg

SEQ ID NO: 86557 - DNA, 20 bp, Artificial Sequence
  MKO10086557_B_Fzd3
  gRNA
tgtcccgtggcctgaagata

SEQ ID NO: 86558 - DNA, 20 bp, Artificial Sequence
  MKO10086558_B_Fzd3
  gRNA
ctaggatagtgaatgagagc

SEQ ID NO: 86559 - DNA, 20 bp, Artificial Sequence
  MKO10086559_B_Fzd3
  gRNA
acctgccatcccgtgacctg

SEQ ID NO: 86560 - DNA, 20 bp, Artificial Sequence
  MKO10086560_B_Fzd4
  gRNA
cttgtacagccgctcagcta

SEQ ID NO: 86561 - DNA, 20 bp, Artificial Sequence
  MKO10086561_B_Fzd4
  gRNA
tcttggtcacgttgtagccg

SEQ ID NO: 86562 - DNA, 20 bp, Artificial Sequence
  MKO10086562_B_Fzd4
  gRNA
cttatttccacatcgcagcc

SEQ ID NO: 86563 - DNA, 20 bp, Artificial Sequence
  MKO10086563_B_Fzd5
  gRNA
acgcggtggtggcttcgctt

SEQ ID NO: 86564 - DNA, 20 bp, Artificial Sequence
  MKO10086564_B_Fzd5
  gRNA
cacgcgccaaacccgagtac

SEQ ID NO: 86565 - DNA, 20 bp, Artificial Sequence
  MKO10086565_B_Fzd5
  gRNA
cgacgccgaggttctgtgta

SEQ ID NO: 86566 - DNA, 20 bp, Artificial Sequence
  MKO10086566_B_Fzd6
  gRNA
ctcggctttccctgccgttc

SEQ ID NO: 86567 - DNA, 20 bp, Artificial Sequence
  MKO10086567_B_Fzd6
  gRNA
ttccccacagtcccgatctt

SEQ ID NO: 86568 - DNA, 20 bp, Artificial Sequence
  MKO10086568_B_Fzd6
  gRNA
tccaaaagctcgaccagaat

SEQ ID NO: 86569 - DNA, 20 bp, Artificial Sequence
  MKO10086569_B_Fzd7
  gRNA
ttagcacggcccggctcaca

SEQ ID NO: 86570 - DNA, 20 bp, Artificial Sequence
  MKO10086570_B_Fzd7
  gRNA
tgcattgcggggcttcgtgc

SEQ ID NO: 86571 - DNA, 20 bp, Artificial Sequence
  MKO10086571_B_Fzd7
  gRNA
atgcctttctcgccgtgata

SEQ ID NO: 86572 - DNA, 20 bp, Artificial Sequence
  MKO10086572_B_Fzd8
  gRNA
cctagtgcacaacgcgcgcc

SEQ ID NO: 86573 - DNA, 20 bp, Artificial Sequence
  MKO10086573_B_Fzd8
  gRNA
taaagcgctccatatcgatg

SEQ ID NO: 86574 - DNA, 20 bp, Artificial Sequence
  MKO10086574_B_Fzd8
  gRNA
agcgctttaagtacccggaa

SEQ ID NO: 86575 - DNA, 20 bp, Artificial Sequence
  MKO10086575_B_Fzd9
  gRNA
tgtggcagccgtactgcacg

SEQ ID NO: 86576 - DNA, 20 bp, Artificial Sequence
  MKO10086576_B_Fzd9
  gRNA
agcgactcttctccacgtac

SEQ ID NO: 86577 - DNA, 20 bp, Artificial Sequence
  MKO10086577_B_Fzd9
  gRNA
cgctcgtgcgctccgcgctg

SEQ ID NO: 86578 - DNA, 20 bp, Artificial Sequence
  MKO10086578_B_Fzr1
  gRNA
cggtactcacattgatcctg

SEQ ID NO: 86579 - DNA, 20 bp, Artificial Sequence
  MKO10086579_B_Fzr1
  gRNA
tgaccgcttcatcccctcgc

SEQ ID NO: 86580 - DNA, 20 bp, Artificial Sequence
  MKO10086580_B_Fzr1
  gRNA
cgtccttggctttgcggttc

SEQ ID NO: 86581 - DNA, 20 bp, Artificial Sequence
  MKO10086581_B_G0s2
  gRNA
gctagtgaagctatacgtgc

SEQ ID NO: 86582 - DNA, 20 bp, Artificial Sequence
  MKO10086582_B_G0s2
  gRNA
agacggctggcggctgtgaa

SEQ ID NO: 86583 - DNA, 20 bp, Artificial Sequence
  MKO10086583_B_G0s2
  gRNA
acagcagtccctccacaagc

SEQ ID NO: 86584 - DNA, 20 bp, Artificial Sequence
  MKO10086584_B_G2e3
  gRNA
agtccagagagcctccaaac

SEQ ID NO: 86585 - DNA, 20 bp, Artificial Sequence
  MKO10086585_B_G2e3
  gRNA
gatgactgtcccaataaata

SEQ ID NO: 86586 - DNA, 20 bp, Artificial Sequence
  MKO10086586_B_G2e3
  gRNA
gcttcctaatagaagacatc

SEQ ID NO: 86587 - DNA, 20 bp, Artificial Sequence
  MKO10086587_B_G3bp1
  gRNA
ccattcctcaggaaatccac

SEQ ID NO: 86588 - DNA, 20 bp, Artificial Sequence
  MKO10086588_B_G3bp1
  gRNA
ctttgtcacagagcctcaag

SEQ ID NO: 86589 - DNA, 20 bp, Artificial Sequence
  MKO10086589_B_G3bp1
  gRNA
tgcccgtagactgcatctgc

SEQ ID NO: 86590 - DNA, 20 bp, Artificial Sequence
  MKO10086590_B_G3bp2
  gRNA
gactttgcaggttctatggc

SEQ ID NO: 86591 - DNA, 20 bp, Artificial Sequence
  MKO10086591_B_G3bp2
  gRNA
gaagcccagtccgctgcttg

SEQ ID NO: 86592 - DNA, 20 bp, Artificial Sequence
  MKO10086592_B_G3bp2
  gRNA
cgttatgaagatgaagtgtt

SEQ ID NO: 86593 - DNA, 20 bp, Artificial Sequence
  MKO10086593_B_G630090E17Rik
  gRNA
cttcttaggaatgtcaatgt

SEQ ID NO: 86594 - DNA, 20 bp, Artificial Sequence
  MKO10086594_B_G630090E17Rik
  gRNA
tcgatcacattacagatgta

SEQ ID NO: 86595 - DNA, 20 bp, Artificial Sequence
  MKO10086595_B_G630090E17Rik
  gRNA
ccccccaaagagtcaagatg

SEQ ID NO: 86596 - DNA, 20 bp, Artificial Sequence
  MKO10086596_B_G6b
  gRNA
agttggggtccctctcgtcg

SEQ ID NO: 86597 - DNA, 20 bp, Artificial Sequence
  MKO10086597_B_G6b
  gRNA
cctagggtacgagtatccca

SEQ ID NO: 86598 - DNA, 20 bp, Artificial Sequence
  MKO10086598_B_G6b
  gRNA
ctgattccgctcctgggcgt

SEQ ID NO: 86599 - DNA, 20 bp, Artificial Sequence
  MKO10086599_B_G6pc2
  gRNA
cgcacgatgagcccattgcg

SEQ ID NO: 86600 - DNA, 20 bp, Artificial Sequence
  MKO10086600_B_G6pc2
  gRNA
gggcctgtttcacacgtagt

SEQ ID NO: 86601 - DNA, 20 bp, Artificial Sequence
  MKO10086601_B_G6pc2
  gRNA
tttcctactacgtgtgaaac

SEQ ID NO: 86602 - DNA, 20 bp, Artificial Sequence
  MKO10086602_B_G6pc3
  gRNA
ccaggaatcaccctcaccca

SEQ ID NO: 86603 - DNA, 20 bp, Artificial Sequence
  MKO10086603_B_G6pc3
  gRNA
ctgcgcctgtgatcatgcag

SEQ ID NO: 86604 - DNA, 20 bp, Artificial Sequence
  MKO10086604_B_G6pc3
  gRNA
ggtgaatctggattggagtc

SEQ ID NO: 86605 - DNA, 20 bp, Artificial Sequence
  MKO10086605_B_G6pc
  gRNA
gtatacacctgctgcgccca

SEQ ID NO: 86606 - DNA, 20 bp, Artificial Sequence
  MKO10086606_B_G6pc
  gRNA
cattgtagatgccccggatg

SEQ ID NO: 86607 - DNA, 20 bp, Artificial Sequence
  MKO10086607_B_G6pc
  gRNA
tgtccaggacccaccaatac

SEQ ID NO: 86608 - DNA, 20 bp, Artificial Sequence
  MKO10086608_B_G6pd2
  gRNA
gctcattacgcttgcacttc

SEQ ID NO: 86609 - DNA, 20 bp, Artificial Sequence
  MKO10086609_B_G6pd2
  gRNA
ttgtccgtactgatgaactc

SEQ ID NO: 86610 - DNA, 20 bp, Artificial Sequence
  MKO10086610_B_G6pd2
  gRNA
agatgtcgcctggtatatct

SEQ ID NO: 86611 - DNA, 20 bp, Artificial Sequence
  MKO10086611_B_G6pdx
  gRNA
gatgtggttcgacagttgat

SEQ ID NO: 86612 - DNA, 20 bp, Artificial Sequence
  MKO10086612_B_G6pdx
  gRNA
cccacaatgaaggtatcttc

SEQ ID NO: 86613 - DNA, 20 bp, Artificial Sequence
  MKO10086613_B_G6pdx
  gRNA
acctgaagataccttcattg

SEQ ID NO: 86614 - DNA, 20 bp, Artificial Sequence
  MKO10086614_B_Gaa
  gRNA
tattgttgcacaacgctctt

SEQ ID NO: 86615 - DNA, 20 bp, Artificial Sequence
  MKO10086615_B_Gaa
  gRNA
agaaaggatgtgacccgtag

SEQ ID NO: 86616 - DNA, 20 bp, Artificial Sequence
  MKO10086616_B_Gaa
  gRNA
gagcgttgtgcaacaatacc

SEQ ID NO: 86617 - DNA, 20 bp, Artificial Sequence
  MKO10086617_B_Gab1
  gRNA
ttgcgcagtggccgtttgac

SEQ ID NO: 86618 - DNA, 20 bp, Artificial Sequence
  MKO10086618_B_Gab1
  gRNA
agggaactagatctatcgct

SEQ ID NO: 86619 - DNA, 20 bp, Artificial Sequence
  MKO10086619_B_Gab1
  gRNA
gatcctgtgaagccgctgac

SEQ ID NO: 86620 - DNA, 20 bp, Artificial Sequence
  MKO10086620_B_Gab2
  gRNA
gacaacagccgactccatcg

SEQ ID NO: 86621 - DNA, 20 bp, Artificial Sequence
  MKO10086621_B_Gab2
  gRNA
ctgtgagacctacgagtacc

SEQ ID NO: 86622 - DNA, 20 bp, Artificial Sequence
  MKO10086622_B_Gab2
  gRNA
cttgtccaccagtgcacctc

SEQ ID NO: 86623 - DNA, 20 bp, Artificial Sequence
  MKO10086623_B_Gab3
  gRNA
ttcccaccagatgtgatagc

SEQ ID NO: 86624 - DNA, 20 bp, Artificial Sequence
  MKO10086624_B_Gab3
  gRNA
caagatcagcccttgttgac

SEQ ID NO: 86625 - DNA, 20 bp, Artificial Sequence
  MKO10086625_B_Gab3
  gRNA
cagaaactctgactcacgtc

SEQ ID NO: 86626 - DNA, 20 bp, Artificial Sequence
  MKO10086626_B_Gabarapl1
  gRNA
cttctaggtcatcgtggaga

SEQ ID NO: 86627 - DNA, 20 bp, Artificial Sequence
  MKO10086627_B_Gabarapl1
  gRNA
tacttcctcttatccagatc

SEQ ID NO: 86628 - DNA, 20 bp, Artificial Sequence
  MKO10086628_B_Gabarapl1
  gRNA
acagaaaatagtcttcctcg

SEQ ID NO: 86629 - DNA, 20 bp, Artificial Sequence
  MKO10086629_B_Gabarapl2
  gRNA
ttccccagaacacagatgcg

SEQ ID NO: 86630 - DNA, 20 bp, Artificial Sequence
  MKO10086630_B_Gabarapl2
  gRNA
acacttcttacctggactgt

SEQ ID NO: 86631 - DNA, 20 bp, Artificial Sequence
  MKO10086631_B_Gabarapl2
  gRNA
ctccttaaacatccacttca

SEQ ID NO: 86632 - DNA, 20 bp, Artificial Sequence
  MKO10086632_B_Gabarap
  gRNA
ctggtacagctgacccatcg

SEQ ID NO: 86633 - DNA, 20 bp, Artificial Sequence
  MKO10086633_B_Gabarap
  gRNA
tacagtgatgaaagcgtcta

SEQ ID NO: 86634 - DNA, 20 bp, Artificial Sequence
  MKO10086634_B_Gabarap
  gRNA
ccctcacctgtaagatcaga

SEQ ID NO: 86635 - DNA, 20 bp, Artificial Sequence
  MKO10086635_B_Gabbr1
  gRNA
ataagcttgagctcgtagtc

SEQ ID NO: 86636 - DNA, 20 bp, Artificial Sequence
  MKO10086636_B_Gabbr1
  gRNA
gtgaatcgaacgccacactc

SEQ ID NO: 86637 - DNA, 20 bp, Artificial Sequence
  MKO10086637_B_Gabbr1
  gRNA
atgtgaccccgacttccatc

SEQ ID NO: 86638 - DNA, 20 bp, Artificial Sequence
  MKO10086638_B_Gabbr2
  gRNA
ccgaaccatttgatggtgtt

SEQ ID NO: 86639 - DNA, 20 bp, Artificial Sequence
  MKO10086639_B_Gabbr2
  gRNA
caggtgaggaacgacctgac

SEQ ID NO: 86640 - DNA, 20 bp, Artificial Sequence
  MKO10086640_B_Gabbr2
  gRNA
ccccgtacagaaccccagtc

SEQ ID NO: 86641 - DNA, 20 bp, Artificial Sequence
  MKO10086641_B_Gabpa
  gRNA
gccttacctgaatatcttgc

SEQ ID NO: 86642 - DNA, 20 bp, Artificial Sequence
  MKO10086642_B_Gabpa
  gRNA
tcttcccgaaatgttgagtg

SEQ ID NO: 86643 - DNA, 20 bp, Artificial Sequence
  MKO10086643_B_Gabpa
  gRNA
ctccttgatcaaacaagctt

SEQ ID NO: 86644 - DNA, 20 bp, Artificial Sequence
  MKO10086644_B_Gabpb1
  gRNA
tttacccagtctgtagtaaa

SEQ ID NO: 86645 - DNA, 20 bp, Artificial Sequence
  MKO10086645_B_Gabpb1
  gRNA
tgtccggtccactttggtcc

SEQ ID NO: 86646 - DNA, 20 bp, Artificial Sequence
  MKO10086646_B_Gabpb1
  gRNA
tggtgctgacgtcaatgcaa

SEQ ID NO: 86647 - DNA, 20 bp, Artificial Sequence
  MKO10086647_B_Gabpb2
  gRNA
gtcgagttacttatcaaata

SEQ ID NO: 86648 - DNA, 20 bp, Artificial Sequence
  MKO10086648_B_Gabpb2
  gRNA
gcagaagtgctccttcgagc

SEQ ID NO: 86649 - DNA, 20 bp, Artificial Sequence
  MKO10086649_B_Gabpb2
  gRNA
tgactcctcgacccagcaag

SEQ ID NO: 86650 - DNA, 20 bp, Artificial Sequence
  MKO10086650_B_Gabra1
  gRNA
gctccggctaaacaacctta

SEQ ID NO: 86651 - DNA, 20 bp, Artificial Sequence
  MKO10086651_B_Gabra1
  gRNA
tatgacaatcgtctgagacc

SEQ ID NO: 86652 - DNA, 20 bp, Artificial Sequence
  MKO10086652_B_Gabra1
  gRNA
tgtcataaccgtccagcagt

SEQ ID NO: 86653 - DNA, 20 bp, Artificial Sequence
  MKO10086653_B_Gabra2
  gRNA
tatgataatcggcttagacc

SEQ ID NO: 86654 - DNA, 20 bp, Artificial Sequence
  MKO10086654_B_Gabra2
  gRNA
aacatttacgtgaccagttt

SEQ ID NO: 86655 - DNA, 20 bp, Artificial Sequence
  MKO10086655_B_Gabra2
  gRNA
catccatcgggaaatcctcc

SEQ ID NO: 86656 - DNA, 20 bp, Artificial Sequence
  MKO10086656_B_Gabra3
  gRNA
tctcttacctcattgtatag

SEQ ID NO: 86657 - DNA, 20 bp, Artificial Sequence
  MKO10086657_B_Gabra3
  gRNA
cactatcttcactagaatct

SEQ ID NO: 86658 - DNA, 20 bp, Artificial Sequence
  MKO10086658_B_Gabra3
  gRNA
gacatctatgtgaccagttt

SEQ ID NO: 86659 - DNA, 20 bp, Artificial Sequence
  MKO10086659_B_Gabra4
  gRNA
gcccgtttctgatgttgaaa

SEQ ID NO: 86660 - DNA, 20 bp, Artificial Sequence
  MKO10086660_B_Gabra4
  gRNA
aggaaaatccaccagtctca

SEQ ID NO: 86661 - DNA, 20 bp, Artificial Sequence
  MKO10086661_B_Gabra4
  gRNA
ttcagcctcaagatttcaat

SEQ ID NO: 86662 - DNA, 20 bp, Artificial Sequence
  MKO10086662_B_Gabra5
  gRNA
tatgacaacagactgcggcc

SEQ ID NO: 86663 - DNA, 20 bp, Artificial Sequence
  MKO10086663_B_Gabra5
  gRNA
tgtcgtcatgttgtgtgcaa

SEQ ID NO: 86664 - DNA, 20 bp, Artificial Sequence
  MKO10086664_B_Gabra5
  gRNA
accatttccgtgtcagacac

SEQ ID NO: 86665 - DNA, 20 bp, Artificial Sequence
  MKO10086665_B_Gabra6
  gRNA
cttcatcttcaagttgagct

SEQ ID NO: 86666 - DNA, 20 bp, Artificial Sequence
  MKO10086666_B_Gabra6
  gRNA
ggatggtcttgcttctcccc

SEQ ID NO: 86667 - DNA, 20 bp, Artificial Sequence
  MKO10086667_B_Gabra6
  gRNA
ccatagaataatgaagagcc

SEQ ID NO: 86668 - DNA, 20 bp, Artificial Sequence
  MKO10086668_B_Gabrb1
  gRNA
aaggatatgacattcgcttg

SEQ ID NO: 86669 - DNA, 20 bp, Artificial Sequence
  MKO10086669_B_Gabrb1
  gRNA
ccatagagaacagttccatc

SEQ ID NO: 86670 - DNA, 20 bp, Artificial Sequence
  MKO10086670_B_Gabrb1
  gRNA
cagtgaaaaaccgaatgatc

SEQ ID NO: 86671 - DNA, 20 bp, Artificial Sequence
  MKO10086671_B_Gabrb2
  gRNA
ccgccttaggtccatcatgc

SEQ ID NO: 86672 - DNA, 20 bp, Artificial Sequence
  MKO10086672_B_Gabrb2
  gRNA
ttaaccagcgacatattact

SEQ ID NO: 86673 - DNA, 20 bp, Artificial Sequence
  MKO10086673_B_Gabrb2
  gRNA
ctgcctgcatgatggaccta

SEQ ID NO: 86674 - DNA, 20 bp, Artificial Sequence
  MKO10086674_B_Gabrb3
  gRNA
attcgcctgagacccgactt

SEQ ID NO: 86675 - DNA, 20 bp, Artificial Sequence
  MKO10086675_B_Gabrb3
  gRNA
cgcaggtcccccagtctgcg

SEQ ID NO: 86676 - DNA, 20 bp, Artificial Sequence
  MKO10086676_B_Gabrb3
  gRNA
tacgacagcagcgtgcatga

SEQ ID NO: 86677 - DNA, 20 bp, Artificial Sequence
  MKO10086677_B_Gabrd
  gRNA
aaccataccaacgagacctt

SEQ ID NO: 86678 - DNA, 20 bp, Artificial Sequence
  MKO10086678_B_Gabrd
  gRNA
agggcaagcgccacattcac

SEQ ID NO: 86679 - DNA, 20 bp, Artificial Sequence
  MKO10086679_B_Gabrd
  gRNA
ggactacgtgggctccaacc

SEQ ID NO: 86680 - DNA, 20 bp, Artificial Sequence
  MKO10086680_B_Gabre
  gRNA
ccacgttgccatgcagaata

SEQ ID NO: 86681 - DNA, 20 bp, Artificial Sequence
  MKO10086681_B_Gabre
  gRNA
ccattggaaaattgagcatg

SEQ ID NO: 86682 - DNA, 20 bp, Artificial Sequence
  MKO10086682_B_Gabre
  gRNA
acttcaacagtgaccacagt

SEQ ID NO: 86683 - DNA, 20 bp, Artificial Sequence
  MKO10086683_B_Gabrg1
  gRNA
aacaaacttcgtccagatat

SEQ ID NO: 86684 - DNA, 20 bp, Artificial Sequence
  MKO10086684_B_Gabrg1
  gRNA
acagctcttaccatgtttat

SEQ ID NO: 86685 - DNA, 20 bp, Artificial Sequence
  MKO10086685_B_Gabrg1
  gRNA
acctgtggatcccataaaca

SEQ ID NO: 86686 - DNA, 20 bp, Artificial Sequence
  MKO10086686_B_Gabrg2
  gRNA
acagtaccattaaagttctc

SEQ ID NO: 86687 - DNA, 20 bp, Artificial Sequence
  MKO10086687_B_Gabrg2
  gRNA
acttacaactggagaactcc

SEQ ID NO: 86688 - DNA, 20 bp, Artificial Sequence
  MKO10086688_B_Gabrg2
  gRNA
tccagtgaatgctatcaata

SEQ ID NO: 86689 - DNA, 20 bp, Artificial Sequence
  MKO10086689_B_Gabrg3
  gRNA
aaaaccaactgtgatcgatg

SEQ ID NO: 86690 - DNA, 20 bp, Artificial Sequence
  MKO10086690_B_Gabrg3
  gRNA
tggcactcacttccaatgtc

SEQ ID NO: 86691 - DNA, 20 bp, Artificial Sequence
  MKO10086691_B_Gabrg3
  gRNA
gcaactgcataacttcccta

SEQ ID NO: 86692 - DNA, 20 bp, Artificial Sequence
  MKO10086692_B_Gabrp
  gRNA
agagtcagtgctatccgaac

SEQ ID NO: 86693 - DNA, 20 bp, Artificial Sequence
  MKO10086693_B_Gabrp
  gRNA
caggatataacaaattcctc

SEQ ID NO: 86694 - DNA, 20 bp, Artificial Sequence
  MKO10086694_B_Gabrp
  gRNA
actttctagctgcagcttgc

SEQ ID NO: 86695 - DNA, 20 bp, Artificial Sequence
  MKO10086695_B_Gabrq
  gRNA
gtccgacttagaccaaattt

SEQ ID NO: 86696 - DNA, 20 bp, Artificial Sequence
  MKO10086696_B_Gabrq
  gRNA
ggacaaacaatcctgcaagc

SEQ ID NO: 86697 - DNA, 20 bp, Artificial Sequence
  MKO10086697_B_Gabrq
  gRNA
ttctgagatctgttcaatac

SEQ ID NO: 86698 - DNA, 20 bp, Artificial Sequence
  MKO10086698_B_Gabrr1
  gRNA
ttatgtcagagcttcgtctc

SEQ ID NO: 86699 - DNA, 20 bp, Artificial Sequence
  MKO10086699_B_Gabrr1
  gRNA
acgaccatgatttcagcatg

SEQ ID NO: 86700 - DNA, 20 bp, Artificial Sequence
  MKO10086700_B_Gabrr1
  gRNA
acctgcacatccacgcccac

SEQ ID NO: 86701 - DNA, 20 bp, Artificial Sequence
  MKO10086701_B_Gabrr2
  gRNA
acctgcacgtccacacctac

SEQ ID NO: 86702 - DNA, 20 bp, Artificial Sequence
  MKO10086702_B_Gabrr2
  gRNA
aggaccacgacttcaccatg

SEQ ID NO: 86703 - DNA, 20 bp, Artificial Sequence
  MKO10086703_B_Gabrr2
  gRNA
acaggccccgccatccctgt

SEQ ID NO: 86704 - DNA, 20 bp, Artificial Sequence
  MKO10086704_B_Gabrr3
  gRNA
cttcatccacgacacaaccg

SEQ ID NO: 86705 - DNA, 20 bp, Artificial Sequence
  MKO10086705_B_Gabrr3
  gRNA
tgaaggctcaccagtgcccg

SEQ ID NO: 86706 - DNA, 20 bp, Artificial Sequence
  MKO10086706_B_Gabrr3
  gRNA
atgcttcgagtacatcccga

SEQ ID NO: 86707 - DNA, 20 bp, Artificial Sequence
  MKO10086707_B_Gad1
  gRNA
gtcgtcttgtgagcgccttc

SEQ ID NO: 86708 - DNA, 20 bp, Artificial Sequence
  MKO10086708_B_Gad1
  gRNA
ggagacttacatattggtat

SEQ ID NO: 86709 - DNA, 20 bp, Artificial Sequence
  MKO10086709_B_Gad1
  gRNA
gtggtggaaatccagaacct

SEQ ID NO: 86710 - DNA, 20 bp, Artificial Sequence
  MKO10086710_B_Gad2
  gRNA
ggcagaccaaccgcaaaatc

SEQ ID NO: 86711 - DNA, 20 bp, Artificial Sequence
  MKO10086711_B_Gad2
  gRNA
cgatgccgcccgtgaacttt

SEQ ID NO: 86712 - DNA, 20 bp, Artificial Sequence
  MKO10086712_B_Gad2
  gRNA
gacctgctgccagcgtgtga

SEQ ID NO: 86713 - DNA, 20 bp, Artificial Sequence
  MKO10086713_B_Gadd45a
  gRNA
ccgtgattaatctcccggaa

SEQ ID NO: 86714 - DNA, 20 bp, Artificial Sequence
  MKO10086714_B_Gadd45a
  gRNA
ttcggatgccatcaccgttc

SEQ ID NO: 86715 - DNA, 20 bp, Artificial Sequence
  MKO10086715_B_Gadd45a
  gRNA
ccgcagagaccccgataacg

SEQ ID NO: 86716 - DNA, 20 bp, Artificial Sequence
  MKO10086716_B_Gadd45b
  gRNA
gcgttcctctagagagatat

SEQ ID NO: 86717 - DNA, 20 bp, Artificial Sequence
  MKO10086717_B_Gadd45b
  gRNA
cctcgtacacccccacggtg

SEQ ID NO: 86718 - DNA, 20 bp, Artificial Sequence
  MKO10086718_B_Gadd45b
  gRNA
ggtcccctatatctctctag

SEQ ID NO: 86719 - DNA, 20 bp, Artificial Sequence
  MKO10086719_B_Gadd45gip1
  gRNA
gcagcgtatcgcagagtgca

SEQ ID NO: 86720 - DNA, 20 bp, Artificial Sequence
  MKO10086720_B_Gadd45gip1
  gRNA
agaacctgctgaccccgcga

SEQ ID NO: 86721 - DNA, 20 bp, Artificial Sequence
  MKO10086721_B_Gadd45gip1
  gRNA
caagcgcagcgactcttgca

SEQ ID NO: 86722 - DNA, 20 bp, Artificial Sequence
  MKO10086722_B_Gadd45g
  gRNA
cgccagggctgtctgaccgc

SEQ ID NO: 86723 - DNA, 20 bp, Artificial Sequence
  MKO10086723_B_Gadd45g
  gRNA
gcacccagtcgttgaagctg

SEQ ID NO: 86724 - DNA, 20 bp, Artificial Sequence
  MKO10086724_B_Gadd45g
  gRNA
tgccaggctgtcactcggga

SEQ ID NO: 86725 - DNA, 20 bp, Artificial Sequence
  MKO10086725_B_Gadl1
  gRNA
ggggatggaatatttaaccc

SEQ ID NO: 86726 - DNA, 20 bp, Artificial Sequence
  MKO10086726_B_Gadl1
  gRNA
gagggacacaggcgagtcac

SEQ ID NO: 86727 - DNA, 20 bp, Artificial Sequence
  MKO10086727_B_Gadl1
  gRNA
ttacctctgccgatgtgaaa

SEQ ID NO: 86728 - DNA, 20 bp, Artificial Sequence
  MKO10086728_B_Gak
  gRNA
tggcagagagtatgcattaa

SEQ ID NO: 86729 - DNA, 20 bp, Artificial Sequence
  MKO10086729_B_Gak
  gRNA
gagcagtgcagcacatgcac

SEQ ID NO: 86730 - DNA, 20 bp, Artificial Sequence
  MKO10086730_B_Gak
  gRNA
tgtttatgaagctcaagatc

SEQ ID NO: 86731 - DNA, 20 bp, Artificial Sequence
  MKO10086731_B_Gal3st1
  gRNA
cactcacgtgaaggccatgt

SEQ ID NO: 86732 - DNA, 20 bp, Artificial Sequence
  MKO10086732_B_Gal3st1
  gRNA
atgaacacaatatctcgccg

SEQ ID NO: 86733 - DNA, 20 bp, Artificial Sequence
  MKO10086733_B_Gal3st1
  gRNA
ggcgcatgtgctcgttcgct

SEQ ID NO: 86734 - DNA, 20 bp, Artificial Sequence
  MKO10086734_B_Gal3st2
  gRNA
aggataatgtccatcctgag

SEQ ID NO: 86735 - DNA, 20 bp, Artificial Sequence
  MKO10086735_B_Gal3st2
  gRNA
gtagtctgaagtccacatgc

SEQ ID NO: 86736 - DNA, 20 bp, Artificial Sequence
  MKO10086736_B_Gal3st2
  gRNA
tgcccacaggtccttccagg

SEQ ID NO: 86737 - DNA, 20 bp, Artificial Sequence
  MKO10086737_B_Gal3st3
  gRNA
cgtaagcctcctcatccacc

SEQ ID NO: 86738 - DNA, 20 bp, Artificial Sequence
  MKO10086738_B_Gal3st3
  gRNA
gactttcctgcgcgcacccg

SEQ ID NO: 86739 - DNA, 20 bp, Artificial Sequence
  MKO10086739_B_Gal3st3
  gRNA
gcgcgccacgcgacgccaga

SEQ ID NO: 86740 - DNA, 20 bp, Artificial Sequence
  MKO10086740_B_Gal3st4
  gRNA
gactgcagctccgacagtcc

SEQ ID NO: 86741 - DNA, 20 bp, Artificial Sequence
  MKO10086741_B_Gal3st4
  gRNA
agactcccagagccaccccc

SEQ ID NO: 86742 - DNA, 20 bp, Artificial Sequence
  MKO10086742_B_Gal3st4
  gRNA
tcctctggaatgatcccccc

SEQ ID NO: 86743 - DNA, 20 bp, Artificial Sequence
  MKO10086743_B_Galc
  gRNA
atccagtatttcagaacgat

SEQ ID NO: 86744 - DNA, 20 bp, Artificial Sequence
  MKO10086744_B_Galc
  gRNA
tagctcatagtgcatgtgcg

SEQ ID NO: 86745 - DNA, 20 bp, Artificial Sequence
  MKO10086745_B_Galc
  gRNA
ctagatgagaattatttccg

SEQ ID NO: 86746 - DNA, 20 bp, Artificial Sequence
  MKO10086746_B_Gale
  gRNA
cccataggcgcccacgcctc

SEQ ID NO: 86747 - DNA, 20 bp, Artificial Sequence
  MKO10086747_B_Gale
  gRNA
tcaactcctggacccggcgc

SEQ ID NO: 86748 - DNA, 20 bp, Artificial Sequence
  MKO10086748_B_Gale
  gRNA
ggggttggtacagccccccg

SEQ ID NO: 86749 - DNA, 20 bp, Artificial Sequence
  MKO10086749_B_Galk1
  gRNA
tcacactgtcgccgacgaac

SEQ ID NO: 86750 - DNA, 20 bp, Artificial Sequence
  MKO10086750_B_Galk1
  gRNA
cccgcagcttccccgctcgt

SEQ ID NO: 86751 - DNA, 20 bp, Artificial Sequence
  MKO10086751_B_Galk1
  gRNA
actgcactgaagccaacgag

SEQ ID NO: 86752 - DNA, 20 bp, Artificial Sequence
  MKO10086752_B_Galk2
  gRNA
aagaagtagttgtgccatag

SEQ ID NO: 86753 - DNA, 20 bp, Artificial Sequence
  MKO10086753_B_Galk2
  gRNA
ggtgagcacatagattactg

SEQ ID NO: 86754 - DNA, 20 bp, Artificial Sequence
  MKO10086754_B_Galk2
  gRNA
cctattatgttgactcttcc

SEQ ID NO: 86755 - DNA, 20 bp, Artificial Sequence
  MKO10086755_B_Galm
  gRNA
ctggactgactcgaaagaac

SEQ ID NO: 86756 - DNA, 20 bp, Artificial Sequence
  MKO10086756_B_Galm
  gRNA
acgccattggtcaacacctg

SEQ ID NO: 86757 - DNA, 20 bp, Artificial Sequence
  MKO10086757_B_Galm
  gRNA
cgaccataatttctgtctga

SEQ ID NO: 86758 - DNA, 20 bp, Artificial Sequence
  MKO10086758_B_Galns
  gRNA
acacaaccaacgctcatgca

SEQ ID NO: 86759 - DNA, 20 bp, Artificial Sequence
  MKO10086759_B_Galns
  gRNA
ccacttgcccacgatcttgt

SEQ ID NO: 86760 - DNA, 20 bp, Artificial Sequence
  MKO10086760_B_Galns
  gRNA
actcgtcaaatccatgcttc

SEQ ID NO: 86761 - DNA, 20 bp, Artificial Sequence
  MKO10086761_B_Galnt10
  gRNA
acaatctccgccactagctc

SEQ ID NO: 86762 - DNA, 20 bp, Artificial Sequence
  MKO10086762_B_Galnt10
  gRNA
catgaccgatgccgagagag

SEQ ID NO: 86763 - DNA, 20 bp, Artificial Sequence
  MKO10086763_B_Galnt10
  gRNA
accagccctcgttgtggaag

SEQ ID NO: 86764 - DNA, 20 bp, Artificial Sequence
  MKO10086764_B_Galnt11
  gRNA
cataagaaatatgaagcgcg

SEQ ID NO: 86765 - DNA, 20 bp, Artificial Sequence
  MKO10086765_B_Galnt11
  gRNA
acagagacgtgccggacacc

SEQ ID NO: 86766 - DNA, 20 bp, Artificial Sequence
  MKO10086766_B_Galnt11
  gRNA
tatgctcattagtaaccgct

SEQ ID NO: 86767 - DNA, 20 bp, Artificial Sequence
  MKO10086767_B_Galnt12
  gRNA
cgactgcggactccttctcg

SEQ ID NO: 86768 - DNA, 20 bp, Artificial Sequence
  MKO10086768_B_Galnt12
  gRNA
gtagatgactacagcgacag

SEQ ID NO: 86769 - DNA, 20 bp, Artificial Sequence
  MKO10086769_B_Galnt12
  gRNA
gaacactgtaaactgtccga

SEQ ID NO: 86770 - DNA, 20 bp, Artificial Sequence
  MKO10086770_B_Galnt13
  gRNA
tgatgatacgtttgagtaca

SEQ ID NO: 86771 - DNA, 20 bp, Artificial Sequence
  MKO10086771_B_Galnt13
  gRNA
gttaagtgcgatcaagtcac

SEQ ID NO: 86772 - DNA, 20 bp, Artificial Sequence
  MKO10086772_B_Galnt13
  gRNA
actggaagctaaatttccga

SEQ ID NO: 86773 - DNA, 20 bp, Artificial Sequence
  MKO10086773_B_Galnt14
  gRNA
ttcgctgcttgtgtattgca

SEQ ID NO: 86774 - DNA, 20 bp, Artificial Sequence
  MKO10086774_B_Galnt14
  gRNA
agtgcttgcgcaacaatgag

SEQ ID NO: 86775 - DNA, 20 bp, Artificial Sequence
  MKO10086775_B_Galnt14
  gRNA
aacccctatgcatctgatcc

SEQ ID NO: 86776 - DNA, 20 bp, Artificial Sequence
  MKO10086776_B_Galnt15
  gRNA
agttctcaagagcgtgggcc

SEQ ID NO: 86777 - DNA, 20 bp, Artificial Sequence
  MKO10086777_B_Galnt15
  gRNA
aataggaggctcggcaccat

SEQ ID NO: 86778 - DNA, 20 bp, Artificial Sequence
  MKO10086778_B_Galnt15
  gRNA
gaagaccagcacgtcccctg

SEQ ID NO: 86779 - DNA, 20 bp, Artificial Sequence
  MKO10086779_B_Galnt16
  gRNA
gtgtggagcgagcctcgttg

SEQ ID NO: 86780 - DNA, 20 bp, Artificial Sequence
  MKO10086780_B_Galnt16
  gRNA
agctggcaggagttcggttc

SEQ ID NO: 86781 - DNA, 20 bp, Artificial Sequence
  MKO10086781_B_Galnt16
  gRNA
acaacatgccttcaaccaac

SEQ ID NO: 86782 - DNA, 20 bp, Artificial Sequence
  MKO10086782_B_Galnt18
  gRNA
gagtacccgctagccgccca

SEQ ID NO: 86783 - DNA, 20 bp, Artificial Sequence
  MKO10086783_B_Galnt18
  gRNA
cgcacaactttgatgaagcc

SEQ ID NO: 86784 - DNA, 20 bp, Artificial Sequence
  MKO10086784_B_Galnt18
  gRNA
accagtcctcacccgcatca

SEQ ID NO: 86785 - DNA, 20 bp, Artificial Sequence
  MKO10086785_B_Galnt1
  gRNA
gctcactgtgaatgcaccgc

SEQ ID NO: 86786 - DNA, 20 bp, Artificial Sequence
  MKO10086786_B_Galnt1
  gRNA
ctagtgcagaaacctcatga

SEQ ID NO: 86787 - DNA, 20 bp, Artificial Sequence
  MKO10086787_B_Galnt1
  gRNA
tgatgacactttcgagtaca

SEQ ID NO: 86788 - DNA, 20 bp, Artificial Sequence
  MKO10086788_B_Galnt2
  gRNA
acctgaccaccgtccgcagc

SEQ ID NO: 86789 - DNA, 20 bp, Artificial Sequence
  MKO10086789_B_Galnt2
  gRNA
cgttgctgtagtcatccacc

SEQ ID NO: 86790 - DNA, 20 bp, Artificial Sequence
  MKO10086790_B_Galnt2
  gRNA
agacacggtacctggaggga

SEQ ID NO: 86791 - DNA, 20 bp, Artificial Sequence
  MKO10086791_B_Galnt3
  gRNA
ttcaggacccccacctttgc

SEQ ID NO: 86792 - DNA, 20 bp, Artificial Sequence
  MKO10086792_B_Galnt3
  gRNA
agctgagaactacactgccg

SEQ ID NO: 86793 - DNA, 20 bp, Artificial Sequence
  MKO10086793_B_Galnt3
  gRNA
ttcacctgccatactgctga

SEQ ID NO: 86794 - DNA, 20 bp, Artificial Sequence
  MKO10086794_B_Galnt4
  gRNA
gatccacccatgctcgcacg

SEQ ID NO: 86795 - DNA, 20 bp, Artificial Sequence
  MKO10086795_B_Galnt4
  gRNA
taatcaagcgaactctctcc

SEQ ID NO: 86796 - DNA, 20 bp, Artificial Sequence
  MKO10086796_B_Galnt4
  gRNA
acttcctacagaataccgcg

SEQ ID NO: 86797 - DNA, 20 bp, Artificial Sequence
  MKO10086797_B_Galnt5
  gRNA
tacactccacatgagagtct

SEQ ID NO: 86798 - DNA, 20 bp, Artificial Sequence
  MKO10086798_B_Galnt5
  gRNA
gggctggctggaacctctac

SEQ ID NO: 86799 - DNA, 20 bp, Artificial Sequence
  MKO10086799_B_Galnt5
  gRNA
tacaaagcacatgatgatgc

SEQ ID NO: 86800 - DNA, 20 bp, Artificial Sequence
  MKO10086800_B_Galnt6
  gRNA
ttgtgttccacaacgaagcc

SEQ ID NO: 86801 - DNA, 20 bp, Artificial Sequence
  MKO10086801_B_Galnt6
  gRNA
gccaggtccccgacgtttgc

SEQ ID NO: 86802 - DNA, 20 bp, Artificial Sequence
  MKO10086802_B_Galnt6
  gRNA
ttcggcagcgggagcggaag

SEQ ID NO: 86803 - DNA, 20 bp, Artificial Sequence
  MKO10086803_B_Galnt7
  gRNA
ttgattcaagctcggagcat

SEQ ID NO: 86804 - DNA, 20 bp, Artificial Sequence
  MKO10086804_B_Galnt7
  gRNA
gctctggtcgtcgggccgcg

SEQ ID NO: 86805 - DNA, 20 bp, Artificial Sequence
  MKO10086805_B_Galnt7
  gRNA
gttcatcttacgcagtttgc

SEQ ID NO: 86806 - DNA, 20 bp, Artificial Sequence
  MKO10086806_B_Galnt9
  gRNA
ctggtgcgctacagtgccga

SEQ ID NO: 86807 - DNA, 20 bp, Artificial Sequence
  MKO10086807_B_Galnt9
  gRNA
agaacgtgtaccccgagatg

SEQ ID NO: 86808 - DNA, 20 bp, Artificial Sequence
  MKO10086808_B_Galnt9
  gRNA
ggtcatcgtcttctgccccc

SEQ ID NO: 86809 - DNA, 20 bp, Artificial Sequence
  MKO10086809_B_Galntl5
  gRNA
tcaccacactcgacactgcc

SEQ ID NO: 86810 - DNA, 20 bp, Artificial Sequence
  MKO10086810_B_Galntl5
  gRNA
gcccagtcttctactcatga

SEQ ID NO: 86811 - DNA, 20 bp, Artificial Sequence
  MKO10086811_B_Galntl5
  gRNA
gtggatgacatgagtgaatt

SEQ ID NO: 86812 - DNA, 20 bp, Artificial Sequence
  MKO10086812_B_Galntl6
  gRNA
ggtgcgtacaattctcactt

SEQ ID NO: 86813 - DNA, 20 bp, Artificial Sequence
  MKO10086813_B_Galntl6
  gRNA
attatcccatttcacaacga

SEQ ID NO: 86814 - DNA, 20 bp, Artificial Sequence
  MKO10086814_B_Galntl6
  gRNA
accgggatgactcagcttac

SEQ ID NO: 86815 - DNA, 20 bp, Artificial Sequence
  MKO10086815_B_Galp
  gRNA
cggccttggaggaaacgggg

SEQ ID NO: 86816 - DNA, 20 bp, Artificial Sequence
  MKO10086816_B_Galp
  gRNA
atggctaactctctgagtcc

SEQ ID NO: 86817 - DNA, 20 bp, Artificial Sequence
  MKO10086817_B_Galp
  gRNA
ccttccagggacgaggaggc

SEQ ID NO: 86818 - DNA, 20 bp, Artificial Sequence
  MKO10086818_B_Galr1
  gRNA
caaatactacaacgaccacc

SEQ ID NO: 86819 - DNA, 20 bp, Artificial Sequence
  MKO10086819_B_Galr1
  gRNA
gtctgaagcatccaagaaaa

SEQ ID NO: 86820 - DNA, 20 bp, Artificial Sequence
  MKO10086820_B_Galr1
  gRNA
tccaggccgctcttcggcat

SEQ ID NO: 86821 - DNA, 20 bp, Artificial Sequence
  MKO10086821_B_Galr2
  gRNA
ccatctataccctggacgat

SEQ ID NO: 86822 - DNA, 20 bp, Artificial Sequence
  MKO10086822_B_Galr2
  gRNA
cgtcgtggtgcgctccacgc

SEQ ID NO: 86823 - DNA, 20 bp, Artificial Sequence
  MKO10086823_B_Galr2
  gRNA
aggtttccgcaaaatctgcg

SEQ ID NO: 86824 - DNA, 20 bp, Artificial Sequence
  MKO10086824_B_Galr3
  gRNA
tgacatccagaacatttcgc

SEQ ID NO: 86825 - DNA, 20 bp, Artificial Sequence
  MKO10086825_B_Galr3
  gRNA
gcagcgggtgtcgcaccgcc

SEQ ID NO: 86826 - DNA, 20 bp, Artificial Sequence
  MKO10086826_B_Galr3
  gRNA
gaagcacagcgtgcgtccgt

SEQ ID NO: 86827 - DNA, 20 bp, Artificial Sequence
  MKO10086827_B_Galt
  gRNA
ggtacctggatccggagcat

SEQ ID NO: 86828 - DNA, 20 bp, Artificial Sequence
  MKO10086828_B_Galt
  gRNA
tccgagctgtcatcgatgca

SEQ ID NO: 86829 - DNA, 20 bp, Artificial Sequence
  MKO10086829_B_Galt
  gRNA
taggtgaatccccactatga

SEQ ID NO: 86830 - DNA, 20 bp, Artificial Sequence
  MKO10086830_B_Gal
  gRNA
gcttgtcgctaaatgatctg

SEQ ID NO: 86831 - DNA, 20 bp, Artificial Sequence
  MKO10086831_B_Gal
  gRNA
ctcagtttcttgcaccttaa

SEQ ID NO: 86832 - DNA, 20 bp, Artificial Sequence
  MKO10086832_B_Gal
  gRNA
ggggccctcgacagcctgcc

SEQ ID NO: 86833 - DNA, 20 bp, Artificial Sequence
  MKO10086833_B_Gamt
  gRNA
aggcccccatagaggaacac

SEQ ID NO: 86834 - DNA, 20 bp, Artificial Sequence
  MKO10086834_B_Gamt
  gRNA
tcaccatcaaagtgaccgtc

SEQ ID NO: 86835 - DNA, 20 bp, Artificial Sequence
  MKO10086835_B_Gamt
  gRNA
cgcccccggtcttcagcaag

SEQ ID NO: 86836 - DNA, 20 bp, Artificial Sequence
  MKO10086836_B_Ganab
  gRNA
ggcatacttaggggtctgtc

SEQ ID NO: 86837 - DNA, 20 bp, Artificial Sequence
  MKO10086837_B_Ganab
  gRNA
ggatcgatgagctagagccc

SEQ ID NO: 86838 - DNA, 20 bp, Artificial Sequence
  MKO10086838_B_Ganab
  gRNA
gctcaaaggccataagtcct

SEQ ID NO: 86839 - DNA, 20 bp, Artificial Sequence
  MKO10086839_B_Ganc
  gRNA
tagttgcttcactgatgatt

SEQ ID NO: 86840 - DNA, 20 bp, Artificial Sequence
  MKO10086840_B_Ganc
  gRNA
ccataaacttcagccacgag

SEQ ID NO: 86841 - DNA, 20 bp, Artificial Sequence
  MKO10086841_B_Ganc
  gRNA
caccaagactaccacctacc

SEQ ID NO: 86842 - DNA, 20 bp, Artificial Sequence
  MKO10086842_B_Gan
  gRNA
gagagggcacatacatcgca

SEQ ID NO: 86843 - DNA, 20 bp, Artificial Sequence
  MKO10086843_B_Gan
  gRNA
gccctctctacgaccctaac

SEQ ID NO: 86844 - DNA, 20 bp, Artificial Sequence
  MKO10086844_B_Gan
  gRNA
ccaggtaatgcacgtggtgc

SEQ ID NO: 86845 - DNA, 20 bp, Artificial Sequence
  MKO10086845_B_Gap43
  gRNA
tgagggtaaagaagaccccg

SEQ ID NO: 86846 - DNA, 20 bp, Artificial Sequence
  MKO10086846_B_Gap43
  gRNA
ctgtatgagaagaaccaaac

SEQ ID NO: 86847 - DNA, 20 bp, Artificial Sequence
  MKO10086847_B_Gap43
  gRNA
tcttctcatacagcacagca

SEQ ID NO: 86848 - DNA, 20 bp, Artificial Sequence
  MKO10086848_B_Gapdhs
  gRNA
ttggacagatttggacgcat

SEQ ID NO: 86849 - DNA, 20 bp, Artificial Sequence
  MKO10086849_B_Gapdhs
  gRNA
ttgagatcaacacgtaccag

SEQ ID NO: 86850 - DNA, 20 bp, Artificial Sequence
  MKO10086850_B_Gapdhs
  gRNA
tctggtgctgcgagtctgca

SEQ ID NO: 86851 - DNA, 20 bp, Artificial Sequence
  MKO10086851_B_Gapdh
  gRNA
ccacaatgccaaagttgtca

SEQ ID NO: 86852 - DNA, 20 bp, Artificial Sequence
  MKO10086852_B_Gapdh
  gRNA
cactgccacccagaagactg

SEQ ID NO: 86853 - DNA, 20 bp, Artificial Sequence
  MKO10086853_B_Gapdh
  gRNA
ccatacatacaggtttctcc

SEQ ID NO: 86854 - DNA, 20 bp, Artificial Sequence
  MKO10086854_B_Gapt
  gRNA
acacgtctacgggaatcaaa

SEQ ID NO: 86855 - DNA, 20 bp, Artificial Sequence
  MKO10086855_B_Gapt
  gRNA
catgcttgggctaatcacgt

SEQ ID NO: 86856 - DNA, 20 bp, Artificial Sequence
  MKO10086856_B_Gapt
  gRNA
gtgcttggcactggaatcgc

SEQ ID NO: 86857 - DNA, 20 bp, Artificial Sequence
  MKO10086857_B_Gapvd1
  gRNA
aggtaatcgattcttcttgt

SEQ ID NO: 86858 - DNA, 20 bp, Artificial Sequence
  MKO10086858_B_Gapvd1
  gRNA
aagaagaatcgattacctat

SEQ ID NO: 86859 - DNA, 20 bp, Artificial Sequence
  MKO10086859_B_Gapvd1
  gRNA
ttggcggagtctccactgca

SEQ ID NO: 86860 - DNA, 20 bp, Artificial Sequence
  MKO10086860_B_Gar1
  gRNA
cctttctcaccaggaggacg

SEQ ID NO: 86861 - DNA, 20 bp, Artificial Sequence
  MKO10086861_B_Gar1
  gRNA
gtagggcaccttgttctcct

SEQ ID NO: 86862 - DNA, 20 bp, Artificial Sequence
  MKO10086862_B_Gar1
  gRNA
taagttgtcagaaaacatga

SEQ ID NO: 86863 - DNA, 20 bp, Artificial Sequence
  MKO10086863_B_Gareml
  gRNA
tgatccactcctgccgccag

SEQ ID NO: 86864 - DNA, 20 bp, Artificial Sequence
  MKO10086864_B_Gareml
  gRNA
tggcttccatcacgaagatt

SEQ ID NO: 86865 - DNA, 20 bp, Artificial Sequence
  MKO10086865_B_Gareml
  gRNA
gacatccccctgcagtaccc

SEQ ID NO: 86866 - DNA, 20 bp, Artificial Sequence
  MKO10086866_B_Garem
  gRNA
acacaccatccgaaacatcg

SEQ ID NO: 86867 - DNA, 20 bp, Artificial Sequence
  MKO10086867_B_Garem
  gRNA
tttgcacttcggggcggcac

SEQ ID NO: 86868 - DNA, 20 bp, Artificial Sequence
  MKO10086868_B_Garem
  gRNA
gcaatatttcaacagcgtgg

SEQ ID NO: 86869 - DNA, 20 bp, Artificial Sequence
  MKO10086869_B_Garnl3
  gRNA
ctcagtatcgtgcaattctt

SEQ ID NO: 86870 - DNA, 20 bp, Artificial Sequence
  MKO10086870_B_Garnl3
  gRNA
tgccctttggatggctccat

SEQ ID NO: 86871 - DNA, 20 bp, Artificial Sequence
  MKO10086871_B_Garnl3
  gRNA
tctgtccttcgccaagtgcc

SEQ ID NO: 86872 - DNA, 20 bp, Artificial Sequence
  MKO10086872_B_Gars
  gRNA
gctctgtccacatccacttg

SEQ ID NO: 86873 - DNA, 20 bp, Artificial Sequence
  MKO10086873_B_Gars
  gRNA
tctatctacgatgtcatctt

SEQ ID NO: 86874 - DNA, 20 bp, Artificial Sequence
  MKO10086874_B_Gars
  gRNA
catcgtagatagagcaaaaa

SEQ ID NO: 86875 - DNA, 20 bp, Artificial Sequence
  MKO10086875_B_Gart
  gRNA
cagcgcgaactttcctgctt

SEQ ID NO: 86876 - DNA, 20 bp, Artificial Sequence
  MKO10086876_B_Gart
  gRNA
ctggccttcacaaccaaagc

SEQ ID NO: 86877 - DNA, 20 bp, Artificial Sequence
  MKO10086877_B_Gart
  gRNA
tgccctcgctcagttctgca

SEQ ID NO: 86878 - DNA, 20 bp, Artificial Sequence
  MKO10086878_B_Gas1
  gRNA
cagctcaaccacacgcgccg

SEQ ID NO: 86879 - DNA, 20 bp, Artificial Sequence
  MKO10086879_B_Gas1
  gRNA
gcatgtcctcgatgaccgcg

SEQ ID NO: 86880 - DNA, 20 bp, Artificial Sequence
  MKO10086880_B_Gas1
  gRNA
cgcctacagccagtacgccg

SEQ ID NO: 86881 - DNA, 20 bp, Artificial Sequence
  MKO10086881_B_Gas2l1
  gRNA
ctagaagacgagcagcgaca

SEQ ID NO: 86882 - DNA, 20 bp, Artificial Sequence
  MKO10086882_B_Gas2l1
  gRNA
gtaacccccatcagcctgcg

SEQ ID NO: 86883 - DNA, 20 bp, Artificial Sequence
  MKO10086883_B_Gas2l1
  gRNA
cgaccagtttcccatgatca

SEQ ID NO: 86884 - DNA, 20 bp, Artificial Sequence
  MKO10086884_B_Gas2l2
  gRNA
attgtgatagcccacaagcc

SEQ ID NO: 86885 - DNA, 20 bp, Artificial Sequence
  MKO10086885_B_Gas2l2
  gRNA
ggtcatgtttatccagataa

SEQ ID NO: 86886 - DNA, 20 bp, Artificial Sequence
  MKO10086886_B_Gas2l2
  gRNA
atgcccagtgcaattctcca

SEQ ID NO: 86887 - DNA, 20 bp, Artificial Sequence
  MKO10086887_B_Gas2l3
  gRNA
ggctgccactctgacgagcc

SEQ ID NO: 86888 - DNA, 20 bp, Artificial Sequence
  MKO10086888_B_Gas2l3
  gRNA
tcacccctggctcgtcagag

SEQ ID NO: 86889 - DNA, 20 bp, Artificial Sequence
  MKO10086889_B_Gas2l3
  gRNA
tggcaaacgtcagccagtcc

SEQ ID NO: 86890 - DNA, 20 bp, Artificial Sequence
  MKO10086890_B_Gas2
  gRNA
ggatgccaacaagcctgcca

SEQ ID NO: 86891 - DNA, 20 bp, Artificial Sequence
  MKO10086891_B_Gas2
  gRNA
gaagagtactggaaacttac

SEQ ID NO: 86892 - DNA, 20 bp, Artificial Sequence
  MKO10086892_B_Gas2
  gRNA
aggtatggtgtggagcctcc

SEQ ID NO: 86893 - DNA, 20 bp, Artificial Sequence
  MKO10086893_B_Gas6
  gRNA
tttaactcaccttgatatcg

SEQ ID NO: 86894 - DNA, 20 bp, Artificial Sequence
  MKO10086894_B_Gas6
  gRNA
tgagtacccttcttatcaca

SEQ ID NO: 86895 - DNA, 20 bp, Artificial Sequence
  MKO10086895_B_Gas6
  gRNA
cccaaacccttgtgataaga

SEQ ID NO: 86896 - DNA, 20 bp, Artificial Sequence
  MKO10086896_B_Gas7
  gRNA
agaactgctgggacgttccc

SEQ ID NO: 86897 - DNA, 20 bp, Artificial Sequence
  MKO10086897_B_Gas7
  gRNA
gcagtctctggagggtgcgc

SEQ ID NO: 86898 - DNA, 20 bp, Artificial Sequence
  MKO10086898_B_Gas7
  gRNA
aacgtcccagcagttctcct

SEQ ID NO: 86899 - DNA, 20 bp, Artificial Sequence
  MKO10086899_B_Gas8
  gRNA
aaagggaccgcgattgttga

SEQ ID NO: 86900 - DNA, 20 bp, Artificial Sequence
  MKO10086900_B_Gas8
  gRNA
ggatcttgtcgcgctccagc

SEQ ID NO: 86901 - DNA, 20 bp, Artificial Sequence
  MKO10086901_B_Gas8
  gRNA
tgcgacgccatcaacaatcg

SEQ ID NO: 86902 - DNA, 20 bp, Artificial Sequence
  MKO10086902_B_Gast
  gRNA
ctttggccgccgcagtgctg

SEQ ID NO: 86903 - DNA, 20 bp, Artificial Sequence
  MKO10086903_B_Gast
  gRNA
atctggaccagggaccaatg

SEQ ID NO: 86904 - DNA, 20 bp, Artificial Sequence
  MKO10086904_B_Gast
  gRNA
gctcagcctctcaccatcga

SEQ ID NO: 86905 - DNA, 20 bp, Artificial Sequence
  MKO10086905_B_Gata1
  gRNA
attgcataccggatctccgc

SEQ ID NO: 86906 - DNA, 20 bp, Artificial Sequence
  MKO10086906_B_Gata1
  gRNA
gaggaatgccagcggagatc

SEQ ID NO: 86907 - DNA, 20 bp, Artificial Sequence
  MKO10086907_B_Gata1
  gRNA
aatccagacgaggaaccgca

SEQ ID NO: 86908 - DNA, 20 bp, Artificial Sequence
  MKO10086908_B_Gata2
  gRNA
aggcggcagtcccctgcgcc

SEQ ID NO: 86909 - DNA, 20 bp, Artificial Sequence
  MKO10086909_B_Gata2
  gRNA
acccctctctggcgacgaga

SEQ ID NO: 86910 - DNA, 20 bp, Artificial Sequence
  MKO10086910_B_Gata2
  gRNA
agacgacaaccaccacctta

SEQ ID NO: 86911 - DNA, 20 bp, Artificial Sequence
  MKO10086911_B_Gata3
  gRNA
cgacccggcggatcccgggg

SEQ ID NO: 86912 - DNA, 20 bp, Artificial Sequence
  MKO10086912_B_Gata3
  gRNA
gtaccatctcgccgccacag

SEQ ID NO: 86913 - DNA, 20 bp, Artificial Sequence
  MKO10086913_B_Gata3
  gRNA
gaggaacgctaatggggacc

SEQ ID NO: 86914 - DNA, 20 bp, Artificial Sequence
  MKO10086914_B_Gata4
  gRNA
attacgacgccacagcgtgg

SEQ ID NO: 86915 - DNA, 20 bp, Artificial Sequence
  MKO10086915_B_Gata4
  gRNA
ccctccttccgcattgcaag

SEQ ID NO: 86916 - DNA, 20 bp, Artificial Sequence
  MKO10086916_B_Gata4
  gRNA
attgctggagttaccgctgg

SEQ ID NO: 86917 - DNA, 20 bp, Artificial Sequence
  MKO10086917_B_Gata5
  gRNA
cctccgagttgcgcctccag

SEQ ID NO: 86918 - DNA, 20 bp, Artificial Sequence
  MKO10086918_B_Gata5
  gRNA
ccttacctgggaggtgatag

SEQ ID NO: 86919 - DNA, 20 bp, Artificial Sequence
  MKO10086919_B_Gata5
  gRNA
acctgaggagcccttgattt

SEQ ID NO: 86920 - DNA, 20 bp, Artificial Sequence
  MKO10086920_B_Gata6
  gRNA
agtccaagccgccgtgatga

SEQ ID NO: 86921 - DNA, 20 bp, Artificial Sequence
  MKO10086921_B_Gata6
  gRNA
tctacacaagcgaccacctc

SEQ ID NO: 86922 - DNA, 20 bp, Artificial Sequence
  MKO10086922_B_Gata6
  gRNA
gaggtggtcgcttgtgtaga

SEQ ID NO: 86923 - DNA, 20 bp, Artificial Sequence
  MKO10086923_B_Gatad1
  gRNA
ggctacatatggactcacgt

SEQ ID NO: 86924 - DNA, 20 bp, Artificial Sequence
  MKO10086924_B_Gatad1
  gRNA
agccgtactatgctcagatc

SEQ ID NO: 86925 - DNA, 20 bp, Artificial Sequence
  MKO10086925_B_Gatad1
  gRNA
agctggagccgatttgtatt

SEQ ID NO: 86926 - DNA, 20 bp, Artificial Sequence
  MKO10086926_B_Gatad2a
  gRNA
gctgttaggagacgggcctg

SEQ ID NO: 86927 - DNA, 20 bp, Artificial Sequence
  MKO10086927_B_Gatad2a
  gRNA
ccattcacccttgggctcga

SEQ ID NO: 86928 - DNA, 20 bp, Artificial Sequence
  MKO10086928_B_Gatad2a
  gRNA
caccaagagcgcctcagtgc

SEQ ID NO: 86929 - DNA, 20 bp, Artificial Sequence
  MKO10086929_B_Gatad2b
  gRNA
ggagttagccttcctcggtc

SEQ ID NO: 86930 - DNA, 20 bp, Artificial Sequence
  MKO10086930_B_Gatad2b
  gRNA
cagcggggtccaccgaagcc

SEQ ID NO: 86931 - DNA, 20 bp, Artificial Sequence
  MKO10086931_B_Gatad2b
  gRNA
tctaagcttccctcccgacc

SEQ ID NO: 86932 - DNA, 20 bp, Artificial Sequence
  MKO10086932_B_Gatc
  gRNA
acagaattccaatcacgttg

SEQ ID NO: 86933 - DNA, 20 bp, Artificial Sequence
  MKO10086933_B_Gatc
  gRNA
ggaatcttgtttaccatgtc

SEQ ID NO: 86934 - DNA, 20 bp, Artificial Sequence
  MKO10086934_B_Gatc
  gRNA
ccagaatagctactctgctg

SEQ ID NO: 86935 - DNA, 20 bp, Artificial Sequence
  MKO10086935_B_Gatm
  gRNA
ggcggcctgaccccatcgac

SEQ ID NO: 86936 - DNA, 20 bp, Artificial Sequence
  MKO10086936_B_Gatm
  gRNA
gaattatcccatccattccg

SEQ ID NO: 86937 - DNA, 20 bp, Artificial Sequence
  MKO10086937_B_Gatm
  gRNA
cagacacaaattggccgctc

SEQ ID NO: 86938 - DNA, 20 bp, Artificial Sequence
  MKO10086938_B_Gatsl2
  gRNA
accctcctcatctacgatga

SEQ ID NO: 86939 - DNA, 20 bp, Artificial Sequence
  MKO10086939_B_Gatsl2
  gRNA
ctacaccatcatcgtagatg

SEQ ID NO: 86940 - DNA, 20 bp, Artificial Sequence
  MKO10086940_B_Gatsl2
  gRNA
cgccgtcgccacccttctca

SEQ ID NO: 86941 - DNA, 20 bp, Artificial Sequence
  MKO10086941_B_Gatsl3
  gRNA
ccagcggggcaatgacagac

SEQ ID NO: 86942 - DNA, 20 bp, Artificial Sequence
  MKO10086942_B_Gatsl3
  gRNA
ggggagcctgtgcccgttac

SEQ ID NO: 86943 - DNA, 20 bp, Artificial Sequence
  MKO10086943_B_Gatsl3
  gRNA
atgagggtggtggcgacagc

SEQ ID NO: 86944 - DNA, 20 bp, Artificial Sequence
  MKO10086944_B_Gba2
  gRNA
gaattgagcatgtcgatgaa

SEQ ID NO: 86945 - DNA, 20 bp, Artificial Sequence
  MKO10086945_B_Gba2
  gRNA
aggaagctgatagaccgtcc

SEQ ID NO: 86946 - DNA, 20 bp, Artificial Sequence
  MKO10086946_B_Gba2
  gRNA
ggagaggccagttctgtcgt

SEQ ID NO: 86947 - DNA, 20 bp, Artificial Sequence
  MKO10086947_B_Gbas
  gRNA
gtttattcatgacctccgtg

SEQ ID NO: 86948 - DNA, 20 bp, Artificial Sequence
  MKO10086948_B_Gbas
  gRNA
atcgacctttctgacaaaca

SEQ ID NO: 86949 - DNA, 20 bp, Artificial Sequence
  MKO10086949_B_Gbas
  gRNA
ctccaacctcctagccaaaa

SEQ ID NO: 86950 - DNA, 20 bp, Artificial Sequence
  MKO10086950_B_Gba
  gRNA
ttggataactggaagtcgtt

SEQ ID NO: 86951 - DNA, 20 bp, Artificial Sequence
  MKO10086951_B_Gba
  gRNA
gtctggtgaaagatatcccc

SEQ ID NO: 86952 - DNA, 20 bp, Artificial Sequence
  MKO10086952_B_Gba
  gRNA
ctcaccgttggtagagaagt

SEQ ID NO: 86953 - DNA, 20 bp, Artificial Sequence
  MKO10086953_B_Gbe1
  gRNA
acaacaacgtgaactatgat

SEQ ID NO: 86954 - DNA, 20 bp, Artificial Sequence
  MKO10086954_B_Gbe1
  gRNA
aaatcccccctgatacctca

SEQ ID NO: 86955 - DNA, 20 bp, Artificial Sequence
  MKO10086955_B_Gbe1
  gRNA
ctccaatgtcatgcaaaacc

SEQ ID NO: 86956 - DNA, 20 bp, Artificial Sequence
  MKO10086956_B_Gbf1
  gRNA
ctggggttagcaacagagtt

SEQ ID NO: 86957 - DNA, 20 bp, Artificial Sequence
  MKO10086957_B_Gbf1
  gRNA
aactctgttgctaaccccag

SEQ ID NO: 86958 - DNA, 20 bp, Artificial Sequence
  MKO10086958_B_Gbf1
  gRNA
cagtttcagtaacctgaaag

SEQ ID NO: 86959 - DNA, 20 bp, Artificial Sequence
  MKO10086959_B_Gbgt1
  gRNA
gcaacatgaagctgcccttc

SEQ ID NO: 86960 - DNA, 20 bp, Artificial Sequence
  MKO10086960_B_Gbgt1
  gRNA
tactgtgtcacaggctgcaa

SEQ ID NO: 86961 - DNA, 20 bp, Artificial Sequence
  MKO10086961_B_Gbgt1
  gRNA
ggggaggtaatagggtatgt

SEQ ID NO: 86962 - DNA, 20 bp, Artificial Sequence
  MKO10086962_B_Gbp10
  gRNA
gtgatcctaagaacgacttg

SEQ ID NO: 86963 - DNA, 20 bp, Artificial Sequence
  MKO10086963_B_Gbp10
  gRNA
aaggatactgcagctgctcc

SEQ ID NO: 86964 - DNA, 20 bp, Artificial Sequence
  MKO10086964_B_Gbp10
  gRNA
aagtcttccccaaatcctgc

SEQ ID NO: 86965 - DNA, 20 bp, Artificial Sequence
  MKO10086965_B_Gbp11
  gRNA
acactgaagctgaagttaaa

SEQ ID NO: 86966 - DNA, 20 bp, Artificial Sequence
  MKO10086966_B_Gbp11
  gRNA
aaggatactgcagcttctcc

SEQ ID NO: 86967 - DNA, 20 bp, Artificial Sequence
  MKO10086967_B_Gbp11
  gRNA
cttcccttcaggcttccctc

SEQ ID NO: 86968 - DNA, 20 bp, Artificial Sequence
  MKO10086968_B_Gbp2b
  gRNA
tgttctggcttctcgggatg

SEQ ID NO: 86969 - DNA, 20 bp, Artificial Sequence
  MKO10086969_B_Gbp2b
  gRNA
gagggatttctccctggatc

SEQ ID NO: 86970 - DNA, 20 bp, Artificial Sequence
  MKO10086970_B_Gbp2b
  gRNA
cgagaagccagaacataccc

SEQ ID NO: 86971 - DNA, 20 bp, Artificial Sequence
  MKO10086971_B_Gbp2
  gRNA
atgagccgcgactgtgcatc

SEQ ID NO: 86972 - DNA, 20 bp, Artificial Sequence
  MKO10086972_B_Gbp2
  gRNA
gtgtgtgcctcaccccaaga

SEQ ID NO: 86973 - DNA, 20 bp, Artificial Sequence
  MKO10086973_B_Gbp2
  gRNA
gtgacaaccagaatgactgc

SEQ ID NO: 86974 - DNA, 20 bp, Artificial Sequence
  MKO10086974_B_Gbp3
  gRNA
cacagtgcaatccgaaacca

SEQ ID NO: 86975 - DNA, 20 bp, Artificial Sequence
  MKO10086975_B_Gbp3
  gRNA
cttcagtgtccaaaaggacc

SEQ ID NO: 86976 - DNA, 20 bp, Artificial Sequence
  MKO10086976_B_Gbp3
  gRNA
cgaacagcccagataaagtc

SEQ ID NO: 86977 - DNA, 20 bp, Artificial Sequence
  MKO10086977_B_Gbp4
  gRNA
gtccaggaggaccagtgctc

SEQ ID NO: 86978 - DNA, 20 bp, Artificial Sequence
  MKO10086978_B_Gbp4
  gRNA
caccatcaaccaccaagccc

SEQ ID NO: 86979 - DNA, 20 bp, Artificial Sequence
  MKO10086979_B_Gbp4
  gRNA
gttcatgctgttgtagacga

SEQ ID NO: 86980 - DNA, 20 bp, Artificial Sequence
  MKO10086980_B_Gbp5
  gRNA
cagatattcatctgatgtga

SEQ ID NO: 86981 - DNA, 20 bp, Artificial Sequence
  MKO10086981_B_Gbp5
  gRNA
catcacatcagatgaatatc

SEQ ID NO: 86982 - DNA, 20 bp, Artificial Sequence
  MKO10086982_B_Gbp5
  gRNA
gttcatagtgttgtatacaa

SEQ ID NO: 86983 - DNA, 20 bp, Artificial Sequence
  MKO10086983_B_Gbp6
  gRNA
aaggatactgcagctgctcc

SEQ ID NO: 86984 - DNA, 20 bp, Artificial Sequence
  MKO10086984_B_Gbp6
  gRNA
aagtcttccccaaatcctgc

SEQ ID NO: 86985 - DNA, 20 bp, Artificial Sequence
  MKO10086985_B_Gbp6
  gRNA
tgtacctgggatcagcttca

SEQ ID NO: 86986 - DNA, 20 bp, Artificial Sequence
  MKO10086986_B_Gbp7
  gRNA
gacaacgattccctctttca

SEQ ID NO: 86987 - DNA, 20 bp, Artificial Sequence
  MKO10086987_B_Gbp7
  gRNA
cgaacagtccagataaaatc

SEQ ID NO: 86988 - DNA, 20 bp, Artificial Sequence
  MKO10086988_B_Gbp7
  gRNA
cacagttaggtctgaaacta

SEQ ID NO: 86989 - DNA, 20 bp, Artificial Sequence
  MKO10086989_B_Gbp8
  gRNA
actgttgatggcatctacat

SEQ ID NO: 86990 - DNA, 20 bp, Artificial Sequence
  MKO10086990_B_Gbp8
  gRNA
cactaaaccagagcacaccc

SEQ ID NO: 86991 - DNA, 20 bp, Artificial Sequence
  MKO10086991_B_Gbp8
  gRNA
ccttcccacagacacgctcc

SEQ ID NO: 86992 - DNA, 20 bp, Artificial Sequence
  MKO10086992_B_Gbp9
  gRNA
tctttattccgtggggattt

SEQ ID NO: 86993 - DNA, 20 bp, Artificial Sequence
  MKO10086993_B_Gbp9
  gRNA
tgctgctcagaagcacactt

SEQ ID NO: 86994 - DNA, 20 bp, Artificial Sequence
  MKO10086994_B_Gbp9
  gRNA
tgtgctctggcttggtgggg

SEQ ID NO: 86995 - DNA, 20 bp, Artificial Sequence
  MKO10086995_B_Gbx1
  gRNA
gcaaacctgttgacgtgcac

SEQ ID NO: 86996 - DNA, 20 bp, Artificial Sequence
  MKO10086996_B_Gbx1
  gRNA
gggcccgtagtaggcgtccg

SEQ ID NO: 86997 - DNA, 20 bp, Artificial Sequence
  MKO10086997_B_Gbx1
  gRNA
caccgcctcgcgaagcaacc

SEQ ID NO: 86998 - DNA, 20 bp, Artificial Sequence
  MKO10086998_B_Gbx2
  gRNA
gcgaacctgctaacgtgaac

SEQ ID NO: 86999 - DNA, 20 bp, Artificial Sequence
  MKO10086999_B_Gbx2
  gRNA
ctccaagcggatgcggaaga

SEQ ID NO: 87000 - DNA, 20 bp, Artificial Sequence
  MKO10087000_B_Gbx2
  gRNA
cggcaacttcgacaaagccg

SEQ ID NO: 87001 - DNA, 20 bp, Artificial Sequence
  MKO10087001_B_Gcat
  gRNA
cacctcaaataggccagcgt

SEQ ID NO: 87002 - DNA, 20 bp, Artificial Sequence
  MKO10087002_B_Gcat
  gRNA
agctgtttcgatgccaacgc

SEQ ID NO: 87003 - DNA, 20 bp, Artificial Sequence
  MKO10087003_B_Gcat
  gRNA
agttctactcgatttatctg

SEQ ID NO: 87004 - DNA, 20 bp, Artificial Sequence
  MKO10087004_B_Gca
  gRNA
gcaggtcccaatatgttctc

SEQ ID NO: 87005 - DNA, 20 bp, Artificial Sequence
  MKO10087005_B_Gca
  gRNA
aagttccactaattccagac

SEQ ID NO: 87006 - DNA, 20 bp, Artificial Sequence
  MKO10087006_B_Gca
  gRNA
catggcaatcataattctgc

SEQ ID NO: 87007 - DNA, 20 bp, Artificial Sequence
  MKO10087007_B_Gcc1
  gRNA
attcgtcgccatggatgtca

SEQ ID NO: 87008 - DNA, 20 bp, Artificial Sequence
  MKO10087008_B_Gcc1
  gRNA
agaggcctacatccgcctcg

SEQ ID NO: 87009 - DNA, 20 bp, Artificial Sequence
  MKO10087009_B_Gcc1
  gRNA
gctggagcaactacgttctg

SEQ ID NO: 87010 - DNA, 20 bp, Artificial Sequence
  MKO10087010_B_Gcc2
  gRNA
cccggagggtgctgcagcta

SEQ ID NO: 87011 - DNA, 20 bp, Artificial Sequence
  MKO10087011_B_Gcc2
  gRNA
tcatcagttcctccatcaac

SEQ ID NO: 87012 - DNA, 20 bp, Artificial Sequence
  MKO10087012_B_Gcc2
  gRNA
ctcaaatcaaaacctgttga

SEQ ID NO: 87013 - DNA, 20 bp, Artificial Sequence
  MKO10087013_B_Gcdh
  gRNA
gtgttgggacccaccattaa

SEQ ID NO: 87014 - DNA, 20 bp, Artificial Sequence
  MKO10087014_B_Gcdh
  gRNA
tcgctgttcctcgctcccat

SEQ ID NO: 87015 - DNA, 20 bp, Artificial Sequence
  MKO10087015_B_Gcdh
  gRNA
atgcaccccatctataccta

SEQ ID NO: 87016 - DNA, 20 bp, Artificial Sequence
  MKO10087016_B_Gcfc2
  gRNA
gaaagagacgtttcacccat

SEQ ID NO: 87017 - DNA, 20 bp, Artificial Sequence
  MKO10087017_B_Gcfc2
  gRNA
tggaagtatcaaacttcttc

SEQ ID NO: 87018 - DNA, 20 bp, Artificial Sequence
  MKO10087018_B_Gcfc2
  gRNA
tttaatagcaatcaggagtg

SEQ ID NO: 87019 - DNA, 20 bp, Artificial Sequence
  MKO10087019_B_Gcgr
  gRNA
caacgcctcccaatgtcagt

SEQ ID NO: 87020 - DNA, 20 bp, Artificial Sequence
  MKO10087020_B_Gcgr
  gRNA
gcgcaaggagcaaggccccc

SEQ ID NO: 87021 - DNA, 20 bp, Artificial Sequence
  MKO10087021_B_Gcgr
  gRNA
ccacggtgtacatcacctgc

SEQ ID NO: 87022 - DNA, 20 bp, Artificial Sequence
  MKO10087022_B_Gcg
  gRNA
gtgcctgcggccgagttcct

SEQ ID NO: 87023 - DNA, 20 bp, Artificial Sequence
  MKO10087023_B_Gcg
  gRNA
cagtgatgtgagttcttact

SEQ ID NO: 87024 - DNA, 20 bp, Artificial Sequence
  MKO10087024_B_Gcg
  gRNA
ctcaaattcatcatgacgtt

SEQ ID NO: 87025 - DNA, 20 bp, Artificial Sequence
  MKO10087025_B_Gch1
  gRNA
tgttaggaagatagccaata

SEQ ID NO: 87026 - DNA, 20 bp, Artificial Sequence
  MKO10087026_B_Gch1
  gRNA
catcaccttgttccatttgt

SEQ ID NO: 87027 - DNA, 20 bp, Artificial Sequence
  MKO10087027_B_Gch1
  gRNA
tggcaagtttactgagacca

SEQ ID NO: 87028 - DNA, 20 bp, Artificial Sequence
  MKO10087028_B_Gchfr
  gRNA
gcaggaggtgggccccacca

SEQ ID NO: 87029 - DNA, 20 bp, Artificial Sequence
  MKO10087029_B_Gchfr
  gRNA
ttccgagtgctgagcatgac

SEQ ID NO: 87030 - DNA, 20 bp, Artificial Sequence
  MKO10087030_B_Gchfr
  gRNA
ctgagtgctgatgagcagat

SEQ ID NO: 87031 - DNA, 20 bp, Artificial Sequence
  MKO10087031_B_Gckr
  gRNA
acctgtcaccccctgcaatg

SEQ ID NO: 87032 - DNA, 20 bp, Artificial Sequence
  MKO10087032_B_Gckr
  gRNA
aaggaatgccatacgaccag

SEQ ID NO: 87033 - DNA, 20 bp, Artificial Sequence
  MKO10087033_B_Gckr
  gRNA
cttgccagccacttgcaaca

SEQ ID NO: 87034 - DNA, 20 bp, Artificial Sequence
  MKO10087034_B_Gck
  gRNA
ggtgggcaacatctttacac

SEQ ID NO: 87035 - DNA, 20 bp, Artificial Sequence
  MKO10087035_B_Gck
  gRNA
agcccttggtccagttgagc

SEQ ID NO: 87036 - DNA, 20 bp, Artificial Sequence
  MKO10087036_B_Gck
  gRNA
tacagggcatcctgctcaac

SEQ ID NO: 87037 - DNA, 20 bp, Artificial Sequence
  MKO10087037_B_Gclc
  gRNA
ataaacaagcacccccgctt

SEQ ID NO: 87038 - DNA, 20 bp, Artificial Sequence
  MKO10087038_B_Gclc
  gRNA
cgcctccattcagtaacaac

SEQ ID NO: 87039 - DNA, 20 bp, Artificial Sequence
  MKO10087039_B_Gclc
  gRNA
cgatgttcttgagactctgc

SEQ ID NO: 87040 - DNA, 20 bp, Artificial Sequence
  MKO10087040_B_Gclm
  gRNA
agattaactccatcttcaat

SEQ ID NO: 87041 - DNA, 20 bp, Artificial Sequence
  MKO10087041_B_Gclm
  gRNA
ccttcagcatgctccgtcct

SEQ ID NO: 87042 - DNA, 20 bp, Artificial Sequence
  MKO10087042_B_Gclm
  gRNA
atgcaccatgtcccatgcag

SEQ ID NO: 87043 - DNA, 20 bp, Artificial Sequence
  MKO10087043_B_Gcm1
  gRNA
agaacgtgaaaacgactgac

SEQ ID NO: 87044 - DNA, 20 bp, Artificial Sequence
  MKO10087044_B_Gcm1
  gRNA
ctgaagcttattccctgccg

SEQ ID NO: 87045 - DNA, 20 bp, Artificial Sequence
  MKO10087045_B_Gcm1
  gRNA
tgtcacagatggcgggtctc

SEQ ID NO: 87046 - DNA, 20 bp, Artificial Sequence
  MKO10087046_B_Gcm2
  gRNA
tgcacgcgcttgcgccctga

SEQ ID NO: 87047 - DNA, 20 bp, Artificial Sequence
  MKO10087047_B_Gcm2
  gRNA
ggggtgatcatgaactcctt

SEQ ID NO: 87048 - DNA, 20 bp, Artificial Sequence
  MKO10087048_B_Gcm2
  gRNA
aagaagccatctgtctcttg

SEQ ID NO: 87049 - DNA, 20 bp, Artificial Sequence
  MKO10087049_B_Gcn1l1
  gRNA
ggggaaagacaattcgcact

SEQ ID NO: 87050 - DNA, 20 bp, Artificial Sequence
  MKO10087050_B_Gcn1l1
  gRNA
ccaagcggcaaggagacatc

SEQ ID NO: 87051 - DNA, 20 bp, Artificial Sequence
  MKO10087051_B_Gcn1l1
  gRNA
aggttcttggcggtggcctc

SEQ ID NO: 87052 - DNA, 20 bp, Artificial Sequence
  MKO10087052_B_Gcnt1
  gRNA
gccccttatccaccgtgcag

SEQ ID NO: 87053 - DNA, 20 bp, Artificial Sequence
  MKO10087053_B_Gcnt1
  gRNA
gtgcgctctgtgtgcgtctt

SEQ ID NO: 87054 - DNA, 20 bp, Artificial Sequence
  MKO10087054_B_Gcnt1
  gRNA
gccctgcaccgcggctaaaa

SEQ ID NO: 87055 - DNA, 20 bp, Artificial Sequence
  MKO10087055_B_Gcnt2
  gRNA
ttacccgtccaggatgcgtt

SEQ ID NO: 87056 - DNA, 20 bp, Artificial Sequence
  MKO10087056_B_Gcnt2
  gRNA
atgaccatgacatacgccaa

SEQ ID NO: 87057 - DNA, 20 bp, Artificial Sequence
  MKO10087057_B_Gcnt2
  gRNA
agatcgccatacagccgagc

SEQ ID NO: 87058 - DNA, 20 bp, Artificial Sequence
  MKO10087058_B_Gcnt3
  gRNA
gaagtgtgacttcgatgcca

SEQ ID NO: 87059 - DNA, 20 bp, Artificial Sequence
  MKO10087059_B_Gcnt3
  gRNA
ttacccactcgatcagttgc

SEQ ID NO: 87060 - DNA, 20 bp, Artificial Sequence
  MKO10087060_B_Gcnt3
  gRNA
gcaccttacacgtcttgctc

SEQ ID NO: 87061 - DNA, 20 bp, Artificial Sequence
  MKO10087061_B_Gcnt4
  gRNA
gaacctctccgtcttagcac

SEQ ID NO: 87062 - DNA, 20 bp, Artificial Sequence
  MKO10087062_B_Gcnt4
  gRNA
gtggcccaaaagtgctcgtc

SEQ ID NO: 87063 - DNA, 20 bp, Artificial Sequence
  MKO10087063_B_Gcnt4
  gRNA
cgagcagttaacgttgtccc

SEQ ID NO: 87064 - DNA, 20 bp, Artificial Sequence
  MKO10087064_B_Gcnt7
  gRNA
tactcccaccagcgggtctg

SEQ ID NO: 87065 - DNA, 20 bp, Artificial Sequence
  MKO10087065_B_Gcnt7
  gRNA
gccctcctcagacccgctgg

SEQ ID NO: 87066 - DNA, 20 bp, Artificial Sequence
  MKO10087066_B_Gcnt7
  gRNA
ccaggtgccacaccagatgc

SEQ ID NO: 87067 - DNA, 20 bp, Artificial Sequence
  MKO10087067_B_Gcsam
  gRNA
ctttacttaccaaggaaggc

SEQ ID NO: 87068 - DNA, 20 bp, Artificial Sequence
  MKO10087068_B_Gcsam
  gRNA
ttgctttggagactcttgtc

SEQ ID NO: 87069 - DNA, 20 bp, Artificial Sequence
  MKO10087069_B_Gcsam
  gRNA
atctctctcagatacttcag

SEQ ID NO: 87070 - DNA, 20 bp, Artificial Sequence
  MKO10087070_B_Gcsh
  gRNA
atcaattcatccatctctga

SEQ ID NO: 87071 - DNA, 20 bp, Artificial Sequence
  MKO10087071_B_Gcsh
  gRNA
aattcacagagaaacatgag

SEQ ID NO: 87072 - DNA, 20 bp, Artificial Sequence
  MKO10087072_B_Gcsh
  gRNA
ataacgacagaggaaggtat

SEQ ID NO: 87073 - DNA, 20 bp, Artificial Sequence
  MKO10087073_B_Gc
  gRNA
accccacctgctacgacacc

SEQ ID NO: 87074 - DNA, 20 bp, Artificial Sequence
  MKO10087074_B_Gc
  gRNA
acgtaggtgggaaattcctg

SEQ ID NO: 87075 - DNA, 20 bp, Artificial Sequence
  MKO10087075_B_Gc
  gRNA
tgccctcagtcaccagccgc

SEQ ID NO: 87076 - DNA, 20 bp, Artificial Sequence
  MKO10087076_B_Gdap1l1
  gRNA
tgcagcactcgggcgtgttg

SEQ ID NO: 87077 - DNA, 20 bp, Artificial Sequence
  MKO10087077_B_Gdap1l1
  gRNA
ctgcccgtaggccaagatcc

SEQ ID NO: 87078 - DNA, 20 bp, Artificial Sequence
  MKO10087078_B_Gdap1l1
  gRNA
agctcacgtcatcgtgctcc

SEQ ID NO: 87079 - DNA, 20 bp, Artificial Sequence
  MKO10087079_B_Gdap1
  gRNA
tccccgcttatgcaaccaca

SEQ ID NO: 87080 - DNA, 20 bp, Artificial Sequence
  MKO10087080_B_Gdap1
  gRNA
atgtatgcctcttgtaagtc

SEQ ID NO: 87081 - DNA, 20 bp, Artificial Sequence
  MKO10087081_B_Gdap1
  gRNA
gaagaaaattcttgatgagt

SEQ ID NO: 87082 - DNA, 20 bp, Artificial Sequence
  MKO10087082_B_Gdap2
  gRNA
cttctttaggtactgtgagg

SEQ ID NO: 87083 - DNA, 20 bp, Artificial Sequence
  MKO10087083_B_Gdap2
  gRNA
atgtgtgttgcatcttctag

SEQ ID NO: 87084 - DNA, 20 bp, Artificial Sequence
  MKO10087084_B_Gdap2
  gRNA
atctgtgaggctttcattgc

SEQ ID NO: 87085 - DNA, 20 bp, Artificial Sequence
  MKO10087085_B_Gda
  gRNA
accaccacggcttgctactt

SEQ ID NO: 87086 - DNA, 20 bp, Artificial Sequence
  MKO10087086_B_Gda
  gRNA
tgttccaaagtagcaagccg

SEQ ID NO: 87087 - DNA, 20 bp, Artificial Sequence
  MKO10087087_B_Gda
  gRNA
gaccaccgaggagtcagtca

SEQ ID NO: 87088 - DNA, 20 bp, Artificial Sequence
  MKO10087088_B_Gde1
  gRNA
gtgttatcgtgcatcaagac

SEQ ID NO: 87089 - DNA, 20 bp, Artificial Sequence
  MKO10087089_B_Gde1
  gRNA
gaaacgagttccctgatgaa

SEQ ID NO: 87090 - DNA, 20 bp, Artificial Sequence
  MKO10087090_B_Gde1
  gRNA
acagctgtacaataacagta

SEQ ID NO: 87091 - DNA, 20 bp, Artificial Sequence
  MKO10087091_B_Gdf10
  gRNA
tatgagaagtacaaccgaag

SEQ ID NO: 87092 - DNA, 20 bp, Artificial Sequence
  MKO10087092_B_Gdf10
  gRNA
ccgtagagacctgtgcctgt

SEQ ID NO: 87093 - DNA, 20 bp, Artificial Sequence
  MKO10087093_B_Gdf10
  gRNA
ccacagctctgacgatgctc

SEQ ID NO: 87094 - DNA, 20 bp, Artificial Sequence
  MKO10087094_B_Gdf11
  gRNA
ctgccgatatcctctcacag

SEQ ID NO: 87095 - DNA, 20 bp, Artificial Sequence
  MKO10087095_B_Gdf11
  gRNA
gtttcagtcgtaagatctgc

SEQ ID NO: 87096 - DNA, 20 bp, Artificial Sequence
  MKO10087096_B_Gdf11
  gRNA
gtagctcaatctttagtgaa

SEQ ID NO: 87097 - DNA, 20 bp, Artificial Sequence
  MKO10087097_B_Gdf15
  gRNA
cgtcaggcgcaggcgtaatg

SEQ ID NO: 87098 - DNA, 20 bp, Artificial Sequence
  MKO10087098_B_Gdf15
  gRNA
gaccctgactcagcgacgcc

SEQ ID NO: 87099 - DNA, 20 bp, Artificial Sequence
  MKO10087099_B_Gdf15
  gRNA
gatctgcgcatgcgtgttcg

SEQ ID NO: 87100 - DNA, 20 bp, Artificial Sequence
  MKO10087100_B_Gdf1
  gRNA
cgcgggggccagggtcgtcg

SEQ ID NO: 87101 - DNA, 20 bp, Artificial Sequence
  MKO10087101_B_Gdf1
  gRNA
gcgcactacccgaaacgctg

SEQ ID NO: 87102 - DNA, 20 bp, Artificial Sequence
  MKO10087102_B_Gdf1
  gRNA
cacgcgcgcgcttagagttg

SEQ ID NO: 87103 - DNA, 20 bp, Artificial Sequence
  MKO10087103_B_Gdf2
  gRNA
ggtgtcacgtcatcagccaa

SEQ ID NO: 87104 - DNA, 20 bp, Artificial Sequence
  MKO10087104_B_Gdf2
  gRNA
tgtacaagtcgatcatgtac

SEQ ID NO: 87105 - DNA, 20 bp, Artificial Sequence
  MKO10087105_B_Gdf2
  gRNA
tgaactttgaggacatcggc

SEQ ID NO: 87106 - DNA, 20 bp, Artificial Sequence
  MKO10087106_B_Gdf3
  gRNA
aatccttaagcgcaccctgc

SEQ ID NO: 87107 - DNA, 20 bp, Artificial Sequence
  MKO10087107_B_Gdf3
  gRNA
agcgccagaagccgttgata

SEQ ID NO: 87108 - DNA, 20 bp, Artificial Sequence
  MKO10087108_B_Gdf3
  gRNA
cgaccatgcagccttatcaa

SEQ ID NO: 87109 - DNA, 20 bp, Artificial Sequence
  MKO10087109_B_Gdf5
  gRNA
ttgggctctcgaggggtccc

SEQ ID NO: 87110 - DNA, 20 bp, Artificial Sequence
  MKO10087110_B_Gdf5
  gRNA
ctttgaacgcactgcccgac

SEQ ID NO: 87111 - DNA, 20 bp, Artificial Sequence
  MKO10087111_B_Gdf5
  gRNA
gctgggaggtgttcgacatc

SEQ ID NO: 87112 - DNA, 20 bp, Artificial Sequence
  MKO10087112_B_Gdf6
  gRNA
gccggacgcccccggagcac

SEQ ID NO: 87113 - DNA, 20 bp, Artificial Sequence
  MKO10087113_B_Gdf6
  gRNA
cgcgcgcgcccccgtatccc

SEQ ID NO: 87114 - DNA, 20 bp, Artificial Sequence
  MKO10087114_B_Gdf6
  gRNA
ggatacgggggcgcgcgcga

SEQ ID NO: 87115 - DNA, 20 bp, Artificial Sequence
  MKO10087115_B_Gdf7
  gRNA
agctgccgcggtgctccgag

SEQ ID NO: 87116 - DNA, 20 bp, Artificial Sequence
  MKO10087116_B_Gdf7
  gRNA
gctgcgcgcggtgacggcct

SEQ ID NO: 87117 - DNA, 20 bp, Artificial Sequence
  MKO10087117_B_Gdf7
  gRNA
catcgcgccattagactacg

SEQ ID NO: 87118 - DNA, 20 bp, Artificial Sequence
  MKO10087118_B_Gdf9
  gRNA
agagccggacggtattgtag

SEQ ID NO: 87119 - DNA, 20 bp, Artificial Sequence
  MKO10087119_B_Gdf9
  gRNA
gtcctagggcggtcaggcat

SEQ ID NO: 87120 - DNA, 20 bp, Artificial Sequence
  MKO10087120_B_Gdf9
  gRNA
actggatcgtggccccgcac

SEQ ID NO: 87121 - DNA, 20 bp, Artificial Sequence
  MKO10087121_B_Gdi1
  gRNA
ccagcatgcgtgatgtctac

SEQ ID NO: 87122 - DNA, 20 bp, Artificial Sequence
  MKO10087122_B_Gdi1
  gRNA
ccccggcccattgattcagg

SEQ ID NO: 87123 - DNA, 20 bp, Artificial Sequence
  MKO10087123_B_Gdi1
  gRNA
ggccccctgaatcaatgggc

SEQ ID NO: 87124 - DNA, 20 bp, Artificial Sequence
  MKO10087124_B_Gdi2
  gRNA
aggacaaccgccagcatcaa

SEQ ID NO: 87125 - DNA, 20 bp, Artificial Sequence
  MKO10087125_B_Gdi2
  gRNA
tatctttaccattggccata

SEQ ID NO: 87126 - DNA, 20 bp, Artificial Sequence
  MKO10087126_B_Gdi2
  gRNA
gaagctttgtctacaaggga

SEQ ID NO: 87127 - DNA, 20 bp, Artificial Sequence
  MKO10087127_B_Gdnf
  gRNA
ttagccttctactccgagac

SEQ ID NO: 87128 - DNA, 20 bp, Artificial Sequence
  MKO10087128_B_Gdnf
  gRNA
cgcttcgagaagcctcttac

SEQ ID NO: 87129 - DNA, 20 bp, Artificial Sequence
  MKO10087129_B_Gdnf
  gRNA
ggtctccgtagacccccagt

SEQ ID NO: 87130 - DNA, 20 bp, Artificial Sequence
  MKO10087130_B_Gdpd1
  gRNA
acatccagcttgcaaaggta

SEQ ID NO: 87131 - DNA, 20 bp, Artificial Sequence
  MKO10087131_B_Gdpd1
  gRNA
tacccggatccccttgctga

SEQ ID NO: 87132 - DNA, 20 bp, Artificial Sequence
  MKO10087132_B_Gdpd1
  gRNA
tgaccccagttgacctcttc

SEQ ID NO: 87133 - DNA, 20 bp, Artificial Sequence
  MKO10087133_B_Gdpd2
  gRNA
ctttgcagtgcgactgtatc

SEQ ID NO: 87134 - DNA, 20 bp, Artificial Sequence
  MKO10087134_B_Gdpd2
  gRNA
tggtgggcctggatatccaa

SEQ ID NO: 87135 - DNA, 20 bp, Artificial Sequence
  MKO10087135_B_Gdpd2
  gRNA
gcccgatgtacagccatccc

SEQ ID NO: 87136 - DNA, 20 bp, Artificial Sequence
  MKO10087136_B_Gdpd3
  gRNA
cctccaaactaatcatgtgc

SEQ ID NO: 87137 - DNA, 20 bp, Artificial Sequence
  MKO10087137_B_Gdpd3
  gRNA
ttggaaatttacttctcacc

SEQ ID NO: 87138 - DNA, 20 bp, Artificial Sequence
  MKO10087138_B_Gdpd3
  gRNA
cacagggtctggggagcgac

SEQ ID NO: 87139 - DNA, 20 bp, Artificial Sequence
  MKO10087139_B_Gdpd4
  gRNA
acaagatgaatgctattacc

SEQ ID NO: 87140 - DNA, 20 bp, Artificial Sequence
  MKO10087140_B_Gdpd4
  gRNA
aaggacaagtggctgatagc

SEQ ID NO: 87141 - DNA, 20 bp, Artificial Sequence
  MKO10087141_B_Gdpd4
  gRNA
gccacttgtccttccagaaa

SEQ ID NO: 87142 - DNA, 20 bp, Artificial Sequence
  MKO10087142_B_Gdpd5
  gRNA
agtcgctccagtagcccatg

SEQ ID NO: 87143 - DNA, 20 bp, Artificial Sequence
  MKO10087143_B_Gdpd5
  gRNA
ggcactatgtcacatcgctg

SEQ ID NO: 87144 - DNA, 20 bp, Artificial Sequence
  MKO10087144_B_Gdpd5
  gRNA
ttaccttgtgtatccagtgc

SEQ ID NO: 87145 - DNA, 20 bp, Artificial Sequence
  MKO10087145_B_Gdpgp1
  gRNA
aacttcaataaaattcgacc

SEQ ID NO: 87146 - DNA, 20 bp, Artificial Sequence
  MKO10087146_B_Gdpgp1
  gRNA
cagggtcggcttcaacagcc

SEQ ID NO: 87147 - DNA, 20 bp, Artificial Sequence
  MKO10087147_B_Gdpgp1
  gRNA
gccgctgcctccacgcagag

SEQ ID NO: 87148 - DNA, 20 bp, Artificial Sequence
  MKO10087148_B_Gemin2
  gRNA
acaacagttggacagtaatg

SEQ ID NO: 87149 - DNA, 20 bp, Artificial Sequence
  MKO10087149_B_Gemin2
  gRNA
ggatgccagcctgcgcctga

SEQ ID NO: 87150 - DNA, 20 bp, Artificial Sequence
  MKO10087150_B_Gemin2
  gRNA
tacacaagcatagaaatcac

SEQ ID NO: 87151 - DNA, 20 bp, Artificial Sequence
  MKO10087151_B_Gemin4
  gRNA
acacggtggccgacacctcc

SEQ ID NO: 87152 - DNA, 20 bp, Artificial Sequence
  MKO10087152_B_Gemin4
  gRNA
agacgagtgggttgcctgcc

SEQ ID NO: 87153 - DNA, 20 bp, Artificial Sequence
  MKO10087153_B_Gemin4
  gRNA
cttcagcccgttaagcaaca

SEQ ID NO: 87154 - DNA, 20 bp, Artificial Sequence
  MKO10087154_B_Gemin5
  gRNA
acgagatccactccatagcc

SEQ ID NO: 87155 - DNA, 20 bp, Artificial Sequence
  MKO10087155_B_Gemin5
  gRNA
gttaaggacttaatagtctc

SEQ ID NO: 87156 - DNA, 20 bp, Artificial Sequence
  MKO10087156_B_Gemin5
  gRNA
tgtgccaccagctcagacga

SEQ ID NO: 87157 - DNA, 20 bp, Artificial Sequence
  MKO10087157_B_Gemin6
  gRNA
tttcttcatccattcgctca

SEQ ID NO: 87158 - DNA, 20 bp, Artificial Sequence
  MKO10087158_B_Gemin6
  gRNA
ccacattcctgtcaccgagc

SEQ ID NO: 87159 - DNA, 20 bp, Artificial Sequence
  MKO10087159_B_Gemin6
  gRNA
catactcacttggcagagac

SEQ ID NO: 87160 - DNA, 20 bp, Artificial Sequence
  MKO10087160_B_Gemin7
  gRNA
agcgctctcgcagagtggct

SEQ ID NO: 87161 - DNA, 20 bp, Artificial Sequence
  MKO10087161_B_Gemin7
  gRNA
gatggtcctacgtccatcag

SEQ ID NO: 87162 - DNA, 20 bp, Artificial Sequence
  MKO10087162_B_Gemin7
  gRNA
accggcacaggaatggtcag

SEQ ID NO: 87163 - DNA, 20 bp, Artificial Sequence
  MKO10087163_B_Gemin8
  gRNA
aacccccatctgagaagccc

SEQ ID NO: 87164 - DNA, 20 bp, Artificial Sequence
  MKO10087164_B_Gemin8
  gRNA
gcgtaatagcagtagaaccc

SEQ ID NO: 87165 - DNA, 20 bp, Artificial Sequence
  MKO10087165_B_Gemin8
  gRNA
actcctgctgcgccatgtgc

SEQ ID NO: 87166 - DNA, 20 bp, Artificial Sequence
  MKO10087166_B_Gem
  gRNA
tactaccgagtagtgcttat

SEQ ID NO: 87167 - DNA, 20 bp, Artificial Sequence
  MKO10087167_B_Gem
  gRNA
gaatgctctcccgcctcttc

SEQ ID NO: 87168 - DNA, 20 bp, Artificial Sequence
  MKO10087168_B_Gem
  gRNA
cactctctccgtcaacgacc

SEQ ID NO: 87169 - DNA, 20 bp, Artificial Sequence
  MKO10087169_B_Gen1
  gRNA
gatggctgcctcaccaacga

SEQ ID NO: 87170 - DNA, 20 bp, Artificial Sequence
  MKO10087170_B_Gen1
  gRNA
atatcgtgtaacagtcaaca

SEQ ID NO: 87171 - DNA, 20 bp, Artificial Sequence
  MKO10087171_B_Gen1
  gRNA
aagctgatgtcataagcaag

SEQ ID NO: 87172 - DNA, 20 bp, Artificial Sequence
  MKO10087172_B_Get4
  gRNA
gacacaaaagctactcgttc

SEQ ID NO: 87173 - DNA, 20 bp, Artificial Sequence
  MKO10087173_B_Get4
  gRNA
ctcatcagctacgtccacct

SEQ ID NO: 87174 - DNA, 20 bp, Artificial Sequence
  MKO10087174_B_Get4
  gRNA
gcctacctttccataatgtg

SEQ ID NO: 87175 - DNA, 20 bp, Artificial Sequence
  MKO10087175_B_Gfap
  gRNA
caacctggctgcgtatagac

SEQ ID NO: 87176 - DNA, 20 bp, Artificial Sequence
  MKO10087176_B_Gfap
  gRNA
tctccaaatccacacgagcc

SEQ ID NO: 87177 - DNA, 20 bp, Artificial Sequence
  MKO10087177_B_Gfap
  gRNA
tgacctgtctatacgcagcc

SEQ ID NO: 87178 - DNA, 20 bp, Artificial Sequence
  MKO10087178_B_Gfer
  gRNA
gtcttccgcacattcctcgc

SEQ ID NO: 87179 - DNA, 20 bp, Artificial Sequence
  MKO10087179_B_Gfer
  gRNA
cgtctctatgccttgcgccg

SEQ ID NO: 87180 - DNA, 20 bp, Artificial Sequence
  MKO10087180_B_Gfer
  gRNA
actctcgagcagtcaaaatc

SEQ ID NO: 87181 - DNA, 20 bp, Artificial Sequence
  MKO10087181_B_Gfi1b
  gRNA
gccgggttccgctgtgagag

SEQ ID NO: 87182 - DNA, 20 bp, Artificial Sequence
  MKO10087182_B_Gfi1b
  gRNA
accgcttccaagccagacct

SEQ ID NO: 87183 - DNA, 20 bp, Artificial Sequence
  MKO10087183_B_Gfi1b
  gRNA
gactcaccaggaattacagc

SEQ ID NO: 87184 - DNA, 20 bp, Artificial Sequence
  MKO10087184_B_Gfi1
  gRNA
ctatcaccagccgcgttctc

SEQ ID NO: 87185 - DNA, 20 bp, Artificial Sequence
  MKO10087185_B_Gfi1
  gRNA
agtcgggggacaaacgctct

SEQ ID NO: 87186 - DNA, 20 bp, Artificial Sequence
  MKO10087186_B_Gfi1
  gRNA
gcgtcccccaacagctgcga

SEQ ID NO: 87187 - DNA, 20 bp, Artificial Sequence
  MKO10087187_B_Gfm1
  gRNA
gaacgagctatttactttga

SEQ ID NO: 87188 - DNA, 20 bp, Artificial Sequence
  MKO10087188_B_Gfm1
  gRNA
ctgcaccgtccaggacccgc

SEQ ID NO: 87189 - DNA, 20 bp, Artificial Sequence
  MKO10087189_B_Gfm1
  gRNA
cagcagctacgtataccatg

SEQ ID NO: 87190 - DNA, 20 bp, Artificial Sequence
  MKO10087190_B_Gfm2
  gRNA
attatggcacatattgatgc

SEQ ID NO: 87191 - DNA, 20 bp, Artificial Sequence
  MKO10087191_B_Gfm2
  gRNA
gaactgtagtttcttgtaag

SEQ ID NO: 87192 - DNA, 20 bp, Artificial Sequence
  MKO10087192_B_Gfm2
  gRNA
agtacttacttggccacagg

SEQ ID NO: 87193 - DNA, 20 bp, Artificial Sequence
  MKO10087193_B_Gfod1
  gRNA
gcaggagcacctcgtcgatg

SEQ ID NO: 87194 - DNA, 20 bp, Artificial Sequence
  MKO10087194_B_Gfod1
  gRNA
gggttccgctgggcggctcc

SEQ ID NO: 87195 - DNA, 20 bp, Artificial Sequence
  MKO10087195_B_Gfod1
  gRNA
agctgcgacgacctgatggg

SEQ ID NO: 87196 - DNA, 20 bp, Artificial Sequence
  MKO10087196_B_Gfod2
  gRNA
gtcccgaacacaccgactcc

SEQ ID NO: 87197 - DNA, 20 bp, Artificial Sequence
  MKO10087197_B_Gfod2
  gRNA
ccgggcaacaaggcgccctg

SEQ ID NO: 87198 - DNA, 20 bp, Artificial Sequence
  MKO10087198_B_Gfod2
  gRNA
tgcgacgctcgcatctactc

SEQ ID NO: 87199 - DNA, 20 bp, Artificial Sequence
  MKO10087199_B_Gfpt1
  gRNA
aagatttctcgtcttgttcg

SEQ ID NO: 87200 - DNA, 20 bp, Artificial Sequence
  MKO10087200_B_Gfpt1
  gRNA
aatttaggtgtgggacttga

SEQ ID NO: 87201 - DNA, 20 bp, Artificial Sequence
  MKO10087201_B_Gfpt1
  gRNA
caaagacttgaaaaagtttc

SEQ ID NO: 87202 - DNA, 20 bp, Artificial Sequence
  MKO10087202_B_Gfpt2
  gRNA
aattagtgatgatcccgttg

SEQ ID NO: 87203 - DNA, 20 bp, Artificial Sequence
  MKO10087203_B_Gfpt2
  gRNA
cacccgcagagtcatagccc

SEQ ID NO: 87204 - DNA, 20 bp, Artificial Sequence
  MKO10087204_B_Gfpt2
  gRNA
gtctgcagcggctggagtac

SEQ ID NO: 87205 - DNA, 20 bp, Artificial Sequence
  MKO10087205_B_Gfra1
  gRNA
ggatgagtgccgcagcgcta

SEQ ID NO: 87206 - DNA, 20 bp, Artificial Sequence
  MKO10087206_B_Gfra1
  gRNA
agaattgtctgcgtatctac

SEQ ID NO: 87207 - DNA, 20 bp, Artificial Sequence
  MKO10087207_B_Gfra1
  gRNA
cgggcagtcccgttcatatc

SEQ ID NO: 87208 - DNA, 20 bp, Artificial Sequence
  MKO10087208_B_Gfra2
  gRNA
catgcggtaggtatactcgc

SEQ ID NO: 87209 - DNA, 20 bp, Artificial Sequence
  MKO10087209_B_Gfra2
  gRNA
cgagcctgaagatgtccgag

SEQ ID NO: 87210 - DNA, 20 bp, Artificial Sequence
  MKO10087210_B_Gfra2
  gRNA
ctgccctgcggacaactacc

SEQ ID NO: 87211 - DNA, 20 bp, Artificial Sequence
  MKO10087211_B_Gfra3
  gRNA
ccctgagcatgcctccccgt

SEQ ID NO: 87212 - DNA, 20 bp, Artificial Sequence
  MKO10087212_B_Gfra3
  gRNA
ttcttccagatcacgcctga

SEQ ID NO: 87213 - DNA, 20 bp, Artificial Sequence
  MKO10087213_B_Gfra3
  gRNA
ggtccaataaatgtccagac

SEQ ID NO: 87214 - DNA, 20 bp, Artificial Sequence
  MKO10087214_B_Gfra4
  gRNA
ctgcgccgcttcttcgcgcg

SEQ ID NO: 87215 - DNA, 20 bp, Artificial Sequence
  MKO10087215_B_Gfra4
  gRNA
cgcgcgcgctcacgttgtcc

SEQ ID NO: 87216 - DNA, 20 bp, Artificial Sequence
  MKO10087216_B_Gfra4
  gRNA
aggcttcgcattcttcgcgc

SEQ ID NO: 87217 - DNA, 20 bp, Artificial Sequence
  MKO10087217_B_Gfral
  gRNA
acaaatattacctgtcttat

SEQ ID NO: 87218 - DNA, 20 bp, Artificial Sequence
  MKO10087218_B_Gfral
  gRNA
atgatattaccatgatagaa

SEQ ID NO: 87219 - DNA, 20 bp, Artificial Sequence
  MKO10087219_B_Gfral
  gRNA
aatgtgcacaatcatttgtt

SEQ ID NO: 87220 - DNA, 20 bp, Artificial Sequence
  MKO10087220_B_Gfy
  gRNA
gccccaccgacggagcctcg

SEQ ID NO: 87221 - DNA, 20 bp, Artificial Sequence
  MKO10087221_B_Gfy
  gRNA
cacagtcaacactatcatcg

SEQ ID NO: 87222 - DNA, 20 bp, Artificial Sequence
  MKO10087222_B_Gfy
  gRNA
gtggcaactcgggtgactgc

SEQ ID NO: 87223 - DNA, 20 bp, Artificial Sequence
  MKO10087223_B_Gga1
  gRNA
agccacaaatcccctgaaca

SEQ ID NO: 87224 - DNA, 20 bp, Artificial Sequence
  MKO10087224_B_Gga1
  gRNA
cttgtgggccagcaagcgag

SEQ ID NO: 87225 - DNA, 20 bp, Artificial Sequence
  MKO10087225_B_Gga1
  gRNA
tcttcaccttctcagatgtc

SEQ ID NO: 87226 - DNA, 20 bp, Artificial Sequence
  MKO10087226_B_Gga2
  gRNA
gatgtcttccggaaaccaga

SEQ ID NO: 87227 - DNA, 20 bp, Artificial Sequence
  MKO10087227_B_Gga2
  gRNA
gcttacttacccactggggt

SEQ ID NO: 87228 - DNA, 20 bp, Artificial Sequence
  MKO10087228_B_Gga2
  gRNA
gatcaaagtattgtccccaa

SEQ ID NO: 87229 - DNA, 20 bp, Artificial Sequence
  MKO10087229_B_Gga3
  gRNA
gaggcgtgtatgaagaactg

SEQ ID NO: 87230 - DNA, 20 bp, Artificial Sequence
  MKO10087230_B_Gga3
  gRNA
ccagattgctgtgcgactcc

SEQ ID NO: 87231 - DNA, 20 bp, Artificial Sequence
  MKO10087231_B_Gga3
  gRNA
ccaggagtcgcacagcaatc

SEQ ID NO: 87232 - DNA, 20 bp, Artificial Sequence
  MKO10087232_B_Ggact
  gRNA
caggcgagcacaacatacct

SEQ ID NO: 87233 - DNA, 20 bp, Artificial Sequence
  MKO10087233_B_Ggact
  gRNA
gggtgccatacacgaagatg

SEQ ID NO: 87234 - DNA, 20 bp, Artificial Sequence
  MKO10087234_B_Ggact
  gRNA
atggcccacatcttcgtgta

SEQ ID NO: 87235 - DNA, 20 bp, Artificial Sequence
  MKO10087235_B_Ggct
  gRNA
attaaagtttcaactcgaga

SEQ ID NO: 87236 - DNA, 20 bp, Artificial Sequence
  MKO10087236_B_Ggct
  gRNA
actccccacacttcgtcgcc

SEQ ID NO: 87237 - DNA, 20 bp, Artificial Sequence
  MKO10087237_B_Ggct
  gRNA
caaaagcaatataagttccc

SEQ ID NO: 87238 - DNA, 20 bp, Artificial Sequence
  MKO10087238_B_Ggcx
  gRNA
ccgaaaatacttggatgggc

SEQ ID NO: 87239 - DNA, 20 bp, Artificial Sequence
  MKO10087239_B_Ggcx
  gRNA
agaatgctcacgtgcccctt

SEQ ID NO: 87240 - DNA, 20 bp, Artificial Sequence
  MKO10087240_B_Ggcx
  gRNA
actgaaacagggcagccgaa

SEQ ID NO: 87241 - DNA, 20 bp, Artificial Sequence
  MKO10087241_B_Ggh
  gRNA
ggtgctaacctaacagattc

SEQ ID NO: 87242 - DNA, 20 bp, Artificial Sequence
  MKO10087242_B_Ggh
  gRNA
gtagtaatgcaagaatgttt

SEQ ID NO: 87243 - DNA, 20 bp, Artificial Sequence
  MKO10087243_B_Ggh
  gRNA
ctcccaaagagctttgataa

SEQ ID NO: 87244 - DNA, 20 bp, Artificial Sequence
  MKO10087244_B_Ggnbp1
  gRNA
gcatccttaccaaactcaat

SEQ ID NO: 87245 - DNA, 20 bp, Artificial Sequence
  MKO10087245_B_Ggnbp1
  gRNA
gcgacgagagctgtcccaag

SEQ ID NO: 87246 - DNA, 20 bp, Artificial Sequence
  MKO10087246_B_Ggnbp1
  gRNA
accccgtggaactatctcct

SEQ ID NO: 87247 - DNA, 20 bp, Artificial Sequence
  MKO10087247_B_Ggnbp2
  gRNA
tctacttaccccagaggttt

SEQ ID NO: 87248 - DNA, 20 bp, Artificial Sequence
  MKO10087248_B_Ggnbp2
  gRNA
tgtttgggaactcatgtccc

SEQ ID NO: 87249 - DNA, 20 bp, Artificial Sequence
  MKO10087249_B_Ggnbp2
  gRNA
atctatcatatcatttagtt

SEQ ID NO: 87250 - DNA, 20 bp, Artificial Sequence
  MKO10087250_B_Ggn
  gRNA
ccacccacggtggctcgctc

SEQ ID NO: 87251 - DNA, 20 bp, Artificial Sequence
  MKO10087251_B_Ggn
  gRNA
gccatcaacgtcgtcaccgt

SEQ ID NO: 87252 - DNA, 20 bp, Artificial Sequence
  MKO10087252_B_Ggn
  gRNA
aaggcactggccgcctttcg

SEQ ID NO: 87253 - DNA, 20 bp, Artificial Sequence
  MKO10087253_B_Ggps1
  gRNA
tatacctgtagcttgtcttc

SEQ ID NO: 87254 - DNA, 20 bp, Artificial Sequence
  MKO10087254_B_Ggps1
  gRNA
aaactaaagagaaagctgag

SEQ ID NO: 87255 - DNA, 20 bp, Artificial Sequence
  MKO10087255_B_Ggps1
  gRNA
taactgaagtaagtacctat

SEQ ID NO: 87256 - DNA, 20 bp, Artificial Sequence
  MKO10087256_B_Ggt1
  gRNA
agcgaggtgttctgccgcca

SEQ ID NO: 87257 - DNA, 20 bp, Artificial Sequence
  MKO10087257_B_Ggt1
  gRNA
tgaaatccgtggttatgagc

SEQ ID NO: 87258 - DNA, 20 bp, Artificial Sequence
  MKO10087258_B_Ggt1
  gRNA
atgcccgtgaggtagctccc

SEQ ID NO: 87259 - DNA, 20 bp, Artificial Sequence
  MKO10087259_B_Ggt5
  gRNA
ggtgcggaggtcttatacac

SEQ ID NO: 87260 - DNA, 20 bp, Artificial Sequence
  MKO10087260_B_Ggt5
  gRNA
taagacctccgcaccctcct

SEQ ID NO: 87261 - DNA, 20 bp, Artificial Sequence
  MKO10087261_B_Ggt5
  gRNA
ggatgccgccatcgctgccc

SEQ ID NO: 87262 - DNA, 20 bp, Artificial Sequence
  MKO10087262_B_Ggt6
  gRNA
cctttctgcaggaacgaggt

SEQ ID NO: 87263 - DNA, 20 bp, Artificial Sequence
  MKO10087263_B_Ggt6
  gRNA
ggagactccaaaataccccc

SEQ ID NO: 87264 - DNA, 20 bp, Artificial Sequence
  MKO10087264_B_Ggt6
  gRNA
ctgacctgccgggctgataa

SEQ ID NO: 87265 - DNA, 20 bp, Artificial Sequence
  MKO10087265_B_Ggt7
  gRNA
ccccagtgggggcgtgatgt

SEQ ID NO: 87266 - DNA, 20 bp, Artificial Sequence
  MKO10087266_B_Ggt7
  gRNA
atgtaaccctttcaccattc

SEQ ID NO: 87267 - DNA, 20 bp, Artificial Sequence
  MKO10087267_B_Ggt7
  gRNA
gacggatgcctccagttgca

SEQ ID NO: 87268 - DNA, 20 bp, Artificial Sequence
  MKO10087268_B_Ggta1
  gRNA
acatggagatcttgttgaca

SEQ ID NO: 87269 - DNA, 20 bp, Artificial Sequence
  MKO10087269_B_Ggta1
  gRNA
tatcaagaagacaacgtaga

SEQ ID NO: 87270 - DNA, 20 bp, Artificial Sequence
  MKO10087270_B_Ggta1
  gRNA
ttcccaagctggtttaaaaa

SEQ ID NO: 87271 - DNA, 20 bp, Artificial Sequence
  MKO10087271_B_Ghdc
  gRNA
tacctacaatcagtgtcctg

SEQ ID NO: 87272 - DNA, 20 bp, Artificial Sequence
  MKO10087272_B_Ghdc
  gRNA
tattgagctgcttccaatca

SEQ ID NO: 87273 - DNA, 20 bp, Artificial Sequence
  MKO10087273_B_Ghdc
  gRNA
cctgcaaagaggcgtctcca

SEQ ID NO: 87274 - DNA, 20 bp, Artificial Sequence
  MKO10087274_B_Ghitm
  gRNA
tctacttacatgtacttagc

SEQ ID NO: 87275 - DNA, 20 bp, Artificial Sequence
  MKO10087275_B_Ghitm
  gRNA
gcgacctttgcagccatgat

SEQ ID NO: 87276 - DNA, 20 bp, Artificial Sequence
  MKO10087276_B_Ghitm
  gRNA
ctggcttggatgctgcattc

SEQ ID NO: 87277 - DNA, 20 bp, Artificial Sequence
  MKO10087277_B_Ghrhr
  gRNA
ggggaccaacaacacctccc

SEQ ID NO: 87278 - DNA, 20 bp, Artificial Sequence
  MKO10087278_B_Ghrhr
  gRNA
cgatgagcttgcatgtcttc

SEQ ID NO: 87279 - DNA, 20 bp, Artificial Sequence
  MKO10087279_B_Ghrhr
  gRNA
ctgctgtgctggcccccgac

SEQ ID NO: 87280 - DNA, 20 bp, Artificial Sequence
  MKO10087280_B_Ghrh
  gRNA
aacccatagggagaggatcc

SEQ ID NO: 87281 - DNA, 20 bp, Artificial Sequence
  MKO10087281_B_Ghrh
  gRNA
ccatcttcaccaccaactac

SEQ ID NO: 87282 - DNA, 20 bp, Artificial Sequence
  MKO10087282_B_Ghrh
  gRNA
gtgatcctcatcctcaccag

SEQ ID NO: 87283 - DNA, 20 bp, Artificial Sequence
  MKO10087283_B_Ghrl
  gRNA
gtccgtggttacttgtcagc

SEQ ID NO: 87284 - DNA, 20 bp, Artificial Sequence
  MKO10087284_B_Ghrl
  gRNA
cagtttagctggtggcttct

SEQ ID NO: 87285 - DNA, 20 bp, Artificial Sequence
  MKO10087285_B_Ghrl
  gRNA
actgactgacctgggctttc

SEQ ID NO: 87286 - DNA, 20 bp, Artificial Sequence
  MKO10087286_B_Ghr
  gRNA
tcagctacaccagctactct

SEQ ID NO: 87287 - DNA, 20 bp, Artificial Sequence
  MKO10087287_B_Ghr
  gRNA
gcaaagaatcaatccaagcc

SEQ ID NO: 87288 - DNA, 20 bp, Artificial Sequence
  MKO10087288_B_Ghr
  gRNA
aaagccaacgacaagctgca

SEQ ID NO: 87289 - DNA, 20 bp, Artificial Sequence
  MKO10087289_B_Ghsr
  gRNA
attgatgctcgactttgtcc

SEQ ID NO: 87290 - DNA, 20 bp, Artificial Sequence
  MKO10087290_B_Ghsr
  gRNA
cgcggcactcgttggtgtcc

SEQ ID NO: 87291 - DNA, 20 bp, Artificial Sequence
  MKO10087291_B_Ghsr
  gRNA
gtagcgctcgacgctcagcg

SEQ ID NO: 87292 - DNA, 20 bp, Artificial Sequence
  MKO10087292_B_Gh
  gRNA
ctctagactctcggacctcc

SEQ ID NO: 87293 - DNA, 20 bp, Artificial Sequence
  MKO10087293_B_Gh
  gRNA
ggtgccgaacatcaggctgt

SEQ ID NO: 87294 - DNA, 20 bp, Artificial Sequence
  MKO10087294_B_Gh
  gRNA
ggaacttacgaactctttgt

SEQ ID NO: 87295 - DNA, 20 bp, Artificial Sequence
  MKO10087295_B_Gid4
  gRNA
tgtgggtacctaaagattaa

SEQ ID NO: 87296 - DNA, 20 bp, Artificial Sequence
  MKO10087296_B_Gid4
  gRNA
tctttacagcacgtggacac

SEQ ID NO: 87297 - DNA, 20 bp, Artificial Sequence
  MKO10087297_B_Gid4
  gRNA
acccttacaaccttctttga

SEQ ID NO: 87298 - DNA, 20 bp, Artificial Sequence
  MKO10087298_B_Gid8
  gRNA
tctccaaaaggcgactcctc

SEQ ID NO: 87299 - DNA, 20 bp, Artificial Sequence
  MKO10087299_B_Gid8
  gRNA
gtctgggatcgaaccaagtg

SEQ ID NO: 87300 - DNA, 20 bp, Artificial Sequence
  MKO10087300_B_Gid8
  gRNA
cctgctctgccagttgtgtc

SEQ ID NO: 87301 - DNA, 20 bp, Artificial Sequence
  MKO10087301_B_Gif
  gRNA
gcagcttgccctcaccgtta

SEQ ID NO: 87302 - DNA, 20 bp, Artificial Sequence
  MKO10087302_B_Gif
  gRNA
acgtgagagccataacggtg

SEQ ID NO: 87303 - DNA, 20 bp, Artificial Sequence
  MKO10087303_B_Gif
  gRNA
cgatggcctacaagcgctca

SEQ ID NO: 87304 - DNA, 20 bp, Artificial Sequence
  MKO10087304_B_Gigyf1
  gRNA
tcttcttcagggcgaggccg

SEQ ID NO: 87305 - DNA, 20 bp, Artificial Sequence
  MKO10087305_B_Gigyf1
  gRNA
aggggcagcactcggagccg

SEQ ID NO: 87306 - DNA, 20 bp, Artificial Sequence
  MKO10087306_B_Gigyf1
  gRNA
tcagagaaacttctcgctgt

SEQ ID NO: 87307 - DNA, 20 bp, Artificial Sequence
  MKO10087307_B_Gigyf2
  gRNA
agaattcctgcctatcctac

SEQ ID NO: 87308 - DNA, 20 bp, Artificial Sequence
  MKO10087308_B_Gigyf2
  gRNA
tactagagccaatggtggca

SEQ ID NO: 87309 - DNA, 20 bp, Artificial Sequence
  MKO10087309_B_Gigyf2
  gRNA
gaaacacagacactaaactt

SEQ ID NO: 87310 - DNA, 20 bp, Artificial Sequence
  MKO10087310_B_Gimap1
  gRNA
ttctaagaagcatgggagga

SEQ ID NO: 87311 - DNA, 20 bp, Artificial Sequence
  MKO10087311_B_Gimap1
  gRNA
gggcgcgcactactccaatg

SEQ ID NO: 87312 - DNA, 20 bp, Artificial Sequence
  MKO10087312_B_Gimap1
  gRNA
gccctcaacaaccgcgccac

SEQ ID NO: 87313 - DNA, 20 bp, Artificial Sequence
  MKO10087313_B_Gimap3
  gRNA
actcccacaggcggaaagaa

SEQ ID NO: 87314 - DNA, 20 bp, Artificial Sequence
  MKO10087314_B_Gimap3
  gRNA
gccgagacactccttagaga

SEQ ID NO: 87315 - DNA, 20 bp, Artificial Sequence
  MKO10087315_B_Gimap3
  gRNA
gaaaacgaagaagattaata

SEQ ID NO: 87316 - DNA, 20 bp, Artificial Sequence
  MKO10087316_B_Gimap4
  gRNA
gaagatgcaattgttgacct

SEQ ID NO: 87317 - DNA, 20 bp, Artificial Sequence
  MKO10087317_B_Gimap4
  gRNA
caagtaagacaattctcagt

SEQ ID NO: 87318 - DNA, 20 bp, Artificial Sequence
  MKO10087318_B_Gimap4
  gRNA
caactgagaattgtcttact

SEQ ID NO: 87319 - DNA, 20 bp, Artificial Sequence
  MKO10087319_B_Gimap5
  gRNA
caccttcagaagagcacata

SEQ ID NO: 87320 - DNA, 20 bp, Artificial Sequence
  MKO10087320_B_Gimap5
  gRNA
tgtgctcttcttattgtgct

SEQ ID NO: 87321 - DNA, 20 bp, Artificial Sequence
  MKO10087321_B_Gimap5
  gRNA
tacaagaatctagctgcctg

SEQ ID NO: 87322 - DNA, 20 bp, Artificial Sequence
  MKO10087322_B_Gimap6
  gRNA
atctacatttcgaccccacc

SEQ ID NO: 87323 - DNA, 20 bp, Artificial Sequence
  MKO10087323_B_Gimap6
  gRNA
tcaatccttgtccagagtcc

SEQ ID NO: 87324 - DNA, 20 bp, Artificial Sequence
  MKO10087324_B_Gimap6
  gRNA
tggcccctggactctggaca

SEQ ID NO: 87325 - DNA, 20 bp, Artificial Sequence
  MKO10087325_B_Gimap7
  gRNA
cttgctcttccaccgtgaag

SEQ ID NO: 87326 - DNA, 20 bp, Artificial Sequence
  MKO10087326_B_Gimap7
  gRNA
actgtcagagtgactcccgc

SEQ ID NO: 87327 - DNA, 20 bp, Artificial Sequence
  MKO10087327_B_Gimap7
  gRNA
ctcctggttgttgatacccc

SEQ ID NO: 87328 - DNA, 20 bp, Artificial Sequence
  MKO10087328_B_Gimap8
  gRNA
gccgcagtgtggacgttccc

SEQ ID NO: 87329 - DNA, 20 bp, Artificial Sequence
  MKO10087329_B_Gimap8
  gRNA
tcccattggccactatacag

SEQ ID NO: 87330 - DNA, 20 bp, Artificial Sequence
  MKO10087330_B_Gimap8
  gRNA
accgtcccaactggagaacc

SEQ ID NO: 87331 - DNA, 20 bp, Artificial Sequence
  MKO10087331_B_Gimap9
  gRNA
caggctgaaccattgtctag

SEQ ID NO: 87332 - DNA, 20 bp, Artificial Sequence
  MKO10087332_B_Gimap9
  gRNA
cactgaagtgaggatcattc

SEQ ID NO: 87333 - DNA, 20 bp, Artificial Sequence
  MKO10087333_B_Gimap9
  gRNA
acaagatgatcatgtacttc

SEQ ID NO: 87334 - DNA, 20 bp, Artificial Sequence
  MKO10087334_B_Gin1
  gRNA
tgaccaatgacgtcaagcag

SEQ ID NO: 87335 - DNA, 20 bp, Artificial Sequence
  MKO10087335_B_Gin1
  gRNA
attgtaatttctcgtgcttc

SEQ ID NO: 87336 - DNA, 20 bp, Artificial Sequence
  MKO10087336_B_Gin1
  gRNA
catgacttctgttgcttgta

SEQ ID NO: 87337 - DNA, 20 bp, Artificial Sequence
  MKO10087337_B_Ginm1
  gRNA
gtaactaccctgagcaagag

SEQ ID NO: 87338 - DNA, 20 bp, Artificial Sequence
  MKO10087338_B_Ginm1
  gRNA
gagctggcactgtacgtcac

SEQ ID NO: 87339 - DNA, 20 bp, Artificial Sequence
  MKO10087339_B_Ginm1
  gRNA
ttgaatatctgagtactctc

SEQ ID NO: 87340 - DNA, 20 bp, Artificial Sequence
  MKO10087340_B_Gins1
  gRNA
agtctcttgctacttacatg

SEQ ID NO: 87341 - DNA, 20 bp, Artificial Sequence
  MKO10087341_B_Gins1
  gRNA
atcccctcgtccagctgact

SEQ ID NO: 87342 - DNA, 20 bp, Artificial Sequence
  MKO10087342_B_Gins1
  gRNA
ggacggactcagacaagttc

SEQ ID NO: 87343 - DNA, 20 bp, Artificial Sequence
  MKO10087343_B_Gins2
  gRNA
gtcagcagacactcgaagct

SEQ ID NO: 87344 - DNA, 20 bp, Artificial Sequence
  MKO10087344_B_Gins2
  gRNA
ctggctagaagtcctgcgac

SEQ ID NO: 87345 - DNA, 20 bp, Artificial Sequence
  MKO10087345_B_Gins2
  gRNA
ttcgtgatctccatgtagtg

SEQ ID NO: 87346 - DNA, 20 bp, Artificial Sequence
  MKO10087346_B_Gins3
  gRNA
caatgaagacacttcagcgc

SEQ ID NO: 87347 - DNA, 20 bp, Artificial Sequence
  MKO10087347_B_Gins3
  gRNA
gtgagccaaacccatagaaa

SEQ ID NO: 87348 - DNA, 20 bp, Artificial Sequence
  MKO10087348_B_Gins3
  gRNA
gtctaaatgactttcagagt

SEQ ID NO: 87349 - DNA, 20 bp, Artificial Sequence
  MKO10087349_B_Gins4
  gRNA
tccaccttctgcaggttggg

SEQ ID NO: 87350 - DNA, 20 bp, Artificial Sequence
  MKO10087350_B_Gins4
  gRNA
aaagtttgcccctgagctcc

SEQ ID NO: 87351 - DNA, 20 bp, Artificial Sequence
  MKO10087351_B_Gins4
  gRNA
ttccaggtatatggaccaca

SEQ ID NO: 87352 - DNA, 20 bp, Artificial Sequence
  MKO10087352_B_Gipc1
  gRNA
gggctcaccatcaccgacaa

SEQ ID NO: 87353 - DNA, 20 bp, Artificial Sequence
  MKO10087353_B_Gipc1
  gRNA
tccacagccgtcggcctttg

SEQ ID NO: 87354 - DNA, 20 bp, Artificial Sequence
  MKO10087354_B_Gipc1
  gRNA
ggctcaccaaaggcctttcg

SEQ ID NO: 87355 - DNA, 20 bp, Artificial Sequence
  MKO10087355_B_Gipc2
  gRNA
ctcagttaaaacgatctgtg

SEQ ID NO: 87356 - DNA, 20 bp, Artificial Sequence
  MKO10087356_B_Gipc2
  gRNA
tgatctccttgagctgtaca

SEQ ID NO: 87357 - DNA, 20 bp, Artificial Sequence
  MKO10087357_B_Gipc2
  gRNA
ttcatatttgcccacgtgaa

SEQ ID NO: 87358 - DNA, 20 bp, Artificial Sequence
  MKO10087358_B_Gipc3
  gRNA
gaaacattacgcctgcgctc

SEQ ID NO: 87359 - DNA, 20 bp, Artificial Sequence
  MKO10087359_B_Gipc3
  gRNA
caccttgatgaaggcgtatc

SEQ ID NO: 87360 - DNA, 20 bp, Artificial Sequence
  MKO10087360_B_Gipc3
  gRNA
ctgcactagacgcagggtga

SEQ ID NO: 87361 - DNA, 20 bp, Artificial Sequence
  MKO10087361_B_Gipr
  gRNA
cgggggagctgtaccagcgc

SEQ ID NO: 87362 - DNA, 20 bp, Artificial Sequence
  MKO10087362_B_Gipr
  gRNA
cctgcagatcatgtataccg

SEQ ID NO: 87363 - DNA, 20 bp, Artificial Sequence
  MKO10087363_B_Gipr
  gRNA
ggcggccgtgtagttccagc

SEQ ID NO: 87364 - DNA, 20 bp, Artificial Sequence
  MKO10087364_B_Gip
  gRNA
tgagtcggcagagctctgtt

SEQ ID NO: 87365 - DNA, 20 bp, Artificial Sequence
  MKO10087365_B_Gip
  gRNA
gccctgccagcaccaaagcc

SEQ ID NO: 87366 - DNA, 20 bp, Artificial Sequence
  MKO10087366_B_Gip
  gRNA
acacaacatcacccagagag

SEQ ID NO: 87367 - DNA, 20 bp, Artificial Sequence
  MKO10087367_B_Git1
  gRNA
tgtgcacgaacgccagcatc

SEQ ID NO: 87368 - DNA, 20 bp, Artificial Sequence
  MKO10087368_B_Git1
  gRNA
ctgcgcaagtgcaaagtggc

SEQ ID NO: 87369 - DNA, 20 bp, Artificial Sequence
  MKO10087369_B_Git1
  gRNA
ctgctgatagatgcccagcc

SEQ ID NO: 87370 - DNA, 20 bp, Artificial Sequence
  MKO10087370_B_Git2
  gRNA
ccgtcacgctgtcgtcctcg

SEQ ID NO: 87371 - DNA, 20 bp, Artificial Sequence
  MKO10087371_B_Git2
  gRNA
tcccctatttactgacgccc

SEQ ID NO: 87372 - DNA, 20 bp, Artificial Sequence
  MKO10087372_B_Git2
  gRNA
ccgcctcccactcatgatag

SEQ ID NO: 87373 - DNA, 20 bp, Artificial Sequence
  MKO10087373_B_Gja10
  gRNA
gtaacagatattgttgcaac

SEQ ID NO: 87374 - DNA, 20 bp, Artificial Sequence
  MKO10087374_B_Gja10
  gRNA
gcaaggccagctttctatcg

SEQ ID NO: 87375 - DNA, 20 bp, Artificial Sequence
  MKO10087375_B_Gja10
  gRNA
attctggcactgcggtcatg

SEQ ID NO: 87376 - DNA, 20 bp, Artificial Sequence
  MKO10087376_B_Gja1
  gRNA
catctccacgttgaccccgt

SEQ ID NO: 87377 - DNA, 20 bp, Artificial Sequence
  MKO10087377_B_Gja1
  gRNA
ttgcttgttgtaattgcggc

SEQ ID NO: 87378 - DNA, 20 bp, Artificial Sequence
  MKO10087378_B_Gja1
  gRNA
ttgttgagtgttacagcgaa

SEQ ID NO: 87379 - DNA, 20 bp, Artificial Sequence
  MKO10087379_B_Gja3
  gRNA
cactttaccgctgcgaccgc

SEQ ID NO: 87380 - DNA, 20 bp, Artificial Sequence
  MKO10087380_B_Gja3
  gRNA
cgtgctacacatcgtgcgca

SEQ ID NO: 87381 - DNA, 20 bp, Artificial Sequence
  MKO10087381_B_Gja3
  gRNA
tgcgcacgatgtgtagcacg

SEQ ID NO: 87382 - DNA, 20 bp, Artificial Sequence
  MKO10087382_B_Gja4
  gRNA
ggcgctcatgggtacctatg

SEQ ID NO: 87383 - DNA, 20 bp, Artificial Sequence
  MKO10087383_B_Gja4
  gRNA
ccatctcccacatccgatac

SEQ ID NO: 87384 - DNA, 20 bp, Artificial Sequence
  MKO10087384_B_Gja4
  gRNA
gccacgtcatctacctgtct

SEQ ID NO: 87385 - DNA, 20 bp, Artificial Sequence
  MKO10087385_B_Gja5
  gRNA
actcataggcaccagtgcgg

SEQ ID NO: 87386 - DNA, 20 bp, Artificial Sequence
  MKO10087386_B_Gja5
  gRNA
gcagtacccaataacgaatg

SEQ ID NO: 87387 - DNA, 20 bp, Artificial Sequence
  MKO10087387_B_Gja5
  gRNA
caggctgaatggtatcgcac

SEQ ID NO: 87388 - DNA, 20 bp, Artificial Sequence
  MKO10087388_B_Gja6
  gRNA
gcacagatacgaaaatgacc

SEQ ID NO: 87389 - DNA, 20 bp, Artificial Sequence
  MKO10087389_B_Gja6
  gRNA
agcagtctccttgcccacgt

SEQ ID NO: 87390 - DNA, 20 bp, Artificial Sequence
  MKO10087390_B_Gja6
  gRNA
cgcctgctcactagaatcta

SEQ ID NO: 87391 - DNA, 20 bp, Artificial Sequence
  MKO10087391_B_Gja8
  gRNA
tgccccacgtacatcagcga

SEQ ID NO: 87392 - DNA, 20 bp, Artificial Sequence
  MKO10087392_B_Gja8
  gRNA
aactccgtgacatatctgcc

SEQ ID NO: 87393 - DNA, 20 bp, Artificial Sequence
  MKO10087393_B_Gja8
  gRNA
gccaccggctgcagcgatag

SEQ ID NO: 87394 - DNA, 20 bp, Artificial Sequence
  MKO10087394_B_Gjb1
  gRNA
gtctttatgctcgcagcctc

SEQ ID NO: 87395 - DNA, 20 bp, Artificial Sequence
  MKO10087395_B_Gjb1
  gRNA
ccttgctcagtggcgtgaat

SEQ ID NO: 87396 - DNA, 20 bp, Artificial Sequence
  MKO10087396_B_Gjb1
  gRNA
ccgattcacgccactgagca

SEQ ID NO: 87397 - DNA, 20 bp, Artificial Sequence
  MKO10087397_B_Gjb2
  gRNA
gtctggtgaaatgcaacgct

SEQ ID NO: 87398 - DNA, 20 bp, Artificial Sequence
  MKO10087398_B_Gjb2
  gRNA
agtgtttgttgacacccccg

SEQ ID NO: 87399 - DNA, 20 bp, Artificial Sequence
  MKO10087399_B_Gjb2
  gRNA
gatgacccggaagaagatgc

SEQ ID NO: 87400 - DNA, 20 bp, Artificial Sequence
  MKO10087400_B_Gjb3
  gRNA
cctgcatgtagcctaccgcg

SEQ ID NO: 87401 - DNA, 20 bp, Artificial Sequence
  MKO10087401_B_Gjb3
  gRNA
actggttcacgccactcaat

SEQ ID NO: 87402 - DNA, 20 bp, Artificial Sequence
  MKO10087402_B_Gjb3
  gRNA
tggcttcaccatgccgcgtc

SEQ ID NO: 87403 - DNA, 20 bp, Artificial Sequence
  MKO10087403_B_Gjb4
  gRNA
cctttctcgctcttcacgat

SEQ ID NO: 87404 - DNA, 20 bp, Artificial Sequence
  MKO10087404_B_Gjb4
  gRNA
ggtgtgggacgacgatcaaa

SEQ ID NO: 87405 - DNA, 20 bp, Artificial Sequence
  MKO10087405_B_Gjb4
  gRNA
aggatcacgctctcatcttg

SEQ ID NO: 87406 - DNA, 20 bp, Artificial Sequence
  MKO10087406_B_Gjb5
  gRNA
ctcatgcgacctcatctttc

SEQ ID NO: 87407 - DNA, 20 bp, Artificial Sequence
  MKO10087407_B_Gjb5
  gRNA
tatatctgggatagaatgcg

SEQ ID NO: 87408 - DNA, 20 bp, Artificial Sequence
  MKO10087408_B_Gjb5
  gRNA
cgagggcggtctggtaacag

SEQ ID NO: 87409 - DNA, 20 bp, Artificial Sequence
  MKO10087409_B_Gjb6
  gRNA
aatgaagcagtccacgagat

SEQ ID NO: 87410 - DNA, 20 bp, Artificial Sequence
  MKO10087410_B_Gjb6
  gRNA
ccaccactaggatcatgact

SEQ ID NO: 87411 - DNA, 20 bp, Artificial Sequence
  MKO10087411_B_Gjb6
  gRNA
tgacccctgccccaatctcg

SEQ ID NO: 87412 - DNA, 20 bp, Artificial Sequence
  MKO10087412_B_Gjc1
  gRNA
cgaattgtcctaactgctgt

SEQ ID NO: 87413 - DNA, 20 bp, Artificial Sequence
  MKO10087413_B_Gjc1
  gRNA
ggaatacccagaagcgcacg

SEQ ID NO: 87414 - DNA, 20 bp, Artificial Sequence
  MKO10087414_B_Gjc1
  gRNA
tcttccctacaaatgtcgaa

SEQ ID NO: 87415 - DNA, 20 bp, Artificial Sequence
  MKO10087415_B_Gjc2
  gRNA
cccaacggtgccccccgacg

SEQ ID NO: 87416 - DNA, 20 bp, Artificial Sequence
  MKO10087416_B_Gjc2
  gRNA
gcacctcgaagccgtacagt

SEQ ID NO: 87417 - DNA, 20 bp, Artificial Sequence
  MKO10087417_B_Gjc2
  gRNA
atgcagtccaccgcttggcg

SEQ ID NO: 87418 - DNA, 20 bp, Artificial Sequence
  MKO10087418_B_Gjc3
  gRNA
tctgtggttgatgcttctgc

SEQ ID NO: 87419 - DNA, 20 bp, Artificial Sequence
  MKO10087419_B_Gjc3
  gRNA
ttggtgacaggatgtgcggc

SEQ ID NO: 87420 - DNA, 20 bp, Artificial Sequence
  MKO10087420_B_Gjc3
  gRNA
tgatcccaaacatgatgttg

SEQ ID NO: 87421 - DNA, 20 bp, Artificial Sequence
  MKO10087421_B_Gjd2
  gRNA
cccttacctcccaatcatag

SEQ ID NO: 87422 - DNA, 20 bp, Artificial Sequence
  MKO10087422_B_Gjd2
  gRNA
aggcgcggtcatagcaggcc

SEQ ID NO: 87423 - DNA, 20 bp, Artificial Sequence
  MKO10087423_B_Gjd2
  gRNA
gatcttccggatactcattg

SEQ ID NO: 87424 - DNA, 20 bp, Artificial Sequence
  MKO10087424_B_Gjd3
  gRNA
gtagctgcaccgcgtccagc

SEQ ID NO: 87425 - DNA, 20 bp, Artificial Sequence
  MKO10087425_B_Gjd3
  gRNA
ggcccggcgcacgcgtagtg

SEQ ID NO: 87426 - DNA, 20 bp, Artificial Sequence
  MKO10087426_B_Gjd3
  gRNA
tcgccctcgctgtcgcctgc

SEQ ID NO: 87427 - DNA, 20 bp, Artificial Sequence
  MKO10087427_B_Gjd4
  gRNA
aaactgtaacgtgaccatca

SEQ ID NO: 87428 - DNA, 20 bp, Artificial Sequence
  MKO10087428_B_Gjd4
  gRNA
ctgtggactgctacgtgtcg

SEQ ID NO: 87429 - DNA, 20 bp, Artificial Sequence
  MKO10087429_B_Gjd4
  gRNA
tgcactagccagaatcgcag

SEQ ID NO: 87430 - DNA, 20 bp, Artificial Sequence
  MKO10087430_B_Gje1
  gRNA
tcagtgcggatgttcttcct

SEQ ID NO: 87431 - DNA, 20 bp, Artificial Sequence
  MKO10087431_B_Gje1
  gRNA
tacatcaagaacttctatga

SEQ ID NO: 87432 - DNA, 20 bp, Artificial Sequence
  MKO10087432_B_Gje1
  gRNA
cactgtgatttacgtcctct

SEQ ID NO: 87433 - DNA, 20 bp, Artificial Sequence
  MKO10087433_B_Gk2
  gRNA
tcccgcagaggtttgcttcg

SEQ ID NO: 87434 - DNA, 20 bp, Artificial Sequence
  MKO10087434_B_Gk2
  gRNA
aagatcgtagacaaatcttc

SEQ ID NO: 87435 - DNA, 20 bp, Artificial Sequence
  MKO10087435_B_Gk2
  gRNA
tagctggtgctgttattcgc

SEQ ID NO: 87436 - DNA, 20 bp, Artificial Sequence
  MKO10087436_B_Gk5
  gRNA
cattatgagagaattattcc

SEQ ID NO: 87437 - DNA, 20 bp, Artificial Sequence
  MKO10087437_B_Gk5
  gRNA
ttacaagttcagctgccctt

SEQ ID NO: 87438 - DNA, 20 bp, Artificial Sequence
  MKO10087438_B_Gk5
  gRNA
atttcaacccagccaggttg

SEQ ID NO: 87439 - DNA, 20 bp, Artificial Sequence
  MKO10087439_B_Gkap1
  gRNA
atcgccaaacccagcacaga

SEQ ID NO: 87440 - DNA, 20 bp, Artificial Sequence
  MKO10087440_B_Gkap1
  gRNA
ctcaaagacttccagtgtga

SEQ ID NO: 87441 - DNA, 20 bp, Artificial Sequence
  MKO10087441_B_Gkap1
  gRNA
tacagatcatattagtaaaa

SEQ ID NO: 87442 - DNA, 20 bp, Artificial Sequence
  MKO10087442_B_Gkn1
  gRNA
gacggagtacatcaagtcct

SEQ ID NO: 87443 - DNA, 20 bp, Artificial Sequence
  MKO10087443_B_Gkn1
  gRNA
acattcggaccaaagattgc

SEQ ID NO: 87444 - DNA, 20 bp, Artificial Sequence
  MKO10087444_B_Gkn1
  gRNA
gccgttattgttgtcgatat

SEQ ID NO: 87445 - DNA, 20 bp, Artificial Sequence
  MKO10087445_B_Gkn2
  gRNA
cgttggagtttgtccagagc

SEQ ID NO: 87446 - DNA, 20 bp, Artificial Sequence
  MKO10087446_B_Gkn2
  gRNA
catctttggaatacaatcgc

SEQ ID NO: 87447 - DNA, 20 bp, Artificial Sequence
  MKO10087447_B_Gkn2
  gRNA
atcttcgtcccaagcaaaaa

SEQ ID NO: 87448 - DNA, 20 bp, Artificial Sequence
  MKO10087448_B_Gkn3
  gRNA
acccagccgaatcaaaaact

SEQ ID NO: 87449 - DNA, 20 bp, Artificial Sequence
  MKO10087449_B_Gkn3
  gRNA
gtgtaggtcagtcctcgagt

SEQ ID NO: 87450 - DNA, 20 bp, Artificial Sequence
  MKO10087450_B_Gkn3
  gRNA
tgggtaatatcatccaaact

SEQ ID NO: 87451 - DNA, 20 bp, Artificial Sequence
  MKO10087451_B_Gla
  gRNA
gcattgtatactcctgtgag

SEQ ID NO: 87452 - DNA, 20 bp, Artificial Sequence
  MKO10087452_B_Gla
  gRNA
actcccggggaaacctgcac

SEQ ID NO: 87453 - DNA, 20 bp, Artificial Sequence
  MKO10087453_B_Gla
  gRNA
cgacttcaacaatctccttc

SEQ ID NO: 87454 - DNA, 20 bp, Artificial Sequence
  MKO10087454_B_Glb1l2
  gRNA
tcttagggcctttatccagc

SEQ ID NO: 87455 - DNA, 20 bp, Artificial Sequence
  MKO10087455_B_Glb1l2
  gRNA
gcggtccctccagtattccc

SEQ ID NO: 87456 - DNA, 20 bp, Artificial Sequence
  MKO10087456_B_Glb1l2
  gRNA
atctgtagtgagattgacct

SEQ ID NO: 87457 - DNA, 20 bp, Artificial Sequence
  MKO10087457_B_Glb1l3
  gRNA
ctcacctaggtaatccaccc

SEQ ID NO: 87458 - DNA, 20 bp, Artificial Sequence
  MKO10087458_B_Glb1l3
  gRNA
catctgtgctgaggttgacc

SEQ ID NO: 87459 - DNA, 20 bp, Artificial Sequence
  MKO10087459_B_Glb1l3
  gRNA
cacaaattcatgatcgttgg

SEQ ID NO: 87460 - DNA, 20 bp, Artificial Sequence
  MKO10087460_B_Glb1l
  gRNA
ccattaaagttatagatccc

SEQ ID NO: 87461 - DNA, 20 bp, Artificial Sequence
  MKO10087461_B_Glb1l
  gRNA
taatgatgttgcccccattg

SEQ ID NO: 87462 - DNA, 20 bp, Artificial Sequence
  MKO10087462_B_Glb1l
  gRNA
accttacatctgtgctgagt

SEQ ID NO: 87463 - DNA, 20 bp, Artificial Sequence
  MKO10087463_B_Glb1
  gRNA
tccggataccccgcttctac

SEQ ID NO: 87464 - DNA, 20 bp, Artificial Sequence
  MKO10087464_B_Glb1
  gRNA
agaaacaatctatcgttctc

SEQ ID NO: 87465 - DNA, 20 bp, Artificial Sequence
  MKO10087465_B_Glb1
  gRNA
acagccattccgatacatct

SEQ ID NO: 87466 - DNA, 20 bp, Artificial Sequence
  MKO10087466_B_Glcci1
  gRNA
catgagagataaagccactc

SEQ ID NO: 87467 - DNA, 20 bp, Artificial Sequence
  MKO10087467_B_Glcci1
  gRNA
ttgtagctgttgcctaagtt

SEQ ID NO: 87468 - DNA, 20 bp, Artificial Sequence
  MKO10087468_B_Glcci1
  gRNA
gctttatctctcatgcatga

SEQ ID NO: 87469 - DNA, 20 bp, Artificial Sequence
  MKO10087469_B_Glce
  gRNA
ttgctcccaacctggcccgc

SEQ ID NO: 87470 - DNA, 20 bp, Artificial Sequence
  MKO10087470_B_Glce
  gRNA
tgtgcccaaggggtgcttca

SEQ ID NO: 87471 - DNA, 20 bp, Artificial Sequence
  MKO10087471_B_Glce
  gRNA
ttagcccatactgtgcaatc

SEQ ID NO: 87472 - DNA, 20 bp, Artificial Sequence
  MKO10087472_B_Gldc
  gRNA
ctggctgatacggagtgtac

SEQ ID NO: 87473 - DNA, 20 bp, Artificial Sequence
  MKO10087473_B_Gldc
  gRNA
tcaattacttggctcgagtc

SEQ ID NO: 87474 - DNA, 20 bp, Artificial Sequence
  MKO10087474_B_Gldc
  gRNA
caatatacgacctccagatc

SEQ ID NO: 87475 - DNA, 20 bp, Artificial Sequence
  MKO10087475_B_Gldn
  gRNA
gtaggaccaccgggcccacc

SEQ ID NO: 87476 - DNA, 20 bp, Artificial Sequence
  MKO10087476_B_Gldn
  gRNA
gagtacttacctggtgggcc

SEQ ID NO: 87477 - DNA, 20 bp, Artificial Sequence
  MKO10087477_B_Gldn
  gRNA
ccaggccacaatggatcaga

SEQ ID NO: 87478 - DNA, 20 bp, Artificial Sequence
  MKO10087478_B_Gle1
  gRNA
ccgtcaccctcatcaccaaa

SEQ ID NO: 87479 - DNA, 20 bp, Artificial Sequence
  MKO10087479_B_Gle1
  gRNA
tatcagtaccagggaggccc

SEQ ID NO: 87480 - DNA, 20 bp, Artificial Sequence
  MKO10087480_B_Gle1
  gRNA
gctccgatgccatctctgag

SEQ ID NO: 87481 - DNA, 20 bp, Artificial Sequence
  MKO10087481_B_Glg1
  gRNA
gtctgaagaaatctcgttct

SEQ ID NO: 87482 - DNA, 20 bp, Artificial Sequence
  MKO10087482_B_Glg1
  gRNA
agttgacttgcaaacctccc

SEQ ID NO: 87483 - DNA, 20 bp, Artificial Sequence
  MKO10087483_B_Glg1
  gRNA
ttgcaagtcaactatttccg

SEQ ID NO: 87484 - DNA, 20 bp, Artificial Sequence
  MKO10087484_B_Gli1
  gRNA
gaaccccgagtagagtcatg

SEQ ID NO: 87485 - DNA, 20 bp, Artificial Sequence
  MKO10087485_B_Gli1
  gRNA
tatgatggttggcaagtgcc

SEQ ID NO: 87486 - DNA, 20 bp, Artificial Sequence
  MKO10087486_B_Gli1
  gRNA
atgtctagccccaactccac

SEQ ID NO: 87487 - DNA, 20 bp, Artificial Sequence
  MKO10087487_B_Gli2
  gRNA
ctccatatgggggttcacgt

SEQ ID NO: 87488 - DNA, 20 bp, Artificial Sequence
  MKO10087488_B_Gli2
  gRNA
tgtctcatgtcaatcggcaa

SEQ ID NO: 87489 - DNA, 20 bp, Artificial Sequence
  MKO10087489_B_Gli2
  gRNA
gaccttctaatgcagagcgg

SEQ ID NO: 87490 - DNA, 20 bp, Artificial Sequence
  MKO10087490_B_Gli3
  gRNA
agagagggctccgccagatg

SEQ ID NO: 87491 - DNA, 20 bp, Artificial Sequence
  MKO10087491_B_Gli3
  gRNA
tgcggaatactatcaccaga

SEQ ID NO: 87492 - DNA, 20 bp, Artificial Sequence
  MKO10087492_B_Gli3
  gRNA
aatacttacacatgtaatgg

SEQ ID NO: 87493 - DNA, 20 bp, Artificial Sequence
  MKO10087493_B_Glipr1l1
  gRNA
acaacgatacgaatgtcttg

SEQ ID NO: 87494 - DNA, 20 bp, Artificial Sequence
  MKO10087494_B_Glipr1l1
  gRNA
ggagactcttgctctatgtg

SEQ ID NO: 87495 - DNA, 20 bp, Artificial Sequence
  MKO10087495_B_Glipr1l1
  gRNA
ttcaaattgtcctaatctca

SEQ ID NO: 87496 - DNA, 20 bp, Artificial Sequence
  MKO10087496_B_Glipr1l2
  gRNA
catccagtatttactgaaat

SEQ ID NO: 87497 - DNA, 20 bp, Artificial Sequence
  MKO10087497_B_Glipr1l2
  gRNA
tgcataggtagtctgtgcat

SEQ ID NO: 87498 - DNA, 20 bp, Artificial Sequence
  MKO10087498_B_Glipr1l2
  gRNA
ttcatatgcaattatgcacc

SEQ ID NO: 87499 - DNA, 20 bp, Artificial Sequence
  MKO10087499_B_Glipr1
  gRNA
acacccaaatttcaccgccc

SEQ ID NO: 87500 - DNA, 20 bp, Artificial Sequence
  MKO10087500_B_Glipr1
  gRNA
gcagtgcaactttgccctaa

SEQ ID NO: 87501 - DNA, 20 bp, Artificial Sequence
  MKO10087501_B_Glipr1
  gRNA
acaacccacagctgcattca

SEQ ID NO: 87502 - DNA, 20 bp, Artificial Sequence
  MKO10087502_B_Glipr2
  gRNA
tgtcctacctgtctgatcat

SEQ ID NO: 87503 - DNA, 20 bp, Artificial Sequence
  MKO10087503_B_Glipr2
  gRNA
gctggcgagagctacttctt

SEQ ID NO: 87504 - DNA, 20 bp, Artificial Sequence
  MKO10087504_B_Glipr2
  gRNA
gaagtatctagccaccacaa

SEQ ID NO: 87505 - DNA, 20 bp, Artificial Sequence
  MKO10087505_B_Glis1
  gRNA
ccaacgcacccacctcgaca

SEQ ID NO: 87506 - DNA, 20 bp, Artificial Sequence
  MKO10087506_B_Glis1
  gRNA
cccccagtgaacgggagcta

SEQ ID NO: 87507 - DNA, 20 bp, Artificial Sequence
  MKO10087507_B_Glis1
  gRNA
agtgggccttcacgtgcttg

SEQ ID NO: 87508 - DNA, 20 bp, Artificial Sequence
  MKO10087508_B_Glis2
  gRNA
tttccagccacttcgctatt

SEQ ID NO: 87509 - DNA, 20 bp, Artificial Sequence
  MKO10087509_B_Glis2
  gRNA
atgctcgatactgctgtcat

SEQ ID NO: 87510 - DNA, 20 bp, Artificial Sequence
  MKO10087510_B_Glis2
  gRNA
gcatcggtgcggcttctcgt

SEQ ID NO: 87511 - DNA, 20 bp, Artificial Sequence
  MKO10087511_B_Glis3
  gRNA
gccatacttgtgccagcatc

SEQ ID NO: 87512 - DNA, 20 bp, Artificial Sequence
  MKO10087512_B_Glis3
  gRNA
aatcttgaggttctcgagcc

SEQ ID NO: 87513 - DNA, 20 bp, Artificial Sequence
  MKO10087513_B_Glis3
  gRNA
tcccagtcgctgaaccatca

SEQ ID NO: 87514 - DNA, 20 bp, Artificial Sequence
  MKO10087514_B_Glmn
  gRNA
cttgaataatctctagcagc

SEQ ID NO: 87515 - DNA, 20 bp, Artificial Sequence
  MKO10087515_B_Glmn
  gRNA
tttgacctgctaactgaaag

SEQ ID NO: 87516 - DNA, 20 bp, Artificial Sequence
  MKO10087516_B_Glmn
  gRNA
ttactgcaaccattacaaac

SEQ ID NO: 87517 - DNA, 20 bp, Artificial Sequence
  MKO10087517_B_Glo1
  gRNA
gcaaacgatgctaagaatta

SEQ ID NO: 87518 - DNA, 20 bp, Artificial Sequence
  MKO10087518_B_Glo1
  gRNA
gaaccctcgtataaaaatcc

SEQ ID NO: 87519 - DNA, 20 bp, Artificial Sequence
  MKO10087519_B_Glo1
  gRNA
gagactcagagttaccacaa

SEQ ID NO: 87520 - DNA, 20 bp, Artificial Sequence
  MKO10087520_B_Glod4
  gRNA
gctagagtcacctttaatac

SEQ ID NO: 87521 - DNA, 20 bp, Artificial Sequence
  MKO10087521_B_Glod4
  gRNA
ccactgagtaaagttgcaga

SEQ ID NO: 87522 - DNA, 20 bp, Artificial Sequence
  MKO10087522_B_Glod4
  gRNA
tgcaacaaaatgatcatcct

SEQ ID NO: 87523 - DNA, 20 bp, Artificial Sequence
  MKO10087523_B_Glod5
  gRNA
cggaagtagatggatagaat

SEQ ID NO: 87524 - DNA, 20 bp, Artificial Sequence
  MKO10087524_B_Glod5
  gRNA
tgatccaacatctgaaagtc

SEQ ID NO: 87525 - DNA, 20 bp, Artificial Sequence
  MKO10087525_B_Glod5
  gRNA
catggaggtcactactttca

SEQ ID NO: 87526 - DNA, 20 bp, Artificial Sequence
  MKO10087526_B_Glp1r
  gRNA
ccactgtgtagataatgtac

SEQ ID NO: 87527 - DNA, 20 bp, Artificial Sequence
  MKO10087527_B_Glp1r
  gRNA
tgctacaaggccatgtgtac

SEQ ID NO: 87528 - DNA, 20 bp, Artificial Sequence
  MKO10087528_B_Glp1r
  gRNA
ggggcagctgacattcacga

SEQ ID NO: 87529 - DNA, 20 bp, Artificial Sequence
  MKO10087529_B_Glp2r
  gRNA
tactacaggatctctccttg

SEQ ID NO: 87530 - DNA, 20 bp, Artificial Sequence
  MKO10087530_B_Glp2r
  gRNA
tcattacctttattccacca

SEQ ID NO: 87531 - DNA, 20 bp, Artificial Sequence
  MKO10087531_B_Glp2r
  gRNA
cacagtgtacatcagctgca

SEQ ID NO: 87532 - DNA, 20 bp, Artificial Sequence
  MKO10087532_B_Glra1
  gRNA
gtcatcagggtattcattgt

SEQ ID NO: 87533 - DNA, 20 bp, Artificial Sequence
  MKO10087533_B_Glra1
  gRNA
caccatggttgtctcagcga

SEQ ID NO: 87534 - DNA, 20 bp, Artificial Sequence
  MKO10087534_B_Glra1
  gRNA
ggacctgaagaatttcccga

SEQ ID NO: 87535 - DNA, 20 bp, Artificial Sequence
  MKO10087535_B_Glra2
  gRNA
tctgcaaagaccatgactcc

SEQ ID NO: 87536 - DNA, 20 bp, Artificial Sequence
  MKO10087536_B_Glra2
  gRNA
aaattaatgggaagaacatc

SEQ ID NO: 87537 - DNA, 20 bp, Artificial Sequence
  MKO10087537_B_Glra2
  gRNA
actctccagctgcattgtac

SEQ ID NO: 87538 - DNA, 20 bp, Artificial Sequence
  MKO10087538_B_Glra3
  gRNA
attaacactctcctgtccaa

SEQ ID NO: 87539 - DNA, 20 bp, Artificial Sequence
  MKO10087539_B_Glra3
  gRNA
taccatagtcgtctctgcaa

SEQ ID NO: 87540 - DNA, 20 bp, Artificial Sequence
  MKO10087540_B_Glra3
  gRNA
attcttgagatccattggac

SEQ ID NO: 87541 - DNA, 20 bp, Artificial Sequence
  MKO10087541_B_Glra4
  gRNA
ctccgtcactgagaccacca

SEQ ID NO: 87542 - DNA, 20 bp, Artificial Sequence
  MKO10087542_B_Glra4
  gRNA
aagcttgtccaagaaatcag

SEQ ID NO: 87543 - DNA, 20 bp, Artificial Sequence
  MKO10087543_B_Glra4
  gRNA
taccatggtggtctcagtga

SEQ ID NO: 87544 - DNA, 20 bp, Artificial Sequence
  MKO10087544_B_Glrb
  gRNA
ccaccatgtataagtgcttg

SEQ ID NO: 87545 - DNA, 20 bp, Artificial Sequence
  MKO10087545_B_Glrb
  gRNA
ctttagtcagcagtcacccg

SEQ ID NO: 87546 - DNA, 20 bp, Artificial Sequence
  MKO10087546_B_Glrb
  gRNA
tttgcagcgttgtgtgtcca

SEQ ID NO: 87547 - DNA, 20 bp, Artificial Sequence
  MKO10087547_B_Glrp1
  gRNA
gctgctggtgctggtcctgc

SEQ ID NO: 87548 - DNA, 20 bp, Artificial Sequence
  MKO10087548_B_Glrp1
  gRNA
tgatagcaacatctctgaag

SEQ ID NO: 87549 - DNA, 20 bp, Artificial Sequence
  MKO10087549_B_Glrp1
  gRNA
gaaagagaagggcctactct

SEQ ID NO: 87550 - DNA, 20 bp, Artificial Sequence
  MKO10087550_B_Glrx2
  gRNA
cgagcgggaggatcttggcg

SEQ ID NO: 87551 - DNA, 20 bp, Artificial Sequence
  MKO10087551_B_Glrx2
  gRNA
gatgcgcttcacaagatgac

SEQ ID NO: 87552 - DNA, 20 bp, Artificial Sequence
  MKO10087552_B_Glrx2
  gRNA
tgtgaagcgcatcttgaaac

SEQ ID NO: 87553 - DNA, 20 bp, Artificial Sequence
  MKO10087553_B_Glrx3
  gRNA
acacctcaagaaccacgctg

SEQ ID NO: 87554 - DNA, 20 bp, Artificial Sequence
  MKO10087554_B_Glrx3
  gRNA
ccctcatgtttcatttgtga

SEQ ID NO: 87555 - DNA, 20 bp, Artificial Sequence
  MKO10087555_B_Glrx3
  gRNA
tgcaggtttcagcaagcaga

SEQ ID NO: 87556 - DNA, 20 bp, Artificial Sequence
  MKO10087556_B_Glrx5
  gRNA
atcccgcaagtgtacctcaa

SEQ ID NO: 87557 - DNA, 20 bp, Artificial Sequence
  MKO10087557_B_Glrx5
  gRNA
cgagctcgccgcccgcacgc

SEQ ID NO: 87558 - DNA, 20 bp, Artificial Sequence
  MKO10087558_B_Glrx5
  gRNA
cctgcccggagccggcgtgc

SEQ ID NO: 87559 - DNA, 20 bp, Artificial Sequence
  MKO10087559_B_Glrx
  gRNA
cacactcactgttctcgctc

SEQ ID NO: 87560 - DNA, 20 bp, Artificial Sequence
  MKO10087560_B_Glrx
  gRNA
ctaatctccatgcaacagac

SEQ ID NO: 87561 - DNA, 20 bp, Artificial Sequence
  MKO10087561_B_Glrx
  gRNA
gattatttacaacagctcac

SEQ ID NO: 87562 - DNA, 20 bp, Artificial Sequence
  MKO10087562_B_Gls2
  gRNA
cccgtgaactcctcaaagtc

SEQ ID NO: 87563 - DNA, 20 bp, Artificial Sequence
  MKO10087563_B_Gls2
  gRNA
ggcagcctacatcccgcacc

SEQ ID NO: 87564 - DNA, 20 bp, Artificial Sequence
  MKO10087564_B_Gls2
  gRNA
cactcaccgtggtgaacttg

SEQ ID NO: 87565 - DNA, 20 bp, Artificial Sequence
  MKO10087565_B_Gls
  gRNA
actgtaataaacttgtgaac

SEQ ID NO: 87566 - DNA, 20 bp, Artificial Sequence
  MKO10087566_B_Gls
  gRNA
gaaagtgctaaaaagcagtc

SEQ ID NO: 87567 - DNA, 20 bp, Artificial Sequence
  MKO10087567_B_Gls
  gRNA
actcttcagacaacgtcaga

SEQ ID NO: 87568 - DNA, 20 bp, Artificial Sequence
  MKO10087568_B_Glt1d1
  gRNA
tgaaattgccaacctgatca

SEQ ID NO: 87569 - DNA, 20 bp, Artificial Sequence
  MKO10087569_B_Glt1d1
  gRNA
aagatcttcccagttgcatg

SEQ ID NO: 87570 - DNA, 20 bp, Artificial Sequence
  MKO10087570_B_Glt1d1
  gRNA
gcaggtcacagcattccttt

SEQ ID NO: 87571 - DNA, 20 bp, Artificial Sequence
  MKO10087571_B_Glt25d1
  gRNA
agctcttacccagacgaaga

SEQ ID NO: 87572 - DNA, 20 bp, Artificial Sequence
  MKO10087572_B_Glt25d1
  gRNA
gtttcatgacatgctcgtag

SEQ ID NO: 87573 - DNA, 20 bp, Artificial Sequence
  MKO10087573_B_Glt25d1
  gRNA
ggcgaccggcagaggaaccc

SEQ ID NO: 87574 - DNA, 20 bp, Artificial Sequence
  MKO10087574_B_Glt28d2
  gRNA
gaacaatcatcagtttgaac

SEQ ID NO: 87575 - DNA, 20 bp, Artificial Sequence
  MKO10087575_B_Glt28d2
  gRNA
cgttcagatcctcaagaatc

SEQ ID NO: 87576 - DNA, 20 bp, Artificial Sequence
  MKO10087576_B_Glt28d2
  gRNA
aaccaacttgtcctccaaat

SEQ ID NO: 87577 - DNA, 20 bp, Artificial Sequence
  MKO10087577_B_Glt6d1
  gRNA
aaaggtgccttcccatatga

SEQ ID NO: 87578 - DNA, 20 bp, Artificial Sequence
  MKO10087578_B_Glt6d1
  gRNA
atgtcatcacgaccacagac

SEQ ID NO: 87579 - DNA, 20 bp, Artificial Sequence
  MKO10087579_B_Glt6d1
  gRNA
taccaggaaccaccaggaag

SEQ ID NO: 87580 - DNA, 20 bp, Artificial Sequence
  MKO10087580_B_Glt8d1
  gRNA
agtaaagcaggatcctgacc

SEQ ID NO: 87581 - DNA, 20 bp, Artificial Sequence
  MKO10087581_B_Glt8d1
  gRNA
gacatcatcatccatgtata

SEQ ID NO: 87582 - DNA, 20 bp, Artificial Sequence
  MKO10087582_B_Glt8d1
  gRNA
acagcacagcagaccatctc

SEQ ID NO: 87583 - DNA, 20 bp, Artificial Sequence
  MKO10087583_B_Glt8d2
  gRNA
gccgtgcttaaggacaaagc

SEQ ID NO: 87584 - DNA, 20 bp, Artificial Sequence
  MKO10087584_B_Glt8d2
  gRNA
gttcaatcctacagtcctca

SEQ ID NO: 87585 - DNA, 20 bp, Artificial Sequence
  MKO10087585_B_Glt8d2
  gRNA
aatagatgactttctcatgc

SEQ ID NO: 87586 - DNA, 20 bp, Artificial Sequence
  MKO10087586_B_Gltpd1
  gRNA
ctgctggaccactatattgc

SEQ ID NO: 87587 - DNA, 20 bp, Artificial Sequence
  MKO10087587_B_Gltpd1
  gRNA
ctagcgtagtgttcagactg

SEQ ID NO: 87588 - DNA, 20 bp, Artificial Sequence
  MKO10087588_B_Gltpd1
  gRNA
acgcctagggcaggtctagc

SEQ ID NO: 87589 - DNA, 20 bp, Artificial Sequence
  MKO10087589_B_Gltpd2
  gRNA
catggcggaaccagcgtccc

SEQ ID NO: 87590 - DNA, 20 bp, Artificial Sequence
  MKO10087590_B_Gltpd2
  gRNA
atgcgacccagcgccccatg

SEQ ID NO: 87591 - DNA, 20 bp, Artificial Sequence
  MKO10087591_B_Gltpd2
  gRNA
accactaggggtctggccgc

SEQ ID NO: 87592 - DNA, 20 bp, Artificial Sequence
  MKO10087592_B_Gltp
  gRNA
tgttggcgttgactcggatg

SEQ ID NO: 87593 - DNA, 20 bp, Artificial Sequence
  MKO10087593_B_Gltp
  gRNA
gcgtgaataccggggaccca

SEQ ID NO: 87594 - DNA, 20 bp, Artificial Sequence
  MKO10087594_B_Gltp
  gRNA
gcctaaagtgggggccactc

SEQ ID NO: 87595 - DNA, 20 bp, Artificial Sequence
  MKO10087595_B_Gltscr1l
  gRNA
tcacttaccgatttactgct

SEQ ID NO: 87596 - DNA, 20 bp, Artificial Sequence
  MKO10087596_B_Gltscr1l
  gRNA
ctcttgagcaccgcactgcc

SEQ ID NO: 87597 - DNA, 20 bp, Artificial Sequence
  MKO10087597_B_Gltscr1l
  gRNA
cctcaagccgtctgtggtct

SEQ ID NO: 87598 - DNA, 20 bp, Artificial Sequence
  MKO10087598_B_Gltscr1
  gRNA
acgcccgtcaccaaaggagc

SEQ ID NO: 87599 - DNA, 20 bp, Artificial Sequence
  MKO10087599_B_Gltscr1
  gRNA
gctggacagcgatgacctcc

SEQ ID NO: 87600 - DNA, 20 bp, Artificial Sequence
  MKO10087600_B_Gltscr1
  gRNA
gccctcaatgatttcttgca

SEQ ID NO: 87601 - DNA, 20 bp, Artificial Sequence
  MKO10087601_B_Gltscr2
  gRNA
ggtcaacccgtaagggtttc

SEQ ID NO: 87602 - DNA, 20 bp, Artificial Sequence
  MKO10087602_B_Gltscr2
  gRNA
cttcagtggcttgttggcag

SEQ ID NO: 87603 - DNA, 20 bp, Artificial Sequence
  MKO10087603_B_Gltscr2
  gRNA
taccctcacgcctttcttct

SEQ ID NO: 87604 - DNA, 20 bp, Artificial Sequence
  MKO10087604_B_Glud1
  gRNA
aatgacatacaagtgcgctg

SEQ ID NO: 87605 - DNA, 20 bp, Artificial Sequence
  MKO10087605_B_Glud1
  gRNA
tctctctcagatgtaccgtt

SEQ ID NO: 87606 - DNA, 20 bp, Artificial Sequence
  MKO10087606_B_Glud1
  gRNA
cctgctttagcacctccaaa

SEQ ID NO: 87607 - DNA, 20 bp, Artificial Sequence
  MKO10087607_B_Glul
  gRNA
cagacggccacccatttggt

SEQ ID NO: 87608 - DNA, 20 bp, Artificial Sequence
  MKO10087608_B_Glul
  gRNA
cttgcccagagttacctgag

SEQ ID NO: 87609 - DNA, 20 bp, Artificial Sequence
  MKO10087609_B_Glul
  gRNA
gcggaaggggtctcgaaaca

SEQ ID NO: 87610 - DNA, 20 bp, Artificial Sequence
  MKO10087610_B_Glyatl3
  gRNA
catgttcttccaatagctgt

SEQ ID NO: 87611 - DNA, 20 bp, Artificial Sequence
  MKO10087611_B_Glyatl3
  gRNA
acttcaaagttatcatcacc

SEQ ID NO: 87612 - DNA, 20 bp, Artificial Sequence
  MKO10087612_B_Glyatl3
  gRNA
cagagcttaccaacagctat

SEQ ID NO: 87613 - DNA, 20 bp, Artificial Sequence
  MKO10087613_B_Glyat
  gRNA
taaaagccctagttgacaag

SEQ ID NO: 87614 - DNA, 20 bp, Artificial Sequence
  MKO10087614_B_Glyat
  gRNA
tttctacatcaatacttacc

SEQ ID NO: 87615 - DNA, 20 bp, Artificial Sequence
  MKO10087615_B_Glyat
  gRNA
ataaattctttgtatccagc

SEQ ID NO: 87616 - DNA, 20 bp, Artificial Sequence
  MKO10087616_B_Glycam1
  gRNA
atgagacttactggcatctg

SEQ ID NO: 87617 - DNA, 20 bp, Artificial Sequence
  MKO10087617_B_Glycam1
  gRNA
cttcatttgaagttcatctt

SEQ ID NO: 87618 - DNA, 20 bp, Artificial Sequence
  MKO10087618_B_Glycam1
  gRNA
aattacagcaaccacctcag

SEQ ID NO: 87619 - DNA, 20 bp, Artificial Sequence
  MKO10087619_B_Glyctk
  gRNA
cctcggcgccctcgaacacc

SEQ ID NO: 87620 - DNA, 20 bp, Artificial Sequence
  MKO10087620_B_Glyctk
  gRNA
gcccggagtgcatcccgatc

SEQ ID NO: 87621 - DNA, 20 bp, Artificial Sequence
  MKO10087621_B_Glyctk
  gRNA
ctccacccttcagctgcgac

SEQ ID NO: 87622 - DNA, 20 bp, Artificial Sequence
  MKO10087622_B_Glyr1
  gRNA
tgcactcacctttcctggcc

SEQ ID NO: 87623 - DNA, 20 bp, Artificial Sequence
  MKO10087623_B_Glyr1
  gRNA
aagaagcatttctttccacg

SEQ ID NO: 87624 - DNA, 20 bp, Artificial Sequence
  MKO10087624_B_Glyr1
  gRNA
agatggcggctgtgagtctg

SEQ ID NO: 87625 - DNA, 20 bp, Artificial Sequence
  MKO10087625_B_Gm10024
  gRNA
tagacacacagcaggatgac

SEQ ID NO: 87626 - DNA, 20 bp, Artificial Sequence
  MKO10087626_B_Gm10024
  gRNA
gcagcttacaggcacacagc

SEQ ID NO: 87627 - DNA, 20 bp, Artificial Sequence
  MKO10087627_B_Gm10024
  gRNA
tctgcagcatgctgactggc

SEQ ID NO: 87628 - DNA, 20 bp, Artificial Sequence
  MKO10087628_B_Gm10057
  gRNA
acacagaaaaccagaaccac

SEQ ID NO: 87629 - DNA, 20 bp, Artificial Sequence
  MKO10087629_B_Gm10057
  gRNA
aacaagcaaacatttaactg

SEQ ID NO: 87630 - DNA, 20 bp, Artificial Sequence
  MKO10087630_B_Gm10057
  gRNA
tcaaaatggcccatactacc

SEQ ID NO: 87631 - DNA, 20 bp, Artificial Sequence
  MKO10087631_B_Gm10058
  gRNA
agaaaacgtaagtttctcag

SEQ ID NO: 87632 - DNA, 20 bp, Artificial Sequence
  MKO10087632_B_Gm10058
  gRNA
acgttctgtagagacaccaa

SEQ ID NO: 87633 - DNA, 20 bp, Artificial Sequence
  MKO10087633_B_Gm10058
  gRNA
aatccagtaactcatgatga

SEQ ID NO: 87634 - DNA, 20 bp, Artificial Sequence
  MKO10087634_B_Gm10081
  gRNA
ccacgaagaacttctcaagc

SEQ ID NO: 87635 - DNA, 20 bp, Artificial Sequence
  MKO10087635_B_Gm10081
  gRNA
ggagaatcaccacccccatg

SEQ ID NO: 87636 - DNA, 20 bp, Artificial Sequence
  MKO10087636_B_Gm10081
  gRNA
atggtgctagagtaatgtaa

SEQ ID NO: 87637 - DNA, 20 bp, Artificial Sequence
  MKO10087637_B_Gm10094
  gRNA
ggtctcatcctccctgacga

SEQ ID NO: 87638 - DNA, 20 bp, Artificial Sequence
  MKO10087638_B_Gm10094
  gRNA
gactagctcatgctcgccgc

SEQ ID NO: 87639 - DNA, 20 bp, Artificial Sequence
  MKO10087639_B_Gm10094
  gRNA
cgcgggagaactcgtccatt

SEQ ID NO: 87640 - DNA, 20 bp, Artificial Sequence
  MKO10087640_B_Gm10096
  gRNA
agaaaacgtaagtttctcag

SEQ ID NO: 87641 - DNA, 20 bp, Artificial Sequence
  MKO10087641_B_Gm10096
  gRNA
acgttctgtagagacaccaa

SEQ ID NO: 87642 - DNA, 20 bp, Artificial Sequence
  MKO10087642_B_Gm10096
  gRNA
aatccagtaactcatgatga

SEQ ID NO: 87643 - DNA, 20 bp, Artificial Sequence
  MKO10087643_B_Gm10100
  gRNA
ctggcagcctgaggagcagc

SEQ ID NO: 87644 - DNA, 20 bp, Artificial Sequence
  MKO10087644_B_Gm10100
  gRNA
gctggcagcctccagatgac

SEQ ID NO: 87645 - DNA, 20 bp, Artificial Sequence
  MKO10087645_B_Gm10100
  gRNA
tagacacacagcaggatggc

SEQ ID NO: 87646 - DNA, 20 bp, Artificial Sequence
  MKO10087646_B_Gm10104
  gRNA
atatgctattgtagaataag

SEQ ID NO: 87647 - DNA, 20 bp, Artificial Sequence
  MKO10087647_B_Gm10104
  gRNA
caaaagagatagacacagcc

SEQ ID NO: 87648 - DNA, 20 bp, Artificial Sequence
  MKO10087648_B_Gm10104
  gRNA
agatgaagagactaatactg

SEQ ID NO: 87649 - DNA, 20 bp, Artificial Sequence
  MKO10087649_B_Gm10142
  gRNA
ggtgacaggcctgcagacca

SEQ ID NO: 87650 - DNA, 20 bp, Artificial Sequence
  MKO10087650_B_Gm10142
  gRNA
agacactggtcagcagcaag

SEQ ID NO: 87651 - DNA, 20 bp, Artificial Sequence
  MKO10087651_B_Gm10142
  gRNA
gagctggacatgcagcagga

SEQ ID NO: 87652 - DNA, 20 bp, Artificial Sequence
  MKO10087652_B_Gm10147
  gRNA
agaaaacgtaagtttctcag

SEQ ID NO: 87653 - DNA, 20 bp, Artificial Sequence
  MKO10087653_B_Gm10147
  gRNA
acgttctgtagagacaccaa

SEQ ID NO: 87654 - DNA, 20 bp, Artificial Sequence
  MKO10087654_B_Gm10147
  gRNA
aatccagtaactcatgatga

SEQ ID NO: 87655 - DNA, 20 bp, Artificial Sequence
  MKO10087655_B_Gm101
  gRNA
aagtccaggttattcaagac

SEQ ID NO: 87656 - DNA, 20 bp, Artificial Sequence
  MKO10087656_B_Gm101
  gRNA
aggccaggcatagtccactt

SEQ ID NO: 87657 - DNA, 20 bp, Artificial Sequence
  MKO10087657_B_Gm101
  gRNA
tctgtggtggtaaaatatga

SEQ ID NO: 87658 - DNA, 20 bp, Artificial Sequence
  MKO10087658_B_Gm10220
  gRNA
caatgtatacctcttgttca

SEQ ID NO: 87659 - DNA, 20 bp, Artificial Sequence
  MKO10087659_B_Gm10220
  gRNA
ctggggtcaggccctaccac

SEQ ID NO: 87660 - DNA, 20 bp, Artificial Sequence
  MKO10087660_B_Gm10220
  gRNA
tgagctcctgattgttctct

SEQ ID NO: 87661 - DNA, 20 bp, Artificial Sequence
  MKO10087661_B_Gm10228
  gRNA
tactatggcggcagaggcta

SEQ ID NO: 87662 - DNA, 20 bp, Artificial Sequence
  MKO10087662_B_Gm10228
  gRNA
aggagccatagccacagccc

SEQ ID NO: 87663 - DNA, 20 bp, Artificial Sequence
  MKO10087663_B_Gm10228
  gRNA
ctgctgtggctatggaggcc

SEQ ID NO: 87664 - DNA, 20 bp, Artificial Sequence
  MKO10087664_B_Gm10229
  gRNA
aggagccataaccacagccc

SEQ ID NO: 87665 - DNA, 20 bp, Artificial Sequence
  MKO10087665_B_Gm10229
  gRNA
tactatggcggcagaggcta

SEQ ID NO: 87666 - DNA, 20 bp, Artificial Sequence
  MKO10087666_B_Gm10229
  gRNA
gtttccgtagtagccacaca

SEQ ID NO: 87667 - DNA, 20 bp, Artificial Sequence
  MKO10087667_B_Gm10230
  gRNA
agaaaacgtaagtttctcag

SEQ ID NO: 87668 - DNA, 20 bp, Artificial Sequence
  MKO10087668_B_Gm10230
  gRNA
acgttctgtagagacaccaa

SEQ ID NO: 87669 - DNA, 20 bp, Artificial Sequence
  MKO10087669_B_Gm10230
  gRNA
aatccagtaactcatgatga

SEQ ID NO: 87670 - DNA, 20 bp, Artificial Sequence
  MKO10087670_B_Gm10256
  gRNA
cgtgaaactaagaagtctag

SEQ ID NO: 87671 - DNA, 20 bp, Artificial Sequence
  MKO10087671_B_Gm10256
  gRNA
cccaagttcccttcacatga

SEQ ID NO: 87672 - DNA, 20 bp, Artificial Sequence
  MKO10087672_B_Gm10256
  gRNA
gaattaaagtaaaacaagcc

SEQ ID NO: 87673 - DNA, 20 bp, Artificial Sequence
  MKO10087673_B_Gm10267
  gRNA
tttatctacagagaaaatga

SEQ ID NO: 87674 - DNA, 20 bp, Artificial Sequence
  MKO10087674_B_Gm10267
  gRNA
ctcaccagaacaaagaagaa

SEQ ID NO: 87675 - DNA, 20 bp, Artificial Sequence
  MKO10087675_B_Gm10267
  gRNA
ttatcctttcttctttgttc

SEQ ID NO: 87676 - DNA, 20 bp, Artificial Sequence
  MKO10087676_B_Gm10318
  gRNA
gaactatccccctgactccc

SEQ ID NO: 87677 - DNA, 20 bp, Artificial Sequence
  MKO10087677_B_Gm10318
  gRNA
tatctttggtatcagccatt

SEQ ID NO: 87678 - DNA, 20 bp, Artificial Sequence
  MKO10087678_B_Gm10318
  gRNA
ccacatcaggaacagagtag

SEQ ID NO: 87679 - DNA, 20 bp, Artificial Sequence
  MKO10087679_B_Gm10324
  gRNA
tgaatttcactaaagaagaa

SEQ ID NO: 87680 - DNA, 20 bp, Artificial Sequence
  MKO10087680_B_Gm10324
  gRNA
gacatgattcttcaatatga

SEQ ID NO: 87681 - DNA, 20 bp, Artificial Sequence
  MKO10087681_B_Gm10324
  gRNA
aaagttctcgaagacataca

SEQ ID NO: 87682 - DNA, 20 bp, Artificial Sequence
  MKO10087682_B_Gm10334
  gRNA
atgagacactgagtgccagc

SEQ ID NO: 87683 - DNA, 20 bp, Artificial Sequence
  MKO10087683_B_Gm10334
  gRNA
accagacctgctccagtgcc

SEQ ID NO: 87684 - DNA, 20 bp, Artificial Sequence
  MKO10087684_B_Gm10334
  gRNA
aggaatccttgcctccctct

SEQ ID NO: 87685 - DNA, 20 bp, Artificial Sequence
  MKO10087685_B_Gm10352
  gRNA
cgtgaaactaagaagtctag

SEQ ID NO: 87686 - DNA, 20 bp, Artificial Sequence
  MKO10087686_B_Gm10352
  gRNA
cccaagttcccttcacatga

SEQ ID NO: 87687 - DNA, 20 bp, Artificial Sequence
  MKO10087687_B_Gm10352
  gRNA
gaattaaagtaaaacaagcc

SEQ ID NO: 87688 - DNA, 20 bp, Artificial Sequence
  MKO10087688_B_Gm10354
  gRNA
gaagttgatgccattgcagc

SEQ ID NO: 87689 - DNA, 20 bp, Artificial Sequence
  MKO10087689_B_Gm10354
  gRNA
ctggggcaaggccctaccac

SEQ ID NO: 87690 - DNA, 20 bp, Artificial Sequence
  MKO10087690_B_Gm10354
  gRNA
ctccttcttgagctcctgct

SEQ ID NO: 87691 - DNA, 20 bp, Artificial Sequence
  MKO10087691_B_Gm10375
  gRNA
ctaaagaaaatcaattatac

SEQ ID NO: 87692 - DNA, 20 bp, Artificial Sequence
  MKO10087692_B_Gm10375
  gRNA
acctcatccagcacaaagtc

SEQ ID NO: 87693 - DNA, 20 bp, Artificial Sequence
  MKO10087693_B_Gm10375
  gRNA
tatattcgtctttgatcttc

SEQ ID NO: 87694 - DNA, 20 bp, Artificial Sequence
  MKO10087694_B_Gm10377
  gRNA
ctaaagaaaatcaattatac

SEQ ID NO: 87695 - DNA, 20 bp, Artificial Sequence
  MKO10087695_B_Gm10377
  gRNA
acctcatccagcacaaagtc

SEQ ID NO: 87696 - DNA, 20 bp, Artificial Sequence
  MKO10087696_B_Gm10377
  gRNA
tatattcgtctttgatcttc

SEQ ID NO: 87697 - DNA, 20 bp, Artificial Sequence
  MKO10087697_B_Gm10406
  gRNA
acaacatgagaagacaatgt

SEQ ID NO: 87698 - DNA, 20 bp, Artificial Sequence
  MKO10087698_B_Gm10406
  gRNA
gttatcttctatcagttcct

SEQ ID NO: 87699 - DNA, 20 bp, Artificial Sequence
  MKO10087699_B_Gm10406
  gRNA
ctcaactcaacgaaaacgta

SEQ ID NO: 87700 - DNA, 20 bp, Artificial Sequence
  MKO10087700_B_Gm10408
  gRNA
acaacatgagaagacaatgt

SEQ ID NO: 87701 - DNA, 20 bp, Artificial Sequence
  MKO10087701_B_Gm10408
  gRNA
tcatcctacctgctgctcct

SEQ ID NO: 87702 - DNA, 20 bp, Artificial Sequence
  MKO10087702_B_Gm10408
  gRNA
ctcaactcagcgaaaaagta

SEQ ID NO: 87703 - DNA, 20 bp, Artificial Sequence
  MKO10087703_B_Gm10413
  gRNA
gaacttcatggaaataatta

SEQ ID NO: 87704 - DNA, 20 bp, Artificial Sequence
  MKO10087704_B_Gm10413
  gRNA
tcatcctacctgctgctcct

SEQ ID NO: 87705 - DNA, 20 bp, Artificial Sequence
  MKO10087705_B_Gm10413
  gRNA
ccgtgagtgcactcaactaa

SEQ ID NO: 87706 - DNA, 20 bp, Artificial Sequence
  MKO10087706_B_Gm10436
  gRNA
attggtttcatgttgtatag

SEQ ID NO: 87707 - DNA, 20 bp, Artificial Sequence
  MKO10087707_B_Gm10436
  gRNA
cttagccatttctgctctca

SEQ ID NO: 87708 - DNA, 20 bp, Artificial Sequence
  MKO10087708_B_Gm10436
  gRNA
gtatataatgattcatagca

SEQ ID NO: 87709 - DNA, 20 bp, Artificial Sequence
  MKO10087709_B_Gm10439
  gRNA
tgtactttacctctccctcg

SEQ ID NO: 87710 - DNA, 20 bp, Artificial Sequence
  MKO10087710_B_Gm10439
  gRNA
ttctgaagaagaatacaatg

SEQ ID NO: 87711 - DNA, 20 bp, Artificial Sequence
  MKO10087711_B_Gm10439
  gRNA
tcacttaccagatgaagtag

SEQ ID NO: 87712 - DNA, 20 bp, Artificial Sequence
  MKO10087712_B_Gm1045
  gRNA
ttggtggtaactacagcaga

SEQ ID NO: 87713 - DNA, 20 bp, Artificial Sequence
  MKO10087713_B_Gm1045
  gRNA
cgcgaggtagactgatccct

SEQ ID NO: 87714 - DNA, 20 bp, Artificial Sequence
  MKO10087714_B_Gm1045
  gRNA
ggggagaagcccggccccct

SEQ ID NO: 87715 - DNA, 20 bp, Artificial Sequence
  MKO10087715_B_Gm10471
  gRNA
caatgtatacctcttgttca

SEQ ID NO: 87716 - DNA, 20 bp, Artificial Sequence
  MKO10087716_B_Gm10471
  gRNA
ctggggtcaggccctaccac

SEQ ID NO: 87717 - DNA, 20 bp, Artificial Sequence
  MKO10087717_B_Gm10471
  gRNA
tgagctcctgcttgttctct

SEQ ID NO: 87718 - DNA, 20 bp, Artificial Sequence
  MKO10087718_B_Gm10486
  gRNA
agaaaacgtaagtttctcag

SEQ ID NO: 87719 - DNA, 20 bp, Artificial Sequence
  MKO10087719_B_Gm10486
  gRNA
acgttctgtagagacaccaa

SEQ ID NO: 87720 - DNA, 20 bp, Artificial Sequence
  MKO10087720_B_Gm10486
  gRNA
gtatctccaactacttcttc

SEQ ID NO: 87721 - DNA, 20 bp, Artificial Sequence
  MKO10087721_B_Gm10487
  gRNA
agaaaacgtaagtttctcag

SEQ ID NO: 87722 - DNA, 20 bp, Artificial Sequence
  MKO10087722_B_Gm10487
  gRNA
acgttctgtagagacaccaa

SEQ ID NO: 87723 - DNA, 20 bp, Artificial Sequence
  MKO10087723_B_Gm10487
  gRNA
aatccagtaactcatgatga

SEQ ID NO: 87724 - DNA, 20 bp, Artificial Sequence
  MKO10087724_B_Gm10488
  gRNA
agaaaacgtaagtttctcag

SEQ ID NO: 87725 - DNA, 20 bp, Artificial Sequence
  MKO10087725_B_Gm10488
  gRNA
acgttctgtagagacaccaa

SEQ ID NO: 87726 - DNA, 20 bp, Artificial Sequence
  MKO10087726_B_Gm10488
  gRNA
gtatctccaactacttcttc

SEQ ID NO: 87727 - DNA, 20 bp, Artificial Sequence
  MKO10087727_B_Gm10591
  gRNA
taccttgcaggcagtgatgg

SEQ ID NO: 87728 - DNA, 20 bp, Artificial Sequence
  MKO10087728_B_Gm10591
  gRNA
gcctcacctcttgcagccct

SEQ ID NO: 87729 - DNA, 20 bp, Artificial Sequence
  MKO10087729_B_Gm10591
  gRNA
caaccctcaggttcttaccc

SEQ ID NO: 87730 - DNA, 20 bp, Artificial Sequence
  MKO10087730_B_Gm10639
  gRNA
agagaagtttatacagagtc

SEQ ID NO: 87731 - DNA, 20 bp, Artificial Sequence
  MKO10087731_B_Gm10639
  gRNA
gatttggaaaagctaaaaaa

SEQ ID NO: 87732 - DNA, 20 bp, Artificial Sequence
  MKO10087732_B_Gm10639
  gRNA
ccttcatgtccttcccatag

SEQ ID NO: 87733 - DNA, 20 bp, Artificial Sequence
  MKO10087733_B_Gm10662
  gRNA
cctaaactccagatatctac

SEQ ID NO: 87734 - DNA, 20 bp, Artificial Sequence
  MKO10087734_B_Gm10662
  gRNA
tagaggagagcgagactcga

SEQ ID NO: 87735 - DNA, 20 bp, Artificial Sequence
  MKO10087735_B_Gm10662
  gRNA
ttctctgcttgcaagagttc

SEQ ID NO: 87736 - DNA, 20 bp, Artificial Sequence
  MKO10087736_B_Gm10665
  gRNA
gttattcttgttacggttgt

SEQ ID NO: 87737 - DNA, 20 bp, Artificial Sequence
  MKO10087737_B_Gm10665
  gRNA
tcttacagtgaatccagaag

SEQ ID NO: 87738 - DNA, 20 bp, Artificial Sequence
  MKO10087738_B_Gm10665
  gRNA
taacattcacattccaatta

SEQ ID NO: 87739 - DNA, 20 bp, Artificial Sequence
  MKO10087739_B_Gm10666
  gRNA
gttattcttgttacggttgt

SEQ ID NO: 87740 - DNA, 20 bp, Artificial Sequence
  MKO10087740_B_Gm10666
  gRNA
tcttacagtgaatccagaag

SEQ ID NO: 87741 - DNA, 20 bp, Artificial Sequence
  MKO10087741_B_Gm10666
  gRNA
taacatccacattccaatta

SEQ ID NO: 87742 - DNA, 20 bp, Artificial Sequence
  MKO10087742_B_Gm10670
  gRNA
gttattcttgttacggttgt

SEQ ID NO: 87743 - DNA, 20 bp, Artificial Sequence
  MKO10087743_B_Gm10670
  gRNA
tcttacagtgaatccagaag

SEQ ID NO: 87744 - DNA, 20 bp, Artificial Sequence
  MKO10087744_B_Gm10670
  gRNA
taacattcacattccaatta

SEQ ID NO: 87745 - DNA, 20 bp, Artificial Sequence
  MKO10087745_B_Gm10681
  gRNA
cacctttcagattgacatct

SEQ ID NO: 87746 - DNA, 20 bp, Artificial Sequence
  MKO10087746_B_Gm10681
  gRNA
ggcaggtactcagctcctac

SEQ ID NO: 87747 - DNA, 20 bp, Artificial Sequence
  MKO10087747_B_Gm10681
  gRNA
tagtgttccgatccactctg

SEQ ID NO: 87748 - DNA, 20 bp, Artificial Sequence
  MKO10087748_B_Gm10696
  gRNA
agcagaaatgtcaggagaca

SEQ ID NO: 87749 - DNA, 20 bp, Artificial Sequence
  MKO10087749_B_Gm10696
  gRNA
gaaaacgccgtgcagaagcc

SEQ ID NO: 87750 - DNA, 20 bp, Artificial Sequence
  MKO10087750_B_Gm10696
  gRNA
catcatctccttgaagactt

SEQ ID NO: 87751 - DNA, 20 bp, Artificial Sequence
  MKO10087751_B_Gm10697
  gRNA
ggattcaaaaagttcatcct

SEQ ID NO: 87752 - DNA, 20 bp, Artificial Sequence
  MKO10087752_B_Gm10697
  gRNA
ctccatttcatgttcaaaca

SEQ ID NO: 87753 - DNA, 20 bp, Artificial Sequence
  MKO10087753_B_Gm10697
  gRNA
tcctcatctctcatccacgt

SEQ ID NO: 87754 - DNA, 20 bp, Artificial Sequence
  MKO10087754_B_Gm10767
  gRNA
atcagtggcatggatggaca

SEQ ID NO: 87755 - DNA, 20 bp, Artificial Sequence
  MKO10087755_B_Gm10767
  gRNA
tgtgtactattgttgatagt

SEQ ID NO: 87756 - DNA, 20 bp, Artificial Sequence
  MKO10087756_B_Gm10767
  gRNA
gcaaacatgtcttcaaaatt

SEQ ID NO: 87757 - DNA, 20 bp, Artificial Sequence
  MKO10087757_B_Gm10778
  gRNA
ttaggatgcggtgacctatg

SEQ ID NO: 87758 - DNA, 20 bp, Artificial Sequence
  MKO10087758_B_Gm10778
  gRNA
cttccacatcctctagaact

SEQ ID NO: 87759 - DNA, 20 bp, Artificial Sequence
  MKO10087759_B_Gm10778
  gRNA
gagcactgtccaagttctag

SEQ ID NO: 87760 - DNA, 20 bp, Artificial Sequence
  MKO10087760_B_Gm10921
  gRNA
ggatttgtcaataacacctc

SEQ ID NO: 87761 - DNA, 20 bp, Artificial Sequence
  MKO10087761_B_Gm10921
  gRNA
tggcagcagcatgcctgctt

SEQ ID NO: 87762 - DNA, 20 bp, Artificial Sequence
  MKO10087762_B_Gm10921
  gRNA
tgttatcaacatatgccatg

SEQ ID NO: 87763 - DNA, 20 bp, Artificial Sequence
  MKO10087763_B_Gm10922
  gRNA
aaatctgatcattaagaatg

SEQ ID NO: 87764 - DNA, 20 bp, Artificial Sequence
  MKO10087764_B_Gm10922
  gRNA
tgttatcaacatatgccatg

SEQ ID NO: 87765 - DNA, 20 bp, Artificial Sequence
  MKO10087765_B_Gm10922
  gRNA
ggatttgtcaataacacctc

SEQ ID NO: 87766 - DNA, 20 bp, Artificial Sequence
  MKO10087766_B_Gm1110
  gRNA
tagactacttccggatacct

SEQ ID NO: 87767 - DNA, 20 bp, Artificial Sequence
  MKO10087767_B_Gm1110
  gRNA
cccgtaataggcatattcct

SEQ ID NO: 87768 - DNA, 20 bp, Artificial Sequence
  MKO10087768_B_Gm1110
  gRNA
attggcagtgacttagacct

SEQ ID NO: 87769 - DNA, 20 bp, Artificial Sequence
  MKO10087769_B_Gm11127
  gRNA
tccatccaccgactctaaca

SEQ ID NO: 87770 - DNA, 20 bp, Artificial Sequence
  MKO10087770_B_Gm11127
  gRNA
aaccgaggctccccgaagcc

SEQ ID NO: 87771 - DNA, 20 bp, Artificial Sequence
  MKO10087771_B_Gm11127
  gRNA
aacctccttaccccatctca

SEQ ID NO: 87772 - DNA, 20 bp, Artificial Sequence
  MKO10087772_B_Gm11128
  gRNA
ggtggctgctcggccagtga

SEQ ID NO: 87773 - DNA, 20 bp, Artificial Sequence
  MKO10087773_B_Gm11128
  gRNA
gctgcagttgcttcttctgc

SEQ ID NO: 87774 - DNA, 20 bp, Artificial Sequence
  MKO10087774_B_Gm11128
  gRNA
tcattgcagcaccgaagaga

SEQ ID NO: 87775 - DNA, 20 bp, Artificial Sequence
  MKO10087775_B_Gm11236
  gRNA
caggtccgtgtgatagcccg

SEQ ID NO: 87776 - DNA, 20 bp, Artificial Sequence
  MKO10087776_B_Gm11236
  gRNA
aaagtgcatacctagagaga

SEQ ID NO: 87777 - DNA, 20 bp, Artificial Sequence
  MKO10087777_B_Gm11236
  gRNA
cactcaggtccttggtttga

SEQ ID NO: 87778 - DNA, 20 bp, Artificial Sequence
  MKO10087778_B_Gm11237
  gRNA
caggtccgtgtgatagcccg

SEQ ID NO: 87779 - DNA, 20 bp, Artificial Sequence
  MKO10087779_B_Gm11237
  gRNA
aaagtgcatacctagagaga

SEQ ID NO: 87780 - DNA, 20 bp, Artificial Sequence
  MKO10087780_B_Gm11237
  gRNA
cactcaggtccttggtttga

SEQ ID NO: 87781 - DNA, 20 bp, Artificial Sequence
  MKO10087781_B_Gm1123
  gRNA
aaggaccgttggacattgag

SEQ ID NO: 87782 - DNA, 20 bp, Artificial Sequence
  MKO10087782_B_Gm1123
  gRNA
aagtgccagcatccgagagc

SEQ ID NO: 87783 - DNA, 20 bp, Artificial Sequence
  MKO10087783_B_Gm1123
  gRNA
tactccagagcagacaattc

SEQ ID NO: 87784 - DNA, 20 bp, Artificial Sequence
  MKO10087784_B_Gm1140
  gRNA
aacttgtcagcatttataaa

SEQ ID NO: 87785 - DNA, 20 bp, Artificial Sequence
  MKO10087785_B_Gm1140
  gRNA
tccagtctttgtttcaacag

SEQ ID NO: 87786 - DNA, 20 bp, Artificial Sequence
  MKO10087786_B_Gm1140
  gRNA
cccactgttgaaacaaagac

SEQ ID NO: 87787 - DNA, 20 bp, Artificial Sequence
  MKO10087787_B_Gm11435
  gRNA
cctttaacctttgccacttc

SEQ ID NO: 87788 - DNA, 20 bp, Artificial Sequence
  MKO10087788_B_Gm11435
  gRNA
cctgcccttgtcctgttaca

SEQ ID NO: 87789 - DNA, 20 bp, Artificial Sequence
  MKO10087789_B_Gm11435
  gRNA
tagcactgttcatcctcttg

SEQ ID NO: 87790 - DNA, 20 bp, Artificial Sequence
  MKO10087790_B_Gm11437
  gRNA
ttccagagccaagacaccgc

SEQ ID NO: 87791 - DNA, 20 bp, Artificial Sequence
  MKO10087791_B_Gm11437
  gRNA
atgcacggtctactcagcta

SEQ ID NO: 87792 - DNA, 20 bp, Artificial Sequence
  MKO10087792_B_Gm11437
  gRNA
gcatagacatgtccttaaag

SEQ ID NO: 87793 - DNA, 20 bp, Artificial Sequence
  MKO10087793_B_Gm11487
  gRNA
gcttgtattcgacttatgat

SEQ ID NO: 87794 - DNA, 20 bp, Artificial Sequence
  MKO10087794_B_Gm11487
  gRNA
caggtccgtgtgatagccct

SEQ ID NO: 87795 - DNA, 20 bp, Artificial Sequence
  MKO10087795_B_Gm11487
  gRNA
tatgcacattccctctgcat

SEQ ID NO: 87796 - DNA, 20 bp, Artificial Sequence
  MKO10087796_B_Gm11541
  gRNA
tttgatgagatgaagacgcg

SEQ ID NO: 87797 - DNA, 20 bp, Artificial Sequence
  MKO10087797_B_Gm11541
  gRNA
gactctccagatgcaattcg

SEQ ID NO: 87798 - DNA, 20 bp, Artificial Sequence
  MKO10087798_B_Gm11541
  gRNA
cttcttcaaatgagtccacc

SEQ ID NO: 87799 - DNA, 20 bp, Artificial Sequence
  MKO10087799_B_Gm11544
  gRNA
atcttgcaaatgaccacttt

SEQ ID NO: 87800 - DNA, 20 bp, Artificial Sequence
  MKO10087800_B_Gm11544
  gRNA
atgttctgtcctcccttcag

SEQ ID NO: 87801 - DNA, 20 bp, Artificial Sequence
  MKO10087801_B_Gm11544
  gRNA
ctaactagaaactgtaccaa

SEQ ID NO: 87802 - DNA, 20 bp, Artificial Sequence
  MKO10087802_B_Gm11545
  gRNA
ctagaccgcagatgcataag

SEQ ID NO: 87803 - DNA, 20 bp, Artificial Sequence
  MKO10087803_B_Gm11545
  gRNA
ctaactagaaactgccccaa

SEQ ID NO: 87804 - DNA, 20 bp, Artificial Sequence
  MKO10087804_B_Gm11545
  gRNA
ggaccccagacctttctttc

SEQ ID NO: 87805 - DNA, 20 bp, Artificial Sequence
  MKO10087805_B_Gm11554
  gRNA
taggctggcagcacacagac

SEQ ID NO: 87806 - DNA, 20 bp, Artificial Sequence
  MKO10087806_B_Gm11554
  gRNA
gcactggggcctgcagcagc

SEQ ID NO: 87807 - DNA, 20 bp, Artificial Sequence
  MKO10087807_B_Gm11554
  gRNA
acagctggggcggcagcagc

SEQ ID NO: 87808 - DNA, 20 bp, Artificial Sequence
  MKO10087808_B_Gm11559
  gRNA
gcagctgggctggcagcagc

SEQ ID NO: 87809 - DNA, 20 bp, Artificial Sequence
  MKO10087809_B_Gm11559
  gRNA
acagcagctgggctggcagc

SEQ ID NO: 87810 - DNA, 20 bp, Artificial Sequence
  MKO10087810_B_Gm11559
  gRNA
gcagctggacacacagcagc

SEQ ID NO: 87811 - DNA, 20 bp, Artificial Sequence
  MKO10087811_B_Gm11562
  gRNA
cagggcgacacactgtggtc

SEQ ID NO: 87812 - DNA, 20 bp, Artificial Sequence
  MKO10087812_B_Gm11562
  gRNA
ggacactgggcggcagcagc

SEQ ID NO: 87813 - DNA, 20 bp, Artificial Sequence
  MKO10087813_B_Gm11562
  gRNA
ggtccctgcagcagcagggc

SEQ ID NO: 87814 - DNA, 20 bp, Artificial Sequence
  MKO10087814_B_Gm11563
  gRNA
tgctgtttgagaccagtctg

SEQ ID NO: 87815 - DNA, 20 bp, Artificial Sequence
  MKO10087815_B_Gm11563
  gRNA
taggctggcaacacacagac

SEQ ID NO: 87816 - DNA, 20 bp, Artificial Sequence
  MKO10087816_B_Gm11563
  gRNA
actatggtcagctcctgttg

SEQ ID NO: 87817 - DNA, 20 bp, Artificial Sequence
  MKO10087817_B_Gm11564
  gRNA
tctggtggttccagctgttg

SEQ ID NO: 87818 - DNA, 20 bp, Artificial Sequence
  MKO10087818_B_Gm11564
  gRNA
gcagcagctggacacacaac

SEQ ID NO: 87819 - DNA, 20 bp, Artificial Sequence
  MKO10087819_B_Gm11564
  gRNA
acagcaggtgctctggcagc

SEQ ID NO: 87820 - DNA, 20 bp, Artificial Sequence
  MKO10087820_B_Gm11565
  gRNA
cacacagcagatggtcacac

SEQ ID NO: 87821 - DNA, 20 bp, Artificial Sequence
  MKO10087821_B_Gm11565
  gRNA
gaagtgtcacagcaggttgg

SEQ ID NO: 87822 - DNA, 20 bp, Artificial Sequence
  MKO10087822_B_Gm11565
  gRNA
aaacccacctgtgtgatcat

SEQ ID NO: 87823 - DNA, 20 bp, Artificial Sequence
  MKO10087823_B_Gm11567
  gRNA
ccaggcacacagacacatgt

SEQ ID NO: 87824 - DNA, 20 bp, Artificial Sequence
  MKO10087824_B_Gm11567
  gRNA
acagctggactgacaacagc

SEQ ID NO: 87825 - DNA, 20 bp, Artificial Sequence
  MKO10087825_B_Gm11567
  gRNA
gctgccagcccacctgctgc

SEQ ID NO: 87826 - DNA, 20 bp, Artificial Sequence
  MKO10087826_B_Gm11568
  gRNA
gctgccagcccacctgctgc

SEQ ID NO: 87827 - DNA, 20 bp, Artificial Sequence
  MKO10087827_B_Gm11568
  gRNA
gcagctggagatacagcacc

SEQ ID NO: 87828 - DNA, 20 bp, Artificial Sequence
  MKO10087828_B_Gm11568
  gRNA
tccagctgctgtgagccctg

SEQ ID NO: 87829 - DNA, 20 bp, Artificial Sequence
  MKO10087829_B_Gm11569
  gRNA
taggctggcagcacacagac

SEQ ID NO: 87830 - DNA, 20 bp, Artificial Sequence
  MKO10087830_B_Gm11569
  gRNA
gcactggggcctgcagcagc

SEQ ID NO: 87831 - DNA, 20 bp, Artificial Sequence
  MKO10087831_B_Gm11569
  gRNA
acagctggggcggcagcagc

SEQ ID NO: 87832 - DNA, 20 bp, Artificial Sequence
  MKO10087832_B_Gm11570
  gRNA
caaggcggcttgcaggaact

SEQ ID NO: 87833 - DNA, 20 bp, Artificial Sequence
  MKO10087833_B_Gm11570
  gRNA
atttgtcgccccatctgttc

SEQ ID NO: 87834 - DNA, 20 bp, Artificial Sequence
  MKO10087834_B_Gm11570
  gRNA
aaagtccgaggggggcaagc

SEQ ID NO: 87835 - DNA, 20 bp, Artificial Sequence
  MKO10087835_B_Gm11595
  gRNA
acaactagaactaccacagc

SEQ ID NO: 87836 - DNA, 20 bp, Artificial Sequence
  MKO10087836_B_Gm11595
  gRNA
tgtcgcccagcatgctctag

SEQ ID NO: 87837 - DNA, 20 bp, Artificial Sequence
  MKO10087837_B_Gm11595
  gRNA
agctgctgtcgcccctgctg

SEQ ID NO: 87838 - DNA, 20 bp, Artificial Sequence
  MKO10087838_B_Gm11596
  gRNA
cagctgggactgcagcaaga

SEQ ID NO: 87839 - DNA, 20 bp, Artificial Sequence
  MKO10087839_B_Gm11596
  gRNA
tgtgatagttccagctgctg

SEQ ID NO: 87840 - DNA, 20 bp, Artificial Sequence
  MKO10087840_B_Gm11596
  gRNA
taggctggcagcacagagac

SEQ ID NO: 87841 - DNA, 20 bp, Artificial Sequence
  MKO10087841_B_Gm11710
  gRNA
gttcacgttaactttaaaca

SEQ ID NO: 87842 - DNA, 20 bp, Artificial Sequence
  MKO10087842_B_Gm11710
  gRNA
ggatccagtcacaggtccag

SEQ ID NO: 87843 - DNA, 20 bp, Artificial Sequence
  MKO10087843_B_Gm11710
  gRNA
atccacagttctgacatcca

SEQ ID NO: 87844 - DNA, 20 bp, Artificial Sequence
  MKO10087844_B_Gm11711
  gRNA
ggatccagtcacaggtccag

SEQ ID NO: 87845 - DNA, 20 bp, Artificial Sequence
  MKO10087845_B_Gm11711
  gRNA
gacacccacaacaccaacca

SEQ ID NO: 87846 - DNA, 20 bp, Artificial Sequence
  MKO10087846_B_Gm11711
  gRNA
agagagagttctgagtcacc

SEQ ID NO: 87847 - DNA, 20 bp, Artificial Sequence
  MKO10087847_B_Gm11744
  gRNA
ggagtgacggtctacttcac

SEQ ID NO: 87848 - DNA, 20 bp, Artificial Sequence
  MKO10087848_B_Gm11744
  gRNA
gactgtcccgtccactctgc

SEQ ID NO: 87849 - DNA, 20 bp, Artificial Sequence
  MKO10087849_B_Gm11744
  gRNA
cagtttctcacggttccact

SEQ ID NO: 87850 - DNA, 20 bp, Artificial Sequence
  MKO10087850_B_Gm11757
  gRNA
cacctggcacatagcctccc

SEQ ID NO: 87851 - DNA, 20 bp, Artificial Sequence
  MKO10087851_B_Gm11757
  gRNA
cactcaggtctttggtttga

SEQ ID NO: 87852 - DNA, 20 bp, Artificial Sequence
  MKO10087852_B_Gm11757
  gRNA
aatgtgcatacctggagaga

SEQ ID NO: 87853 - DNA, 20 bp, Artificial Sequence
  MKO10087853_B_Gm11758
  gRNA
cacctggcacatagcctccc

SEQ ID NO: 87854 - DNA, 20 bp, Artificial Sequence
  MKO10087854_B_Gm11758
  gRNA
cactcaggtctttggtttga

SEQ ID NO: 87855 - DNA, 20 bp, Artificial Sequence
  MKO10087855_B_Gm11758
  gRNA
aatgtgcatacctggagaga

SEQ ID NO: 87856 - DNA, 20 bp, Artificial Sequence
  MKO10087856_B_Gm11780
  gRNA
gggtaaattcggtatgtagc

SEQ ID NO: 87857 - DNA, 20 bp, Artificial Sequence
  MKO10087857_B_Gm11780
  gRNA
gctaggaagggcacccgtgc

SEQ ID NO: 87858 - DNA, 20 bp, Artificial Sequence
  MKO10087858_B_Gm11780
  gRNA
ccctgaagcgcgacagtgac

SEQ ID NO: 87859 - DNA, 20 bp, Artificial Sequence
  MKO10087859_B_Gm11837
  gRNA
agcactcaatgcttacaaag

SEQ ID NO: 87860 - DNA, 20 bp, Artificial Sequence
  MKO10087860_B_Gm11837
  gRNA
ccattgtcataaagaccttg

SEQ ID NO: 87861 - DNA, 20 bp, Artificial Sequence
  MKO10087861_B_Gm11837
  gRNA
tgtaagcattgagtgctgca

SEQ ID NO: 87862 - DNA, 20 bp, Artificial Sequence
  MKO10087862_B_Gm11937
  gRNA
cagggcgacacactgtggtc

SEQ ID NO: 87863 - DNA, 20 bp, Artificial Sequence
  MKO10087863_B_Gm11937
  gRNA
ggacactgggcggcagcagc

SEQ ID NO: 87864 - DNA, 20 bp, Artificial Sequence
  MKO10087864_B_Gm11937
  gRNA
ggtccctgcagcagcagggc

SEQ ID NO: 87865 - DNA, 20 bp, Artificial Sequence
  MKO10087865_B_Gm11938
  gRNA
cctggtgcaatggggcacac

SEQ ID NO: 87866 - DNA, 20 bp, Artificial Sequence
  MKO10087866_B_Gm11938
  gRNA
accatgacaggctcctgctg

SEQ ID NO: 87867 - DNA, 20 bp, Artificial Sequence
  MKO10087867_B_Gm11938
  gRNA
gctcagcagcaggtgttgca

SEQ ID NO: 87868 - DNA, 20 bp, Artificial Sequence
  MKO10087868_B_Gm11992
  gRNA
ggtctccataccagattaca

SEQ ID NO: 87869 - DNA, 20 bp, Artificial Sequence
  MKO10087869_B_Gm11992
  gRNA
tagcctactccctgccagac

SEQ ID NO: 87870 - DNA, 20 bp, Artificial Sequence
  MKO10087870_B_Gm11992
  gRNA
ctgtggtgaatataccagtc

SEQ ID NO: 87871 - DNA, 20 bp, Artificial Sequence
  MKO10087871_B_Gm12169
  gRNA
gatgctaagccattagacac

SEQ ID NO: 87872 - DNA, 20 bp, Artificial Sequence
  MKO10087872_B_Gm12169
  gRNA
tgacgtcttcaaaccaccct

SEQ ID NO: 87873 - DNA, 20 bp, Artificial Sequence
  MKO10087873_B_Gm12169
  gRNA
cttacagtattattattcca

SEQ ID NO: 87874 - DNA, 20 bp, Artificial Sequence
  MKO10087874_B_Gm12171
  gRNA
cccttgtgtaagcacatccc

SEQ ID NO: 87875 - DNA, 20 bp, Artificial Sequence
  MKO10087875_B_Gm12171
  gRNA
ggaagtcgggaggagttgaa

SEQ ID NO: 87876 - DNA, 20 bp, Artificial Sequence
  MKO10087876_B_Gm12171
  gRNA
gaaaaaagaagagtctagaa

SEQ ID NO: 87877 - DNA, 20 bp, Artificial Sequence
  MKO10087877_B_Gm12185
  gRNA
tctcaaagaacgtttccagc

SEQ ID NO: 87878 - DNA, 20 bp, Artificial Sequence
  MKO10087878_B_Gm12185
  gRNA
gttctttgagattacttgaa

SEQ ID NO: 87879 - DNA, 20 bp, Artificial Sequence
  MKO10087879_B_Gm12185
  gRNA
ggatcctcctttgacatttc

SEQ ID NO: 87880 - DNA, 20 bp, Artificial Sequence
  MKO10087880_B_Gm12250
  gRNA
tgcagacggaagctcttcac

SEQ ID NO: 87881 - DNA, 20 bp, Artificial Sequence
  MKO10087881_B_Gm12250
  gRNA
ttgtccgccacagattcatt

SEQ ID NO: 87882 - DNA, 20 bp, Artificial Sequence
  MKO10087882_B_Gm12250
  gRNA
ctaaacccagttcctacaat

SEQ ID NO: 87883 - DNA, 20 bp, Artificial Sequence
  MKO10087883_B_Gm12253
  gRNA
cccgtgcactttagtaaaac

SEQ ID NO: 87884 - DNA, 20 bp, Artificial Sequence
  MKO10087884_B_Gm12253
  gRNA
ctgtagcaaagagcccatta

SEQ ID NO: 87885 - DNA, 20 bp, Artificial Sequence
  MKO10087885_B_Gm12253
  gRNA
aaatttaagattatccgtga

SEQ ID NO: 87886 - DNA, 20 bp, Artificial Sequence
  MKO10087886_B_Gm12429
  gRNA
caagtgtgtcagaattacca

SEQ ID NO: 87887 - DNA, 20 bp, Artificial Sequence
  MKO10087887_B_Gm12429
  gRNA
ttaagcgtcatcaaaaagtc

SEQ ID NO: 87888 - DNA, 20 bp, Artificial Sequence
  MKO10087888_B_Gm12429
  gRNA
gctaaagatgcagcgtcaag

SEQ ID NO: 87889 - DNA, 20 bp, Artificial Sequence
  MKO10087889_B_Gm12597
  gRNA
caagagagccttgaccctcc

SEQ ID NO: 87890 - DNA, 20 bp, Artificial Sequence
  MKO10087890_B_Gm12597
  gRNA
tagtcttcctgggtcagggg

SEQ ID NO: 87891 - DNA, 20 bp, Artificial Sequence
  MKO10087891_B_Gm12597
  gRNA
aagactacctgctggctgtg

SEQ ID NO: 87892 - DNA, 20 bp, Artificial Sequence
  MKO10087892_B_Gm12657
  gRNA
tcttattaacagccactaaa

SEQ ID NO: 87893 - DNA, 20 bp, Artificial Sequence
  MKO10087893_B_Gm12657
  gRNA
taactcacccaggaaacaac

SEQ ID NO: 87894 - DNA, 20 bp, Artificial Sequence
  MKO10087894_B_Gm12657
  gRNA
ttaaatgtttcccctcatag

SEQ ID NO: 87895 - DNA, 20 bp, Artificial Sequence
  MKO10087895_B_Gm12695
  gRNA
cagctggatatagtaactca

SEQ ID NO: 87896 - DNA, 20 bp, Artificial Sequence
  MKO10087896_B_Gm12695
  gRNA
aactgctaacccagctgaga

SEQ ID NO: 87897 - DNA, 20 bp, Artificial Sequence
  MKO10087897_B_Gm12695
  gRNA
taaccagagtattcagtaac

SEQ ID NO: 87898 - DNA, 20 bp, Artificial Sequence
  MKO10087898_B_Gm12789
  gRNA
ttgcagcatctccacaccag

SEQ ID NO: 87899 - DNA, 20 bp, Artificial Sequence
  MKO10087899_B_Gm12789
  gRNA
tgcacagttatcaaactgac

SEQ ID NO: 87900 - DNA, 20 bp, Artificial Sequence
  MKO10087900_B_Gm12789
  gRNA
aaggtgcaagcttcaagtgt

SEQ ID NO: 87901 - DNA, 20 bp, Artificial Sequence
  MKO10087901_B_Gm12794
  gRNA
atgctgcaagctgtgctcga

SEQ ID NO: 87902 - DNA, 20 bp, Artificial Sequence
  MKO10087902_B_Gm12794
  gRNA
cttctctttgctgccaacaa

SEQ ID NO: 87903 - DNA, 20 bp, Artificial Sequence
  MKO10087903_B_Gm12794
  gRNA
tagatgcctgaagagcccct

SEQ ID NO: 87904 - DNA, 20 bp, Artificial Sequence
  MKO10087904_B_Gm12886
  gRNA
ccagtgctcaagactgcaac

SEQ ID NO: 87905 - DNA, 20 bp, Artificial Sequence
  MKO10087905_B_Gm12886
  gRNA
tctaacgaaacaccgaaatc

SEQ ID NO: 87906 - DNA, 20 bp, Artificial Sequence
  MKO10087906_B_Gm12886
  gRNA
tgcaccatggctacattctt

SEQ ID NO: 87907 - DNA, 20 bp, Artificial Sequence
  MKO10087907_B_Gm12887
  gRNA
ggatgtggagaataaagtcc

SEQ ID NO: 87908 - DNA, 20 bp, Artificial Sequence
  MKO10087908_B_Gm12887
  gRNA
cattgttgttgcatacttta

SEQ ID NO: 87909 - DNA, 20 bp, Artificial Sequence
  MKO10087909_B_Gm12887
  gRNA
tcttcccatcctgtagagcc

SEQ ID NO: 87910 - DNA, 20 bp, Artificial Sequence
  MKO10087910_B_Gm12888
  gRNA
cattgttagggcatacttta

SEQ ID NO: 87911 - DNA, 20 bp, Artificial Sequence
  MKO10087911_B_Gm12888
  gRNA
gagcaagactctgacatact

SEQ ID NO: 87912 - DNA, 20 bp, Artificial Sequence
  MKO10087912_B_Gm12888
  gRNA
tcatggaaaccacgatcata

SEQ ID NO: 87913 - DNA, 20 bp, Artificial Sequence
  MKO10087913_B_Gm128
  gRNA
ctttctgggcgccttcgagt

SEQ ID NO: 87914 - DNA, 20 bp, Artificial Sequence
  MKO10087914_B_Gm128
  gRNA
tagcggtcggggtagtcgtt

SEQ ID NO: 87915 - DNA, 20 bp, Artificial Sequence
  MKO10087915_B_Gm128
  gRNA
gacccgctgcatcccaatcg

SEQ ID NO: 87916 - DNA, 20 bp, Artificial Sequence
  MKO10087916_B_Gm12942
  gRNA
gctcttgatcctactcatga

SEQ ID NO: 87917 - DNA, 20 bp, Artificial Sequence
  MKO10087917_B_Gm12942
  gRNA
aagactcaattgccgtgtgc

SEQ ID NO: 87918 - DNA, 20 bp, Artificial Sequence
  MKO10087918_B_Gm12942
  gRNA
tggtagccgaacaccttcaa

SEQ ID NO: 87919 - DNA, 20 bp, Artificial Sequence
  MKO10087919_B_Gm129
  gRNA
taggcaggacaggcggacat

SEQ ID NO: 87920 - DNA, 20 bp, Artificial Sequence
  MKO10087920_B_Gm129
  gRNA
ttcagatcaccagggacgac

SEQ ID NO: 87921 - DNA, 20 bp, Artificial Sequence
  MKO10087921_B_Gm129
  gRNA
ctacagtgtaaagaactcca

SEQ ID NO: 87922 - DNA, 20 bp, Artificial Sequence
  MKO10087922_B_Gm12
  gRNA
ccgcctccctggtgtttacc

SEQ ID NO: 87923 - DNA, 20 bp, Artificial Sequence
  MKO10087923_B_Gm12
  gRNA
aacagacattccgctgcagc

SEQ ID NO: 87924 - DNA, 20 bp, Artificial Sequence
  MKO10087924_B_Gm12
  gRNA
cgacacccgaaagctttacc

SEQ ID NO: 87925 - DNA, 20 bp, Artificial Sequence
  MKO10087925_B_Gm13011
  gRNA
aactccgaatgtgtgaactg

SEQ ID NO: 87926 - DNA, 20 bp, Artificial Sequence
  MKO10087926_B_Gm13011
  gRNA
tcccacccatctcatactga

SEQ ID NO: 87927 - DNA, 20 bp, Artificial Sequence
  MKO10087927_B_Gm13011
  gRNA
tcacctctagcctcaggctg

SEQ ID NO: 87928 - DNA, 20 bp, Artificial Sequence
  MKO10087928_B_Gm13023
  gRNA
cttctatgcagatacgtctt

SEQ ID NO: 87929 - DNA, 20 bp, Artificial Sequence
  MKO10087929_B_Gm13023
  gRNA
gagatcatgacttgaactta

SEQ ID NO: 87930 - DNA, 20 bp, Artificial Sequence
  MKO10087930_B_Gm13023
  gRNA
gactttgaaggctatccttg

SEQ ID NO: 87931 - DNA, 20 bp, Artificial Sequence
  MKO10087931_B_Gm13040
  gRNA
acacgagcaattcattcatg

SEQ ID NO: 87932 - DNA, 20 bp, Artificial Sequence
  MKO10087932_B_Gm13040
  gRNA
aaagaggaagcttcaagtgc

SEQ ID NO: 87933 - DNA, 20 bp, Artificial Sequence
  MKO10087933_B_Gm13040
  gRNA
ctcctatttactggcaacaa

SEQ ID NO: 87934 - DNA, 20 bp, Artificial Sequence
  MKO10087934_B_Gm13043
  gRNA
aaagaggaagcttcaagtgc

SEQ ID NO: 87935 - DNA, 20 bp, Artificial Sequence
  MKO10087935_B_Gm13043
  gRNA
ctcctatttactggcaacaa

SEQ ID NO: 87936 - DNA, 20 bp, Artificial Sequence
  MKO10087936_B_Gm13043
  gRNA
taggtgtctgaagactccgc

SEQ ID NO: 87937 - DNA, 20 bp, Artificial Sequence
  MKO10087937_B_Gm13051
  gRNA
tcacatacattctatttgta

SEQ ID NO: 87938 - DNA, 20 bp, Artificial Sequence
  MKO10087938_B_Gm13051
  gRNA
tcagaaaatcattgcatacg

SEQ ID NO: 87939 - DNA, 20 bp, Artificial Sequence
  MKO10087939_B_Gm13051
  gRNA
cgtggccttggacttctcac

SEQ ID NO: 87940 - DNA, 20 bp, Artificial Sequence
  MKO10087940_B_Gm13057
  gRNA
acacgagcaattcattcatg

SEQ ID NO: 87941 - DNA, 20 bp, Artificial Sequence
  MKO10087941_B_Gm13057
  gRNA
aaagaggaagcttcaagtgc

SEQ ID NO: 87942 - DNA, 20 bp, Artificial Sequence
  MKO10087942_B_Gm13057
  gRNA
ctcctatttactggcaacaa

SEQ ID NO: 87943 - DNA, 20 bp, Artificial Sequence
  MKO10087943_B_Gm13078
  gRNA
tgttctgtagcaacttcttc

SEQ ID NO: 87944 - DNA, 20 bp, Artificial Sequence
  MKO10087944_B_Gm13078
  gRNA
cctgatgaagattcctcacc

SEQ ID NO: 87945 - DNA, 20 bp, Artificial Sequence
  MKO10087945_B_Gm13078
  gRNA
caaagttgcaaaaatctgtc

SEQ ID NO: 87946 - DNA, 20 bp, Artificial Sequence
  MKO10087946_B_Gm13083
  gRNA
acccttgcctcgctagcccc

SEQ ID NO: 87947 - DNA, 20 bp, Artificial Sequence
  MKO10087947_B_Gm13083
  gRNA
aggtcccaaggcctatccca

SEQ ID NO: 87948 - DNA, 20 bp, Artificial Sequence
  MKO10087948_B_Gm13083
  gRNA
tttcagatatgcagatgata

SEQ ID NO: 87949 - DNA, 20 bp, Artificial Sequence
  MKO10087949_B_Gm13084
  gRNA
gtagattgctcatctgtttc

SEQ ID NO: 87950 - DNA, 20 bp, Artificial Sequence
  MKO10087950_B_Gm13084
  gRNA
caggtgcctaaggaagccct

SEQ ID NO: 87951 - DNA, 20 bp, Artificial Sequence
  MKO10087951_B_Gm13084
  gRNA
ctgttatcatagcactcctg

SEQ ID NO: 87952 - DNA, 20 bp, Artificial Sequence
  MKO10087952_B_Gm13088
  gRNA
gtttggccctgagcatatcc

SEQ ID NO: 87953 - DNA, 20 bp, Artificial Sequence
  MKO10087953_B_Gm13088
  gRNA
aatgcacaggctactgagag

SEQ ID NO: 87954 - DNA, 20 bp, Artificial Sequence
  MKO10087954_B_Gm13088
  gRNA
tgaaagccatgatacctgag

SEQ ID NO: 87955 - DNA, 20 bp, Artificial Sequence
  MKO10087955_B_Gm13102
  gRNA
tcctttcttacctgagcatt

SEQ ID NO: 87956 - DNA, 20 bp, Artificial Sequence
  MKO10087956_B_Gm13102
  gRNA
tgatttgcgagatgcccacc

SEQ ID NO: 87957 - DNA, 20 bp, Artificial Sequence
  MKO10087957_B_Gm13102
  gRNA
ccacgacctctccttcttaa

SEQ ID NO: 87958 - DNA, 20 bp, Artificial Sequence
  MKO10087958_B_Gm13103
  gRNA
ttctctttgcctacaagatc

SEQ ID NO: 87959 - DNA, 20 bp, Artificial Sequence
  MKO10087959_B_Gm13103
  gRNA
ttgcacaaaagcttcactcc

SEQ ID NO: 87960 - DNA, 20 bp, Artificial Sequence
  MKO10087960_B_Gm13103
  gRNA
tgtgtattgccagcttcagc

SEQ ID NO: 87961 - DNA, 20 bp, Artificial Sequence
  MKO10087961_B_Gm13119
  gRNA
tgaacatacttcgcactgtt

SEQ ID NO: 87962 - DNA, 20 bp, Artificial Sequence
  MKO10087962_B_Gm13119
  gRNA
atgcatcaggatgagcttcc

SEQ ID NO: 87963 - DNA, 20 bp, Artificial Sequence
  MKO10087963_B_Gm13119
  gRNA
gcttgcaatactgtcatgtc

SEQ ID NO: 87964 - DNA, 20 bp, Artificial Sequence
  MKO10087964_B_Gm13124
  gRNA
acctcctctggcccccggaa

SEQ ID NO: 87965 - DNA, 20 bp, Artificial Sequence
  MKO10087965_B_Gm13124
  gRNA
ttaccaatgctattgtcagc

SEQ ID NO: 87966 - DNA, 20 bp, Artificial Sequence
  MKO10087966_B_Gm13124
  gRNA
tgagacagattcggtggtaa

SEQ ID NO: 87967 - DNA, 20 bp, Artificial Sequence
  MKO10087967_B_Gm13125
  gRNA
gtggtgtagtaggtccttca

SEQ ID NO: 87968 - DNA, 20 bp, Artificial Sequence
  MKO10087968_B_Gm13125
  gRNA
taagtactgcaaagcgctga

SEQ ID NO: 87969 - DNA, 20 bp, Artificial Sequence
  MKO10087969_B_Gm13125
  gRNA
atggtactcccctcatgcaa

SEQ ID NO: 87970 - DNA, 20 bp, Artificial Sequence
  MKO10087970_B_Gm13128
  gRNA
acgtgtatcacagtcataac

SEQ ID NO: 87971 - DNA, 20 bp, Artificial Sequence
  MKO10087971_B_Gm13128
  gRNA
tatacctgagaagcaagaag

SEQ ID NO: 87972 - DNA, 20 bp, Artificial Sequence
  MKO10087972_B_Gm13128
  gRNA
cccacccactctcctgcagc

SEQ ID NO: 87973 - DNA, 20 bp, Artificial Sequence
  MKO10087973_B_Gm13139
  gRNA
ctcctgtatgaattctctga

SEQ ID NO: 87974 - DNA, 20 bp, Artificial Sequence
  MKO10087974_B_Gm13139
  gRNA
tcagaaaatcattgcatatg

SEQ ID NO: 87975 - DNA, 20 bp, Artificial Sequence
  MKO10087975_B_Gm13139
  gRNA
cgtggccttggacttctcac

SEQ ID NO: 87976 - DNA, 20 bp, Artificial Sequence
  MKO10087976_B_Gm13152
  gRNA
ttcctccagtgagaattcca

SEQ ID NO: 87977 - DNA, 20 bp, Artificial Sequence
  MKO10087977_B_Gm13152
  gRNA
aacaagaatgagtgtgtgtc

SEQ ID NO: 87978 - DNA, 20 bp, Artificial Sequence
  MKO10087978_B_Gm13152
  gRNA
catttcatatgtgcaaagtg

SEQ ID NO: 87979 - DNA, 20 bp, Artificial Sequence
  MKO10087979_B_Gm13154
  gRNA
actgtacattgatgtgatgt

SEQ ID NO: 87980 - DNA, 20 bp, Artificial Sequence
  MKO10087980_B_Gm13154
  gRNA
ttcctccagtgagaagtcca

SEQ ID NO: 87981 - DNA, 20 bp, Artificial Sequence
  MKO10087981_B_Gm13154
  gRNA
atcccatcttaatattcatc

SEQ ID NO: 87982 - DNA, 20 bp, Artificial Sequence
  MKO10087982_B_Gm13157
  gRNA
ccagggtctgttaaccttca

SEQ ID NO: 87983 - DNA, 20 bp, Artificial Sequence
  MKO10087983_B_Gm13157
  gRNA
tcagaaaatcattgcataca

SEQ ID NO: 87984 - DNA, 20 bp, Artificial Sequence
  MKO10087984_B_Gm13157
  gRNA
ttcctccagtgagaagtaca

SEQ ID NO: 87985 - DNA, 20 bp, Artificial Sequence
  MKO10087985_B_Gm13177
  gRNA
ggtagaaaataatgcctcga

SEQ ID NO: 87986 - DNA, 20 bp, Artificial Sequence
  MKO10087986_B_Gm13177
  gRNA
gctcattactccaagtatgc

SEQ ID NO: 87987 - DNA, 20 bp, Artificial Sequence
  MKO10087987_B_Gm13177
  gRNA
aaattgatcgcctgcatact

SEQ ID NO: 87988 - DNA, 20 bp, Artificial Sequence
  MKO10087988_B_Gm13178
  gRNA
aggtgccgtatgtggaagtc

SEQ ID NO: 87989 - DNA, 20 bp, Artificial Sequence
  MKO10087989_B_Gm13178
  gRNA
cttacccagacttccacata

SEQ ID NO: 87990 - DNA, 20 bp, Artificial Sequence
  MKO10087990_B_Gm13178
  gRNA
agggctgctcacattcttcc

SEQ ID NO: 87991 - DNA, 20 bp, Artificial Sequence
  MKO10087991_B_Gm13212
  gRNA
tctctgatgaatattaagat

SEQ ID NO: 87992 - DNA, 20 bp, Artificial Sequence
  MKO10087992_B_Gm13212
  gRNA
tcagaaaatcattgcatatg

SEQ ID NO: 87993 - DNA, 20 bp, Artificial Sequence
  MKO10087993_B_Gm13212
  gRNA
tcacatgtaaactatttgta

SEQ ID NO: 87994 - DNA, 20 bp, Artificial Sequence
  MKO10087994_B_Gm1322
  gRNA
catgcctgatgtccattagt

SEQ ID NO: 87995 - DNA, 20 bp, Artificial Sequence
  MKO10087995_B_Gm1322
  gRNA
ataagctgcttgtgcaaacc

SEQ ID NO: 87996 - DNA, 20 bp, Artificial Sequence
  MKO10087996_B_Gm1322
  gRNA
tctgatacatgttgtgttga

SEQ ID NO: 87997 - DNA, 20 bp, Artificial Sequence
  MKO10087997_B_Gm13242
  gRNA
tttgctcctcaccaagaatc

SEQ ID NO: 87998 - DNA, 20 bp, Artificial Sequence
  MKO10087998_B_Gm13242
  gRNA
gtccaaaaacacgtccttga

SEQ ID NO: 87999 - DNA, 20 bp, Artificial Sequence
  MKO10087999_B_Gm13242
  gRNA
acagtgtctattaaccttca

SEQ ID NO: 88000 - DNA, 20 bp, Artificial Sequence
  MKO10088000_B_Gm13247
  gRNA
attggaatgtggcatctctt

SEQ ID NO: 88001 - DNA, 20 bp, Artificial Sequence
  MKO10088001_B_Gm13247
  gRNA
tctgttaaccttcaacgatg

SEQ ID NO: 88002 - DNA, 20 bp, Artificial Sequence
  MKO10088002_B_Gm13247
  gRNA
ctgtggagggtttaccagag

SEQ ID NO: 88003 - DNA, 20 bp, Artificial Sequence
  MKO10088003_B_Gm13251
  gRNA
tcacatacaaactatttgta

SEQ ID NO: 88004 - DNA, 20 bp, Artificial Sequence
  MKO10088004_B_Gm13251
  gRNA
tcagaaaatcattgcatatg

SEQ ID NO: 88005 - DNA, 20 bp, Artificial Sequence
  MKO10088005_B_Gm13251
  gRNA
cgtggccttggacttctcac

SEQ ID NO: 88006 - DNA, 20 bp, Artificial Sequence
  MKO10088006_B_Gm13271
  gRNA
gtcatcagtgcctgcgggac

SEQ ID NO: 88007 - DNA, 20 bp, Artificial Sequence
  MKO10088007_B_Gm13271
  gRNA
agtgttcttccgctatctga

SEQ ID NO: 88008 - DNA, 20 bp, Artificial Sequence
  MKO10088008_B_Gm13271
  gRNA
actgatgacccggcacgctt

SEQ ID NO: 88009 - DNA, 20 bp, Artificial Sequence
  MKO10088009_B_Gm13272
  gRNA
ggaggacctgcctgagggtc

SEQ ID NO: 88010 - DNA, 20 bp, Artificial Sequence
  MKO10088010_B_Gm13272
  gRNA
gcagagctgcctggcacgag

SEQ ID NO: 88011 - DNA, 20 bp, Artificial Sequence
  MKO10088011_B_Gm13272
  gRNA
gtggtttctcccagagtcat

SEQ ID NO: 88012 - DNA, 20 bp, Artificial Sequence
  MKO10088012_B_Gm13275
  gRNA
gcagagctgcctggcacgag

SEQ ID NO: 88013 - DNA, 20 bp, Artificial Sequence
  MKO10088013_B_Gm13275
  gRNA
gtggtttctcccagagtcat

SEQ ID NO: 88014 - DNA, 20 bp, Artificial Sequence
  MKO10088014_B_Gm13275
  gRNA
accagctactatctagcctg

SEQ ID NO: 88015 - DNA, 20 bp, Artificial Sequence
  MKO10088015_B_Gm13276
  gRNA
gcagagctgcctggcacgag

SEQ ID NO: 88016 - DNA, 20 bp, Artificial Sequence
  MKO10088016_B_Gm13276
  gRNA
gatgttagttccttccttcc

SEQ ID NO: 88017 - DNA, 20 bp, Artificial Sequence
  MKO10088017_B_Gm13276
  gRNA
accagctactatctagcctg

SEQ ID NO: 88018 - DNA, 20 bp, Artificial Sequence
  MKO10088018_B_Gm13277
  gRNA
gcagagctgcctggcacgag

SEQ ID NO: 88019 - DNA, 20 bp, Artificial Sequence
  MKO10088019_B_Gm13277
  gRNA
gtggtttctcccagagtcat

SEQ ID NO: 88020 - DNA, 20 bp, Artificial Sequence
  MKO10088020_B_Gm13277
  gRNA
accagctactatctagcctg

SEQ ID NO: 88021 - DNA, 20 bp, Artificial Sequence
  MKO10088021_B_Gm13278
  gRNA
gcagagctgcctggcacgag

SEQ ID NO: 88022 - DNA, 20 bp, Artificial Sequence
  MKO10088022_B_Gm13278
  gRNA
gtggtttctcccagagtcat

SEQ ID NO: 88023 - DNA, 20 bp, Artificial Sequence
  MKO10088023_B_Gm13278
  gRNA
accagctactatctagcctg

SEQ ID NO: 88024 - DNA, 20 bp, Artificial Sequence
  MKO10088024_B_Gm13279
  gRNA
gcagagctgcctggcacgag

SEQ ID NO: 88025 - DNA, 20 bp, Artificial Sequence
  MKO10088025_B_Gm13279
  gRNA
gtggtttctcccagagtcat

SEQ ID NO: 88026 - DNA, 20 bp, Artificial Sequence
  MKO10088026_B_Gm13279
  gRNA
accagctactatctagcctg

SEQ ID NO: 88027 - DNA, 20 bp, Artificial Sequence
  MKO10088027_B_Gm13280
  gRNA
catttgtatcaagagtgtca

SEQ ID NO: 88028 - DNA, 20 bp, Artificial Sequence
  MKO10088028_B_Gm13280
  gRNA
tgacactcttgatacaaatg

SEQ ID NO: 88029 - DNA, 20 bp, Artificial Sequence
  MKO10088029_B_Gm13280
  gRNA
tcatcacagccagaaccatc

SEQ ID NO: 88030 - DNA, 20 bp, Artificial Sequence
  MKO10088030_B_Gm13283
  gRNA
gctgcctgtgcatctattcc

SEQ ID NO: 88031 - DNA, 20 bp, Artificial Sequence
  MKO10088031_B_Gm13283
  gRNA
ggaggacctgcctgaggctc

SEQ ID NO: 88032 - DNA, 20 bp, Artificial Sequence
  MKO10088032_B_Gm13283
  gRNA
gcagagctgcctggcacgag

SEQ ID NO: 88033 - DNA, 20 bp, Artificial Sequence
  MKO10088033_B_Gm13285
  gRNA
gcagagctgcctggcacgag

SEQ ID NO: 88034 - DNA, 20 bp, Artificial Sequence
  MKO10088034_B_Gm13285
  gRNA
gtggtttctcccagagtcat

SEQ ID NO: 88035 - DNA, 20 bp, Artificial Sequence
  MKO10088035_B_Gm13285
  gRNA
accagctactatctagcctg

SEQ ID NO: 88036 - DNA, 20 bp, Artificial Sequence
  MKO10088036_B_Gm13286
  gRNA
gggcctcatctcgcagacag

SEQ ID NO: 88037 - DNA, 20 bp, Artificial Sequence
  MKO10088037_B_Gm13286
  gRNA
gctgcctgtgcatctattcc

SEQ ID NO: 88038 - DNA, 20 bp, Artificial Sequence
  MKO10088038_B_Gm13286
  gRNA
ggaggacatgcctgagggtc

SEQ ID NO: 88039 - DNA, 20 bp, Artificial Sequence
  MKO10088039_B_Gm13287
  gRNA
gcagagctgcctggcacgag

SEQ ID NO: 88040 - DNA, 20 bp, Artificial Sequence
  MKO10088040_B_Gm13287
  gRNA
gtggtttctcccagagtcat

SEQ ID NO: 88041 - DNA, 20 bp, Artificial Sequence
  MKO10088041_B_Gm13287
  gRNA
accagctactatctagcctg

SEQ ID NO: 88042 - DNA, 20 bp, Artificial Sequence
  MKO10088042_B_Gm13288
  gRNA
gcagagctgcctggcacgag

SEQ ID NO: 88043 - DNA, 20 bp, Artificial Sequence
  MKO10088043_B_Gm13288
  gRNA
gtggtttctcccagagtcat

SEQ ID NO: 88044 - DNA, 20 bp, Artificial Sequence
  MKO10088044_B_Gm13288
  gRNA
accagctactatctagcctg

SEQ ID NO: 88045 - DNA, 20 bp, Artificial Sequence
  MKO10088045_B_Gm13289
  gRNA
gcagagctgcctggcacgag

SEQ ID NO: 88046 - DNA, 20 bp, Artificial Sequence
  MKO10088046_B_Gm13289
  gRNA
gtggtttctcccagagtcat

SEQ ID NO: 88047 - DNA, 20 bp, Artificial Sequence
  MKO10088047_B_Gm13289
  gRNA
accagctactatctagcctg

SEQ ID NO: 88048 - DNA, 20 bp, Artificial Sequence
  MKO10088048_B_Gm13290
  gRNA
gcagagctgcctggcacgag

SEQ ID NO: 88049 - DNA, 20 bp, Artificial Sequence
  MKO10088049_B_Gm13290
  gRNA
gtggtttctcccagagtcat

SEQ ID NO: 88050 - DNA, 20 bp, Artificial Sequence
  MKO10088050_B_Gm13290
  gRNA
accagctactatctagcctg

SEQ ID NO: 88051 - DNA, 20 bp, Artificial Sequence
  MKO10088051_B_Gm13304
  gRNA
taccttgcaggcagtgatgg

SEQ ID NO: 88052 - DNA, 20 bp, Artificial Sequence
  MKO10088052_B_Gm13304
  gRNA
gcctcacctcttgcagccct

SEQ ID NO: 88053 - DNA, 20 bp, Artificial Sequence
  MKO10088053_B_Gm13304
  gRNA
caaccctcaggttcttaccc

SEQ ID NO: 88054 - DNA, 20 bp, Artificial Sequence
  MKO10088054_B_Gm13305
  gRNA
ctaactcacagcccagcttc

SEQ ID NO: 88055 - DNA, 20 bp, Artificial Sequence
  MKO10088055_B_Gm13305
  gRNA
tcctgaagtctcttgccaag

SEQ ID NO: 88056 - DNA, 20 bp, Artificial Sequence
  MKO10088056_B_Gm13305
  gRNA
acacatacctgtaggaagta

SEQ ID NO: 88057 - DNA, 20 bp, Artificial Sequence
  MKO10088057_B_Gm13306
  gRNA
gctgagtgagcatgatggag

SEQ ID NO: 88058 - DNA, 20 bp, Artificial Sequence
  MKO10088058_B_Gm13306
  gRNA
gcagagctcacacgacagcc

SEQ ID NO: 88059 - DNA, 20 bp, Artificial Sequence
  MKO10088059_B_Gm13306
  gRNA
atagacagccactcccaagc

SEQ ID NO: 88060 - DNA, 20 bp, Artificial Sequence
  MKO10088060_B_Gm13308
  gRNA
tgtctttgcaggatctactg

SEQ ID NO: 88061 - DNA, 20 bp, Artificial Sequence
  MKO10088061_B_Gm13308
  gRNA
actttaaatctttaatgcac

SEQ ID NO: 88062 - DNA, 20 bp, Artificial Sequence
  MKO10088062_B_Gm13308
  gRNA
cctacagctcggcgcacccc

SEQ ID NO: 88063 - DNA, 20 bp, Artificial Sequence
  MKO10088063_B_Gm13547
  gRNA
cgactaatgagatcagcatc

SEQ ID NO: 88064 - DNA, 20 bp, Artificial Sequence
  MKO10088064_B_Gm13547
  gRNA
ccttgtgtctgagataccac

SEQ ID NO: 88065 - DNA, 20 bp, Artificial Sequence
  MKO10088065_B_Gm13547
  gRNA
cctgtggtatctcagacaca

SEQ ID NO: 88066 - DNA, 20 bp, Artificial Sequence
  MKO10088066_B_Gm136
  gRNA
gtttcgagagactgtgttca

SEQ ID NO: 88067 - DNA, 20 bp, Artificial Sequence
  MKO10088067_B_Gm136
  gRNA
cacagctgcagaacagcgta

SEQ ID NO: 88068 - DNA, 20 bp, Artificial Sequence
  MKO10088068_B_Gm136
  gRNA
tcggatccagaggattatga

SEQ ID NO: 88069 - DNA, 20 bp, Artificial Sequence
  MKO10088069_B_Gm13718
  gRNA
tccccacaggaatctgaacc

SEQ ID NO: 88070 - DNA, 20 bp, Artificial Sequence
  MKO10088070_B_Gm13718
  gRNA
aaaaagaacgcacagttgta

SEQ ID NO: 88071 - DNA, 20 bp, Artificial Sequence
  MKO10088071_B_Gm13718
  gRNA
aaaacacaccactctgctgc

SEQ ID NO: 88072 - DNA, 20 bp, Artificial Sequence
  MKO10088072_B_Gm13769
  gRNA
gtgtacagtccttgtaggaa

SEQ ID NO: 88073 - DNA, 20 bp, Artificial Sequence
  MKO10088073_B_Gm13769
  gRNA
agcggaagatgagaagaact

SEQ ID NO: 88074 - DNA, 20 bp, Artificial Sequence
  MKO10088074_B_Gm13769
  gRNA
atcttccgcttgcccttctg

SEQ ID NO: 88075 - DNA, 20 bp, Artificial Sequence
  MKO10088075_B_Gm13826
  gRNA
acaccacacacacgcactgc

SEQ ID NO: 88076 - DNA, 20 bp, Artificial Sequence
  MKO10088076_B_Gm13826
  gRNA
gggaggctggcatccttgtg

SEQ ID NO: 88077 - DNA, 20 bp, Artificial Sequence
  MKO10088077_B_Gm13826
  gRNA
tctgcctgcctctgcctccc

SEQ ID NO: 88078 - DNA, 20 bp, Artificial Sequence
  MKO10088078_B_Gm13871
  gRNA
cacctggcacatagcctccc

SEQ ID NO: 88079 - DNA, 20 bp, Artificial Sequence
  MKO10088079_B_Gm13871
  gRNA
cactcaggtctttggtttga

SEQ ID NO: 88080 - DNA, 20 bp, Artificial Sequence
  MKO10088080_B_Gm13871
  gRNA
aatgtgcatacctggagaga

SEQ ID NO: 88081 - DNA, 20 bp, Artificial Sequence
  MKO10088081_B_Gm13889
  gRNA
accgcctcacagggccgagt

SEQ ID NO: 88082 - DNA, 20 bp, Artificial Sequence
  MKO10088082_B_Gm13889
  gRNA
gaccgatgagttcccgcagc

SEQ ID NO: 88083 - DNA, 20 bp, Artificial Sequence
  MKO10088083_B_Gm13889
  gRNA
cgctgtcgccgtgtaccccg

SEQ ID NO: 88084 - DNA, 20 bp, Artificial Sequence
  MKO10088084_B_Gm14085
  gRNA
tggttctcgacacagctcaa

SEQ ID NO: 88085 - DNA, 20 bp, Artificial Sequence
  MKO10088085_B_Gm14085
  gRNA
cgagaaccagccacaagatc

SEQ ID NO: 88086 - DNA, 20 bp, Artificial Sequence
  MKO10088086_B_Gm14085
  gRNA
aatgacccaagccatcctcc

SEQ ID NO: 88087 - DNA, 20 bp, Artificial Sequence
  MKO10088087_B_Gm14092
  gRNA
gatccttaaagtgcacaata

SEQ ID NO: 88088 - DNA, 20 bp, Artificial Sequence
  MKO10088088_B_Gm14092
  gRNA
gatgcaatttccactctacc

SEQ ID NO: 88089 - DNA, 20 bp, Artificial Sequence
  MKO10088089_B_Gm14092
  gRNA
tttccatattgtgcacttta

SEQ ID NO: 88090 - DNA, 20 bp, Artificial Sequence
  MKO10088090_B_Gm14124
  gRNA
atatttctagaagatatgaa

SEQ ID NO: 88091 - DNA, 20 bp, Artificial Sequence
  MKO10088091_B_Gm14124
  gRNA
tatagcagcgagattcctgt

SEQ ID NO: 88092 - DNA, 20 bp, Artificial Sequence
  MKO10088092_B_Gm14124
  gRNA
atgtgcatgtgaacttcact

SEQ ID NO: 88093 - DNA, 20 bp, Artificial Sequence
  MKO10088093_B_Gm14137
  gRNA
acggccggcgtctgcccttg

SEQ ID NO: 88094 - DNA, 20 bp, Artificial Sequence
  MKO10088094_B_Gm14137
  gRNA
gcggaaggagcctttccgcc

SEQ ID NO: 88095 - DNA, 20 bp, Artificial Sequence
  MKO10088095_B_Gm14137
  gRNA
gcatccccgagccaccctac

SEQ ID NO: 88096 - DNA, 20 bp, Artificial Sequence
  MKO10088096_B_Gm14139
  gRNA
tatgaattctttcttgtctt

SEQ ID NO: 88097 - DNA, 20 bp, Artificial Sequence
  MKO10088097_B_Gm14139
  gRNA
tccctcagagcacccagcag

SEQ ID NO: 88098 - DNA, 20 bp, Artificial Sequence
  MKO10088098_B_Gm14139
  gRNA
tctctacaaagaagtgatgc

SEQ ID NO: 88099 - DNA, 20 bp, Artificial Sequence
  MKO10088099_B_Gm14151
  gRNA
ctcacccttggcctccttcc

SEQ ID NO: 88100 - DNA, 20 bp, Artificial Sequence
  MKO10088100_B_Gm14151
  gRNA
aatgtaaagcttactgattt

SEQ ID NO: 88101 - DNA, 20 bp, Artificial Sequence
  MKO10088101_B_Gm14151
  gRNA
acccagctgtagtcacaatg

SEQ ID NO: 88102 - DNA, 20 bp, Artificial Sequence
  MKO10088102_B_Gm14288
  gRNA
ttccatgacttctagaagtt

SEQ ID NO: 88103 - DNA, 20 bp, Artificial Sequence
  MKO10088103_B_Gm14288
  gRNA
tctcagaagagtctctacaa

SEQ ID NO: 88104 - DNA, 20 bp, Artificial Sequence
  MKO10088104_B_Gm14288
  gRNA
gttcacatgcacgtcatcat

SEQ ID NO: 88105 - DNA, 20 bp, Artificial Sequence
  MKO10088105_B_Gm14295
  gRNA
actgggtttaggttacattt

SEQ ID NO: 88106 - DNA, 20 bp, Artificial Sequence
  MKO10088106_B_Gm14295
  gRNA
agtcacctatgatgacgtgc

SEQ ID NO: 88107 - DNA, 20 bp, Artificial Sequence
  MKO10088107_B_Gm14295
  gRNA
ttgtagagactcttctgaga

SEQ ID NO: 88108 - DNA, 20 bp, Artificial Sequence
  MKO10088108_B_Gm14305
  gRNA
gacttcgagaagtttgaaaa

SEQ ID NO: 88109 - DNA, 20 bp, Artificial Sequence
  MKO10088109_B_Gm14305
  gRNA
actgggtttaggttacattt

SEQ ID NO: 88110 - DNA, 20 bp, Artificial Sequence
  MKO10088110_B_Gm14305
  gRNA
ctcctgtatgtgttcgctta

SEQ ID NO: 88111 - DNA, 20 bp, Artificial Sequence
  MKO10088111_B_Gm14306
  gRNA
cgtgcatgtgaacttcactc

SEQ ID NO: 88112 - DNA, 20 bp, Artificial Sequence
  MKO10088112_B_Gm14306
  gRNA
ttccaagacttctagaagtt

SEQ ID NO: 88113 - DNA, 20 bp, Artificial Sequence
  MKO10088113_B_Gm14306
  gRNA
actgtgtttaggttacagtt

SEQ ID NO: 88114 - DNA, 20 bp, Artificial Sequence
  MKO10088114_B_Gm14308
  gRNA
gacttctagaagtttgaaaa

SEQ ID NO: 88115 - DNA, 20 bp, Artificial Sequence
  MKO10088115_B_Gm14308
  gRNA
ccctctgagtttattcaatg

SEQ ID NO: 88116 - DNA, 20 bp, Artificial Sequence
  MKO10088116_B_Gm14308
  gRNA
ctcctgtatatgttcgctta

SEQ ID NO: 88117 - DNA, 20 bp, Artificial Sequence
  MKO10088117_B_Gm14322
  gRNA
ttccatgacttctagaagtt

SEQ ID NO: 88118 - DNA, 20 bp, Artificial Sequence
  MKO10088118_B_Gm14322
  gRNA
actgggtttaggttacattt

SEQ ID NO: 88119 - DNA, 20 bp, Artificial Sequence
  MKO10088119_B_Gm14322
  gRNA
tatgtgtttgcttatgtatt

SEQ ID NO: 88120 - DNA, 20 bp, Artificial Sequence
  MKO10088120_B_Gm14325
  gRNA
cgtgcatgtgaactttactc

SEQ ID NO: 88121 - DNA, 20 bp, Artificial Sequence
  MKO10088121_B_Gm14325
  gRNA
cttcaaacttctagaagtca

SEQ ID NO: 88122 - DNA, 20 bp, Artificial Sequence
  MKO10088122_B_Gm14325
  gRNA
tgtgttctgcgtgactctac

SEQ ID NO: 88123 - DNA, 20 bp, Artificial Sequence
  MKO10088123_B_Gm14326
  gRNA
tatagctgtgagattcctat

SEQ ID NO: 88124 - DNA, 20 bp, Artificial Sequence
  MKO10088124_B_Gm14326
  gRNA
actgggtttaggttacattt

SEQ ID NO: 88125 - DNA, 20 bp, Artificial Sequence
  MKO10088125_B_Gm14326
  gRNA
gacttctagaagtttgaaaa

SEQ ID NO: 88126 - DNA, 20 bp, Artificial Sequence
  MKO10088126_B_Gm14345
  gRNA
aaatctgatcattaagaatg

SEQ ID NO: 88127 - DNA, 20 bp, Artificial Sequence
  MKO10088127_B_Gm14345
  gRNA
tgttatcaacatatgccatg

SEQ ID NO: 88128 - DNA, 20 bp, Artificial Sequence
  MKO10088128_B_Gm14345
  gRNA
ggatttgtcaataacacctc

SEQ ID NO: 88129 - DNA, 20 bp, Artificial Sequence
  MKO10088129_B_Gm14346
  gRNA
atcttgttcaagaatagttg

SEQ ID NO: 88130 - DNA, 20 bp, Artificial Sequence
  MKO10088130_B_Gm14346
  gRNA
ggatttgtcaataacacctc

SEQ ID NO: 88131 - DNA, 20 bp, Artificial Sequence
  MKO10088131_B_Gm14346
  gRNA
tgttatcaacatatgccatg

SEQ ID NO: 88132 - DNA, 20 bp, Artificial Sequence
  MKO10088132_B_Gm14347
  gRNA
aaatctgatcattaagaatg

SEQ ID NO: 88133 - DNA, 20 bp, Artificial Sequence
  MKO10088133_B_Gm14347
  gRNA
tgttatcaacatatgccatg

SEQ ID NO: 88134 - DNA, 20 bp, Artificial Sequence
  MKO10088134_B_Gm14347
  gRNA
ggatttgtcaataacacctc

SEQ ID NO: 88135 - DNA, 20 bp, Artificial Sequence
  MKO10088135_B_Gm14351
  gRNA
atcttgttcaagaatagttg

SEQ ID NO: 88136 - DNA, 20 bp, Artificial Sequence
  MKO10088136_B_Gm14351
  gRNA
ggatttgtcaataacacctc

SEQ ID NO: 88137 - DNA, 20 bp, Artificial Sequence
  MKO10088137_B_Gm14351
  gRNA
tgttatcaacatatgccatg

SEQ ID NO: 88138 - DNA, 20 bp, Artificial Sequence
  MKO10088138_B_Gm14374
  gRNA
aaatctgatcattaagaatg

SEQ ID NO: 88139 - DNA, 20 bp, Artificial Sequence
  MKO10088139_B_Gm14374
  gRNA
tgttatcaacatatgccatg

SEQ ID NO: 88140 - DNA, 20 bp, Artificial Sequence
  MKO10088140_B_Gm14374
  gRNA
ggatttgtcaataacacctc

SEQ ID NO: 88141 - DNA, 20 bp, Artificial Sequence
  MKO10088141_B_Gm14378
  gRNA
ggtctcgtctgcgcacactc

SEQ ID NO: 88142 - DNA, 20 bp, Artificial Sequence
  MKO10088142_B_Gm14378
  gRNA
gacgcgttccctcgccgcgc

SEQ ID NO: 88143 - DNA, 20 bp, Artificial Sequence
  MKO10088143_B_Gm14378
  gRNA
ctgtccgccggaacctccag

SEQ ID NO: 88144 - DNA, 20 bp, Artificial Sequence
  MKO10088144_B_Gm14391
  gRNA
gacttctagaagtttgaaaa

SEQ ID NO: 88145 - DNA, 20 bp, Artificial Sequence
  MKO10088145_B_Gm14391
  gRNA
ccctctgagtttattcaatg

SEQ ID NO: 88146 - DNA, 20 bp, Artificial Sequence
  MKO10088146_B_Gm14391
  gRNA
accatactagttacattcat

SEQ ID NO: 88147 - DNA, 20 bp, Artificial Sequence
  MKO10088147_B_Gm14393
  gRNA
ttccatgacttctagaagtt

SEQ ID NO: 88148 - DNA, 20 bp, Artificial Sequence
  MKO10088148_B_Gm14393
  gRNA
ccctctgagtttattcaatg

SEQ ID NO: 88149 - DNA, 20 bp, Artificial Sequence
  MKO10088149_B_Gm14393
  gRNA
catatgagagttgtagtcaa

SEQ ID NO: 88150 - DNA, 20 bp, Artificial Sequence
  MKO10088150_B_Gm14420
  gRNA
cgtgcatgtgaacttcactc

SEQ ID NO: 88151 - DNA, 20 bp, Artificial Sequence
  MKO10088151_B_Gm14420
  gRNA
ttccatgacttctagaagtt

SEQ ID NO: 88152 - DNA, 20 bp, Artificial Sequence
  MKO10088152_B_Gm14420
  gRNA
actgtgtttaggttacagtt

SEQ ID NO: 88153 - DNA, 20 bp, Artificial Sequence
  MKO10088153_B_Gm14430
  gRNA
tatagctgtgagattcttat

SEQ ID NO: 88154 - DNA, 20 bp, Artificial Sequence
  MKO10088154_B_Gm14430
  gRNA
tactgggtttaggttacatt

SEQ ID NO: 88155 - DNA, 20 bp, Artificial Sequence
  MKO10088155_B_Gm14430
  gRNA
gacttctagaagtttgaaaa

SEQ ID NO: 88156 - DNA, 20 bp, Artificial Sequence
  MKO10088156_B_Gm14431
  gRNA
cgtgcatgtgaacttcactc

SEQ ID NO: 88157 - DNA, 20 bp, Artificial Sequence
  MKO10088157_B_Gm14431
  gRNA
ttccatgacttctagaagtt

SEQ ID NO: 88158 - DNA, 20 bp, Artificial Sequence
  MKO10088158_B_Gm14431
  gRNA
actgtgtttaggttacagtt

SEQ ID NO: 88159 - DNA, 20 bp, Artificial Sequence
  MKO10088159_B_Gm14434
  gRNA
gacttctagaagtttgaaaa

SEQ ID NO: 88160 - DNA, 20 bp, Artificial Sequence
  MKO10088160_B_Gm14434
  gRNA
ccctctgagtttattcaatg

SEQ ID NO: 88161 - DNA, 20 bp, Artificial Sequence
  MKO10088161_B_Gm14434
  gRNA
ctcctgtatatgttcgctta

SEQ ID NO: 88162 - DNA, 20 bp, Artificial Sequence
  MKO10088162_B_Gm14436
  gRNA
cgtgcatgtgaacttcactc

SEQ ID NO: 88163 - DNA, 20 bp, Artificial Sequence
  MKO10088163_B_Gm14436
  gRNA
ttccaagacttctagaagtt

SEQ ID NO: 88164 - DNA, 20 bp, Artificial Sequence
  MKO10088164_B_Gm14436
  gRNA
actgtgtttaggttacagtt

SEQ ID NO: 88165 - DNA, 20 bp, Artificial Sequence
  MKO10088165_B_Gm14440
  gRNA
accacatggcttgcaaacat

SEQ ID NO: 88166 - DNA, 20 bp, Artificial Sequence
  MKO10088166_B_Gm14440
  gRNA
actgtgtttaggttacagtt

SEQ ID NO: 88167 - DNA, 20 bp, Artificial Sequence
  MKO10088167_B_Gm14440
  gRNA
cgctatactacatctctatg

SEQ ID NO: 88168 - DNA, 20 bp, Artificial Sequence
  MKO10088168_B_Gm14446
  gRNA
ttctgagtcccagcaacgtg

SEQ ID NO: 88169 - DNA, 20 bp, Artificial Sequence
  MKO10088169_B_Gm14446
  gRNA
ttctgagtcccagcaacatg

SEQ ID NO: 88170 - DNA, 20 bp, Artificial Sequence
  MKO10088170_B_Gm14446
  gRNA
aagcctttacctcatgttgc

SEQ ID NO: 88171 - DNA, 20 bp, Artificial Sequence
  MKO10088171_B_Gm14458
  gRNA
cctgaccaacctgcgccaga

SEQ ID NO: 88172 - DNA, 20 bp, Artificial Sequence
  MKO10088172_B_Gm14458
  gRNA
agaaacgcttgaagttctcc

SEQ ID NO: 88173 - DNA, 20 bp, Artificial Sequence
  MKO10088173_B_Gm14458
  gRNA
tgccatcgacatgtactcgt

SEQ ID NO: 88174 - DNA, 20 bp, Artificial Sequence
  MKO10088174_B_Gm14459
  gRNA
catacttctctgatgaagag

SEQ ID NO: 88175 - DNA, 20 bp, Artificial Sequence
  MKO10088175_B_Gm14459
  gRNA
tacatcagaatgactgacct

SEQ ID NO: 88176 - DNA, 20 bp, Artificial Sequence
  MKO10088176_B_Gm14459
  gRNA
tctgtagatgaatgctttga

SEQ ID NO: 88177 - DNA, 20 bp, Artificial Sequence
  MKO10088177_B_Gm14461
  gRNA
gcacaagtgacagatttgac

SEQ ID NO: 88178 - DNA, 20 bp, Artificial Sequence
  MKO10088178_B_Gm14461
  gRNA
ctggtggtattccacttcca

SEQ ID NO: 88179 - DNA, 20 bp, Artificial Sequence
  MKO10088179_B_Gm14461
  gRNA
aatgttgcccaccgtgtgat

SEQ ID NO: 88180 - DNA, 20 bp, Artificial Sequence
  MKO10088180_B_Gm14474
  gRNA
aaaagaacccgctcccagag

SEQ ID NO: 88181 - DNA, 20 bp, Artificial Sequence
  MKO10088181_B_Gm14474
  gRNA
agctatgcgcttcctgccag

SEQ ID NO: 88182 - DNA, 20 bp, Artificial Sequence
  MKO10088182_B_Gm14474
  gRNA
tgtagatcgtttcctacgag

SEQ ID NO: 88183 - DNA, 20 bp, Artificial Sequence
  MKO10088183_B_Gm14475
  gRNA
aaaagaacccgctcccagag

SEQ ID NO: 88184 - DNA, 20 bp, Artificial Sequence
  MKO10088184_B_Gm14475
  gRNA
agctatgcgcttcctgccag

SEQ ID NO: 88185 - DNA, 20 bp, Artificial Sequence
  MKO10088185_B_Gm14475
  gRNA
tgtagatcgtttcctacgag

SEQ ID NO: 88186 - DNA, 20 bp, Artificial Sequence
  MKO10088186_B_Gm14476
  gRNA
aaaagaacccgctcccagag

SEQ ID NO: 88187 - DNA, 20 bp, Artificial Sequence
  MKO10088187_B_Gm14476
  gRNA
agctatgcgcttcctgccag

SEQ ID NO: 88188 - DNA, 20 bp, Artificial Sequence
  MKO10088188_B_Gm14476
  gRNA
tgtagatcgtttcctacgag

SEQ ID NO: 88189 - DNA, 20 bp, Artificial Sequence
  MKO10088189_B_Gm14477
  gRNA
aaaagaacccgctcccagag

SEQ ID NO: 88190 - DNA, 20 bp, Artificial Sequence
  MKO10088190_B_Gm14477
  gRNA
agctatgcgcttcctgccag

SEQ ID NO: 88191 - DNA, 20 bp, Artificial Sequence
  MKO10088191_B_Gm14477
  gRNA
tgtagatcgtttcctacgag

SEQ ID NO: 88192 - DNA, 20 bp, Artificial Sequence
  MKO10088192_B_Gm14478
  gRNA
aaaagaacccgctcccagag

SEQ ID NO: 88193 - DNA, 20 bp, Artificial Sequence
  MKO10088193_B_Gm14478
  gRNA
agctatgcgcttcctgccag

SEQ ID NO: 88194 - DNA, 20 bp, Artificial Sequence
  MKO10088194_B_Gm14478
  gRNA
tgtagatcgtttcctacgag

SEQ ID NO: 88195 - DNA, 20 bp, Artificial Sequence
  MKO10088195_B_Gm14479
  gRNA
aaaagaacccgctcccagag

SEQ ID NO: 88196 - DNA, 20 bp, Artificial Sequence
  MKO10088196_B_Gm14479
  gRNA
agctatgcgcttcctgccag

SEQ ID NO: 88197 - DNA, 20 bp, Artificial Sequence
  MKO10088197_B_Gm14479
  gRNA
tgtagatcgtttcctacgag

SEQ ID NO: 88198 - DNA, 20 bp, Artificial Sequence
  MKO10088198_B_Gm14482
  gRNA
aaaagaacccgctcccagag

SEQ ID NO: 88199 - DNA, 20 bp, Artificial Sequence
  MKO10088199_B_Gm14482
  gRNA
agctatgcgcttcctgccag

SEQ ID NO: 88200 - DNA, 20 bp, Artificial Sequence
  MKO10088200_B_Gm14482
  gRNA
tgtagatcgtttcctacgag

SEQ ID NO: 88201 - DNA, 20 bp, Artificial Sequence
  MKO10088201_B_Gm14483
  gRNA
aaaagaacccgctcccagag

SEQ ID NO: 88202 - DNA, 20 bp, Artificial Sequence
  MKO10088202_B_Gm14483
  gRNA
agctatgcgcttcctgccag

SEQ ID NO: 88203 - DNA, 20 bp, Artificial Sequence
  MKO10088203_B_Gm14483
  gRNA
tgtagatcgtttcctacgag

SEQ ID NO: 88204 - DNA, 20 bp, Artificial Sequence
  MKO10088204_B_Gm14484
  gRNA
aaaagaacccgctcccagag

SEQ ID NO: 88205 - DNA, 20 bp, Artificial Sequence
  MKO10088205_B_Gm14484
  gRNA
agctatgcgcttcctgccag

SEQ ID NO: 88206 - DNA, 20 bp, Artificial Sequence
  MKO10088206_B_Gm14484
  gRNA
tgtagatcgtttcctacgag

SEQ ID NO: 88207 - DNA, 20 bp, Artificial Sequence
  MKO10088207_B_Gm14496
  gRNA
aatggattcttcgatgccaa

SEQ ID NO: 88208 - DNA, 20 bp, Artificial Sequence
  MKO10088208_B_Gm14496
  gRNA
tatcttccttgctgaaaacc

SEQ ID NO: 88209 - DNA, 20 bp, Artificial Sequence
  MKO10088209_B_Gm14496
  gRNA
agtacatgtcatactacaca

SEQ ID NO: 88210 - DNA, 20 bp, Artificial Sequence
  MKO10088210_B_Gm14499
  gRNA
ctactttgaccgtgatgacg

SEQ ID NO: 88211 - DNA, 20 bp, Artificial Sequence
  MKO10088211_B_Gm14499
  gRNA
cctgaccaacctgcgccaga

SEQ ID NO: 88212 - DNA, 20 bp, Artificial Sequence
  MKO10088212_B_Gm14499
  gRNA
tcaaaaccaacatgaacatc

SEQ ID NO: 88213 - DNA, 20 bp, Artificial Sequence
  MKO10088213_B_Gm14501
  gRNA
aaaagaacccgctcccagag

SEQ ID NO: 88214 - DNA, 20 bp, Artificial Sequence
  MKO10088214_B_Gm14501
  gRNA
agctatgcgcttcctgccag

SEQ ID NO: 88215 - DNA, 20 bp, Artificial Sequence
  MKO10088215_B_Gm14501
  gRNA
tgtagatcgtttcctacgag

SEQ ID NO: 88216 - DNA, 20 bp, Artificial Sequence
  MKO10088216_B_Gm14511
  gRNA
tgaacatctctgcactggtc

SEQ ID NO: 88217 - DNA, 20 bp, Artificial Sequence
  MKO10088217_B_Gm14511
  gRNA
agaaacgcttgaagttctcc

SEQ ID NO: 88218 - DNA, 20 bp, Artificial Sequence
  MKO10088218_B_Gm14511
  gRNA
cctgaccaacctgcgccaga

SEQ ID NO: 88219 - DNA, 20 bp, Artificial Sequence
  MKO10088219_B_Gm14525
  gRNA
agaaaatgtaagtttctcag

SEQ ID NO: 88220 - DNA, 20 bp, Artificial Sequence
  MKO10088220_B_Gm14525
  gRNA
acgttctgtagagacaccaa

SEQ ID NO: 88221 - DNA, 20 bp, Artificial Sequence
  MKO10088221_B_Gm14525
  gRNA
aatccagtaactcatgatga

SEQ ID NO: 88222 - DNA, 20 bp, Artificial Sequence
  MKO10088222_B_Gm14548
  gRNA
cttctggagaccacagagtg

SEQ ID NO: 88223 - DNA, 20 bp, Artificial Sequence
  MKO10088223_B_Gm14548
  gRNA
caggactgactctgagcctc

SEQ ID NO: 88224 - DNA, 20 bp, Artificial Sequence
  MKO10088224_B_Gm14548
  gRNA
acacactcacctgtcagcac

SEQ ID NO: 88225 - DNA, 20 bp, Artificial Sequence
  MKO10088225_B_Gm14625
  gRNA
tagagacaccaatagaaaac

SEQ ID NO: 88226 - DNA, 20 bp, Artificial Sequence
  MKO10088226_B_Gm14625
  gRNA
gtatctccaactatttcttc

SEQ ID NO: 88227 - DNA, 20 bp, Artificial Sequence
  MKO10088227_B_Gm14625
  gRNA
gaaattcctgaagaaatagt

SEQ ID NO: 88228 - DNA, 20 bp, Artificial Sequence
  MKO10088228_B_Gm14632
  gRNA
agaaaacgtaagtttctcag

SEQ ID NO: 88229 - DNA, 20 bp, Artificial Sequence
  MKO10088229_B_Gm14632
  gRNA
acgttctgtagagacaccaa

SEQ ID NO: 88230 - DNA, 20 bp, Artificial Sequence
  MKO10088230_B_Gm14632
  gRNA
gtatctccaactacttcttc

SEQ ID NO: 88231 - DNA, 20 bp, Artificial Sequence
  MKO10088231_B_Gm14685
  gRNA
tctgcagagtatgtactctg

SEQ ID NO: 88232 - DNA, 20 bp, Artificial Sequence
  MKO10088232_B_Gm14685
  gRNA
ggccacttcttgcaaatgtc

SEQ ID NO: 88233 - DNA, 20 bp, Artificial Sequence
  MKO10088233_B_Gm14685
  gRNA
gagggaaccagcttgtttca

SEQ ID NO: 88234 - DNA, 20 bp, Artificial Sequence
  MKO10088234_B_Gm14692
  gRNA
aacttgtcagcatttataaa

SEQ ID NO: 88235 - DNA, 20 bp, Artificial Sequence
  MKO10088235_B_Gm14692
  gRNA
cccactgttgaaacaaagac

SEQ ID NO: 88236 - DNA, 20 bp, Artificial Sequence
  MKO10088236_B_Gm14692
  gRNA
tccagtctttgtttcaacag

SEQ ID NO: 88237 - DNA, 20 bp, Artificial Sequence
  MKO10088237_B_Gm14725
  gRNA
agatcttaatttactgccac

SEQ ID NO: 88238 - DNA, 20 bp, Artificial Sequence
  MKO10088238_B_Gm14725
  gRNA
aacaactgtcttagaaagtc

SEQ ID NO: 88239 - DNA, 20 bp, Artificial Sequence
  MKO10088239_B_Gm14725
  gRNA
ggtttatgtgtagcctgagt

SEQ ID NO: 88240 - DNA, 20 bp, Artificial Sequence
  MKO10088240_B_Gm14743
  gRNA
attgacaagatagagacgag

SEQ ID NO: 88241 - DNA, 20 bp, Artificial Sequence
  MKO10088241_B_Gm14743
  gRNA
tgctcattgaccacagtcac

SEQ ID NO: 88242 - DNA, 20 bp, Artificial Sequence
  MKO10088242_B_Gm14743
  gRNA
ttgcttatacccagtgactg

SEQ ID NO: 88243 - DNA, 20 bp, Artificial Sequence
  MKO10088243_B_Gm14744
  gRNA
ccttgtccgcagctatgtaa

SEQ ID NO: 88244 - DNA, 20 bp, Artificial Sequence
  MKO10088244_B_Gm14744
  gRNA
gtgtcagacacacactgttg

SEQ ID NO: 88245 - DNA, 20 bp, Artificial Sequence
  MKO10088245_B_Gm14744
  gRNA
gagaaaaacaagaagatggg

SEQ ID NO: 88246 - DNA, 20 bp, Artificial Sequence
  MKO10088246_B_Gm14781
  gRNA
tcctcaaaaagatgagtctc

SEQ ID NO: 88247 - DNA, 20 bp, Artificial Sequence
  MKO10088247_B_Gm14781
  gRNA
taaataaaatgcttcctccc

SEQ ID NO: 88248 - DNA, 20 bp, Artificial Sequence
  MKO10088248_B_Gm14781
  gRNA
ggcaggggtttaccaaaaac

SEQ ID NO: 88249 - DNA, 20 bp, Artificial Sequence
  MKO10088249_B_Gm14819
  gRNA
agaaaacgtaagtttctcag

SEQ ID NO: 88250 - DNA, 20 bp, Artificial Sequence
  MKO10088250_B_Gm14819
  gRNA
acgttctgtagagacaccaa

SEQ ID NO: 88251 - DNA, 20 bp, Artificial Sequence
  MKO10088251_B_Gm14819
  gRNA
gtatctccaactacttcttc

SEQ ID NO: 88252 - DNA, 20 bp, Artificial Sequence
  MKO10088252_B_Gm14850
  gRNA
atatgctattgtagaataag

SEQ ID NO: 88253 - DNA, 20 bp, Artificial Sequence
  MKO10088253_B_Gm14850
  gRNA
caaaagagatagacacagcc

SEQ ID NO: 88254 - DNA, 20 bp, Artificial Sequence
  MKO10088254_B_Gm14850
  gRNA
agatgaagagactaatactg

SEQ ID NO: 88255 - DNA, 20 bp, Artificial Sequence
  MKO10088255_B_Gm14851
  gRNA
agagccttctgtgcctccaa

SEQ ID NO: 88256 - DNA, 20 bp, Artificial Sequence
  MKO10088256_B_Gm14851
  gRNA
agatgaagagactaaaactg

SEQ ID NO: 88257 - DNA, 20 bp, Artificial Sequence
  MKO10088257_B_Gm14851
  gRNA
acagcctggtcctcttcctc

SEQ ID NO: 88258 - DNA, 20 bp, Artificial Sequence
  MKO10088258_B_Gm14920
  gRNA
tgcaaagatcagctcagctc

SEQ ID NO: 88259 - DNA, 20 bp, Artificial Sequence
  MKO10088259_B_Gm14920
  gRNA
gctagtagctagcgatgagc

SEQ ID NO: 88260 - DNA, 20 bp, Artificial Sequence
  MKO10088260_B_Gm14920
  gRNA
aggccaccatgccaaggaac

SEQ ID NO: 88261 - DNA, 20 bp, Artificial Sequence
  MKO10088261_B_Gm15023
  gRNA
gagtcgtatgaaccacctga

SEQ ID NO: 88262 - DNA, 20 bp, Artificial Sequence
  MKO10088262_B_Gm15023
  gRNA
cagagtactatctgctgatt

SEQ ID NO: 88263 - DNA, 20 bp, Artificial Sequence
  MKO10088263_B_Gm15023
  gRNA
aatgccacctcccatagcaa

SEQ ID NO: 88264 - DNA, 20 bp, Artificial Sequence
  MKO10088264_B_Gm15056
  gRNA
tgtatgagaaccatgacctg

SEQ ID NO: 88265 - DNA, 20 bp, Artificial Sequence
  MKO10088265_B_Gm15056
  gRNA
gagaaggtaaagtaatttca

SEQ ID NO: 88266 - DNA, 20 bp, Artificial Sequence
  MKO10088266_B_Gm15056
  gRNA
ccatggcttgagaaatcaag

SEQ ID NO: 88267 - DNA, 20 bp, Artificial Sequence
  MKO10088267_B_Gm15070
  gRNA
cctagacctcagctaattcc

SEQ ID NO: 88268 - DNA, 20 bp, Artificial Sequence
  MKO10088268_B_Gm15070
  gRNA
ttcttacctggaattagctg

SEQ ID NO: 88269 - DNA, 20 bp, Artificial Sequence
  MKO10088269_B_Gm15070
  gRNA
ggttgttgcaggagcatttg

SEQ ID NO: 88270 - DNA, 20 bp, Artificial Sequence
  MKO10088270_B_Gm15080
  gRNA
tcacttaccagatgaagtag

SEQ ID NO: 88271 - DNA, 20 bp, Artificial Sequence
  MKO10088271_B_Gm15080
  gRNA
caggacacagacgtgacagt

SEQ ID NO: 88272 - DNA, 20 bp, Artificial Sequence
  MKO10088272_B_Gm15080
  gRNA
tgtttctacctgtcaatttc

SEQ ID NO: 88273 - DNA, 20 bp, Artificial Sequence
  MKO10088273_B_Gm15085
  gRNA
caggacacagacgtgacagt

SEQ ID NO: 88274 - DNA, 20 bp, Artificial Sequence
  MKO10088274_B_Gm15085
  gRNA
tgtttctacctgtcaatttc

SEQ ID NO: 88275 - DNA, 20 bp, Artificial Sequence
  MKO10088275_B_Gm15085
  gRNA
tcaacctagaaagtctaaca

SEQ ID NO: 88276 - DNA, 20 bp, Artificial Sequence
  MKO10088276_B_Gm15091
  gRNA
tcacttaccagatgaagtag

SEQ ID NO: 88277 - DNA, 20 bp, Artificial Sequence
  MKO10088277_B_Gm15091
  gRNA
caggacacagacgtgacagt

SEQ ID NO: 88278 - DNA, 20 bp, Artificial Sequence
  MKO10088278_B_Gm15091
  gRNA
tgtttctacctgacaatttc

SEQ ID NO: 88279 - DNA, 20 bp, Artificial Sequence
  MKO10088279_B_Gm15093
  gRNA
caggacacagacgtgacagt

SEQ ID NO: 88280 - DNA, 20 bp, Artificial Sequence
  MKO10088280_B_Gm15093
  gRNA
tgtttctacctgtcaatttc

SEQ ID NO: 88281 - DNA, 20 bp, Artificial Sequence
  MKO10088281_B_Gm15093
  gRNA
tcaacctagaaagtctaaca

SEQ ID NO: 88282 - DNA, 20 bp, Artificial Sequence
  MKO10088282_B_Gm15097
  gRNA
ttctgaagaagaatacaatg

SEQ ID NO: 88283 - DNA, 20 bp, Artificial Sequence
  MKO10088283_B_Gm15097
  gRNA
tcacttaccagatgaagtag

SEQ ID NO: 88284 - DNA, 20 bp, Artificial Sequence
  MKO10088284_B_Gm15097
  gRNA
caggacacagacgtgacagt

SEQ ID NO: 88285 - DNA, 20 bp, Artificial Sequence
  MKO10088285_B_Gm15104
  gRNA
tgccgccactgccagatgtg

SEQ ID NO: 88286 - DNA, 20 bp, Artificial Sequence
  MKO10088286_B_Gm15104
  gRNA
gttaccccataaagctgaca

SEQ ID NO: 88287 - DNA, 20 bp, Artificial Sequence
  MKO10088287_B_Gm15104
  gRNA
atatggtgtcttgcacaaga

SEQ ID NO: 88288 - DNA, 20 bp, Artificial Sequence
  MKO10088288_B_Gm15107
  gRNA
caggacacagacgtgacagt

SEQ ID NO: 88289 - DNA, 20 bp, Artificial Sequence
  MKO10088289_B_Gm15107
  gRNA
tgtttctacctgtcaatttc

SEQ ID NO: 88290 - DNA, 20 bp, Artificial Sequence
  MKO10088290_B_Gm15107
  gRNA
tcaacctagaaagtctaaca

SEQ ID NO: 88291 - DNA, 20 bp, Artificial Sequence
  MKO10088291_B_Gm15114
  gRNA
ttctgaagaagaatacaatg

SEQ ID NO: 88292 - DNA, 20 bp, Artificial Sequence
  MKO10088292_B_Gm15114
  gRNA
tcacttaccagatgaagtag

SEQ ID NO: 88293 - DNA, 20 bp, Artificial Sequence
  MKO10088293_B_Gm15114
  gRNA
caggacacagacgtgacagt

SEQ ID NO: 88294 - DNA, 20 bp, Artificial Sequence
  MKO10088294_B_Gm15127
  gRNA
ttctgaagaagaatacaatg

SEQ ID NO: 88295 - DNA, 20 bp, Artificial Sequence
  MKO10088295_B_Gm15127
  gRNA
tcacttaccagatgaagtag

SEQ ID NO: 88296 - DNA, 20 bp, Artificial Sequence
  MKO10088296_B_Gm15127
  gRNA
caggacacagacgtgacagt

SEQ ID NO: 88297 - DNA, 20 bp, Artificial Sequence
  MKO10088297_B_Gm15140
  gRNA
tatcacttcacgcatctaga

SEQ ID NO: 88298 - DNA, 20 bp, Artificial Sequence
  MKO10088298_B_Gm15140
  gRNA
acacagaaaaccagaaccac

SEQ ID NO: 88299 - DNA, 20 bp, Artificial Sequence
  MKO10088299_B_Gm15140
  gRNA
aacaagcaaacatttaactg

SEQ ID NO: 88300 - DNA, 20 bp, Artificial Sequence
  MKO10088300_B_Gm1527
  gRNA
cacaagaacagaaagatcag

SEQ ID NO: 88301 - DNA, 20 bp, Artificial Sequence
  MKO10088301_B_Gm1527
  gRNA
tcacatacactgtcacaggt

SEQ ID NO: 88302 - DNA, 20 bp, Artificial Sequence
  MKO10088302_B_Gm1527
  gRNA
cttacacgcattcttatcat

SEQ ID NO: 88303 - DNA, 20 bp, Artificial Sequence
  MKO10088303_B_Gm15284
  gRNA
gtctccagcgttgagagatc

SEQ ID NO: 88304 - DNA, 20 bp, Artificial Sequence
  MKO10088304_B_Gm15284
  gRNA
caaaagagacagacacagcc

SEQ ID NO: 88305 - DNA, 20 bp, Artificial Sequence
  MKO10088305_B_Gm15284
  gRNA
agatgaagagactaaaactg

SEQ ID NO: 88306 - DNA, 20 bp, Artificial Sequence
  MKO10088306_B_Gm15292
  gRNA
gtccccagcgttgagagatc

SEQ ID NO: 88307 - DNA, 20 bp, Artificial Sequence
  MKO10088307_B_Gm15292
  gRNA
tcttgaagatcagagccttc

SEQ ID NO: 88308 - DNA, 20 bp, Artificial Sequence
  MKO10088308_B_Gm15292
  gRNA
agatgaagagactaatactg

SEQ ID NO: 88309 - DNA, 20 bp, Artificial Sequence
  MKO10088309_B_Gm15293
  gRNA
atatgctattgtagaataag

SEQ ID NO: 88310 - DNA, 20 bp, Artificial Sequence
  MKO10088310_B_Gm15293
  gRNA
catgaagagcagacccttct

SEQ ID NO: 88311 - DNA, 20 bp, Artificial Sequence
  MKO10088311_B_Gm15293
  gRNA
cctctctgcccttgtcctgc

SEQ ID NO: 88312 - DNA, 20 bp, Artificial Sequence
  MKO10088312_B_Gm15299
  gRNA
atatgctattgtagaacaag

SEQ ID NO: 88313 - DNA, 20 bp, Artificial Sequence
  MKO10088313_B_Gm15299
  gRNA
cctctctgcccttgccctgc

SEQ ID NO: 88314 - DNA, 20 bp, Artificial Sequence
  MKO10088314_B_Gm15299
  gRNA
caaaggagacagaaacagct

SEQ ID NO: 88315 - DNA, 20 bp, Artificial Sequence
  MKO10088315_B_Gm15308
  gRNA
ctgatatgctattgtagaaa

SEQ ID NO: 88316 - DNA, 20 bp, Artificial Sequence
  MKO10088316_B_Gm15308
  gRNA
caaaggagacagacacagcc

SEQ ID NO: 88317 - DNA, 20 bp, Artificial Sequence
  MKO10088317_B_Gm15308
  gRNA
tcctatccaaaacacagatg

SEQ ID NO: 88318 - DNA, 20 bp, Artificial Sequence
  MKO10088318_B_Gm15315
  gRNA
atatgctattgtagaataag

SEQ ID NO: 88319 - DNA, 20 bp, Artificial Sequence
  MKO10088319_B_Gm15315
  gRNA
caaaggagatagacacagcc

SEQ ID NO: 88320 - DNA, 20 bp, Artificial Sequence
  MKO10088320_B_Gm15315
  gRNA
agatgaagagactaatactg

SEQ ID NO: 88321 - DNA, 20 bp, Artificial Sequence
  MKO10088321_B_Gm15319
  gRNA
ggccacccaacgagacaatg

SEQ ID NO: 88322 - DNA, 20 bp, Artificial Sequence
  MKO10088322_B_Gm15319
  gRNA
caatgtctacgttgtgctca

SEQ ID NO: 88323 - DNA, 20 bp, Artificial Sequence
  MKO10088323_B_Gm15319
  gRNA
atttgaacagaaacctgaaa

SEQ ID NO: 88324 - DNA, 20 bp, Artificial Sequence
  MKO10088324_B_Gm15386
  gRNA
gaaaaatagatgaaacttca

SEQ ID NO: 88325 - DNA, 20 bp, Artificial Sequence
  MKO10088325_B_Gm15386
  gRNA
atttctttctgcataagacc

SEQ ID NO: 88326 - DNA, 20 bp, Artificial Sequence
  MKO10088326_B_Gm15386
  gRNA
tacatgcaacagtgagttcc

SEQ ID NO: 88327 - DNA, 20 bp, Artificial Sequence
  MKO10088327_B_Gm15455
  gRNA
agagccctccctcgacagcc

SEQ ID NO: 88328 - DNA, 20 bp, Artificial Sequence
  MKO10088328_B_Gm15455
  gRNA
tcccagctctgccttaccac

SEQ ID NO: 88329 - DNA, 20 bp, Artificial Sequence
  MKO10088329_B_Gm15455
  gRNA
gagcaaagtgcagagatccg

SEQ ID NO: 88330 - DNA, 20 bp, Artificial Sequence
  MKO10088330_B_Gm1553
  gRNA
cgtctactgataatgtcttt

SEQ ID NO: 88331 - DNA, 20 bp, Artificial Sequence
  MKO10088331_B_Gm1553
  gRNA
gattattctgtattcacttc

SEQ ID NO: 88332 - DNA, 20 bp, Artificial Sequence
  MKO10088332_B_Gm1553
  gRNA
atccactccaaacactgttt

SEQ ID NO: 88333 - DNA, 20 bp, Artificial Sequence
  MKO10088333_B_Gm1564
  gRNA
agaccaattaaaacccgtag

SEQ ID NO: 88334 - DNA, 20 bp, Artificial Sequence
  MKO10088334_B_Gm1564
  gRNA
tcgtctccgtaagtagacca

SEQ ID NO: 88335 - DNA, 20 bp, Artificial Sequence
  MKO10088335_B_Gm1564
  gRNA
acgaagacaatgtagaccta

SEQ ID NO: 88336 - DNA, 20 bp, Artificial Sequence
  MKO10088336_B_Gm156
  gRNA
tgaggcatcctgcaaagtcc

SEQ ID NO: 88337 - DNA, 20 bp, Artificial Sequence
  MKO10088337_B_Gm156
  gRNA
agaatgtactacttccattg

SEQ ID NO: 88338 - DNA, 20 bp, Artificial Sequence
  MKO10088338_B_Gm156
  gRNA
gcgcataagtgttgtgatcc

SEQ ID NO: 88339 - DNA, 20 bp, Artificial Sequence
  MKO10088339_B_Gm15800
  gRNA
gccgctgtctcaccgcagat

SEQ ID NO: 88340 - DNA, 20 bp, Artificial Sequence
  MKO10088340_B_Gm15800
  gRNA
gtgtttgcccccaagcaaac

SEQ ID NO: 88341 - DNA, 20 bp, Artificial Sequence
  MKO10088341_B_Gm15800
  gRNA
ggatccccatcctgtttgct

SEQ ID NO: 88342 - DNA, 20 bp, Artificial Sequence
  MKO10088342_B_Gm15816
  gRNA
atctttcttacagtggcagc

SEQ ID NO: 88343 - DNA, 20 bp, Artificial Sequence
  MKO10088343_B_Gm15816
  gRNA
gtcaggaggttgtaagtttc

SEQ ID NO: 88344 - DNA, 20 bp, Artificial Sequence
  MKO10088344_B_Gm15816
  gRNA
tattctgaagctcatccccc

SEQ ID NO: 88345 - DNA, 20 bp, Artificial Sequence
  MKO10088345_B_Gm1587
  gRNA
gaaccccaccaccctgtgta

SEQ ID NO: 88346 - DNA, 20 bp, Artificial Sequence
  MKO10088346_B_Gm1587
  gRNA
ttggctgctcaatgagagcc

SEQ ID NO: 88347 - DNA, 20 bp, Artificial Sequence
  MKO10088347_B_Gm1587
  gRNA
agggcagcagcattcatccc

SEQ ID NO: 88348 - DNA, 20 bp, Artificial Sequence
  MKO10088348_B_Gm15881
  gRNA
atgaaccgcacataagtcat

SEQ ID NO: 88349 - DNA, 20 bp, Artificial Sequence
  MKO10088349_B_Gm15881
  gRNA
ccaccataatcaaagagtcc

SEQ ID NO: 88350 - DNA, 20 bp, Artificial Sequence
  MKO10088350_B_Gm15881
  gRNA
tcaaggcctggatatatcac

SEQ ID NO: 88351 - DNA, 20 bp, Artificial Sequence
  MKO10088351_B_Gm1604b
  gRNA
ctgttatcagaccgccgaag

SEQ ID NO: 88352 - DNA, 20 bp, Artificial Sequence
  MKO10088352_B_Gm1604b
  gRNA
tcctacctctgcggacgatg

SEQ ID NO: 88353 - DNA, 20 bp, Artificial Sequence
  MKO10088353_B_Gm1604b
  gRNA
agcctcctcatcgtccgcag

SEQ ID NO: 88354 - DNA, 20 bp, Artificial Sequence
  MKO10088354_B_Gm16130
  gRNA
tgcacagctgaggcgctacc

SEQ ID NO: 88355 - DNA, 20 bp, Artificial Sequence
  MKO10088355_B_Gm16130
  gRNA
atggcagtccagcccccaag

SEQ ID NO: 88356 - DNA, 20 bp, Artificial Sequence
  MKO10088356_B_Gm16130
  gRNA
ccggcgggccatgcagaaga

SEQ ID NO: 88357 - DNA, 20 bp, Artificial Sequence
  MKO10088357_B_Gm16367
  gRNA
atggttcttgaagtgggccc

SEQ ID NO: 88358 - DNA, 20 bp, Artificial Sequence
  MKO10088358_B_Gm16367
  gRNA
tttgctcaagtcactgtaga

SEQ ID NO: 88359 - DNA, 20 bp, Artificial Sequence
  MKO10088359_B_Gm16367
  gRNA
tggtgttgtgcatgtagccc

SEQ ID NO: 88360 - DNA, 20 bp, Artificial Sequence
  MKO10088360_B_Gm16381
  gRNA
catagtctcccagagacacg

SEQ ID NO: 88361 - DNA, 20 bp, Artificial Sequence
  MKO10088361_B_Gm16381
  gRNA
tgacttgaagaaactgatag

SEQ ID NO: 88362 - DNA, 20 bp, Artificial Sequence
  MKO10088362_B_Gm16381
  gRNA
taagaatgatcttattccag

SEQ ID NO: 88363 - DNA, 20 bp, Artificial Sequence
  MKO10088363_B_Gm16390
  gRNA
ctttcttcaaatttagacat

SEQ ID NO: 88364 - DNA, 20 bp, Artificial Sequence
  MKO10088364_B_Gm16390
  gRNA
ctatgtctaaatttgaagaa

SEQ ID NO: 88365 - DNA, 20 bp, Artificial Sequence
  MKO10088365_B_Gm16390
  gRNA
atgccgttgaaaaagtgcca

SEQ ID NO: 88366 - DNA, 20 bp, Artificial Sequence
  MKO10088366_B_Gm16404
  gRNA
tagagacaccaatagaaaac

SEQ ID NO: 88367 - DNA, 20 bp, Artificial Sequence
  MKO10088367_B_Gm16404
  gRNA
gtatctccaactatttcttc

SEQ ID NO: 88368 - DNA, 20 bp, Artificial Sequence
  MKO10088368_B_Gm16404
  gRNA
gaaattcctgaagaaatagt

SEQ ID NO: 88369 - DNA, 20 bp, Artificial Sequence
  MKO10088369_B_Gm16405
  gRNA
gaaattcctgaagaaatcgt

SEQ ID NO: 88370 - DNA, 20 bp, Artificial Sequence
  MKO10088370_B_Gm16405
  gRNA
cttgttgttcattgaaattc

SEQ ID NO: 88371 - DNA, 20 bp, Artificial Sequence
  MKO10088371_B_Gm16405
  gRNA
tacatttcagaagtttgata

SEQ ID NO: 88372 - DNA, 20 bp, Artificial Sequence
  MKO10088372_B_Gm16430
  gRNA
gaaattcctgaagaaatcgt

SEQ ID NO: 88373 - DNA, 20 bp, Artificial Sequence
  MKO10088373_B_Gm16430
  gRNA
cttgttgttcattgaaattc

SEQ ID NO: 88374 - DNA, 20 bp, Artificial Sequence
  MKO10088374_B_Gm16430
  gRNA
tacatttcagaagtttgata

SEQ ID NO: 88375 - DNA, 20 bp, Artificial Sequence
  MKO10088375_B_Gm16432
  gRNA
agacaacactacactgcaaa

SEQ ID NO: 88376 - DNA, 20 bp, Artificial Sequence
  MKO10088376_B_Gm16432
  gRNA
cttccatccaggaagtggaa

SEQ ID NO: 88377 - DNA, 20 bp, Artificial Sequence
  MKO10088377_B_Gm16432
  gRNA
attcttatatttgctacttg

SEQ ID NO: 88378 - DNA, 20 bp, Artificial Sequence
  MKO10088378_B_Gm16442
  gRNA
gcctacactgaatccagaag

SEQ ID NO: 88379 - DNA, 20 bp, Artificial Sequence
  MKO10088379_B_Gm16442
  gRNA
tagagcaagtgtcacaaaca

SEQ ID NO: 88380 - DNA, 20 bp, Artificial Sequence
  MKO10088380_B_Gm16442
  gRNA
gtgttattgtctgttatctg

SEQ ID NO: 88381 - DNA, 20 bp, Artificial Sequence
  MKO10088381_B_Gm16445
  gRNA
gttgtgcaatttgtgtcctt

SEQ ID NO: 88382 - DNA, 20 bp, Artificial Sequence
  MKO10088382_B_Gm16445
  gRNA
ttaatgtgagtctctaacac

SEQ ID NO: 88383 - DNA, 20 bp, Artificial Sequence
  MKO10088383_B_Gm16445
  gRNA
gcacttcaatgaaaagataa

SEQ ID NO: 88384 - DNA, 20 bp, Artificial Sequence
  MKO10088384_B_Gm16451
  gRNA
gcctacactgaatccagaag

SEQ ID NO: 88385 - DNA, 20 bp, Artificial Sequence
  MKO10088385_B_Gm16451
  gRNA
tagagcaagtgtcacaaaca

SEQ ID NO: 88386 - DNA, 20 bp, Artificial Sequence
  MKO10088386_B_Gm16451
  gRNA
gtgttattgtctgttatctg

SEQ ID NO: 88387 - DNA, 20 bp, Artificial Sequence
  MKO10088387_B_Gm1647
  gRNA
tcatgggctgttcagacttc

SEQ ID NO: 88388 - DNA, 20 bp, Artificial Sequence
  MKO10088388_B_Gm1647
  gRNA
agcatctgcagtcgtgactc

SEQ ID NO: 88389 - DNA, 20 bp, Artificial Sequence
  MKO10088389_B_Gm1647
  gRNA
gctgagattctgccgcatcc

SEQ ID NO: 88390 - DNA, 20 bp, Artificial Sequence
  MKO10088390_B_Gm16501
  gRNA
agccgtgtagatcgtttcct

SEQ ID NO: 88391 - DNA, 20 bp, Artificial Sequence
  MKO10088391_B_Gm16501
  gRNA
tgccaccttgtttgaagagt

SEQ ID NO: 88392 - DNA, 20 bp, Artificial Sequence
  MKO10088392_B_Gm16501
  gRNA
accacctgacacacatgctc

SEQ ID NO: 88393 - DNA, 20 bp, Artificial Sequence
  MKO10088393_B_Gm16515
  gRNA
ccacgcccacggtaagcatc

SEQ ID NO: 88394 - DNA, 20 bp, Artificial Sequence
  MKO10088394_B_Gm16515
  gRNA
atacttctggatgtaccagc

SEQ ID NO: 88395 - DNA, 20 bp, Artificial Sequence
  MKO10088395_B_Gm16515
  gRNA
cttcctccaccacgaagtcc

SEQ ID NO: 88396 - DNA, 20 bp, Artificial Sequence
  MKO10088396_B_Gm16532
  gRNA
ggagtggcatggcttctccc

SEQ ID NO: 88397 - DNA, 20 bp, Artificial Sequence
  MKO10088397_B_Gm16532
  gRNA
agacacagggactactgcct

SEQ ID NO: 88398 - DNA, 20 bp, Artificial Sequence
  MKO10088398_B_Gm16532
  gRNA
cctgagatagcccagtctct

SEQ ID NO: 88399 - DNA, 20 bp, Artificial Sequence
  MKO10088399_B_Gm1661
  gRNA
cgtagagaagatcaacgaag

SEQ ID NO: 88400 - DNA, 20 bp, Artificial Sequence
  MKO10088400_B_Gm1661
  gRNA
gcaggttctgctggaaacgt

SEQ ID NO: 88401 - DNA, 20 bp, Artificial Sequence
  MKO10088401_B_Gm1661
  gRNA
gtccccgaaagcccagcgac

SEQ ID NO: 88402 - DNA, 20 bp, Artificial Sequence
  MKO10088402_B_Gm166
  gRNA
tccatgacaaaagagaacgc

SEQ ID NO: 88403 - DNA, 20 bp, Artificial Sequence
  MKO10088403_B_Gm166
  gRNA
catccattctatgcacagac

SEQ ID NO: 88404 - DNA, 20 bp, Artificial Sequence
  MKO10088404_B_Gm166
  gRNA
tctccagtctgtgcatagaa

SEQ ID NO: 88405 - DNA, 20 bp, Artificial Sequence
  MKO10088405_B_Gm1673
  gRNA
gtatactcacccgtgcgtcc

SEQ ID NO: 88406 - DNA, 20 bp, Artificial Sequence
  MKO10088406_B_Gm1673
  gRNA
ctgagcggggacagcgctcc

SEQ ID NO: 88407 - DNA, 20 bp, Artificial Sequence
  MKO10088407_B_Gm1673
  gRNA
tcaggtccttgctgtcgcca

SEQ ID NO: 88408 - DNA, 20 bp, Artificial Sequence
  MKO10088408_B_Gm17019
  gRNA
ctggggcaaggccctaccac

SEQ ID NO: 88409 - DNA, 20 bp, Artificial Sequence
  MKO10088409_B_Gm17019
  gRNA
tgagctcctgcttgttctct

SEQ ID NO: 88410 - DNA, 20 bp, Artificial Sequence
  MKO10088410_B_Gm17019
  gRNA
cttacagtaacctgcacagc

SEQ ID NO: 88411 - DNA, 20 bp, Artificial Sequence
  MKO10088411_B_Gm17252
  gRNA
ctgaacagctggtaaagtac

SEQ ID NO: 88412 - DNA, 20 bp, Artificial Sequence
  MKO10088412_B_Gm17252
  gRNA
atgtactgcaacagcagaag

SEQ ID NO: 88413 - DNA, 20 bp, Artificial Sequence
  MKO10088413_B_Gm17252
  gRNA
gaagactttcccagccatac

SEQ ID NO: 88414 - DNA, 20 bp, Artificial Sequence
  MKO10088414_B_Gm17296
  gRNA
agaaggcgtgatccacttct

SEQ ID NO: 88415 - DNA, 20 bp, Artificial Sequence
  MKO10088415_B_Gm17296
  gRNA
gtttgaatgcgcagtgtcag

SEQ ID NO: 88416 - DNA, 20 bp, Artificial Sequence
  MKO10088416_B_Gm17296
  gRNA
tcaaacagcctgtttagctt

SEQ ID NO: 88417 - DNA, 20 bp, Artificial Sequence
  MKO10088417_B_Gm17359
  gRNA
tgtatcctagttgcttgttc

SEQ ID NO: 88418 - DNA, 20 bp, Artificial Sequence
  MKO10088418_B_Gm17359
  gRNA
tataaacacgagtacacctg

SEQ ID NO: 88419 - DNA, 20 bp, Artificial Sequence
  MKO10088419_B_Gm17359
  gRNA
ttcatagtcactcatattcc

SEQ ID NO: 88420 - DNA, 20 bp, Artificial Sequence
  MKO10088420_B_Gm17365
  gRNA
ctccctcttctacttcattg

SEQ ID NO: 88421 - DNA, 20 bp, Artificial Sequence
  MKO10088421_B_Gm17365
  gRNA
cagtcagaccactgcagaag

SEQ ID NO: 88422 - DNA, 20 bp, Artificial Sequence
  MKO10088422_B_Gm17365
  gRNA
cacccacaatgaagtagaag

SEQ ID NO: 88423 - DNA, 20 bp, Artificial Sequence
  MKO10088423_B_Gm17384
  gRNA
agctcatgtcattagttatc

SEQ ID NO: 88424 - DNA, 20 bp, Artificial Sequence
  MKO10088424_B_Gm17384
  gRNA
aactcctgcaggataactga

SEQ ID NO: 88425 - DNA, 20 bp, Artificial Sequence
  MKO10088425_B_Gm17384
  gRNA
actggtggacattactgaat

SEQ ID NO: 88426 - DNA, 20 bp, Artificial Sequence
  MKO10088426_B_Gm17455
  gRNA
cttacgacccctgccgcttc

SEQ ID NO: 88427 - DNA, 20 bp, Artificial Sequence
  MKO10088427_B_Gm17455
  gRNA
gagagcgtcgcagcgagccc

SEQ ID NO: 88428 - DNA, 20 bp, Artificial Sequence
  MKO10088428_B_Gm17455
  gRNA
ggatagcaggcctgcctcgt

SEQ ID NO: 88429 - DNA, 20 bp, Artificial Sequence
  MKO10088429_B_Gm17660
  gRNA
ctgttcactggaacttcctc

SEQ ID NO: 88430 - DNA, 20 bp, Artificial Sequence
  MKO10088430_B_Gm17660
  gRNA
cgacttaccagaggagcctg

SEQ ID NO: 88431 - DNA, 20 bp, Artificial Sequence
  MKO10088431_B_Gm17660
  gRNA
tttacctccagaagctgatt

SEQ ID NO: 88432 - DNA, 20 bp, Artificial Sequence
  MKO10088432_B_Gm17677
  gRNA
gcatgcaaagtcaggatatc

SEQ ID NO: 88433 - DNA, 20 bp, Artificial Sequence
  MKO10088433_B_Gm17677
  gRNA
gcagtagctttcattgcagc

SEQ ID NO: 88434 - DNA, 20 bp, Artificial Sequence
  MKO10088434_B_Gm17677
  gRNA
tttgtacaagtctcattcaa

SEQ ID NO: 88435 - DNA, 20 bp, Artificial Sequence
  MKO10088435_B_Gm17689
  gRNA
gtgaacaaatacattattag

SEQ ID NO: 88436 - DNA, 20 bp, Artificial Sequence
  MKO10088436_B_Gm17689
  gRNA
aaactggttacacaaagaac

SEQ ID NO: 88437 - DNA, 20 bp, Artificial Sequence
  MKO10088437_B_Gm17689
  gRNA
ctggcaaggagatgccaagc

SEQ ID NO: 88438 - DNA, 20 bp, Artificial Sequence
  MKO10088438_B_Gm17727
  gRNA
acaacagatgaatattacta

SEQ ID NO: 88439 - DNA, 20 bp, Artificial Sequence
  MKO10088439_B_Gm17727
  gRNA
agaacatgcactgccaaaga

SEQ ID NO: 88440 - DNA, 20 bp, Artificial Sequence
  MKO10088440_B_Gm17727
  gRNA
cttgtctgactgtgagattg

SEQ ID NO: 88441 - DNA, 20 bp, Artificial Sequence
  MKO10088441_B_Gm19345
  gRNA
gccaacatggggggtatcca

SEQ ID NO: 88442 - DNA, 20 bp, Artificial Sequence
  MKO10088442_B_Gm19345
  gRNA
ctcacctgcagcacggatgc

SEQ ID NO: 88443 - DNA, 20 bp, Artificial Sequence
  MKO10088443_B_Gm19345
  gRNA
tgcacgccagacatatgcca

SEQ ID NO: 88444 - DNA, 20 bp, Artificial Sequence
  MKO10088444_B_Gm19402
  gRNA
gcagcagagggtcatacagc

SEQ ID NO: 88445 - DNA, 20 bp, Artificial Sequence
  MKO10088445_B_Gm19402
  gRNA
actggagcagacagacatgg

SEQ ID NO: 88446 - DNA, 20 bp, Artificial Sequence
  MKO10088446_B_Gm19402
  gRNA
cagcttggctggcagctgct

SEQ ID NO: 88447 - DNA, 20 bp, Artificial Sequence
  MKO10088447_B_Gm1965
  gRNA
taggattgccttgagactac

SEQ ID NO: 88448 - DNA, 20 bp, Artificial Sequence
  MKO10088448_B_Gm1965
  gRNA
ctcgagttggtgatagaagt

SEQ ID NO: 88449 - DNA, 20 bp, Artificial Sequence
  MKO10088449_B_Gm1965
  gRNA
ccgcttcatattatagccca

SEQ ID NO: 88450 - DNA, 20 bp, Artificial Sequence
  MKO10088450_B_Gm19668
  gRNA
acaattgtctgcctgccatg

SEQ ID NO: 88451 - DNA, 20 bp, Artificial Sequence
  MKO10088451_B_Gm19668
  gRNA
tggctgacacctgctgcaca

SEQ ID NO: 88452 - DNA, 20 bp, Artificial Sequence
  MKO10088452_B_Gm19668
  gRNA
attactggagcagacagatg

SEQ ID NO: 88453 - DNA, 20 bp, Artificial Sequence
  MKO10088453_B_Gm1966
  gRNA
tacaaacatcagtgacgaag

SEQ ID NO: 88454 - DNA, 20 bp, Artificial Sequence
  MKO10088454_B_Gm1966
  gRNA
ccatctgctgaggcttagaa

SEQ ID NO: 88455 - DNA, 20 bp, Artificial Sequence
  MKO10088455_B_Gm1966
  gRNA
tggaaaacagtagagctgac

SEQ ID NO: 88456 - DNA, 20 bp, Artificial Sequence
  MKO10088456_B_Gm1979
  gRNA
ctggggccaggccctaccac

SEQ ID NO: 88457 - DNA, 20 bp, Artificial Sequence
  MKO10088457_B_Gm1979
  gRNA
tttccagtaacctgcacacc

SEQ ID NO: 88458 - DNA, 20 bp, Artificial Sequence
  MKO10088458_B_Gm1979
  gRNA
cctgatgttcttgagtctcc

SEQ ID NO: 88459 - DNA, 20 bp, Artificial Sequence
  MKO10088459_B_Gm1987
  gRNA
gcctcacctcttgcagccct

SEQ ID NO: 88460 - DNA, 20 bp, Artificial Sequence
  MKO10088460_B_Gm1987
  gRNA
gaacagacacagccctcaag

SEQ ID NO: 88461 - DNA, 20 bp, Artificial Sequence
  MKO10088461_B_Gm1987
  gRNA
acagcaggactgtcccctct

SEQ ID NO: 88462 - DNA, 20 bp, Artificial Sequence
  MKO10088462_B_Gm1993
  gRNA
agatgaacaagacagtatgt

SEQ ID NO: 88463 - DNA, 20 bp, Artificial Sequence
  MKO10088463_B_Gm1993
  gRNA
agaaaacgtaagtttctcag

SEQ ID NO: 88464 - DNA, 20 bp, Artificial Sequence
  MKO10088464_B_Gm1993
  gRNA
aatccagtaactcatgatga

SEQ ID NO: 88465 - DNA, 20 bp, Artificial Sequence
  MKO10088465_B_Gm2002
  gRNA
tacctggaggaccccaagct

SEQ ID NO: 88466 - DNA, 20 bp, Artificial Sequence
  MKO10088466_B_Gm2002
  gRNA
cacttacccagcactcactc

SEQ ID NO: 88467 - DNA, 20 bp, Artificial Sequence
  MKO10088467_B_Gm2002
  gRNA
cccgtgatgctgtgctgccc

SEQ ID NO: 88468 - DNA, 20 bp, Artificial Sequence
  MKO10088468_B_Gm2012
  gRNA
agatgaacaagacagtatgt

SEQ ID NO: 88469 - DNA, 20 bp, Artificial Sequence
  MKO10088469_B_Gm2012
  gRNA
acgttctgtagagacaccaa

SEQ ID NO: 88470 - DNA, 20 bp, Artificial Sequence
  MKO10088470_B_Gm2012
  gRNA
aatccagtaactcatgatga

SEQ ID NO: 88471 - DNA, 20 bp, Artificial Sequence
  MKO10088471_B_Gm2016
  gRNA
gaaatcgtgtttgatgatat

SEQ ID NO: 88472 - DNA, 20 bp, Artificial Sequence
  MKO10088472_B_Gm2016
  gRNA
atgttctggaagttctccat

SEQ ID NO: 88473 - DNA, 20 bp, Artificial Sequence
  MKO10088473_B_Gm2016
  gRNA
ggaggcaaaaacaggcgcag

SEQ ID NO: 88474 - DNA, 20 bp, Artificial Sequence
  MKO10088474_B_Gm20172
  gRNA
tagtgtgcttcaaatacccc

SEQ ID NO: 88475 - DNA, 20 bp, Artificial Sequence
  MKO10088475_B_Gm20172
  gRNA
tcgcttgcttatctttaagc

SEQ ID NO: 88476 - DNA, 20 bp, Artificial Sequence
  MKO10088476_B_Gm20172
  gRNA
tgtactcaccatatttagca

SEQ ID NO: 88477 - DNA, 20 bp, Artificial Sequence
  MKO10088477_B_Gm2022
  gRNA
gtgagtaccatcttctttga

SEQ ID NO: 88478 - DNA, 20 bp, Artificial Sequence
  MKO10088478_B_Gm2022
  gRNA
tgagcaatcttcaaagaact

SEQ ID NO: 88479 - DNA, 20 bp, Artificial Sequence
  MKO10088479_B_Gm2022
  gRNA
caacaagggctacaaatgaa

SEQ ID NO: 88480 - DNA, 20 bp, Artificial Sequence
  MKO10088480_B_Gm2030
  gRNA
agaaaacataagtttctcag

SEQ ID NO: 88481 - DNA, 20 bp, Artificial Sequence
  MKO10088481_B_Gm2030
  gRNA
acgttctgtagagacaccaa

SEQ ID NO: 88482 - DNA, 20 bp, Artificial Sequence
  MKO10088482_B_Gm2030
  gRNA
aatccagtaactcatgatga

SEQ ID NO: 88483 - DNA, 20 bp, Artificial Sequence
  MKO10088483_B_Gm2042
  gRNA
ttctttagaagaagtcacag

SEQ ID NO: 88484 - DNA, 20 bp, Artificial Sequence
  MKO10088484_B_Gm2042
  gRNA
cagccagcactgttctcaat

SEQ ID NO: 88485 - DNA, 20 bp, Artificial Sequence
  MKO10088485_B_Gm2042
  gRNA
gcaaactcagagtaattaat

SEQ ID NO: 88486 - DNA, 20 bp, Artificial Sequence
  MKO10088486_B_Gm20594
  gRNA
atttcagcctcttcactgaa

SEQ ID NO: 88487 - DNA, 20 bp, Artificial Sequence
  MKO10088487_B_Gm20594
  gRNA
aaattgacctttcagtgaag

SEQ ID NO: 88488 - DNA, 20 bp, Artificial Sequence
  MKO10088488_B_Gm20604
  gRNA
cgcgtctcccgacgcctcac

SEQ ID NO: 88489 - DNA, 20 bp, Artificial Sequence
  MKO10088489_B_Gm20604
  gRNA
gatccggacgacgctttgga

SEQ ID NO: 88490 - DNA, 20 bp, Artificial Sequence
  MKO10088490_B_Gm20604
  gRNA
gtactcgcccgaaagctcca

SEQ ID NO: 88491 - DNA, 20 bp, Artificial Sequence
  MKO10088491_B_Gm20736
  gRNA
tgcaaaatctttctaatttc

SEQ ID NO: 88492 - DNA, 20 bp, Artificial Sequence
  MKO10088492_B_Gm20736
  gRNA
cgcttcacataaagagaaaa

SEQ ID NO: 88493 - DNA, 20 bp, Artificial Sequence
  MKO10088493_B_Gm20736
  gRNA
tacatttcagaagtctgata

SEQ ID NO: 88494 - DNA, 20 bp, Artificial Sequence
  MKO10088494_B_Gm20738
  gRNA
tctgtctcctgatacagacc

SEQ ID NO: 88495 - DNA, 20 bp, Artificial Sequence
  MKO10088495_B_Gm20738
  gRNA
gttgtacctctctgcaaacc

SEQ ID NO: 88496 - DNA, 20 bp, Artificial Sequence
  MKO10088496_B_Gm20738
  gRNA
tcatatatatgaattcctga

SEQ ID NO: 88497 - DNA, 20 bp, Artificial Sequence
  MKO10088497_B_Gm20747
  gRNA
aacaaacccttctctttatt

SEQ ID NO: 88498 - DNA, 20 bp, Artificial Sequence
  MKO10088498_B_Gm20747
  gRNA
gaggtgctagaatccattca

SEQ ID NO: 88499 - DNA, 20 bp, Artificial Sequence
  MKO10088499_B_Gm20747
  gRNA
tgccaaccagtgcgcctgcg

SEQ ID NO: 88500 - DNA, 20 bp, Artificial Sequence
  MKO10088500_B_Gm20765
  gRNA
ctgagtaactgctagatcct

SEQ ID NO: 88501 - DNA, 20 bp, Artificial Sequence
  MKO10088501_B_Gm20765
  gRNA
gcctccaagtgtccatttct

SEQ ID NO: 88502 - DNA, 20 bp, Artificial Sequence
  MKO10088502_B_Gm20765
  gRNA
gctgtgcactatgatcgctg

SEQ ID NO: 88503 - DNA, 20 bp, Artificial Sequence
  MKO10088503_B_Gm20767
  gRNA
gcctttctcacttcttcttc

SEQ ID NO: 88504 - DNA, 20 bp, Artificial Sequence
  MKO10088504_B_Gm20767
  gRNA
cacactctcaaatacacaaa

SEQ ID NO: 88505 - DNA, 20 bp, Artificial Sequence
  MKO10088505_B_Gm20767
  gRNA
ctggatcttgcaacctgtga

SEQ ID NO: 88506 - DNA, 20 bp, Artificial Sequence
  MKO10088506_B_Gm20806
  gRNA
aggagctccacagcgatgag

SEQ ID NO: 88507 - DNA, 20 bp, Artificial Sequence
  MKO10088507_B_Gm20806
  gRNA
tgccaaccagtgcgcctgcg

SEQ ID NO: 88508 - DNA, 20 bp, Artificial Sequence
  MKO10088508_B_Gm20806
  gRNA
tgaggaaaaactactttgtg

SEQ ID NO: 88509 - DNA, 20 bp, Artificial Sequence
  MKO10088509_B_Gm20809
  gRNA
gttgtacctctctgcaaacc

SEQ ID NO: 88510 - DNA, 20 bp, Artificial Sequence
  MKO10088510_B_Gm20809
  gRNA
gacggaattgacagtgtcta

SEQ ID NO: 88511 - DNA, 20 bp, Artificial Sequence
  MKO10088511_B_Gm20809
  gRNA
tgaagaaaaactactttgtg

SEQ ID NO: 88512 - DNA, 20 bp, Artificial Sequence
  MKO10088512_B_Gm20815
  gRNA
tctatctcctgatacagacc

SEQ ID NO: 88513 - DNA, 20 bp, Artificial Sequence
  MKO10088513_B_Gm20815
  gRNA
gggcatgagattgagagtat

SEQ ID NO: 88514 - DNA, 20 bp, Artificial Sequence
  MKO10088514_B_Gm20815
  gRNA
cgggacatagatagaatctc

SEQ ID NO: 88515 - DNA, 20 bp, Artificial Sequence
  MKO10088515_B_Gm20816
  gRNA
gttgtacctctctgcaaacc

SEQ ID NO: 88516 - DNA, 20 bp, Artificial Sequence
  MKO10088516_B_Gm20816
  gRNA
agcccaggtgccattcttac

SEQ ID NO: 88517 - DNA, 20 bp, Artificial Sequence
  MKO10088517_B_Gm20816
  gRNA
taaaaatagtcctgtaagaa

SEQ ID NO: 88518 - DNA, 20 bp, Artificial Sequence
  MKO10088518_B_Gm20822
  gRNA
ttaaaatcctctcatcgctg

SEQ ID NO: 88519 - DNA, 20 bp, Artificial Sequence
  MKO10088519_B_Gm20822
  gRNA
aagatggctctgaggacaac

SEQ ID NO: 88520 - DNA, 20 bp, Artificial Sequence
  MKO10088520_B_Gm20822
  gRNA
tacttcaccaaataaagaga

SEQ ID NO: 88521 - DNA, 20 bp, Artificial Sequence
  MKO10088521_B_Gm20823
  gRNA
tgagttcactatcttcacag

SEQ ID NO: 88522 - DNA, 20 bp, Artificial Sequence
  MKO10088522_B_Gm20823
  gRNA
tctgtctcctgatacagacc

SEQ ID NO: 88523 - DNA, 20 bp, Artificial Sequence
  MKO10088523_B_Gm20823
  gRNA
taaaaatagtcctgtaagaa

SEQ ID NO: 88524 - DNA, 20 bp, Artificial Sequence
  MKO10088524_B_Gm20826
  gRNA
agttggacatccctcacctg

SEQ ID NO: 88525 - DNA, 20 bp, Artificial Sequence
  MKO10088525_B_Gm20826
  gRNA
aagatggctctgaggacaac

SEQ ID NO: 88526 - DNA, 20 bp, Artificial Sequence
  MKO10088526_B_Gm20826
  gRNA
ttaaaatcctctcatcgctg

SEQ ID NO: 88527 - DNA, 20 bp, Artificial Sequence
  MKO10088527_B_Gm20831
  gRNA
agctgataagcatagagagc

SEQ ID NO: 88528 - DNA, 20 bp, Artificial Sequence
  MKO10088528_B_Gm20831
  gRNA
taggtgatgtcacagagcac

SEQ ID NO: 88529 - DNA, 20 bp, Artificial Sequence
  MKO10088529_B_Gm20831
  gRNA
caaaagcttgaggaacaagt

SEQ ID NO: 88530 - DNA, 20 bp, Artificial Sequence
  MKO10088530_B_Gm2083
  gRNA
gtcagcaaccatagataatt

SEQ ID NO: 88531 - DNA, 20 bp, Artificial Sequence
  MKO10088531_B_Gm2083
  gRNA
agactatgataactttctta

SEQ ID NO: 88532 - DNA, 20 bp, Artificial Sequence
  MKO10088532_B_Gm2083
  gRNA
taccatagagccccatcagc

SEQ ID NO: 88533 - DNA, 20 bp, Artificial Sequence
  MKO10088533_B_Gm20854
  gRNA
aggtggacatccctcacctg

SEQ ID NO: 88534 - DNA, 20 bp, Artificial Sequence
  MKO10088534_B_Gm20854
  gRNA
tgtccacctcgccagcgccc

SEQ ID NO: 88535 - DNA, 20 bp, Artificial Sequence
  MKO10088535_B_Gm20854
  gRNA
taccttccttgtagtcatcc

SEQ ID NO: 88536 - DNA, 20 bp, Artificial Sequence
  MKO10088536_B_Gm20865
  gRNA
aggagctccacagcgatgag

SEQ ID NO: 88537 - DNA, 20 bp, Artificial Sequence
  MKO10088537_B_Gm20865
  gRNA
tgagtagaaactactttgtg

SEQ ID NO: 88538 - DNA, 20 bp, Artificial Sequence
  MKO10088538_B_Gm20865
  gRNA
tcacaaagtagtttctactc

SEQ ID NO: 88539 - DNA, 20 bp, Artificial Sequence
  MKO10088539_B_Gm20867
  gRNA
gttgtacctctctgcaaacc

SEQ ID NO: 88540 - DNA, 20 bp, Artificial Sequence
  MKO10088540_B_Gm20867
  gRNA
taaaaatagtcctgtaagaa

SEQ ID NO: 88541 - DNA, 20 bp, Artificial Sequence
  MKO10088541_B_Gm20867
  gRNA
cctctacgtctatcagctcc

SEQ ID NO: 88542 - DNA, 20 bp, Artificial Sequence
  MKO10088542_B_Gm20877
  gRNA
gttgtacctctatgccaacc

SEQ ID NO: 88543 - DNA, 20 bp, Artificial Sequence
  MKO10088543_B_Gm20877
  gRNA
tttcgtgcttgttctgtatc

SEQ ID NO: 88544 - DNA, 20 bp, Artificial Sequence
  MKO10088544_B_Gm20877
  gRNA
gtaatgtgcctgccacccat

SEQ ID NO: 88545 - DNA, 20 bp, Artificial Sequence
  MKO10088545_B_Gm20878
  gRNA
tgtctttgcaggatctactg

SEQ ID NO: 88546 - DNA, 20 bp, Artificial Sequence
  MKO10088546_B_Gm20878
  gRNA
actttaaatctttaatgcac

SEQ ID NO: 88547 - DNA, 20 bp, Artificial Sequence
  MKO10088547_B_Gm20878
  gRNA
cctacagctcggcgcacccc

SEQ ID NO: 88548 - DNA, 20 bp, Artificial Sequence
  MKO10088548_B_Gm20917
  gRNA
gacagaattgacagtgtcta

SEQ ID NO: 88549 - DNA, 20 bp, Artificial Sequence
  MKO10088549_B_Gm20917
  gRNA
tgccaaccagtgcgcctgcg

SEQ ID NO: 88550 - DNA, 20 bp, Artificial Sequence
  MKO10088550_B_Gm20917
  gRNA
tgaggaaaaactactttgtg

SEQ ID NO: 88551 - DNA, 20 bp, Artificial Sequence
  MKO10088551_B_Gm20939
  gRNA
ctttgctgaaccctacacag

SEQ ID NO: 88552 - DNA, 20 bp, Artificial Sequence
  MKO10088552_B_Gm20939
  gRNA
tatgaattctttcatacttt

SEQ ID NO: 88553 - DNA, 20 bp, Artificial Sequence
  MKO10088553_B_Gm20939
  gRNA
gacaatattcttcagtgttt

SEQ ID NO: 88554 - DNA, 20 bp, Artificial Sequence
  MKO10088554_B_Gm21002
  gRNA
ctgatatgctattgtagaaa

SEQ ID NO: 88555 - DNA, 20 bp, Artificial Sequence
  MKO10088555_B_Gm21002
  gRNA
caaaggagacagacacagcc

SEQ ID NO: 88556 - DNA, 20 bp, Artificial Sequence
  MKO10088556_B_Gm21002
  gRNA
tcctatccaaaacacagatg

SEQ ID NO: 88557 - DNA, 20 bp, Artificial Sequence
  MKO10088557_B_Gm21119
  gRNA
ggccacccaacgagacaatg

SEQ ID NO: 88558 - DNA, 20 bp, Artificial Sequence
  MKO10088558_B_Gm21119
  gRNA
gctaaaaattctaccatttc

SEQ ID NO: 88559 - DNA, 20 bp, Artificial Sequence
  MKO10088559_B_Gm21119
  gRNA
atttgaacagaaacctgaaa

SEQ ID NO: 88560 - DNA, 20 bp, Artificial Sequence
  MKO10088560_B_Gm21293
  gRNA
ctgagtaactgctagatcct

SEQ ID NO: 88561 - DNA, 20 bp, Artificial Sequence
  MKO10088561_B_Gm21293
  gRNA
gcctccaagtgtccatttct

SEQ ID NO: 88562 - DNA, 20 bp, Artificial Sequence
  MKO10088562_B_Gm21293
  gRNA
gctgtgcactatgatcgctg

SEQ ID NO: 88563 - DNA, 20 bp, Artificial Sequence
  MKO10088563_B_Gm21304
  gRNA
ctgagtaactgctagatcct

SEQ ID NO: 88564 - DNA, 20 bp, Artificial Sequence
  MKO10088564_B_Gm21304
  gRNA
gcctccaagtgtccatttct

SEQ ID NO: 88565 - DNA, 20 bp, Artificial Sequence
  MKO10088565_B_Gm21304
  gRNA
gctgtgcactatgatcgctg

SEQ ID NO: 88566 - DNA, 20 bp, Artificial Sequence
  MKO10088566_B_Gm21312
  gRNA
ctgagtaactgctagatcct

SEQ ID NO: 88567 - DNA, 20 bp, Artificial Sequence
  MKO10088567_B_Gm21312
  gRNA
gcctccaagtgtccatttct

SEQ ID NO: 88568 - DNA, 20 bp, Artificial Sequence
  MKO10088568_B_Gm21312
  gRNA
gctgtgcactatgatcgctg

SEQ ID NO: 88569 - DNA, 20 bp, Artificial Sequence
  MKO10088569_B_Gm21319
  gRNA
tccatcatgccaaagaataa

SEQ ID NO: 88570 - DNA, 20 bp, Artificial Sequence
  MKO10088570_B_Gm21319
  gRNA
acgatttcatcatcatcccc

SEQ ID NO: 88571 - DNA, 20 bp, Artificial Sequence
  MKO10088571_B_Gm21319
  gRNA
acatgccaaaatcaatgaaa

SEQ ID NO: 88572 - DNA, 20 bp, Artificial Sequence
  MKO10088572_B_Gm21498
  gRNA
atatgctattgtagaataag

SEQ ID NO: 88573 - DNA, 20 bp, Artificial Sequence
  MKO10088573_B_Gm21498
  gRNA
caaaagagatagacacagcc

SEQ ID NO: 88574 - DNA, 20 bp, Artificial Sequence
  MKO10088574_B_Gm21498
  gRNA
agatgaagagactaatactg

SEQ ID NO: 88575 - DNA, 20 bp, Artificial Sequence
  MKO10088575_B_Gm21541
  gRNA
taccttgcaggcagtgatgg

SEQ ID NO: 88576 - DNA, 20 bp, Artificial Sequence
  MKO10088576_B_Gm21541
  gRNA
gcctcacctcttgcagccct

SEQ ID NO: 88577 - DNA, 20 bp, Artificial Sequence
  MKO10088577_B_Gm21541
  gRNA
caaccctcaggttcttaccc

SEQ ID NO: 88578 - DNA, 20 bp, Artificial Sequence
  MKO10088578_B_Gm21586
  gRNA
tgtctttgcaggatctactg

SEQ ID NO: 88579 - DNA, 20 bp, Artificial Sequence
  MKO10088579_B_Gm21586
  gRNA
actttaaatctttaatgcac

SEQ ID NO: 88580 - DNA, 20 bp, Artificial Sequence
  MKO10088580_B_Gm21586
  gRNA
cctacagctcggcgcacccc

SEQ ID NO: 88581 - DNA, 20 bp, Artificial Sequence
  MKO10088581_B_Gm21637
  gRNA
agcatggctctaaggaagag

SEQ ID NO: 88582 - DNA, 20 bp, Artificial Sequence
  MKO10088582_B_Gm21637
  gRNA
aaagctggaatcagtgactc

SEQ ID NO: 88583 - DNA, 20 bp, Artificial Sequence
  MKO10088583_B_Gm21637
  gRNA
cctgagccaagcgcctatct

SEQ ID NO: 88584 - DNA, 20 bp, Artificial Sequence
  MKO10088584_B_Gm21671
  gRNA
ctggggtcaggccctaccac

SEQ ID NO: 88585 - DNA, 20 bp, Artificial Sequence
  MKO10088585_B_Gm21671
  gRNA
tttccagtaacctgcacacc

SEQ ID NO: 88586 - DNA, 20 bp, Artificial Sequence
  MKO10088586_B_Gm21671
  gRNA
cctgatgttcttgagtctcc

SEQ ID NO: 88587 - DNA, 20 bp, Artificial Sequence
  MKO10088587_B_Gm21677
  gRNA
cagcattcttagcatctgca

SEQ ID NO: 88588 - DNA, 20 bp, Artificial Sequence
  MKO10088588_B_Gm21677
  gRNA
cccaagttcccttcacatga

SEQ ID NO: 88589 - DNA, 20 bp, Artificial Sequence
  MKO10088589_B_Gm21677
  gRNA
gaattaaagtaaaacaagcc

SEQ ID NO: 88590 - DNA, 20 bp, Artificial Sequence
  MKO10088590_B_Gm21693
  gRNA
cagcattcttagcatctgca

SEQ ID NO: 88591 - DNA, 20 bp, Artificial Sequence
  MKO10088591_B_Gm21693
  gRNA
cccaagttcccttcacatga

SEQ ID NO: 88592 - DNA, 20 bp, Artificial Sequence
  MKO10088592_B_Gm21693
  gRNA
gaattaaagtaaaacaagcc

SEQ ID NO: 88593 - DNA, 20 bp, Artificial Sequence
  MKO10088593_B_Gm216
  gRNA
ttcctagacaaatcgctgtg

SEQ ID NO: 88594 - DNA, 20 bp, Artificial Sequence
  MKO10088594_B_Gm216
  gRNA
gctgatggaacagcacagtc

SEQ ID NO: 88595 - DNA, 20 bp, Artificial Sequence
  MKO10088595_B_Gm216
  gRNA
gaagatgagcgtcctgaagc

SEQ ID NO: 88596 - DNA, 20 bp, Artificial Sequence
  MKO10088596_B_Gm21704
  gRNA
cgtgaaactaagaagtctag

SEQ ID NO: 88597 - DNA, 20 bp, Artificial Sequence
  MKO10088597_B_Gm21704
  gRNA
cccaagttcccttcacatga

SEQ ID NO: 88598 - DNA, 20 bp, Artificial Sequence
  MKO10088598_B_Gm21704
  gRNA
gaattaaagtaaaacaagcc

SEQ ID NO: 88599 - DNA, 20 bp, Artificial Sequence
  MKO10088599_B_Gm21708
  gRNA
aaatatgaatcaacatccag

SEQ ID NO: 88600 - DNA, 20 bp, Artificial Sequence
  MKO10088600_B_Gm21708
  gRNA
tttacctatcattagaagac

SEQ ID NO: 88601 - DNA, 20 bp, Artificial Sequence
  MKO10088601_B_Gm21708
  gRNA
atttctagaaatatgccaag

SEQ ID NO: 88602 - DNA, 20 bp, Artificial Sequence
  MKO10088602_B_Gm21943
  gRNA
aagatctcctgatacagacc

SEQ ID NO: 88603 - DNA, 20 bp, Artificial Sequence
  MKO10088603_B_Gm21943
  gRNA
taaaaatagtcctgtaagaa

SEQ ID NO: 88604 - DNA, 20 bp, Artificial Sequence
  MKO10088604_B_Gm21943
  gRNA
aacaaacccttctctttatt

SEQ ID NO: 88605 - DNA, 20 bp, Artificial Sequence
  MKO10088605_B_Gm21949
  gRNA
cctttagaacaagttgacga

SEQ ID NO: 88606 - DNA, 20 bp, Artificial Sequence
  MKO10088606_B_Gm21949
  gRNA
ccatcgtcaacttgttctaa

SEQ ID NO: 88607 - DNA, 20 bp, Artificial Sequence
  MKO10088607_B_Gm21949
  gRNA
tctgcagcatccagcgagca

SEQ ID NO: 88608 - DNA, 20 bp, Artificial Sequence
  MKO10088608_B_Gm21950
  gRNA
tactttactaacattctcaa

SEQ ID NO: 88609 - DNA, 20 bp, Artificial Sequence
  MKO10088609_B_Gm21950
  gRNA
ctttacgcgtgacctttacc

SEQ ID NO: 88610 - DNA, 20 bp, Artificial Sequence
  MKO10088610_B_Gm21950
  gRNA
caaccactgttgtttgtaaa

SEQ ID NO: 88611 - DNA, 20 bp, Artificial Sequence
  MKO10088611_B_Gm21951
  gRNA
aaatctgatcattaagaatg

SEQ ID NO: 88612 - DNA, 20 bp, Artificial Sequence
  MKO10088612_B_Gm21951
  gRNA
tgttatcaatatatgccatg

SEQ ID NO: 88613 - DNA, 20 bp, Artificial Sequence
  MKO10088613_B_Gm21951
  gRNA
ggatttgtcaataacacctc

SEQ ID NO: 88614 - DNA, 20 bp, Artificial Sequence
  MKO10088614_B_Gm2382
  gRNA
gccaggaatggcggcggtca

SEQ ID NO: 88615 - DNA, 20 bp, Artificial Sequence
  MKO10088615_B_Gm2382
  gRNA
catgcaagatgaagttgaga

SEQ ID NO: 88616 - DNA, 20 bp, Artificial Sequence
  MKO10088616_B_Gm2382
  gRNA
cttgacctcatcttccttcc

SEQ ID NO: 88617 - DNA, 20 bp, Artificial Sequence
  MKO10088617_B_Gm2663
  gRNA
tgtctgcaatggagagatcc

SEQ ID NO: 88618 - DNA, 20 bp, Artificial Sequence
  MKO10088618_B_Gm2663
  gRNA
agaagactccaggttcgcct

SEQ ID NO: 88619 - DNA, 20 bp, Artificial Sequence
  MKO10088619_B_Gm2663
  gRNA
tatttccccagccagaaaca

SEQ ID NO: 88620 - DNA, 20 bp, Artificial Sequence
  MKO10088620_B_Gm266
  gRNA
tggcccgccgagaggttcat

SEQ ID NO: 88621 - DNA, 20 bp, Artificial Sequence
  MKO10088621_B_Gm266
  gRNA
gcaccacctgcgtgaacacg

SEQ ID NO: 88622 - DNA, 20 bp, Artificial Sequence
  MKO10088622_B_Gm266
  gRNA
ctggccacgcagttcgcgtg

SEQ ID NO: 88623 - DNA, 20 bp, Artificial Sequence
  MKO10088623_B_Gm2696
  gRNA
acagctggcctgtctgcagc

SEQ ID NO: 88624 - DNA, 20 bp, Artificial Sequence
  MKO10088624_B_Gm2696
  gRNA
atggggcacagcagctgggc

SEQ ID NO: 88625 - DNA, 20 bp, Artificial Sequence
  MKO10088625_B_Gm2696
  gRNA
ggaggaggcacaacaggaag

SEQ ID NO: 88626 - DNA, 20 bp, Artificial Sequence
  MKO10088626_B_Gm2799
  gRNA
acttggagagaatcacacca

SEQ ID NO: 88627 - DNA, 20 bp, Artificial Sequence
  MKO10088627_B_Gm2799
  gRNA
atcttgttcaagaatagttg

SEQ ID NO: 88628 - DNA, 20 bp, Artificial Sequence
  MKO10088628_B_Gm2799
  gRNA
aaatctgatcattaagaatg

SEQ ID NO: 88629 - DNA, 20 bp, Artificial Sequence
  MKO10088629_B_Gm2825
  gRNA
aaatctgatcattaagaatg

SEQ ID NO: 88630 - DNA, 20 bp, Artificial Sequence
  MKO10088630_B_Gm2825
  gRNA
tgttatcaacatatgccatg

SEQ ID NO: 88631 - DNA, 20 bp, Artificial Sequence
  MKO10088631_B_Gm2825
  gRNA
ggatttgtcaataacacctc

SEQ ID NO: 88632 - DNA, 20 bp, Artificial Sequence
  MKO10088632_B_Gm2863
  gRNA
atcttgttcaagaatagttg

SEQ ID NO: 88633 - DNA, 20 bp, Artificial Sequence
  MKO10088633_B_Gm2863
  gRNA
aaatctgatcattaagaatg

SEQ ID NO: 88634 - DNA, 20 bp, Artificial Sequence
  MKO10088634_B_Gm2863
  gRNA
tgttatcaacatatgccatg

SEQ ID NO: 88635 - DNA, 20 bp, Artificial Sequence
  MKO10088635_B_Gm2897
  gRNA
acaacatgagaagacaatgt

SEQ ID NO: 88636 - DNA, 20 bp, Artificial Sequence
  MKO10088636_B_Gm2897
  gRNA
tcatcctacctgctgttcct

SEQ ID NO: 88637 - DNA, 20 bp, Artificial Sequence
  MKO10088637_B_Gm2897
  gRNA
ctcaactcaacgaaaacgta

SEQ ID NO: 88638 - DNA, 20 bp, Artificial Sequence
  MKO10088638_B_Gm2913
  gRNA
tactttgctaacattctcaa

SEQ ID NO: 88639 - DNA, 20 bp, Artificial Sequence
  MKO10088639_B_Gm2913
  gRNA
ttgctcctccttatattcaa

SEQ ID NO: 88640 - DNA, 20 bp, Artificial Sequence
  MKO10088640_B_Gm2913
  gRNA
acttggagagaatcacacca

SEQ ID NO: 88641 - DNA, 20 bp, Artificial Sequence
  MKO10088641_B_Gm2927
  gRNA
tactttgctaacattctcaa

SEQ ID NO: 88642 - DNA, 20 bp, Artificial Sequence
  MKO10088642_B_Gm2927
  gRNA
ttattctgaatatgacattt

SEQ ID NO: 88643 - DNA, 20 bp, Artificial Sequence
  MKO10088643_B_Gm2927
  gRNA
acttggagagaatcacacca

SEQ ID NO: 88644 - DNA, 20 bp, Artificial Sequence
  MKO10088644_B_Gm2933
  gRNA
aaatctgatcattaagaatg

SEQ ID NO: 88645 - DNA, 20 bp, Artificial Sequence
  MKO10088645_B_Gm2933
  gRNA
atcttgttcaagaatagttg

SEQ ID NO: 88646 - DNA, 20 bp, Artificial Sequence
  MKO10088646_B_Gm2933
  gRNA
ggatttgtcaataacacctc

SEQ ID NO: 88647 - DNA, 20 bp, Artificial Sequence
  MKO10088647_B_Gm2a
  gRNA
aggcactgtgaagttgctcg

SEQ ID NO: 88648 - DNA, 20 bp, Artificial Sequence
  MKO10088648_B_Gm2a
  gRNA
gtgacaggtggagctcaccg

SEQ ID NO: 88649 - DNA, 20 bp, Artificial Sequence
  MKO10088649_B_Gm2a
  gRNA
agatgtagtcgtcagccttg

SEQ ID NO: 88650 - DNA, 20 bp, Artificial Sequence
  MKO10088650_B_Gm3139
  gRNA
ccacaggaggccaaaacttc

SEQ ID NO: 88651 - DNA, 20 bp, Artificial Sequence
  MKO10088651_B_Gm3139
  gRNA
tatccatgtttactgcaaac

SEQ ID NO: 88652 - DNA, 20 bp, Artificial Sequence
  MKO10088652_B_Gm3139
  gRNA
cctaatttcacagacagact

SEQ ID NO: 88653 - DNA, 20 bp, Artificial Sequence
  MKO10088653_B_Gm3238
  gRNA
atgctctcaccaactcctct

SEQ ID NO: 88654 - DNA, 20 bp, Artificial Sequence
  MKO10088654_B_Gm3238
  gRNA
gccacagccactgggctggc

SEQ ID NO: 88655 - DNA, 20 bp, Artificial Sequence
  MKO10088655_B_Gm3238
  gRNA
gcagtcatccacctgccaag

SEQ ID NO: 88656 - DNA, 20 bp, Artificial Sequence
  MKO10088656_B_Gm3258
  gRNA
aggaacctgtgttgtcgcat

SEQ ID NO: 88657 - DNA, 20 bp, Artificial Sequence
  MKO10088657_B_Gm3258
  gRNA
cctcaccgatgcgacaacac

SEQ ID NO: 88658 - DNA, 20 bp, Artificial Sequence
  MKO10088658_B_Gm3258
  gRNA
ggccctggagacggtaccga

SEQ ID NO: 88659 - DNA, 20 bp, Artificial Sequence
  MKO10088659_B_Gm3259
  gRNA
ccacaggagggcaaaacttc

SEQ ID NO: 88660 - DNA, 20 bp, Artificial Sequence
  MKO10088660_B_Gm3259
  gRNA
tgaaaacaagaacaaaatat

SEQ ID NO: 88661 - DNA, 20 bp, Artificial Sequence
  MKO10088661_B_Gm3259
  gRNA
taggtgcctgatgacaccct

SEQ ID NO: 88662 - DNA, 20 bp, Artificial Sequence
  MKO10088662_B_Gm3264
  gRNA
acaacatgagaagacaatgt

SEQ ID NO: 88663 - DNA, 20 bp, Artificial Sequence
  MKO10088663_B_Gm3264
  gRNA
tcatcctacctgctgttcct

SEQ ID NO: 88664 - DNA, 20 bp, Artificial Sequence
  MKO10088664_B_Gm3264
  gRNA
ctcaactccacgaaaacgta

SEQ ID NO: 88665 - DNA, 20 bp, Artificial Sequence
  MKO10088665_B_Gm3285
  gRNA
agccagctggcaccaggaac

SEQ ID NO: 88666 - DNA, 20 bp, Artificial Sequence
  MKO10088666_B_Gm3285
  gRNA
ggaggaggagccagagcaga

SEQ ID NO: 88667 - DNA, 20 bp, Artificial Sequence
  MKO10088667_B_Gm3285
  gRNA
cacacaggcttgcagcagac

SEQ ID NO: 88668 - DNA, 20 bp, Artificial Sequence
  MKO10088668_B_Gm3286
  gRNA
cctaatttcacagacagact

SEQ ID NO: 88669 - DNA, 20 bp, Artificial Sequence
  MKO10088669_B_Gm3286
  gRNA
aggttatgcatatttatcaa

SEQ ID NO: 88670 - DNA, 20 bp, Artificial Sequence
  MKO10088670_B_Gm3286
  gRNA
actgctgagagatgaggctt

SEQ ID NO: 88671 - DNA, 20 bp, Artificial Sequence
  MKO10088671_B_Gm3317
  gRNA
acaacatgagaagacaatgt

SEQ ID NO: 88672 - DNA, 20 bp, Artificial Sequence
  MKO10088672_B_Gm3317
  gRNA
tcatcctacctgctgttcct

SEQ ID NO: 88673 - DNA, 20 bp, Artificial Sequence
  MKO10088673_B_Gm3317
  gRNA
ctcaactccacgaaaatgta

SEQ ID NO: 88674 - DNA, 20 bp, Artificial Sequence
  MKO10088674_B_Gm3336
  gRNA
tagataccgtatccagatta

SEQ ID NO: 88675 - DNA, 20 bp, Artificial Sequence
  MKO10088675_B_Gm3336
  gRNA
tccacgaacttgcctccaca

SEQ ID NO: 88676 - DNA, 20 bp, Artificial Sequence
  MKO10088676_B_Gm3336
  gRNA
cctctgagagtcacgactgt

SEQ ID NO: 88677 - DNA, 20 bp, Artificial Sequence
  MKO10088677_B_Gm3376
  gRNA
cgtgaaactaagaagtctag

SEQ ID NO: 88678 - DNA, 20 bp, Artificial Sequence
  MKO10088678_B_Gm3376
  gRNA
cccaagttcccttcacatga

SEQ ID NO: 88679 - DNA, 20 bp, Artificial Sequence
  MKO10088679_B_Gm3376
  gRNA
gaattaaagtaaaacaagcc

SEQ ID NO: 88680 - DNA, 20 bp, Artificial Sequence
  MKO10088680_B_Gm3383
  gRNA
tcaaatcctcatacatgtaa

SEQ ID NO: 88681 - DNA, 20 bp, Artificial Sequence
  MKO10088681_B_Gm3383
  gRNA
acaacatgagaagacaatgt

SEQ ID NO: 88682 - DNA, 20 bp, Artificial Sequence
  MKO10088682_B_Gm3383
  gRNA
gttatcttctatcagttcct

SEQ ID NO: 88683 - DNA, 20 bp, Artificial Sequence
  MKO10088683_B_Gm3402
  gRNA
gccacaggtatgcatccttc

SEQ ID NO: 88684 - DNA, 20 bp, Artificial Sequence
  MKO10088684_B_Gm3402
  gRNA
tgcctcctgatcttccagca

SEQ ID NO: 88685 - DNA, 20 bp, Artificial Sequence
  MKO10088685_B_Gm3402
  gRNA
cttcccccagagccatattc

SEQ ID NO: 88686 - DNA, 20 bp, Artificial Sequence
  MKO10088686_B_Gm3404
  gRNA
gccacaggtatgcatccttc

SEQ ID NO: 88687 - DNA, 20 bp, Artificial Sequence
  MKO10088687_B_Gm3404
  gRNA
tgcctcctgatcttccagca

SEQ ID NO: 88688 - DNA, 20 bp, Artificial Sequence
  MKO10088688_B_Gm3404
  gRNA
cttcccccagagccatattc

SEQ ID NO: 88689 - DNA, 20 bp, Artificial Sequence
  MKO10088689_B_Gm3409
  gRNA
ggtctgttctcaaaatgaac

SEQ ID NO: 88690 - DNA, 20 bp, Artificial Sequence
  MKO10088690_B_Gm3409
  gRNA
ccactcacctcttagtttgc

SEQ ID NO: 88691 - DNA, 20 bp, Artificial Sequence
  MKO10088691_B_Gm3409
  gRNA
gccacaggtatgcatccttc

SEQ ID NO: 88692 - DNA, 20 bp, Artificial Sequence
  MKO10088692_B_Gm3415
  gRNA
gccacaggtatgcatccttc

SEQ ID NO: 88693 - DNA, 20 bp, Artificial Sequence
  MKO10088693_B_Gm3415
  gRNA
tgcctcctgatcttccagca

SEQ ID NO: 88694 - DNA, 20 bp, Artificial Sequence
  MKO10088694_B_Gm3415
  gRNA
cttcccccagagccatattc

SEQ ID NO: 88695 - DNA, 20 bp, Artificial Sequence
  MKO10088695_B_Gm3417
  gRNA
gatgactcaattgctgatgt

SEQ ID NO: 88696 - DNA, 20 bp, Artificial Sequence
  MKO10088696_B_Gm3417
  gRNA
ccctcatttgtcacttgaat

SEQ ID NO: 88697 - DNA, 20 bp, Artificial Sequence
  MKO10088697_B_Gm3417
  gRNA
gtataatgaatttataacga

SEQ ID NO: 88698 - DNA, 20 bp, Artificial Sequence
  MKO10088698_B_Gm3435
  gRNA
cctcctatcagggcgaagtc

SEQ ID NO: 88699 - DNA, 20 bp, Artificial Sequence
  MKO10088699_B_Gm3435
  gRNA
gccgagggctcgctccagac

SEQ ID NO: 88700 - DNA, 20 bp, Artificial Sequence
  MKO10088700_B_Gm3435
  gRNA
cagcctgctgccgtctccct

SEQ ID NO: 88701 - DNA, 20 bp, Artificial Sequence
  MKO10088701_B_Gm3448
  gRNA
gatgactcaattgctgatgt

SEQ ID NO: 88702 - DNA, 20 bp, Artificial Sequence
  MKO10088702_B_Gm3448
  gRNA
ccctcatttgtcacttgaat

SEQ ID NO: 88703 - DNA, 20 bp, Artificial Sequence
  MKO10088703_B_Gm3448
  gRNA
gtataatgaatttataacga

SEQ ID NO: 88704 - DNA, 20 bp, Artificial Sequence
  MKO10088704_B_Gm3488
  gRNA
acaacatgagaagacaatgt

SEQ ID NO: 88705 - DNA, 20 bp, Artificial Sequence
  MKO10088705_B_Gm3488
  gRNA
tcatcctacctgctgttcct

SEQ ID NO: 88706 - DNA, 20 bp, Artificial Sequence
  MKO10088706_B_Gm3488
  gRNA
ctcaactccacgaaaatgta

SEQ ID NO: 88707 - DNA, 20 bp, Artificial Sequence
  MKO10088707_B_Gm3500
  gRNA
gttatcttctatcagttcct

SEQ ID NO: 88708 - DNA, 20 bp, Artificial Sequence
  MKO10088708_B_Gm3500
  gRNA
ctcaactcaacgaaaacgta

SEQ ID NO: 88709 - DNA, 20 bp, Artificial Sequence
  MKO10088709_B_Gm3500
  gRNA
tcatcctacctgctgttcct

SEQ ID NO: 88710 - DNA, 20 bp, Artificial Sequence
  MKO10088710_B_Gm3558
  gRNA
gttatcttctatcagttcct

SEQ ID NO: 88711 - DNA, 20 bp, Artificial Sequence
  MKO10088711_B_Gm3558
  gRNA
ctcaactccacgaaaacgta

SEQ ID NO: 88712 - DNA, 20 bp, Artificial Sequence
  MKO10088712_B_Gm3558
  gRNA
tcatcctacctgctgctcct

SEQ ID NO: 88713 - DNA, 20 bp, Artificial Sequence
  MKO10088713_B_Gm3604
  gRNA
atctttcagcttgcttgcaa

SEQ ID NO: 88714 - DNA, 20 bp, Artificial Sequence
  MKO10088714_B_Gm3604
  gRNA
ctagaatgcagtgacttatg

SEQ ID NO: 88715 - DNA, 20 bp, Artificial Sequence
  MKO10088715_B_Gm3604
  gRNA
caaatttacctatagcattg

SEQ ID NO: 88716 - DNA, 20 bp, Artificial Sequence
  MKO10088716_B_Gm362
  gRNA
acatctctaagaagctaatc

SEQ ID NO: 88717 - DNA, 20 bp, Artificial Sequence
  MKO10088717_B_Gm362
  gRNA
gatgagcgggaaatacttcg

SEQ ID NO: 88718 - DNA, 20 bp, Artificial Sequence
  MKO10088718_B_Gm362
  gRNA
tgaagtagaactgattccga

SEQ ID NO: 88719 - DNA, 20 bp, Artificial Sequence
  MKO10088719_B_Gm3646
  gRNA
ctgataaagcatacgacaaa

SEQ ID NO: 88720 - DNA, 20 bp, Artificial Sequence
  MKO10088720_B_Gm3646
  gRNA
ggttgaacccagggatacgg

SEQ ID NO: 88721 - DNA, 20 bp, Artificial Sequence
  MKO10088721_B_Gm3646
  gRNA
caagctcatcaaatgacaac

SEQ ID NO: 88722 - DNA, 20 bp, Artificial Sequence
  MKO10088722_B_Gm364
  gRNA
gaagaacaccattgcatgtc

SEQ ID NO: 88723 - DNA, 20 bp, Artificial Sequence
  MKO10088723_B_Gm364
  gRNA
tgctgataaattatactcag

SEQ ID NO: 88724 - DNA, 20 bp, Artificial Sequence
  MKO10088724_B_Gm364
  gRNA
aatttgtccaagagtctcag

SEQ ID NO: 88725 - DNA, 20 bp, Artificial Sequence
  MKO10088725_B_Gm3696
  gRNA
acaacatgagaagacaatgt

SEQ ID NO: 88726 - DNA, 20 bp, Artificial Sequence
  MKO10088726_B_Gm3696
  gRNA
gttatcttctatcagttcct

SEQ ID NO: 88727 - DNA, 20 bp, Artificial Sequence
  MKO10088727_B_Gm3696
  gRNA
ctcaactcaacgaaaacgta

SEQ ID NO: 88728 - DNA, 20 bp, Artificial Sequence
  MKO10088728_B_Gm3701
  gRNA
aaattgcagaatatacacat

SEQ ID NO: 88729 - DNA, 20 bp, Artificial Sequence
  MKO10088729_B_Gm3701
  gRNA
tactttgctaacattctcaa

SEQ ID NO: 88730 - DNA, 20 bp, Artificial Sequence
  MKO10088730_B_Gm3701
  gRNA
ttgctcctccttatattcaa

SEQ ID NO: 88731 - DNA, 20 bp, Artificial Sequence
  MKO10088731_B_Gm3706
  gRNA
gttcacaacagtttcaacaa

SEQ ID NO: 88732 - DNA, 20 bp, Artificial Sequence
  MKO10088732_B_Gm3706
  gRNA
aaattgcagaatatacacat

SEQ ID NO: 88733 - DNA, 20 bp, Artificial Sequence
  MKO10088733_B_Gm3706
  gRNA
ttgctcctccttatattcaa

SEQ ID NO: 88734 - DNA, 20 bp, Artificial Sequence
  MKO10088734_B_Gm3750
  gRNA
ggatttgtcaataacacctc

SEQ ID NO: 88735 - DNA, 20 bp, Artificial Sequence
  MKO10088735_B_Gm3750
  gRNA
tgttatcaacatatgccatg

SEQ ID NO: 88736 - DNA, 20 bp, Artificial Sequence
  MKO10088736_B_Gm3750
  gRNA
tggcagcagcatgcctgctt

SEQ ID NO: 88737 - DNA, 20 bp, Artificial Sequence
  MKO10088737_B_Gm3763
  gRNA
acttggagagaatcacacca

SEQ ID NO: 88738 - DNA, 20 bp, Artificial Sequence
  MKO10088738_B_Gm3763
  gRNA
atcttgttcaagaatagttg

SEQ ID NO: 88739 - DNA, 20 bp, Artificial Sequence
  MKO10088739_B_Gm3763
  gRNA
aaatctgatcattaagaatg

SEQ ID NO: 88740 - DNA, 20 bp, Artificial Sequence
  MKO10088740_B_Gm3776
  gRNA
gatttggaaaagctaaaaaa

SEQ ID NO: 88741 - DNA, 20 bp, Artificial Sequence
  MKO10088741_B_Gm3776
  gRNA
ccttcatgtccttcccatag

SEQ ID NO: 88742 - DNA, 20 bp, Artificial Sequence
  MKO10088742_B_Gm3776
  gRNA
gatgtttgaccaagtgccca

SEQ ID NO: 88743 - DNA, 20 bp, Artificial Sequence
  MKO10088743_B_Gm382
  gRNA
tggtttacgcaaactagtaa

SEQ ID NO: 88744 - DNA, 20 bp, Artificial Sequence
  MKO10088744_B_Gm382
  gRNA
gaggtaaacgtatatctact

SEQ ID NO: 88745 - DNA, 20 bp, Artificial Sequence
  MKO10088745_B_Gm382
  gRNA
taacattgccacgaacctgc

SEQ ID NO: 88746 - DNA, 20 bp, Artificial Sequence
  MKO10088746_B_Gm3985
  gRNA
tattactaacgccaacatct

SEQ ID NO: 88747 - DNA, 20 bp, Artificial Sequence
  MKO10088747_B_Gm3985
  gRNA
atgagccgaccagtagaacc

SEQ ID NO: 88748 - DNA, 20 bp, Artificial Sequence
  MKO10088748_B_Gm3985
  gRNA
caccaagatgaacttcacta

SEQ ID NO: 88749 - DNA, 20 bp, Artificial Sequence
  MKO10088749_B_Gm4027
  gRNA
acatgccaaaatcaatgaaa

SEQ ID NO: 88750 - DNA, 20 bp, Artificial Sequence
  MKO10088750_B_Gm4027
  gRNA
gaaatcgtgtttgatgatat

SEQ ID NO: 88751 - DNA, 20 bp, Artificial Sequence
  MKO10088751_B_Gm4027
  gRNA
atgttctggaagttctccat

SEQ ID NO: 88752 - DNA, 20 bp, Artificial Sequence
  MKO10088752_B_Gm4064
  gRNA
cgtgaaactaagaagtctag

SEQ ID NO: 88753 - DNA, 20 bp, Artificial Sequence
  MKO10088753_B_Gm4064
  gRNA
cccaagttcccttcacatga

SEQ ID NO: 88754 - DNA, 20 bp, Artificial Sequence
  MKO10088754_B_Gm4064
  gRNA
gaattaaagtaaaacaagcc

SEQ ID NO: 88755 - DNA, 20 bp, Artificial Sequence
  MKO10088755_B_Gm4070
  gRNA
gaagagactggagcagaaac

SEQ ID NO: 88756 - DNA, 20 bp, Artificial Sequence
  MKO10088756_B_Gm4070
  gRNA
agcctcagctacaaagcaga

SEQ ID NO: 88757 - DNA, 20 bp, Artificial Sequence
  MKO10088757_B_Gm4070
  gRNA
ctgaaagccttgcagtcaga

SEQ ID NO: 88758 - DNA, 20 bp, Artificial Sequence
  MKO10088758_B_Gm410
  gRNA
gtatgactgcaacaccctca

SEQ ID NO: 88759 - DNA, 20 bp, Artificial Sequence
  MKO10088759_B_Gm410
  gRNA
tatcttgagctgatgtatgc

SEQ ID NO: 88760 - DNA, 20 bp, Artificial Sequence
  MKO10088760_B_Gm410
  gRNA
tgatttagcttccatacttg

SEQ ID NO: 88761 - DNA, 20 bp, Artificial Sequence
  MKO10088761_B_Gm4133
  gRNA
gcctacactgaatccagaag

SEQ ID NO: 88762 - DNA, 20 bp, Artificial Sequence
  MKO10088762_B_Gm4133
  gRNA
tagagcaagtgtcacaaaca

SEQ ID NO: 88763 - DNA, 20 bp, Artificial Sequence
  MKO10088763_B_Gm4133
  gRNA
gtgttattgtctgttatctg

SEQ ID NO: 88764 - DNA, 20 bp, Artificial Sequence
  MKO10088764_B_Gm4141
  gRNA
gcctacaatgaatccagaag

SEQ ID NO: 88765 - DNA, 20 bp, Artificial Sequence
  MKO10088765_B_Gm4141
  gRNA
gtgttattgtctgttatctg

SEQ ID NO: 88766 - DNA, 20 bp, Artificial Sequence
  MKO10088766_B_Gm4141
  gRNA
gtaacatccacattccaatt

SEQ ID NO: 88767 - DNA, 20 bp, Artificial Sequence
  MKO10088767_B_Gm4175
  gRNA
gttattcttgttatggttgt

SEQ ID NO: 88768 - DNA, 20 bp, Artificial Sequence
  MKO10088768_B_Gm4175
  gRNA
tcttacagtgaatccagaag

SEQ ID NO: 88769 - DNA, 20 bp, Artificial Sequence
  MKO10088769_B_Gm4175
  gRNA
taacatccacattccaatta

SEQ ID NO: 88770 - DNA, 20 bp, Artificial Sequence
  MKO10088770_B_Gm4177
  gRNA
gcctacaatgaatccagaag

SEQ ID NO: 88771 - DNA, 20 bp, Artificial Sequence
  MKO10088771_B_Gm4177
  gRNA
aacttgttctgttccacttc

SEQ ID NO: 88772 - DNA, 20 bp, Artificial Sequence
  MKO10088772_B_Gm4177
  gRNA
gtgttattgtctgttatctg

SEQ ID NO: 88773 - DNA, 20 bp, Artificial Sequence
  MKO10088773_B_Gm4187
  gRNA
gcctacactgaatccagaag

SEQ ID NO: 88774 - DNA, 20 bp, Artificial Sequence
  MKO10088774_B_Gm4187
  gRNA
tagagcaagtgtcacaaaca

SEQ ID NO: 88775 - DNA, 20 bp, Artificial Sequence
  MKO10088775_B_Gm4187
  gRNA
gtgttattgtctgttatctg

SEQ ID NO: 88776 - DNA, 20 bp, Artificial Sequence
  MKO10088776_B_Gm4201
  gRNA
gcctacaatgaatccagaag

SEQ ID NO: 88777 - DNA, 20 bp, Artificial Sequence
  MKO10088777_B_Gm4201
  gRNA
gtgttattgtctgttatctg

SEQ ID NO: 88778 - DNA, 20 bp, Artificial Sequence
  MKO10088778_B_Gm4201
  gRNA
gtaacatccacattccaatt

SEQ ID NO: 88779 - DNA, 20 bp, Artificial Sequence
  MKO10088779_B_Gm4214
  gRNA
gttattcttgttatggttgt

SEQ ID NO: 88780 - DNA, 20 bp, Artificial Sequence
  MKO10088780_B_Gm4214
  gRNA
tcttacagtgaatccagaag

SEQ ID NO: 88781 - DNA, 20 bp, Artificial Sequence
  MKO10088781_B_Gm4214
  gRNA
taacatccacattccaatta

SEQ ID NO: 88782 - DNA, 20 bp, Artificial Sequence
  MKO10088782_B_Gm4216
  gRNA
gcctacaatgaatccagaag

SEQ ID NO: 88783 - DNA, 20 bp, Artificial Sequence
  MKO10088783_B_Gm4216
  gRNA
aacttgttctgttccacttc

SEQ ID NO: 88784 - DNA, 20 bp, Artificial Sequence
  MKO10088784_B_Gm4216
  gRNA
gtgttattgtctgttatctg

SEQ ID NO: 88785 - DNA, 20 bp, Artificial Sequence
  MKO10088785_B_Gm428
  gRNA
caggtccgtgtgatagcccg

SEQ ID NO: 88786 - DNA, 20 bp, Artificial Sequence
  MKO10088786_B_Gm428
  gRNA
aacgtgcatacctagagaga

SEQ ID NO: 88787 - DNA, 20 bp, Artificial Sequence
  MKO10088787_B_Gm428
  gRNA
cactcaggtccttggtttga

SEQ ID NO: 88788 - DNA, 20 bp, Artificial Sequence
  MKO10088788_B_Gm4297
  gRNA
atagtaaagaggccagcatt

SEQ ID NO: 88789 - DNA, 20 bp, Artificial Sequence
  MKO10088789_B_Gm4297
  gRNA
tagaagcagatgaaaatata

SEQ ID NO: 88790 - DNA, 20 bp, Artificial Sequence
  MKO10088790_B_Gm4297
  gRNA
aatccagtaactcatgatga

SEQ ID NO: 88791 - DNA, 20 bp, Artificial Sequence
  MKO10088791_B_Gm4301
  gRNA
ttcctgtcaaatctgcactt

SEQ ID NO: 88792 - DNA, 20 bp, Artificial Sequence
  MKO10088792_B_Gm4301
  gRNA
ctccgaagtgcagatttgac

SEQ ID NO: 88793 - DNA, 20 bp, Artificial Sequence
  MKO10088793_B_Gm4301
  gRNA
cagctactctttgctgaatt

SEQ ID NO: 88794 - DNA, 20 bp, Artificial Sequence
  MKO10088794_B_Gm4302
  gRNA
ttcctgtcaaatctgcactt

SEQ ID NO: 88795 - DNA, 20 bp, Artificial Sequence
  MKO10088795_B_Gm4302
  gRNA
ctccgaagtgcagatttgac

SEQ ID NO: 88796 - DNA, 20 bp, Artificial Sequence
  MKO10088796_B_Gm4302
  gRNA
cagctactctttgctgaatt

SEQ ID NO: 88797 - DNA, 20 bp, Artificial Sequence
  MKO10088797_B_Gm4303
  gRNA
ttcctgtcaaatctgcactt

SEQ ID NO: 88798 - DNA, 20 bp, Artificial Sequence
  MKO10088798_B_Gm4303
  gRNA
ctccgaagtgcagatttgac

SEQ ID NO: 88799 - DNA, 20 bp, Artificial Sequence
  MKO10088799_B_Gm4303
  gRNA
cagctactctttgctgaatt

SEQ ID NO: 88800 - DNA, 20 bp, Artificial Sequence
  MKO10088800_B_Gm4305
  gRNA
ttcctgtcaaatctgcactt

SEQ ID NO: 88801 - DNA, 20 bp, Artificial Sequence
  MKO10088801_B_Gm4305
  gRNA
ctccgaagtgcagatttgac

SEQ ID NO: 88802 - DNA, 20 bp, Artificial Sequence
  MKO10088802_B_Gm4305
  gRNA
cagctactctttgctgaatt

SEQ ID NO: 88803 - DNA, 20 bp, Artificial Sequence
  MKO10088803_B_Gm4307
  gRNA
ttcctgtcaaatctgcactt

SEQ ID NO: 88804 - DNA, 20 bp, Artificial Sequence
  MKO10088804_B_Gm4307
  gRNA
ctccgaagtgcagatttgac

SEQ ID NO: 88805 - DNA, 20 bp, Artificial Sequence
  MKO10088805_B_Gm4307
  gRNA
cagctactctttgctgaatt

SEQ ID NO: 88806 - DNA, 20 bp, Artificial Sequence
  MKO10088806_B_Gm4312
  gRNA
ttcctgtcaaatctgcactt

SEQ ID NO: 88807 - DNA, 20 bp, Artificial Sequence
  MKO10088807_B_Gm4312
  gRNA
cagctactctttgctgaatt

SEQ ID NO: 88808 - DNA, 20 bp, Artificial Sequence
  MKO10088808_B_Gm4312
  gRNA
ctccgaagtgcagatttgac

SEQ ID NO: 88809 - DNA, 20 bp, Artificial Sequence
  MKO10088809_B_Gm4340
  gRNA
ctgagtaactgctagatcct

SEQ ID NO: 88810 - DNA, 20 bp, Artificial Sequence
  MKO10088810_B_Gm4340
  gRNA
ctcagtctcacacagcaagc

SEQ ID NO: 88811 - DNA, 20 bp, Artificial Sequence
  MKO10088811_B_Gm4340
  gRNA
agcttcgactgaacaattgt

SEQ ID NO: 88812 - DNA, 20 bp, Artificial Sequence
  MKO10088812_B_Gm436
  gRNA
tgcatgatttagtgcccata

SEQ ID NO: 88813 - DNA, 20 bp, Artificial Sequence
  MKO10088813_B_Gm436
  gRNA
ctgtgtctgctactgctagt

SEQ ID NO: 88814 - DNA, 20 bp, Artificial Sequence
  MKO10088814_B_Gm436
  gRNA
tgcatacacctgaacttgac

SEQ ID NO: 88815 - DNA, 20 bp, Artificial Sequence
  MKO10088815_B_Gm438
  gRNA
gttatgataacatccccaga

SEQ ID NO: 88816 - DNA, 20 bp, Artificial Sequence
  MKO10088816_B_Gm438
  gRNA
tgaagcatccagccaaatta

SEQ ID NO: 88817 - DNA, 20 bp, Artificial Sequence
  MKO10088817_B_Gm438
  gRNA
tctcttgcagatacttacca

SEQ ID NO: 88818 - DNA, 20 bp, Artificial Sequence
  MKO10088818_B_Gm4461
  gRNA
gaagggggtgaggactgtat

SEQ ID NO: 88819 - DNA, 20 bp, Artificial Sequence
  MKO10088819_B_Gm4461
  gRNA
atgtggagagaatgtattgg

SEQ ID NO: 88820 - DNA, 20 bp, Artificial Sequence
  MKO10088820_B_Gm4461
  gRNA
tctgggaggagatactctga

SEQ ID NO: 88821 - DNA, 20 bp, Artificial Sequence
  MKO10088821_B_Gm4477
  gRNA
gatcacaggtccccttccca

SEQ ID NO: 88822 - DNA, 20 bp, Artificial Sequence
  MKO10088822_B_Gm4477
  gRNA
ggtggctgctcggccagtga

SEQ ID NO: 88823 - DNA, 20 bp, Artificial Sequence
  MKO10088823_B_Gm4477
  gRNA
tcattgcagcaccgaagaga

SEQ ID NO: 88824 - DNA, 20 bp, Artificial Sequence
  MKO10088824_B_Gm4498
  gRNA
gtgttattgtctgttatctg

SEQ ID NO: 88825 - DNA, 20 bp, Artificial Sequence
  MKO10088825_B_Gm4498
  gRNA
gtaacatccacattccaatt

SEQ ID NO: 88826 - DNA, 20 bp, Artificial Sequence
  MKO10088826_B_Gm4498
  gRNA
cagtgaccctaattggaatg

SEQ ID NO: 88827 - DNA, 20 bp, Artificial Sequence
  MKO10088827_B_Gm44
  gRNA
tttcgtgaagctaaagtatg

SEQ ID NO: 88828 - DNA, 20 bp, Artificial Sequence
  MKO10088828_B_Gm44
  gRNA
gagtcctctcctaaatcatg

SEQ ID NO: 88829 - DNA, 20 bp, Artificial Sequence
  MKO10088829_B_Gm44
  gRNA
tatcttggtgactaatagtg

SEQ ID NO: 88830 - DNA, 20 bp, Artificial Sequence
  MKO10088830_B_Gm4559
  gRNA
gcacacaggtttgcaacagc

SEQ ID NO: 88831 - DNA, 20 bp, Artificial Sequence
  MKO10088831_B_Gm4559
  gRNA
accagaaccatgacctgctg

SEQ ID NO: 88832 - DNA, 20 bp, Artificial Sequence
  MKO10088832_B_Gm4559
  gRNA
tcagcagctgtcctgacagc

SEQ ID NO: 88833 - DNA, 20 bp, Artificial Sequence
  MKO10088833_B_Gm4567
  gRNA
gtttgcccagatagtacatg

SEQ ID NO: 88834 - DNA, 20 bp, Artificial Sequence
  MKO10088834_B_Gm4567
  gRNA
caagccaaaatcacacagct

SEQ ID NO: 88835 - DNA, 20 bp, Artificial Sequence
  MKO10088835_B_Gm4567
  gRNA
cattgtccatagagacataa

SEQ ID NO: 88836 - DNA, 20 bp, Artificial Sequence
  MKO10088836_B_Gm4724
  gRNA
gacttctagaagtttgaaaa

SEQ ID NO: 88837 - DNA, 20 bp, Artificial Sequence
  MKO10088837_B_Gm4724
  gRNA
ccctctgagtttattcaatg

SEQ ID NO: 88838 - DNA, 20 bp, Artificial Sequence
  MKO10088838_B_Gm4724
  gRNA
ctcctgtatatgttcgctta

SEQ ID NO: 88839 - DNA, 20 bp, Artificial Sequence
  MKO10088839_B_Gm4736
  gRNA
cagcagagacccactcagcc

SEQ ID NO: 88840 - DNA, 20 bp, Artificial Sequence
  MKO10088840_B_Gm4736
  gRNA
gactcaaattctcagctcct

SEQ ID NO: 88841 - DNA, 20 bp, Artificial Sequence
  MKO10088841_B_Gm4736
  gRNA
ctgagaatttgagtcttcgt

SEQ ID NO: 88842 - DNA, 20 bp, Artificial Sequence
  MKO10088842_B_Gm4745
  gRNA
ttcgaagccacttgaagttt

SEQ ID NO: 88843 - DNA, 20 bp, Artificial Sequence
  MKO10088843_B_Gm4745
  gRNA
accaaatgtgcctgaacaga

SEQ ID NO: 88844 - DNA, 20 bp, Artificial Sequence
  MKO10088844_B_Gm4745
  gRNA
ctcaggcctgaaaacaatac

SEQ ID NO: 88845 - DNA, 20 bp, Artificial Sequence
  MKO10088845_B_Gm4763
  gRNA
agaagattccgattgaagtt

SEQ ID NO: 88846 - DNA, 20 bp, Artificial Sequence
  MKO10088846_B_Gm4763
  gRNA
taagaggcagtcactattcc

SEQ ID NO: 88847 - DNA, 20 bp, Artificial Sequence
  MKO10088847_B_Gm4763
  gRNA
taaaagtgtcaatgatgtcc

SEQ ID NO: 88848 - DNA, 20 bp, Artificial Sequence
  MKO10088848_B_Gm4787
  gRNA
tgtggcgttagaatcaaacg

SEQ ID NO: 88849 - DNA, 20 bp, Artificial Sequence
  MKO10088849_B_Gm4787
  gRNA
tccattacaagccctatttc

SEQ ID NO: 88850 - DNA, 20 bp, Artificial Sequence
  MKO10088850_B_Gm4787
  gRNA
gtaatggatggtgcaacttg

SEQ ID NO: 88851 - DNA, 20 bp, Artificial Sequence
  MKO10088851_B_Gm4788
  gRNA
taccttcgttgcacagtaca

SEQ ID NO: 88852 - DNA, 20 bp, Artificial Sequence
  MKO10088852_B_Gm4788
  gRNA
tagtcccagaaaatcccaga

SEQ ID NO: 88853 - DNA, 20 bp, Artificial Sequence
  MKO10088853_B_Gm4788
  gRNA
attgtccattctccacataa

SEQ ID NO: 88854 - DNA, 20 bp, Artificial Sequence
  MKO10088854_B_Gm4791
  gRNA
tgatgaactgtgcctgcctg

SEQ ID NO: 88855 - DNA, 20 bp, Artificial Sequence
  MKO10088855_B_Gm4791
  gRNA
atcctctgctgtatgtgtct

SEQ ID NO: 88856 - DNA, 20 bp, Artificial Sequence
  MKO10088856_B_Gm4791
  gRNA
agggaggctgaaagaagctg

SEQ ID NO: 88857 - DNA, 20 bp, Artificial Sequence
  MKO10088857_B_Gm4794
  gRNA
atgtgttcattgtttgctcg

SEQ ID NO: 88858 - DNA, 20 bp, Artificial Sequence
  MKO10088858_B_Gm4794
  gRNA
actcaaagcttcagatactc

SEQ ID NO: 88859 - DNA, 20 bp, Artificial Sequence
  MKO10088859_B_Gm4794
  gRNA
ttgcagtggtaggaagcctt

SEQ ID NO: 88860 - DNA, 20 bp, Artificial Sequence
  MKO10088860_B_Gm4832
  gRNA
gcaggctgattcttcaggct

SEQ ID NO: 88861 - DNA, 20 bp, Artificial Sequence
  MKO10088861_B_Gm4832
  gRNA
attcatgatggctacagctc

SEQ ID NO: 88862 - DNA, 20 bp, Artificial Sequence
  MKO10088862_B_Gm4832
  gRNA
tgtcttgcgagtccgtgttt

SEQ ID NO: 88863 - DNA, 20 bp, Artificial Sequence
  MKO10088863_B_Gm4836
  gRNA
agaaaacgtaagtttctcag

SEQ ID NO: 88864 - DNA, 20 bp, Artificial Sequence
  MKO10088864_B_Gm4836
  gRNA
acgttctgtagagacaccaa

SEQ ID NO: 88865 - DNA, 20 bp, Artificial Sequence
  MKO10088865_B_Gm4836
  gRNA
aatccagtaactcatgatga

SEQ ID NO: 88866 - DNA, 20 bp, Artificial Sequence
  MKO10088866_B_Gm4841
  gRNA
ttctaactttgtaaatcgtg

SEQ ID NO: 88867 - DNA, 20 bp, Artificial Sequence
  MKO10088867_B_Gm4841
  gRNA
gctcttctctcatataccta

SEQ ID NO: 88868 - DNA, 20 bp, Artificial Sequence
  MKO10088868_B_Gm4841
  gRNA
cgccaaaagtccatccttcg

SEQ ID NO: 88869 - DNA, 20 bp, Artificial Sequence
  MKO10088869_B_Gm4846
  gRNA
cctccaccacaacgtcccac

SEQ ID NO: 88870 - DNA, 20 bp, Artificial Sequence
  MKO10088870_B_Gm4846
  gRNA
tttaacctgcaatacatcca

SEQ ID NO: 88871 - DNA, 20 bp, Artificial Sequence
  MKO10088871_B_Gm4846
  gRNA
tgagaagtatctgcccttgc

SEQ ID NO: 88872 - DNA, 20 bp, Artificial Sequence
  MKO10088872_B_Gm4847
  gRNA
taccacatcccattgaccag

SEQ ID NO: 88873 - DNA, 20 bp, Artificial Sequence
  MKO10088873_B_Gm4847
  gRNA
caaacaccccgacaactttg

SEQ ID NO: 88874 - DNA, 20 bp, Artificial Sequence
  MKO10088874_B_Gm4847
  gRNA
ctttaggagataccaaaaag

SEQ ID NO: 88875 - DNA, 20 bp, Artificial Sequence
  MKO10088875_B_Gm4858
  gRNA
atgaacagaaattgtgctac

SEQ ID NO: 88876 - DNA, 20 bp, Artificial Sequence
  MKO10088876_B_Gm4858
  gRNA
cattacagtttatgcttccg

SEQ ID NO: 88877 - DNA, 20 bp, Artificial Sequence
  MKO10088877_B_Gm4858
  gRNA
acacctccacagctactcta

SEQ ID NO: 88878 - DNA, 20 bp, Artificial Sequence
  MKO10088878_B_Gm4861
  gRNA
ttatatgatagatccagttc

SEQ ID NO: 88879 - DNA, 20 bp, Artificial Sequence
  MKO10088879_B_Gm4861
  gRNA
gagtggaaagcatcgaggag

SEQ ID NO: 88880 - DNA, 20 bp, Artificial Sequence
  MKO10088880_B_Gm4861
  gRNA
tgttagtgattccttacttc

SEQ ID NO: 88881 - DNA, 20 bp, Artificial Sequence
  MKO10088881_B_Gm4871
  gRNA
gtaagatagaaataactgct

SEQ ID NO: 88882 - DNA, 20 bp, Artificial Sequence
  MKO10088882_B_Gm4871
  gRNA
gtgggccagaaagttgaata

SEQ ID NO: 88883 - DNA, 20 bp, Artificial Sequence
  MKO10088883_B_Gm4871
  gRNA
actatccatcagcctattcc

SEQ ID NO: 88884 - DNA, 20 bp, Artificial Sequence
  MKO10088884_B_Gm4884
  gRNA
tgtttggagttgctcagcag

SEQ ID NO: 88885 - DNA, 20 bp, Artificial Sequence
  MKO10088885_B_Gm4884
  gRNA
cagtgcaacctaccacactc

SEQ ID NO: 88886 - DNA, 20 bp, Artificial Sequence
  MKO10088886_B_Gm4884
  gRNA
tctgcagctgacagtatgtc

SEQ ID NO: 88887 - DNA, 20 bp, Artificial Sequence
  MKO10088887_B_Gm4894
  gRNA
cagttcaggagtccctaccc

SEQ ID NO: 88888 - DNA, 20 bp, Artificial Sequence
  MKO10088888_B_Gm4894
  gRNA
gtcttaaatgttgataaatg

SEQ ID NO: 88889 - DNA, 20 bp, Artificial Sequence
  MKO10088889_B_Gm4894
  gRNA
cagaactctgtaatcatttc

SEQ ID NO: 88890 - DNA, 20 bp, Artificial Sequence
  MKO10088890_B_Gm4906
  gRNA
ccttggtcatcagttgtcat

SEQ ID NO: 88891 - DNA, 20 bp, Artificial Sequence
  MKO10088891_B_Gm4906
  gRNA
ttacaggtgcagaagagctc

SEQ ID NO: 88892 - DNA, 20 bp, Artificial Sequence
  MKO10088892_B_Gm4906
  gRNA
ggtgaggtggcctacaccac

SEQ ID NO: 88893 - DNA, 20 bp, Artificial Sequence
  MKO10088893_B_Gm4907
  gRNA
tctcattgtaagacaaccca

SEQ ID NO: 88894 - DNA, 20 bp, Artificial Sequence
  MKO10088894_B_Gm4907
  gRNA
atcatatgtaacagtgttaa

SEQ ID NO: 88895 - DNA, 20 bp, Artificial Sequence
  MKO10088895_B_Gm4907
  gRNA
accttgagcattcatatcag

SEQ ID NO: 88896 - DNA, 20 bp, Artificial Sequence
  MKO10088896_B_Gm4922
  gRNA
tcacttcagtagtgccatgc

SEQ ID NO: 88897 - DNA, 20 bp, Artificial Sequence
  MKO10088897_B_Gm4922
  gRNA
ttcaccatgacagtagccta

SEQ ID NO: 88898 - DNA, 20 bp, Artificial Sequence
  MKO10088898_B_Gm4922
  gRNA
tgttattggcaacaaacgca

SEQ ID NO: 88899 - DNA, 20 bp, Artificial Sequence
  MKO10088899_B_Gm4925
  gRNA
ggttacaggtggatccgacc

SEQ ID NO: 88900 - DNA, 20 bp, Artificial Sequence
  MKO10088900_B_Gm4925
  gRNA
ctccgaagccgagagcgcaa

SEQ ID NO: 88901 - DNA, 20 bp, Artificial Sequence
  MKO10088901_B_Gm4925
  gRNA
tcctctaaatgcattcccgc

SEQ ID NO: 88902 - DNA, 20 bp, Artificial Sequence
  MKO10088902_B_Gm4937
  gRNA
gatgggaagtgccacggctt

SEQ ID NO: 88903 - DNA, 20 bp, Artificial Sequence
  MKO10088903_B_Gm4937
  gRNA
agtatgcctgaaagtctaaa

SEQ ID NO: 88904 - DNA, 20 bp, Artificial Sequence
  MKO10088904_B_Gm4937
  gRNA
tgcaatccatttagactttc

SEQ ID NO: 88905 - DNA, 20 bp, Artificial Sequence
  MKO10088905_B_Gm4944
  gRNA
atgtcttgactgtgctcagc

SEQ ID NO: 88906 - DNA, 20 bp, Artificial Sequence
  MKO10088906_B_Gm4944
  gRNA
ttctctcctaaatgctcctc

SEQ ID NO: 88907 - DNA, 20 bp, Artificial Sequence
  MKO10088907_B_Gm4944
  gRNA
cactgacctgaggagcattt

SEQ ID NO: 88908 - DNA, 20 bp, Artificial Sequence
  MKO10088908_B_Gm4951
  gRNA
aatgaccgaatctgtaatat

SEQ ID NO: 88909 - DNA, 20 bp, Artificial Sequence
  MKO10088909_B_Gm4951
  gRNA
attctacttcgtgagaacac

SEQ ID NO: 88910 - DNA, 20 bp, Artificial Sequence
  MKO10088910_B_Gm4951
  gRNA
tgatgcatctttgcagagat

SEQ ID NO: 88911 - DNA, 20 bp, Artificial Sequence
  MKO10088911_B_Gm4952
  gRNA
atataacttacctgttcccg

SEQ ID NO: 88912 - DNA, 20 bp, Artificial Sequence
  MKO10088912_B_Gm4952
  gRNA
tacagcgcccaatgaatctc

SEQ ID NO: 88913 - DNA, 20 bp, Artificial Sequence
  MKO10088913_B_Gm4952
  gRNA
gcacaccagatgtcatcaac

SEQ ID NO: 88914 - DNA, 20 bp, Artificial Sequence
  MKO10088914_B_Gm4975
  gRNA
gataccaaagaagtagtatc

SEQ ID NO: 88915 - DNA, 20 bp, Artificial Sequence
  MKO10088915_B_Gm4975
  gRNA
cagacaattcttctatgttc

SEQ ID NO: 88916 - DNA, 20 bp, Artificial Sequence
  MKO10088916_B_Gm4975
  gRNA
aattgcagctaacaaattat

SEQ ID NO: 88917 - DNA, 20 bp, Artificial Sequence
  MKO10088917_B_Gm4980
  gRNA
aacctagtcgcgcctcgtcc

SEQ ID NO: 88918 - DNA, 20 bp, Artificial Sequence
  MKO10088918_B_Gm4980
  gRNA
accgccgcggcatccaacgc

SEQ ID NO: 88919 - DNA, 20 bp, Artificial Sequence
  MKO10088919_B_Gm4980
  gRNA
actacagctcaatcacgcgc

SEQ ID NO: 88920 - DNA, 20 bp, Artificial Sequence
  MKO10088920_B_Gm4981
  gRNA
caggggccatgaagttgcac

SEQ ID NO: 88921 - DNA, 20 bp, Artificial Sequence
  MKO10088921_B_Gm4981
  gRNA
tgggtagtgatcctggcgcc

SEQ ID NO: 88922 - DNA, 20 bp, Artificial Sequence
  MKO10088922_B_Gm4981
  gRNA
agagcatgtgccagaccctt

SEQ ID NO: 88923 - DNA, 20 bp, Artificial Sequence
  MKO10088923_B_Gm4984
  gRNA
gcccttccgtatgattgctg

SEQ ID NO: 88924 - DNA, 20 bp, Artificial Sequence
  MKO10088924_B_Gm4984
  gRNA
ccaaataggcctcatgactg

SEQ ID NO: 88925 - DNA, 20 bp, Artificial Sequence
  MKO10088925_B_Gm4984
  gRNA
tgacgtcctcagctgacttg

SEQ ID NO: 88926 - DNA, 20 bp, Artificial Sequence
  MKO10088926_B_Gm5071
  gRNA
acccagtacaccatgcctag

SEQ ID NO: 88927 - DNA, 20 bp, Artificial Sequence
  MKO10088927_B_Gm5071
  gRNA
aatggctagctaaatgtggg

SEQ ID NO: 88928 - DNA, 20 bp, Artificial Sequence
  MKO10088928_B_Gm5071
  gRNA
cacgcagagatcctctgacc

SEQ ID NO: 88929 - DNA, 20 bp, Artificial Sequence
  MKO10088929_B_Gm5072
  gRNA
caaggtacttcactatctgc

SEQ ID NO: 88930 - DNA, 20 bp, Artificial Sequence
  MKO10088930_B_Gm5072
  gRNA
ccttcatgaagatcataccc

SEQ ID NO: 88931 - DNA, 20 bp, Artificial Sequence
  MKO10088931_B_Gm5072
  gRNA
aaaggatgagcaacctgtag

SEQ ID NO: 88932 - DNA, 20 bp, Artificial Sequence
  MKO10088932_B_Gm5077
  gRNA
agtgtagtatgctgcaaagc

SEQ ID NO: 88933 - DNA, 20 bp, Artificial Sequence
  MKO10088933_B_Gm5077
  gRNA
cctgtcccctaactatcccc

SEQ ID NO: 88934 - DNA, 20 bp, Artificial Sequence
  MKO10088934_B_Gm5077
  gRNA
tgaataccagattcaactgc

SEQ ID NO: 88935 - DNA, 20 bp, Artificial Sequence
  MKO10088935_B_Gm5082
  gRNA
gtcaattcccaataacatta

SEQ ID NO: 88936 - DNA, 20 bp, Artificial Sequence
  MKO10088936_B_Gm5082
  gRNA
ctaaaatcccaagaactaaa

SEQ ID NO: 88937 - DNA, 20 bp, Artificial Sequence
  MKO10088937_B_Gm5082
  gRNA
agacaattcagaaagtatca

SEQ ID NO: 88938 - DNA, 20 bp, Artificial Sequence
  MKO10088938_B_Gm5087
  gRNA
caagttaacatagaagatga

SEQ ID NO: 88939 - DNA, 20 bp, Artificial Sequence
  MKO10088939_B_Gm5087
  gRNA
gtcatagaagttatcattcg

SEQ ID NO: 88940 - DNA, 20 bp, Artificial Sequence
  MKO10088940_B_Gm5087
  gRNA
gaaggatctttgttgtgttt

SEQ ID NO: 88941 - DNA, 20 bp, Artificial Sequence
  MKO10088941_B_Gm5108
  gRNA
tggacttcaataattaattg

SEQ ID NO: 88942 - DNA, 20 bp, Artificial Sequence
  MKO10088942_B_Gm5108
  gRNA
agcctcgttctgatattctc

SEQ ID NO: 88943 - DNA, 20 bp, Artificial Sequence
  MKO10088943_B_Gm5108
  gRNA
gctgcatttctctctcagaa

SEQ ID NO: 88944 - DNA, 20 bp, Artificial Sequence
  MKO10088944_B_Gm5111
  gRNA
gagaaccaaccctgcccagt

SEQ ID NO: 88945 - DNA, 20 bp, Artificial Sequence
  MKO10088945_B_Gm5111
  gRNA
ccttaccagaagtgacatcc

SEQ ID NO: 88946 - DNA, 20 bp, Artificial Sequence
  MKO10088946_B_Gm5111
  gRNA
ctaagaattcgttgagactg

SEQ ID NO: 88947 - DNA, 20 bp, Artificial Sequence
  MKO10088947_B_Gm5113
  gRNA
gagctgggagacaccgataa

SEQ ID NO: 88948 - DNA, 20 bp, Artificial Sequence
  MKO10088948_B_Gm5113
  gRNA
acgagaagccctgcctatgc

SEQ ID NO: 88949 - DNA, 20 bp, Artificial Sequence
  MKO10088949_B_Gm5113
  gRNA
tgacagacccttggcatgta

SEQ ID NO: 88950 - DNA, 20 bp, Artificial Sequence
  MKO10088950_B_Gm5114
  gRNA
tgtagcaccatcaccttctc

SEQ ID NO: 88951 - DNA, 20 bp, Artificial Sequence
  MKO10088951_B_Gm5114
  gRNA
ttggagctggacacaaggct

SEQ ID NO: 88952 - DNA, 20 bp, Artificial Sequence
  MKO10088952_B_Gm5114
  gRNA
tattcttgacttagcatctg

SEQ ID NO: 88953 - DNA, 20 bp, Artificial Sequence
  MKO10088953_B_Gm5127
  gRNA
cagtagagacacgccacata

SEQ ID NO: 88954 - DNA, 20 bp, Artificial Sequence
  MKO10088954_B_Gm5127
  gRNA
gtttattggtagcatagctc

SEQ ID NO: 88955 - DNA, 20 bp, Artificial Sequence
  MKO10088955_B_Gm5127
  gRNA
cacatctaacattccttatg

SEQ ID NO: 88956 - DNA, 20 bp, Artificial Sequence
  MKO10088956_B_Gm5128
  gRNA
cctacaggagccctaaactg

SEQ ID NO: 88957 - DNA, 20 bp, Artificial Sequence
  MKO10088957_B_Gm5128
  gRNA
aatgccacctcccatagcaa

SEQ ID NO: 88958 - DNA, 20 bp, Artificial Sequence
  MKO10088958_B_Gm5128
  gRNA
cagagtactatctgctgatt

SEQ ID NO: 88959 - DNA, 20 bp, Artificial Sequence
  MKO10088959_B_Gm5132
  gRNA
aaatgatctacaaggctaag

SEQ ID NO: 88960 - DNA, 20 bp, Artificial Sequence
  MKO10088960_B_Gm5132
  gRNA
tgtagatcatttcctacgag

SEQ ID NO: 88961 - DNA, 20 bp, Artificial Sequence
  MKO10088961_B_Gm5132
  gRNA
aaaagaacctgctcccagag

SEQ ID NO: 88962 - DNA, 20 bp, Artificial Sequence
  MKO10088962_B_Gm5134
  gRNA
taatcgtctatatcttcagc

SEQ ID NO: 88963 - DNA, 20 bp, Artificial Sequence
  MKO10088963_B_Gm5134
  gRNA
aagctgcacctatgccagcc

SEQ ID NO: 88964 - DNA, 20 bp, Artificial Sequence
  MKO10088964_B_Gm5134
  gRNA
atttgtgcccatctatagca

SEQ ID NO: 88965 - DNA, 20 bp, Artificial Sequence
  MKO10088965_B_Gm5136
  gRNA
agtccgtgccctttcgtcct

SEQ ID NO: 88966 - DNA, 20 bp, Artificial Sequence
  MKO10088966_B_Gm5136
  gRNA
gcaggcggtttaccttgaat

SEQ ID NO: 88967 - DNA, 20 bp, Artificial Sequence
  MKO10088967_B_Gm5136
  gRNA
actgtcccgatggtggtacg

SEQ ID NO: 88968 - DNA, 20 bp, Artificial Sequence
  MKO10088968_B_Gm5141
  gRNA
attgccagcgatctacaacc

SEQ ID NO: 88969 - DNA, 20 bp, Artificial Sequence
  MKO10088969_B_Gm5141
  gRNA
ctagaatgcagtgacttatg

SEQ ID NO: 88970 - DNA, 20 bp, Artificial Sequence
  MKO10088970_B_Gm5141
  gRNA
caaatgtacctaaagcactg

SEQ ID NO: 88971 - DNA, 20 bp, Artificial Sequence
  MKO10088971_B_Gm5142
  gRNA
ctctcccaagaaagcaccga

SEQ ID NO: 88972 - DNA, 20 bp, Artificial Sequence
  MKO10088972_B_Gm5142
  gRNA
gggcatggccatcatgaaag

SEQ ID NO: 88973 - DNA, 20 bp, Artificial Sequence
  MKO10088973_B_Gm5142
  gRNA
tctatccatcggtgctttct

SEQ ID NO: 88974 - DNA, 20 bp, Artificial Sequence
  MKO10088974_B_Gm5148
  gRNA
aatccctcaatgttgaagag

SEQ ID NO: 88975 - DNA, 20 bp, Artificial Sequence
  MKO10088975_B_Gm5148
  gRNA
tctccctctcttcaacattg

SEQ ID NO: 88976 - DNA, 20 bp, Artificial Sequence
  MKO10088976_B_Gm5148
  gRNA
acaatacagcaccctgcctg

SEQ ID NO: 88977 - DNA, 20 bp, Artificial Sequence
  MKO10088977_B_Gm514
  gRNA
agcaggtcgggtgctgaatc

SEQ ID NO: 88978 - DNA, 20 bp, Artificial Sequence
  MKO10088978_B_Gm514
  gRNA
gctgcggcagggctacgacg

SEQ ID NO: 88979 - DNA, 20 bp, Artificial Sequence
  MKO10088979_B_Gm514
  gRNA
ctgccgcagcagcctgtcgc

SEQ ID NO: 88980 - DNA, 20 bp, Artificial Sequence
  MKO10088980_B_Gm5150
  gRNA
caccttcaactctttcccag

SEQ ID NO: 88981 - DNA, 20 bp, Artificial Sequence
  MKO10088981_B_Gm5150
  gRNA
atccaaggagcacagctgca

SEQ ID NO: 88982 - DNA, 20 bp, Artificial Sequence
  MKO10088982_B_Gm5150
  gRNA
agccgctggaaaagagttga

SEQ ID NO: 88983 - DNA, 20 bp, Artificial Sequence
  MKO10088983_B_Gm5168
  gRNA
agaaaacgtaagtttctcag

SEQ ID NO: 88984 - DNA, 20 bp, Artificial Sequence
  MKO10088984_B_Gm5168
  gRNA
taagtggtgaacagcaagtt

SEQ ID NO: 88985 - DNA, 20 bp, Artificial Sequence
  MKO10088985_B_Gm5168
  gRNA
aatccagtaactcatgatga

SEQ ID NO: 88986 - DNA, 20 bp, Artificial Sequence
  MKO10088986_B_Gm5169
  gRNA
agaaaatgtaagtttctcag

SEQ ID NO: 88987 - DNA, 20 bp, Artificial Sequence
  MKO10088987_B_Gm5169
  gRNA
acgttctgtagagacaccaa

SEQ ID NO: 88988 - DNA, 20 bp, Artificial Sequence
  MKO10088988_B_Gm5169
  gRNA
aatccagtaactcatgatga

SEQ ID NO: 88989 - DNA, 20 bp, Artificial Sequence
  MKO10088989_B_Gm525
  gRNA
ggagtatatgcatcatctcc

SEQ ID NO: 88990 - DNA, 20 bp, Artificial Sequence
  MKO10088990_B_Gm525
  gRNA
catggagaagctgtttgtct

SEQ ID NO: 88991 - DNA, 20 bp, Artificial Sequence
  MKO10088991_B_Gm525
  gRNA
tacctgaggagaaagccagc

SEQ ID NO: 88992 - DNA, 20 bp, Artificial Sequence
  MKO10088992_B_Gm527
  gRNA
gcatccaatgtccgtcaatc

SEQ ID NO: 88993 - DNA, 20 bp, Artificial Sequence
  MKO10088993_B_Gm527
  gRNA
gcctccaaaatgatcgatct

SEQ ID NO: 88994 - DNA, 20 bp, Artificial Sequence
  MKO10088994_B_Gm527
  gRNA
agtcgtatcaagtttccatg

SEQ ID NO: 88995 - DNA, 20 bp, Artificial Sequence
  MKO10088995_B_Gm5294
  gRNA
gacgctgacgactaccctgc

SEQ ID NO: 88996 - DNA, 20 bp, Artificial Sequence
  MKO10088996_B_Gm5294
  gRNA
cccctcgaaccaacagcgcg

SEQ ID NO: 88997 - DNA, 20 bp, Artificial Sequence
  MKO10088997_B_Gm5294
  gRNA
acgaggaaaagcggcttaca

SEQ ID NO: 88998 - DNA, 20 bp, Artificial Sequence
  MKO10088998_B_Gm5346
  gRNA
tccaactacagaatgcatct

SEQ ID NO: 88999 - DNA, 20 bp, Artificial Sequence
  MKO10088999_B_Gm5346
  gRNA
tggaatgtcaacgacatgat

SEQ ID NO: 89000 - DNA, 20 bp, Artificial Sequence
  MKO10089000_B_Gm5346
  gRNA
ttatcaccagaatctgattc

SEQ ID NO: 89001 - DNA, 20 bp, Artificial Sequence
  MKO10089001_B_Gm5347
  gRNA
atagacagtggaccatcttc

SEQ ID NO: 89002 - DNA, 20 bp, Artificial Sequence
  MKO10089002_B_Gm5347
  gRNA
tcctattgactagtattcat

SEQ ID NO: 89003 - DNA, 20 bp, Artificial Sequence
  MKO10089003_B_Gm5347
  gRNA
ccctatgaatactagtcaat

SEQ ID NO: 89004 - DNA, 20 bp, Artificial Sequence
  MKO10089004_B_Gm5382
  gRNA
ctccgccaactcttcaaatc

SEQ ID NO: 89005 - DNA, 20 bp, Artificial Sequence
  MKO10089005_B_Gm5382
  gRNA
tcttcgcctttgcattatct

SEQ ID NO: 89006 - DNA, 20 bp, Artificial Sequence
  MKO10089006_B_Gm5382
  gRNA
tcatggccaagataatgcaa

SEQ ID NO: 89007 - DNA, 20 bp, Artificial Sequence
  MKO10089007_B_Gm5409
  gRNA
cccagacctgctccaatgcc

SEQ ID NO: 89008 - DNA, 20 bp, Artificial Sequence
  MKO10089008_B_Gm5409
  gRNA
cccttccagggtgactctga

SEQ ID NO: 89009 - DNA, 20 bp, Artificial Sequence
  MKO10089009_B_Gm5409
  gRNA
gcagtggggcatccaggcat

SEQ ID NO: 89010 - DNA, 20 bp, Artificial Sequence
  MKO10089010_B_Gm5414
  gRNA
tcaaatagagtctctacctc

SEQ ID NO: 89011 - DNA, 20 bp, Artificial Sequence
  MKO10089011_B_Gm5414
  gRNA
cgagaatgaacttacagcca

SEQ ID NO: 89012 - DNA, 20 bp, Artificial Sequence
  MKO10089012_B_Gm5414
  gRNA
agctcaccttcttcagggtc

SEQ ID NO: 89013 - DNA, 20 bp, Artificial Sequence
  MKO10089013_B_Gm5415
  gRNA
actgttctatagcaagctct

SEQ ID NO: 89014 - DNA, 20 bp, Artificial Sequence
  MKO10089014_B_Gm5415
  gRNA
tggaacaacgatggtattta

SEQ ID NO: 89015 - DNA, 20 bp, Artificial Sequence
  MKO10089015_B_Gm5415
  gRNA
tgagccactgaccattcttc

SEQ ID NO: 89016 - DNA, 20 bp, Artificial Sequence
  MKO10089016_B_Gm5416
  gRNA
tataaatctcaattcgtcgc

SEQ ID NO: 89017 - DNA, 20 bp, Artificial Sequence
  MKO10089017_B_Gm5416
  gRNA
gaattgagatttatactcaa

SEQ ID NO: 89018 - DNA, 20 bp, Artificial Sequence
  MKO10089018_B_Gm5416
  gRNA
tcaccttgttagcaatctcc

SEQ ID NO: 89019 - DNA, 20 bp, Artificial Sequence
  MKO10089019_B_Gm5431
  gRNA
tgaaaagctcttctttactg

SEQ ID NO: 89020 - DNA, 20 bp, Artificial Sequence
  MKO10089020_B_Gm5431
  gRNA
aggtcagagaggcacgatcc

SEQ ID NO: 89021 - DNA, 20 bp, Artificial Sequence
  MKO10089021_B_Gm5431
  gRNA
ttcaccccttactcccctca

SEQ ID NO: 89022 - DNA, 20 bp, Artificial Sequence
  MKO10089022_B_Gm5458
  gRNA
tcaaatcctcatacatgtaa

SEQ ID NO: 89023 - DNA, 20 bp, Artificial Sequence
  MKO10089023_B_Gm5458
  gRNA
acaacatgagaagacaatgt

SEQ ID NO: 89024 - DNA, 20 bp, Artificial Sequence
  MKO10089024_B_Gm5458
  gRNA
tgcttccatgaagttctccg

SEQ ID NO: 89025 - DNA, 20 bp, Artificial Sequence
  MKO10089025_B_Gm5460
  gRNA
cagacccaccacagcactac

SEQ ID NO: 89026 - DNA, 20 bp, Artificial Sequence
  MKO10089026_B_Gm5460
  gRNA
gttccctgcacctctaagac

SEQ ID NO: 89027 - DNA, 20 bp, Artificial Sequence
  MKO10089027_B_Gm5460
  gRNA
agcacctgtaccacaaccaa

SEQ ID NO: 89028 - DNA, 20 bp, Artificial Sequence
  MKO10089028_B_Gm5464
  gRNA
cctgcccgcgcgccaatccg

SEQ ID NO: 89029 - DNA, 20 bp, Artificial Sequence
  MKO10089029_B_Gm5464
  gRNA
gcaggcgtgtgcatgccgcc

SEQ ID NO: 89030 - DNA, 20 bp, Artificial Sequence
  MKO10089030_B_Gm5464
  gRNA
agagccaatggcctcgctga

SEQ ID NO: 89031 - DNA, 20 bp, Artificial Sequence
  MKO10089031_B_Gm5483
  gRNA
ctcatcagaatgatgcctgg

SEQ ID NO: 89032 - DNA, 20 bp, Artificial Sequence
  MKO10089032_B_Gm5483
  gRNA
gaacacttcatatttctcat

SEQ ID NO: 89033 - DNA, 20 bp, Artificial Sequence
  MKO10089033_B_Gm5483
  gRNA
tataaatctcaagtcgtcgc

SEQ ID NO: 89034 - DNA, 20 bp, Artificial Sequence
  MKO10089034_B_Gm5506
  gRNA
tttgagcaagaggcagttgc

SEQ ID NO: 89035 - DNA, 20 bp, Artificial Sequence
  MKO10089035_B_Gm5506
  gRNA
acagagaataaatctaaatt

SEQ ID NO: 89036 - DNA, 20 bp, Artificial Sequence
  MKO10089036_B_Gm5506
  gRNA
gcagccttggcaatccgctt

SEQ ID NO: 89037 - DNA, 20 bp, Artificial Sequence
  MKO10089037_B_Gm5531
  gRNA
ttaacaaagggatgcctcca

SEQ ID NO: 89038 - DNA, 20 bp, Artificial Sequence
  MKO10089038_B_Gm5531
  gRNA
ggctggctgaagatagtgac

SEQ ID NO: 89039 - DNA, 20 bp, Artificial Sequence
  MKO10089039_B_Gm5531
  gRNA
gccaagctgaaaatatctta

SEQ ID NO: 89040 - DNA, 20 bp, Artificial Sequence
  MKO10089040_B_Gm5535
  gRNA
atctgcttccaggttgattc

SEQ ID NO: 89041 - DNA, 20 bp, Artificial Sequence
  MKO10089041_B_Gm5535
  gRNA
gtccacaagagcccagtaac

SEQ ID NO: 89042 - DNA, 20 bp, Artificial Sequence
  MKO10089042_B_Gm5535
  gRNA
gccaacagcctgaatcaacc

SEQ ID NO: 89043 - DNA, 20 bp, Artificial Sequence
  MKO10089043_B_Gm5538
  gRNA
cccactcgcatttgtatttc

SEQ ID NO: 89044 - DNA, 20 bp, Artificial Sequence
  MKO10089044_B_Gm5538
  gRNA
cagttgtactttcactaata

SEQ ID NO: 89045 - DNA, 20 bp, Artificial Sequence
  MKO10089045_B_Gm5538
  gRNA
gggcaaaatgtttgaaatca

SEQ ID NO: 89046 - DNA, 20 bp, Artificial Sequence
  MKO10089046_B_Gm5544
  gRNA
gaatagttgctctctgtttg

SEQ ID NO: 89047 - DNA, 20 bp, Artificial Sequence
  MKO10089047_B_Gm5544
  gRNA
aaggctatggtaccaagtcc

SEQ ID NO: 89048 - DNA, 20 bp, Artificial Sequence
  MKO10089048_B_Gm5544
  gRNA
tgtgtgcaatcattgtatcc

SEQ ID NO: 89049 - DNA, 20 bp, Artificial Sequence
  MKO10089049_B_Gm5549
  gRNA
gacagccatgtaattcttac

SEQ ID NO: 89050 - DNA, 20 bp, Artificial Sequence
  MKO10089050_B_Gm5549
  gRNA
cgtaaccaaagagtgcagcc

SEQ ID NO: 89051 - DNA, 20 bp, Artificial Sequence
  MKO10089051_B_Gm5549
  gRNA
ctccatggcttcatgcgtcg

SEQ ID NO: 89052 - DNA, 20 bp, Artificial Sequence
  MKO10089052_B_Gm5591
  gRNA
catgaagagttgtgctcaac

SEQ ID NO: 89053 - DNA, 20 bp, Artificial Sequence
  MKO10089053_B_Gm5591
  gRNA
cagtacgagctgcccctgcc

SEQ ID NO: 89054 - DNA, 20 bp, Artificial Sequence
  MKO10089054_B_Gm5591
  gRNA
taaaatccagcaccaagacc

SEQ ID NO: 89055 - DNA, 20 bp, Artificial Sequence
  MKO10089055_B_Gm5592
  gRNA
acaaagctggaagacagtgt

SEQ ID NO: 89056 - DNA, 20 bp, Artificial Sequence
  MKO10089056_B_Gm5592
  gRNA
ggagaggttctcttctgctt

SEQ ID NO: 89057 - DNA, 20 bp, Artificial Sequence
  MKO10089057_B_Gm5592
  gRNA
ggggccactggtgactgtcc

SEQ ID NO: 89058 - DNA, 20 bp, Artificial Sequence
  MKO10089058_B_Gm5595
  gRNA
ttgtaaagtctcttctgaga

SEQ ID NO: 89059 - DNA, 20 bp, Artificial Sequence
  MKO10089059_B_Gm5595
  gRNA
tgtcaaaatgatagaagata

SEQ ID NO: 89060 - DNA, 20 bp, Artificial Sequence
  MKO10089060_B_Gm5595
  gRNA
gacaatgttcttcaatgtta

SEQ ID NO: 89061 - DNA, 20 bp, Artificial Sequence
  MKO10089061_B_Gm5615
  gRNA
tagagttgaacaaagtgcac

SEQ ID NO: 89062 - DNA, 20 bp, Artificial Sequence
  MKO10089062_B_Gm5615
  gRNA
cacaagtgtgagaacattcc

SEQ ID NO: 89063 - DNA, 20 bp, Artificial Sequence
  MKO10089063_B_Gm5615
  gRNA
tttaccctttatctgctttg

SEQ ID NO: 89064 - DNA, 20 bp, Artificial Sequence
  MKO10089064_B_Gm5617
  gRNA
taggctggatccgaatcagc

SEQ ID NO: 89065 - DNA, 20 bp, Artificial Sequence
  MKO10089065_B_Gm5617
  gRNA
tcggatccagcctagtaacc

SEQ ID NO: 89066 - DNA, 20 bp, Artificial Sequence
  MKO10089066_B_Gm5617
  gRNA
ccgacgggttgagatctcct

SEQ ID NO: 89067 - DNA, 20 bp, Artificial Sequence
  MKO10089067_B_Gm561
  gRNA
tcagcagctgttcacgcttg

SEQ ID NO: 89068 - DNA, 20 bp, Artificial Sequence
  MKO10089068_B_Gm561
  gRNA
tcaggaacctttgagtggct

SEQ ID NO: 89069 - DNA, 20 bp, Artificial Sequence
  MKO10089069_B_Gm561
  gRNA
tcctgacctatctgaagtca

SEQ ID NO: 89070 - DNA, 20 bp, Artificial Sequence
  MKO10089070_B_Gm5622
  gRNA
tgaatactgatttgaactac

SEQ ID NO: 89071 - DNA, 20 bp, Artificial Sequence
  MKO10089071_B_Gm5622
  gRNA
acctgctgctgctttgcact

SEQ ID NO: 89072 - DNA, 20 bp, Artificial Sequence
  MKO10089072_B_Gm5622
  gRNA
atcaattgaagaaaaaagta

SEQ ID NO: 89073 - DNA, 20 bp, Artificial Sequence
  MKO10089073_B_Gm5634
  gRNA
tgaacatctctgcactggtc

SEQ ID NO: 89074 - DNA, 20 bp, Artificial Sequence
  MKO10089074_B_Gm5634
  gRNA
agaaacgcttgaagttctcc

SEQ ID NO: 89075 - DNA, 20 bp, Artificial Sequence
  MKO10089075_B_Gm5634
  gRNA
cctgaccaacctgcgccaga

SEQ ID NO: 89076 - DNA, 20 bp, Artificial Sequence
  MKO10089076_B_Gm5635
  gRNA
ctcctatgagtacatgtcga

SEQ ID NO: 89077 - DNA, 20 bp, Artificial Sequence
  MKO10089077_B_Gm5635
  gRNA
agaggctgagcttgtcaaag

SEQ ID NO: 89078 - DNA, 20 bp, Artificial Sequence
  MKO10089078_B_Gm5635
  gRNA
gatggaatgtgccttccaca

SEQ ID NO: 89079 - DNA, 20 bp, Artificial Sequence
  MKO10089079_B_Gm5640
  gRNA
tcacctgaggacaaagagac

SEQ ID NO: 89080 - DNA, 20 bp, Artificial Sequence
  MKO10089080_B_Gm5640
  gRNA
tgtgtgacagcaccttaccc

SEQ ID NO: 89081 - DNA, 20 bp, Artificial Sequence
  MKO10089081_B_Gm5640
  gRNA
agacaacacgagcgagcaag

SEQ ID NO: 89082 - DNA, 20 bp, Artificial Sequence
  MKO10089082_B_Gm5662
  gRNA
gaaatcgtgtttgatgatat

SEQ ID NO: 89083 - DNA, 20 bp, Artificial Sequence
  MKO10089083_B_Gm5662
  gRNA
ggaggcaaaaacaggcgcag

SEQ ID NO: 89084 - DNA, 20 bp, Artificial Sequence
  MKO10089084_B_Gm5662
  gRNA
atgttctggaagttctccat

SEQ ID NO: 89085 - DNA, 20 bp, Artificial Sequence
  MKO10089085_B_Gm5725
  gRNA
gcccacactgaatccagaag

SEQ ID NO: 89086 - DNA, 20 bp, Artificial Sequence
  MKO10089086_B_Gm5725
  gRNA
gttattcttcttgcagttgt

SEQ ID NO: 89087 - DNA, 20 bp, Artificial Sequence
  MKO10089087_B_Gm5725
  gRNA
gtgttattgtctgttatctg

SEQ ID NO: 89088 - DNA, 20 bp, Artificial Sequence
  MKO10089088_B_Gm5726
  gRNA
gacaatgcccacactgaatc

SEQ ID NO: 89089 - DNA, 20 bp, Artificial Sequence
  MKO10089089_B_Gm5726
  gRNA
gttattcttcttacagttat

SEQ ID NO: 89090 - DNA, 20 bp, Artificial Sequence
  MKO10089090_B_Gm5726
  gRNA
gtgttattgtctgctatctg

SEQ ID NO: 89091 - DNA, 20 bp, Artificial Sequence
  MKO10089091_B_Gm5728
  gRNA
gtgttattgtctgttatctg

SEQ ID NO: 89092 - DNA, 20 bp, Artificial Sequence
  MKO10089092_B_Gm5728
  gRNA
tgccacattcatgagcatca

SEQ ID NO: 89093 - DNA, 20 bp, Artificial Sequence
  MKO10089093_B_Gm5728
  gRNA
cagtgaccttaattggaatg

SEQ ID NO: 89094 - DNA, 20 bp, Artificial Sequence
  MKO10089094_B_Gm572
  gRNA
atcttccgagcactgtactc

SEQ ID NO: 89095 - DNA, 20 bp, Artificial Sequence
  MKO10089095_B_Gm572
  gRNA
agagcgatcgctacataatg

SEQ ID NO: 89096 - DNA, 20 bp, Artificial Sequence
  MKO10089096_B_Gm572
  gRNA
ccagcgcatggagctctgac

SEQ ID NO: 89097 - DNA, 20 bp, Artificial Sequence
  MKO10089097_B_Gm5741
  gRNA
caagagcgaccccttccttg

SEQ ID NO: 89098 - DNA, 20 bp, Artificial Sequence
  MKO10089098_B_Gm5741
  gRNA
gcagttgctccactgcccga

SEQ ID NO: 89099 - DNA, 20 bp, Artificial Sequence
  MKO10089099_B_Gm5741
  gRNA
ctgtccgatgtcactgccag

SEQ ID NO: 89100 - DNA, 20 bp, Artificial Sequence
  MKO10089100_B_Gm5771
  gRNA
ttggggctatggctgtgccc

SEQ ID NO: 89101 - DNA, 20 bp, Artificial Sequence
  MKO10089101_B_Gm5771
  gRNA
acacaccaggattgtctgcc

SEQ ID NO: 89102 - DNA, 20 bp, Artificial Sequence
  MKO10089102_B_Gm5771
  gRNA
gagctgcagacaccacccac

SEQ ID NO: 89103 - DNA, 20 bp, Artificial Sequence
  MKO10089103_B_Gm5795
  gRNA
gaacttcatggaaataatta

SEQ ID NO: 89104 - DNA, 20 bp, Artificial Sequence
  MKO10089104_B_Gm5795
  gRNA
tcatcctacctgctgctcct

SEQ ID NO: 89105 - DNA, 20 bp, Artificial Sequence
  MKO10089105_B_Gm5795
  gRNA
ccgtgagtgcactcaactaa

SEQ ID NO: 89106 - DNA, 20 bp, Artificial Sequence
  MKO10089106_B_Gm5796
  gRNA
gttatcttctatcagttcct

SEQ ID NO: 89107 - DNA, 20 bp, Artificial Sequence
  MKO10089107_B_Gm5796
  gRNA
acaacatgagaagacaatgt

SEQ ID NO: 89108 - DNA, 20 bp, Artificial Sequence
  MKO10089108_B_Gm5796
  gRNA
tcatcctacctgctgttcct

SEQ ID NO: 89109 - DNA, 20 bp, Artificial Sequence
  MKO10089109_B_Gm5797
  gRNA
cagttcctcagagaacttca

SEQ ID NO: 89110 - DNA, 20 bp, Artificial Sequence
  MKO10089110_B_Gm5797
  gRNA
ccgtgagtgcactcaactaa

SEQ ID NO: 89111 - DNA, 20 bp, Artificial Sequence
  MKO10089111_B_Gm5797
  gRNA
tcatcctacctgctgctcct

SEQ ID NO: 89112 - DNA, 20 bp, Artificial Sequence
  MKO10089112_B_Gm5800
  gRNA
tgtagtcaactccttgtact

SEQ ID NO: 89113 - DNA, 20 bp, Artificial Sequence
  MKO10089113_B_Gm5800
  gRNA
gcagccttctccctacttcc

SEQ ID NO: 89114 - DNA, 20 bp, Artificial Sequence
  MKO10089114_B_Gm5800
  gRNA
accacatcaagcagaaagtc

SEQ ID NO: 89115 - DNA, 20 bp, Artificial Sequence
  MKO10089115_B_Gm5803
  gRNA
ccatagccaccttggttctg

SEQ ID NO: 89116 - DNA, 20 bp, Artificial Sequence
  MKO10089116_B_Gm5803
  gRNA
gaagctagaaacaacgcaga

SEQ ID NO: 89117 - DNA, 20 bp, Artificial Sequence
  MKO10089117_B_Gm5803
  gRNA
agacaagattctcagcgacc

SEQ ID NO: 89118 - DNA, 20 bp, Artificial Sequence
  MKO10089118_B_Gm5820
  gRNA
tcggaccacatacctgagtg

SEQ ID NO: 89119 - DNA, 20 bp, Artificial Sequence
  MKO10089119_B_Gm5820
  gRNA
ccagtcgagctgtaaaattc

SEQ ID NO: 89120 - DNA, 20 bp, Artificial Sequence
  MKO10089120_B_Gm5820
  gRNA
tcaagcaacagactagttcc

SEQ ID NO: 89121 - DNA, 20 bp, Artificial Sequence
  MKO10089121_B_Gm5862
  gRNA
tgagctcctgattgttctct

SEQ ID NO: 89122 - DNA, 20 bp, Artificial Sequence
  MKO10089122_B_Gm5862
  gRNA
tttccagtaacctgcacacc

SEQ ID NO: 89123 - DNA, 20 bp, Artificial Sequence
  MKO10089123_B_Gm5862
  gRNA
cctgatgttcttgagtctcc

SEQ ID NO: 89124 - DNA, 20 bp, Artificial Sequence
  MKO10089124_B_Gm5868
  gRNA
cattcccacaactgtttacg

SEQ ID NO: 89125 - DNA, 20 bp, Artificial Sequence
  MKO10089125_B_Gm5868
  gRNA
aggcatggctgtagatccag

SEQ ID NO: 89126 - DNA, 20 bp, Artificial Sequence
  MKO10089126_B_Gm5868
  gRNA
acacacagtcctcttgcagt

SEQ ID NO: 89127 - DNA, 20 bp, Artificial Sequence
  MKO10089127_B_Gm5878
  gRNA
tttcacaggtgctggacacc

SEQ ID NO: 89128 - DNA, 20 bp, Artificial Sequence
  MKO10089128_B_Gm5878
  gRNA
tcagtgttacatgaattcct

SEQ ID NO: 89129 - DNA, 20 bp, Artificial Sequence
  MKO10089129_B_Gm5878
  gRNA
aattcatgtaacactgaaga

SEQ ID NO: 89130 - DNA, 20 bp, Artificial Sequence
  MKO10089130_B_Gm5885
  gRNA
aatatgtccttcagatgtaa

SEQ ID NO: 89131 - DNA, 20 bp, Artificial Sequence
  MKO10089131_B_Gm5885
  gRNA
ctgccctctgagctgagctc

SEQ ID NO: 89132 - DNA, 20 bp, Artificial Sequence
  MKO10089132_B_Gm5885
  gRNA
agcctcttccaagatgcttg

SEQ ID NO: 89133 - DNA, 20 bp, Artificial Sequence
  MKO10089133_B_Gm5886
  gRNA
acatctgatgtccaagaaca

SEQ ID NO: 89134 - DNA, 20 bp, Artificial Sequence
  MKO10089134_B_Gm5886
  gRNA
cttggacatcagatgtactc

SEQ ID NO: 89135 - DNA, 20 bp, Artificial Sequence
  MKO10089135_B_Gm5886
  gRNA
aaccttctccaagatgcttg

SEQ ID NO: 89136 - DNA, 20 bp, Artificial Sequence
  MKO10089136_B_Gm5891
  gRNA
cctaaactccagatatctac

SEQ ID NO: 89137 - DNA, 20 bp, Artificial Sequence
  MKO10089137_B_Gm5891
  gRNA
tagaggagagcgagactcga

SEQ ID NO: 89138 - DNA, 20 bp, Artificial Sequence
  MKO10089138_B_Gm5891
  gRNA
ttctctgcttgcaagagttc

SEQ ID NO: 89139 - DNA, 20 bp, Artificial Sequence
  MKO10089139_B_Gm5901
  gRNA
tgccacttgggccctcatca

SEQ ID NO: 89140 - DNA, 20 bp, Artificial Sequence
  MKO10089140_B_Gm5901
  gRNA
gctcctggtggagggttgcg

SEQ ID NO: 89141 - DNA, 20 bp, Artificial Sequence
  MKO10089141_B_Gm5901
  gRNA
ctgcttcatccagtgttagc

SEQ ID NO: 89142 - DNA, 20 bp, Artificial Sequence
  MKO10089142_B_Gm590
  gRNA
caatcagtatgtccgtcgag

SEQ ID NO: 89143 - DNA, 20 bp, Artificial Sequence
  MKO10089143_B_Gm590
  gRNA
tcctgcagaagacctctcga

SEQ ID NO: 89144 - DNA, 20 bp, Artificial Sequence
  MKO10089144_B_Gm590
  gRNA
ggggtttaactggcttctaa

SEQ ID NO: 89145 - DNA, 20 bp, Artificial Sequence
  MKO10089145_B_Gm5916
  gRNA
ccttacctgtttgtgagaat

SEQ ID NO: 89146 - DNA, 20 bp, Artificial Sequence
  MKO10089146_B_Gm5916
  gRNA
gagcaaaagaccccagcatc

SEQ ID NO: 89147 - DNA, 20 bp, Artificial Sequence
  MKO10089147_B_Gm5916
  gRNA
cctactctttctcctgatgc

SEQ ID NO: 89148 - DNA, 20 bp, Artificial Sequence
  MKO10089148_B_Gm5934
  gRNA
tagaagcagatgaaaatata

SEQ ID NO: 89149 - DNA, 20 bp, Artificial Sequence
  MKO10089149_B_Gm5934
  gRNA
agaaaacgtaagtttctcag

SEQ ID NO: 89150 - DNA, 20 bp, Artificial Sequence
  MKO10089150_B_Gm5934
  gRNA
acgttctgtagagacaccaa

SEQ ID NO: 89151 - DNA, 20 bp, Artificial Sequence
  MKO10089151_B_Gm5935
  gRNA
agaaaacgtaagtttctcag

SEQ ID NO: 89152 - DNA, 20 bp, Artificial Sequence
  MKO10089152_B_Gm5935
  gRNA
acgttctgtagagacaccaa

SEQ ID NO: 89153 - DNA, 20 bp, Artificial Sequence
  MKO10089153_B_Gm5935
  gRNA
aatccagtaactcatgatga

SEQ ID NO: 89154 - DNA, 20 bp, Artificial Sequence
  MKO10089154_B_Gm5936
  gRNA
ctcccgcgctctgaaatgga

SEQ ID NO: 89155 - DNA, 20 bp, Artificial Sequence
  MKO10089155_B_Gm5936
  gRNA
ggaccccagcccatagtaaa

SEQ ID NO: 89156 - DNA, 20 bp, Artificial Sequence
  MKO10089156_B_Gm5936
  gRNA
gagtgccccagcctccagaa

SEQ ID NO: 89157 - DNA, 20 bp, Artificial Sequence
  MKO10089157_B_Gm5938
  gRNA
ctataaaatactaagttctc

SEQ ID NO: 89158 - DNA, 20 bp, Artificial Sequence
  MKO10089158_B_Gm5938
  gRNA
agagtagacaagatagagag

SEQ ID NO: 89159 - DNA, 20 bp, Artificial Sequence
  MKO10089159_B_Gm5938
  gRNA
tcgtagccttacctgtgaaa

SEQ ID NO: 89160 - DNA, 20 bp, Artificial Sequence
  MKO10089160_B_Gm5941
  gRNA
aggcaaatcttcactgtctt

SEQ ID NO: 89161 - DNA, 20 bp, Artificial Sequence
  MKO10089161_B_Gm5941
  gRNA
tctaatcttcttgctacatt

SEQ ID NO: 89162 - DNA, 20 bp, Artificial Sequence
  MKO10089162_B_Gm5941
  gRNA
cagatgctgtgccatcaacc

SEQ ID NO: 89163 - DNA, 20 bp, Artificial Sequence
  MKO10089163_B_Gm595
  gRNA
acaggcagtttggccccgag

SEQ ID NO: 89164 - DNA, 20 bp, Artificial Sequence
  MKO10089164_B_Gm595
  gRNA
tgacccatattgtaaactga

SEQ ID NO: 89165 - DNA, 20 bp, Artificial Sequence
  MKO10089165_B_Gm595
  gRNA
tcaacacactttattattgc

SEQ ID NO: 89166 - DNA, 20 bp, Artificial Sequence
  MKO10089166_B_Gm597
  gRNA
gatccccactccaagtataa

SEQ ID NO: 89167 - DNA, 20 bp, Artificial Sequence
  MKO10089167_B_Gm597
  gRNA
gtccttcgcaacactgatat

SEQ ID NO: 89168 - DNA, 20 bp, Artificial Sequence
  MKO10089168_B_Gm597
  gRNA
aataaccaccgctgtttgtt

SEQ ID NO: 89169 - DNA, 20 bp, Artificial Sequence
  MKO10089169_B_Gm6026
  gRNA
agccgtgtagatcgtttcct

SEQ ID NO: 89170 - DNA, 20 bp, Artificial Sequence
  MKO10089170_B_Gm6026
  gRNA
tgccaccttgtttgaagagt

SEQ ID NO: 89171 - DNA, 20 bp, Artificial Sequence
  MKO10089171_B_Gm6026
  gRNA
accacctgacacacatgctc

SEQ ID NO: 89172 - DNA, 20 bp, Artificial Sequence
  MKO10089172_B_Gm6034
  gRNA
caggccctctcatgggacac

SEQ ID NO: 89173 - DNA, 20 bp, Artificial Sequence
  MKO10089173_B_Gm6034
  gRNA
ctcagatcactcaacacaaa

SEQ ID NO: 89174 - DNA, 20 bp, Artificial Sequence
  MKO10089174_B_Gm6034
  gRNA
gagaacaagggagctgagag

SEQ ID NO: 89175 - DNA, 20 bp, Artificial Sequence
  MKO10089175_B_Gm6040
  gRNA
gcttcaggcagatacctcct

SEQ ID NO: 89176 - DNA, 20 bp, Artificial Sequence
  MKO10089176_B_Gm6040
  gRNA
tccacaataatgagactcca

SEQ ID NO: 89177 - DNA, 20 bp, Artificial Sequence
  MKO10089177_B_Gm6040
  gRNA
ccaaactgtgagcctttcag

SEQ ID NO: 89178 - DNA, 20 bp, Artificial Sequence
  MKO10089178_B_Gm6086
  gRNA
caaccagcaggaacacggcc

SEQ ID NO: 89179 - DNA, 20 bp, Artificial Sequence
  MKO10089179_B_Gm6086
  gRNA
cctatccacagcgctgcccg

SEQ ID NO: 89180 - DNA, 20 bp, Artificial Sequence
  MKO10089180_B_Gm6086
  gRNA
ataccgtgtcacaaaaagcc

SEQ ID NO: 89181 - DNA, 20 bp, Artificial Sequence
  MKO10089181_B_Gm608
  gRNA
cagctccgttatgtacttaa

SEQ ID NO: 89182 - DNA, 20 bp, Artificial Sequence
  MKO10089182_B_Gm608
  gRNA
aaccgagagacacacaatgc

SEQ ID NO: 89183 - DNA, 20 bp, Artificial Sequence
  MKO10089183_B_Gm608
  gRNA
tacctgcattgtgtgtctct

SEQ ID NO: 89184 - DNA, 20 bp, Artificial Sequence
  MKO10089184_B_Gm609
  gRNA
caatcaattatgtctcagac

SEQ ID NO: 89185 - DNA, 20 bp, Artificial Sequence
  MKO10089185_B_Gm609
  gRNA
taaagcataacacttatgag

SEQ ID NO: 89186 - DNA, 20 bp, Artificial Sequence
  MKO10089186_B_Gm609
  gRNA
ggctcattacctcaaaatat

SEQ ID NO: 89187 - DNA, 20 bp, Artificial Sequence
  MKO10089187_B_Gm6121
  gRNA
agaaaacgtaagtttctcag

SEQ ID NO: 89188 - DNA, 20 bp, Artificial Sequence
  MKO10089188_B_Gm6121
  gRNA
acgttctgtagagacaccaa

SEQ ID NO: 89189 - DNA, 20 bp, Artificial Sequence
  MKO10089189_B_Gm6121
  gRNA
aatccagtaactcatgatga

SEQ ID NO: 89190 - DNA, 20 bp, Artificial Sequence
  MKO10089190_B_Gm614
  gRNA
tagcacaagcagtcaactga

SEQ ID NO: 89191 - DNA, 20 bp, Artificial Sequence
  MKO10089191_B_Gm614
  gRNA
catgggcacaatagctttgt

SEQ ID NO: 89192 - DNA, 20 bp, Artificial Sequence
  MKO10089192_B_Gm614
  gRNA
aatccagaacctgaactagt

SEQ ID NO: 89193 - DNA, 20 bp, Artificial Sequence
  MKO10089193_B_Gm6164
  gRNA
gcccacactgaatccagaag

SEQ ID NO: 89194 - DNA, 20 bp, Artificial Sequence
  MKO10089194_B_Gm6164
  gRNA
gttattcttcttacagttgt

SEQ ID NO: 89195 - DNA, 20 bp, Artificial Sequence
  MKO10089195_B_Gm6164
  gRNA
gtgttattgtctgttatctg

SEQ ID NO: 89196 - DNA, 20 bp, Artificial Sequence
  MKO10089196_B_Gm6251
  gRNA
ccacctcgtaggcagcacca

SEQ ID NO: 89197 - DNA, 20 bp, Artificial Sequence
  MKO10089197_B_Gm6251
  gRNA
aacccagaggcatcgaccac

SEQ ID NO: 89198 - DNA, 20 bp, Artificial Sequence
  MKO10089198_B_Gm6251
  gRNA
ggccccttctccgcaccctg

SEQ ID NO: 89199 - DNA, 20 bp, Artificial Sequence
  MKO10089199_B_Gm6289
  gRNA
aagtgtctgacatctgaagc

SEQ ID NO: 89200 - DNA, 20 bp, Artificial Sequence
  MKO10089200_B_Gm6289
  gRNA
tttcttcccagtacaaagtc

SEQ ID NO: 89201 - DNA, 20 bp, Artificial Sequence
  MKO10089201_B_Gm6289
  gRNA
aagacagtccccattacaga

SEQ ID NO: 89202 - DNA, 20 bp, Artificial Sequence
  MKO10089202_B_Gm6370
  gRNA
ccactcacctcttagtttgc

SEQ ID NO: 89203 - DNA, 20 bp, Artificial Sequence
  MKO10089203_B_Gm6370
  gRNA
gccacaggtatgcatccttc

SEQ ID NO: 89204 - DNA, 20 bp, Artificial Sequence
  MKO10089204_B_Gm6370
  gRNA
tgcctcctgatcttccagca

SEQ ID NO: 89205 - DNA, 20 bp, Artificial Sequence
  MKO10089205_B_Gm6377
  gRNA
atacaaattcccgactagct

SEQ ID NO: 89206 - DNA, 20 bp, Artificial Sequence
  MKO10089206_B_Gm6377
  gRNA
gattgcatagtgctaaagag

SEQ ID NO: 89207 - DNA, 20 bp, Artificial Sequence
  MKO10089207_B_Gm6377
  gRNA
aattagccttcaaatctctc

SEQ ID NO: 89208 - DNA, 20 bp, Artificial Sequence
  MKO10089208_B_Gm6406
  gRNA
gggttgtgtcatgagtccct

SEQ ID NO: 89209 - DNA, 20 bp, Artificial Sequence
  MKO10089209_B_Gm6406
  gRNA
agtactcacaggtttcctcc

SEQ ID NO: 89210 - DNA, 20 bp, Artificial Sequence
  MKO10089210_B_Gm6406
  gRNA
gcgtcgaccccgcgccctgc

SEQ ID NO: 89211 - DNA, 20 bp, Artificial Sequence
  MKO10089211_B_Gm6408
  gRNA
gtggaatagaaacctgaata

SEQ ID NO: 89212 - DNA, 20 bp, Artificial Sequence
  MKO10089212_B_Gm6408
  gRNA
ccactcacgttgtcatcagc

SEQ ID NO: 89213 - DNA, 20 bp, Artificial Sequence
  MKO10089213_B_Gm6408
  gRNA
ggtctgttctcaaaatgaac

SEQ ID NO: 89214 - DNA, 20 bp, Artificial Sequence
  MKO10089214_B_Gm6432
  gRNA
cacaactcgtttgcctgatg

SEQ ID NO: 89215 - DNA, 20 bp, Artificial Sequence
  MKO10089215_B_Gm6432
  gRNA
aggcaaacgagttgtgtacg

SEQ ID NO: 89216 - DNA, 20 bp, Artificial Sequence
  MKO10089216_B_Gm6432
  gRNA
taatggtaaaatagtagagt

SEQ ID NO: 89217 - DNA, 20 bp, Artificial Sequence
  MKO10089217_B_Gm6460
  gRNA
actgagatcaacgaagaacc

SEQ ID NO: 89218 - DNA, 20 bp, Artificial Sequence
  MKO10089218_B_Gm6460
  gRNA
ttgttgggtctcatggttgc

SEQ ID NO: 89219 - DNA, 20 bp, Artificial Sequence
  MKO10089219_B_Gm6460
  gRNA
cctacatagccagctcttga

SEQ ID NO: 89220 - DNA, 20 bp, Artificial Sequence
  MKO10089220_B_Gm6484
  gRNA
cccgctgctgtcgctgcacg

SEQ ID NO: 89221 - DNA, 20 bp, Artificial Sequence
  MKO10089221_B_Gm6484
  gRNA
ggaagtggcccgggcccagc

SEQ ID NO: 89222 - DNA, 20 bp, Artificial Sequence
  MKO10089222_B_Gm6484
  gRNA
ataagcagagccacctctta

SEQ ID NO: 89223 - DNA, 20 bp, Artificial Sequence
  MKO10089223_B_Gm648
  gRNA
aggggcataccatgctgaaa

SEQ ID NO: 89224 - DNA, 20 bp, Artificial Sequence
  MKO10089224_B_Gm648
  gRNA
ccagtatcttctccagatac

SEQ ID NO: 89225 - DNA, 20 bp, Artificial Sequence
  MKO10089225_B_Gm648
  gRNA
atctcttgaagcttcagctg

SEQ ID NO: 89226 - DNA, 20 bp, Artificial Sequence
  MKO10089226_B_Gm6531
  gRNA
gcccaaggacatagacaagt

SEQ ID NO: 89227 - DNA, 20 bp, Artificial Sequence
  MKO10089227_B_Gm6531
  gRNA
ttcacatcttactgttccag

SEQ ID NO: 89228 - DNA, 20 bp, Artificial Sequence
  MKO10089228_B_Gm6531
  gRNA
gaccaacttgtctatgtcct

SEQ ID NO: 89229 - DNA, 20 bp, Artificial Sequence
  MKO10089229_B_Gm6537
  gRNA
gctaacccgctgtctagcag

SEQ ID NO: 89230 - DNA, 20 bp, Artificial Sequence
  MKO10089230_B_Gm6537
  gRNA
cccgagagcctcccctagca

SEQ ID NO: 89231 - DNA, 20 bp, Artificial Sequence
  MKO10089231_B_Gm6537
  gRNA
attgatgcccagaccctcca

SEQ ID NO: 89232 - DNA, 20 bp, Artificial Sequence
  MKO10089232_B_Gm6583
  gRNA
tgagccgtctattaagtgcc

SEQ ID NO: 89233 - DNA, 20 bp, Artificial Sequence
  MKO10089233_B_Gm6583
  gRNA
gcaccaggaacaaacgatcc

SEQ ID NO: 89234 - DNA, 20 bp, Artificial Sequence
  MKO10089234_B_Gm6583
  gRNA
gcctgccgtgcgggaggtga

SEQ ID NO: 89235 - DNA, 20 bp, Artificial Sequence
  MKO10089235_B_Gm6588
  gRNA
tgtgcctcgcggtccaggaa

SEQ ID NO: 89236 - DNA, 20 bp, Artificial Sequence
  MKO10089236_B_Gm6588
  gRNA
ggagaggattcatacgatgt

SEQ ID NO: 89237 - DNA, 20 bp, Artificial Sequence
  MKO10089237_B_Gm6588
  gRNA
gtgagctttctgtcgagata

SEQ ID NO: 89238 - DNA, 20 bp, Artificial Sequence
  MKO10089238_B_Gm6592
  gRNA
gatatttctacatacttctc

SEQ ID NO: 89239 - DNA, 20 bp, Artificial Sequence
  MKO10089239_B_Gm6592
  gRNA
gaatgctttgaagaatcttt

SEQ ID NO: 89240 - DNA, 20 bp, Artificial Sequence
  MKO10089240_B_Gm6592
  gRNA
gacaccaagaaaacgaatga

SEQ ID NO: 89241 - DNA, 20 bp, Artificial Sequence
  MKO10089241_B_Gm6614
  gRNA
ctggtaggaaatattatacg

SEQ ID NO: 89242 - DNA, 20 bp, Artificial Sequence
  MKO10089242_B_Gm6614
  gRNA
acacacaaaaagctgtttga

SEQ ID NO: 89243 - DNA, 20 bp, Artificial Sequence
  MKO10089243_B_Gm6614
  gRNA
aagatgtttggcccagtaat

SEQ ID NO: 89244 - DNA, 20 bp, Artificial Sequence
  MKO10089244_B_Gm6696
  gRNA
cattaaatgaccctttctgc

SEQ ID NO: 89245 - DNA, 20 bp, Artificial Sequence
  MKO10089245_B_Gm6696
  gRNA
caaaggagacagaaacagct

SEQ ID NO: 89246 - DNA, 20 bp, Artificial Sequence
  MKO10089246_B_Gm6696
  gRNA
agtaaaattgatgagcagcc

SEQ ID NO: 89247 - DNA, 20 bp, Artificial Sequence
  MKO10089247_B_Gm6710
  gRNA
actgggtttaggttacattt

SEQ ID NO: 89248 - DNA, 20 bp, Artificial Sequence
  MKO10089248_B_Gm6710
  gRNA
accatactagttacattcat

SEQ ID NO: 89249 - DNA, 20 bp, Artificial Sequence
  MKO10089249_B_Gm6710
  gRNA
ccctctgagtttattcaatg

SEQ ID NO: 89250 - DNA, 20 bp, Artificial Sequence
  MKO10089250_B_Gm6760
  gRNA
gcctacacaaagcaatacct

SEQ ID NO: 89251 - DNA, 20 bp, Artificial Sequence
  MKO10089251_B_Gm6760
  gRNA
gccagtcactgggtgttatt

SEQ ID NO: 89252 - DNA, 20 bp, Artificial Sequence
  MKO10089252_B_Gm6760
  gRNA
tcagaacaagcgagatgaga

SEQ ID NO: 89253 - DNA, 20 bp, Artificial Sequence
  MKO10089253_B_Gm6763
  gRNA
ctgagtaactgctagatcct

SEQ ID NO: 89254 - DNA, 20 bp, Artificial Sequence
  MKO10089254_B_Gm6763
  gRNA
gcctccaagtgtccatttct

SEQ ID NO: 89255 - DNA, 20 bp, Artificial Sequence
  MKO10089255_B_Gm6763
  gRNA
gctgtgcactatgatcgctg

SEQ ID NO: 89256 - DNA, 20 bp, Artificial Sequence
  MKO10089256_B_Gm6772
  gRNA
tgaagctgaattgacacctc

SEQ ID NO: 89257 - DNA, 20 bp, Artificial Sequence
  MKO10089257_B_Gm6772
  gRNA
cactacacccaccagtttgc

SEQ ID NO: 89258 - DNA, 20 bp, Artificial Sequence
  MKO10089258_B_Gm6772
  gRNA
agagcgaagagttattctcc

SEQ ID NO: 89259 - DNA, 20 bp, Artificial Sequence
  MKO10089259_B_Gm6812
  gRNA
gctgtccagctcatagcttg

SEQ ID NO: 89260 - DNA, 20 bp, Artificial Sequence
  MKO10089260_B_Gm6812
  gRNA
tctcattcttcttcacagct

SEQ ID NO: 89261 - DNA, 20 bp, Artificial Sequence
  MKO10089261_B_Gm6812
  gRNA
cgtaaatgagaagcctaacc

SEQ ID NO: 89262 - DNA, 20 bp, Artificial Sequence
  MKO10089262_B_Gm684
  gRNA
actaccatgccatcttccgc

SEQ ID NO: 89263 - DNA, 20 bp, Artificial Sequence
  MKO10089263_B_Gm684
  gRNA
ctgtactgacctgcggaaga

SEQ ID NO: 89264 - DNA, 20 bp, Artificial Sequence
  MKO10089264_B_Gm684
  gRNA
gaattaccaggctctggttg

SEQ ID NO: 89265 - DNA, 20 bp, Artificial Sequence
  MKO10089265_B_Gm6878
  gRNA
ccagggcttgctgcctgtat

SEQ ID NO: 89266 - DNA, 20 bp, Artificial Sequence
  MKO10089266_B_Gm6878
  gRNA
agcccaaacagcacaccaac

SEQ ID NO: 89267 - DNA, 20 bp, Artificial Sequence
  MKO10089267_B_Gm6878
  gRNA
cactgtgcagtctctccagt

SEQ ID NO: 89268 - DNA, 20 bp, Artificial Sequence
  MKO10089268_B_Gm6880
  gRNA
gctctgtaacagtgcctttc

SEQ ID NO: 89269 - DNA, 20 bp, Artificial Sequence
  MKO10089269_B_Gm6880
  gRNA
tttccttgaccagctctccc

SEQ ID NO: 89270 - DNA, 20 bp, Artificial Sequence
  MKO10089270_B_Gm6880
  gRNA
tgacaacagccacaaactcc

SEQ ID NO: 89271 - DNA, 20 bp, Artificial Sequence
  MKO10089271_B_Gm6890
  gRNA
aggcatggcccgcagatccc

SEQ ID NO: 89272 - DNA, 20 bp, Artificial Sequence
  MKO10089272_B_Gm6890
  gRNA
tgacaacagccacaaactcc

SEQ ID NO: 89273 - DNA, 20 bp, Artificial Sequence
  MKO10089273_B_Gm6890
  gRNA
tttccttgaccagctctccc

SEQ ID NO: 89274 - DNA, 20 bp, Artificial Sequence
  MKO10089274_B_Gm6902
  gRNA
cattgtccatagagacataa

SEQ ID NO: 89275 - DNA, 20 bp, Artificial Sequence
  MKO10089275_B_Gm6902
  gRNA
caagccaaaatcacacagct

SEQ ID NO: 89276 - DNA, 20 bp, Artificial Sequence
  MKO10089276_B_Gm6902
  gRNA
gcaacatcttgatcgactac

SEQ ID NO: 89277 - DNA, 20 bp, Artificial Sequence
  MKO10089277_B_Gm6904
  gRNA
atcctgcagctgtattcatc

SEQ ID NO: 89278 - DNA, 20 bp, Artificial Sequence
  MKO10089278_B_Gm6904
  gRNA
tcaaagtttctaactgtatt

SEQ ID NO: 89279 - DNA, 20 bp, Artificial Sequence
  MKO10089279_B_Gm6904
  gRNA
ttaccacttatcctgtgcca

SEQ ID NO: 89280 - DNA, 20 bp, Artificial Sequence
  MKO10089280_B_Gm6927
  gRNA
gagcctaccacagtctttat

SEQ ID NO: 89281 - DNA, 20 bp, Artificial Sequence
  MKO10089281_B_Gm6927
  gRNA
ccaaagcaaaacctccgact

SEQ ID NO: 89282 - DNA, 20 bp, Artificial Sequence
  MKO10089282_B_Gm6927
  gRNA
cgatgacagctttatccctt

SEQ ID NO: 89283 - DNA, 20 bp, Artificial Sequence
  MKO10089283_B_Gm694
  gRNA
ggagcgcatggctttctcaa

SEQ ID NO: 89284 - DNA, 20 bp, Artificial Sequence
  MKO10089284_B_Gm694
  gRNA
tgatgcgtggggtggcgccg

SEQ ID NO: 89285 - DNA, 20 bp, Artificial Sequence
  MKO10089285_B_Gm694
  gRNA
aagaccttcgttatgttccg

SEQ ID NO: 89286 - DNA, 20 bp, Artificial Sequence
  MKO10089286_B_Gm7030
  gRNA
ggagccccggttcaccgccg

SEQ ID NO: 89287 - DNA, 20 bp, Artificial Sequence
  MKO10089287_B_Gm7030
  gRNA
ccctctacttctcctgctgc

SEQ ID NO: 89288 - DNA, 20 bp, Artificial Sequence
  MKO10089288_B_Gm7030
  gRNA
gcagctgtcgtggtgccttt

SEQ ID NO: 89289 - DNA, 20 bp, Artificial Sequence
  MKO10089289_B_Gm7073
  gRNA
aaacttaccctcctggtggc

SEQ ID NO: 89290 - DNA, 20 bp, Artificial Sequence
  MKO10089290_B_Gm7073
  gRNA
ttcacctgacacaggtatag

SEQ ID NO: 89291 - DNA, 20 bp, Artificial Sequence
  MKO10089291_B_Gm7073
  gRNA
aactctatgatatattctac

SEQ ID NO: 89292 - DNA, 20 bp, Artificial Sequence
  MKO10089292_B_Gm7092
  gRNA
cccccgccagaagggaaccc

SEQ ID NO: 89293 - DNA, 20 bp, Artificial Sequence
  MKO10089293_B_Gm7092
  gRNA
gcctgaccggggttcccttc

SEQ ID NO: 89294 - DNA, 20 bp, Artificial Sequence
  MKO10089294_B_Gm7092
  gRNA
gacttcgagatgaccatctg

SEQ ID NO: 89295 - DNA, 20 bp, Artificial Sequence
  MKO10089295_B_Gm7102
  gRNA
ccgcttcgcgtctccgtccc

SEQ ID NO: 89296 - DNA, 20 bp, Artificial Sequence
  MKO10089296_B_Gm7102
  gRNA
cagcacagcagcaacttctc

SEQ ID NO: 89297 - DNA, 20 bp, Artificial Sequence
  MKO10089297_B_Gm7102
  gRNA
tagatgtccttggagaaccc

SEQ ID NO: 89298 - DNA, 20 bp, Artificial Sequence
  MKO10089298_B_Gm711
  gRNA
tacctcctccagggccttgt

SEQ ID NO: 89299 - DNA, 20 bp, Artificial Sequence
  MKO10089299_B_Gm711
  gRNA
accatgagatgttcatcatg

SEQ ID NO: 89300 - DNA, 20 bp, Artificial Sequence
  MKO10089300_B_Gm711
  gRNA
tccacatgatgaacatctca

SEQ ID NO: 89301 - DNA, 20 bp, Artificial Sequence
  MKO10089301_B_Gm7120
  gRNA
ctccactgtgatacccatcg

SEQ ID NO: 89302 - DNA, 20 bp, Artificial Sequence
  MKO10089302_B_Gm7120
  gRNA
agctagatccctatctttac

SEQ ID NO: 89303 - DNA, 20 bp, Artificial Sequence
  MKO10089303_B_Gm7120
  gRNA
gtgtactatgttatctgaga

SEQ ID NO: 89304 - DNA, 20 bp, Artificial Sequence
  MKO10089304_B_Gm7157
  gRNA
actgtcacctacaatgcctt

SEQ ID NO: 89305 - DNA, 20 bp, Artificial Sequence
  MKO10089305_B_Gm7157
  gRNA
gccatcctgttcttgtgtag

SEQ ID NO: 89306 - DNA, 20 bp, Artificial Sequence
  MKO10089306_B_Gm7157
  gRNA
aatcccctccttgtttatga

SEQ ID NO: 89307 - DNA, 20 bp, Artificial Sequence
  MKO10089307_B_Gm715
  gRNA
gcaagcatcagcatgcgatc

SEQ ID NO: 89308 - DNA, 20 bp, Artificial Sequence
  MKO10089308_B_Gm715
  gRNA
ggctcaagatcgagcgccag

SEQ ID NO: 89309 - DNA, 20 bp, Artificial Sequence
  MKO10089309_B_Gm715
  gRNA
attgcacaagcgtaaccgaa

SEQ ID NO: 89310 - DNA, 20 bp, Artificial Sequence
  MKO10089310_B_Gm7168
  gRNA
gaagagtagaccatgcccac

SEQ ID NO: 89311 - DNA, 20 bp, Artificial Sequence
  MKO10089311_B_Gm7168
  gRNA
cgaagcttcaccagcatcca

SEQ ID NO: 89312 - DNA, 20 bp, Artificial Sequence
  MKO10089312_B_Gm7168
  gRNA
agagccagcctatgtccaga

SEQ ID NO: 89313 - DNA, 20 bp, Artificial Sequence
  MKO10089313_B_Gm7173
  gRNA
aatgtgccaaaatcaactac

SEQ ID NO: 89314 - DNA, 20 bp, Artificial Sequence
  MKO10089314_B_Gm7173
  gRNA
tgacaataggtaactgaccc

SEQ ID NO: 89315 - DNA, 20 bp, Artificial Sequence
  MKO10089315_B_Gm7173
  gRNA
aaattggaatgtatacgatt

SEQ ID NO: 89316 - DNA, 20 bp, Artificial Sequence
  MKO10089316_B_Gm7244
  gRNA
gaagatactcacctttcttg

SEQ ID NO: 89317 - DNA, 20 bp, Artificial Sequence
  MKO10089317_B_Gm7244
  gRNA
gaatcatgaggaggacgata

SEQ ID NO: 89318 - DNA, 20 bp, Artificial Sequence
  MKO10089318_B_Gm7244
  gRNA
gggcggttcccctccgtaag

SEQ ID NO: 89319 - DNA, 20 bp, Artificial Sequence
  MKO10089319_B_Gm7257
  gRNA
tgtgctaacatttgcttcac

SEQ ID NO: 89320 - DNA, 20 bp, Artificial Sequence
  MKO10089320_B_Gm7257
  gRNA
agcaaatgttagcacatctt

SEQ ID NO: 89321 - DNA, 20 bp, Artificial Sequence
  MKO10089321_B_Gm7257
  gRNA
gcacatcttgcagctcctgc

SEQ ID NO: 89322 - DNA, 20 bp, Artificial Sequence
  MKO10089322_B_Gm7325
  gRNA
tttacagtgcagctttcttc

SEQ ID NO: 89323 - DNA, 20 bp, Artificial Sequence
  MKO10089323_B_Gm7325
  gRNA
acctcctgcccttgctgcgc

SEQ ID NO: 89324 - DNA, 20 bp, Artificial Sequence
  MKO10089324_B_Gm7325
  gRNA
gctgctgcctgttgcccgcc

SEQ ID NO: 89325 - DNA, 20 bp, Artificial Sequence
  MKO10089325_B_Gm732
  gRNA
tagaaatggtcctgcacatc

SEQ ID NO: 89326 - DNA, 20 bp, Artificial Sequence
  MKO10089326_B_Gm732
  gRNA
aataacgtatctatgaataa

SEQ ID NO: 89327 - DNA, 20 bp, Artificial Sequence
  MKO10089327_B_Gm732
  gRNA
tctaaacgaccatctgctca

SEQ ID NO: 89328 - DNA, 20 bp, Artificial Sequence
  MKO10089328_B_Gm7361
  gRNA
caccaaaagttggtgaatga

SEQ ID NO: 89329 - DNA, 20 bp, Artificial Sequence
  MKO10089329_B_Gm7361
  gRNA
caatgtatacctcttgttca

SEQ ID NO: 89330 - DNA, 20 bp, Artificial Sequence
  MKO10089330_B_Gm7361
  gRNA
aagcaaaaagcagtttgaga

SEQ ID NO: 89331 - DNA, 20 bp, Artificial Sequence
  MKO10089331_B_Gm7534
  gRNA
tcatcgggtccaggtcgttc

SEQ ID NO: 89332 - DNA, 20 bp, Artificial Sequence
  MKO10089332_B_Gm7534
  gRNA
aagccccgttgctcaagtcc

SEQ ID NO: 89333 - DNA, 20 bp, Artificial Sequence
  MKO10089333_B_Gm7534
  gRNA
agatagcaaccctgcgctgc

SEQ ID NO: 89334 - DNA, 20 bp, Artificial Sequence
  MKO10089334_B_Gm757
  gRNA
tagatagtaatgcgaaccca

SEQ ID NO: 89335 - DNA, 20 bp, Artificial Sequence
  MKO10089335_B_Gm757
  gRNA
tagccagagtcagactactt

SEQ ID NO: 89336 - DNA, 20 bp, Artificial Sequence
  MKO10089336_B_Gm757
  gRNA
tctatgcctcttgtaaaccc

SEQ ID NO: 89337 - DNA, 20 bp, Artificial Sequence
  MKO10089337_B_Gm7609
  gRNA
agaagcctgtgcagacacca

SEQ ID NO: 89338 - DNA, 20 bp, Artificial Sequence
  MKO10089338_B_Gm7609
  gRNA
tctacgaatgagattcaaat

SEQ ID NO: 89339 - DNA, 20 bp, Artificial Sequence
  MKO10089339_B_Gm7609
  gRNA
gctagattcctgtagatcgc

SEQ ID NO: 89340 - DNA, 20 bp, Artificial Sequence
  MKO10089340_B_Gm7616
  gRNA
tcacagctaggagactgagt

SEQ ID NO: 89341 - DNA, 20 bp, Artificial Sequence
  MKO10089341_B_Gm7616
  gRNA
ccccactcacatgtctatgc

SEQ ID NO: 89342 - DNA, 20 bp, Artificial Sequence
  MKO10089342_B_Gm7616
  gRNA
agccctgaagaatgccctga

SEQ ID NO: 89343 - DNA, 20 bp, Artificial Sequence
  MKO10089343_B_Gm765
  gRNA
gatgaactgaagtattagtt

SEQ ID NO: 89344 - DNA, 20 bp, Artificial Sequence
  MKO10089344_B_Gm765
  gRNA
tcagatgtcagaaattgagt

SEQ ID NO: 89345 - DNA, 20 bp, Artificial Sequence
  MKO10089345_B_Gm765
  gRNA
aaccttccttggttaaaaga

SEQ ID NO: 89346 - DNA, 20 bp, Artificial Sequence
  MKO10089346_B_Gm766
  gRNA
tggggttgtccctgtagtag

SEQ ID NO: 89347 - DNA, 20 bp, Artificial Sequence
  MKO10089347_B_Gm766
  gRNA
actcaaaacgtgatcaaacc

SEQ ID NO: 89348 - DNA, 20 bp, Artificial Sequence
  MKO10089348_B_Gm766
  gRNA
ctacatcgtcagaaatccga

SEQ ID NO: 89349 - DNA, 20 bp, Artificial Sequence
  MKO10089349_B_Gm7694
  gRNA
gccccaggctctatcgcccc

SEQ ID NO: 89350 - DNA, 20 bp, Artificial Sequence
  MKO10089350_B_Gm7694
  gRNA
ctggaagtccgtgcctgcgg

SEQ ID NO: 89351 - DNA, 20 bp, Artificial Sequence
  MKO10089351_B_Gm7694
  gRNA
ccggagtctaccattgaaat

SEQ ID NO: 89352 - DNA, 20 bp, Artificial Sequence
  MKO10089352_B_Gm7714
  gRNA
gcttcttataggatgcttcc

SEQ ID NO: 89353 - DNA, 20 bp, Artificial Sequence
  MKO10089353_B_Gm7714
  gRNA
tagaccaaattgtccatgct

SEQ ID NO: 89354 - DNA, 20 bp, Artificial Sequence
  MKO10089354_B_Gm7714
  gRNA
tgatgagttgaaggagcgag

SEQ ID NO: 89355 - DNA, 20 bp, Artificial Sequence
  MKO10089355_B_Gm773
  gRNA
acaagcatatcaaacaacat

SEQ ID NO: 89356 - DNA, 20 bp, Artificial Sequence
  MKO10089356_B_Gm773
  gRNA
acagaaatgaagtaaagaat

SEQ ID NO: 89357 - DNA, 20 bp, Artificial Sequence
  MKO10089357_B_Gm773
  gRNA
ttataactctgtttcagcag

SEQ ID NO: 89358 - DNA, 20 bp, Artificial Sequence
  MKO10089358_B_Gm7849
  gRNA
cagcctttatgatgtgtatt

SEQ ID NO: 89359 - DNA, 20 bp, Artificial Sequence
  MKO10089359_B_Gm7849
  gRNA
agatgaagagactaaaactc

SEQ ID NO: 89360 - DNA, 20 bp, Artificial Sequence
  MKO10089360_B_Gm7849
  gRNA
acagcctggtcctcttcccc

SEQ ID NO: 89361 - DNA, 20 bp, Artificial Sequence
  MKO10089361_B_Gm7861
  gRNA
cagcctttatgatgtgtatt

SEQ ID NO: 89362 - DNA, 20 bp, Artificial Sequence
  MKO10089362_B_Gm7861
  gRNA
agatgaagagactaaaactc

SEQ ID NO: 89363 - DNA, 20 bp, Artificial Sequence
  MKO10089363_B_Gm7861
  gRNA
acagcctggtcctcttcccc

SEQ ID NO: 89364 - DNA, 20 bp, Artificial Sequence
  MKO10089364_B_Gm7903
  gRNA
cctacaggagccctaaactg

SEQ ID NO: 89365 - DNA, 20 bp, Artificial Sequence
  MKO10089365_B_Gm7903
  gRNA
aatgccacctcccatagcaa

SEQ ID NO: 89366 - DNA, 20 bp, Artificial Sequence
  MKO10089366_B_Gm7903
  gRNA
cagagtactatctgctgatt

SEQ ID NO: 89367 - DNA, 20 bp, Artificial Sequence
  MKO10089367_B_Gm7978
  gRNA
acctgaagacctgactcatg

SEQ ID NO: 89368 - DNA, 20 bp, Artificial Sequence
  MKO10089368_B_Gm7978
  gRNA
taggtgcttgatgacaccct

SEQ ID NO: 89369 - DNA, 20 bp, Artificial Sequence
  MKO10089369_B_Gm7978
  gRNA
ccgccagcaaaaacaaagtc

SEQ ID NO: 89370 - DNA, 20 bp, Artificial Sequence
  MKO10089370_B_Gm806
  gRNA
atgtactcccgcacagcttc

SEQ ID NO: 89371 - DNA, 20 bp, Artificial Sequence
  MKO10089371_B_Gm806
  gRNA
agtctggtggacagtcttca

SEQ ID NO: 89372 - DNA, 20 bp, Artificial Sequence
  MKO10089372_B_Gm806
  gRNA
tggttgcaacaacttggtac

SEQ ID NO: 89373 - DNA, 20 bp, Artificial Sequence
  MKO10089373_B_Gm813
  gRNA
tgcgatagatattctaaaca

SEQ ID NO: 89374 - DNA, 20 bp, Artificial Sequence
  MKO10089374_B_Gm813
  gRNA
ggtctgcattccggaaattc

SEQ ID NO: 89375 - DNA, 20 bp, Artificial Sequence
  MKO10089375_B_Gm813
  gRNA
cagtgatgcttatatgttct

SEQ ID NO: 89376 - DNA, 20 bp, Artificial Sequence
  MKO10089376_B_Gm815
  gRNA
ctcactaggtgcctcaagag

SEQ ID NO: 89377 - DNA, 20 bp, Artificial Sequence
  MKO10089377_B_Gm815
  gRNA
agcagttctaaacgtagaga

SEQ ID NO: 89378 - DNA, 20 bp, Artificial Sequence
  MKO10089378_B_Gm815
  gRNA
tttcatgatggccctgtctg

SEQ ID NO: 89379 - DNA, 20 bp, Artificial Sequence
  MKO10089379_B_Gm8267
  gRNA
agactatttcacagggagaa

SEQ ID NO: 89380 - DNA, 20 bp, Artificial Sequence
  MKO10089380_B_Gm8267
  gRNA
tgaacactgatttgaactac

SEQ ID NO: 89381 - DNA, 20 bp, Artificial Sequence
  MKO10089381_B_Gm8267
  gRNA
gcaagaaaaaaaaaaagtaa

SEQ ID NO: 89382 - DNA, 20 bp, Artificial Sequence
  MKO10089382_B_Gm826
  gRNA
accaccacgagctccctgtc

SEQ ID NO: 89383 - DNA, 20 bp, Artificial Sequence
  MKO10089383_B_Gm826
  gRNA
ggaaccagacagggagctcg

SEQ ID NO: 89384 - DNA, 20 bp, Artificial Sequence
  MKO10089384_B_Gm826
  gRNA
ttcagcagccccgctcagcc

SEQ ID NO: 89385 - DNA, 20 bp, Artificial Sequence
  MKO10089385_B_Gm8298
  gRNA
catcggtttacagaatcata

SEQ ID NO: 89386 - DNA, 20 bp, Artificial Sequence
  MKO10089386_B_Gm8298
  gRNA
tcctgaaatacagatgcgag

SEQ ID NO: 89387 - DNA, 20 bp, Artificial Sequence
  MKO10089387_B_Gm8298
  gRNA
agttcttgcaaaatatggag

SEQ ID NO: 89388 - DNA, 20 bp, Artificial Sequence
  MKO10089388_B_Gm829
  gRNA
gacgggagtcttgtcctaac

SEQ ID NO: 89389 - DNA, 20 bp, Artificial Sequence
  MKO10089389_B_Gm829
  gRNA
ctgtgaacgccctaggagtc

SEQ ID NO: 89390 - DNA, 20 bp, Artificial Sequence
  MKO10089390_B_Gm829
  gRNA
acaatatgacctgccctgtt

SEQ ID NO: 89391 - DNA, 20 bp, Artificial Sequence
  MKO10089391_B_Gm8300
  gRNA
acatgccaaaatcaatgaaa

SEQ ID NO: 89392 - DNA, 20 bp, Artificial Sequence
  MKO10089392_B_Gm8300
  gRNA
gaaatcgtgtttgatgatat

SEQ ID NO: 89393 - DNA, 20 bp, Artificial Sequence
  MKO10089393_B_Gm8300
  gRNA
tgtgtccatttcattgattt

SEQ ID NO: 89394 - DNA, 20 bp, Artificial Sequence
  MKO10089394_B_Gm8369
  gRNA
cacctctctggagttacagc

SEQ ID NO: 89395 - DNA, 20 bp, Artificial Sequence
  MKO10089395_B_Gm8369
  gRNA
agtgaaaactacaaaaagcc

SEQ ID NO: 89396 - DNA, 20 bp, Artificial Sequence
  MKO10089396_B_Gm8369
  gRNA
gctgtgtccatctctgcatt

SEQ ID NO: 89397 - DNA, 20 bp, Artificial Sequence
  MKO10089397_B_Gm8439
  gRNA
cacacagccaagcttcttgt

SEQ ID NO: 89398 - DNA, 20 bp, Artificial Sequence
  MKO10089398_B_Gm8439
  gRNA
acctcaggaggggagaacag

SEQ ID NO: 89399 - DNA, 20 bp, Artificial Sequence
  MKO10089399_B_Gm8439
  gRNA
acctctgttctcccctcctg

SEQ ID NO: 89400 - DNA, 20 bp, Artificial Sequence
  MKO10089400_B_Gm8453
  gRNA
gtgttattgtctgttatctg

SEQ ID NO: 89401 - DNA, 20 bp, Artificial Sequence
  MKO10089401_B_Gm8453
  gRNA
gtaacatccacattccaatt

SEQ ID NO: 89402 - DNA, 20 bp, Artificial Sequence
  MKO10089402_B_Gm8453
  gRNA
cagtgaccctaattggaatg

SEQ ID NO: 89403 - DNA, 20 bp, Artificial Sequence
  MKO10089403_B_Gm853
  gRNA
atgtgctggtcagccgccat

SEQ ID NO: 89404 - DNA, 20 bp, Artificial Sequence
  MKO10089404_B_Gm853
  gRNA
agcccatctcaaacacacga

SEQ ID NO: 89405 - DNA, 20 bp, Artificial Sequence
  MKO10089405_B_Gm853
  gRNA
gggccgccaagatgccttca

SEQ ID NO: 89406 - DNA, 20 bp, Artificial Sequence
  MKO10089406_B_Gm8653
  gRNA
gcccacactgaatccagaag

SEQ ID NO: 89407 - DNA, 20 bp, Artificial Sequence
  MKO10089407_B_Gm8653
  gRNA
gttattcttcttacagttgt

SEQ ID NO: 89408 - DNA, 20 bp, Artificial Sequence
  MKO10089408_B_Gm8653
  gRNA
gtgttattgtctgttatctg

SEQ ID NO: 89409 - DNA, 20 bp, Artificial Sequence
  MKO10089409_B_Gm8660
  gRNA
gtgttattgtctgttatctg

SEQ ID NO: 89410 - DNA, 20 bp, Artificial Sequence
  MKO10089410_B_Gm8660
  gRNA
tgccacattcatgagcatca

SEQ ID NO: 89411 - DNA, 20 bp, Artificial Sequence
  MKO10089411_B_Gm8660
  gRNA
cagtgaccttaattggaatg

SEQ ID NO: 89412 - DNA, 20 bp, Artificial Sequence
  MKO10089412_B_Gm8677
  gRNA
gacaatgcccacactgaatc

SEQ ID NO: 89413 - DNA, 20 bp, Artificial Sequence
  MKO10089413_B_Gm8677
  gRNA
gttattcttcttacagttat

SEQ ID NO: 89414 - DNA, 20 bp, Artificial Sequence
  MKO10089414_B_Gm8677
  gRNA
gtgttattgtctgctatctg

SEQ ID NO: 89415 - DNA, 20 bp, Artificial Sequence
  MKO10089415_B_Gm867
  gRNA
acttactaatgacctgtacc

SEQ ID NO: 89416 - DNA, 20 bp, Artificial Sequence
  MKO10089416_B_Gm867
  gRNA
gatgcaccgtgaagttcagc

SEQ ID NO: 89417 - DNA, 20 bp, Artificial Sequence
  MKO10089417_B_Gm867
  gRNA
ggaacaagtgacctatgtcc

SEQ ID NO: 89418 - DNA, 20 bp, Artificial Sequence
  MKO10089418_B_Gm8693
  gRNA
gttattcttgttacagttgt

SEQ ID NO: 89419 - DNA, 20 bp, Artificial Sequence
  MKO10089419_B_Gm8693
  gRNA
gtgttattgtctgttatctg

SEQ ID NO: 89420 - DNA, 20 bp, Artificial Sequence
  MKO10089420_B_Gm8693
  gRNA
taacatccacattccaatta

SEQ ID NO: 89421 - DNA, 20 bp, Artificial Sequence
  MKO10089421_B_Gm8720
  gRNA
gcccacactgaatccagaag

SEQ ID NO: 89422 - DNA, 20 bp, Artificial Sequence
  MKO10089422_B_Gm8720
  gRNA
gttattcttcttgcagttgt

SEQ ID NO: 89423 - DNA, 20 bp, Artificial Sequence
  MKO10089423_B_Gm8720
  gRNA
gtgttattgtctgttatctg

SEQ ID NO: 89424 - DNA, 20 bp, Artificial Sequence
  MKO10089424_B_Gm8764
  gRNA
ctgagtaactgctagatcct

SEQ ID NO: 89425 - DNA, 20 bp, Artificial Sequence
  MKO10089425_B_Gm8764
  gRNA
gcctccaagtgtccatttct

SEQ ID NO: 89426 - DNA, 20 bp, Artificial Sequence
  MKO10089426_B_Gm8764
  gRNA
gctgtgcactatgatcgctg

SEQ ID NO: 89427 - DNA, 20 bp, Artificial Sequence
  MKO10089427_B_Gm8765
  gRNA
ctgcattgcgattcagaaga

SEQ ID NO: 89428 - DNA, 20 bp, Artificial Sequence
  MKO10089428_B_Gm8765
  gRNA
attactggcaggatgtgaag

SEQ ID NO: 89429 - DNA, 20 bp, Artificial Sequence
  MKO10089429_B_Gm8765
  gRNA
accagtaagaaaacagctac

SEQ ID NO: 89430 - DNA, 20 bp, Artificial Sequence
  MKO10089430_B_Gm8787
  gRNA
tgtataattaggcactatta

SEQ ID NO: 89431 - DNA, 20 bp, Artificial Sequence
  MKO10089431_B_Gm8787
  gRNA
cttcagatctctcaatagtg

SEQ ID NO: 89432 - DNA, 20 bp, Artificial Sequence
  MKO10089432_B_Gm8787
  gRNA
ggatactggatagtttcacc

SEQ ID NO: 89433 - DNA, 20 bp, Artificial Sequence
  MKO10089433_B_Gm8817
  gRNA
gcctcttgttataaatcacc

SEQ ID NO: 89434 - DNA, 20 bp, Artificial Sequence
  MKO10089434_B_Gm8817
  gRNA
agctcttgaactcattgatg

SEQ ID NO: 89435 - DNA, 20 bp, Artificial Sequence
  MKO10089435_B_Gm8817
  gRNA
gactgactaaatagaagctg

SEQ ID NO: 89436 - DNA, 20 bp, Artificial Sequence
  MKO10089436_B_Gm884
  gRNA
ctcacaatttctcagtccaa

SEQ ID NO: 89437 - DNA, 20 bp, Artificial Sequence
  MKO10089437_B_Gm884
  gRNA
tcacctgactgaattacata

SEQ ID NO: 89438 - DNA, 20 bp, Artificial Sequence
  MKO10089438_B_Gm884
  gRNA
ccgtgagtaaattgcaccca

SEQ ID NO: 89439 - DNA, 20 bp, Artificial Sequence
  MKO10089439_B_Gm8882
  gRNA
ccagcaaagccgctgtgagc

SEQ ID NO: 89440 - DNA, 20 bp, Artificial Sequence
  MKO10089440_B_Gm8882
  gRNA
gactcaaattctcagctcct

SEQ ID NO: 89441 - DNA, 20 bp, Artificial Sequence
  MKO10089441_B_Gm8882
  gRNA
ctgagaatttgagtcttcgt

SEQ ID NO: 89442 - DNA, 20 bp, Artificial Sequence
  MKO10089442_B_Gm8898
  gRNA
tatagctgtgagattcctat

SEQ ID NO: 89443 - DNA, 20 bp, Artificial Sequence
  MKO10089443_B_Gm8898
  gRNA
actgtgtttaggttacagtt

SEQ ID NO: 89444 - DNA, 20 bp, Artificial Sequence
  MKO10089444_B_Gm8898
  gRNA
ttccatgacttctagaagtt

SEQ ID NO: 89445 - DNA, 20 bp, Artificial Sequence
  MKO10089445_B_Gm8909
  gRNA
tcccagagcctcgtccatcc

SEQ ID NO: 89446 - DNA, 20 bp, Artificial Sequence
  MKO10089446_B_Gm8909
  gRNA
ctcctgctcttcaacacaaa

SEQ ID NO: 89447 - DNA, 20 bp, Artificial Sequence
  MKO10089447_B_Gm8909
  gRNA
tcccttggaaaccctgctca

SEQ ID NO: 89448 - DNA, 20 bp, Artificial Sequence
  MKO10089448_B_Gm8994
  gRNA
gacattggtgcccccaacgc

SEQ ID NO: 89449 - DNA, 20 bp, Artificial Sequence
  MKO10089449_B_Gm8994
  gRNA
gcctcgagcccagacatctg

SEQ ID NO: 89450 - DNA, 20 bp, Artificial Sequence
  MKO10089450_B_Gm8994
  gRNA
gtcatcgcacagtctcagtc

SEQ ID NO: 89451 - DNA, 20 bp, Artificial Sequence
  MKO10089451_B_Gm9047
  gRNA
gctcagagggccagatctcg

SEQ ID NO: 89452 - DNA, 20 bp, Artificial Sequence
  MKO10089452_B_Gm9047
  gRNA
catgtcgaggcagctcaaca

SEQ ID NO: 89453 - DNA, 20 bp, Artificial Sequence
  MKO10089453_B_Gm9047
  gRNA
gggaacaggtaacgcgtctc

SEQ ID NO: 89454 - DNA, 20 bp, Artificial Sequence
  MKO10089454_B_Gm904
  gRNA
accagtaagaaaactgctac

SEQ ID NO: 89455 - DNA, 20 bp, Artificial Sequence
  MKO10089455_B_Gm904
  gRNA
tacatttccataggttgtga

SEQ ID NO: 89456 - DNA, 20 bp, Artificial Sequence
  MKO10089456_B_Gm904
  gRNA
tctccaggttgtacagattc

SEQ ID NO: 89457 - DNA, 20 bp, Artificial Sequence
  MKO10089457_B_Gm906
  gRNA
ctatctctaggttgtacaga

SEQ ID NO: 89458 - DNA, 20 bp, Artificial Sequence
  MKO10089458_B_Gm906
  gRNA
ctccattcattctcagatgc

SEQ ID NO: 89459 - DNA, 20 bp, Artificial Sequence
  MKO10089459_B_Gm906
  gRNA
attactggcaggatgtgaag

SEQ ID NO: 89460 - DNA, 20 bp, Artificial Sequence
  MKO10089460_B_Gm9112
  gRNA
gtgccagagctctctgcaag

SEQ ID NO: 89461 - DNA, 20 bp, Artificial Sequence
  MKO10089461_B_Gm9112
  gRNA
gggccgcttgcagagagctc

SEQ ID NO: 89462 - DNA, 20 bp, Artificial Sequence
  MKO10089462_B_Gm9112
  gRNA
cccctccaggaccttgtggg

SEQ ID NO: 89463 - DNA, 20 bp, Artificial Sequence
  MKO10089463_B_Gm9125
  gRNA
gcacatcacaggccatggag

SEQ ID NO: 89464 - DNA, 20 bp, Artificial Sequence
  MKO10089464_B_Gm9125
  gRNA
aaacataacacctgcaatca

SEQ ID NO: 89465 - DNA, 20 bp, Artificial Sequence
  MKO10089465_B_Gm9125
  gRNA
tcatcatctccttgaagact

SEQ ID NO: 89466 - DNA, 20 bp, Artificial Sequence
  MKO10089466_B_Gm9268
  gRNA
caactaattaattataactg

SEQ ID NO: 89467 - DNA, 20 bp, Artificial Sequence
  MKO10089467_B_Gm9268
  gRNA
gaatgccattccgtctccat

SEQ ID NO: 89468 - DNA, 20 bp, Artificial Sequence
  MKO10089468_B_Gm9268
  gRNA
tcagtttaaaactctctatc

SEQ ID NO: 89469 - DNA, 20 bp, Artificial Sequence
  MKO10089469_B_Gm933
  gRNA
gaggattatggctgcaagag

SEQ ID NO: 89470 - DNA, 20 bp, Artificial Sequence
  MKO10089470_B_Gm933
  gRNA
taccaaatcttgattgttcc

SEQ ID NO: 89471 - DNA, 20 bp, Artificial Sequence
  MKO10089471_B_Gm933
  gRNA
agccaggaacaatcaagatt

SEQ ID NO: 89472 - DNA, 20 bp, Artificial Sequence
  MKO10089472_B_Gm9376
  gRNA
ctcagcgtcgaagaatgatg

SEQ ID NO: 89473 - DNA, 20 bp, Artificial Sequence
  MKO10089473_B_Gm9376
  gRNA
acacatagaagatctgacaa

SEQ ID NO: 89474 - DNA, 20 bp, Artificial Sequence
  MKO10089474_B_Gm9376
  gRNA
tcgacgctgagtgatgaacc

SEQ ID NO: 89475 - DNA, 20 bp, Artificial Sequence
  MKO10089475_B_Gm94
  gRNA
tgcttacgatcctctggaca

SEQ ID NO: 89476 - DNA, 20 bp, Artificial Sequence
  MKO10089476_B_Gm94
  gRNA
ccttcaaaagtgacctccta

SEQ ID NO: 89477 - DNA, 20 bp, Artificial Sequence
  MKO10089477_B_Gm94
  gRNA
tctagtaaaaatccagagcc

SEQ ID NO: 89478 - DNA, 20 bp, Artificial Sequence
  MKO10089478_B_Gm9513
  gRNA
ttgctggtgatgtccctgca

SEQ ID NO: 89479 - DNA, 20 bp, Artificial Sequence
  MKO10089479_B_Gm9513
  gRNA
taacagtcccagtgaagcaa

SEQ ID NO: 89480 - DNA, 20 bp, Artificial Sequence
  MKO10089480_B_Gm9513
  gRNA
gcacgtcttgcagctcctgc

SEQ ID NO: 89481 - DNA, 20 bp, Artificial Sequence
  MKO10089481_B_Gm9573
  gRNA
tcaatgtcgtagagatgaca

SEQ ID NO: 89482 - DNA, 20 bp, Artificial Sequence
  MKO10089482_B_Gm9573
  gRNA
actcaccacttcctaaaagc

SEQ ID NO: 89483 - DNA, 20 bp, Artificial Sequence
  MKO10089483_B_Gm9573
  gRNA
tgcagaggagaagcagcctc

SEQ ID NO: 89484 - DNA, 20 bp, Artificial Sequence
  MKO10089484_B_Gm960
  gRNA
aatcatcatagttcatcaca

SEQ ID NO: 89485 - DNA, 20 bp, Artificial Sequence
  MKO10089485_B_Gm960
  gRNA
caagccaccataaacacttc

SEQ ID NO: 89486 - DNA, 20 bp, Artificial Sequence
  MKO10089486_B_Gm960
  gRNA
gcttctaccagaagtgttta

SEQ ID NO: 89487 - DNA, 20 bp, Artificial Sequence
  MKO10089487_B_Gm9733
  gRNA
caagtgtaacattactgatg

SEQ ID NO: 89488 - DNA, 20 bp, Artificial Sequence
  MKO10089488_B_Gm9733
  gRNA
ttattgtctctgtcatgtac

SEQ ID NO: 89489 - DNA, 20 bp, Artificial Sequence
  MKO10089489_B_Gm9733
  gRNA
gacaataaccagaagaagtt

SEQ ID NO: 89490 - DNA, 20 bp, Artificial Sequence
  MKO10089490_B_Gm973
  gRNA
aattgatacatacatggacc

SEQ ID NO: 89491 - DNA, 20 bp, Artificial Sequence
  MKO10089491_B_Gm973
  gRNA
cccgaagtgtgtgcagtcca

SEQ ID NO: 89492 - DNA, 20 bp, Artificial Sequence
  MKO10089492_B_Gm973
  gRNA
ggccccctgacatcatgcac

SEQ ID NO: 89493 - DNA, 20 bp, Artificial Sequence
  MKO10089493_B_Gm9758
  gRNA
ctggggcaaggccctaccac

SEQ ID NO: 89494 - DNA, 20 bp, Artificial Sequence
  MKO10089494_B_Gm9758
  gRNA
tgagctcctgcttgttctct

SEQ ID NO: 89495 - DNA, 20 bp, Artificial Sequence
  MKO10089495_B_Gm9758
  gRNA
cttacagtaacctgcacagc

SEQ ID NO: 89496 - DNA, 20 bp, Artificial Sequence
  MKO10089496_B_Gm9839
  gRNA
tattgcatacttcgattcca

SEQ ID NO: 89497 - DNA, 20 bp, Artificial Sequence
  MKO10089497_B_Gm9839
  gRNA
agaccctgaagaacagtcag

SEQ ID NO: 89498 - DNA, 20 bp, Artificial Sequence
  MKO10089498_B_Gm9839
  gRNA
tggaacaaagatggtattta

SEQ ID NO: 89499 - DNA, 20 bp, Artificial Sequence
  MKO10089499_B_Gm996
  gRNA
ccgccaactacgccgcctgc

SEQ ID NO: 89500 - DNA, 20 bp, Artificial Sequence
  MKO10089500_B_Gm996
  gRNA
ctcgcgtctgtgccgccgag

SEQ ID NO: 89501 - DNA, 20 bp, Artificial Sequence
  MKO10089501_B_Gm996
  gRNA
ttctctcgcatagcgcgcgt

SEQ ID NO: 89502 - DNA, 20 bp, Artificial Sequence
  MKO10089502_B_Gm9992
  gRNA
aggggctgtaccagttggca

SEQ ID NO: 89503 - DNA, 20 bp, Artificial Sequence
  MKO10089503_B_Gm9992
  gRNA
ctttgtagaggccatcccag

SEQ ID NO: 89504 - DNA, 20 bp, Artificial Sequence
  MKO10089504_B_Gm9992
  gRNA
tgtgtagatcagctgctgtg

SEQ ID NO: 89505 - DNA, 20 bp, Artificial Sequence
  MKO10089505_B_Gm9994
  gRNA
cctcaggatagttgaaccga

SEQ ID NO: 89506 - DNA, 20 bp, Artificial Sequence
  MKO10089506_B_Gm9994
  gRNA
tccattcagggacaaggtcc

SEQ ID NO: 89507 - DNA, 20 bp, Artificial Sequence
  MKO10089507_B_Gm9994
  gRNA
aggtgcagaaagtcatgccc

SEQ ID NO: 89508 - DNA, 20 bp, Artificial Sequence
  MKO10089508_B_Gm9
  gRNA
cctccctcaacattgatcat

SEQ ID NO: 89509 - DNA, 20 bp, Artificial Sequence
  MKO10089509_B_Gm9
  gRNA
gtgcccaacggattcagctt

SEQ ID NO: 89510 - DNA, 20 bp, Artificial Sequence
  MKO10089510_B_Gm9
  gRNA
ccgaagacacatcaattccg

SEQ ID NO: 89511 - DNA, 20 bp, Artificial Sequence
  MKO10089511_B_Gmcl1l
  gRNA
atcttgttcaagaatagttg

SEQ ID NO: 89512 - DNA, 20 bp, Artificial Sequence
  MKO10089512_B_Gmcl1l
  gRNA
aaatctgatcattaagaatg

SEQ ID NO: 89513 - DNA, 20 bp, Artificial Sequence
  MKO10089513_B_Gmcl1l
  gRNA
tgttatcaacatatgccatg

SEQ ID NO: 89514 - DNA, 20 bp, Artificial Sequence
  MKO10089514_B_Gmcl1
  gRNA
caccattcaaaaacagcgtt

SEQ ID NO: 89515 - DNA, 20 bp, Artificial Sequence
  MKO10089515_B_Gmcl1
  gRNA
cagcatgaatattattgaac

SEQ ID NO: 89516 - DNA, 20 bp, Artificial Sequence
  MKO10089516_B_Gmcl1
  gRNA
ctttacagagtctagtccat

SEQ ID NO: 89517 - DNA, 20 bp, Artificial Sequence
  MKO10089517_B_Gmds
  gRNA
tccttaccatagggtgacct

SEQ ID NO: 89518 - DNA, 20 bp, Artificial Sequence
  MKO10089518_B_Gmds
  gRNA
aaagacatgaagttgcacta

SEQ ID NO: 89519 - DNA, 20 bp, Artificial Sequence
  MKO10089519_B_Gmds
  gRNA
gcctcaccttgacatggctc

SEQ ID NO: 89520 - DNA, 20 bp, Artificial Sequence
  MKO10089520_B_Gmeb1
  gRNA
tgagcatgatgccgcctaga

SEQ ID NO: 89521 - DNA, 20 bp, Artificial Sequence
  MKO10089521_B_Gmeb1
  gRNA
acctcctgatcagcagtgcg

SEQ ID NO: 89522 - DNA, 20 bp, Artificial Sequence
  MKO10089522_B_Gmeb1
  gRNA
acacacttcacgtttattcc

SEQ ID NO: 89523 - DNA, 20 bp, Artificial Sequence
  MKO10089523_B_Gmeb2
  gRNA
aagagagccatccggatgaa

SEQ ID NO: 89524 - DNA, 20 bp, Artificial Sequence
  MKO10089524_B_Gmeb2
  gRNA
gggatacacgtgcccctgaa

SEQ ID NO: 89525 - DNA, 20 bp, Artificial Sequence
  MKO10089525_B_Gmeb2
  gRNA
tgagcatgatgccattcatc

SEQ ID NO: 89526 - DNA, 20 bp, Artificial Sequence
  MKO10089526_B_Gmfb
  gRNA
cattgtagtgaagattgaca

SEQ ID NO: 89527 - DNA, 20 bp, Artificial Sequence
  MKO10089527_B_Gmfb
  gRNA
gctcctcatccagcaccacc

SEQ ID NO: 89528 - DNA, 20 bp, Artificial Sequence
  MKO10089528_B_Gmfb
  gRNA
tataaataccaacatgatga

SEQ ID NO: 89529 - DNA, 20 bp, Artificial Sequence
  MKO10089529_B_Gmfg
  gRNA
atatacctgggctgtctctc

SEQ ID NO: 89530 - DNA, 20 bp, Artificial Sequence
  MKO10089530_B_Gmfg
  gRNA
ggtgctggaggatgaactcc

SEQ ID NO: 89531 - DNA, 20 bp, Artificial Sequence
  MKO10089531_B_Gmfg
  gRNA
ccattggcagtcggactccc

SEQ ID NO: 89532 - DNA, 20 bp, Artificial Sequence
  MKO10089532_B_Gmip
  gRNA
acaacctcgagatatcattg

SEQ ID NO: 89533 - DNA, 20 bp, Artificial Sequence
  MKO10089533_B_Gmip
  gRNA
tgcgtacagggtctccagcc

SEQ ID NO: 89534 - DNA, 20 bp, Artificial Sequence
  MKO10089534_B_Gmip
  gRNA
ccctggagtatgctaaagca

SEQ ID NO: 89535 - DNA, 20 bp, Artificial Sequence
  MKO10089535_B_Gml
  gRNA
catgaatggcatctcatctg

SEQ ID NO: 89536 - DNA, 20 bp, Artificial Sequence
  MKO10089536_B_Gml
  gRNA
cttcttcttgtcaattctca

SEQ ID NO: 89537 - DNA, 20 bp, Artificial Sequence
  MKO10089537_B_Gml
  gRNA
atacttacatctaggctcaa

SEQ ID NO: 89538 - DNA, 20 bp, Artificial Sequence
  MKO10089538_B_Gmnc
  gRNA
tccactacaacgtcagaatc

SEQ ID NO: 89539 - DNA, 20 bp, Artificial Sequence
  MKO10089539_B_Gmnc
  gRNA
ccaggatactctactgcaga

SEQ ID NO: 89540 - DNA, 20 bp, Artificial Sequence
  MKO10089540_B_Gmnc
  gRNA
ccttctgcagtagagtatcc

SEQ ID NO: 89541 - DNA, 20 bp, Artificial Sequence
  MKO10089541_B_Gmnn
  gRNA
agaacccatcttctcagtat

SEQ ID NO: 89542 - DNA, 20 bp, Artificial Sequence
  MKO10089542_B_Gmnn
  gRNA
tttagaatagtcctgtccca

SEQ ID NO: 89543 - DNA, 20 bp, Artificial Sequence
  MKO10089543_B_Gmnn
  gRNA
aagaagtggcagagcagcgg

SEQ ID NO: 89544 - DNA, 20 bp, Artificial Sequence
  MKO10089544_B_Gmppa
  gRNA
tcctctcagggactcgcttc

SEQ ID NO: 89545 - DNA, 20 bp, Artificial Sequence
  MKO10089545_B_Gmppa
  gRNA
atcatgggaacgcctgccac

SEQ ID NO: 89546 - DNA, 20 bp, Artificial Sequence
  MKO10089546_B_Gmppa
  gRNA
ctgcaggagtttgcccccct

SEQ ID NO: 89547 - DNA, 20 bp, Artificial Sequence
  MKO10089547_B_Gmppb
  gRNA
cagtctcagatagtaggtct

SEQ ID NO: 89548 - DNA, 20 bp, Artificial Sequence
  MKO10089548_B_Gmppb
  gRNA
tcactgttgagaacgaagaa

SEQ ID NO: 89549 - DNA, 20 bp, Artificial Sequence
  MKO10089549_B_Gmppb
  gRNA
aggtgtggaccacgtgatcc

SEQ ID NO: 89550 - DNA, 20 bp, Artificial Sequence
  MKO10089550_B_Gmpr2
  gRNA
agcactacagcatccatcag

SEQ ID NO: 89551 - DNA, 20 bp, Artificial Sequence
  MKO10089551_B_Gmpr2
  gRNA
agccatttcaaaagtgccca

SEQ ID NO: 89552 - DNA, 20 bp, Artificial Sequence
  MKO10089552_B_Gmpr2
  gRNA
gtagaagagttaatcctttc

SEQ ID NO: 89553 - DNA, 20 bp, Artificial Sequence
  MKO10089553_B_Gmpr
  gRNA
cctgtcgcaggcagggaacg

SEQ ID NO: 89554 - DNA, 20 bp, Artificial Sequence
  MKO10089554_B_Gmpr
  gRNA
gcgggcagaatgatcttgag

SEQ ID NO: 89555 - DNA, 20 bp, Artificial Sequence
  MKO10089555_B_Gmpr
  gRNA
tcccatcattgtggccaaca

SEQ ID NO: 89556 - DNA, 20 bp, Artificial Sequence
  MKO10089556_B_Gmps
  gRNA
cacagggctattatcatatc

SEQ ID NO: 89557 - DNA, 20 bp, Artificial Sequence
  MKO10089557_B_Gmps
  gRNA
ataatacgtgttcattattc

SEQ ID NO: 89558 - DNA, 20 bp, Artificial Sequence
  MKO10089558_B_Gmps
  gRNA
ttgccaatggtaaatattgc

SEQ ID NO: 89559 - DNA, 20 bp, Artificial Sequence
  MKO10089559_B_Gna11
  gRNA
gcctgcgatcgtaacactcc

SEQ ID NO: 89560 - DNA, 20 bp, Artificial Sequence
  MKO10089560_B_Gna11
  gRNA
cgggtactcgatgatgccag

SEQ ID NO: 89561 - DNA, 20 bp, Artificial Sequence
  MKO10089561_B_Gna11
  gRNA
gcatggcggtaaagatgttc

SEQ ID NO: 89562 - DNA, 20 bp, Artificial Sequence
  MKO10089562_B_Gna12
  gRNA
gtcctcgagcgagtatgacc

SEQ ID NO: 89563 - DNA, 20 bp, Artificial Sequence
  MKO10089563_B_Gna12
  gRNA
gagacaagctcggcattccc

SEQ ID NO: 89564 - DNA, 20 bp, Artificial Sequence
  MKO10089564_B_Gna12
  gRNA
ccagctggaactcgcttctg

SEQ ID NO: 89565 - DNA, 20 bp, Artificial Sequence
  MKO10089565_B_Gna13
  gRNA
aatgcttccgggggaaacgc

SEQ ID NO: 89566 - DNA, 20 bp, Artificial Sequence
  MKO10089566_B_Gna13
  gRNA
atttgatacccgcgccccca

SEQ ID NO: 89567 - DNA, 20 bp, Artificial Sequence
  MKO10089567_B_Gna13
  gRNA
cttggataaacttggagtac

SEQ ID NO: 89568 - DNA, 20 bp, Artificial Sequence
  MKO10089568_B_Gna14
  gRNA
catagaatatccattcgacc

SEQ ID NO: 89569 - DNA, 20 bp, Artificial Sequence
  MKO10089569_B_Gna14
  gRNA
tcctcctgtcgtaacactcc

SEQ ID NO: 89570 - DNA, 20 bp, Artificial Sequence
  MKO10089570_B_Gna14
  gRNA
gaatccaggagtgttacgac

SEQ ID NO: 89571 - DNA, 20 bp, Artificial Sequence
  MKO10089571_B_Gna15
  gRNA
cgcagtcgcatgcccaccac

SEQ ID NO: 89572 - DNA, 20 bp, Artificial Sequence
  MKO10089572_B_Gna15
  gRNA
cgagtatgaccagtgcctag

SEQ ID NO: 89573 - DNA, 20 bp, Artificial Sequence
  MKO10089573_B_Gna15
  gRNA
cgtgattgccctcatctacc

SEQ ID NO: 89574 - DNA, 20 bp, Artificial Sequence
  MKO10089574_B_Gnai1
  gRNA
acactcctcttccgagtagc

SEQ ID NO: 89575 - DNA, 20 bp, Artificial Sequence
  MKO10089575_B_Gnai1
  gRNA
gtgggtttccacaatccctg

SEQ ID NO: 89576 - DNA, 20 bp, Artificial Sequence
  MKO10089576_B_Gnai1
  gRNA
atgcagctatctgaatgact

SEQ ID NO: 89577 - DNA, 20 bp, Artificial Sequence
  MKO10089577_B_Gnai2
  gRNA
gtgtgtttccacgatgcccg

SEQ ID NO: 89578 - DNA, 20 bp, Artificial Sequence
  MKO10089578_B_Gnai2
  gRNA
caatgcgctccagatcattc

SEQ ID NO: 89579 - DNA, 20 bp, Artificial Sequence
  MKO10089579_B_Gnai2
  gRNA
atgacaccggacaggtcttc

SEQ ID NO: 89580 - DNA, 20 bp, Artificial Sequence
  MKO10089580_B_Gnai3
  gRNA
atcattgagctgatattccc

SEQ ID NO: 89581 - DNA, 20 bp, Artificial Sequence
  MKO10089581_B_Gnai3
  gRNA
cttgaagtagagttccttga

SEQ ID NO: 89582 - DNA, 20 bp, Artificial Sequence
  MKO10089582_B_Gnai3
  gRNA
atttagctacctaaatgatt

SEQ ID NO: 89583 - DNA, 20 bp, Artificial Sequence
  MKO10089583_B_Gnal
  gRNA
ctcgttggatctctcaaagc

SEQ ID NO: 89584 - DNA, 20 bp, Artificial Sequence
  MKO10089584_B_Gnal
  gRNA
ccaaccctgagaaccagttc

SEQ ID NO: 89585 - DNA, 20 bp, Artificial Sequence
  MKO10089585_B_Gnal
  gRNA
cactgactttgaatattccc

SEQ ID NO: 89586 - DNA, 20 bp, Artificial Sequence
  MKO10089586_B_Gnao1
  gRNA
ctccacgcccaaagtgtcca

SEQ ID NO: 89587 - DNA, 20 bp, Artificial Sequence
  MKO10089587_B_Gnao1
  gRNA
cgaaccagagtcaaaacaac

SEQ ID NO: 89588 - DNA, 20 bp, Artificial Sequence
  MKO10089588_B_Gnao1
  gRNA
cgtgaagcagtacaagcctg

SEQ ID NO: 89589 - DNA, 20 bp, Artificial Sequence
  MKO10089589_B_Gnaq
  gRNA
ccttgcagaatggtcgatgt

SEQ ID NO: 89590 - DNA, 20 bp, Artificial Sequence
  MKO10089590_B_Gnaq
  gRNA
tactctgacgaagacaagcg

SEQ ID NO: 89591 - DNA, 20 bp, Artificial Sequence
  MKO10089591_B_Gnaq
  gRNA
cgaatatgatcaagttcttg

SEQ ID NO: 89592 - DNA, 20 bp, Artificial Sequence
  MKO10089592_B_Gnas
  gRNA
gaccgaggaccagcgcaacg

SEQ ID NO: 89593 - DNA, 20 bp, Artificial Sequence
  MKO10089593_B_Gnas
  gRNA
gcgccttctcctcgttgcgc

SEQ ID NO: 89594 - DNA, 20 bp, Artificial Sequence
  MKO10089594_B_Gnas
  gRNA
gcggtcacgaacaatcgagc

SEQ ID NO: 89595 - DNA, 20 bp, Artificial Sequence
  MKO10089595_B_Gnat1
  gRNA
acgcaacacgtcctgctcag

SEQ ID NO: 89596 - DNA, 20 bp, Artificial Sequence
  MKO10089596_B_Gnat1
  gRNA
agccggcggagtcattgagc

SEQ ID NO: 89597 - DNA, 20 bp, Artificial Sequence
  MKO10089597_B_Gnat1
  gRNA
ttgagtctcgataataccag

SEQ ID NO: 89598 - DNA, 20 bp, Artificial Sequence
  MKO10089598_B_Gnat2
  gRNA
gaatcacgtaccgcacagct

SEQ ID NO: 89599 - DNA, 20 bp, Artificial Sequence
  MKO10089599_B_Gnat2
  gRNA
ctgatgacgtccaccaactc

SEQ ID NO: 89600 - DNA, 20 bp, Artificial Sequence
  MKO10089600_B_Gnat2
  gRNA
aggcatggtcccctcctcgg

SEQ ID NO: 89601 - DNA, 20 bp, Artificial Sequence
  MKO10089601_B_Gnat3
  gRNA
tgagtctgtctaagtcatta

SEQ ID NO: 89602 - DNA, 20 bp, Artificial Sequence
  MKO10089602_B_Gnat3
  gRNA
ctgaaatcattaaacgactg

SEQ ID NO: 89603 - DNA, 20 bp, Artificial Sequence
  MKO10089603_B_Gnat3
  gRNA
ttgagtttcaatgataccag

SEQ ID NO: 89604 - DNA, 20 bp, Artificial Sequence
  MKO10089604_B_Gnaz
  gRNA
tgaggtcctcgaactgacgt

SEQ ID NO: 89605 - DNA, 20 bp, Artificial Sequence
  MKO10089605_B_Gnaz
  gRNA
acgccatcgactcgctgacc

SEQ ID NO: 89606 - DNA, 20 bp, Artificial Sequence
  MKO10089606_B_Gnaz
  gRNA
tgatttcacggcgctgccgc

SEQ ID NO: 89607 - DNA, 20 bp, Artificial Sequence
  MKO10089607_B_Gnb1l
  gRNA
agaatagttaccactctaaa

SEQ ID NO: 89608 - DNA, 20 bp, Artificial Sequence
  MKO10089608_B_Gnb1l
  gRNA
tcagccagggtcgagacctg

SEQ ID NO: 89609 - DNA, 20 bp, Artificial Sequence
  MKO10089609_B_Gnb1l
  gRNA
cagggtgcacactgacgtct

SEQ ID NO: 89610 - DNA, 20 bp, Artificial Sequence
  MKO10089610_B_Gnb1
  gRNA
tacctgagaaagagtcgcat

SEQ ID NO: 89611 - DNA, 20 bp, Artificial Sequence
  MKO10089611_B_Gnb1
  gRNA
tgtgcgtgtgagtcgtgagc

SEQ ID NO: 89612 - DNA, 20 bp, Artificial Sequence
  MKO10089612_B_Gnb1
  gRNA
gctccttgtcagcgcctctc

SEQ ID NO: 89613 - DNA, 20 bp, Artificial Sequence
  MKO10089613_B_Gnb2l1
  gRNA
taacaacatcactaacgaag

SEQ ID NO: 89614 - DNA, 20 bp, Artificial Sequence
  MKO10089614_B_Gnb2l1
  gRNA
gaccagcttgtcccatccgc

SEQ ID NO: 89615 - DNA, 20 bp, Artificial Sequence
  MKO10089615_B_Gnb2l1
  gRNA
aaccctatcatcgtctcctg

SEQ ID NO: 89616 - DNA, 20 bp, Artificial Sequence
  MKO10089616_B_Gnb2
  gRNA
ctatagtctcaagacccgag

SEQ ID NO: 89617 - DNA, 20 bp, Artificial Sequence
  MKO10089617_B_Gnb2
  gRNA
ggacagctacaccactaaca

SEQ ID NO: 89618 - DNA, 20 bp, Artificial Sequence
  MKO10089618_B_Gnb2
  gRNA
ggcgaattcagatgagaaca

SEQ ID NO: 89619 - DNA, 20 bp, Artificial Sequence
  MKO10089619_B_Gnb3
  gRNA
atgtcctccgtgtccgcatc

SEQ ID NO: 89620 - DNA, 20 bp, Artificial Sequence
  MKO10089620_B_Gnb3
  gRNA
agccagagtgatgtccgcac

SEQ ID NO: 89621 - DNA, 20 bp, Artificial Sequence
  MKO10089621_B_Gnb3
  gRNA
tgaccttgacattgccctcg

SEQ ID NO: 89622 - DNA, 20 bp, Artificial Sequence
  MKO10089622_B_Gnb4
  gRNA
gccgaatacaaatgcgaaca

SEQ ID NO: 89623 - DNA, 20 bp, Artificial Sequence
  MKO10089623_B_Gnb4
  gRNA
ggatagctatacgacaaata

SEQ ID NO: 89624 - DNA, 20 bp, Artificial Sequence
  MKO10089624_B_Gnb4
  gRNA
ctagtcagtgcttcgcaaga

SEQ ID NO: 89625 - DNA, 20 bp, Artificial Sequence
  MKO10089625_B_Gnb5
  gRNA
cctcaccttgttcgtagtga

SEQ ID NO: 89626 - DNA, 20 bp, Artificial Sequence
  MKO10089626_B_Gnb5
  gRNA
cctccacccgctcggccacc

SEQ ID NO: 89627 - DNA, 20 bp, Artificial Sequence
  MKO10089627_B_Gnb5
  gRNA
gagaatcgtgagctcctcac

SEQ ID NO: 89628 - DNA, 20 bp, Artificial Sequence
  MKO10089628_B_Gne
  gRNA
ctcacccatagtcgtcaatc

SEQ ID NO: 89629 - DNA, 20 bp, Artificial Sequence
  MKO10089629_B_Gne
  gRNA
gtgcttgactgcacggaaat

SEQ ID NO: 89630 - DNA, 20 bp, Artificial Sequence
  MKO10089630_B_Gne
  gRNA
cggaacacccgtgatcaacc

SEQ ID NO: 89631 - DNA, 20 bp, Artificial Sequence
  MKO10089631_B_Gng10
  gRNA
gcaaccccttccgggagccc

SEQ ID NO: 89632 - DNA, 20 bp, Artificial Sequence
  MKO10089632_B_Gng10
  gRNA
ccttagccgccatgtcttcc

SEQ ID NO: 89633 - DNA, 20 bp, Artificial Sequence
  MKO10089633_B_Gng10
  gRNA
cggaaggggttgcttccagc

SEQ ID NO: 89634 - DNA, 20 bp, Artificial Sequence
  MKO10089634_B_Gng11
  gRNA
ataggtatctaaatgttctg

SEQ ID NO: 89635 - DNA, 20 bp, Artificial Sequence
  MKO10089635_B_Gng11
  gRNA
tctgggattccctttaccag

SEQ ID NO: 89636 - DNA, 20 bp, Artificial Sequence
  MKO10089636_B_Gng11
  gRNA
caagaatcccttcaaagaaa

SEQ ID NO: 89637 - DNA, 20 bp, Artificial Sequence
  MKO10089637_B_Gng12
  gRNA
acttgcctttattctttcga

SEQ ID NO: 89638 - DNA, 20 bp, Artificial Sequence
  MKO10089638_B_Gng12
  gRNA
tcggtatgcccatcagcagg

SEQ ID NO: 89639 - DNA, 20 bp, Artificial Sequence
  MKO10089639_B_Gng12
  gRNA
ccggagcgaccccctgctga

SEQ ID NO: 89640 - DNA, 20 bp, Artificial Sequence
  MKO10089640_B_Gng13
  gRNA
agagagcctcaagtaccaac

SEQ ID NO: 89641 - DNA, 20 bp, Artificial Sequence
  MKO10089641_B_Gng13
  gRNA
cactcactcggggatggtct

SEQ ID NO: 89642 - DNA, 20 bp, Artificial Sequence
  MKO10089642_B_Gng13
  gRNA
cccaagggttgttcttcatc

SEQ ID NO: 89643 - DNA, 20 bp, Artificial Sequence
  MKO10089643_B_Gng2
  gRNA
cagctgttctaccagcttcc

SEQ ID NO: 89644 - DNA, 20 bp, Artificial Sequence
  MKO10089644_B_Gng2
  gRNA
cagcctcagaaaaccccttt

SEQ ID NO: 89645 - DNA, 20 bp, Artificial Sequence
  MKO10089645_B_Gng2
  gRNA
ctactgtgaggcacatgcca

SEQ ID NO: 89646 - DNA, 20 bp, Artificial Sequence
  MKO10089646_B_Gng3
  gRNA
gttaacagcactatgagtat

SEQ ID NO: 89647 - DNA, 20 bp, Artificial Sequence
  MKO10089647_B_Gng3
  gRNA
ggtggaacagcttaagattg

SEQ ID NO: 89648 - DNA, 20 bp, Artificial Sequence
  MKO10089648_B_Gng3
  gRNA
gggttctcggaagtgggcac

SEQ ID NO: 89649 - DNA, 20 bp, Artificial Sequence
  MKO10089649_B_Gng4
  gRNA
ctgcctcagaaaaccccttc

SEQ ID NO: 89650 - DNA, 20 bp, Artificial Sequence
  MKO10089650_B_Gng4
  gRNA
cctactgtgaagcccacgtg

SEQ ID NO: 89651 - DNA, 20 bp, Artificial Sequence
  MKO10089651_B_Gng4
  gRNA
acagtaggccaggaggtctg

SEQ ID NO: 89652 - DNA, 20 bp, Artificial Sequence
  MKO10089652_B_Gng5
  gRNA
caacatgaccctctgctgac

SEQ ID NO: 89653 - DNA, 20 bp, Artificial Sequence
  MKO10089653_B_Gng5
  gRNA
ctgctggaccaccttcttca

SEQ ID NO: 89654 - DNA, 20 bp, Artificial Sequence
  MKO10089654_B_Gng5
  gRNA
ggtccagcagctccggctgg

SEQ ID NO: 89655 - DNA, 20 bp, Artificial Sequence
  MKO10089655_B_Gng7
  gRNA
gagcagctgcgcattgaagc

SEQ ID NO: 89656 - DNA, 20 bp, Artificial Sequence
  MKO10089656_B_Gng7
  gRNA
caaggcctcgtcagacctga

SEQ ID NO: 89657 - DNA, 20 bp, Artificial Sequence
  MKO10089657_B_Gng7
  gRNA
gttgctcacagtagcccatc

SEQ ID NO: 89658 - DNA, 20 bp, Artificial Sequence
  MKO10089658_B_Gng8
  gRNA
tgctgaggcccgcaagaccg

SEQ ID NO: 89659 - DNA, 20 bp, Artificial Sequence
  MKO10089659_B_Gng8
  gRNA
ggattctcggcggcagggac

SEQ ID NO: 89660 - DNA, 20 bp, Artificial Sequence
  MKO10089660_B_Gng8
  gRNA
cttgcgggcctcagcaatct

SEQ ID NO: 89661 - DNA, 20 bp, Artificial Sequence
  MKO10089661_B_Gngt1
  gRNA
aggaggctgtgtgatttcat

SEQ ID NO: 89662 - DNA, 20 bp, Artificial Sequence
  MKO10089662_B_Gngt1
  gRNA
catcgaagacctgacagaaa

SEQ ID NO: 89663 - DNA, 20 bp, Artificial Sequence
  MKO10089663_B_Gngt1
  gRNA
tctcacttcttcacaacatt

SEQ ID NO: 89664 - DNA, 20 bp, Artificial Sequence
  MKO10089664_B_Gngt2
  gRNA
ggaaatcaaggattatgtag

SEQ ID NO: 89665 - DNA, 20 bp, Artificial Sequence
  MKO10089665_B_Gngt2
  gRNA
acaagtgcctttctccttga

SEQ ID NO: 89666 - DNA, 20 bp, Artificial Sequence
  MKO10089666_B_Gngt2
  gRNA
tcaacagctccttctcactg

SEQ ID NO: 89667 - DNA, 20 bp, Artificial Sequence
  MKO10089667_B_Gnl1
  gRNA
cattactgacatccgacatc

SEQ ID NO: 89668 - DNA, 20 bp, Artificial Sequence
  MKO10089668_B_Gnl1
  gRNA
atgccccgtgtatcttccca

SEQ ID NO: 89669 - DNA, 20 bp, Artificial Sequence
  MKO10089669_B_Gnl1
  gRNA
gtcggatgtcagtaatgagc

SEQ ID NO: 89670 - DNA, 20 bp, Artificial Sequence
  MKO10089670_B_Gnl2
  gRNA
cctcaacttaggaacagtcg

SEQ ID NO: 89671 - DNA, 20 bp, Artificial Sequence
  MKO10089671_B_Gnl2
  gRNA
gtctactgagagctatgacc

SEQ ID NO: 89672 - DNA, 20 bp, Artificial Sequence
  MKO10089672_B_Gnl2
  gRNA
aaatactcgtgtgatcaagc

SEQ ID NO: 89673 - DNA, 20 bp, Artificial Sequence
  MKO10089673_B_Gnl3l
  gRNA
tctgctccccagattgttca

SEQ ID NO: 89674 - DNA, 20 bp, Artificial Sequence
  MKO10089674_B_Gnl3l
  gRNA
cttccggaattccttgtaat

SEQ ID NO: 89675 - DNA, 20 bp, Artificial Sequence
  MKO10089675_B_Gnl3l
  gRNA
acttaccttcttacagcctt

SEQ ID NO: 89676 - DNA, 20 bp, Artificial Sequence
  MKO10089676_B_Gnl3
  gRNA
tccaaagaagttacattgcc

SEQ ID NO: 89677 - DNA, 20 bp, Artificial Sequence
  MKO10089677_B_Gnl3
  gRNA
agaaaacttgaagttagccc

SEQ ID NO: 89678 - DNA, 20 bp, Artificial Sequence
  MKO10089678_B_Gnl3
  gRNA
gcgatataaaattcaaaaaa

SEQ ID NO: 89679 - DNA, 20 bp, Artificial Sequence
  MKO10089679_B_Gnmt
  gRNA
gtcgatcaccagcaggcccc

SEQ ID NO: 89680 - DNA, 20 bp, Artificial Sequence
  MKO10089680_B_Gnmt
  gRNA
tttgtccagcgtcaaccagt

SEQ ID NO: 89681 - DNA, 20 bp, Artificial Sequence
  MKO10089681_B_Gnmt
  gRNA
tactgacgtcgtaatgtcct

SEQ ID NO: 89682 - DNA, 20 bp, Artificial Sequence
  MKO10089682_B_Gnpat
  gRNA
tggctcctatgcgcagtttg

SEQ ID NO: 89683 - DNA, 20 bp, Artificial Sequence
  MKO10089683_B_Gnpat
  gRNA
ttcttcatgcgacgcacttt

SEQ ID NO: 89684 - DNA, 20 bp, Artificial Sequence
  MKO10089684_B_Gnpat
  gRNA
atgagccacaaactgcgcat

SEQ ID NO: 89685 - DNA, 20 bp, Artificial Sequence
  MKO10089685_B_Gnpda1
  gRNA
tatagtactcgatcagcttc

SEQ ID NO: 89686 - DNA, 20 bp, Artificial Sequence
  MKO10089686_B_Gnpda1
  gRNA
tgctctgtacaaagccatcg

SEQ ID NO: 89687 - DNA, 20 bp, Artificial Sequence
  MKO10089687_B_Gnpda1
  gRNA
gggcgtgaaccacatgtgga

SEQ ID NO: 89688 - DNA, 20 bp, Artificial Sequence
  MKO10089688_B_Gnpda2
  gRNA
ccttgtgcgcacctgttatg

SEQ ID NO: 89689 - DNA, 20 bp, Artificial Sequence
  MKO10089689_B_Gnpda2
  gRNA
gagattaaagacgctagcaa

SEQ ID NO: 89690 - DNA, 20 bp, Artificial Sequence
  MKO10089690_B_Gnpda2
  gRNA
aacaatgctcacatcctcga

SEQ ID NO: 89691 - DNA, 20 bp, Artificial Sequence
  MKO10089691_B_Gnpnat1
  gRNA
atttatccattcatgtgcta

SEQ ID NO: 89692 - DNA, 20 bp, Artificial Sequence
  MKO10089692_B_Gnpnat1
  gRNA
ttgggtcagctgacagagac

SEQ ID NO: 89693 - DNA, 20 bp, Artificial Sequence
  MKO10089693_B_Gnpnat1
  gRNA
gaatgtctaccacaaaatgt

SEQ ID NO: 89694 - DNA, 20 bp, Artificial Sequence
  MKO10089694_B_Gnptab
  gRNA
caaccgaaccgacaaagaag

SEQ ID NO: 89695 - DNA, 20 bp, Artificial Sequence
  MKO10089695_B_Gnptab
  gRNA
ttcggttgtgttcttcccga

SEQ ID NO: 89696 - DNA, 20 bp, Artificial Sequence
  MKO10089696_B_Gnptab
  gRNA
tctgctgacgcactgcatta

SEQ ID NO: 89697 - DNA, 20 bp, Artificial Sequence
  MKO10089697_B_Gnptg
  gRNA
cgctcaccggatacagctga

SEQ ID NO: 89698 - DNA, 20 bp, Artificial Sequence
  MKO10089698_B_Gnptg
  gRNA
tgggctgaaggcggcttgcc

SEQ ID NO: 89699 - DNA, 20 bp, Artificial Sequence
  MKO10089699_B_Gnptg
  gRNA
tggaggagcctaacacattc

SEQ ID NO: 89700 - DNA, 20 bp, Artificial Sequence
  MKO10089700_B_Gnrh1
  gRNA
gcaacccataggaccagtgc

SEQ ID NO: 89701 - DNA, 20 bp, Artificial Sequence
  MKO10089701_B_Gnrh1
  gRNA
tcaggaaagtctgattgaag

SEQ ID NO: 89702 - DNA, 20 bp, Artificial Sequence
  MKO10089702_B_Gnrh1
  gRNA
catctacatcttcttctgcc

SEQ ID NO: 89703 - DNA, 20 bp, Artificial Sequence
  MKO10089703_B_Gnrhr
  gRNA
gattagcctggaccgctccc

SEQ ID NO: 89704 - DNA, 20 bp, Artificial Sequence
  MKO10089704_B_Gnrhr
  gRNA
gggagtccagcagacgacaa

SEQ ID NO: 89705 - DNA, 20 bp, Artificial Sequence
  MKO10089705_B_Gnrhr
  gRNA
atctacctagcagacggctc

SEQ ID NO: 89706 - DNA, 20 bp, Artificial Sequence
  MKO10089706_B_Gns
  gRNA
ccaaagtgttgttaacgacg

SEQ ID NO: 89707 - DNA, 20 bp, Artificial Sequence
  MKO10089707_B_Gns
  gRNA
cttccgtgccttcccgttga

SEQ ID NO: 89708 - DNA, 20 bp, Artificial Sequence
  MKO10089708_B_Gns
  gRNA
cagtatggagccccagacgc

SEQ ID NO: 89709 - DNA, 20 bp, Artificial Sequence
  MKO10089709_B_Golga1
  gRNA
ttaatacataccagaaagtc

SEQ ID NO: 89710 - DNA, 20 bp, Artificial Sequence
  MKO10089710_B_Golga1
  gRNA
gttcatttcttctcaaaagc

SEQ ID NO: 89711 - DNA, 20 bp, Artificial Sequence
  MKO10089711_B_Golga1
  gRNA
aattgcattagaaaaacacc

SEQ ID NO: 89712 - DNA, 20 bp, Artificial Sequence
  MKO10089712_B_Golga2
  gRNA
gtatcagcagaagaacagcc

SEQ ID NO: 89713 - DNA, 20 bp, Artificial Sequence
  MKO10089713_B_Golga2
  gRNA
gctactgacactatgtttct

SEQ ID NO: 89714 - DNA, 20 bp, Artificial Sequence
  MKO10089714_B_Golga2
  gRNA
ctctggtgactgacagtcac

SEQ ID NO: 89715 - DNA, 20 bp, Artificial Sequence
  MKO10089715_B_Golga3
  gRNA
agacactcaccctttcccga

SEQ ID NO: 89716 - DNA, 20 bp, Artificial Sequence
  MKO10089716_B_Golga3
  gRNA
ccacctggctggatctatct

SEQ ID NO: 89717 - DNA, 20 bp, Artificial Sequence
  MKO10089717_B_Golga3
  gRNA
tccacacctgtagaggcatc

SEQ ID NO: 89718 - DNA, 20 bp, Artificial Sequence
  MKO10089718_B_Golga4
  gRNA
tgacgtgacacccaacagag

SEQ ID NO: 89719 - DNA, 20 bp, Artificial Sequence
  MKO10089719_B_Golga4
  gRNA
agatgagtcgtccccctctc

SEQ ID NO: 89720 - DNA, 20 bp, Artificial Sequence
  MKO10089720_B_Golga4
  gRNA
tcatctttactgacaccatc

SEQ ID NO: 89721 - DNA, 20 bp, Artificial Sequence
  MKO10089721_B_Golga5
  gRNA
cctcctgcagtcgcactttg

SEQ ID NO: 89722 - DNA, 20 bp, Artificial Sequence
  MKO10089722_B_Golga5
  gRNA
tgctgcacgccttaacaaaa

SEQ ID NO: 89723 - DNA, 20 bp, Artificial Sequence
  MKO10089723_B_Golga5
  gRNA
aagcttggagtcggctaagc

SEQ ID NO: 89724 - DNA, 20 bp, Artificial Sequence
  MKO10089724_B_Golga7b
  gRNA
accctcattccgcgttccac

SEQ ID NO: 89725 - DNA, 20 bp, Artificial Sequence
  MKO10089725_B_Golga7b
  gRNA
cctccgcataaaaaccattg

SEQ ID NO: 89726 - DNA, 20 bp, Artificial Sequence
  MKO10089726_B_Golga7b
  gRNA
gctgcaccggtcctcataga

SEQ ID NO: 89727 - DNA, 20 bp, Artificial Sequence
  MKO10089727_B_Golga7
  gRNA
agtttccatgcataagaaga

SEQ ID NO: 89728 - DNA, 20 bp, Artificial Sequence
  MKO10089728_B_Golga7
  gRNA
gagaagatatatgctcccca

SEQ ID NO: 89729 - DNA, 20 bp, Artificial Sequence
  MKO10089729_B_Golga7
  gRNA
aactcgaagtcctctctcaa

SEQ ID NO: 89730 - DNA, 20 bp, Artificial Sequence
  MKO10089730_B_Golgb1
  gRNA
cctgcgaggcttgttctgat

SEQ ID NO: 89731 - DNA, 20 bp, Artificial Sequence
  MKO10089731_B_Golgb1
  gRNA
acatgatcttggcctttgca

SEQ ID NO: 89732 - DNA, 20 bp, Artificial Sequence
  MKO10089732_B_Golgb1
  gRNA
aacacagctcagccagacac

SEQ ID NO: 89733 - DNA, 20 bp, Artificial Sequence
  MKO10089733_B_Golim4
  gRNA
ttactttcagcatctgatgt

SEQ ID NO: 89734 - DNA, 20 bp, Artificial Sequence
  MKO10089734_B_Golim4
  gRNA
aagaggaacaccggaagcaa

SEQ ID NO: 89735 - DNA, 20 bp, Artificial Sequence
  MKO10089735_B_Golim4
  gRNA
gcacaagaaacacttaacaa

SEQ ID NO: 89736 - DNA, 20 bp, Artificial Sequence
  MKO10089736_B_Golm1
  gRNA
cagaaagcgaaacgaagcac

SEQ ID NO: 89737 - DNA, 20 bp, Artificial Sequence
  MKO10089737_B_Golm1
  gRNA
ctagacgcgcattgtagagc

SEQ ID NO: 89738 - DNA, 20 bp, Artificial Sequence
  MKO10089738_B_Golm1
  gRNA
gaatgtcaacaagctacacc

SEQ ID NO: 89739 - DNA, 20 bp, Artificial Sequence
  MKO10089739_B_Golph3l
  gRNA
ccgcctagggtacgggaaac

SEQ ID NO: 89740 - DNA, 20 bp, Artificial Sequence
  MKO10089740_B_Golph3l
  gRNA
gagtggtcatgtcgaagagc

SEQ ID NO: 89741 - DNA, 20 bp, Artificial Sequence
  MKO10089741_B_Golph3l
  gRNA
gatccacgtctgcacagttt

SEQ ID NO: 89742 - DNA, 20 bp, Artificial Sequence
  MKO10089742_B_Golph3
  gRNA
acgctgcttaatgttgttat

SEQ ID NO: 89743 - DNA, 20 bp, Artificial Sequence
  MKO10089743_B_Golph3
  gRNA
tgtatatcatctggattacg

SEQ ID NO: 89744 - DNA, 20 bp, Artificial Sequence
  MKO10089744_B_Golph3
  gRNA
taagtaactcaatccagttc

SEQ ID NO: 89745 - DNA, 20 bp, Artificial Sequence
  MKO10089745_B_Golt1a
  gRNA
ggatgttaaacgcactgccc

SEQ ID NO: 89746 - DNA, 20 bp, Artificial Sequence
  MKO10089746_B_Golt1a
  gRNA
gtactttgactccgtgctct

SEQ ID NO: 89747 - DNA, 20 bp, Artificial Sequence
  MKO10089747_B_Golt1a
  gRNA
agtacaggagaatcccaaag

SEQ ID NO: 89748 - DNA, 20 bp, Artificial Sequence
  MKO10089748_B_Golt1b
  gRNA
ggtgtgttcgtggtcctcat

SEQ ID NO: 89749 - DNA, 20 bp, Artificial Sequence
  MKO10089749_B_Golt1b
  gRNA
ttacagttcgtagacaaagt

SEQ ID NO: 89750 - DNA, 20 bp, Artificial Sequence
  MKO10089750_B_Golt1b
  gRNA
ttatgttgcagaaattggca

SEQ ID NO: 89751 - DNA, 20 bp, Artificial Sequence
  MKO10089751_B_Gon4l
  gRNA
ctacttccttcagtttagag

SEQ ID NO: 89752 - DNA, 20 bp, Artificial Sequence
  MKO10089752_B_Gon4l
  gRNA
aatcacaaatgaacatgttg

SEQ ID NO: 89753 - DNA, 20 bp, Artificial Sequence
  MKO10089753_B_Gon4l
  gRNA
catgtcttctgtctcactga

SEQ ID NO: 89754 - DNA, 20 bp, Artificial Sequence
  MKO10089754_B_Gopc
  gRNA
tcgccccataaacttcagcc

SEQ ID NO: 89755 - DNA, 20 bp, Artificial Sequence
  MKO10089755_B_Gopc
  gRNA
aggagaacgaggctcttcga

SEQ ID NO: 89756 - DNA, 20 bp, Artificial Sequence
  MKO10089756_B_Gopc
  gRNA
gcagctgtaaaagctgctcg

SEQ ID NO: 89757 - DNA, 20 bp, Artificial Sequence
  MKO10089757_B_Gorab
  gRNA
aggtagctttccatcgccag

SEQ ID NO: 89758 - DNA, 20 bp, Artificial Sequence
  MKO10089758_B_Gorab
  gRNA
tcaggcaagagaaatctcgt

SEQ ID NO: 89759 - DNA, 20 bp, Artificial Sequence
  MKO10089759_B_Gorab
  gRNA
gttgcaggccttagacgaca

SEQ ID NO: 89760 - DNA, 20 bp, Artificial Sequence
  MKO10089760_B_Gorasp1
  gRNA
acaggtacaagagaactcgc

SEQ ID NO: 89761 - DNA, 20 bp, Artificial Sequence
  MKO10089761_B_Gorasp1
  gRNA
ttatacaccatcagcttcag

SEQ ID NO: 89762 - DNA, 20 bp, Artificial Sequence
  MKO10089762_B_Gorasp1
  gRNA
ccaactatgtagtctgtgta

SEQ ID NO: 89763 - DNA, 20 bp, Artificial Sequence
  MKO10089763_B_Gorasp2
  gRNA
ttgcttcgtgggtctcaata

SEQ ID NO: 89764 - DNA, 20 bp, Artificial Sequence
  MKO10089764_B_Gorasp2
  gRNA
ctcaatcctgccagcgctgc

SEQ ID NO: 89765 - DNA, 20 bp, Artificial Sequence
  MKO10089765_B_Gorasp2
  gRNA
tgttgtacacgtagagcttc

SEQ ID NO: 89766 - DNA, 20 bp, Artificial Sequence
  MKO10089766_B_Gosr1
  gRNA
gtcgctgcagcgtgtgcatc

SEQ ID NO: 89767 - DNA, 20 bp, Artificial Sequence
  MKO10089767_B_Gosr1
  gRNA
gacacaacaccgctattaaa

SEQ ID NO: 89768 - DNA, 20 bp, Artificial Sequence
  MKO10089768_B_Gosr1
  gRNA
tacaggagtaaacgacaaaa

SEQ ID NO: 89769 - DNA, 20 bp, Artificial Sequence
  MKO10089769_B_Gosr2
  gRNA
gccggtgctgaaagttcctg

SEQ ID NO: 89770 - DNA, 20 bp, Artificial Sequence
  MKO10089770_B_Gosr2
  gRNA
atatttgctctatgcttgct

SEQ ID NO: 89771 - DNA, 20 bp, Artificial Sequence
  MKO10089771_B_Gosr2
  gRNA
ccttgcttgacaaaatctcc

SEQ ID NO: 89772 - DNA, 20 bp, Artificial Sequence
  MKO10089772_B_Got1l1
  gRNA
gttgggggtgtgcacatcgt

SEQ ID NO: 89773 - DNA, 20 bp, Artificial Sequence
  MKO10089773_B_Got1l1
  gRNA
gagtacttccacgaacatgc

SEQ ID NO: 89774 - DNA, 20 bp, Artificial Sequence
  MKO10089774_B_Got1l1
  gRNA
gacccgcctgcagattgcag

SEQ ID NO: 89775 - DNA, 20 bp, Artificial Sequence
  MKO10089775_B_Got1
  gRNA
gttggtgatgatacgtagat

SEQ ID NO: 89776 - DNA, 20 bp, Artificial Sequence
  MKO10089776_B_Got1
  gRNA
tctacgtatcatcaccaacc

SEQ ID NO: 89777 - DNA, 20 bp, Artificial Sequence
  MKO10089777_B_Got1
  gRNA
ccacgagtacctgcccatcc

SEQ ID NO: 89778 - DNA, 20 bp, Artificial Sequence
  MKO10089778_B_Got2
  gRNA
cacttactgatatgtcttct

SEQ ID NO: 89779 - DNA, 20 bp, Artificial Sequence
  MKO10089779_B_Got2
  gRNA
acacttcattgttctcgccc

SEQ ID NO: 89780 - DNA, 20 bp, Artificial Sequence
  MKO10089780_B_Got2
  gRNA
acaaagaatacctgcccatt

SEQ ID NO: 89781 - DNA, 20 bp, Artificial Sequence
  MKO10089781_B_Gp1ba
  gRNA
cagctcacgcaatttgttgt

SEQ ID NO: 89782 - DNA, 20 bp, Artificial Sequence
  MKO10089782_B_Gp1ba
  gRNA
cagtgtacgatgtgccaact

SEQ ID NO: 89783 - DNA, 20 bp, Artificial Sequence
  MKO10089783_B_Gp1ba
  gRNA
agaggccccactcgcccatt

SEQ ID NO: 89784 - DNA, 20 bp, Artificial Sequence
  MKO10089784_B_Gp1bb
  gRNA
gctgctacacgcgctgctat

SEQ ID NO: 89785 - DNA, 20 bp, Artificial Sequence
  MKO10089785_B_Gp1bb
  gRNA
cagcgccgtcaggttgttgc

SEQ ID NO: 89786 - DNA, 20 bp, Artificial Sequence
  MKO10089786_B_Gp1bb
  gRNA
ccgcttgctgccctacgtgg

SEQ ID NO: 89787 - DNA, 20 bp, Artificial Sequence
  MKO10089787_B_Gp2
  gRNA
gacaataccttacaatgggc

SEQ ID NO: 89788 - DNA, 20 bp, Artificial Sequence
  MKO10089788_B_Gp2
  gRNA
gcatggtaccattgcagttc

SEQ ID NO: 89789 - DNA, 20 bp, Artificial Sequence
  MKO10089789_B_Gp2
  gRNA
cacaggaccagttgttattt

SEQ ID NO: 89790 - DNA, 20 bp, Artificial Sequence
  MKO10089790_B_Gp49a
  gRNA
tgagctgcacttaaaggata

SEQ ID NO: 89791 - DNA, 20 bp, Artificial Sequence
  MKO10089791_B_Gp49a
  gRNA
cccgcacttaccatcttcag

SEQ ID NO: 89792 - DNA, 20 bp, Artificial Sequence
  MKO10089792_B_Gp49a
  gRNA
tcctgtacacccactgaaga

SEQ ID NO: 89793 - DNA, 20 bp, Artificial Sequence
  MKO10089793_B_Gp5
  gRNA
agagccgcgaacacgtctcc

SEQ ID NO: 89794 - DNA, 20 bp, Artificial Sequence
  MKO10089794_B_Gp5
  gRNA
ccgaggcggtcgaaggcacc

SEQ ID NO: 89795 - DNA, 20 bp, Artificial Sequence
  MKO10089795_B_Gp5
  gRNA
acgcaagagtgcgagcaccg

SEQ ID NO: 89796 - DNA, 20 bp, Artificial Sequence
  MKO10089796_B_Gp6
  gRNA
ctcggggctgaccacaggta

SEQ ID NO: 89797 - DNA, 20 bp, Artificial Sequence
  MKO10089797_B_Gp6
  gRNA
catactcaccactctgtgtt

SEQ ID NO: 89798 - DNA, 20 bp, Artificial Sequence
  MKO10089798_B_Gp6
  gRNA
cacaggaaatgattcttccg

SEQ ID NO: 89799 - DNA, 20 bp, Artificial Sequence
  MKO10089799_B_Gp9
  gRNA
agcctgcgttcagtgccacc

SEQ ID NO: 89800 - DNA, 20 bp, Artificial Sequence
  MKO10089800_B_Gp9
  gRNA
tcgaccacttgcctcagctg

SEQ ID NO: 89801 - DNA, 20 bp, Artificial Sequence
  MKO10089801_B_Gp9
  gRNA
aagtggtcgaaggcacctgg

SEQ ID NO: 89802 - DNA, 20 bp, Artificial Sequence
  MKO10089802_B_Gpa33
  gRNA
cacctatgtttcagaccgag

SEQ ID NO: 89803 - DNA, 20 bp, Artificial Sequence
  MKO10089803_B_Gpa33
  gRNA
gagtccctaccgtctgactt

SEQ ID NO: 89804 - DNA, 20 bp, Artificial Sequence
  MKO10089804_B_Gpa33
  gRNA
agagtcctgcaacatcaccg

SEQ ID NO: 89805 - DNA, 20 bp, Artificial Sequence
  MKO10089805_B_Gpaa1
  gRNA
gtgtcaggtaccaacgtgta

SEQ ID NO: 89806 - DNA, 20 bp, Artificial Sequence
  MKO10089806_B_Gpaa1
  gRNA
tggcagaacgtggggcccgc

SEQ ID NO: 89807 - DNA, 20 bp, Artificial Sequence
  MKO10089807_B_Gpaa1
  gRNA
ggtaacagaccatgatcttc

SEQ ID NO: 89808 - DNA, 20 bp, Artificial Sequence
  MKO10089808_B_Gpalpp1
  gRNA
actgtcctcgtcactgtctg

SEQ ID NO: 89809 - DNA, 20 bp, Artificial Sequence
  MKO10089809_B_Gpalpp1
  gRNA
gtcatcattcttcaactcag

SEQ ID NO: 89810 - DNA, 20 bp, Artificial Sequence
  MKO10089810_B_Gpalpp1
  gRNA
aagaatgatgacacttgccc

SEQ ID NO: 89811 - DNA, 20 bp, Artificial Sequence
  MKO10089811_B_Gpam
  gRNA
agagccttatgagccggaag

SEQ ID NO: 89812 - DNA, 20 bp, Artificial Sequence
  MKO10089812_B_Gpam
  gRNA
atggtcgccaccgtctcccc

SEQ ID NO: 89813 - DNA, 20 bp, Artificial Sequence
  MKO10089813_B_Gpam
  gRNA
agacggtggcgaccatctcc

SEQ ID NO: 89814 - DNA, 20 bp, Artificial Sequence
  MKO10089814_B_Gpank1
  gRNA
gttggcacggccttcacccc

SEQ ID NO: 89815 - DNA, 20 bp, Artificial Sequence
  MKO10089815_B_Gpank1
  gRNA
cttcatcgaatttaccccag

SEQ ID NO: 89816 - DNA, 20 bp, Artificial Sequence
  MKO10089816_B_Gpank1
  gRNA
cctcaccggttctggttctc

SEQ ID NO: 89817 - DNA, 20 bp, Artificial Sequence
  MKO10089817_B_Gpat2
  gRNA
acactacctcttgaccattg

SEQ ID NO: 89818 - DNA, 20 bp, Artificial Sequence
  MKO10089818_B_Gpat2
  gRNA
cttcccccaggttccggggc

SEQ ID NO: 89819 - DNA, 20 bp, Artificial Sequence
  MKO10089819_B_Gpat2
  gRNA
tgatgcctcccagaagatca

SEQ ID NO: 89820 - DNA, 20 bp, Artificial Sequence
  MKO10089820_B_Gpatch11
  gRNA
atcgggttgaagaatgcact

SEQ ID NO: 89821 - DNA, 20 bp, Artificial Sequence
  MKO10089821_B_Gpatch11
  gRNA
gtcatcattaaaacggaaag

SEQ ID NO: 89822 - DNA, 20 bp, Artificial Sequence
  MKO10089822_B_Gpatch11
  gRNA
ccagcgagcttgccagcagc

SEQ ID NO: 89823 - DNA, 20 bp, Artificial Sequence
  MKO10089823_B_Gpatch1
  gRNA
cgtaccttcctttgagccga

SEQ ID NO: 89824 - DNA, 20 bp, Artificial Sequence
  MKO10089824_B_Gpatch1
  gRNA
gctggttacttcaataccgt

SEQ ID NO: 89825 - DNA, 20 bp, Artificial Sequence
  MKO10089825_B_Gpatch1
  gRNA
gcttgatgacctcatcacac

SEQ ID NO: 89826 - DNA, 20 bp, Artificial Sequence
  MKO10089826_B_Gpatch2l
  gRNA
cccacttgggcagaaggtta

SEQ ID NO: 89827 - DNA, 20 bp, Artificial Sequence
  MKO10089827_B_Gpatch2l
  gRNA
tctacttcagtgcagtgatc

SEQ ID NO: 89828 - DNA, 20 bp, Artificial Sequence
  MKO10089828_B_Gpatch2l
  gRNA
accttgtcgtccttcatcat

SEQ ID NO: 89829 - DNA, 20 bp, Artificial Sequence
  MKO10089829_B_Gpatch2
  gRNA
ggattgctggagtcgtgccc

SEQ ID NO: 89830 - DNA, 20 bp, Artificial Sequence
  MKO10089830_B_Gpatch2
  gRNA
gaaggcgactgagtctagct

SEQ ID NO: 89831 - DNA, 20 bp, Artificial Sequence
  MKO10089831_B_Gpatch2
  gRNA
accttgtcttccctcatcgt

SEQ ID NO: 89832 - DNA, 20 bp, Artificial Sequence
  MKO10089832_B_Gpatch3
  gRNA
tcaactctaaaaagacccgc

SEQ ID NO: 89833 - DNA, 20 bp, Artificial Sequence
  MKO10089833_B_Gpatch3
  gRNA
atgagcgtctactacgacag

SEQ ID NO: 89834 - DNA, 20 bp, Artificial Sequence
  MKO10089834_B_Gpatch3
  gRNA
tctacaccgacgctcagttc

SEQ ID NO: 89835 - DNA, 20 bp, Artificial Sequence
  MKO10089835_B_Gpatch4
  gRNA
gtctcacatctttgggggcg

SEQ ID NO: 89836 - DNA, 20 bp, Artificial Sequence
  MKO10089836_B_Gpatch4
  gRNA
ctcctctacaggcaagggcc

SEQ ID NO: 89837 - DNA, 20 bp, Artificial Sequence
  MKO10089837_B_Gpatch4
  gRNA
gcagataagacgtctttcca

SEQ ID NO: 89838 - DNA, 20 bp, Artificial Sequence
  MKO10089838_B_Gpatch8
  gRNA
catgggtcgaatggaaatgg

SEQ ID NO: 89839 - DNA, 20 bp, Artificial Sequence
  MKO10089839_B_Gpatch8
  gRNA
ccttgacaagcccatagaat

SEQ ID NO: 89840 - DNA, 20 bp, Artificial Sequence
  MKO10089840_B_Gpatch8
  gRNA
acgccgttcggtagcatcct

SEQ ID NO: 89841 - DNA, 20 bp, Artificial Sequence
  MKO10089841_B_Gpbar1
  gRNA
tatgagcgtcgcccaccact

SEQ ID NO: 89842 - DNA, 20 bp, Artificial Sequence
  MKO10089842_B_Gpbar1
  gRNA
cgatgacgatgaggcttgcc

SEQ ID NO: 89843 - DNA, 20 bp, Artificial Sequence
  MKO10089843_B_Gpbar1
  gRNA
ccttctctctgtccgcgtgt

SEQ ID NO: 89844 - DNA, 20 bp, Artificial Sequence
  MKO10089844_B_Gpbp1l1
  gRNA
tacctaccccacactccaga

SEQ ID NO: 89845 - DNA, 20 bp, Artificial Sequence
  MKO10089845_B_Gpbp1l1
  gRNA
ggaagagccatgccaacctg

SEQ ID NO: 89846 - DNA, 20 bp, Artificial Sequence
  MKO10089846_B_Gpbp1l1
  gRNA
aatcagccctgcagacctgt

SEQ ID NO: 89847 - DNA, 20 bp, Artificial Sequence
  MKO10089847_B_Gpbp1
  gRNA
ggaaaatactgctacgagaa

SEQ ID NO: 89848 - DNA, 20 bp, Artificial Sequence
  MKO10089848_B_Gpbp1
  gRNA
agcatgactttgctccagcc

SEQ ID NO: 89849 - DNA, 20 bp, Artificial Sequence
  MKO10089849_B_Gpbp1
  gRNA
tcagaataaatctttagctg

SEQ ID NO: 89850 - DNA, 20 bp, Artificial Sequence
  MKO10089850_B_Gpc1
  gRNA
tagtacagcaagtgtagccc

SEQ ID NO: 89851 - DNA, 20 bp, Artificial Sequence
  MKO10089851_B_Gpc1
  gRNA
gagcacatttcggcaatagt

SEQ ID NO: 89852 - DNA, 20 bp, Artificial Sequence
  MKO10089852_B_Gpc1
  gRNA
tttggccaaccacagccgaa

SEQ ID NO: 89853 - DNA, 20 bp, Artificial Sequence
  MKO10089853_B_Gpc2
  gRNA
gaaggaactccccgacaaag

SEQ ID NO: 89854 - DNA, 20 bp, Artificial Sequence
  MKO10089854_B_Gpc2
  gRNA
gcccggcatagaaagtttaa

SEQ ID NO: 89855 - DNA, 20 bp, Artificial Sequence
  MKO10089855_B_Gpc2
  gRNA
gatgctgaagtcacattccg

SEQ ID NO: 89856 - DNA, 20 bp, Artificial Sequence
  MKO10089856_B_Gpc3
  gRNA
tgagttccatactcgcagac

SEQ ID NO: 89857 - DNA, 20 bp, Artificial Sequence
  MKO10089857_B_Gpc3
  gRNA
tgttcagccgtgctgttagt

SEQ ID NO: 89858 - DNA, 20 bp, Artificial Sequence
  MKO10089858_B_Gpc3
  gRNA
aaaccttatccagccgaaga

SEQ ID NO: 89859 - DNA, 20 bp, Artificial Sequence
  MKO10089859_B_Gpc4
  gRNA
tttcaacattgagtccgtta

SEQ ID NO: 89860 - DNA, 20 bp, Artificial Sequence
  MKO10089860_B_Gpc4
  gRNA
tcccgttacaagaagtttga

SEQ ID NO: 89861 - DNA, 20 bp, Artificial Sequence
  MKO10089861_B_Gpc4
  gRNA
gagaacagcatgtataatcc

SEQ ID NO: 89862 - DNA, 20 bp, Artificial Sequence
  MKO10089862_B_Gpc5
  gRNA
tgaaaggtgaatacgatttg

SEQ ID NO: 89863 - DNA, 20 bp, Artificial Sequence
  MKO10089863_B_Gpc5
  gRNA
ctgcatgggtccttctatgg

SEQ ID NO: 89864 - DNA, 20 bp, Artificial Sequence
  MKO10089864_B_Gpc5
  gRNA
tagcaactttaatgttgagc

SEQ ID NO: 89865 - DNA, 20 bp, Artificial Sequence
  MKO10089865_B_Gpc6
  gRNA
ctgcatgtacagcatcccgt

SEQ ID NO: 89866 - DNA, 20 bp, Artificial Sequence
  MKO10089866_B_Gpc6
  gRNA
ggcagcccttcatgacgttg

SEQ ID NO: 89867 - DNA, 20 bp, Artificial Sequence
  MKO10089867_B_Gpc6
  gRNA
agtgtccaaatctgcctgat

SEQ ID NO: 89868 - DNA, 20 bp, Artificial Sequence
  MKO10089868_B_Gpcpd1
  gRNA
agtgaaatcattattgacga

SEQ ID NO: 89869 - DNA, 20 bp, Artificial Sequence
  MKO10089869_B_Gpcpd1
  gRNA
gcagtgattgctctcaatag

SEQ ID NO: 89870 - DNA, 20 bp, Artificial Sequence
  MKO10089870_B_Gpcpd1
  gRNA
cttattaatgaaaacgagac

SEQ ID NO: 89871 - DNA, 20 bp, Artificial Sequence
  MKO10089871_B_Gpd1l
  gRNA
tgtcagcttcctcccgttca

SEQ ID NO: 89872 - DNA, 20 bp, Artificial Sequence
  MKO10089872_B_Gpd1l
  gRNA
acccctctagggcatagatg

SEQ ID NO: 89873 - DNA, 20 bp, Artificial Sequence
  MKO10089873_B_Gpd1l
  gRNA
gtctttgaggagaccgtgaa

SEQ ID NO: 89874 - DNA, 20 bp, Artificial Sequence
  MKO10089874_B_Gpd1
  gRNA
taccacagtgatgcgaaagt

SEQ ID NO: 89875 - DNA, 20 bp, Artificial Sequence
  MKO10089875_B_Gpd1
  gRNA
tgtcagcgcctgttgcagcc

SEQ ID NO: 89876 - DNA, 20 bp, Artificial Sequence
  MKO10089876_B_Gpd1
  gRNA
ctcagccattgccaagatcg

SEQ ID NO: 89877 - DNA, 20 bp, Artificial Sequence
  MKO10089877_B_Gpd2
  gRNA
gcactagatgccgtcaccag

SEQ ID NO: 89878 - DNA, 20 bp, Artificial Sequence
  MKO10089878_B_Gpd2
  gRNA
ggtggcagttaccttattac

SEQ ID NO: 89879 - DNA, 20 bp, Artificial Sequence
  MKO10089879_B_Gpd2
  gRNA
ctgctgcttccacatatgcc

SEQ ID NO: 89880 - DNA, 20 bp, Artificial Sequence
  MKO10089880_B_Gper1
  gRNA
ccactgcgaagatcatcctc

SEQ ID NO: 89881 - DNA, 20 bp, Artificial Sequence
  MKO10089881_B_Gper1
  gRNA
gatgccccggggaacctcac

SEQ ID NO: 89882 - DNA, 20 bp, Artificial Sequence
  MKO10089882_B_Gper1
  gRNA
cttcgacaggtacctagcgc

SEQ ID NO: 89883 - DNA, 20 bp, Artificial Sequence
  MKO10089883_B_Gpha2
  gRNA
agcttgagatctttactgca

SEQ ID NO: 89884 - DNA, 20 bp, Artificial Sequence
  MKO10089884_B_Gpha2
  gRNA
agtcttgctcctttgcctgc

SEQ ID NO: 89885 - DNA, 20 bp, Artificial Sequence
  MKO10089885_B_Gpha2
  gRNA
tcacggtgcaagtggcagcc

SEQ ID NO: 89886 - DNA, 20 bp, Artificial Sequence
  MKO10089886_B_Gphb5
  gRNA
tcacctcccaggtctcgcag

SEQ ID NO: 89887 - DNA, 20 bp, Artificial Sequence
  MKO10089887_B_Gphb5
  gRNA
tcgactccaggggcacagtt

SEQ ID NO: 89888 - DNA, 20 bp, Artificial Sequence
  MKO10089888_B_Gphb5
  gRNA
atccgaagtcccctgcagcc

SEQ ID NO: 89889 - DNA, 20 bp, Artificial Sequence
  MKO10089889_B_Gphn
  gRNA
acctctggagtgacatctcg

SEQ ID NO: 89890 - DNA, 20 bp, Artificial Sequence
  MKO10089890_B_Gphn
  gRNA
aatcttgcagaagaccgcag

SEQ ID NO: 89891 - DNA, 20 bp, Artificial Sequence
  MKO10089891_B_Gphn
  gRNA
tttaggaaacactcatagac

SEQ ID NO: 89892 - DNA, 20 bp, Artificial Sequence
  MKO10089892_B_Gpi1
  gRNA
atctttgccgtccaccttga

SEQ ID NO: 89893 - DNA, 20 bp, Artificial Sequence
  MKO10089893_B_Gpi1
  gRNA
ccgtgcagcctccacgcctc

SEQ ID NO: 89894 - DNA, 20 bp, Artificial Sequence
  MKO10089894_B_Gpi1
  gRNA
ggacggcaaagatgtgatgc

SEQ ID NO: 89895 - DNA, 20 bp, Artificial Sequence
  MKO10089895_B_Gpihbp1
  gRNA
tcatcgtagttgtagttctc

SEQ ID NO: 89896 - DNA, 20 bp, Artificial Sequence
  MKO10089896_B_Gpihbp1
  gRNA
atcacgctcgtctcccacag

SEQ ID NO: 89897 - DNA, 20 bp, Artificial Sequence
  MKO10089897_B_Gpihbp1
  gRNA
gtccacttagtagcaagatc

SEQ ID NO: 89898 - DNA, 20 bp, Artificial Sequence
  MKO10089898_B_Gpkow
  gRNA
gcctcatagtcggcttcctc

SEQ ID NO: 89899 - DNA, 20 bp, Artificial Sequence
  MKO10089899_B_Gpkow
  gRNA
actatccccatgatccagaa

SEQ ID NO: 89900 - DNA, 20 bp, Artificial Sequence
  MKO10089900_B_Gpkow
  gRNA
tgtgttgtcccaggctgtga

SEQ ID NO: 89901 - DNA, 20 bp, Artificial Sequence
  MKO10089901_B_Gpld1
  gRNA
ggtagttctctcgaatataa

SEQ ID NO: 89902 - DNA, 20 bp, Artificial Sequence
  MKO10089902_B_Gpld1
  gRNA
aatatcatgacgtttctgag

SEQ ID NO: 89903 - DNA, 20 bp, Artificial Sequence
  MKO10089903_B_Gpld1
  gRNA
tggacgcattaactacaaag

SEQ ID NO: 89904 - DNA, 20 bp, Artificial Sequence
  MKO10089904_B_Gpm6a
  gRNA
cgagtgctgcattaaatgcc

SEQ ID NO: 89905 - DNA, 20 bp, Artificial Sequence
  MKO10089905_B_Gpm6a
  gRNA
attgtagggattgtgacaat

SEQ ID NO: 89906 - DNA, 20 bp, Artificial Sequence
  MKO10089906_B_Gpm6a
  gRNA
agcgctcacacatctgccac

SEQ ID NO: 89907 - DNA, 20 bp, Artificial Sequence
  MKO10089907_B_Gpm6b
  gRNA
cgtgttcctcacctatgtgc

SEQ ID NO: 89908 - DNA, 20 bp, Artificial Sequence
  MKO10089908_B_Gpm6b
  gRNA
gtgttgctcaagaattgcca

SEQ ID NO: 89909 - DNA, 20 bp, Artificial Sequence
  MKO10089909_B_Gpm6b
  gRNA
gccaccatcctatgtttctc

SEQ ID NO: 89910 - DNA, 20 bp, Artificial Sequence
  MKO10089910_B_Gpn1
  gRNA
tcacctacctgaatgtgttc

SEQ ID NO: 89911 - DNA, 20 bp, Artificial Sequence
  MKO10089911_B_Gpn1
  gRNA
ctttgctaccagatttgatc

SEQ ID NO: 89912 - DNA, 20 bp, Artificial Sequence
  MKO10089912_B_Gpn1
  gRNA
ggtgatgaaatttattgaga

SEQ ID NO: 89913 - DNA, 20 bp, Artificial Sequence
  MKO10089913_B_Gpn2
  gRNA
ctgctctgcggtctgctccg

SEQ ID NO: 89914 - DNA, 20 bp, Artificial Sequence
  MKO10089914_B_Gpn2
  gRNA
ctcggagcagaccgcagagc

SEQ ID NO: 89915 - DNA, 20 bp, Artificial Sequence
  MKO10089915_B_Gpn2
  gRNA
gcttcccatagtgttcaata

SEQ ID NO: 89916 - DNA, 20 bp, Artificial Sequence
  MKO10089916_B_Gpn3
  gRNA
ccagtttatctccggcatcc

SEQ ID NO: 89917 - DNA, 20 bp, Artificial Sequence
  MKO10089917_B_Gpn3
  gRNA
ttcgtcatgatgttaacctg

SEQ ID NO: 89918 - DNA, 20 bp, Artificial Sequence
  MKO10089918_B_Gpn3
  gRNA
cgtccacctcgatcagctcc

SEQ ID NO: 89919 - DNA, 20 bp, Artificial Sequence
  MKO10089919_B_Gpnmb
  gRNA
cctgagatgctggcttcggc

SEQ ID NO: 89920 - DNA, 20 bp, Artificial Sequence
  MKO10089920_B_Gpnmb
  gRNA
cgagggaagggcctcctgtc

SEQ ID NO: 89921 - DNA, 20 bp, Artificial Sequence
  MKO10089921_B_Gpnmb
  gRNA
tgccctaggaggccgtgtgc

SEQ ID NO: 89922 - DNA, 20 bp, Artificial Sequence
  MKO10089922_B_Gpr101
  gRNA
tcatttcaacgacgatgttg

SEQ ID NO: 89923 - DNA, 20 bp, Artificial Sequence
  MKO10089923_B_Gpr101
  gRNA
actacgtcggttggtcatct

SEQ ID NO: 89924 - DNA, 20 bp, Artificial Sequence
  MKO10089924_B_Gpr101
  gRNA
gggtgatcaccataataatc

SEQ ID NO: 89925 - DNA, 20 bp, Artificial Sequence
  MKO10089925_B_Gpr107
  gRNA
gtcagatccccaccagaagc

SEQ ID NO: 89926 - DNA, 20 bp, Artificial Sequence
  MKO10089926_B_Gpr107
  gRNA
tctccgagcctcactgtctt

SEQ ID NO: 89927 - DNA, 20 bp, Artificial Sequence
  MKO10089927_B_Gpr107
  gRNA
cttgtcatcttagacatctc

SEQ ID NO: 89928 - DNA, 20 bp, Artificial Sequence
  MKO10089928_B_Gpr108
  gRNA
ctccactcaccgagtaggag

SEQ ID NO: 89929 - DNA, 20 bp, Artificial Sequence
  MKO10089929_B_Gpr108
  gRNA
gaactcccatgaatgccctc

SEQ ID NO: 89930 - DNA, 20 bp, Artificial Sequence
  MKO10089930_B_Gpr108
  gRNA
gcaggtccttgatattgatg

SEQ ID NO: 89931 - DNA, 20 bp, Artificial Sequence
  MKO10089931_B_Gpr110
  gRNA
cctgcgaagacagctatacg

SEQ ID NO: 89932 - DNA, 20 bp, Artificial Sequence
  MKO10089932_B_Gpr110
  gRNA
catcagatgatgaattccaa

SEQ ID NO: 89933 - DNA, 20 bp, Artificial Sequence
  MKO10089933_B_Gpr110
  gRNA
tttcaattccaactgtgtag

SEQ ID NO: 89934 - DNA, 20 bp, Artificial Sequence
  MKO10089934_B_Gpr111
  gRNA
tctaaccaaagacgtcaatg

SEQ ID NO: 89935 - DNA, 20 bp, Artificial Sequence
  MKO10089935_B_Gpr111
  gRNA
ttccatcaacgtatccatta

SEQ ID NO: 89936 - DNA, 20 bp, Artificial Sequence
  MKO10089936_B_Gpr111
  gRNA
tcaggcctccagcaaaagca

SEQ ID NO: 89937 - DNA, 20 bp, Artificial Sequence
  MKO10089937_B_Gpr113
  gRNA
ctttactcttcctaccgccc

SEQ ID NO: 89938 - DNA, 20 bp, Artificial Sequence
  MKO10089938_B_Gpr113
  gRNA
gagtgttacctgcccaatga

SEQ ID NO: 89939 - DNA, 20 bp, Artificial Sequence
  MKO10089939_B_Gpr113
  gRNA
agtagccagtaacaggaccg

SEQ ID NO: 89940 - DNA, 20 bp, Artificial Sequence
  MKO10089940_B_Gpr114
  gRNA
ggggcttgtcttccagagcg

SEQ ID NO: 89941 - DNA, 20 bp, Artificial Sequence
  MKO10089941_B_Gpr114
  gRNA
aagctgagctgcgactttcc

SEQ ID NO: 89942 - DNA, 20 bp, Artificial Sequence
  MKO10089942_B_Gpr114
  gRNA
cagatgagtcgaagctcagc

SEQ ID NO: 89943 - DNA, 20 bp, Artificial Sequence
  MKO10089943_B_Gpr115
  gRNA
aacaatgcaaacgtagtcct

SEQ ID NO: 89944 - DNA, 20 bp, Artificial Sequence
  MKO10089944_B_Gpr115
  gRNA
gcatgagtttagaccaagac

SEQ ID NO: 89945 - DNA, 20 bp, Artificial Sequence
  MKO10089945_B_Gpr115
  gRNA
atgtgaatacgatttctcca

SEQ ID NO: 89946 - DNA, 20 bp, Artificial Sequence
  MKO10089946_B_Gpr116
  gRNA
atttcgtaccttctgggagc

SEQ ID NO: 89947 - DNA, 20 bp, Artificial Sequence
  MKO10089947_B_Gpr116
  gRNA
gggcagaagacgtgttcttt

SEQ ID NO: 89948 - DNA, 20 bp, Artificial Sequence
  MKO10089948_B_Gpr116
  gRNA
agtgagctctgatggactcc

SEQ ID NO: 89949 - DNA, 20 bp, Artificial Sequence
  MKO10089949_B_Gpr119
  gRNA
ccgtcttagccatcgagctc

SEQ ID NO: 89950 - DNA, 20 bp, Artificial Sequence
  MKO10089950_B_Gpr119
  gRNA
ttgaagtcattgacagaccg

SEQ ID NO: 89951 - DNA, 20 bp, Artificial Sequence
  MKO10089951_B_Gpr119
  gRNA
cctctctggaccacgattcc

SEQ ID NO: 89952 - DNA, 20 bp, Artificial Sequence
  MKO10089952_B_Gpr123
  gRNA
gtgaccccacagatgatgaa

SEQ ID NO: 89953 - DNA, 20 bp, Artificial Sequence
  MKO10089953_B_Gpr123
  gRNA
tacggtggctggtctgctcc

SEQ ID NO: 89954 - DNA, 20 bp, Artificial Sequence
  MKO10089954_B_Gpr123
  gRNA
gacaggttctacctcatcag

SEQ ID NO: 89955 - DNA, 20 bp, Artificial Sequence
  MKO10089955_B_Gpr124
  gRNA
gcacttacaacttctccaac

SEQ ID NO: 89956 - DNA, 20 bp, Artificial Sequence
  MKO10089956_B_Gpr124
  gRNA
ctagagatctctccaacaat

SEQ ID NO: 89957 - DNA, 20 bp, Artificial Sequence
  MKO10089957_B_Gpr124
  gRNA
gtcatcagcactgtgcagcc

SEQ ID NO: 89958 - DNA, 20 bp, Artificial Sequence
  MKO10089958_B_Gpr125
  gRNA
tacttacagccgaaccagat

SEQ ID NO: 89959 - DNA, 20 bp, Artificial Sequence
  MKO10089959_B_Gpr125
  gRNA
ttgattatcttggctcgttg

SEQ ID NO: 89960 - DNA, 20 bp, Artificial Sequence
  MKO10089960_B_Gpr125
  gRNA
agaatactcacagtctttcg

SEQ ID NO: 89961 - DNA, 20 bp, Artificial Sequence
  MKO10089961_B_Gpr126
  gRNA
ggagggtccacgaacaagac

SEQ ID NO: 89962 - DNA, 20 bp, Artificial Sequence
  MKO10089962_B_Gpr126
  gRNA
gctgacaaactgttcagaac

SEQ ID NO: 89963 - DNA, 20 bp, Artificial Sequence
  MKO10089963_B_Gpr126
  gRNA
cagtttgtcagctctgctgc

SEQ ID NO: 89964 - DNA, 20 bp, Artificial Sequence
  MKO10089964_B_Gpr128
  gRNA
ttgcacagccgagttgcttt

SEQ ID NO: 89965 - DNA, 20 bp, Artificial Sequence
  MKO10089965_B_Gpr128
  gRNA
gtatccctgtacagttctgc

SEQ ID NO: 89966 - DNA, 20 bp, Artificial Sequence
  MKO10089966_B_Gpr128
  gRNA
tattctcagcacttgctgtt

SEQ ID NO: 89967 - DNA, 20 bp, Artificial Sequence
  MKO10089967_B_Gpr12
  gRNA
agaggcgacaatgagtccga

SEQ ID NO: 89968 - DNA, 20 bp, Artificial Sequence
  MKO10089968_B_Gpr12
  gRNA
agaaggctgctacacatcgc

SEQ ID NO: 89969 - DNA, 20 bp, Artificial Sequence
  MKO10089969_B_Gpr12
  gRNA
ccgagctcgttgtcaacccc

SEQ ID NO: 89970 - DNA, 20 bp, Artificial Sequence
  MKO10089970_B_Gpr132
  gRNA
tcagaacctaccaatgcagc

SEQ ID NO: 89971 - DNA, 20 bp, Artificial Sequence
  MKO10089971_B_Gpr132
  gRNA
tggacacttcttgccgagag

SEQ ID NO: 89972 - DNA, 20 bp, Artificial Sequence
  MKO10089972_B_Gpr132
  gRNA
tgttcttctgcgcagcgctc

SEQ ID NO: 89973 - DNA, 20 bp, Artificial Sequence
  MKO10089973_B_Gpr133
  gRNA
acctacagtcgcagacaagt

SEQ ID NO: 89974 - DNA, 20 bp, Artificial Sequence
  MKO10089974_B_Gpr133
  gRNA
cctcccttagatatcatgga

SEQ ID NO: 89975 - DNA, 20 bp, Artificial Sequence
  MKO10089975_B_Gpr133
  gRNA
ggatgggatccttgagcttc

SEQ ID NO: 89976 - DNA, 20 bp, Artificial Sequence
  MKO10089976_B_Gpr135
  gRNA
cgtcgcctacagcgtgggac

SEQ ID NO: 89977 - DNA, 20 bp, Artificial Sequence
  MKO10089977_B_Gpr135
  gRNA
ggccgcgagtgcaaccttgc

SEQ ID NO: 89978 - DNA, 20 bp, Artificial Sequence
  MKO10089978_B_Gpr135
  gRNA
agtcgcaatcgccttcgaaa

SEQ ID NO: 89979 - DNA, 20 bp, Artificial Sequence
  MKO10089979_B_Gpr137b
  gRNA
tcatcttgctctacacctct

SEQ ID NO: 89980 - DNA, 20 bp, Artificial Sequence
  MKO10089980_B_Gpr137b
  gRNA
caacatctacttggagtcaa

SEQ ID NO: 89981 - DNA, 20 bp, Artificial Sequence
  MKO10089981_B_Gpr137b
  gRNA
agaggtgtagagcaagatga

SEQ ID NO: 89982 - DNA, 20 bp, Artificial Sequence
  MKO10089982_B_Gpr137c
  gRNA
aatagtaccactgaccatgc

SEQ ID NO: 89983 - DNA, 20 bp, Artificial Sequence
  MKO10089983_B_Gpr137c
  gRNA
ctgggataatctttcagata

SEQ ID NO: 89984 - DNA, 20 bp, Artificial Sequence
  MKO10089984_B_Gpr137c
  gRNA
ggaggagactacattgtctt

SEQ ID NO: 89985 - DNA, 20 bp, Artificial Sequence
  MKO10089985_B_Gpr137
  gRNA
agcaccagtcgaatcctcaa

SEQ ID NO: 89986 - DNA, 20 bp, Artificial Sequence
  MKO10089986_B_Gpr137
  gRNA
tgggcttcttccgggtacac

SEQ ID NO: 89987 - DNA, 20 bp, Artificial Sequence
  MKO10089987_B_Gpr137
  gRNA
ggcagttggtatggtgccat

SEQ ID NO: 89988 - DNA, 20 bp, Artificial Sequence
  MKO10089988_B_Gpr139
  gRNA
cagcaagcgcttccgtacca

SEQ ID NO: 89989 - DNA, 20 bp, Artificial Sequence
  MKO10089989_B_Gpr139
  gRNA
ccacctcgctgcgaatagct

SEQ ID NO: 89990 - DNA, 20 bp, Artificial Sequence
  MKO10089990_B_Gpr139
  gRNA
ccgtaatccaaatagaagtg

SEQ ID NO: 89991 - DNA, 20 bp, Artificial Sequence
  MKO10089991_B_Gpr141
  gRNA
agcaaaagattgtcgacatg

SEQ ID NO: 89992 - DNA, 20 bp, Artificial Sequence
  MKO10089992_B_Gpr141
  gRNA
tgccagtatagggtcacaag

SEQ ID NO: 89993 - DNA, 20 bp, Artificial Sequence
  MKO10089993_B_Gpr141
  gRNA
tgaagtaaatcgatgttaag

SEQ ID NO: 89994 - DNA, 20 bp, Artificial Sequence
  MKO10089994_B_Gpr142
  gRNA
taacccaagatacgatggtg

SEQ ID NO: 89995 - DNA, 20 bp, Artificial Sequence
  MKO10089995_B_Gpr142
  gRNA
accaacatgctgatcttcta

SEQ ID NO: 89996 - DNA, 20 bp, Artificial Sequence
  MKO10089996_B_Gpr142
  gRNA
ggcgtcacagatgtagctgt

SEQ ID NO: 89997 - DNA, 20 bp, Artificial Sequence
  MKO10089997_B_Gpr143
  gRNA
aatgtctgttgcattcacat

SEQ ID NO: 89998 - DNA, 20 bp, Artificial Sequence
  MKO10089998_B_Gpr143
  gRNA
ctatgcagttgatgtatact

SEQ ID NO: 89999 - DNA, 20 bp, Artificial Sequence
  MKO10089999_B_Gpr143
  gRNA
aagtcactgtcttgtgaaac

SEQ ID NO: 90000 - DNA, 20 bp, Artificial Sequence
  MKO10090000_B_Gpr146
  gRNA
cgattctcgagatgagtgcc

SEQ ID NO: 90001 - DNA, 20 bp, Artificial Sequence
  MKO10090001_B_Gpr146
  gRNA
ggtcctctcgctgctctacc

SEQ ID NO: 90002 - DNA, 20 bp, Artificial Sequence
  MKO10090002_B_Gpr146
  gRNA
actgctcatcctgttcaacg

SEQ ID NO: 90003 - DNA, 20 bp, Artificial Sequence
  MKO10090003_B_Gpr149
  gRNA
acccggggcaaacaccacgt

SEQ ID NO: 90004 - DNA, 20 bp, Artificial Sequence
  MKO10090004_B_Gpr149
  gRNA
acctactccgttgccttcga

SEQ ID NO: 90005 - DNA, 20 bp, Artificial Sequence
  MKO10090005_B_Gpr149
  gRNA
aatcagcaccacgccaccgc

SEQ ID NO: 90006 - DNA, 20 bp, Artificial Sequence
  MKO10090006_B_Gpr150
  gRNA
aagtccatcttgcgacgctt

SEQ ID NO: 90007 - DNA, 20 bp, Artificial Sequence
  MKO10090007_B_Gpr150
  gRNA
agtggtgttgccagctaccg

SEQ ID NO: 90008 - DNA, 20 bp, Artificial Sequence
  MKO10090008_B_Gpr150
  gRNA
gccctacttcgccgctcgct

SEQ ID NO: 90009 - DNA, 20 bp, Artificial Sequence
  MKO10090009_B_Gpr151
  gRNA
tgcatacgcgaagcatgctt

SEQ ID NO: 90010 - DNA, 20 bp, Artificial Sequence
  MKO10090010_B_Gpr151
  gRNA
agcaccaccagacgtcacgc

SEQ ID NO: 90011 - DNA, 20 bp, Artificial Sequence
  MKO10090011_B_Gpr151
  gRNA
cagcatactccaagggcgtt

SEQ ID NO: 90012 - DNA, 20 bp, Artificial Sequence
  MKO10090012_B_Gpr152
  gRNA
tgggtcagggggtccacttg

SEQ ID NO: 90013 - DNA, 20 bp, Artificial Sequence
  MKO10090013_B_Gpr152
  gRNA
aggagagcacagttcgcagc

SEQ ID NO: 90014 - DNA, 20 bp, Artificial Sequence
  MKO10090014_B_Gpr152
  gRNA
gacgagtcagcctctaaccc

SEQ ID NO: 90015 - DNA, 20 bp, Artificial Sequence
  MKO10090015_B_Gpr153
  gRNA
tcgttaccgggcggatctca

SEQ ID NO: 90016 - DNA, 20 bp, Artificial Sequence
  MKO10090016_B_Gpr153
  gRNA
cgcttcatcgtggccgagat

SEQ ID NO: 90017 - DNA, 20 bp, Artificial Sequence
  MKO10090017_B_Gpr153
  gRNA
agagcgctccaataccatgt

SEQ ID NO: 90018 - DNA, 20 bp, Artificial Sequence
  MKO10090018_B_Gpr155
  gRNA
acagaacccgatagtattta

SEQ ID NO: 90019 - DNA, 20 bp, Artificial Sequence
  MKO10090019_B_Gpr155
  gRNA
aagttcgctgtgagcatatg

SEQ ID NO: 90020 - DNA, 20 bp, Artificial Sequence
  MKO10090020_B_Gpr155
  gRNA
gttgcaaagatagccactcc

SEQ ID NO: 90021 - DNA, 20 bp, Artificial Sequence
  MKO10090021_B_Gpr156
  gRNA
caacttaccactctcttgtc

SEQ ID NO: 90022 - DNA, 20 bp, Artificial Sequence
  MKO10090022_B_Gpr156
  gRNA
cacataatccccaagagggc

SEQ ID NO: 90023 - DNA, 20 bp, Artificial Sequence
  MKO10090023_B_Gpr156
  gRNA
ttcagtagaagctctcattc

SEQ ID NO: 90024 - DNA, 20 bp, Artificial Sequence
  MKO10090024_B_Gpr157
  gRNA
agtaccggcccatctgcgag

SEQ ID NO: 90025 - DNA, 20 bp, Artificial Sequence
  MKO10090025_B_Gpr157
  gRNA
ccggggaaccacagagcgtc

SEQ ID NO: 90026 - DNA, 20 bp, Artificial Sequence
  MKO10090026_B_Gpr157
  gRNA
gctcctacgccccccaagat

SEQ ID NO: 90027 - DNA, 20 bp, Artificial Sequence
  MKO10090027_B_Gpr158
  gRNA
acgaatcccaggcctttgat

SEQ ID NO: 90028 - DNA, 20 bp, Artificial Sequence
  MKO10090028_B_Gpr158
  gRNA
ctgtagtgtatgccaatcaa

SEQ ID NO: 90029 - DNA, 20 bp, Artificial Sequence
  MKO10090029_B_Gpr158
  gRNA
ttacctttgctttgcgaaaa

SEQ ID NO: 90030 - DNA, 20 bp, Artificial Sequence
  MKO10090030_B_Gpr15
  gRNA
taaagatgtcgatcaatctt

SEQ ID NO: 90031 - DNA, 20 bp, Artificial Sequence
  MKO10090031_B_Gpr15
  gRNA
cgcaataataacgatcttta

SEQ ID NO: 90032 - DNA, 20 bp, Artificial Sequence
  MKO10090032_B_Gpr15
  gRNA
tctttgacagctatatccgc

SEQ ID NO: 90033 - DNA, 20 bp, Artificial Sequence
  MKO10090033_B_Gpr160
  gRNA
gagggcggccttgctcttat

SEQ ID NO: 90034 - DNA, 20 bp, Artificial Sequence
  MKO10090034_B_Gpr160
  gRNA
accaataaactgcagcgatg

SEQ ID NO: 90035 - DNA, 20 bp, Artificial Sequence
  MKO10090035_B_Gpr160
  gRNA
tcctcatcgctgcagtttat

SEQ ID NO: 90036 - DNA, 20 bp, Artificial Sequence
  MKO10090036_B_Gpr161
  gRNA
catcactgtcctcgtctgcc

SEQ ID NO: 90037 - DNA, 20 bp, Artificial Sequence
  MKO10090037_B_Gpr161
  gRNA
gccatgagcgccgtgagatg

SEQ ID NO: 90038 - DNA, 20 bp, Artificial Sequence
  MKO10090038_B_Gpr161
  gRNA
catggcaggcggacagtccc

SEQ ID NO: 90039 - DNA, 20 bp, Artificial Sequence
  MKO10090039_B_Gpr162
  gRNA
cccgttgttgtgccagccga

SEQ ID NO: 90040 - DNA, 20 bp, Artificial Sequence
  MKO10090040_B_Gpr162
  gRNA
ggggagcgctactatgcccg

SEQ ID NO: 90041 - DNA, 20 bp, Artificial Sequence
  MKO10090041_B_Gpr162
  gRNA
gcacatgctcttcccaccgc

SEQ ID NO: 90042 - DNA, 20 bp, Artificial Sequence
  MKO10090042_B_Gpr165
  gRNA
catatacttctaaatccacg

SEQ ID NO: 90043 - DNA, 20 bp, Artificial Sequence
  MKO10090043_B_Gpr165
  gRNA
gcgctatctgtgtaattcct

SEQ ID NO: 90044 - DNA, 20 bp, Artificial Sequence
  MKO10090044_B_Gpr165
  gRNA
agtactgggcaaagcgactg

SEQ ID NO: 90045 - DNA, 20 bp, Artificial Sequence
  MKO10090045_B_Gpr171
  gRNA
gtcaaaagcctttcgactaa

SEQ ID NO: 90046 - DNA, 20 bp, Artificial Sequence
  MKO10090046_B_Gpr171
  gRNA
aaacagttcaacgttctgtc

SEQ ID NO: 90047 - DNA, 20 bp, Artificial Sequence
  MKO10090047_B_Gpr171
  gRNA
atataccgaatacaagaacc

SEQ ID NO: 90048 - DNA, 20 bp, Artificial Sequence
  MKO10090048_B_Gpr173
  gRNA
gtgtaatcgcgtagaacatt

SEQ ID NO: 90049 - DNA, 20 bp, Artificial Sequence
  MKO10090049_B_Gpr173
  gRNA
catacattgtggcctgctac

SEQ ID NO: 90050 - DNA, 20 bp, Artificial Sequence
  MKO10090050_B_Gpr173
  gRNA
cagtgcgccgctcacctctt

SEQ ID NO: 90051 - DNA, 20 bp, Artificial Sequence
  MKO10090051_B_Gpr174
  gRNA
aactagaaacacccctgcac

SEQ ID NO: 90052 - DNA, 20 bp, Artificial Sequence
  MKO10090052_B_Gpr174
  gRNA
tcctatcaggaatgttaatc

SEQ ID NO: 90053 - DNA, 20 bp, Artificial Sequence
  MKO10090053_B_Gpr174
  gRNA
agaaccaatgatgatactcc

SEQ ID NO: 90054 - DNA, 20 bp, Artificial Sequence
  MKO10090054_B_Gpr176
  gRNA
atcggctgagccgagatact

SEQ ID NO: 90055 - DNA, 20 bp, Artificial Sequence
  MKO10090055_B_Gpr176
  gRNA
tacctgtccagggcaatagc

SEQ ID NO: 90056 - DNA, 20 bp, Artificial Sequence
  MKO10090056_B_Gpr176
  gRNA
ctatacgatgctcttctgca

SEQ ID NO: 90057 - DNA, 20 bp, Artificial Sequence
  MKO10090057_B_Gpr179
  gRNA
actggttgatgtccacactt

SEQ ID NO: 90058 - DNA, 20 bp, Artificial Sequence
  MKO10090058_B_Gpr179
  gRNA
tatctctgccgctgccgacc

SEQ ID NO: 90059 - DNA, 20 bp, Artificial Sequence
  MKO10090059_B_Gpr179
  gRNA
gacatcaaccagtgtgcaag

SEQ ID NO: 90060 - DNA, 20 bp, Artificial Sequence
  MKO10090060_B_Gpr17
  gRNA
gaaccggtcagcgctgatgc

SEQ ID NO: 90061 - DNA, 20 bp, Artificial Sequence
  MKO10090061_B_Gpr17
  gRNA
atgcggacaagagacccccc

SEQ ID NO: 90062 - DNA, 20 bp, Artificial Sequence
  MKO10090062_B_Gpr17
  gRNA
cggcatgggatctccccaaa

SEQ ID NO: 90063 - DNA, 20 bp, Artificial Sequence
  MKO10090063_B_Gpr180
  gRNA
acgcagtcacaaagtacact

SEQ ID NO: 90064 - DNA, 20 bp, Artificial Sequence
  MKO10090064_B_Gpr180
  gRNA
ctagcccgagctcagctgac

SEQ ID NO: 90065 - DNA, 20 bp, Artificial Sequence
  MKO10090065_B_Gpr180
  gRNA
gcatctatgcgcagtctctg

SEQ ID NO: 90066 - DNA, 20 bp, Artificial Sequence
  MKO10090066_B_Gpr182
  gRNA
agcgccaccagcaccgaata

SEQ ID NO: 90067 - DNA, 20 bp, Artificial Sequence
  MKO10090067_B_Gpr182
  gRNA
tactaagcctaccacgaaga

SEQ ID NO: 90068 - DNA, 20 bp, Artificial Sequence
  MKO10090068_B_Gpr182
  gRNA
tgtgtcaactgccgccgttc

SEQ ID NO: 90069 - DNA, 20 bp, Artificial Sequence
  MKO10090069_B_Gpr183
  gRNA
ttgccatgagacgttgccag

SEQ ID NO: 90070 - DNA, 20 bp, Artificial Sequence
  MKO10090070_B_Gpr183
  gRNA
taaaagaatcgaatacgcaa

SEQ ID NO: 90071 - DNA, 20 bp, Artificial Sequence
  MKO10090071_B_Gpr183
  gRNA
ttctacatcaacacgtacgc

SEQ ID NO: 90072 - DNA, 20 bp, Artificial Sequence
  MKO10090072_B_Gpr18
  gRNA
gtttggaaacgatgtagtag

SEQ ID NO: 90073 - DNA, 20 bp, Artificial Sequence
  MKO10090073_B_Gpr18
  gRNA
tttgccgtcctgatgctaca

SEQ ID NO: 90074 - DNA, 20 bp, Artificial Sequence
  MKO10090074_B_Gpr18
  gRNA
atcattcacagtctcctccg

SEQ ID NO: 90075 - DNA, 20 bp, Artificial Sequence
  MKO10090075_B_Gpr19
  gRNA
gctgcggtagcatttcatcg

SEQ ID NO: 90076 - DNA, 20 bp, Artificial Sequence
  MKO10090076_B_Gpr19
  gRNA
gaagctcagcgggtagacga

SEQ ID NO: 90077 - DNA, 20 bp, Artificial Sequence
  MKO10090077_B_Gpr19
  gRNA
ttatggtcctgctcacggga

SEQ ID NO: 90078 - DNA, 20 bp, Artificial Sequence
  MKO10090078_B_Gpr1
  gRNA
agatccagtgaacgagtccc

SEQ ID NO: 90079 - DNA, 20 bp, Artificial Sequence
  MKO10090079_B_Gpr1
  gRNA
catgttcagttgggcaatga

SEQ ID NO: 90080 - DNA, 20 bp, Artificial Sequence
  MKO10090080_B_Gpr1
  gRNA
cccggaggagaaggtgtacc

SEQ ID NO: 90081 - DNA, 20 bp, Artificial Sequence
  MKO10090081_B_Gpr20
  gRNA
tcacgcgccgctgacggccc

SEQ ID NO: 90082 - DNA, 20 bp, Artificial Sequence
  MKO10090082_B_Gpr20
  gRNA
tgtctttgctctgaccgttc

SEQ ID NO: 90083 - DNA, 20 bp, Artificial Sequence
  MKO10090083_B_Gpr20
  gRNA
tcgacagcgcacacatgatc

SEQ ID NO: 90084 - DNA, 20 bp, Artificial Sequence
  MKO10090084_B_Gpr21
  gRNA
agcacgagatgaactccacc

SEQ ID NO: 90085 - DNA, 20 bp, Artificial Sequence
  MKO10090085_B_Gpr21
  gRNA
accatggcatagcgcttatc

SEQ ID NO: 90086 - DNA, 20 bp, Artificial Sequence
  MKO10090086_B_Gpr21
  gRNA
ggcagcttaccccaaccaag

SEQ ID NO: 90087 - DNA, 20 bp, Artificial Sequence
  MKO10090087_B_Gpr22
  gRNA
tgacatcatgtatcaatttg

SEQ ID NO: 90088 - DNA, 20 bp, Artificial Sequence
  MKO10090088_B_Gpr22
  gRNA
tggcagcaaccttaccgtcc

SEQ ID NO: 90089 - DNA, 20 bp, Artificial Sequence
  MKO10090089_B_Gpr22
  gRNA
tctgccgttctcgtcgttcc

SEQ ID NO: 90090 - DNA, 20 bp, Artificial Sequence
  MKO10090090_B_Gpr25
  gRNA
acacgcgccagtagcagatc

SEQ ID NO: 90091 - DNA, 20 bp, Artificial Sequence
  MKO10090091_B_Gpr25
  gRNA
ccatgcagtccaccgaaccc

SEQ ID NO: 90092 - DNA, 20 bp, Artificial Sequence
  MKO10090092_B_Gpr25
  gRNA
gttccggggccggtccccga

SEQ ID NO: 90093 - DNA, 20 bp, Artificial Sequence
  MKO10090093_B_Gpr26
  gRNA
gggcgcgcaccatgaactcg

SEQ ID NO: 90094 - DNA, 20 bp, Artificial Sequence
  MKO10090094_B_Gpr26
  gRNA
cacaaggaaggtccctatga

SEQ ID NO: 90095 - DNA, 20 bp, Artificial Sequence
  MKO10090095_B_Gpr26
  gRNA
ttgcaccctatgtgattacc

SEQ ID NO: 90096 - DNA, 20 bp, Artificial Sequence
  MKO10090096_B_Gpr27
  gRNA
gccgaagcccgccgtccagt

SEQ ID NO: 90097 - DNA, 20 bp, Artificial Sequence
  MKO10090097_B_Gpr27
  gRNA
cgcgaatgtcagccacaccg

SEQ ID NO: 90098 - DNA, 20 bp, Artificial Sequence
  MKO10090098_B_Gpr27
  gRNA
tgttcgcgctgctcatcgtg

SEQ ID NO: 90099 - DNA, 20 bp, Artificial Sequence
  MKO10090099_B_Gpr31b
  gRNA
gagttaacttgctgtctctg

SEQ ID NO: 90100 - DNA, 20 bp, Artificial Sequence
  MKO10090100_B_Gpr31b
  gRNA
tgggctgtttgtcagactct

SEQ ID NO: 90101 - DNA, 20 bp, Artificial Sequence
  MKO10090101_B_Gpr31b
  gRNA
ggggcatctccagcctcatc

SEQ ID NO: 90102 - DNA, 20 bp, Artificial Sequence
  MKO10090102_B_Gpr33
  gRNA
accagtgctgtttgttaacg

SEQ ID NO: 90103 - DNA, 20 bp, Artificial Sequence
  MKO10090103_B_Gpr33
  gRNA
acctcgttaacaaacagcac

SEQ ID NO: 90104 - DNA, 20 bp, Artificial Sequence
  MKO10090104_B_Gpr33
  gRNA
agcagcaccgaaccccacac

SEQ ID NO: 90105 - DNA, 20 bp, Artificial Sequence
  MKO10090105_B_Gpr34
  gRNA
tgtttccaaccagtcccacg

SEQ ID NO: 90106 - DNA, 20 bp, Artificial Sequence
  MKO10090106_B_Gpr34
  gRNA
caaaactaacgagatcatgc

SEQ ID NO: 90107 - DNA, 20 bp, Artificial Sequence
  MKO10090107_B_Gpr34
  gRNA
ctactacttcagttgacagc

SEQ ID NO: 90108 - DNA, 20 bp, Artificial Sequence
  MKO10090108_B_Gpr35
  gRNA
ggtgtgttggaagacgtggc

SEQ ID NO: 90109 - DNA, 20 bp, Artificial Sequence
  MKO10090109_B_Gpr35
  gRNA
tctgctatcgcatgcaccag

SEQ ID NO: 90110 - DNA, 20 bp, Artificial Sequence
  MKO10090110_B_Gpr35
  gRNA
ccctgcgtgcgcgtgagctg

SEQ ID NO: 90111 - DNA, 20 bp, Artificial Sequence
  MKO10090111_B_Gpr37l1
  gRNA
aattgattgacatcgctcaa

SEQ ID NO: 90112 - DNA, 20 bp, Artificial Sequence
  MKO10090112_B_Gpr37l1
  gRNA
catgatggcgtaggcgctgt

SEQ ID NO: 90113 - DNA, 20 bp, Artificial Sequence
  MKO10090113_B_Gpr37l1
  gRNA
caccagcgaatagacagatt

SEQ ID NO: 90114 - DNA, 20 bp, Artificial Sequence
  MKO10090114_B_Gpr37
  gRNA
cgcccttcagtactatccgc

SEQ ID NO: 90115 - DNA, 20 bp, Artificial Sequence
  MKO10090115_B_Gpr37
  gRNA
cttcaatctcacgcgccgcg

SEQ ID NO: 90116 - DNA, 20 bp, Artificial Sequence
  MKO10090116_B_Gpr37
  gRNA
gaccaagggggtccacgccg

SEQ ID NO: 90117 - DNA, 20 bp, Artificial Sequence
  MKO10090117_B_Gpr39
  gRNA
gggcacgctggcgtttctct

SEQ ID NO: 90118 - DNA, 20 bp, Artificial Sequence
  MKO10090118_B_Gpr39
  gRNA
gtatgccctgaagtacgttc

SEQ ID NO: 90119 - DNA, 20 bp, Artificial Sequence
  MKO10090119_B_Gpr39
  gRNA
caatacctgcgtaaccctga

SEQ ID NO: 90120 - DNA, 20 bp, Artificial Sequence
  MKO10090120_B_Gpr3
  gRNA
ggtgtcctgcgagaacgcgc

SEQ ID NO: 90121 - DNA, 20 bp, Artificial Sequence
  MKO10090121_B_Gpr3
  gRNA
ccgggaccggaatggaatct

SEQ ID NO: 90122 - DNA, 20 bp, Artificial Sequence
  MKO10090122_B_Gpr3
  gRNA
agaagtcagccgcaaagtgc

SEQ ID NO: 90123 - DNA, 20 bp, Artificial Sequence
  MKO10090123_B_Gpr44
  gRNA
gacaggccgctttgtgcgcc

SEQ ID NO: 90124 - DNA, 20 bp, Artificial Sequence
  MKO10090124_B_Gpr44
  gRNA
ccgctacatcgaccacgtgt

SEQ ID NO: 90125 - DNA, 20 bp, Artificial Sequence
  MKO10090125_B_Gpr44
  gRNA
tacgtggctcgaggcaatta

SEQ ID NO: 90126 - DNA, 20 bp, Artificial Sequence
  MKO10090126_B_Gpr45
  gRNA
aggcgctgtaatagaaccgc

SEQ ID NO: 90127 - DNA, 20 bp, Artificial Sequence
  MKO10090127_B_Gpr45
  gRNA
ggagcacaacatgacgccga

SEQ ID NO: 90128 - DNA, 20 bp, Artificial Sequence
  MKO10090128_B_Gpr45
  gRNA
aggattccttggcaacacgg

SEQ ID NO: 90129 - DNA, 20 bp, Artificial Sequence
  MKO10090129_B_Gpr4
  gRNA
gtctcgcagcgccgtctacc

SEQ ID NO: 90130 - DNA, 20 bp, Artificial Sequence
  MKO10090130_B_Gpr4
  gRNA
ctcatgttgctgtgctaccg

SEQ ID NO: 90131 - DNA, 20 bp, Artificial Sequence
  MKO10090131_B_Gpr4
  gRNA
cgcaggcgtgcaaagcgcag

SEQ ID NO: 90132 - DNA, 20 bp, Artificial Sequence
  MKO10090132_B_Gpr50
  gRNA
agaacattccggacgttcct

SEQ ID NO: 90133 - DNA, 20 bp, Artificial Sequence
  MKO10090133_B_Gpr50
  gRNA
gtcacaggactgagcgtagt

SEQ ID NO: 90134 - DNA, 20 bp, Artificial Sequence
  MKO10090134_B_Gpr50
  gRNA
ggatagggtgccgcatagca

SEQ ID NO: 90135 - DNA, 20 bp, Artificial Sequence
  MKO10090135_B_Gpr52
  gRNA
gcctctatcctacaatcaac

SEQ ID NO: 90136 - DNA, 20 bp, Artificial Sequence
  MKO10090136_B_Gpr52
  gRNA
atttgcccgtctcctaggtt

SEQ ID NO: 90137 - DNA, 20 bp, Artificial Sequence
  MKO10090137_B_Gpr52
  gRNA
actattgcttatcgcaagcc

SEQ ID NO: 90138 - DNA, 20 bp, Artificial Sequence
  MKO10090138_B_Gpr55
  gRNA
ctagccatctccggtcgccc

SEQ ID NO: 90139 - DNA, 20 bp, Artificial Sequence
  MKO10090139_B_Gpr55
  gRNA
tcttcctgggcgaccggaga

SEQ ID NO: 90140 - DNA, 20 bp, Artificial Sequence
  MKO10090140_B_Gpr55
  gRNA
ccggccctccacaatcaagc

SEQ ID NO: 90141 - DNA, 20 bp, Artificial Sequence
  MKO10090141_B_Gpr56
  gRNA
gggagactccacttgcgcta

SEQ ID NO: 90142 - DNA, 20 bp, Artificial Sequence
  MKO10090142_B_Gpr56
  gRNA
gccacccacagccggtctag

SEQ ID NO: 90143 - DNA, 20 bp, Artificial Sequence
  MKO10090143_B_Gpr56
  gRNA
ttactggctgatgaacgctg

SEQ ID NO: 90144 - DNA, 20 bp, Artificial Sequence
  MKO10090144_B_Gpr61
  gRNA
ctactgcagcatgtttcgag

SEQ ID NO: 90145 - DNA, 20 bp, Artificial Sequence
  MKO10090145_B_Gpr61
  gRNA
actgtttgctaagctcgccc

SEQ ID NO: 90146 - DNA, 20 bp, Artificial Sequence
  MKO10090146_B_Gpr61
  gRNA
gttgttgactttcgaatccc

SEQ ID NO: 90147 - DNA, 20 bp, Artificial Sequence
  MKO10090147_B_Gpr62
  gRNA
cttagcgcacttgtgcgtcg

SEQ ID NO: 90148 - DNA, 20 bp, Artificial Sequence
  MKO10090148_B_Gpr62
  gRNA
gtgagccgcgaaggcggagt

SEQ ID NO: 90149 - DNA, 20 bp, Artificial Sequence
  MKO10090149_B_Gpr62
  gRNA
gcctcatagtgcatccgctg

SEQ ID NO: 90150 - DNA, 20 bp, Artificial Sequence
  MKO10090150_B_Gpr63
  gRNA
tcctcaaggcattatgccga

SEQ ID NO: 90151 - DNA, 20 bp, Artificial Sequence
  MKO10090151_B_Gpr63
  gRNA
atccgtcgccttgtgtgacc

SEQ ID NO: 90152 - DNA, 20 bp, Artificial Sequence
  MKO10090152_B_Gpr63
  gRNA
gcggagccgtaatattcacg

SEQ ID NO: 90153 - DNA, 20 bp, Artificial Sequence
  MKO10090153_B_Gpr64
  gRNA
ttgtcgactttaaacaaaac

SEQ ID NO: 90154 - DNA, 20 bp, Artificial Sequence
  MKO10090154_B_Gpr64
  gRNA
acaaattgcagatatttctc

SEQ ID NO: 90155 - DNA, 20 bp, Artificial Sequence
  MKO10090155_B_Gpr64
  gRNA
tcatctctttgcaatgactc

SEQ ID NO: 90156 - DNA, 20 bp, Artificial Sequence
  MKO10090156_B_Gpr65
  gRNA
tacgcataaagatccgatgt

SEQ ID NO: 90157 - DNA, 20 bp, Artificial Sequence
  MKO10090157_B_Gpr65
  gRNA
agcccatgcacgtccgaaac

SEQ ID NO: 90158 - DNA, 20 bp, Artificial Sequence
  MKO10090158_B_Gpr65
  gRNA
caacacagtttagactcgtc

SEQ ID NO: 90159 - DNA, 20 bp, Artificial Sequence
  MKO10090159_B_Gpr68
  gRNA
acgtgcttcagcacgacgac

SEQ ID NO: 90160 - DNA, 20 bp, Artificial Sequence
  MKO10090160_B_Gpr68
  gRNA
ccaccagttccgcaccctga

SEQ ID NO: 90161 - DNA, 20 bp, Artificial Sequence
  MKO10090161_B_Gpr68
  gRNA
tgagaacatttacatcagcg

SEQ ID NO: 90162 - DNA, 20 bp, Artificial Sequence
  MKO10090162_B_Gpr6
  gRNA
cgcgctcaacgagtcccaag

SEQ ID NO: 90163 - DNA, 20 bp, Artificial Sequence
  MKO10090163_B_Gpr6
  gRNA
cttgtacgtgcgcatctgcc

SEQ ID NO: 90164 - DNA, 20 bp, Artificial Sequence
  MKO10090164_B_Gpr6
  gRNA
cacttgggactcgttgagcg

SEQ ID NO: 90165 - DNA, 20 bp, Artificial Sequence
  MKO10090165_B_Gpr75
  gRNA
gcgagtcccaaagtttctgc

SEQ ID NO: 90166 - DNA, 20 bp, Artificial Sequence
  MKO10090166_B_Gpr75
  gRNA
ttgccggaccgctctcctgc

SEQ ID NO: 90167 - DNA, 20 bp, Artificial Sequence
  MKO10090167_B_Gpr75
  gRNA
ctcagccagtcgactccagc

SEQ ID NO: 90168 - DNA, 20 bp, Artificial Sequence
  MKO10090168_B_Gpr81
  gRNA
tggagatatcgcctgtcgcc

SEQ ID NO: 90169 - DNA, 20 bp, Artificial Sequence
  MKO10090169_B_Gpr81
  gRNA
catgacatcgtgccacccgt

SEQ ID NO: 90170 - DNA, 20 bp, Artificial Sequence
  MKO10090170_B_Gpr81
  gRNA
gagggccacccggttcatca

SEQ ID NO: 90171 - DNA, 20 bp, Artificial Sequence
  MKO10090171_B_Gpr82
  gRNA
aaacattctctcgtagcatg

SEQ ID NO: 90172 - DNA, 20 bp, Artificial Sequence
  MKO10090172_B_Gpr82
  gRNA
atgagacccgcaatctgaga

SEQ ID NO: 90173 - DNA, 20 bp, Artificial Sequence
  MKO10090173_B_Gpr82
  gRNA
aggtccttactcttcgcaga

SEQ ID NO: 90174 - DNA, 20 bp, Artificial Sequence
  MKO10090174_B_Gpr83
  gRNA
tggtcttcttcttgcgtcgc

SEQ ID NO: 90175 - DNA, 20 bp, Artificial Sequence
  MKO10090175_B_Gpr83
  gRNA
tggtggccgagtgcatgcgc

SEQ ID NO: 90176 - DNA, 20 bp, Artificial Sequence
  MKO10090176_B_Gpr83
  gRNA
tcatatatattgctgtcatc

SEQ ID NO: 90177 - DNA, 20 bp, Artificial Sequence
  MKO10090177_B_Gpr84
  gRNA
aactctgtggcccgcgtttc

SEQ ID NO: 90178 - DNA, 20 bp, Artificial Sequence
  MKO10090178_B_Gpr84
  gRNA
tggcctgatgcagcccgtat

SEQ ID NO: 90179 - DNA, 20 bp, Artificial Sequence
  MKO10090179_B_Gpr84
  gRNA
tgcagctttgaccgcatgcg

SEQ ID NO: 90180 - DNA, 20 bp, Artificial Sequence
  MKO10090180_B_Gpr85
  gRNA
gcagctgccaattggctagc

SEQ ID NO: 90181 - DNA, 20 bp, Artificial Sequence
  MKO10090181_B_Gpr85
  gRNA
gcggctgttagaaatccccc

SEQ ID NO: 90182 - DNA, 20 bp, Artificial Sequence
  MKO10090182_B_Gpr85
  gRNA
cagaaggcggctattggtct

SEQ ID NO: 90183 - DNA, 20 bp, Artificial Sequence
  MKO10090183_B_Gpr87
  gRNA
gtctgcgtgcaacgtgtgcc

SEQ ID NO: 90184 - DNA, 20 bp, Artificial Sequence
  MKO10090184_B_Gpr87
  gRNA
catgaaactcaaaagtccgc

SEQ ID NO: 90185 - DNA, 20 bp, Artificial Sequence
  MKO10090185_B_Gpr87
  gRNA
ttggcttatgaattgcctgc

SEQ ID NO: 90186 - DNA, 20 bp, Artificial Sequence
  MKO10090186_B_Gpr88
  gRNA
gcgtgcgcgtcagcgtcaag

SEQ ID NO: 90187 - DNA, 20 bp, Artificial Sequence
  MKO10090187_B_Gpr88
  gRNA
agcaacgccttcatcgtgaa

SEQ ID NO: 90188 - DNA, 20 bp, Artificial Sequence
  MKO10090188_B_Gpr88
  gRNA
cccgggtacccagttgcgcc

SEQ ID NO: 90189 - DNA, 20 bp, Artificial Sequence
  MKO10090189_B_Gpr89
  gRNA
cctcatagtccttaaacaac

SEQ ID NO: 90190 - DNA, 20 bp, Artificial Sequence
  MKO10090190_B_Gpr89
  gRNA
tgacctttatgtacttcttc

SEQ ID NO: 90191 - DNA, 20 bp, Artificial Sequence
  MKO10090191_B_Gpr89
  gRNA
cttccagaagaagtacataa

SEQ ID NO: 90192 - DNA, 20 bp, Artificial Sequence
  MKO10090192_B_Gpr97
  gRNA
tcacaggtggttgacgctca

SEQ ID NO: 90193 - DNA, 20 bp, Artificial Sequence
  MKO10090193_B_Gpr97
  gRNA
agacatccgtgctgatgttc

SEQ ID NO: 90194 - DNA, 20 bp, Artificial Sequence
  MKO10090194_B_Gpr97
  gRNA
gaactatgagtcctacctgc

SEQ ID NO: 90195 - DNA, 20 bp, Artificial Sequence
  MKO10090195_B_Gpr98
  gRNA
aatgacaagacgaataactg

SEQ ID NO: 90196 - DNA, 20 bp, Artificial Sequence
  MKO10090196_B_Gpr98
  gRNA
tcaatagccctcatcaatct

SEQ ID NO: 90197 - DNA, 20 bp, Artificial Sequence
  MKO10090197_B_Gpr98
  gRNA
ttattcgtcttgtcattgag

SEQ ID NO: 90198 - DNA, 20 bp, Artificial Sequence
  MKO10090198_B_Gprasp1
  gRNA
gtcaatccggacaactgatc

SEQ ID NO: 90199 - DNA, 20 bp, Artificial Sequence
  MKO10090199_B_Gprasp1
  gRNA
gtccgtgttgaatccacttc

SEQ ID NO: 90200 - DNA, 20 bp, Artificial Sequence
  MKO10090200_B_Gprasp1
  gRNA
accgatatgaagtatgcagc

SEQ ID NO: 90201 - DNA, 20 bp, Artificial Sequence
  MKO10090201_B_Gprasp2
  gRNA
gcaatctgtgacgctgaacc

SEQ ID NO: 90202 - DNA, 20 bp, Artificial Sequence
  MKO10090202_B_Gprasp2
  gRNA
ccgaatcgcgaatgaaatcc

SEQ ID NO: 90203 - DNA, 20 bp, Artificial Sequence
  MKO10090203_B_Gprasp2
  gRNA
ccaaaccagggctcgattcc

SEQ ID NO: 90204 - DNA, 20 bp, Artificial Sequence
  MKO10090204_B_Gprc5a
  gRNA
cgcccttcgtagtcattgta

SEQ ID NO: 90205 - DNA, 20 bp, Artificial Sequence
  MKO10090205_B_Gprc5a
  gRNA
cacttacctgtagctgaaaa

SEQ ID NO: 90206 - DNA, 20 bp, Artificial Sequence
  MKO10090206_B_Gprc5a
  gRNA
ctctgtttcaggtcttgaga

SEQ ID NO: 90207 - DNA, 20 bp, Artificial Sequence
  MKO10090207_B_Gprc5b
  gRNA
agtccctccattgagcacga

SEQ ID NO: 90208 - DNA, 20 bp, Artificial Sequence
  MKO10090208_B_Gprc5b
  gRNA
tggtgtcttcccgtgtgaga

SEQ ID NO: 90209 - DNA, 20 bp, Artificial Sequence
  MKO10090209_B_Gprc5b
  gRNA
aactgctccgccatctcaca

SEQ ID NO: 90210 - DNA, 20 bp, Artificial Sequence
  MKO10090210_B_Gprc5c
  gRNA
tcaccgggcctttgtgcatc

SEQ ID NO: 90211 - DNA, 20 bp, Artificial Sequence
  MKO10090211_B_Gprc5c
  gRNA
cgtgtaccagcccaccgaga

SEQ ID NO: 90212 - DNA, 20 bp, Artificial Sequence
  MKO10090212_B_Gprc5c
  gRNA
catacgacgtcatcctccca

SEQ ID NO: 90213 - DNA, 20 bp, Artificial Sequence
  MKO10090213_B_Gprc5d
  gRNA
ctttcagcccgagacagtga

SEQ ID NO: 90214 - DNA, 20 bp, Artificial Sequence
  MKO10090214_B_Gprc5d
  gRNA
agtcctgaaccttccgcatg

SEQ ID NO: 90215 - DNA, 20 bp, Artificial Sequence
  MKO10090215_B_Gprc5d
  gRNA
gcccctcgttgtcacagaag

SEQ ID NO: 90216 - DNA, 20 bp, Artificial Sequence
  MKO10090216_B_Gprc6a
  gRNA
tttaaatactggttatgacg

SEQ ID NO: 90217 - DNA, 20 bp, Artificial Sequence
  MKO10090217_B_Gprc6a
  gRNA
ctactctgaaacatccatcg

SEQ ID NO: 90218 - DNA, 20 bp, Artificial Sequence
  MKO10090218_B_Gprc6a
  gRNA
tgatgaagacgtcacgctgc

SEQ ID NO: 90219 - DNA, 20 bp, Artificial Sequence
  MKO10090219_B_Gprin1
  gRNA
agccggtgcgcgacgtgagc

SEQ ID NO: 90220 - DNA, 20 bp, Artificial Sequence
  MKO10090220_B_Gprin1
  gRNA
ggcgctccggcgtcccacga

SEQ ID NO: 90221 - DNA, 20 bp, Artificial Sequence
  MKO10090221_B_Gprin1
  gRNA
atcgaggagcacggccgcca

SEQ ID NO: 90222 - DNA, 20 bp, Artificial Sequence
  MKO10090222_B_Gprin2
  gRNA
tcggtgatctgtgtcgccta

SEQ ID NO: 90223 - DNA, 20 bp, Artificial Sequence
  MKO10090223_B_Gprin2
  gRNA
ctggcactcttgcgaagctc

SEQ ID NO: 90224 - DNA, 20 bp, Artificial Sequence
  MKO10090224_B_Gprin2
  gRNA
tgacgatgcctgtcgtaggc

SEQ ID NO: 90225 - DNA, 20 bp, Artificial Sequence
  MKO10090225_B_Gprin3
  gRNA
aggttccttggtgaaatccg

SEQ ID NO: 90226 - DNA, 20 bp, Artificial Sequence
  MKO10090226_B_Gprin3
  gRNA
ccttcagctggttggttcgc

SEQ ID NO: 90227 - DNA, 20 bp, Artificial Sequence
  MKO10090227_B_Gprin3
  gRNA
tgccaacaaagactaccccc

SEQ ID NO: 90228 - DNA, 20 bp, Artificial Sequence
  MKO10090228_B_Gps1
  gRNA
tccaccacatagttgacatc

SEQ ID NO: 90229 - DNA, 20 bp, Artificial Sequence
  MKO10090229_B_Gps1
  gRNA
cagtatgcagccagctacag

SEQ ID NO: 90230 - DNA, 20 bp, Artificial Sequence
  MKO10090230_B_Gps1
  gRNA
caacagagccttcttccgag

SEQ ID NO: 90231 - DNA, 20 bp, Artificial Sequence
  MKO10090231_B_Gps2
  gRNA
caatcgcccaggtactctga

SEQ ID NO: 90232 - DNA, 20 bp, Artificial Sequence
  MKO10090232_B_Gps2
  gRNA
tgcataccagcagagcctga

SEQ ID NO: 90233 - DNA, 20 bp, Artificial Sequence
  MKO10090233_B_Gps2
  gRNA
aacggaggcgaaaggaacag

SEQ ID NO: 90234 - DNA, 20 bp, Artificial Sequence
  MKO10090234_B_Gpsm1
  gRNA
gaaggaactaggcgaccggg

SEQ ID NO: 90235 - DNA, 20 bp, Artificial Sequence
  MKO10090235_B_Gpsm1
  gRNA
agacgattgcctcatcgaat

SEQ ID NO: 90236 - DNA, 20 bp, Artificial Sequence
  MKO10090236_B_Gpsm1
  gRNA
atgtccgcgagacactgcac

SEQ ID NO: 90237 - DNA, 20 bp, Artificial Sequence
  MKO10090237_B_Gpsm2
  gRNA
gctaaagccagcggcaatct

SEQ ID NO: 90238 - DNA, 20 bp, Artificial Sequence
  MKO10090238_B_Gpsm2
  gRNA
accgtgcaagagttaagtca

SEQ ID NO: 90239 - DNA, 20 bp, Artificial Sequence
  MKO10090239_B_Gpsm2
  gRNA
agtgtgttgccagcgacacc

SEQ ID NO: 90240 - DNA, 20 bp, Artificial Sequence
  MKO10090240_B_Gpsm3
  gRNA
gccagcggattgaagcccaa

SEQ ID NO: 90241 - DNA, 20 bp, Artificial Sequence
  MKO10090241_B_Gpsm3
  gRNA
ttggtatcagagtctcccgc

SEQ ID NO: 90242 - DNA, 20 bp, Artificial Sequence
  MKO10090242_B_Gpsm3
  gRNA
cccctgtgaatgccaccgct

SEQ ID NO: 90243 - DNA, 20 bp, Artificial Sequence
  MKO10090243_B_Gpt2
  gRNA
gtcgagctcagagatgaccg

SEQ ID NO: 90244 - DNA, 20 bp, Artificial Sequence
  MKO10090244_B_Gpt2
  gRNA
gctcgtttcttagcgtcttc

SEQ ID NO: 90245 - DNA, 20 bp, Artificial Sequence
  MKO10090245_B_Gpt2
  gRNA
taactgtatccgtgaagatg

SEQ ID NO: 90246 - DNA, 20 bp, Artificial Sequence
  MKO10090246_B_Gpt
  gRNA
gtccggactgctcagaagat

SEQ ID NO: 90247 - DNA, 20 bp, Artificial Sequence
  MKO10090247_B_Gpt
  gRNA
tgcgccacatcctcccgaat

SEQ ID NO: 90248 - DNA, 20 bp, Artificial Sequence
  MKO10090248_B_Gpt
  gRNA
cagcctaacctggcggaaga

SEQ ID NO: 90249 - DNA, 20 bp, Artificial Sequence
  MKO10090249_B_Gpx1
  gRNA
cttctccgcgcgcccgctga

SEQ ID NO: 90250 - DNA, 20 bp, Artificial Sequence
  MKO10090250_B_Gpx1
  gRNA
gcgcgcggagaaggcataca

SEQ ID NO: 90251 - DNA, 20 bp, Artificial Sequence
  MKO10090251_B_Gpx1
  gRNA
ccgacggtgttcccgtgcgc

SEQ ID NO: 90252 - DNA, 20 bp, Artificial Sequence
  MKO10090252_B_Gpx2
  gRNA
gtgggctggtacccaccccc

SEQ ID NO: 90253 - DNA, 20 bp, Artificial Sequence
  MKO10090253_B_Gpx2
  gRNA
atagacttcaatacgttcag

SEQ ID NO: 90254 - DNA, 20 bp, Artificial Sequence
  MKO10090254_B_Gpx2
  gRNA
gacattgcagctcattgagc

SEQ ID NO: 90255 - DNA, 20 bp, Artificial Sequence
  MKO10090255_B_Gpx3
  gRNA
agtggtaccatctacgagta

SEQ ID NO: 90256 - DNA, 20 bp, Artificial Sequence
  MKO10090256_B_Gpx3
  gRNA
aatgtattcctccccatcga

SEQ ID NO: 90257 - DNA, 20 bp, Artificial Sequence
  MKO10090257_B_Gpx3
  gRNA
gccatttggcttggtcattc

SEQ ID NO: 90258 - DNA, 20 bp, Artificial Sequence
  MKO10090258_B_Gpx4
  gRNA
cccctcccagtgccatcaaa

SEQ ID NO: 90259 - DNA, 20 bp, Artificial Sequence
  MKO10090259_B_Gpx4
  gRNA
agtgtgcatcccgcgatgat

SEQ ID NO: 90260 - DNA, 20 bp, Artificial Sequence
  MKO10090260_B_Gpx4
  gRNA
tcccagcatgcccctgccct

SEQ ID NO: 90261 - DNA, 20 bp, Artificial Sequence
  MKO10090261_B_Gpx5
  gRNA
atggcatccctgtcatgcgc

SEQ ID NO: 90262 - DNA, 20 bp, Artificial Sequence
  MKO10090262_B_Gpx5
  gRNA
ggctttccctgcaaccaatt

SEQ ID NO: 90263 - DNA, 20 bp, Artificial Sequence
  MKO10090263_B_Gpx5
  gRNA
gacaatttagagattcttcc

SEQ ID NO: 90264 - DNA, 20 bp, Artificial Sequence
  MKO10090264_B_Gpx6
  gRNA
ttggggacatagccaccgcc

SEQ ID NO: 90265 - DNA, 20 bp, Artificial Sequence
  MKO10090265_B_Gpx6
  gRNA
cccaaaaccgtgacgttgaa

SEQ ID NO: 90266 - DNA, 20 bp, Artificial Sequence
  MKO10090266_B_Gpx6
  gRNA
gctgaagccattcaacgtca

SEQ ID NO: 90267 - DNA, 20 bp, Artificial Sequence
  MKO10090267_B_Gpx7
  gRNA
gctcccaccacctttccgtc

SEQ ID NO: 90268 - DNA, 20 bp, Artificial Sequence
  MKO10090268_B_Gpx7
  gRNA
acaagtcttctcgtttccga

SEQ ID NO: 90269 - DNA, 20 bp, Artificial Sequence
  MKO10090269_B_Gpx7
  gRNA
acttcaaggcggtcaacatc

SEQ ID NO: 90270 - DNA, 20 bp, Artificial Sequence
  MKO10090270_B_Gpx8
  gRNA
aacttcacgacttgtccctc

SEQ ID NO: 90271 - DNA, 20 bp, Artificial Sequence
  MKO10090271_B_Gpx8
  gRNA
agctgttggttctcggcttc

SEQ ID NO: 90272 - DNA, 20 bp, Artificial Sequence
  MKO10090272_B_Gpx8
  gRNA
agggacaagtcgtgaagttc

SEQ ID NO: 90273 - DNA, 20 bp, Artificial Sequence
  MKO10090273_B_Gramd1a
  gRNA
ctcgttgcgttgtttgtatg

SEQ ID NO: 90274 - DNA, 20 bp, Artificial Sequence
  MKO10090274_B_Gramd1a
  gRNA
attactcctgcgccctgcag

SEQ ID NO: 90275 - DNA, 20 bp, Artificial Sequence
  MKO10090275_B_Gramd1a
  gRNA
ggaggaggatctccctctgc

SEQ ID NO: 90276 - DNA, 20 bp, Artificial Sequence
  MKO10090276_B_Gramd1b
  gRNA
acaatgaggcgctccgtgtc

SEQ ID NO: 90277 - DNA, 20 bp, Artificial Sequence
  MKO10090277_B_Gramd1b
  gRNA
ggtggacggggacttgtccg

SEQ ID NO: 90278 - DNA, 20 bp, Artificial Sequence
  MKO10090278_B_Gramd1b
  gRNA
tacttacattgtaccaactc

SEQ ID NO: 90279 - DNA, 20 bp, Artificial Sequence
  MKO10090279_B_Gramd1c
  gRNA
ttcggtgagttcccgtccaa

SEQ ID NO: 90280 - DNA, 20 bp, Artificial Sequence
  MKO10090280_B_Gramd1c
  gRNA
cttattcaagtccagtgact

SEQ ID NO: 90281 - DNA, 20 bp, Artificial Sequence
  MKO10090281_B_Gramd1c
  gRNA
tcatccacgctgcttcttcc

SEQ ID NO: 90282 - DNA, 20 bp, Artificial Sequence
  MKO10090282_B_Gramd2
  gRNA
acgactccttcccaatggac

SEQ ID NO: 90283 - DNA, 20 bp, Artificial Sequence
  MKO10090283_B_Gramd2
  gRNA
tgatggccagtccattggga

SEQ ID NO: 90284 - DNA, 20 bp, Artificial Sequence
  MKO10090284_B_Gramd2
  gRNA
ggctctatatctctcccaac

SEQ ID NO: 90285 - DNA, 20 bp, Artificial Sequence
  MKO10090285_B_Gramd3
  gRNA
gcactttcacaagttattcc

SEQ ID NO: 90286 - DNA, 20 bp, Artificial Sequence
  MKO10090286_B_Gramd3
  gRNA
aaagtcttcatcgtctagtc

SEQ ID NO: 90287 - DNA, 20 bp, Artificial Sequence
  MKO10090287_B_Gramd3
  gRNA
ccgacacaaagagctttcct

SEQ ID NO: 90288 - DNA, 20 bp, Artificial Sequence
  MKO10090288_B_Gramd4
  gRNA
ttggggactcggctagatca

SEQ ID NO: 90289 - DNA, 20 bp, Artificial Sequence
  MKO10090289_B_Gramd4
  gRNA
tggatcgggagcggcagcgc

SEQ ID NO: 90290 - DNA, 20 bp, Artificial Sequence
  MKO10090290_B_Gramd4
  gRNA
ctgccgcagcatctctgagt

SEQ ID NO: 90291 - DNA, 20 bp, Artificial Sequence
  MKO10090291_B_Grap2
  gRNA
tttctgcttgatgtcgagag

SEQ ID NO: 90292 - DNA, 20 bp, Artificial Sequence
  MKO10090292_B_Grap2
  gRNA
catctagatactaagcaacc

SEQ ID NO: 90293 - DNA, 20 bp, Artificial Sequence
  MKO10090293_B_Grap2
  gRNA
gggtcaccggggcaacagcc

SEQ ID NO: 90294 - DNA, 20 bp, Artificial Sequence
  MKO10090294_B_Grap
  gRNA
gaacaaaaccctccgctcct

SEQ ID NO: 90295 - DNA, 20 bp, Artificial Sequence
  MKO10090295_B_Grap
  gRNA
cgtggaagttgtggagcgtg

SEQ ID NO: 90296 - DNA, 20 bp, Artificial Sequence
  MKO10090296_B_Grap
  gRNA
gcccggccccgccaccagtg

SEQ ID NO: 90297 - DNA, 20 bp, Artificial Sequence
  MKO10090297_B_Grasp
  gRNA
gtgactcaccgttgctgttc

SEQ ID NO: 90298 - DNA, 20 bp, Artificial Sequence
  MKO10090298_B_Grasp
  gRNA
ctgcaggaaggttctaactt

SEQ ID NO: 90299 - DNA, 20 bp, Artificial Sequence
  MKO10090299_B_Grasp
  gRNA
tctctacacgctgctcctct

SEQ ID NO: 90300 - DNA, 20 bp, Artificial Sequence
  MKO10090300_B_Grb10
  gRNA
tccttataggcgccttcagg

SEQ ID NO: 90301 - DNA, 20 bp, Artificial Sequence
  MKO10090301_B_Grb10
  gRNA
ttctaaccgacatgacagcc

SEQ ID NO: 90302 - DNA, 20 bp, Artificial Sequence
  MKO10090302_B_Grb10
  gRNA
tagaatctccaccactttgc

SEQ ID NO: 90303 - DNA, 20 bp, Artificial Sequence
  MKO10090303_B_Grb14
  gRNA
atcccctacacagatactgc

SEQ ID NO: 90304 - DNA, 20 bp, Artificial Sequence
  MKO10090304_B_Grb14
  gRNA
cagtgagacagcacttcagt

SEQ ID NO: 90305 - DNA, 20 bp, Artificial Sequence
  MKO10090305_B_Grb14
  gRNA
gctgacagcacagatgtaag

SEQ ID NO: 90306 - DNA, 20 bp, Artificial Sequence
  MKO10090306_B_Grb2
  gRNA
ggtcaaagtcaaagagcgcc

SEQ ID NO: 90307 - DNA, 20 bp, Artificial Sequence
  MKO10090307_B_Grb2
  gRNA
gcagcagccaacctacgtcc

SEQ ID NO: 90308 - DNA, 20 bp, Artificial Sequence
  MKO10090308_B_Grb2
  gRNA
gcagaactcaatgggaaaga

SEQ ID NO: 90309 - DNA, 20 bp, Artificial Sequence
  MKO10090309_B_Grb7
  gRNA
ccataggaaacttcgagaag

SEQ ID NO: 90310 - DNA, 20 bp, Artificial Sequence
  MKO10090310_B_Grb7
  gRNA
gctcttgaatagttcatact

SEQ ID NO: 90311 - DNA, 20 bp, Artificial Sequence
  MKO10090311_B_Grb7
  gRNA
acaactcacacagaggcggc

SEQ ID NO: 90312 - DNA, 20 bp, Artificial Sequence
  MKO10090312_B_Grcc10
  gRNA
ccttggcctgctccgcgctc

SEQ ID NO: 90313 - DNA, 20 bp, Artificial Sequence
  MKO10090313_B_Grcc10
  gRNA
cccgagattgccagcctgtc

SEQ ID NO: 90314 - DNA, 20 bp, Artificial Sequence
  MKO10090314_B_Grcc10
  gRNA
tgtccttaagtttgcccgcc

SEQ ID NO: 90315 - DNA, 20 bp, Artificial Sequence
  MKO10090315_B_Greb1l
  gRNA
acttaaagtactacctagtc

SEQ ID NO: 90316 - DNA, 20 bp, Artificial Sequence
  MKO10090316_B_Greb1l
  gRNA
cccaccagcaggaacccggc

SEQ ID NO: 90317 - DNA, 20 bp, Artificial Sequence
  MKO10090317_B_Greb1l
  gRNA
aaagcaggcttcacggtgac

SEQ ID NO: 90318 - DNA, 20 bp, Artificial Sequence
  MKO10090318_B_Greb1
  gRNA
aggttcttgcccgatgacaa

SEQ ID NO: 90319 - DNA, 20 bp, Artificial Sequence
  MKO10090319_B_Greb1
  gRNA
gcacaaggggcactgaccaa

SEQ ID NO: 90320 - DNA, 20 bp, Artificial Sequence
  MKO10090320_B_Greb1
  gRNA
cggcagccgagcagacaatg

SEQ ID NO: 90321 - DNA, 20 bp, Artificial Sequence
  MKO10090321_B_Grem1
  gRNA
gttgcagccctcctcgtgga

SEQ ID NO: 90322 - DNA, 20 bp, Artificial Sequence
  MKO10090322_B_Grem1
  gRNA
gaatcgcaccgcatacactg

SEQ ID NO: 90323 - DNA, 20 bp, Artificial Sequence
  MKO10090323_B_Grem1
  gRNA
gcaagtatctgaagcgagat

SEQ ID NO: 90324 - DNA, 20 bp, Artificial Sequence
  MKO10090324_B_Grem2
  gRNA
acttgcgctcggtgactacc

SEQ ID NO: 90325 - DNA, 20 bp, Artificial Sequence
  MKO10090325_B_Grem2
  gRNA
cgccatcccctcgccttaca

SEQ ID NO: 90326 - DNA, 20 bp, Artificial Sequence
  MKO10090326_B_Grem2
  gRNA
tcctccttcttcacgtgtcg

SEQ ID NO: 90327 - DNA, 20 bp, Artificial Sequence
  MKO10090327_B_Grhl1
  gRNA
tagtcctctgaattcatgcc

SEQ ID NO: 90328 - DNA, 20 bp, Artificial Sequence
  MKO10090328_B_Grhl1
  gRNA
gaacaactttgagtataccc

SEQ ID NO: 90329 - DNA, 20 bp, Artificial Sequence
  MKO10090329_B_Grhl1
  gRNA
ctggcactcccgtcagcaca

SEQ ID NO: 90330 - DNA, 20 bp, Artificial Sequence
  MKO10090330_B_Grhl2
  gRNA
tggtgacctaccttcccgtc

SEQ ID NO: 90331 - DNA, 20 bp, Artificial Sequence
  MKO10090331_B_Grhl2
  gRNA
ccccctgactgcggccacca

SEQ ID NO: 90332 - DNA, 20 bp, Artificial Sequence
  MKO10090332_B_Grhl2
  gRNA
cgagtatacatatgaccaga

SEQ ID NO: 90333 - DNA, 20 bp, Artificial Sequence
  MKO10090333_B_Grhl3
  gRNA
ctaccatatagtagtcgtag

SEQ ID NO: 90334 - DNA, 20 bp, Artificial Sequence
  MKO10090334_B_Grhl3
  gRNA
ccatgcccagaggattatcc

SEQ ID NO: 90335 - DNA, 20 bp, Artificial Sequence
  MKO10090335_B_Grhl3
  gRNA
attccggccaccagtgctgg

SEQ ID NO: 90336 - DNA, 20 bp, Artificial Sequence
  MKO10090336_B_Grhpr
  gRNA
cacctggcgtgtagcccacc

SEQ ID NO: 90337 - DNA, 20 bp, Artificial Sequence
  MKO10090337_B_Grhpr
  gRNA
ctgccgcctctctgaccgtg

SEQ ID NO: 90338 - DNA, 20 bp, Artificial Sequence
  MKO10090338_B_Grhpr
  gRNA
aagaaacttctggatgccgc

SEQ ID NO: 90339 - DNA, 20 bp, Artificial Sequence
  MKO10090339_B_Gria1
  gRNA
ccactacatcctcgccaacc

SEQ ID NO: 90340 - DNA, 20 bp, Artificial Sequence
  MKO10090340_B_Gria1
  gRNA
cgtacactcctttggagaac

SEQ ID NO: 90341 - DNA, 20 bp, Artificial Sequence
  MKO10090341_B_Gria1
  gRNA
ctctactcaccaggttggcg

SEQ ID NO: 90342 - DNA, 20 bp, Artificial Sequence
  MKO10090342_B_Gria2
  gRNA
gcttgattgagtactaccaa

SEQ ID NO: 90343 - DNA, 20 bp, Artificial Sequence
  MKO10090343_B_Gria2
  gRNA
gtgtaatccttgactgcgaa

SEQ ID NO: 90344 - DNA, 20 bp, Artificial Sequence
  MKO10090344_B_Gria2
  gRNA
ctttatccctttcgcagtca

SEQ ID NO: 90345 - DNA, 20 bp, Artificial Sequence
  MKO10090345_B_Gria3
  gRNA
aaactgcacatcggcatcag

SEQ ID NO: 90346 - DNA, 20 bp, Artificial Sequence
  MKO10090346_B_Gria3
  gRNA
tgattgactgtgaagtcgaa

SEQ ID NO: 90347 - DNA, 20 bp, Artificial Sequence
  MKO10090347_B_Gria3
  gRNA
cagacgcatcattgaagaaa

SEQ ID NO: 90348 - DNA, 20 bp, Artificial Sequence
  MKO10090348_B_Gria4
  gRNA
tttccgagcagcgttcaaat

SEQ ID NO: 90349 - DNA, 20 bp, Artificial Sequence
  MKO10090349_B_Gria4
  gRNA
ctttatccgaaacacagacc

SEQ ID NO: 90350 - DNA, 20 bp, Artificial Sequence
  MKO10090350_B_Gria4
  gRNA
ttcaatacttcaagctataa

SEQ ID NO: 90351 - DNA, 20 bp, Artificial Sequence
  MKO10090351_B_Grid1
  gRNA
agaacgcagccaaggacgac

SEQ ID NO: 90352 - DNA, 20 bp, Artificial Sequence
  MKO10090352_B_Grid1
  gRNA
cgaggccaataatccgttcc

SEQ ID NO: 90353 - DNA, 20 bp, Artificial Sequence
  MKO10090353_B_Grid1
  gRNA
cgccgtcagggctagggttc

SEQ ID NO: 90354 - DNA, 20 bp, Artificial Sequence
  MKO10090354_B_Grid2ip
  gRNA
aggacggttcgagtttataa

SEQ ID NO: 90355 - DNA, 20 bp, Artificial Sequence
  MKO10090355_B_Grid2ip
  gRNA
acagtctcaccactggcgaa

SEQ ID NO: 90356 - DNA, 20 bp, Artificial Sequence
  MKO10090356_B_Grid2ip
  gRNA
agtttcggcttcactctgcg

SEQ ID NO: 90357 - DNA, 20 bp, Artificial Sequence
  MKO10090357_B_Grid2
  gRNA
ctaggtggtggagacgaatc

SEQ ID NO: 90358 - DNA, 20 bp, Artificial Sequence
  MKO10090358_B_Grid2
  gRNA
agccaaatccttcataagtg

SEQ ID NO: 90359 - DNA, 20 bp, Artificial Sequence
  MKO10090359_B_Grid2
  gRNA
tcactggatcatcattaatg

SEQ ID NO: 90360 - DNA, 20 bp, Artificial Sequence
  MKO10090360_B_Grifin
  gRNA
ctcactgagcactcgcactc

SEQ ID NO: 90361 - DNA, 20 bp, Artificial Sequence
  MKO10090361_B_Grifin
  gRNA
cagttcgaagccttctgtgc

SEQ ID NO: 90362 - DNA, 20 bp, Artificial Sequence
  MKO10090362_B_Grifin
  gRNA
ggccagaccccctgcacaga

SEQ ID NO: 90363 - DNA, 20 bp, Artificial Sequence
  MKO10090363_B_Grik1
  gRNA
tgagacgttccagcaaatcg

SEQ ID NO: 90364 - DNA, 20 bp, Artificial Sequence
  MKO10090364_B_Grik1
  gRNA
cggccaccccaagagccagt

SEQ ID NO: 90365 - DNA, 20 bp, Artificial Sequence
  MKO10090365_B_Grik1
  gRNA
cttggggtggccgccctctt

SEQ ID NO: 90366 - DNA, 20 bp, Artificial Sequence
  MKO10090366_B_Grik2
  gRNA
cttcgactgcagccatgaaa

SEQ ID NO: 90367 - DNA, 20 bp, Artificial Sequence
  MKO10090367_B_Grik2
  gRNA
cgatccacaacaagcagagc

SEQ ID NO: 90368 - DNA, 20 bp, Artificial Sequence
  MKO10090368_B_Grik2
  gRNA
aatccttattgtctgacacc

SEQ ID NO: 90369 - DNA, 20 bp, Artificial Sequence
  MKO10090369_B_Grik3
  gRNA
aactcatcatggccccttcg

SEQ ID NO: 90370 - DNA, 20 bp, Artificial Sequence
  MKO10090370_B_Grik3
  gRNA
ccctgacttacgacattcag

SEQ ID NO: 90371 - DNA, 20 bp, Artificial Sequence
  MKO10090371_B_Grik3
  gRNA
tcctctgaatgtcgtaagtc

SEQ ID NO: 90372 - DNA, 20 bp, Artificial Sequence
  MKO10090372_B_Grik4
  gRNA
aaagatgtccacttcgacct

SEQ ID NO: 90373 - DNA, 20 bp, Artificial Sequence
  MKO10090373_B_Grik4
  gRNA
cagcaacaccgacatcagcg

SEQ ID NO: 90374 - DNA, 20 bp, Artificial Sequence
  MKO10090374_B_Grik4
  gRNA
tggccccagaggaatttgtc

SEQ ID NO: 90375 - DNA, 20 bp, Artificial Sequence
  MKO10090375_B_Grik5
  gRNA
ggctgacagatgcgaagcga

SEQ ID NO: 90376 - DNA, 20 bp, Artificial Sequence
  MKO10090376_B_Grik5
  gRNA
agctagcctcatctgcgcca

SEQ ID NO: 90377 - DNA, 20 bp, Artificial Sequence
  MKO10090377_B_Grik5
  gRNA
cgcattggcatcaatgatga

SEQ ID NO: 90378 - DNA, 20 bp, Artificial Sequence
  MKO10090378_B_Grin1os
  gRNA
ttatgcgcgcccggtgtccc

SEQ ID NO: 90379 - DNA, 20 bp, Artificial Sequence
  MKO10090379_B_Grin1os
  gRNA
ggacgactggggcctagcat

SEQ ID NO: 90380 - DNA, 20 bp, Artificial Sequence
  MKO10090380_B_Grin1os
  gRNA
catggaagatgcaacacgca

SEQ ID NO: 90381 - DNA, 20 bp, Artificial Sequence
  MKO10090381_B_Grin1
  gRNA
acattcgggtagtcagcccc

SEQ ID NO: 90382 - DNA, 20 bp, Artificial Sequence
  MKO10090382_B_Grin1
  gRNA
agatgatgcgcgtctacaac

SEQ ID NO: 90383 - DNA, 20 bp, Artificial Sequence
  MKO10090383_B_Grin1
  gRNA
gctggtcagcgatgaccacg

SEQ ID NO: 90384 - DNA, 20 bp, Artificial Sequence
  MKO10090384_B_Grin2a
  gRNA
caagagagcgagcctcgctc

SEQ ID NO: 90385 - DNA, 20 bp, Artificial Sequence
  MKO10090385_B_Grin2a
  gRNA
ggcagcaattcaaccaacga

SEQ ID NO: 90386 - DNA, 20 bp, Artificial Sequence
  MKO10090386_B_Grin2a
  gRNA
tgtggtgatcgtgctgaata

SEQ ID NO: 90387 - DNA, 20 bp, Artificial Sequence
  MKO10090387_B_Grin2b
  gRNA
ggaggcaccgtttgtcattg

SEQ ID NO: 90388 - DNA, 20 bp, Artificial Sequence
  MKO10090388_B_Grin2b
  gRNA
ctaccagatgcatccgaagc

SEQ ID NO: 90389 - DNA, 20 bp, Artificial Sequence
  MKO10090389_B_Grin2b
  gRNA
tcaccagcttcggatgcatc

SEQ ID NO: 90390 - DNA, 20 bp, Artificial Sequence
  MKO10090390_B_Grin2c
  gRNA
ctctcaaccggcatcgcctc

SEQ ID NO: 90391 - DNA, 20 bp, Artificial Sequence
  MKO10090391_B_Grin2c
  gRNA
ccaacggcaagcacggcaag

SEQ ID NO: 90392 - DNA, 20 bp, Artificial Sequence
  MKO10090392_B_Grin2c
  gRNA
tctacggcagggcacagtgt

SEQ ID NO: 90393 - DNA, 20 bp, Artificial Sequence
  MKO10090393_B_Grin2d
  gRNA
gcgtgtcatccaccggctgc

SEQ ID NO: 90394 - DNA, 20 bp, Artificial Sequence
  MKO10090394_B_Grin2d
  gRNA
tctgatgcaagtgccgctga

SEQ ID NO: 90395 - DNA, 20 bp, Artificial Sequence
  MKO10090395_B_Grin2d
  gRNA
aagcatggcaagaagatcga

SEQ ID NO: 90396 - DNA, 20 bp, Artificial Sequence
  MKO10090396_B_Grin3a
  gRNA
gactgcaagcttctgaccgt

SEQ ID NO: 90397 - DNA, 20 bp, Artificial Sequence
  MKO10090397_B_Grin3a
  gRNA
cggtgatattccagtcttcc

SEQ ID NO: 90398 - DNA, 20 bp, Artificial Sequence
  MKO10090398_B_Grin3a
  gRNA
aatgtaccagccacccctga

SEQ ID NO: 90399 - DNA, 20 bp, Artificial Sequence
  MKO10090399_B_Grin3b
  gRNA
aagcgtccggtaggacactt

SEQ ID NO: 90400 - DNA, 20 bp, Artificial Sequence
  MKO10090400_B_Grin3b
  gRNA
gggcacaccactgcccgccg

SEQ ID NO: 90401 - DNA, 20 bp, Artificial Sequence
  MKO10090401_B_Grin3b
  gRNA
tcctcacaatttactgccgc

SEQ ID NO: 90402 - DNA, 20 bp, Artificial Sequence
  MKO10090402_B_Grina
  gRNA
acttccggcgaaagcatccc

SEQ ID NO: 90403 - DNA, 20 bp, Artificial Sequence
  MKO10090403_B_Grina
  gRNA
tccatcctactatgacaacc

SEQ ID NO: 90404 - DNA, 20 bp, Artificial Sequence
  MKO10090404_B_Grina
  gRNA
ctatgacttcacctcgtgca

SEQ ID NO: 90405 - DNA, 20 bp, Artificial Sequence
  MKO10090405_B_Grip1
  gRNA
cagtgttatgttccgaactg

SEQ ID NO: 90406 - DNA, 20 bp, Artificial Sequence
  MKO10090406_B_Grip1
  gRNA
gtgataacctgtgttcgtcc

SEQ ID NO: 90407 - DNA, 20 bp, Artificial Sequence
  MKO10090407_B_Grip1
  gRNA
tagggggagcgcatgatgac

SEQ ID NO: 90408 - DNA, 20 bp, Artificial Sequence
  MKO10090408_B_Grip2
  gRNA
ggtggagttgatcaaacgtg

SEQ ID NO: 90409 - DNA, 20 bp, Artificial Sequence
  MKO10090409_B_Grip2
  gRNA
acgtttgatcaactccacca

SEQ ID NO: 90410 - DNA, 20 bp, Artificial Sequence
  MKO10090410_B_Grip2
  gRNA
gcggcataccagagccccgt

SEQ ID NO: 90411 - DNA, 20 bp, Artificial Sequence
  MKO10090411_B_Gripap1
  gRNA
agttatttgtccggagctcc

SEQ ID NO: 90412 - DNA, 20 bp, Artificial Sequence
  MKO10090412_B_Gripap1
  gRNA
caccagcaccttgctgaact

SEQ ID NO: 90413 - DNA, 20 bp, Artificial Sequence
  MKO10090413_B_Gripap1
  gRNA
tttgcagaacagtacactta

SEQ ID NO: 90414 - DNA, 20 bp, Artificial Sequence
  MKO10090414_B_Grk1
  gRNA
cacgtcacctccgttcatga

SEQ ID NO: 90415 - DNA, 20 bp, Artificial Sequence
  MKO10090415_B_Grk1
  gRNA
tggggtccctgcgtagccct

SEQ ID NO: 90416 - DNA, 20 bp, Artificial Sequence
  MKO10090416_B_Grk1
  gRNA
ctatgcgttcgagaccaaga

SEQ ID NO: 90417 - DNA, 20 bp, Artificial Sequence
  MKO10090417_B_Grk4
  gRNA
catggaactcgagaacttcg

SEQ ID NO: 90418 - DNA, 20 bp, Artificial Sequence
  MKO10090418_B_Grk4
  gRNA
gcatgtgcactgaattaaga

SEQ ID NO: 90419 - DNA, 20 bp, Artificial Sequence
  MKO10090419_B_Grk4
  gRNA
ctaaaaagaagtcttccaat

SEQ ID NO: 90420 - DNA, 20 bp, Artificial Sequence
  MKO10090420_B_Grk5
  gRNA
ctatgtgacaagcaaccaat

SEQ ID NO: 90421 - DNA, 20 bp, Artificial Sequence
  MKO10090421_B_Grk5
  gRNA
gaccaagtacctcactccaa

SEQ ID NO: 90422 - DNA, 20 bp, Artificial Sequence
  MKO10090422_B_Grk5
  gRNA
attactccagatgaaaacct

SEQ ID NO: 90423 - DNA, 20 bp, Artificial Sequence
  MKO10090423_B_Grk6
  gRNA
ggtggtggcgggaatcgcaa

SEQ ID NO: 90424 - DNA, 20 bp, Artificial Sequence
  MKO10090424_B_Grk6
  gRNA
cacagaactcacgaaataac

SEQ ID NO: 90425 - DNA, 20 bp, Artificial Sequence
  MKO10090425_B_Grk6
  gRNA
tcagaaagttctgcattagt

SEQ ID NO: 90426 - DNA, 20 bp, Artificial Sequence
  MKO10090426_B_Grlf1
  gRNA
cccaaaatagttactctccc

SEQ ID NO: 90427 - DNA, 20 bp, Artificial Sequence
  MKO10090427_B_Grlf1
  gRNA
tccacaggactaagcactga

SEQ ID NO: 90428 - DNA, 20 bp, Artificial Sequence
  MKO10090428_B_Grlf1
  gRNA
aagtcaatctgcatgctgta

SEQ ID NO: 90429 - DNA, 20 bp, Artificial Sequence
  MKO10090429_B_Grm1
  gRNA
tcaccagcctccagccgaaa

SEQ ID NO: 90430 - DNA, 20 bp, Artificial Sequence
  MKO10090430_B_Grm1
  gRNA
tcatcaaacgacctgacctc

SEQ ID NO: 90431 - DNA, 20 bp, Artificial Sequence
  MKO10090431_B_Grm1
  gRNA
cgcttccagtgtcgcctacc

SEQ ID NO: 90432 - DNA, 20 bp, Artificial Sequence
  MKO10090432_B_Grm2
  gRNA
tgcccgagcctcgagctcga

SEQ ID NO: 90433 - DNA, 20 bp, Artificial Sequence
  MKO10090433_B_Grm2
  gRNA
gacggacacgcacatcgtag

SEQ ID NO: 90434 - DNA, 20 bp, Artificial Sequence
  MKO10090434_B_Grm2
  gRNA
cgggcacctaccagccgctt

SEQ ID NO: 90435 - DNA, 20 bp, Artificial Sequence
  MKO10090435_B_Grm3
  gRNA
gcgagcgatgcagtttgtct

SEQ ID NO: 90436 - DNA, 20 bp, Artificial Sequence
  MKO10090436_B_Grm3
  gRNA
tgcatctccgttagcttgag

SEQ ID NO: 90437 - DNA, 20 bp, Artificial Sequence
  MKO10090437_B_Grm3
  gRNA
cacgaaaccactcaagctaa

SEQ ID NO: 90438 - DNA, 20 bp, Artificial Sequence
  MKO10090438_B_Grm4
  gRNA
ctacctgatatcatcctcgt

SEQ ID NO: 90439 - DNA, 20 bp, Artificial Sequence
  MKO10090439_B_Grm4
  gRNA
gcctgttgttgtcaagcgtg

SEQ ID NO: 90440 - DNA, 20 bp, Artificial Sequence
  MKO10090440_B_Grm4
  gRNA
cccgtggaatcttcaccgac

SEQ ID NO: 90441 - DNA, 20 bp, Artificial Sequence
  MKO10090441_B_Grm5
  gRNA
cctgtgcaaacccttctagc

SEQ ID NO: 90442 - DNA, 20 bp, Artificial Sequence
  MKO10090442_B_Grm5
  gRNA
tcatcaaaccacttgacatc

SEQ ID NO: 90443 - DNA, 20 bp, Artificial Sequence
  MKO10090443_B_Grm5
  gRNA
aaaagtttccgcccatcaat

SEQ ID NO: 90444 - DNA, 20 bp, Artificial Sequence
  MKO10090444_B_Grm6
  gRNA
ggtggacattgtgcgggcac

SEQ ID NO: 90445 - DNA, 20 bp, Artificial Sequence
  MKO10090445_B_Grm6
  gRNA
ctatgacttcttctcccgag

SEQ ID NO: 90446 - DNA, 20 bp, Artificial Sequence
  MKO10090446_B_Grm6
  gRNA
ccatcaccatcttgcccaaa

SEQ ID NO: 90447 - DNA, 20 bp, Artificial Sequence
  MKO10090447_B_Grm7
  gRNA
ttactttatatcctcatcgt

SEQ ID NO: 90448 - DNA, 20 bp, Artificial Sequence
  MKO10090448_B_Grm7
  gRNA
acattgtaaaggcattgggc

SEQ ID NO: 90449 - DNA, 20 bp, Artificial Sequence
  MKO10090449_B_Grm7
  gRNA
ttccccaagaacgcaaagac

SEQ ID NO: 90450 - DNA, 20 bp, Artificial Sequence
  MKO10090450_B_Grm8
  gRNA
aatagcacctgtctatcagc

SEQ ID NO: 90451 - DNA, 20 bp, Artificial Sequence
  MKO10090451_B_Grm8
  gRNA
ccacacatttcttcgattat

SEQ ID NO: 90452 - DNA, 20 bp, Artificial Sequence
  MKO10090452_B_Grm8
  gRNA
gagttcggcttctaaagtat

SEQ ID NO: 90453 - DNA, 20 bp, Artificial Sequence
  MKO10090453_B_Grn
  gRNA
accatcaaccataatgcagc

SEQ ID NO: 90454 - DNA, 20 bp, Artificial Sequence
  MKO10090454_B_Grn
  gRNA
agatgatggctcgttattct

SEQ ID NO: 90455 - DNA, 20 bp, Artificial Sequence
  MKO10090455_B_Grn
  gRNA
tctatttgcagataacccct

SEQ ID NO: 90456 - DNA, 20 bp, Artificial Sequence
  MKO10090456_B_Grpel1
  gRNA
cgggggcagtcatggcggct

SEQ ID NO: 90457 - DNA, 20 bp, Artificial Sequence
  MKO10090457_B_Grpel1
  gRNA
tgtctgcttaccatataact

SEQ ID NO: 90458 - DNA, 20 bp, Artificial Sequence
  MKO10090458_B_Grpel1
  gRNA
ctgaacgacagtgccaaagc

SEQ ID NO: 90459 - DNA, 20 bp, Artificial Sequence
  MKO10090459_B_Grpel2
  gRNA
actgccacccaaagaactgc

SEQ ID NO: 90460 - DNA, 20 bp, Artificial Sequence
  MKO10090460_B_Grpel2
  gRNA
gctctctgacatagcccccg

SEQ ID NO: 90461 - DNA, 20 bp, Artificial Sequence
  MKO10090461_B_Grpel2
  gRNA
tggggtacagcctggcaccg

SEQ ID NO: 90462 - DNA, 20 bp, Artificial Sequence
  MKO10090462_B_Grpr
  gRNA
ttcctgctcagatcgaatcc

SEQ ID NO: 90463 - DNA, 20 bp, Artificial Sequence
  MKO10090463_B_Grpr
  gRNA
atgataagcccataaactgc

SEQ ID NO: 90464 - DNA, 20 bp, Artificial Sequence
  MKO10090464_B_Grpr
  gRNA
gggcacaactaatgaaggtt

SEQ ID NO: 90465 - DNA, 20 bp, Artificial Sequence
  MKO10090465_B_Grp
  gRNA
ccagctgccccggtgtcgac

SEQ ID NO: 90466 - DNA, 20 bp, Artificial Sequence
  MKO10090466_B_Grp
  gRNA
gttggtagactctctgctcc

SEQ ID NO: 90467 - DNA, 20 bp, Artificial Sequence
  MKO10090467_B_Grp
  gRNA
ccacctgcgcctgtcgacac

SEQ ID NO: 90468 - DNA, 20 bp, Artificial Sequence
  MKO10090468_B_Grrp1
  gRNA
ggcggcgacgttgcgacctg

SEQ ID NO: 90469 - DNA, 20 bp, Artificial Sequence
  MKO10090469_B_Grrp1
  gRNA
aaaggcgtcgtactagcccc

SEQ ID NO: 90470 - DNA, 20 bp, Artificial Sequence
  MKO10090470_B_Grrp1
  gRNA
gcaacgcgcgcgtcatccag

SEQ ID NO: 90471 - DNA, 20 bp, Artificial Sequence
  MKO10090471_B_Grsf1
  gRNA
gggcgatgccttaatagaga

SEQ ID NO: 90472 - DNA, 20 bp, Artificial Sequence
  MKO10090472_B_Grsf1
  gRNA
ccctgtgctttagaagcgct

SEQ ID NO: 90473 - DNA, 20 bp, Artificial Sequence
  MKO10090473_B_Grsf1
  gRNA
tgccttaatgaagagcctgc

SEQ ID NO: 90474 - DNA, 20 bp, Artificial Sequence
  MKO10090474_B_Grtp1
  gRNA
ggtgtccggaaaagcgtgac

SEQ ID NO: 90475 - DNA, 20 bp, Artificial Sequence
  MKO10090475_B_Grtp1
  gRNA
gaccctgtacaacgtgctcc

SEQ ID NO: 90476 - DNA, 20 bp, Artificial Sequence
  MKO10090476_B_Grtp1
  gRNA
atgccaggagcacgttgtac

SEQ ID NO: 90477 - DNA, 20 bp, Artificial Sequence
  MKO10090477_B_Grwd1
  gRNA
acggtggcatcaaccgagtt

SEQ ID NO: 90478 - DNA, 20 bp, Artificial Sequence
  MKO10090478_B_Grwd1
  gRNA
gatcctccacagaccgtgtg

SEQ ID NO: 90479 - DNA, 20 bp, Artificial Sequence
  MKO10090479_B_Grwd1
  gRNA
gcagtgcgaacacctccact

SEQ ID NO: 90480 - DNA, 20 bp, Artificial Sequence
  MKO10090480_B_Grxcr1
  gRNA
attcgaaaccggactttccg

SEQ ID NO: 90481 - DNA, 20 bp, Artificial Sequence
  MKO10090481_B_Grxcr1
  gRNA
cattatcctctgatccaatg

SEQ ID NO: 90482 - DNA, 20 bp, Artificial Sequence
  MKO10090482_B_Grxcr1
  gRNA
acactgacatcttgcttccg

SEQ ID NO: 90483 - DNA, 20 bp, Artificial Sequence
  MKO10090483_B_Grxcr2
  gRNA
cgggctatgggctgcaaatt

SEQ ID NO: 90484 - DNA, 20 bp, Artificial Sequence
  MKO10090484_B_Grxcr2
  gRNA
gacccataaacgccatccat

SEQ ID NO: 90485 - DNA, 20 bp, Artificial Sequence
  MKO10090485_B_Grxcr2
  gRNA
gaaccaatggatggcgttta

SEQ ID NO: 90486 - DNA, 20 bp, Artificial Sequence
  MKO10090486_B_Gsap
  gRNA
tataattacctcattctgtc

SEQ ID NO: 90487 - DNA, 20 bp, Artificial Sequence
  MKO10090487_B_Gsap
  gRNA
gtactaaacatcgaaagaaa

SEQ ID NO: 90488 - DNA, 20 bp, Artificial Sequence
  MKO10090488_B_Gsap
  gRNA
gcatctgtacacctttgaga

SEQ ID NO: 90489 - DNA, 20 bp, Artificial Sequence
  MKO10090489_B_Gsc2
  gRNA
ggtccgcatccgcctgcgag

SEQ ID NO: 90490 - DNA, 20 bp, Artificial Sequence
  MKO10090490_B_Gsc2
  gRNA
aaaagcgtgcttcctcatcg

SEQ ID NO: 90491 - DNA, 20 bp, Artificial Sequence
  MKO10090491_B_Gsc2
  gRNA
tcgatgaggaagcacgcttt

SEQ ID NO: 90492 - DNA, 20 bp, Artificial Sequence
  MKO10090492_B_Gsc
  gRNA
gacgtcctcaaaagcctcgc

SEQ ID NO: 90493 - DNA, 20 bp, Artificial Sequence
  MKO10090493_B_Gsc
  gRNA
cagcgtgcccacgttcatgt

SEQ ID NO: 90494 - DNA, 20 bp, Artificial Sequence
  MKO10090494_B_Gsc
  gRNA
agtcagaaaacgccgagaag

SEQ ID NO: 90495 - DNA, 20 bp, Artificial Sequence
  MKO10090495_B_Gsdma2
  gRNA
cctgtcacaaagcagcacgc

SEQ ID NO: 90496 - DNA, 20 bp, Artificial Sequence
  MKO10090496_B_Gsdma2
  gRNA
agcagaccacccgttcctga

SEQ ID NO: 90497 - DNA, 20 bp, Artificial Sequence
  MKO10090497_B_Gsdma2
  gRNA
agactttaccagatatcatc

SEQ ID NO: 90498 - DNA, 20 bp, Artificial Sequence
  MKO10090498_B_Gsdma3
  gRNA
gggatccttgaacaacaaca

SEQ ID NO: 90499 - DNA, 20 bp, Artificial Sequence
  MKO10090499_B_Gsdma3
  gRNA
tctcctacccagatgatatc

SEQ ID NO: 90500 - DNA, 20 bp, Artificial Sequence
  MKO10090500_B_Gsdma3
  gRNA
actcgttcctgaacgagatg

SEQ ID NO: 90501 - DNA, 20 bp, Artificial Sequence
  MKO10090501_B_Gsdma
  gRNA
gcacctacctccaggaggga

SEQ ID NO: 90502 - DNA, 20 bp, Artificial Sequence
  MKO10090502_B_Gsdma
  gRNA
tgctcgagtagagggagatg

SEQ ID NO: 90503 - DNA, 20 bp, Artificial Sequence
  MKO10090503_B_Gsdma
  gRNA
agcatgcaaaccttccctcc

SEQ ID NO: 90504 - DNA, 20 bp, Artificial Sequence
  MKO10090504_B_Gsdmc2
  gRNA
aatgtcgcagacattgcaag

SEQ ID NO: 90505 - DNA, 20 bp, Artificial Sequence
  MKO10090505_B_Gsdmc2
  gRNA
gcctgtcagcatagtatcct

SEQ ID NO: 90506 - DNA, 20 bp, Artificial Sequence
  MKO10090506_B_Gsdmc2
  gRNA
gtctccccaggttcgaggca

SEQ ID NO: 90507 - DNA, 20 bp, Artificial Sequence
  MKO10090507_B_Gsdmc3
  gRNA
aagcctctgtcaccacatac

SEQ ID NO: 90508 - DNA, 20 bp, Artificial Sequence
  MKO10090508_B_Gsdmc3
  gRNA
cttcatacatgtccaatcaa

SEQ ID NO: 90509 - DNA, 20 bp, Artificial Sequence
  MKO10090509_B_Gsdmc3
  gRNA
aatgtcgcagacattgcaag

SEQ ID NO: 90510 - DNA, 20 bp, Artificial Sequence
  MKO10090510_B_Gsdmc4
  gRNA
tcctgtcagcatagtatcct

SEQ ID NO: 90511 - DNA, 20 bp, Artificial Sequence
  MKO10090511_B_Gsdmc4
  gRNA
tgttgattggacatgtatga

SEQ ID NO: 90512 - DNA, 20 bp, Artificial Sequence
  MKO10090512_B_Gsdmc4
  gRNA
ggaaaggaagaacctgtatg

SEQ ID NO: 90513 - DNA, 20 bp, Artificial Sequence
  MKO10090513_B_Gsdmc
  gRNA
gatcatcaaccagcttgtca

SEQ ID NO: 90514 - DNA, 20 bp, Artificial Sequence
  MKO10090514_B_Gsdmc
  gRNA
gacattcccacaaatctcat

SEQ ID NO: 90515 - DNA, 20 bp, Artificial Sequence
  MKO10090515_B_Gsdmc
  gRNA
ccacatttatgaagacttgc

SEQ ID NO: 90516 - DNA, 20 bp, Artificial Sequence
  MKO10090516_B_Gsdmd
  gRNA
cgagtggcccaactgcttat

SEQ ID NO: 90517 - DNA, 20 bp, Artificial Sequence
  MKO10090517_B_Gsdmd
  gRNA
atttagagccaataagcagt

SEQ ID NO: 90518 - DNA, 20 bp, Artificial Sequence
  MKO10090518_B_Gsdmd
  gRNA
tgcgtgtgactcagaagacc

SEQ ID NO: 90519 - DNA, 20 bp, Artificial Sequence
  MKO10090519_B_Gse1
  gRNA
gcccccactaaaaccgtcaa

SEQ ID NO: 90520 - DNA, 20 bp, Artificial Sequence
  MKO10090520_B_Gse1
  gRNA
gccccatcatcgtccccccc

SEQ ID NO: 90521 - DNA, 20 bp, Artificial Sequence
  MKO10090521_B_Gse1
  gRNA
ctcagcaccccgtacccctt

SEQ ID NO: 90522 - DNA, 20 bp, Artificial Sequence
  MKO10090522_B_Gsg1l
  gRNA
cagcccgtctatgacgctgc

SEQ ID NO: 90523 - DNA, 20 bp, Artificial Sequence
  MKO10090523_B_Gsg1l
  gRNA
atgtcgcagcttcattgacc

SEQ ID NO: 90524 - DNA, 20 bp, Artificial Sequence
  MKO10090524_B_Gsg1l
  gRNA
gaaggaccacccatagtccc

SEQ ID NO: 90525 - DNA, 20 bp, Artificial Sequence
  MKO10090525_B_Gsg1
  gRNA
aactgccaacttaggtccgg

SEQ ID NO: 90526 - DNA, 20 bp, Artificial Sequence
  MKO10090526_B_Gsg1
  gRNA
gtacttgccacgggccccca

SEQ ID NO: 90527 - DNA, 20 bp, Artificial Sequence
  MKO10090527_B_Gsg1
  gRNA
gctatattcacaagtcttcc

SEQ ID NO: 90528 - DNA, 20 bp, Artificial Sequence
  MKO10090528_B_Gsg2
  gRNA
ccggggaagtcggggtcgtc

SEQ ID NO: 90529 - DNA, 20 bp, Artificial Sequence
  MKO10090529_B_Gsg2
  gRNA
gcgactcgttactgtcgctg

SEQ ID NO: 90530 - DNA, 20 bp, Artificial Sequence
  MKO10090530_B_Gsg2
  gRNA
ttcggctcggagggccctcc

SEQ ID NO: 90531 - DNA, 20 bp, Artificial Sequence
  MKO10090531_B_Gsk3a
  gRNA
caagccccagaatttgcttg

SEQ ID NO: 90532 - DNA, 20 bp, Artificial Sequence
  MKO10090532_B_Gsk3a
  gRNA
cctaccttgatgtagatgat

SEQ ID NO: 90533 - DNA, 20 bp, Artificial Sequence
  MKO10090533_B_Gsk3a
  gRNA
tacgcataatctgcagttct

SEQ ID NO: 90534 - DNA, 20 bp, Artificial Sequence
  MKO10090534_B_Gsk3b
  gRNA
gccaggagttgccactactg

SEQ ID NO: 90535 - DNA, 20 bp, Artificial Sequence
  MKO10090535_B_Gsk3b
  gRNA
tatacagacacgaaagtgat

SEQ ID NO: 90536 - DNA, 20 bp, Artificial Sequence
  MKO10090536_B_Gsk3b
  gRNA
cttggctcgactatagtgtc

SEQ ID NO: 90537 - DNA, 20 bp, Artificial Sequence
  MKO10090537_B_Gskip
  gRNA
tccgagctcaatgggtttga

SEQ ID NO: 90538 - DNA, 20 bp, Artificial Sequence
  MKO10090538_B_Gskip
  gRNA
tttgcaaatgatcctccacc

SEQ ID NO: 90539 - DNA, 20 bp, Artificial Sequence
  MKO10090539_B_Gskip
  gRNA
tacatcgtttacaactgcct

SEQ ID NO: 90540 - DNA, 20 bp, Artificial Sequence
  MKO10090540_B_Gsn
  gRNA
gctgtacagcccggccgttc

SEQ ID NO: 90541 - DNA, 20 bp, Artificial Sequence
  MKO10090541_B_Gsn
  gRNA
ctcgttgtcccggatgccct

SEQ ID NO: 90542 - DNA, 20 bp, Artificial Sequence
  MKO10090542_B_Gsn
  gRNA
atccgggacaacgagaggag

SEQ ID NO: 90543 - DNA, 20 bp, Artificial Sequence
  MKO10090543_B_Gspt1
  gRNA
tctcaagaccagtcgtgtga

SEQ ID NO: 90544 - DNA, 20 bp, Artificial Sequence
  MKO10090544_B_Gspt1
  gRNA
aataccgaaacctaagtcag

SEQ ID NO: 90545 - DNA, 20 bp, Artificial Sequence
  MKO10090545_B_Gspt1
  gRNA
ggtggtgccaccgctgactt

SEQ ID NO: 90546 - DNA, 20 bp, Artificial Sequence
  MKO10090546_B_Gspt2
  gRNA
tcaagccgatttagctgtgc

SEQ ID NO: 90547 - DNA, 20 bp, Artificial Sequence
  MKO10090547_B_Gspt2
  gRNA
tggaatcgcccccgcagcca

SEQ ID NO: 90548 - DNA, 20 bp, Artificial Sequence
  MKO10090548_B_Gspt2
  gRNA
ctccccggcgccaccgatgc

SEQ ID NO: 90549 - DNA, 20 bp, Artificial Sequence
  MKO10090549_B_Gsr
  gRNA
tgttggatgtgtacccaaaa

SEQ ID NO: 90550 - DNA, 20 bp, Artificial Sequence
  MKO10090550_B_Gsr
  gRNA
gctgtgagggtaaattcagt

SEQ ID NO: 90551 - DNA, 20 bp, Artificial Sequence
  MKO10090551_B_Gsr
  gRNA
acagtgtcatcaagcagaaa

SEQ ID NO: 90552 - DNA, 20 bp, Artificial Sequence
  MKO10090552_B_Gss
  gRNA
ctcctctagcaccatcaaaa

SEQ ID NO: 90553 - DNA, 20 bp, Artificial Sequence
  MKO10090553_B_Gss
  gRNA
cctgtccaataaccccagca

SEQ ID NO: 90554 - DNA, 20 bp, Artificial Sequence
  MKO10090554_B_Gss
  gRNA
cctgggcaatgccctctttc

SEQ ID NO: 90555 - DNA, 20 bp, Artificial Sequence
  MKO10090555_B_Gsta1
  gRNA
gatgtttgaccaagtgccca

SEQ ID NO: 90556 - DNA, 20 bp, Artificial Sequence
  MKO10090556_B_Gsta1
  gRNA
aggattgacatgtattcaga

SEQ ID NO: 90557 - DNA, 20 bp, Artificial Sequence
  MKO10090557_B_Gsta1
  gRNA
ttagatctgactgaaatgat

SEQ ID NO: 90558 - DNA, 20 bp, Artificial Sequence
  MKO10090558_B_Gsta2
  gRNA
gatgtttgaccaagtgccca

SEQ ID NO: 90559 - DNA, 20 bp, Artificial Sequence
  MKO10090559_B_Gsta2
  gRNA
ccttcatgtccttcccatag

SEQ ID NO: 90560 - DNA, 20 bp, Artificial Sequence
  MKO10090560_B_Gsta2
  gRNA
aggattgacatgtatacaga

SEQ ID NO: 90561 - DNA, 20 bp, Artificial Sequence
  MKO10090561_B_Gsta3
  gRNA
taccacttcgtaaccttgcc

SEQ ID NO: 90562 - DNA, 20 bp, Artificial Sequence
  MKO10090562_B_Gsta3
  gRNA
ttacccccacatgccccctg

SEQ ID NO: 90563 - DNA, 20 bp, Artificial Sequence
  MKO10090563_B_Gsta3
  gRNA
catcccgtcgatctctacca

SEQ ID NO: 90564 - DNA, 20 bp, Artificial Sequence
  MKO10090564_B_Gsta4
  gRNA
cttcccatacaagttgtact

SEQ ID NO: 90565 - DNA, 20 bp, Artificial Sequence
  MKO10090565_B_Gsta4
  gRNA
cctgatgatgatgattgccg

SEQ ID NO: 90566 - DNA, 20 bp, Artificial Sequence
  MKO10090566_B_Gsta4
  gRNA
ccacggcaatcatcatcatc

SEQ ID NO: 90567 - DNA, 20 bp, Artificial Sequence
  MKO10090567_B_Gstcd
  gRNA
agtttccactactaacctct

SEQ ID NO: 90568 - DNA, 20 bp, Artificial Sequence
  MKO10090568_B_Gstcd
  gRNA
tgtccactgaccgagctctg

SEQ ID NO: 90569 - DNA, 20 bp, Artificial Sequence
  MKO10090569_B_Gstcd
  gRNA
taccaaaaagtggtgaatac

SEQ ID NO: 90570 - DNA, 20 bp, Artificial Sequence
  MKO10090570_B_Gstk1
  gRNA
tacacgcatccatatctctc

SEQ ID NO: 90571 - DNA, 20 bp, Artificial Sequence
  MKO10090571_B_Gstk1
  gRNA
aggaaaccaaccacctgcta

SEQ ID NO: 90572 - DNA, 20 bp, Artificial Sequence
  MKO10090572_B_Gstk1
  gRNA
gaatctctttgaagatgtac

SEQ ID NO: 90573 - DNA, 20 bp, Artificial Sequence
  MKO10090573_B_Gstm1
  gRNA
acacccgatccgcatgctcc

SEQ ID NO: 90574 - DNA, 20 bp, Artificial Sequence
  MKO10090574_B_Gstm1
  gRNA
ccgactttgacagaagccag

SEQ ID NO: 90575 - DNA, 20 bp, Artificial Sequence
  MKO10090575_B_Gstm1
  gRNA
tgctgcagatggagagacag

SEQ ID NO: 90576 - DNA, 20 bp, Artificial Sequence
  MKO10090576_B_Gstm2
  gRNA
aagaaatacaccatggggga

SEQ ID NO: 90577 - DNA, 20 bp, Artificial Sequence
  MKO10090577_B_Gstm2
  gRNA
ctgagtgagaagttcaagct

SEQ ID NO: 90578 - DNA, 20 bp, Artificial Sequence
  MKO10090578_B_Gstm2
  gRNA
ctgactatgaccgaagccag

SEQ ID NO: 90579 - DNA, 20 bp, Artificial Sequence
  MKO10090579_B_Gstm3
  gRNA
aagagatatgtcatggggga

SEQ ID NO: 90580 - DNA, 20 bp, Artificial Sequence
  MKO10090580_B_Gstm3
  gRNA
ccaactttgaccgaagccag

SEQ ID NO: 90581 - DNA, 20 bp, Artificial Sequence
  MKO10090581_B_Gstm3
  gRNA
cagctgccctacttaattga

SEQ ID NO: 90582 - DNA, 20 bp, Artificial Sequence
  MKO10090582_B_Gstm4
  gRNA
cagttgccttacttgattga

SEQ ID NO: 90583 - DNA, 20 bp, Artificial Sequence
  MKO10090583_B_Gstm4
  gRNA
ctgagtgagaagttcaaatt

SEQ ID NO: 90584 - DNA, 20 bp, Artificial Sequence
  MKO10090584_B_Gstm4
  gRNA
tgtgacccatcaatcaagta

SEQ ID NO: 90585 - DNA, 20 bp, Artificial Sequence
  MKO10090585_B_Gstm5
  gRNA
gtaccgtttctcctcatagc

SEQ ID NO: 90586 - DNA, 20 bp, Artificial Sequence
  MKO10090586_B_Gstm5
  gRNA
cgtgaaattcaagctagatc

SEQ ID NO: 90587 - DNA, 20 bp, Artificial Sequence
  MKO10090587_B_Gstm5
  gRNA
tgaatttcacgtccagccat

SEQ ID NO: 90588 - DNA, 20 bp, Artificial Sequence
  MKO10090588_B_Gstm6
  gRNA
tgaacttgtcattcagccac

SEQ ID NO: 90589 - DNA, 20 bp, Artificial Sequence
  MKO10090589_B_Gstm6
  gRNA
tcacgccatccgcctgctcc

SEQ ID NO: 90590 - DNA, 20 bp, Artificial Sequence
  MKO10090590_B_Gstm6
  gRNA
aatgtcattaccgtccccca

SEQ ID NO: 90591 - DNA, 20 bp, Artificial Sequence
  MKO10090591_B_Gstm7
  gRNA
aaggatccgtgtggatattc

SEQ ID NO: 90592 - DNA, 20 bp, Artificial Sequence
  MKO10090592_B_Gstm7
  gRNA
gtgtgacccatcgatcaagt

SEQ ID NO: 90593 - DNA, 20 bp, Artificial Sequence
  MKO10090593_B_Gstm7
  gRNA
gatgcagtcaccatcaccca

SEQ ID NO: 90594 - DNA, 20 bp, Artificial Sequence
  MKO10090594_B_Gsto1
  gRNA
acctgaagaataagcccgag

SEQ ID NO: 90595 - DNA, 20 bp, Artificial Sequence
  MKO10090595_B_Gsto1
  gRNA
aggaagactctccgaaccta

SEQ ID NO: 90596 - DNA, 20 bp, Artificial Sequence
  MKO10090596_B_Gsto1
  gRNA
ctatggttgattatcttact

SEQ ID NO: 90597 - DNA, 20 bp, Artificial Sequence
  MKO10090597_B_Gsto2
  gRNA
ttcccgggtagacgtcatcc

SEQ ID NO: 90598 - DNA, 20 bp, Artificial Sequence
  MKO10090598_B_Gsto2
  gRNA
caggcgtgccctgtgcgagt

SEQ ID NO: 90599 - DNA, 20 bp, Artificial Sequence
  MKO10090599_B_Gsto2
  gRNA
ctactcgcacagggcacgcc

SEQ ID NO: 90600 - DNA, 20 bp, Artificial Sequence
  MKO10090600_B_Gstp1
  gRNA
catcattcaccatatccatc

SEQ ID NO: 90601 - DNA, 20 bp, Artificial Sequence
  MKO10090601_B_Gstp1
  gRNA
tcgaactgggaagtagacaa

SEQ ID NO: 90602 - DNA, 20 bp, Artificial Sequence
  MKO10090602_B_Gstp1
  gRNA
gcgaatgctgctggctgacc

SEQ ID NO: 90603 - DNA, 20 bp, Artificial Sequence
  MKO10090603_B_Gstp2
  gRNA
tggacttgggaagtagacaa

SEQ ID NO: 90604 - DNA, 20 bp, Artificial Sequence
  MKO10090604_B_Gstp2
  gRNA
attgtctacttcccaagtcc

SEQ ID NO: 90605 - DNA, 20 bp, Artificial Sequence
  MKO10090605_B_Gstp2
  gRNA
tgggcagctccccaagtttg

SEQ ID NO: 90606 - DNA, 20 bp, Artificial Sequence
  MKO10090606_B_Gstt1
  gRNA
ccggtcttaccttatgccac

SEQ ID NO: 90607 - DNA, 20 bp, Artificial Sequence
  MKO10090607_B_Gstt1
  gRNA
ccacagctgcctccactcgc

SEQ ID NO: 90608 - DNA, 20 bp, Artificial Sequence
  MKO10090608_B_Gstt1
  gRNA
ggctgcatggtaccagcgag

SEQ ID NO: 90609 - DNA, 20 bp, Artificial Sequence
  MKO10090609_B_Gstt2
  gRNA
aatgttaccagtaccccctc

SEQ ID NO: 90610 - DNA, 20 bp, Artificial Sequence
  MKO10090610_B_Gstt2
  gRNA
gcatgcagcttcgaattgct

SEQ ID NO: 90611 - DNA, 20 bp, Artificial Sequence
  MKO10090611_B_Gstt2
  gRNA
ctttgtttaagcagttcacc

SEQ ID NO: 90612 - DNA, 20 bp, Artificial Sequence
  MKO10090612_B_Gstt3
  gRNA
taaggaaggcctggttccgc

SEQ ID NO: 90613 - DNA, 20 bp, Artificial Sequence
  MKO10090613_B_Gstt3
  gRNA
ccctggtgcaacaactccgc

SEQ ID NO: 90614 - DNA, 20 bp, Artificial Sequence
  MKO10090614_B_Gstt3
  gRNA
ctttgagagccgacccaaac

SEQ ID NO: 90615 - DNA, 20 bp, Artificial Sequence
  MKO10090615_B_Gstt4
  gRNA
agatgaacttgccgtccttg

SEQ ID NO: 90616 - DNA, 20 bp, Artificial Sequence
  MKO10090616_B_Gstt4
  gRNA
gttgataatcccaatgatca

SEQ ID NO: 90617 - DNA, 20 bp, Artificial Sequence
  MKO10090617_B_Gstt4
  gRNA
tctgcacatgcgtgcccgcg

SEQ ID NO: 90618 - DNA, 20 bp, Artificial Sequence
  MKO10090618_B_Gstz1
  gRNA
atttccgaagctcctgttca

SEQ ID NO: 90619 - DNA, 20 bp, Artificial Sequence
  MKO10090619_B_Gstz1
  gRNA
gttgcccgccatcctttatg

SEQ ID NO: 90620 - DNA, 20 bp, Artificial Sequence
  MKO10090620_B_Gstz1
  gRNA
ctcctagctctggcgttaaa

SEQ ID NO: 90621 - DNA, 20 bp, Artificial Sequence
  MKO10090621_B_Gsx1
  gRNA
gggcccgtgcagctgcgaag

SEQ ID NO: 90622 - DNA, 20 bp, Artificial Sequence
  MKO10090622_B_Gsx1
  gRNA
cagtactgcgatccgaaggg

SEQ ID NO: 90623 - DNA, 20 bp, Artificial Sequence
  MKO10090623_B_Gsx1
  gRNA
gtcgtcgtcctctgagcatt

SEQ ID NO: 90624 - DNA, 20 bp, Artificial Sequence
  MKO10090624_B_Gsx2
  gRNA
atgtcgcgatctcgattctc

SEQ ID NO: 90625 - DNA, 20 bp, Artificial Sequence
  MKO10090625_B_Gsx2
  gRNA
tgggtgcgattccggcagcg

SEQ ID NO: 90626 - DNA, 20 bp, Artificial Sequence
  MKO10090626_B_Gsx2
  gRNA
gggcaaaactgcgcgtcccc

SEQ ID NO: 90627 - DNA, 20 bp, Artificial Sequence
  MKO10090627_B_Gtdc1
  gRNA
gcagctctaccagctgtcga

SEQ ID NO: 90628 - DNA, 20 bp, Artificial Sequence
  MKO10090628_B_Gtdc1
  gRNA
tcagatttcctgatgtgagc

SEQ ID NO: 90629 - DNA, 20 bp, Artificial Sequence
  MKO10090629_B_Gtdc1
  gRNA
tgaagctgattcctgatcac

SEQ ID NO: 90630 - DNA, 20 bp, Artificial Sequence
  MKO10090630_B_Gtf2a1l
  gRNA
ctcggcagagttctaccagc

SEQ ID NO: 90631 - DNA, 20 bp, Artificial Sequence
  MKO10090631_B_Gtf2a1l
  gRNA
tgtaattgaagatgtcatcg

SEQ ID NO: 90632 - DNA, 20 bp, Artificial Sequence
  MKO10090632_B_Gtf2a1l
  gRNA
cgtgcgggacctgtttgctg

SEQ ID NO: 90633 - DNA, 20 bp, Artificial Sequence
  MKO10090633_B_Gtf2a1
  gRNA
tgttgtagcaacttagaatc

SEQ ID NO: 90634 - DNA, 20 bp, Artificial Sequence
  MKO10090634_B_Gtf2a1
  gRNA
tatgaatgcatcaagtatta

SEQ ID NO: 90635 - DNA, 20 bp, Artificial Sequence
  MKO10090635_B_Gtf2a1
  gRNA
cactcctgcaggcagtgcca

SEQ ID NO: 90636 - DNA, 20 bp, Artificial Sequence
  MKO10090636_B_Gtf2a2
  gRNA
gtagaacttgaagcgcaagc

SEQ ID NO: 90637 - DNA, 20 bp, Artificial Sequence
  MKO10090637_B_Gtf2a2
  gRNA
gcacctgtatgagctcatca

SEQ ID NO: 90638 - DNA, 20 bp, Artificial Sequence
  MKO10090638_B_Gtf2a2
  gRNA
gtgaaaattgtagcctgtga

SEQ ID NO: 90639 - DNA, 20 bp, Artificial Sequence
  MKO10090639_B_Gtf2b
  gRNA
acaaaagacccatctagagt

SEQ ID NO: 90640 - DNA, 20 bp, Artificial Sequence
  MKO10090640_B_Gtf2b
  gRNA
aagcctacctttaaatgtcc

SEQ ID NO: 90641 - DNA, 20 bp, Artificial Sequence
  MKO10090641_B_Gtf2b
  gRNA
acctacaactaggccacatt

SEQ ID NO: 90642 - DNA, 20 bp, Artificial Sequence
  MKO10090642_B_Gtf2e1
  gRNA
aaaagatgctcgcacgcttt

SEQ ID NO: 90643 - DNA, 20 bp, Artificial Sequence
  MKO10090643_B_Gtf2e1
  gRNA
acttccaggtggcatcgatg

SEQ ID NO: 90644 - DNA, 20 bp, Artificial Sequence
  MKO10090644_B_Gtf2e1
  gRNA
gctcaatgccataaaagccc

SEQ ID NO: 90645 - DNA, 20 bp, Artificial Sequence
  MKO10090645_B_Gtf2e2
  gRNA
caatcctaaaattgaagtag

SEQ ID NO: 90646 - DNA, 20 bp, Artificial Sequence
  MKO10090646_B_Gtf2e2
  gRNA
tttaacttgaaagctctgtc

SEQ ID NO: 90647 - DNA, 20 bp, Artificial Sequence
  MKO10090647_B_Gtf2e2
  gRNA
agaatctcttccaacgttag

SEQ ID NO: 90648 - DNA, 20 bp, Artificial Sequence
  MKO10090648_B_Gtf2f1
  gRNA
aaattgtaccagttctgtac

SEQ ID NO: 90649 - DNA, 20 bp, Artificial Sequence
  MKO10090649_B_Gtf2f1
  gRNA
cggggacttacttggggact

SEQ ID NO: 90650 - DNA, 20 bp, Artificial Sequence
  MKO10090650_B_Gtf2f1
  gRNA
acaccgcacactcactgctg

SEQ ID NO: 90651 - DNA, 20 bp, Artificial Sequence
  MKO10090651_B_Gtf2f2
  gRNA
cattcaagataaactgtcat

SEQ ID NO: 90652 - DNA, 20 bp, Artificial Sequence
  MKO10090652_B_Gtf2f2
  gRNA
ctaaatatttgtcccagcaa

SEQ ID NO: 90653 - DNA, 20 bp, Artificial Sequence
  MKO10090653_B_Gtf2f2
  gRNA
aggaatagtggtgcagagag

SEQ ID NO: 90654 - DNA, 20 bp, Artificial Sequence
  MKO10090654_B_Gtf2h1
  gRNA
ccccaaacggatggctgtaa

SEQ ID NO: 90655 - DNA, 20 bp, Artificial Sequence
  MKO10090655_B_Gtf2h1
  gRNA
gaccattacagccatccgtt

SEQ ID NO: 90656 - DNA, 20 bp, Artificial Sequence
  MKO10090656_B_Gtf2h1
  gRNA
accaacatcctgcttgtgac

SEQ ID NO: 90657 - DNA, 20 bp, Artificial Sequence
  MKO10090657_B_Gtf2h2
  gRNA
ggtggatggatcgagaacaa

SEQ ID NO: 90658 - DNA, 20 bp, Artificial Sequence
  MKO10090658_B_Gtf2h2
  gRNA
cctaacataccattccaagt

SEQ ID NO: 90659 - DNA, 20 bp, Artificial Sequence
  MKO10090659_B_Gtf2h2
  gRNA
aacagagtgtttgagcacca

SEQ ID NO: 90660 - DNA, 20 bp, Artificial Sequence
  MKO10090660_B_Gtf2h3
  gRNA
ccagtagtgtctccgtatgc

SEQ ID NO: 90661 - DNA, 20 bp, Artificial Sequence
  MKO10090661_B_Gtf2h3
  gRNA
tgtcaactatgatcaccaga

SEQ ID NO: 90662 - DNA, 20 bp, Artificial Sequence
  MKO10090662_B_Gtf2h3
  gRNA
ccagcatacggagacactac

SEQ ID NO: 90663 - DNA, 20 bp, Artificial Sequence
  MKO10090663_B_Gtf2h4
  gRNA
ttacagggagctcccctctt

SEQ ID NO: 90664 - DNA, 20 bp, Artificial Sequence
  MKO10090664_B_Gtf2h4
  gRNA
tgcccgggacgtcccctcac

SEQ ID NO: 90665 - DNA, 20 bp, Artificial Sequence
  MKO10090665_B_Gtf2h4
  gRNA
gccaccgcagcctgtggtag

SEQ ID NO: 90666 - DNA, 20 bp, Artificial Sequence
  MKO10090666_B_Gtf2h5
  gRNA
aacgtcctccaggagcgagt

SEQ ID NO: 90667 - DNA, 20 bp, Artificial Sequence
  MKO10090667_B_Gtf2h5
  gRNA
gaagcagttcttgctgtact

SEQ ID NO: 90668 - DNA, 20 bp, Artificial Sequence
  MKO10090668_B_Gtf2h5
  gRNA
aatgatgaacttcttcccca

SEQ ID NO: 90669 - DNA, 20 bp, Artificial Sequence
  MKO10090669_B_Gtf2ird1
  gRNA
ctgcttctggatcgttccac

SEQ ID NO: 90670 - DNA, 20 bp, Artificial Sequence
  MKO10090670_B_Gtf2ird1
  gRNA
tcctgagcttaaaccgaatt

SEQ ID NO: 90671 - DNA, 20 bp, Artificial Sequence
  MKO10090671_B_Gtf2ird1
  gRNA
ctcattgtgtaccgccacgc

SEQ ID NO: 90672 - DNA, 20 bp, Artificial Sequence
  MKO10090672_B_Gtf2ird2
  gRNA
tccctacgagcagatgctac

SEQ ID NO: 90673 - DNA, 20 bp, Artificial Sequence
  MKO10090673_B_Gtf2ird2
  gRNA
gcacggctctcctgagcagc

SEQ ID NO: 90674 - DNA, 20 bp, Artificial Sequence
  MKO10090674_B_Gtf2ird2
  gRNA
gtgtttgcaggccaggggga

SEQ ID NO: 90675 - DNA, 20 bp, Artificial Sequence
  MKO10090675_B_Gtf2i
  gRNA
gagaccgacgtgtttgttgt

SEQ ID NO: 90676 - DNA, 20 bp, Artificial Sequence
  MKO10090676_B_Gtf2i
  gRNA
gcaaggcagacatcactact

SEQ ID NO: 90677 - DNA, 20 bp, Artificial Sequence
  MKO10090677_B_Gtf2i
  gRNA
gacaaaagcacgccctcttt

SEQ ID NO: 90678 - DNA, 20 bp, Artificial Sequence
  MKO10090678_B_Gtf3a
  gRNA
agcactttgcctcgcccagc

SEQ ID NO: 90679 - DNA, 20 bp, Artificial Sequence
  MKO10090679_B_Gtf3a
  gRNA
caacctgaagagcggctcgc

SEQ ID NO: 90680 - DNA, 20 bp, Artificial Sequence
  MKO10090680_B_Gtf3a
  gRNA
ccctcatagtcgcaaacaaa

SEQ ID NO: 90681 - DNA, 20 bp, Artificial Sequence
  MKO10090681_B_Gtf3c1
  gRNA
gggctcctgccgatacttta

SEQ ID NO: 90682 - DNA, 20 bp, Artificial Sequence
  MKO10090682_B_Gtf3c1
  gRNA
ttctcctgcagggttgacgc

SEQ ID NO: 90683 - DNA, 20 bp, Artificial Sequence
  MKO10090683_B_Gtf3c1
  gRNA
gcttgcccagagtctcaatc

SEQ ID NO: 90684 - DNA, 20 bp, Artificial Sequence
  MKO10090684_B_Gtf3c2
  gRNA
tggacaacttcaatagtagc

SEQ ID NO: 90685 - DNA, 20 bp, Artificial Sequence
  MKO10090685_B_Gtf3c2
  gRNA
gatggaggtttacgttgctg

SEQ ID NO: 90686 - DNA, 20 bp, Artificial Sequence
  MKO10090686_B_Gtf3c2
  gRNA
tggcttacccaattacatca

SEQ ID NO: 90687 - DNA, 20 bp, Artificial Sequence
  MKO10090687_B_Gtf3c3
  gRNA
ggcagagtcaattcctgatg

SEQ ID NO: 90688 - DNA, 20 bp, Artificial Sequence
  MKO10090688_B_Gtf3c3
  gRNA
cgatgtatttgtgttggaga

SEQ ID NO: 90689 - DNA, 20 bp, Artificial Sequence
  MKO10090689_B_Gtf3c3
  gRNA
tccttaggagaaacatcaga

SEQ ID NO: 90690 - DNA, 20 bp, Artificial Sequence
  MKO10090690_B_Gtf3c4
  gRNA
tgctccatgacagcatcgcc

SEQ ID NO: 90691 - DNA, 20 bp, Artificial Sequence
  MKO10090691_B_Gtf3c4
  gRNA
agcaacctcttaatccagtc

SEQ ID NO: 90692 - DNA, 20 bp, Artificial Sequence
  MKO10090692_B_Gtf3c4
  gRNA
cagatcctgactggattaag

SEQ ID NO: 90693 - DNA, 20 bp, Artificial Sequence
  MKO10090693_B_Gtf3c5
  gRNA
gcgatagaaatagtccacag

SEQ ID NO: 90694 - DNA, 20 bp, Artificial Sequence
  MKO10090694_B_Gtf3c5
  gRNA
tctttgacatccgtcctgtt

SEQ ID NO: 90695 - DNA, 20 bp, Artificial Sequence
  MKO10090695_B_Gtf3c5
  gRNA
ctgtgtgcactgccaagtac

SEQ ID NO: 90696 - DNA, 20 bp, Artificial Sequence
  MKO10090696_B_Gtf3c6
  gRNA
ccaccaggagcagtttgttc

SEQ ID NO: 90697 - DNA, 20 bp, Artificial Sequence
  MKO10090697_B_Gtf3c6
  gRNA
tctgttatagggaattgaca

SEQ ID NO: 90698 - DNA, 20 bp, Artificial Sequence
  MKO10090698_B_Gtf3c6
  gRNA
accttcttcaaatataacac

SEQ ID NO: 90699 - DNA, 20 bp, Artificial Sequence
  MKO10090699_B_Gtl3
  gRNA
cacatacatcacgtgtcctg

SEQ ID NO: 90700 - DNA, 20 bp, Artificial Sequence
  MKO10090700_B_Gtl3
  gRNA
actttggccttgttctgaac

SEQ ID NO: 90701 - DNA, 20 bp, Artificial Sequence
  MKO10090701_B_Gtl3
  gRNA
tcccttcaatctctagcacc

SEQ ID NO: 90702 - DNA, 20 bp, Artificial Sequence
  MKO10090702_B_Gtpbp10
  gRNA
ccggaggaggagcaaacagt

SEQ ID NO: 90703 - DNA, 20 bp, Artificial Sequence
  MKO10090703_B_Gtpbp10
  gRNA
ccgactgtttgctcctcctc

SEQ ID NO: 90704 - DNA, 20 bp, Artificial Sequence
  MKO10090704_B_Gtpbp10
  gRNA
tcagttactgagatacccac

SEQ ID NO: 90705 - DNA, 20 bp, Artificial Sequence
  MKO10090705_B_Gtpbp1
  gRNA
gtggccagccaagtcgatga

SEQ ID NO: 90706 - DNA, 20 bp, Artificial Sequence
  MKO10090706_B_Gtpbp1
  gRNA
tctcccacatctgccgaagt

SEQ ID NO: 90707 - DNA, 20 bp, Artificial Sequence
  MKO10090707_B_Gtpbp1
  gRNA
agcagtatgacagcctactt

SEQ ID NO: 90708 - DNA, 20 bp, Artificial Sequence
  MKO10090708_B_Gtpbp2
  gRNA
gcgcatacttctctgccatc

SEQ ID NO: 90709 - DNA, 20 bp, Artificial Sequence
  MKO10090709_B_Gtpbp2
  gRNA
tcagtaccgctttgagcact

SEQ ID NO: 90710 - DNA, 20 bp, Artificial Sequence
  MKO10090710_B_Gtpbp2
  gRNA
agctggacaacgggcggggc

SEQ ID NO: 90711 - DNA, 20 bp, Artificial Sequence
  MKO10090711_B_Gtpbp3
  gRNA
tgcgtggagtttcacgtaca

SEQ ID NO: 90712 - DNA, 20 bp, Artificial Sequence
  MKO10090712_B_Gtpbp3
  gRNA
gcctcagagcctgtcgacgc

SEQ ID NO: 90713 - DNA, 20 bp, Artificial Sequence
  MKO10090713_B_Gtpbp3
  gRNA
ggcctacattgacttcggag

SEQ ID NO: 90714 - DNA, 20 bp, Artificial Sequence
  MKO10090714_B_Gtpbp4
  gRNA
taatgtttatgaataaccgt

SEQ ID NO: 90715 - DNA, 20 bp, Artificial Sequence
  MKO10090715_B_Gtpbp4
  gRNA
accaaccttgttgatgaagc

SEQ ID NO: 90716 - DNA, 20 bp, Artificial Sequence
  MKO10090716_B_Gtpbp4
  gRNA
gaaatccagcttcatcaaca

SEQ ID NO: 90717 - DNA, 20 bp, Artificial Sequence
  MKO10090717_B_Gtpbp6
  gRNA
ccctcgtgcgtgcgttacaa

SEQ ID NO: 90718 - DNA, 20 bp, Artificial Sequence
  MKO10090718_B_Gtpbp6
  gRNA
tacctgaccccatgatgtac

SEQ ID NO: 90719 - DNA, 20 bp, Artificial Sequence
  MKO10090719_B_Gtpbp6
  gRNA
cacaagggaaccttggtcgg

SEQ ID NO: 90720 - DNA, 20 bp, Artificial Sequence
  MKO10090720_B_Gtpbp8
  gRNA
agaatttgcattgccttatg

SEQ ID NO: 90721 - DNA, 20 bp, Artificial Sequence
  MKO10090721_B_Gtpbp8
  gRNA
cagccttagcacttctgcga

SEQ ID NO: 90722 - DNA, 20 bp, Artificial Sequence
  MKO10090722_B_Gtpbp8
  gRNA
tggcccctgatgtagaagtc

SEQ ID NO: 90723 - DNA, 20 bp, Artificial Sequence
  MKO10090723_B_Gtse1
  gRNA
acctgtagacaccagactcg

SEQ ID NO: 90724 - DNA, 20 bp, Artificial Sequence
  MKO10090724_B_Gtse1
  gRNA
aagatgcattgctgccagtt

SEQ ID NO: 90725 - DNA, 20 bp, Artificial Sequence
  MKO10090725_B_Gtse1
  gRNA
tctgcttcaagcctcgagtc

SEQ ID NO: 90726 - DNA, 20 bp, Artificial Sequence
  MKO10090726_B_Gtsf1l
  gRNA
cctcccacagccgcagaacc

SEQ ID NO: 90727 - DNA, 20 bp, Artificial Sequence
  MKO10090727_B_Gtsf1l
  gRNA
aacgaacctgtagtgtgtcc

SEQ ID NO: 90728 - DNA, 20 bp, Artificial Sequence
  MKO10090728_B_Gtsf1l
  gRNA
gcaggcgttgtatttacagc

SEQ ID NO: 90729 - DNA, 20 bp, Artificial Sequence
  MKO10090729_B_Gtsf1
  gRNA
gccctccttgtgatgaagac

SEQ ID NO: 90730 - DNA, 20 bp, Artificial Sequence
  MKO10090730_B_Gtsf1
  gRNA
agactagcaccccatttgtc

SEQ ID NO: 90731 - DNA, 20 bp, Artificial Sequence
  MKO10090731_B_Gtsf1
  gRNA
gtcttgcagtcaaccaaacc

SEQ ID NO: 90732 - DNA, 20 bp, Artificial Sequence
  MKO10090732_B_Guca1a
  gRNA
ttcaagctctacgacgtcga

SEQ ID NO: 90733 - DNA, 20 bp, Artificial Sequence
  MKO10090733_B_Guca1a
  gRNA
gcacgatgccggtcaagtcc

SEQ ID NO: 90734 - DNA, 20 bp, Artificial Sequence
  MKO10090734_B_Guca1a
  gRNA
aagtggaacagaagttgcgc

SEQ ID NO: 90735 - DNA, 20 bp, Artificial Sequence
  MKO10090735_B_Guca1b
  gRNA
ccttaccccattcttgtcga

SEQ ID NO: 90736 - DNA, 20 bp, Artificial Sequence
  MKO10090736_B_Guca1b
  gRNA
gggccagctgctcacgcccg

SEQ ID NO: 90737 - DNA, 20 bp, Artificial Sequence
  MKO10090737_B_Guca1b
  gRNA
cgtctccattctcgtccacc

SEQ ID NO: 90738 - DNA, 20 bp, Artificial Sequence
  MKO10090738_B_Guca2a
  gRNA
gcacagtgaccccttctacc

SEQ ID NO: 90739 - DNA, 20 bp, Artificial Sequence
  MKO10090739_B_Guca2a
  gRNA
ctgtgcctacgctgcctgta

SEQ ID NO: 90740 - DNA, 20 bp, Artificial Sequence
  MKO10090740_B_Guca2a
  gRNA
gccttggctgtcctggtaga

SEQ ID NO: 90741 - DNA, 20 bp, Artificial Sequence
  MKO10090741_B_Guca2b
  gRNA
agatgtccaatccccagcct

SEQ ID NO: 90742 - DNA, 20 bp, Artificial Sequence
  MKO10090742_B_Guca2b
  gRNA
atccttactcaaggccttga

SEQ ID NO: 90743 - DNA, 20 bp, Artificial Sequence
  MKO10090743_B_Guca2b
  gRNA
agacaccctgtgcactctgc

SEQ ID NO: 90744 - DNA, 20 bp, Artificial Sequence
  MKO10090744_B_Gucd1
  gRNA
tacctgggccagctcgacga

SEQ ID NO: 90745 - DNA, 20 bp, Artificial Sequence
  MKO10090745_B_Gucd1
  gRNA
cgctcaccgaagcaccatcc

SEQ ID NO: 90746 - DNA, 20 bp, Artificial Sequence
  MKO10090746_B_Gucd1
  gRNA
tcatccagcagctatatcac

SEQ ID NO: 90747 - DNA, 20 bp, Artificial Sequence
  MKO10090747_B_Gucy1a2
  gRNA
tgctcagtgtactcccatgc

SEQ ID NO: 90748 - DNA, 20 bp, Artificial Sequence
  MKO10090748_B_Gucy1a2
  gRNA
acaagatttgatcaccagtg

SEQ ID NO: 90749 - DNA, 20 bp, Artificial Sequence
  MKO10090749_B_Gucy1a2
  gRNA
cagtgcactgctaatgtact

SEQ ID NO: 90750 - DNA, 20 bp, Artificial Sequence
  MKO10090750_B_Gucy1a3
  gRNA
agcatcgtgatgacctgcag

SEQ ID NO: 90751 - DNA, 20 bp, Artificial Sequence
  MKO10090751_B_Gucy1a3
  gRNA
gcagaagaagcaattgcagc

SEQ ID NO: 90752 - DNA, 20 bp, Artificial Sequence
  MKO10090752_B_Gucy1a3
  gRNA
ccttgcacttcagagaacct

SEQ ID NO: 90753 - DNA, 20 bp, Artificial Sequence
  MKO10090753_B_Gucy1b2
  gRNA
ttggatgagcttaacggtga

SEQ ID NO: 90754 - DNA, 20 bp, Artificial Sequence
  MKO10090754_B_Gucy1b2
  gRNA
agacacgacgctggacacca

SEQ ID NO: 90755 - DNA, 20 bp, Artificial Sequence
  MKO10090755_B_Gucy1b2
  gRNA
tgtcttacccagagccttgc

SEQ ID NO: 90756 - DNA, 20 bp, Artificial Sequence
  MKO10090756_B_Gucy1b3
  gRNA
tgataccatcttgcgtgtcc

SEQ ID NO: 90757 - DNA, 20 bp, Artificial Sequence
  MKO10090757_B_Gucy1b3
  gRNA
aaggaaggcgcgcgcatccc

SEQ ID NO: 90758 - DNA, 20 bp, Artificial Sequence
  MKO10090758_B_Gucy1b3
  gRNA
tacaaaacagacctcaatgc

SEQ ID NO: 90759 - DNA, 20 bp, Artificial Sequence
  MKO10090759_B_Gucy2c
  gRNA
tgacttatgaatcagaccgt

SEQ ID NO: 90760 - DNA, 20 bp, Artificial Sequence
  MKO10090760_B_Gucy2c
  gRNA
gatagttcaactctgtgtcg

SEQ ID NO: 90761 - DNA, 20 bp, Artificial Sequence
  MKO10090761_B_Gucy2c
  gRNA
tgtacttcttggtcgatttc

SEQ ID NO: 90762 - DNA, 20 bp, Artificial Sequence
  MKO10090762_B_Gucy2d
  gRNA
ggcaaagagcagcgtgtcgt

SEQ ID NO: 90763 - DNA, 20 bp, Artificial Sequence
  MKO10090763_B_Gucy2d
  gRNA
gacagtgagtactgcgtcat

SEQ ID NO: 90764 - DNA, 20 bp, Artificial Sequence
  MKO10090764_B_Gucy2d
  gRNA
caaagaggtcaccagtccga

SEQ ID NO: 90765 - DNA, 20 bp, Artificial Sequence
  MKO10090765_B_Gucy2e
  gRNA
caacgtcaagatgatcttgt

SEQ ID NO: 90766 - DNA, 20 bp, Artificial Sequence
  MKO10090766_B_Gucy2e
  gRNA
agacttgtgcttcccgtact

SEQ ID NO: 90767 - DNA, 20 bp, Artificial Sequence
  MKO10090767_B_Gucy2e
  gRNA
caacaagatcatcttgacgt

SEQ ID NO: 90768 - DNA, 20 bp, Artificial Sequence
  MKO10090768_B_Gucy2f
  gRNA
ctgccgccagggaaatgaat

SEQ ID NO: 90769 - DNA, 20 bp, Artificial Sequence
  MKO10090769_B_Gucy2f
  gRNA
tgttgggtcctttaatcaac

SEQ ID NO: 90770 - DNA, 20 bp, Artificial Sequence
  MKO10090770_B_Gucy2f
  gRNA
tacttaccttactgccaaag

SEQ ID NO: 90771 - DNA, 20 bp, Artificial Sequence
  MKO10090771_B_Gucy2g
  gRNA
gtggacctgggactcgacac

SEQ ID NO: 90772 - DNA, 20 bp, Artificial Sequence
  MKO10090772_B_Gucy2g
  gRNA
aaacaccgactcatagactt

SEQ ID NO: 90773 - DNA, 20 bp, Artificial Sequence
  MKO10090773_B_Gucy2g
  gRNA
catcctccgagctgcagatt

SEQ ID NO: 90774 - DNA, 20 bp, Artificial Sequence
  MKO10090774_B_Guf1
  gRNA
tttcagtatcattgcacatg

SEQ ID NO: 90775 - DNA, 20 bp, Artificial Sequence
  MKO10090775_B_Guf1
  gRNA
gggtattcaagctcaaactg

SEQ ID NO: 90776 - DNA, 20 bp, Artificial Sequence
  MKO10090776_B_Guf1
  gRNA
ataaaatacctgttagctcc

SEQ ID NO: 90777 - DNA, 20 bp, Artificial Sequence
  MKO10090777_B_Guk1
  gRNA
actacaaggaacccacgacc

SEQ ID NO: 90778 - DNA, 20 bp, Artificial Sequence
  MKO10090778_B_Guk1
  gRNA
cagcccaccttgtcccgtac

SEQ ID NO: 90779 - DNA, 20 bp, Artificial Sequence
  MKO10090779_B_Guk1
  gRNA
atgcagcgtgatattgcagc

SEQ ID NO: 90780 - DNA, 20 bp, Artificial Sequence
  MKO10090780_B_Gulo
  gRNA
gcacggtatcctggccaccc

SEQ ID NO: 90781 - DNA, 20 bp, Artificial Sequence
  MKO10090781_B_Gulo
  gRNA
caaaactgggcgaagaccta

SEQ ID NO: 90782 - DNA, 20 bp, Artificial Sequence
  MKO10090782_B_Gulo
  gRNA
accaaccgtcacatcagaca

SEQ ID NO: 90783 - DNA, 20 bp, Artificial Sequence
  MKO10090783_B_Gulp1
  gRNA
aattctcgaacccaaaacaa

SEQ ID NO: 90784 - DNA, 20 bp, Artificial Sequence
  MKO10090784_B_Gulp1
  gRNA
gaattgcaaatatcaattta

SEQ ID NO: 90785 - DNA, 20 bp, Artificial Sequence
  MKO10090785_B_Gulp1
  gRNA
cagatgataaaactgacaag

SEQ ID NO: 90786 - DNA, 20 bp, Artificial Sequence
  MKO10090786_B_Gusb
  gRNA
ggtggcaaagtcgtggccca

SEQ ID NO: 90787 - DNA, 20 bp, Artificial Sequence
  MKO10090787_B_Gusb
  gRNA
agtgatatcatcgatgtaag

SEQ ID NO: 90788 - DNA, 20 bp, Artificial Sequence
  MKO10090788_B_Gusb
  gRNA
tccccggcggaagggtatga

SEQ ID NO: 90789 - DNA, 20 bp, Artificial Sequence
  MKO10090789_B_Gvin1
  gRNA
ctgaaagccttgcagtcaga

SEQ ID NO: 90790 - DNA, 20 bp, Artificial Sequence
  MKO10090790_B_Gvin1
  gRNA
cactgtggtctccttcatgc

SEQ ID NO: 90791 - DNA, 20 bp, Artificial Sequence
  MKO10090791_B_Gvin1
  gRNA
ctacagttcacagtcagtgc

SEQ ID NO: 90792 - DNA, 20 bp, Artificial Sequence
  MKO10090792_B_Gxylt1
  gRNA
agttgactcactgttgtatg

SEQ ID NO: 90793 - DNA, 20 bp, Artificial Sequence
  MKO10090793_B_Gxylt1
  gRNA
tttgcccggcacccgtacta

SEQ ID NO: 90794 - DNA, 20 bp, Artificial Sequence
  MKO10090794_B_Gxylt1
  gRNA
gcaaagatgtggacgtgcag

SEQ ID NO: 90795 - DNA, 20 bp, Artificial Sequence
  MKO10090795_B_Gxylt2
  gRNA
tgcaagctcctcgtttcccc

SEQ ID NO: 90796 - DNA, 20 bp, Artificial Sequence
  MKO10090796_B_Gxylt2
  gRNA
ctaccgggagaaagagcctc

SEQ ID NO: 90797 - DNA, 20 bp, Artificial Sequence
  MKO10090797_B_Gxylt2
  gRNA
tttccgacggaaaatgtgat

SEQ ID NO: 90798 - DNA, 20 bp, Artificial Sequence
  MKO10090798_B_Gyg
  gRNA
acaaacgatgcctatgccaa

SEQ ID NO: 90799 - DNA, 20 bp, Artificial Sequence
  MKO10090799_B_Gyg
  gRNA
tggcctgactgtttcaattc

SEQ ID NO: 90800 - DNA, 20 bp, Artificial Sequence
  MKO10090800_B_Gyg
  gRNA
actccagaattgaaacagtc

SEQ ID NO: 90801 - DNA, 20 bp, Artificial Sequence
  MKO10090801_B_Gykl1
  gRNA
catccaaaatctcccgcgtt

SEQ ID NO: 90802 - DNA, 20 bp, Artificial Sequence
  MKO10090802_B_Gykl1
  gRNA
agactatcgtagtttcccgc

SEQ ID NO: 90803 - DNA, 20 bp, Artificial Sequence
  MKO10090803_B_Gykl1
  gRNA
cggttgattcgtggcttatc

SEQ ID NO: 90804 - DNA, 20 bp, Artificial Sequence
  MKO10090804_B_Gyk
  gRNA
agccgcgaagaaagcagttc

SEQ ID NO: 90805 - DNA, 20 bp, Artificial Sequence
  MKO10090805_B_Gyk
  gRNA
atgggtagaacaagacccga

SEQ ID NO: 90806 - DNA, 20 bp, Artificial Sequence
  MKO10090806_B_Gyk
  gRNA
acagactgcagaatttcctt

SEQ ID NO: 90807 - DNA, 20 bp, Artificial Sequence
  MKO10090807_B_Gyltl1b
  gRNA
ccattgcccgggggcgacct

SEQ ID NO: 90808 - DNA, 20 bp, Artificial Sequence
  MKO10090808_B_Gyltl1b
  gRNA
cgaagtccctgctattctac

SEQ ID NO: 90809 - DNA, 20 bp, Artificial Sequence
  MKO10090809_B_Gyltl1b
  gRNA
tagaagctgaccaccaccgc

SEQ ID NO: 90810 - DNA, 20 bp, Artificial Sequence
  MKO10090810_B_Gypa
  gRNA
aacgcagcagacacttcagt

SEQ ID NO: 90811 - DNA, 20 bp, Artificial Sequence
  MKO10090811_B_Gypa
  gRNA
tcttcaaataaccactcctg

SEQ ID NO: 90812 - DNA, 20 bp, Artificial Sequence
  MKO10090812_B_Gypa
  gRNA
tcttggtaatgttgacttga

SEQ ID NO: 90813 - DNA, 20 bp, Artificial Sequence
  MKO10090813_B_Gypc
  gRNA
ccgcgtggcaatgagcagcc

SEQ ID NO: 90814 - DNA, 20 bp, Artificial Sequence
  MKO10090814_B_Gypc
  gRNA
aggtacccttgtgcctgtac

SEQ ID NO: 90815 - DNA, 20 bp, Artificial Sequence
  MKO10090815_B_Gypc
  gRNA
ttatccacagagcctaaccc

SEQ ID NO: 90816 - DNA, 20 bp, Artificial Sequence
  MKO10090816_B_Gys1
  gRNA
atcccagatcaccgcaatcg

SEQ ID NO: 90817 - DNA, 20 bp, Artificial Sequence
  MKO10090817_B_Gys1
  gRNA
ggtgacaactactatctggt

SEQ ID NO: 90818 - DNA, 20 bp, Artificial Sequence
  MKO10090818_B_Gys1
  gRNA
gccgaacaggacagcgtcat

SEQ ID NO: 90819 - DNA, 20 bp, Artificial Sequence
  MKO10090819_B_Gys2
  gRNA
atgcccgctccatgcagtag

SEQ ID NO: 90820 - DNA, 20 bp, Artificial Sequence
  MKO10090820_B_Gys2
  gRNA
gatataccaccgctactgca

SEQ ID NO: 90821 - DNA, 20 bp, Artificial Sequence
  MKO10090821_B_Gys2
  gRNA
ccaaaacgacagccgatgag

SEQ ID NO: 90822 - DNA, 20 bp, Artificial Sequence
  MKO10090822_B_Gzf1
  gRNA
tcagatcgattactatcttt

SEQ ID NO: 90823 - DNA, 20 bp, Artificial Sequence
  MKO10090823_B_Gzf1
  gRNA
ccgtgtggactttaatatgc

SEQ ID NO: 90824 - DNA, 20 bp, Artificial Sequence
  MKO10090824_B_Gzf1
  gRNA
cacttactgaggtatgcctc

SEQ ID NO: 90825 - DNA, 20 bp, Artificial Sequence
  MKO10090825_B_Gzma
  gRNA
ctatgatgaatatacacgtg

SEQ ID NO: 90826 - DNA, 20 bp, Artificial Sequence
  MKO10090826_B_Gzma
  gRNA
ggaaccagatgccgagtagc

SEQ ID NO: 90827 - DNA, 20 bp, Artificial Sequence
  MKO10090827_B_Gzma
  gRNA
tctcagataaacacctcaat

SEQ ID NO: 90828 - DNA, 20 bp, Artificial Sequence
  MKO10090828_B_Gzmb
  gRNA
cttcacattgacattgcgcc

SEQ ID NO: 90829 - DNA, 20 bp, Artificial Sequence
  MKO10090829_B_Gzmb
  gRNA
gacccagcaagtcatcccta

SEQ ID NO: 90830 - DNA, 20 bp, Artificial Sequence
  MKO10090830_B_Gzmb
  gRNA
cccgcttgtgtgtaaaaaag

SEQ ID NO: 90831 - DNA, 20 bp, Artificial Sequence
  MKO10090831_B_Gzmc
  gRNA
gtctcctacgggcaaactga

SEQ ID NO: 90832 - DNA, 20 bp, Artificial Sequence
  MKO10090832_B_Gzmc
  gRNA
catcaggattatagtctgga

SEQ ID NO: 90833 - DNA, 20 bp, Artificial Sequence
  MKO10090833_B_Gzmc
  gRNA
cgcaatgctcatgtgaagcc

SEQ ID NO: 90834 - DNA, 20 bp, Artificial Sequence
  MKO10090834_B_Gzmd
  gRNA
tgaccagttgaacctctcgc

SEQ ID NO: 90835 - DNA, 20 bp, Artificial Sequence
  MKO10090835_B_Gzmd
  gRNA
aagatagtagcattataatc

SEQ ID NO: 90836 - DNA, 20 bp, Artificial Sequence
  MKO10090836_B_Gzmd
  gRNA
ggcccacaacatcacggcta

SEQ ID NO: 90837 - DNA, 20 bp, Artificial Sequence
  MKO10090837_B_Gzme
  gRNA
gtgtgtgacaacaaagctta

SEQ ID NO: 90838 - DNA, 20 bp, Artificial Sequence
  MKO10090838_B_Gzme
  gRNA
gagatactgtggaggcttct

SEQ ID NO: 90839 - DNA, 20 bp, Artificial Sequence
  MKO10090839_B_Gzme
  gRNA
tctgcccacagggtgactct

SEQ ID NO: 90840 - DNA, 20 bp, Artificial Sequence
  MKO10090840_B_Gzmf
  gRNA
gattgtcctgtttagcccat

SEQ ID NO: 90841 - DNA, 20 bp, Artificial Sequence
  MKO10090841_B_Gzmf
  gRNA
actgatcatccagaaggata

SEQ ID NO: 90842 - DNA, 20 bp, Artificial Sequence
  MKO10090842_B_Gzmf
  gRNA
aagatcttcctgcctacgag

SEQ ID NO: 90843 - DNA, 20 bp, Artificial Sequence
  MKO10090843_B_Gzmg
  gRNA
aaaagtacaggctccttacg

SEQ ID NO: 90844 - DNA, 20 bp, Artificial Sequence
  MKO10090844_B_Gzmg
  gRNA
ccatgctttctattaaaagc

SEQ ID NO: 90845 - DNA, 20 bp, Artificial Sequence
  MKO10090845_B_Gzmg
  gRNA
gaaatactgcggaggcttct

SEQ ID NO: 90846 - DNA, 20 bp, Artificial Sequence
  MKO10090846_B_Gzmk
  gRNA
tccctccaataatttcagta

SEQ ID NO: 90847 - DNA, 20 bp, Artificial Sequence
  MKO10090847_B_Gzmk
  gRNA
caatctcaatgtgcacgtga

SEQ ID NO: 90848 - DNA, 20 bp, Artificial Sequence
  MKO10090848_B_Gzmk
  gRNA
taccgcagcaagcatatttg

SEQ ID NO: 90849 - DNA, 20 bp, Artificial Sequence
  MKO10090849_B_Gzmm
  gRNA
taccttctgccggcttggat

SEQ ID NO: 90850 - DNA, 20 bp, Artificial Sequence
  MKO10090850_B_Gzmm
  gRNA
gggatactcacggctcagac

SEQ ID NO: 90851 - DNA, 20 bp, Artificial Sequence
  MKO10090851_B_Gzmm
  gRNA
cccgcaccttaagcagtgcc

SEQ ID NO: 90852 - DNA, 20 bp, Artificial Sequence
  MKO10090852_B_Gzmn
  gRNA
aagttcctgtggcggcttcc

SEQ ID NO: 90853 - DNA, 20 bp, Artificial Sequence
  MKO10090853_B_Gzmn
  gRNA
gactcctgaagagatcttct

SEQ ID NO: 90854 - DNA, 20 bp, Artificial Sequence
  MKO10090854_B_Gzmn
  gRNA
acgtccatcaataccactga

SEQ ID NO: 90855 - DNA, 20 bp, Artificial Sequence
  MKO10090855_B_H13
  gRNA
gtccatgtatttcttcgtgc

SEQ ID NO: 90856 - DNA, 20 bp, Artificial Sequence
  MKO10090856_B_H13
  gRNA
gcaagaggttgatgtactcc

SEQ ID NO: 90857 - DNA, 20 bp, Artificial Sequence
  MKO10090857_B_H13
  gRNA
catcgccagctgcacactcc

SEQ ID NO: 90858 - DNA, 20 bp, Artificial Sequence
  MKO10090858_B_H1f0
  gRNA
ccaagggcgatgagcccaaa

SEQ ID NO: 90859 - DNA, 20 bp, Artificial Sequence
  MKO10090859_B_H1f0
  gRNA
ggaggtggagttctcggtca

SEQ ID NO: 90860 - DNA, 20 bp, Artificial Sequence
  MKO10090860_B_H1f0
  gRNA
cttgaaagccaccgaccttt

SEQ ID NO: 90861 - DNA, 20 bp, Artificial Sequence
  MKO10090861_B_H1fnt
  gRNA
gggacaatcccggttgacgc

SEQ ID NO: 90862 - DNA, 20 bp, Artificial Sequence
  MKO10090862_B_H1fnt
  gRNA
gcgtcgcaaggcagccaaga

SEQ ID NO: 90863 - DNA, 20 bp, Artificial Sequence
  MKO10090863_B_H1fnt
  gRNA
agtggctgcccagcgtcaac

SEQ ID NO: 90864 - DNA, 20 bp, Artificial Sequence
  MKO10090864_B_H1foo
  gRNA
gtacctgttgaagcaagctc

SEQ ID NO: 90865 - DNA, 20 bp, Artificial Sequence
  MKO10090865_B_H1foo
  gRNA
tcccactgcgtttgaccttc

SEQ ID NO: 90866 - DNA, 20 bp, Artificial Sequence
  MKO10090866_B_H1foo
  gRNA
aggtgagaaatcgaagccct

SEQ ID NO: 90867 - DNA, 20 bp, Artificial Sequence
  MKO10090867_B_H1fx
  gRNA
cggcggacagaacgcccgcc

SEQ ID NO: 90868 - DNA, 20 bp, Artificial Sequence
  MKO10090868_B_H1fx
  gRNA
cttgaaggatccgttggcgc

SEQ ID NO: 90869 - DNA, 20 bp, Artificial Sequence
  MKO10090869_B_H1fx
  gRNA
tatcgttctgcaccagcgcc

SEQ ID NO: 90870 - DNA, 20 bp, Artificial Sequence
  MKO10090870_B_H2-Aa
  gRNA
aatagcaagtcagtcgcaga

SEQ ID NO: 90871 - DNA, 20 bp, Artificial Sequence
  MKO10090871_B_H2-Aa
  gRNA
gagcacgtaccattggtagc

SEQ ID NO: 90872 - DNA, 20 bp, Artificial Sequence
  MKO10090872_B_H2-Aa
  gRNA
ggtggcacctccagacaccc

SEQ ID NO: 90873 - DNA, 20 bp, Artificial Sequence
  MKO10090873_B_H2-Ab1
  gRNA
gaaccagcgcactttgatct

SEQ ID NO: 90874 - DNA, 20 bp, Artificial Sequence
  MKO10090874_B_H2-Ab1
  gRNA
agcaagatgttgagcggcat

SEQ ID NO: 90875 - DNA, 20 bp, Artificial Sequence
  MKO10090875_B_H2-Ab1
  gRNA
gccgctcaacatcttgctcc

SEQ ID NO: 90876 - DNA, 20 bp, Artificial Sequence
  MKO10090876_B_H2-Bl
  gRNA
agagctatacaagttctacc

SEQ ID NO: 90877 - DNA, 20 bp, Artificial Sequence
  MKO10090877_B_H2-Bl
  gRNA
tgtgatcatcattgaagcta

SEQ ID NO: 90878 - DNA, 20 bp, Artificial Sequence
  MKO10090878_B_H2-Bl
  gRNA
acccatcatcccagacctgc

SEQ ID NO: 90879 - DNA, 20 bp, Artificial Sequence
  MKO10090879_B_H2-D1
  gRNA
agtcacagccagacatctgc

SEQ ID NO: 90880 - DNA, 20 bp, Artificial Sequence
  MKO10090880_B_H2-D1
  gRNA
actccacgcactcgccctcc

SEQ ID NO: 90881 - DNA, 20 bp, Artificial Sequence
  MKO10090881_B_H2-D1
  gRNA
acccatcaccccagatctaa

SEQ ID NO: 90882 - DNA, 20 bp, Artificial Sequence
  MKO10090882_B_H2-DMa
  gRNA
ctatgttgggaatcccgtcc

SEQ ID NO: 90883 - DNA, 20 bp, Artificial Sequence
  MKO10090883_B_H2-DMa
  gRNA
acatccatctcagctgtcga

SEQ ID NO: 90884 - DNA, 20 bp, Artificial Sequence
  MKO10090884_B_H2-DMa
  gRNA
gaagagttcgtcctcgtcat

SEQ ID NO: 90885 - DNA, 20 bp, Artificial Sequence
  MKO10090885_B_H2-DMb1
  gRNA
gacctctgagcccatccgag

SEQ ID NO: 90886 - DNA, 20 bp, Artificial Sequence
  MKO10090886_B_H2-DMb1
  gRNA
cacacttactccagtcccct

SEQ ID NO: 90887 - DNA, 20 bp, Artificial Sequence
  MKO10090887_B_H2-DMb1
  gRNA
ctaggctacactcctctctc

SEQ ID NO: 90888 - DNA, 20 bp, Artificial Sequence
  MKO10090888_B_H2-DMb2
  gRNA
cacacttactccagtccccg

SEQ ID NO: 90889 - DNA, 20 bp, Artificial Sequence
  MKO10090889_B_H2-DMb2
  gRNA
acaaatgttaccttctgggt

SEQ ID NO: 90890 - DNA, 20 bp, Artificial Sequence
  MKO10090890_B_H2-DMb2
  gRNA
ctaggctacactcctctccc

SEQ ID NO: 90891 - DNA, 20 bp, Artificial Sequence
  MKO10090891_B_H2-Ea-ps
  gRNA
atagaactccgcctggatga

SEQ ID NO: 90892 - DNA, 20 bp, Artificial Sequence
  MKO10090892_B_H2-Ea-ps
  gRNA
aacgctctttcatgacatcc

SEQ ID NO: 90893 - DNA, 20 bp, Artificial Sequence
  MKO10090893_B_H2-Ea-ps
  gRNA
acgacattctctttagtttc

SEQ ID NO: 90894 - DNA, 20 bp, Artificial Sequence
  MKO10090894_B_H2-Eb1
  gRNA
ccacgtcgctgtcgaagcgc

SEQ ID NO: 90895 - DNA, 20 bp, Artificial Sequence
  MKO10090895_B_H2-Eb1
  gRNA
cggggctgttcatctacttc

SEQ ID NO: 90896 - DNA, 20 bp, Artificial Sequence
  MKO10090896_B_H2-Eb1
  gRNA
agatgaacagccccgctccc

SEQ ID NO: 90897 - DNA, 20 bp, Artificial Sequence
  MKO10090897_B_H2-Eb2
  gRNA
agaagaacagccccactgcg

SEQ ID NO: 90898 - DNA, 20 bp, Artificial Sequence
  MKO10090898_B_H2-Eb2
  gRNA
gactgatccaaaatagagac

SEQ ID NO: 90899 - DNA, 20 bp, Artificial Sequence
  MKO10090899_B_H2-Eb2
  gRNA
aggtctgttcatcctcgcag

SEQ ID NO: 90900 - DNA, 20 bp, Artificial Sequence
  MKO10090900_B_H2-K1
  gRNA
ctacctggagggcacgtgcg

SEQ ID NO: 90901 - DNA, 20 bp, Artificial Sequence
  MKO10090901_B_H2-K1
  gRNA
ctcagggtgactttatcttc

SEQ ID NO: 90902 - DNA, 20 bp, Artificial Sequence
  MKO10090902_B_H2-K1
  gRNA
cagtgactattgcagctcca

SEQ ID NO: 90903 - DNA, 20 bp, Artificial Sequence
  MKO10090903_B_H2-Ke2
  gRNA
caacgtggtctttaagcttc

SEQ ID NO: 90904 - DNA, 20 bp, Artificial Sequence
  MKO10090904_B_H2-Ke2
  gRNA
actgatccaaaagaagctgc

SEQ ID NO: 90905 - DNA, 20 bp, Artificial Sequence
  MKO10090905_B_H2-Ke2
  gRNA
cctctccctgcagcttcttt

SEQ ID NO: 90906 - DNA, 20 bp, Artificial Sequence
  MKO10090906_B_H2-Ke6
  gRNA
atcgcgtgtgatgcccgcac

SEQ ID NO: 90907 - DNA, 20 bp, Artificial Sequence
  MKO10090907_B_H2-Ke6
  gRNA
cgccactggacactaaagcc

SEQ ID NO: 90908 - DNA, 20 bp, Artificial Sequence
  MKO10090908_B_H2-Ke6
  gRNA
gggcaccttcctagtcactc

SEQ ID NO: 90909 - DNA, 20 bp, Artificial Sequence
  MKO10090909_B_H2-L
  gRNA
tcacccgcgcgggtctgagt

SEQ ID NO: 90910 - DNA, 20 bp, Artificial Sequence
  MKO10090910_B_H2-L
  gRNA
ctcgaggccgggccgggaca

SEQ ID NO: 90911 - DNA, 20 bp, Artificial Sequence
  MKO10090911_B_H2-L
  gRNA
gtttcccgctcccaatactc

SEQ ID NO: 90912 - DNA, 20 bp, Artificial Sequence
  MKO10090912_B_H2-M10.1
  gRNA
tgagtcggtagtgaccgccg

SEQ ID NO: 90913 - DNA, 20 bp, Artificial Sequence
  MKO10090913_B_H2-M10.1
  gRNA
cctggttcttggaaccttgg

SEQ ID NO: 90914 - DNA, 20 bp, Artificial Sequence
  MKO10090914_B_H2-M10.1
  gRNA
gtatcttagctcttctccag

SEQ ID NO: 90915 - DNA, 20 bp, Artificial Sequence
  MKO10090915_B_H2-M10.2
  gRNA
gttggagccccggatcatcc

SEQ ID NO: 90916 - DNA, 20 bp, Artificial Sequence
  MKO10090916_B_H2-M10.2
  gRNA
aaaccaccacagttcctacc

SEQ ID NO: 90917 - DNA, 20 bp, Artificial Sequence
  MKO10090917_B_H2-M10.2
  gRNA
agatgggaaaaactacaccc

SEQ ID NO: 90918 - DNA, 20 bp, Artificial Sequence
  MKO10090918_B_H2-M10.3
  gRNA
tgagccggaagtgaccgtga

SEQ ID NO: 90919 - DNA, 20 bp, Artificial Sequence
  MKO10090919_B_H2-M10.3
  gRNA
cccatcatagcaatcctcat

SEQ ID NO: 90920 - DNA, 20 bp, Artificial Sequence
  MKO10090920_B_H2-M10.3
  gRNA
acatggagctgccagatacc

SEQ ID NO: 90921 - DNA, 20 bp, Artificial Sequence
  MKO10090921_B_H2-M10.4
  gRNA
aagacgaactcttatataca

SEQ ID NO: 90922 - DNA, 20 bp, Artificial Sequence
  MKO10090922_B_H2-M10.4
  gRNA
acccacaaagtaacacctga

SEQ ID NO: 90923 - DNA, 20 bp, Artificial Sequence
  MKO10090923_B_H2-M10.4
  gRNA
tcccttcaggtgttactttg

SEQ ID NO: 90924 - DNA, 20 bp, Artificial Sequence
  MKO10090924_B_H2-M10.5
  gRNA
gcttcctcggcggtcacttc

SEQ ID NO: 90925 - DNA, 20 bp, Artificial Sequence
  MKO10090925_B_H2-M10.5
  gRNA
ttaccccatttcagcttgag

SEQ ID NO: 90926 - DNA, 20 bp, Artificial Sequence
  MKO10090926_B_H2-M10.5
  gRNA
ctgagcctctcaagctgaaa

SEQ ID NO: 90927 - DNA, 20 bp, Artificial Sequence
  MKO10090927_B_H2-M10.6
  gRNA
ttcctgacagtgagaagctc

SEQ ID NO: 90928 - DNA, 20 bp, Artificial Sequence
  MKO10090928_B_H2-M10.6
  gRNA
gtgtatctcagctcttctcc

SEQ ID NO: 90929 - DNA, 20 bp, Artificial Sequence
  MKO10090929_B_H2-M10.6
  gRNA
ggatggaaaaaaccacaccc

SEQ ID NO: 90930 - DNA, 20 bp, Artificial Sequence
  MKO10090930_B_H2-M11
  gRNA
cctgaaaatagctcagaacg

SEQ ID NO: 90931 - DNA, 20 bp, Artificial Sequence
  MKO10090931_B_H2-M11
  gRNA
ctatgatgactttgctgata

SEQ ID NO: 90932 - DNA, 20 bp, Artificial Sequence
  MKO10090932_B_H2-M11
  gRNA
tctccgtgacctccatgtcc

SEQ ID NO: 90933 - DNA, 20 bp, Artificial Sequence
  MKO10090933_B_H2-M1
  gRNA
cacagacgctacttcagtca

SEQ ID NO: 90934 - DNA, 20 bp, Artificial Sequence
  MKO10090934_B_H2-M1
  gRNA
atgtatataccctcctgtca

SEQ ID NO: 90935 - DNA, 20 bp, Artificial Sequence
  MKO10090935_B_H2-M1
  gRNA
atagcccctcatgatttacg

SEQ ID NO: 90936 - DNA, 20 bp, Artificial Sequence
  MKO10090936_B_H2-M2
  gRNA
cttcacgcataccgtcagtt

SEQ ID NO: 90937 - DNA, 20 bp, Artificial Sequence
  MKO10090937_B_H2-M2
  gRNA
cacctttaaaggtctgtgcc

SEQ ID NO: 90938 - DNA, 20 bp, Artificial Sequence
  MKO10090938_B_H2-M2
  gRNA
gccctggcacagacctttaa

SEQ ID NO: 90939 - DNA, 20 bp, Artificial Sequence
  MKO10090939_B_H2-M3
  gRNA
ttctccatccaaggtgcacg

SEQ ID NO: 90940 - DNA, 20 bp, Artificial Sequence
  MKO10090940_B_H2-M3
  gRNA
ggatggaacctcgtgcacct

SEQ ID NO: 90941 - DNA, 20 bp, Artificial Sequence
  MKO10090941_B_H2-M3
  gRNA
gcccatcacccgagacccaa

SEQ ID NO: 90942 - DNA, 20 bp, Artificial Sequence
  MKO10090942_B_H2-M5
  gRNA
gaatggagccacgcgctctg

SEQ ID NO: 90943 - DNA, 20 bp, Artificial Sequence
  MKO10090943_B_H2-M5
  gRNA
gtgatgggtcacatgtgcct

SEQ ID NO: 90944 - DNA, 20 bp, Artificial Sequence
  MKO10090944_B_H2-M5
  gRNA
ccaacagtgattcccatgat

SEQ ID NO: 90945 - DNA, 20 bp, Artificial Sequence
  MKO10090945_B_H2-M9
  gRNA
ttgtgtccaccttcttatca

SEQ ID NO: 90946 - DNA, 20 bp, Artificial Sequence
  MKO10090946_B_H2-M9
  gRNA
atagcccctcatgatttaca

SEQ ID NO: 90947 - DNA, 20 bp, Artificial Sequence
  MKO10090947_B_H2-M9
  gRNA
agaaccagagcaataatcat

SEQ ID NO: 90948 - DNA, 20 bp, Artificial Sequence
  MKO10090948_B_H2-Oa
  gRNA
ggatgtgtacgactgcaagg

SEQ ID NO: 90949 - DNA, 20 bp, Artificial Sequence
  MKO10090949_B_H2-Oa
  gRNA
gtccagaagcgtcgtaagat

SEQ ID NO: 90950 - DNA, 20 bp, Artificial Sequence
  MKO10090950_B_H2-Oa
  gRNA
cacgcaggcccagtatccgc

SEQ ID NO: 90951 - DNA, 20 bp, Artificial Sequence
  MKO10090951_B_H2-Ob
  gRNA
ggaggccggggtgctccacg

SEQ ID NO: 90952 - DNA, 20 bp, Artificial Sequence
  MKO10090952_B_H2-Ob
  gRNA
ggaagacaatcagcccaagc

SEQ ID NO: 90953 - DNA, 20 bp, Artificial Sequence
  MKO10090953_B_H2-Ob
  gRNA
agagtgcttacctcattgcc

SEQ ID NO: 90954 - DNA, 20 bp, Artificial Sequence
  MKO10090954_B_H2-Q10
  gRNA
caggctctcacacgatccag

SEQ ID NO: 90955 - DNA, 20 bp, Artificial Sequence
  MKO10090955_B_H2-Q10
  gRNA
cacacattgctgatctgctg

SEQ ID NO: 90956 - DNA, 20 bp, Artificial Sequence
  MKO10090956_B_H2-Q10
  gRNA
cgtaaccgacaataatgaac

SEQ ID NO: 90957 - DNA, 20 bp, Artificial Sequence
  MKO10090957_B_H2-Q1
  gRNA
ggtgacatcaccttgagatc

SEQ ID NO: 90958 - DNA, 20 bp, Artificial Sequence
  MKO10090958_B_H2-Q1
  gRNA
ctttcacacagaccccccaa

SEQ ID NO: 90959 - DNA, 20 bp, Artificial Sequence
  MKO10090959_B_H2-Q1
  gRNA
agtattgggaacggaacaca

SEQ ID NO: 90960 - DNA, 20 bp, Artificial Sequence
  MKO10090960_B_H2-Q2
  gRNA
agtagctcagtgcggtcccc

SEQ ID NO: 90961 - DNA, 20 bp, Artificial Sequence
  MKO10090961_B_H2-Q2
  gRNA
gcctagatacacatgccatg

SEQ ID NO: 90962 - DNA, 20 bp, Artificial Sequence
  MKO10090962_B_H2-Q2
  gRNA
ggtgacatcaccttgagaac

SEQ ID NO: 90963 - DNA, 20 bp, Artificial Sequence
  MKO10090963_B_H2-Q4
  gRNA
cttccacacagatcctccaa

SEQ ID NO: 90964 - DNA, 20 bp, Artificial Sequence
  MKO10090964_B_H2-Q4
  gRNA
acatgtcaccacagatctga

SEQ ID NO: 90965 - DNA, 20 bp, Artificial Sequence
  MKO10090965_B_H2-Q4
  gRNA
aacagctacgttcgccatgt

SEQ ID NO: 90966 - DNA, 20 bp, Artificial Sequence
  MKO10090966_B_H2-Q6
  gRNA
aatagctacgttcgccatgt

SEQ ID NO: 90967 - DNA, 20 bp, Artificial Sequence
  MKO10090967_B_H2-Q6
  gRNA
agtatctctgtgcggtcctc

SEQ ID NO: 90968 - DNA, 20 bp, Artificial Sequence
  MKO10090968_B_H2-Q6
  gRNA
ttctggttgtccttgtagct

SEQ ID NO: 90969 - DNA, 20 bp, Artificial Sequence
  MKO10090969_B_H2-Q7
  gRNA
tggtattgcagagaaagacc

SEQ ID NO: 90970 - DNA, 20 bp, Artificial Sequence
  MKO10090970_B_H2-Q7
  gRNA
ctgagccccttaccctgaga

SEQ ID NO: 90971 - DNA, 20 bp, Artificial Sequence
  MKO10090971_B_H2-Q7
  gRNA
cacccgcgcgggtctcgatc

SEQ ID NO: 90972 - DNA, 20 bp, Artificial Sequence
  MKO10090972_B_H2-Q8
  gRNA
aatagctacgttcgccatgt

SEQ ID NO: 90973 - DNA, 20 bp, Artificial Sequence
  MKO10090973_B_H2-Q8
  gRNA
agtatctctgtgcggtcctc

SEQ ID NO: 90974 - DNA, 20 bp, Artificial Sequence
  MKO10090974_B_H2-Q8
  gRNA
ttctggttgtccttgtagct

SEQ ID NO: 90975 - DNA, 20 bp, Artificial Sequence
  MKO10090975_B_H2-Q9
  gRNA
tggtattgcagagaaagacc

SEQ ID NO: 90976 - DNA, 20 bp, Artificial Sequence
  MKO10090976_B_H2-Q9
  gRNA
ctgagccccttaccctgaga

SEQ ID NO: 90977 - DNA, 20 bp, Artificial Sequence
  MKO10090977_B_H2-Q9
  gRNA
taccccatctcccccatctc

SEQ ID NO: 90978 - DNA, 20 bp, Artificial Sequence
  MKO10090978_B_H2-T10
  gRNA
acctcagatctctcagcacc

SEQ ID NO: 90979 - DNA, 20 bp, Artificial Sequence
  MKO10090979_B_H2-T10
  gRNA
tccaggtgctgagagatctg

SEQ ID NO: 90980 - DNA, 20 bp, Artificial Sequence
  MKO10090980_B_H2-T10
  gRNA
ctgcccagtcccagatgtcc

SEQ ID NO: 90981 - DNA, 20 bp, Artificial Sequence
  MKO10090981_B_H2-T22
  gRNA
atagccgacgattatgaacc

SEQ ID NO: 90982 - DNA, 20 bp, Artificial Sequence
  MKO10090982_B_H2-T22
  gRNA
gttcatcatttgtctctgtg

SEQ ID NO: 90983 - DNA, 20 bp, Artificial Sequence
  MKO10090983_B_H2-T22
  gRNA
gatgaacaaaatgaaaacca

SEQ ID NO: 90984 - DNA, 20 bp, Artificial Sequence
  MKO10090984_B_H2-T23
  gRNA
gtgaaataccgcagcgagtg

SEQ ID NO: 90985 - DNA, 20 bp, Artificial Sequence
  MKO10090985_B_H2-T23
  gRNA
caaaagccaccacagctcca

SEQ ID NO: 90986 - DNA, 20 bp, Artificial Sequence
  MKO10090986_B_H2-T23
  gRNA
gtgacttcatcttcagatct

SEQ ID NO: 90987 - DNA, 20 bp, Artificial Sequence
  MKO10090987_B_H2-T24
  gRNA
cctagcatatactcctgtcg

SEQ ID NO: 90988 - DNA, 20 bp, Artificial Sequence
  MKO10090988_B_H2-T24
  gRNA
cagctcaccacgcccacgac

SEQ ID NO: 90989 - DNA, 20 bp, Artificial Sequence
  MKO10090989_B_H2-T24
  gRNA
ctggaaaatcttcatccgat

SEQ ID NO: 90990 - DNA, 20 bp, Artificial Sequence
  MKO10090990_B_H2-T3
  gRNA
ttccgcgcttatgagcagca

SEQ ID NO: 90991 - DNA, 20 bp, Artificial Sequence
  MKO10090991_B_H2-T3
  gRNA
ctcagaccagtatgcccaac

SEQ ID NO: 90992 - DNA, 20 bp, Artificial Sequence
  MKO10090992_B_H2-T3
  gRNA
accactgttcgtgctctcct

SEQ ID NO: 90993 - DNA, 20 bp, Artificial Sequence
  MKO10090993_B_H2-T9
  gRNA
agtgctgtttcccactgtac

SEQ ID NO: 90994 - DNA, 20 bp, Artificial Sequence
  MKO10090994_B_H2-T9
  gRNA
atagccgacgattatgaacc

SEQ ID NO: 90995 - DNA, 20 bp, Artificial Sequence
  MKO10090995_B_H2-T9
  gRNA
ccttaccccatctcaggatg

SEQ ID NO: 90996 - DNA, 20 bp, Artificial Sequence
  MKO10090996_B_H2afb1
  gRNA
tccagagcatgtgtgccgtg

SEQ ID NO: 90997 - DNA, 20 bp, Artificial Sequence
  MKO10090997_B_H2afb1
  gRNA
ttctgctcctgtattcctcg

SEQ ID NO: 90998 - DNA, 20 bp, Artificial Sequence
  MKO10090998_B_H2afb1
  gRNA
aaacgatccacacggctaac

SEQ ID NO: 90999 - DNA, 20 bp, Artificial Sequence
  MKO10090999_B_H2afb2-ps
  gRNA
cactcctcaaccgctggact

SEQ ID NO: 91000 - DNA, 20 bp, Artificial Sequence
  MKO10091000_B_H2afb2-ps
  gRNA
aactgtcttcaaaggtcttc

SEQ ID NO: 91001 - DNA, 20 bp, Artificial Sequence
  MKO10091001_B_H2afb2-ps
  gRNA
ggaactccaggatggctacc

SEQ ID NO: 91002 - DNA, 20 bp, Artificial Sequence
  MKO10091002_B_H2afb3-ps
  gRNA
gctaatctttgctgtgagcc

SEQ ID NO: 91003 - DNA, 20 bp, Artificial Sequence
  MKO10091003_B_H2afb3-ps
  gRNA
agcaaagattagctcagctc

SEQ ID NO: 91004 - DNA, 20 bp, Artificial Sequence
  MKO10091004_B_H2afb3-ps
  gRNA
cggcaagctccagcaacctg

SEQ ID NO: 91005 - DNA, 20 bp, Artificial Sequence
  MKO10091005_B_H2afj
  gRNA
accgccctgcttgcctcgcc

SEQ ID NO: 91006 - DNA, 20 bp, Artificial Sequence
  MKO10091006_B_H2afj
  gRNA
caagtcgcgctcgtcgcgcg

SEQ ID NO: 91007 - DNA, 20 bp, Artificial Sequence
  MKO10091007_B_H2afj
  gRNA
cgcgggagcgcccgtgtacc

SEQ ID NO: 91008 - DNA, 20 bp, Artificial Sequence
  MKO10091008_B_H2afv
  gRNA
cacttacagcttgcaatccg

SEQ ID NO: 91009 - DNA, 20 bp, Artificial Sequence
  MKO10091009_B_H2afv
  gRNA
gtgtctcgttcccagcgagc

SEQ ID NO: 91010 - DNA, 20 bp, Artificial Sequence
  MKO10091010_B_H2afv
  gRNA
aagactcgcaccacaagcca

SEQ ID NO: 91011 - DNA, 20 bp, Artificial Sequence
  MKO10091011_B_H2afx
  gRNA
tcgtacactatgtccggacg

SEQ ID NO: 91012 - DNA, 20 bp, Artificial Sequence
  MKO10091012_B_H2afx
  gRNA
ggcgccggcggtcggcaaga

SEQ ID NO: 91013 - DNA, 20 bp, Artificial Sequence
  MKO10091013_B_H2afx
  gRNA
cttggcgcgggccttgccgc

SEQ ID NO: 91014 - DNA, 20 bp, Artificial Sequence
  MKO10091014_B_H2afy2
  gRNA
ctggttgagttcctcgtcgt

SEQ ID NO: 91015 - DNA, 20 bp, Artificial Sequence
  MKO10091015_B_H2afy2
  gRNA
cgatctcggctgtggttggg

SEQ ID NO: 91016 - DNA, 20 bp, Artificial Sequence
  MKO10091016_B_H2afy2
  gRNA
ttaccttctgccccagaacg

SEQ ID NO: 91017 - DNA, 20 bp, Artificial Sequence
  MKO10091017_B_H2afy
  gRNA
ccctaagtataggatcggag

SEQ ID NO: 91018 - DNA, 20 bp, Artificial Sequence
  MKO10091018_B_H2afy
  gRNA
gctgtcgccatgtcgagccg

SEQ ID NO: 91019 - DNA, 20 bp, Artificial Sequence
  MKO10091019_B_H2afy
  gRNA
ctccgtcgtactgtctgcgc

SEQ ID NO: 91020 - DNA, 20 bp, Artificial Sequence
  MKO10091020_B_H2afz
  gRNA
gcaagccggctcgctgcgag

SEQ ID NO: 91021 - DNA, 20 bp, Artificial Sequence
  MKO10091021_B_H2afz
  gRNA
ttcatcgacacctgaaatct

SEQ ID NO: 91022 - DNA, 20 bp, Artificial Sequence
  MKO10091022_B_H2afz
  gRNA
atagcaagctgcaagtgacg

SEQ ID NO: 91023 - DNA, 20 bp, Artificial Sequence
  MKO10091023_B_H2bfm
  gRNA
tgttcacagaccgctgcgag

SEQ ID NO: 91024 - DNA, 20 bp, Artificial Sequence
  MKO10091024_B_H2bfm
  gRNA
aggaagcagaagtcgaatag

SEQ ID NO: 91025 - DNA, 20 bp, Artificial Sequence
  MKO10091025_B_H2bfm
  gRNA
acgcgccaagaagctggctt

SEQ ID NO: 91026 - DNA, 20 bp, Artificial Sequence
  MKO10091026_B_H3f3a
  gRNA
aagcaccaatagctgcactc

SEQ ID NO: 91027 - DNA, 20 bp, Artificial Sequence
  MKO10091027_B_H3f3a
  gRNA
caagctcccctttcagcgtc

SEQ ID NO: 91028 - DNA, 20 bp, Artificial Sequence
  MKO10091028_B_H3f3a
  gRNA
aagcacgttctccgcgtatg

SEQ ID NO: 91029 - DNA, 20 bp, Artificial Sequence
  MKO10091029_B_H3f3b
  gRNA
tgactgcaggccagggaccg

SEQ ID NO: 91030 - DNA, 20 bp, Artificial Sequence
  MKO10091030_B_H3f3b
  gRNA
tgatggtgactctcttggcg

SEQ ID NO: 91031 - DNA, 20 bp, Artificial Sequence
  MKO10091031_B_H3f3b
  gRNA
ggaggctagcgaagcatacc

SEQ ID NO: 91032 - DNA, 20 bp, Artificial Sequence
  MKO10091032_B_H60b
  gRNA
tttatccacttaatatgacc

SEQ ID NO: 91033 - DNA, 20 bp, Artificial Sequence
  MKO10091033_B_H60b
  gRNA
aactgttgatcaggttgtag

SEQ ID NO: 91034 - DNA, 20 bp, Artificial Sequence
  MKO10091034_B_H60b
  gRNA
ccaacataattctgacaccc

SEQ ID NO: 91035 - DNA, 20 bp, Artificial Sequence
  MKO10091035_B_H60c
  gRNA
tttatccacttaataagacc

SEQ ID NO: 91036 - DNA, 20 bp, Artificial Sequence
  MKO10091036_B_H60c
  gRNA
gacttgcatgccatggatcg

SEQ ID NO: 91037 - DNA, 20 bp, Artificial Sequence
  MKO10091037_B_H60c
  gRNA
tgacagtgagtttgcaattt

SEQ ID NO: 91038 - DNA, 20 bp, Artificial Sequence
  MKO10091038_B_H6pd
  gRNA
cttgcggttctgatctcgga

SEQ ID NO: 91039 - DNA, 20 bp, Artificial Sequence
  MKO10091039_B_H6pd
  gRNA
gggccaagcacattgccgct

SEQ ID NO: 91040 - DNA, 20 bp, Artificial Sequence
  MKO10091040_B_H6pd
  gRNA
tcacgcaccttccgcatcta

SEQ ID NO: 91041 - DNA, 20 bp, Artificial Sequence
  MKO10091041_B_Haao
  gRNA
cagctcaaaatcatgttcgt

SEQ ID NO: 91042 - DNA, 20 bp, Artificial Sequence
  MKO10091042_B_Haao
  gRNA
aggatgtcctcttcgagaaa

SEQ ID NO: 91043 - DNA, 20 bp, Artificial Sequence
  MKO10091043_B_Haao
  gRNA
tggcaaacctctgcggggag

SEQ ID NO: 91044 - DNA, 20 bp, Artificial Sequence
  MKO10091044_B_Habp2
  gRNA
acagtccccgccgtgttcac

SEQ ID NO: 91045 - DNA, 20 bp, Artificial Sequence
  MKO10091045_B_Habp2
  gRNA
tcccgtgtaagggtatttgc

SEQ ID NO: 91046 - DNA, 20 bp, Artificial Sequence
  MKO10091046_B_Habp2
  gRNA
cacagaatttccccttatac

SEQ ID NO: 91047 - DNA, 20 bp, Artificial Sequence
  MKO10091047_B_Habp4
  gRNA
ctggcactcctccatcatcg

SEQ ID NO: 91048 - DNA, 20 bp, Artificial Sequence
  MKO10091048_B_Habp4
  gRNA
gatcgagacagaccactgag

SEQ ID NO: 91049 - DNA, 20 bp, Artificial Sequence
  MKO10091049_B_Habp4
  gRNA
agcagaggccgaggcggtcc

SEQ ID NO: 91050 - DNA, 20 bp, Artificial Sequence
  MKO10091050_B_Hace1
  gRNA
gtcaacatttgtaataatga

SEQ ID NO: 91051 - DNA, 20 bp, Artificial Sequence
  MKO10091051_B_Hace1
  gRNA
gaaatgcatgagtaaattac

SEQ ID NO: 91052 - DNA, 20 bp, Artificial Sequence
  MKO10091052_B_Hace1
  gRNA
tgtttacacactgatgccaa

SEQ ID NO: 91053 - DNA, 20 bp, Artificial Sequence
  MKO10091053_B_Hacl1
  gRNA
actttatttacctgcctgtc

SEQ ID NO: 91054 - DNA, 20 bp, Artificial Sequence
  MKO10091054_B_Hacl1
  gRNA
caggatgtggagtacatgtt

SEQ ID NO: 91055 - DNA, 20 bp, Artificial Sequence
  MKO10091055_B_Hacl1
  gRNA
tggatacctgtggaaactcc

SEQ ID NO: 91056 - DNA, 20 bp, Artificial Sequence
  MKO10091056_B_Hadha
  gRNA
taaggacagcactcctgatt

SEQ ID NO: 91057 - DNA, 20 bp, Artificial Sequence
  MKO10091057_B_Hadha
  gRNA
gcccctgcgacaaagcagcc

SEQ ID NO: 91058 - DNA, 20 bp, Artificial Sequence
  MKO10091058_B_Hadha
  gRNA
aaggggatgtggcagttatt

SEQ ID NO: 91059 - DNA, 20 bp, Artificial Sequence
  MKO10091059_B_Hadhb
  gRNA
gaagtgcctgacagcagaaa

SEQ ID NO: 91060 - DNA, 20 bp, Artificial Sequence
  MKO10091060_B_Hadhb
  gRNA
gcagctctagccaagtcatg

SEQ ID NO: 91061 - DNA, 20 bp, Artificial Sequence
  MKO10091061_B_Hadhb
  gRNA
agacctaatgccacatgact

SEQ ID NO: 91062 - DNA, 20 bp, Artificial Sequence
  MKO10091062_B_Hadh
  gRNA
ttgccaggatgtcttccgtt

SEQ ID NO: 91063 - DNA, 20 bp, Artificial Sequence
  MKO10091063_B_Hadh
  gRNA
agtagtattggtggaccaaa

SEQ ID NO: 91064 - DNA, 20 bp, Artificial Sequence
  MKO10091064_B_Hadh
  gRNA
cctttcaaccagcaccgatg

SEQ ID NO: 91065 - DNA, 20 bp, Artificial Sequence
  MKO10091065_B_Haghl
  gRNA
cgaaggctcaccgtctcggg

SEQ ID NO: 91066 - DNA, 20 bp, Artificial Sequence
  MKO10091066_B_Haghl
  gRNA
gggtacccttccacccgaga

SEQ ID NO: 91067 - DNA, 20 bp, Artificial Sequence
  MKO10091067_B_Haghl
  gRNA
gctccgcatttccacgtgtg

SEQ ID NO: 91068 - DNA, 20 bp, Artificial Sequence
  MKO10091068_B_Hagh
  gRNA
aacagatgtgtcccgaagta

SEQ ID NO: 91069 - DNA, 20 bp, Artificial Sequence
  MKO10091069_B_Hagh
  gRNA
catcggagccttgactcaca

SEQ ID NO: 91070 - DNA, 20 bp, Artificial Sequence
  MKO10091070_B_Hagh
  gRNA
gtcaacaccctgccatactt

SEQ ID NO: 91071 - DNA, 20 bp, Artificial Sequence
  MKO10091071_B_Hal
  gRNA
gctttagatacagcaaatac

SEQ ID NO: 91072 - DNA, 20 bp, Artificial Sequence
  MKO10091072_B_Hal
  gRNA
ggatacaggaaaactccttc

SEQ ID NO: 91073 - DNA, 20 bp, Artificial Sequence
  MKO10091073_B_Hal
  gRNA
tgatgctgtcgatgacctcc

SEQ ID NO: 91074 - DNA, 20 bp, Artificial Sequence
  MKO10091074_B_Hamp2
  gRNA
gctcacctgttgctggagat

SEQ ID NO: 91075 - DNA, 20 bp, Artificial Sequence
  MKO10091075_B_Hamp2
  gRNA
acagagctgcagcctttgca

SEQ ID NO: 91076 - DNA, 20 bp, Artificial Sequence
  MKO10091076_B_Hamp2
  gRNA
ctgctttcttccccgtgcaa

SEQ ID NO: 91077 - DNA, 20 bp, Artificial Sequence
  MKO10091077_B_Hamp
  gRNA
tttacagcagaagatgcaga

SEQ ID NO: 91078 - DNA, 20 bp, Artificial Sequence
  MKO10091078_B_Hamp
  gRNA
acagagctgcagcctttgca

SEQ ID NO: 91079 - DNA, 20 bp, Artificial Sequence
  MKO10091079_B_Hamp
  gRNA
ctgctttcttccccgtgcaa

SEQ ID NO: 91080 - DNA, 20 bp, Artificial Sequence
  MKO10091080_B_Hand1
  gRNA
ccggctggcctcagcaagtc

SEQ ID NO: 91081 - DNA, 20 bp, Artificial Sequence
  MKO10091081_B_Hand1
  gRNA
gtaggtggtggcccgccggc

SEQ ID NO: 91082 - DNA, 20 bp, Artificial Sequence
  MKO10091082_B_Hand1
  gRNA
cccggcctcgcgttgccacc

SEQ ID NO: 91083 - DNA, 20 bp, Artificial Sequence
  MKO10091083_B_Hand2
  gRNA
cgtgctgtggccagcctgtc

SEQ ID NO: 91084 - DNA, 20 bp, Artificial Sequence
  MKO10091084_B_Hand2
  gRNA
gcggtgccccggcgcttcac

SEQ ID NO: 91085 - DNA, 20 bp, Artificial Sequence
  MKO10091085_B_Hand2
  gRNA
gagtcctgcgccgctccttg

SEQ ID NO: 91086 - DNA, 20 bp, Artificial Sequence
  MKO10091086_B_Hao1
  gRNA
tgttccgcacgtcatcaatg

SEQ ID NO: 91087 - DNA, 20 bp, Artificial Sequence
  MKO10091087_B_Hao1
  gRNA
gtcagcatgccaatatgtgt

SEQ ID NO: 91088 - DNA, 20 bp, Artificial Sequence
  MKO10091088_B_Hao1
  gRNA
cagtggacttgctgaatatg

SEQ ID NO: 91089 - DNA, 20 bp, Artificial Sequence
  MKO10091089_B_Hao2
  gRNA
tgcttgttgatgtcccagtc

SEQ ID NO: 91090 - DNA, 20 bp, Artificial Sequence
  MKO10091090_B_Hao2
  gRNA
catcaagctgcctcccgcca

SEQ ID NO: 91091 - DNA, 20 bp, Artificial Sequence
  MKO10091091_B_Hao2
  gRNA
tgccttcaacacatcattgc

SEQ ID NO: 91092 - DNA, 20 bp, Artificial Sequence
  MKO10091092_B_Hap1
  gRNA
cgatccgggcggctgtgttc

SEQ ID NO: 91093 - DNA, 20 bp, Artificial Sequence
  MKO10091093_B_Hap1
  gRNA
cagcagcacgaccaccccta

SEQ ID NO: 91094 - DNA, 20 bp, Artificial Sequence
  MKO10091094_B_Hap1
  gRNA
ttcttcgtgggtggtggatt

SEQ ID NO: 91095 - DNA, 20 bp, Artificial Sequence
  MKO10091095_B_Hapln1
  gRNA
tccacaaaatccgcatcaag

SEQ ID NO: 91096 - DNA, 20 bp, Artificial Sequence
  MKO10091096_B_Hapln1
  gRNA
catcacggatcttaccctgg

SEQ ID NO: 91097 - DNA, 20 bp, Artificial Sequence
  MKO10091097_B_Hapln1
  gRNA
tgctgtcttaccgttgaagt

SEQ ID NO: 91098 - DNA, 20 bp, Artificial Sequence
  MKO10091098_B_Hapln2
  gRNA
gatcatcaagaacgtgcgtc

SEQ ID NO: 91099 - DNA, 20 bp, Artificial Sequence
  MKO10091099_B_Hapln2
  gRNA
tcgcttcgaagtaattgaac

SEQ ID NO: 91100 - DNA, 20 bp, Artificial Sequence
  MKO10091100_B_Hapln2
  gRNA
tcaattacttcgaagcgaag

SEQ ID NO: 91101 - DNA, 20 bp, Artificial Sequence
  MKO10091101_B_Hapln3
  gRNA
gtctcagttgaactcgccct

SEQ ID NO: 91102 - DNA, 20 bp, Artificial Sequence
  MKO10091102_B_Hapln3
  gRNA
gagcctggagtacggacctt

SEQ ID NO: 91103 - DNA, 20 bp, Artificial Sequence
  MKO10091103_B_Hapln3
  gRNA
cgctcctttggggactacca

SEQ ID NO: 91104 - DNA, 20 bp, Artificial Sequence
  MKO10091104_B_Hapln4
  gRNA
gtctactgctaccgcgctcc

SEQ ID NO: 91105 - DNA, 20 bp, Artificial Sequence
  MKO10091105_B_Hapln4
  gRNA
ggctttcgccgatgtcttcg

SEQ ID NO: 91106 - DNA, 20 bp, Artificial Sequence
  MKO10091106_B_Hapln4
  gRNA
agcgcacgcgcgcactgccc

SEQ ID NO: 91107 - DNA, 20 bp, Artificial Sequence
  MKO10091107_B_Harbi1
  gRNA
cggtgcctggacggatccaa

SEQ ID NO: 91108 - DNA, 20 bp, Artificial Sequence
  MKO10091108_B_Harbi1
  gRNA
taagagaggtcttccgcatt

SEQ ID NO: 91109 - DNA, 20 bp, Artificial Sequence
  MKO10091109_B_Harbi1
  gRNA
tgcaacgcagcgactcatag

SEQ ID NO: 91110 - DNA, 20 bp, Artificial Sequence
  MKO10091110_B_Hars2
  gRNA
ggaaccttgatgacaaaatt

SEQ ID NO: 91111 - DNA, 20 bp, Artificial Sequence
  MKO10091111_B_Hars2
  gRNA
gcctccagacctttccaact

SEQ ID NO: 91112 - DNA, 20 bp, Artificial Sequence
  MKO10091112_B_Hars2
  gRNA
gaagttgtcttcatacttct

SEQ ID NO: 91113 - DNA, 20 bp, Artificial Sequence
  MKO10091113_B_Hars
  gRNA
gtttgtgctcaaaaccccca

SEQ ID NO: 91114 - DNA, 20 bp, Artificial Sequence
  MKO10091114_B_Hars
  gRNA
gcacgagagactatagtccc

SEQ ID NO: 91115 - DNA, 20 bp, Artificial Sequence
  MKO10091115_B_Hars
  gRNA
ccctccacagatcgaggagg

SEQ ID NO: 91116 - DNA, 20 bp, Artificial Sequence
  MKO10091116_B_Has1
  gRNA
cgagtagcatctggagcgcg

SEQ ID NO: 91117 - DNA, 20 bp, Artificial Sequence
  MKO10091117_B_Has1
  gRNA
tcttgagcagtcttcgatac

SEQ ID NO: 91118 - DNA, 20 bp, Artificial Sequence
  MKO10091118_B_Has1
  gRNA
gacccccgggtaggggctgt

SEQ ID NO: 91119 - DNA, 20 bp, Artificial Sequence
  MKO10091119_B_Has2
  gRNA
taccaacagggtgttgagtc

SEQ ID NO: 91120 - DNA, 20 bp, Artificial Sequence
  MKO10091120_B_Has2
  gRNA
ggtcttagaggaagacccta

SEQ ID NO: 91121 - DNA, 20 bp, Artificial Sequence
  MKO10091121_B_Has2
  gRNA
cctccaacacctccaaccat

SEQ ID NO: 91122 - DNA, 20 bp, Artificial Sequence
  MKO10091122_B_Has3
  gRNA
caagactcgaagcatctcaa

SEQ ID NO: 91123 - DNA, 20 bp, Artificial Sequence
  MKO10091123_B_Has3
  gRNA
ggctcaatcagcaaacccgc

SEQ ID NO: 91124 - DNA, 20 bp, Artificial Sequence
  MKO10091124_B_Has3
  gRNA
gatccccaagtaggaggtgt

SEQ ID NO: 91125 - DNA, 20 bp, Artificial Sequence
  MKO10091125_B_Hat1
  gRNA
gtttcacctcctgtctgact

SEQ ID NO: 91126 - DNA, 20 bp, Artificial Sequence
  MKO10091126_B_Hat1
  gRNA
gaatatacccatcagctctt

SEQ ID NO: 91127 - DNA, 20 bp, Artificial Sequence
  MKO10091127_B_Hat1
  gRNA
atgtcattctcaagatcttc

SEQ ID NO: 91128 - DNA, 20 bp, Artificial Sequence
  MKO10091128_B_Haus1
  gRNA
ccagacttagacagattggc

SEQ ID NO: 91129 - DNA, 20 bp, Artificial Sequence
  MKO10091129_B_Haus1
  gRNA
tgacagtcgccttcagaata

SEQ ID NO: 91130 - DNA, 20 bp, Artificial Sequence
  MKO10091130_B_Haus1
  gRNA
ctgaaggcgactgtcaacct

SEQ ID NO: 91131 - DNA, 20 bp, Artificial Sequence
  MKO10091131_B_Haus2
  gRNA
tgatactcaccatttgcttt

SEQ ID NO: 91132 - DNA, 20 bp, Artificial Sequence
  MKO10091132_B_Haus2
  gRNA
cagatatgtggtacatatgt

SEQ ID NO: 91133 - DNA, 20 bp, Artificial Sequence
  MKO10091133_B_Haus2
  gRNA
tattcaagctgaaatctacc

SEQ ID NO: 91134 - DNA, 20 bp, Artificial Sequence
  MKO10091134_B_Haus3
  gRNA
tcaaaatcgccctttacaac

SEQ ID NO: 91135 - DNA, 20 bp, Artificial Sequence
  MKO10091135_B_Haus3
  gRNA
ttctgtaatacaagatcagt

SEQ ID NO: 91136 - DNA, 20 bp, Artificial Sequence
  MKO10091136_B_Haus3
  gRNA
gtccacatcattattcagtt

SEQ ID NO: 91137 - DNA, 20 bp, Artificial Sequence
  MKO10091137_B_Haus4
  gRNA
ttgaggcgtggagtgaagtt

SEQ ID NO: 91138 - DNA, 20 bp, Artificial Sequence
  MKO10091138_B_Haus4
  gRNA
tgtgcctctaggatttcgtg

SEQ ID NO: 91139 - DNA, 20 bp, Artificial Sequence
  MKO10091139_B_Haus4
  gRNA
agttatccaagagctgctcg

SEQ ID NO: 91140 - DNA, 20 bp, Artificial Sequence
  MKO10091140_B_Haus5
  gRNA
tttctctaggcatgcctatc

SEQ ID NO: 91141 - DNA, 20 bp, Artificial Sequence
  MKO10091141_B_Haus5
  gRNA
tacctttggattgtcctgat

SEQ ID NO: 91142 - DNA, 20 bp, Artificial Sequence
  MKO10091142_B_Haus5
  gRNA
cttcaggctgtgtctgagtc

SEQ ID NO: 91143 - DNA, 20 bp, Artificial Sequence
  MKO10091143_B_Haus6
  gRNA
ttatgttatgcaaaaatacc

SEQ ID NO: 91144 - DNA, 20 bp, Artificial Sequence
  MKO10091144_B_Haus6
  gRNA
agcaatgagccaacaacttg

SEQ ID NO: 91145 - DNA, 20 bp, Artificial Sequence
  MKO10091145_B_Haus6
  gRNA
gtctttcctaggctgaatgt

SEQ ID NO: 91146 - DNA, 20 bp, Artificial Sequence
  MKO10091146_B_Haus7
  gRNA
tgacagctactacaaagatg

SEQ ID NO: 91147 - DNA, 20 bp, Artificial Sequence
  MKO10091147_B_Haus7
  gRNA
tgagatgaacttgtcttgca

SEQ ID NO: 91148 - DNA, 20 bp, Artificial Sequence
  MKO10091148_B_Haus7
  gRNA
ttcttaccattagaagatcc

SEQ ID NO: 91149 - DNA, 20 bp, Artificial Sequence
  MKO10091149_B_Haus8
  gRNA
gaatggcggattcctcagaa

SEQ ID NO: 91150 - DNA, 20 bp, Artificial Sequence
  MKO10091150_B_Haus8
  gRNA
gtctctcgcaggaagaagag

SEQ ID NO: 91151 - DNA, 20 bp, Artificial Sequence
  MKO10091151_B_Haus8
  gRNA
gtgctggctttccttccctc

SEQ ID NO: 91152 - DNA, 20 bp, Artificial Sequence
  MKO10091152_B_Havcr1
  gRNA
aatggcactgtgacatcctc

SEQ ID NO: 91153 - DNA, 20 bp, Artificial Sequence
  MKO10091153_B_Havcr1
  gRNA
agctgtgggccttgtagttg

SEQ ID NO: 91154 - DNA, 20 bp, Artificial Sequence
  MKO10091154_B_Havcr1
  gRNA
caagaagacccacaactaca

SEQ ID NO: 91155 - DNA, 20 bp, Artificial Sequence
  MKO10091155_B_Havcr2
  gRNA
cagagactcccactccaatg

SEQ ID NO: 91156 - DNA, 20 bp, Artificial Sequence
  MKO10091156_B_Havcr2
  gRNA
ttctccaagaaccctaacca

SEQ ID NO: 91157 - DNA, 20 bp, Artificial Sequence
  MKO10091157_B_Havcr2
  gRNA
acctgaaccatttctctccg

SEQ ID NO: 91158 - DNA, 20 bp, Artificial Sequence
  MKO10091158_B_Hax1
  gRNA
ttctacagttggatgataca

SEQ ID NO: 91159 - DNA, 20 bp, Artificial Sequence
  MKO10091159_B_Hax1
  gRNA
agacttacctttgtcctctt

SEQ ID NO: 91160 - DNA, 20 bp, Artificial Sequence
  MKO10091160_B_Hax1
  gRNA
cgagagagctatgcgtttga

SEQ ID NO: 91161 - DNA, 20 bp, Artificial Sequence
  MKO10091161_B_Hba-a1
  gRNA
agcgcataccttgaagttga

SEQ ID NO: 91162 - DNA, 20 bp, Artificial Sequence
  MKO10091162_B_Hba-a1
  gRNA
cctcactttgatgtaagcca

SEQ ID NO: 91163 - DNA, 20 bp, Artificial Sequence
  MKO10091163_B_Hba-a1
  gRNA
gaaggcagcttaacggtact

SEQ ID NO: 91164 - DNA, 20 bp, Artificial Sequence
  MKO10091164_B_Hba-a2
  gRNA
agcgcataccttgaagttga

SEQ ID NO: 91165 - DNA, 20 bp, Artificial Sequence
  MKO10091165_B_Hba-a2
  gRNA
cctcactttgatgtaagcca

SEQ ID NO: 91166 - DNA, 20 bp, Artificial Sequence
  MKO10091166_B_Hba-a2
  gRNA
gaaggcagcttaacggtact

SEQ ID NO: 91167 - DNA, 20 bp, Artificial Sequence
  MKO10091167_B_Hba-x
  gRNA
gctcttaaccgcatccccta

SEQ ID NO: 91168 - DNA, 20 bp, Artificial Sequence
  MKO10091168_B_Hba-x
  gRNA
tcccgccgacttcacccctg

SEQ ID NO: 91169 - DNA, 20 bp, Artificial Sequence
  MKO10091169_B_Hba-x
  gRNA
gagctatcatcatgtccatg

SEQ ID NO: 91170 - DNA, 20 bp, Artificial Sequence
  MKO10091170_B_Hbb-b1
  gRNA
ctatgtcagaagcaaatgtg

SEQ ID NO: 91171 - DNA, 20 bp, Artificial Sequence
  MKO10091171_B_Hbb-b1
  gRNA
ggctgctggttgtctaccct

SEQ ID NO: 91172 - DNA, 20 bp, Artificial Sequence
  MKO10091172_B_Hbb-b1
  gRNA
agactcaccctgaagttctc

SEQ ID NO: 91173 - DNA, 20 bp, Artificial Sequence
  MKO10091173_B_Hbb-b2
  gRNA
ggcctcaccaccaacttcat

SEQ ID NO: 91174 - DNA, 20 bp, Artificial Sequence
  MKO10091174_B_Hbb-b2
  gRNA
ggctgctggttgtctaccct

SEQ ID NO: 91175 - DNA, 20 bp, Artificial Sequence
  MKO10091175_B_Hbb-b2
  gRNA
agactcaccctgaagttctc

SEQ ID NO: 91176 - DNA, 20 bp, Artificial Sequence
  MKO10091176_B_Hbb-bh1
  gRNA
caatcaccaacatgttgccc

SEQ ID NO: 91177 - DNA, 20 bp, Artificial Sequence
  MKO10091177_B_Hbb-bh1
  gRNA
aggcagctatcacaagcatc

SEQ ID NO: 91178 - DNA, 20 bp, Artificial Sequence
  MKO10091178_B_Hbb-bh1
  gRNA
aaagtggacttggaaaaagt

SEQ ID NO: 91179 - DNA, 20 bp, Artificial Sequence
  MKO10091179_B_Hbb-bh2
  gRNA
attgtgatgtctccacactt

SEQ ID NO: 91180 - DNA, 20 bp, Artificial Sequence
  MKO10091180_B_Hbb-bh2
  gRNA
caatcactatcatgctgccc

SEQ ID NO: 91181 - DNA, 20 bp, Artificial Sequence
  MKO10091181_B_Hbb-bh2
  gRNA
tatggtggagctcactgcag

SEQ ID NO: 91182 - DNA, 20 bp, Artificial Sequence
  MKO10091182_B_Hbb-bs
  gRNA
ggctgctggttgtctaccct

SEQ ID NO: 91183 - DNA, 20 bp, Artificial Sequence
  MKO10091183_B_Hbb-bs
  gRNA
agactcaccctgaagttctc

SEQ ID NO: 91184 - DNA, 20 bp, Artificial Sequence
  MKO10091184_B_Hbb-bs
  gRNA
caatatgatcgtgattgtgc

SEQ ID NO: 91185 - DNA, 20 bp, Artificial Sequence
  MKO10091185_B_Hbb-bt
  gRNA
ggctgctggttgtctaccct

SEQ ID NO: 91186 - DNA, 20 bp, Artificial Sequence
  MKO10091186_B_Hbb-bt
  gRNA
agactcaccctgaagttctc

SEQ ID NO: 91187 - DNA, 20 bp, Artificial Sequence
  MKO10091187_B_Hbb-bt
  gRNA
caatatgatcgtgattgtgc

SEQ ID NO: 91188 - DNA, 20 bp, Artificial Sequence
  MKO10091188_B_Hbb-y
  gRNA
ggcttcttgttgtgtaccca

SEQ ID NO: 91189 - DNA, 20 bp, Artificial Sequence
  MKO10091189_B_Hbb-y
  gRNA
acagctcttgggtaatgtgc

SEQ ID NO: 91190 - DNA, 20 bp, Artificial Sequence
  MKO10091190_B_Hbb-y
  gRNA
tgaattcacagctgagatgc

SEQ ID NO: 91191 - DNA, 20 bp, Artificial Sequence
  MKO10091191_B_Hbegf
  gRNA
ctgagcacgatcacctcccg

SEQ ID NO: 91192 - DNA, 20 bp, Artificial Sequence
  MKO10091192_B_Hbegf
  gRNA
gcccatgacacctgtgtccg

SEQ ID NO: 91193 - DNA, 20 bp, Artificial Sequence
  MKO10091193_B_Hbegf
  gRNA
tacaaggactactgcatcca

SEQ ID NO: 91194 - DNA, 20 bp, Artificial Sequence
  MKO10091194_B_Hbp1
  gRNA
gagatacatctgaacttagc

SEQ ID NO: 91195 - DNA, 20 bp, Artificial Sequence
  MKO10091195_B_Hbp1
  gRNA
cactggtggtgggcgtgcat

SEQ ID NO: 91196 - DNA, 20 bp, Artificial Sequence
  MKO10091196_B_Hbp1
  gRNA
ctagtagctatgatgtgtac

SEQ ID NO: 91197 - DNA, 20 bp, Artificial Sequence
  MKO10091197_B_Hbq1a
  gRNA
ggcgtacctctccaaggcct

SEQ ID NO: 91198 - DNA, 20 bp, Artificial Sequence
  MKO10091198_B_Hbq1a
  gRNA
ggactcacctggaagttagc

SEQ ID NO: 91199 - DNA, 20 bp, Artificial Sequence
  MKO10091199_B_Hbq1a
  gRNA
caaaacctacttcccacact

SEQ ID NO: 91200 - DNA, 20 bp, Artificial Sequence
  MKO10091200_B_Hbq1b
  gRNA
gtttctgggtcacgtgactt

SEQ ID NO: 91201 - DNA, 20 bp, Artificial Sequence
  MKO10091201_B_Hbq1b
  gRNA
ggactcacctggaagttagc

SEQ ID NO: 91202 - DNA, 20 bp, Artificial Sequence
  MKO10091202_B_Hbq1b
  gRNA
caaaacctacttcccacact

SEQ ID NO: 91203 - DNA, 20 bp, Artificial Sequence
  MKO10091203_B_Hbs1l
  gRNA
cttcatcgtagttatatccc

SEQ ID NO: 91204 - DNA, 20 bp, Artificial Sequence
  MKO10091204_B_Hbs1l
  gRNA
tttgaagatgatgatctgta

SEQ ID NO: 91205 - DNA, 20 bp, Artificial Sequence
  MKO10091205_B_Hbs1l
  gRNA
cttggtcaatttcacttaat

SEQ ID NO: 91206 - DNA, 20 bp, Artificial Sequence
  MKO10091206_B_Hccs
  gRNA
caagagcaagaattcgttcc

SEQ ID NO: 91207 - DNA, 20 bp, Artificial Sequence
  MKO10091207_B_Hccs
  gRNA
attccacataatcataggcc

SEQ ID NO: 91208 - DNA, 20 bp, Artificial Sequence
  MKO10091208_B_Hccs
  gRNA
gagcctcgatccttcaaacc

SEQ ID NO: 91209 - DNA, 20 bp, Artificial Sequence
  MKO10091209_B_Hcfc1r1
  gRNA
gtgcctacctgagtggtggc

SEQ ID NO: 91210 - DNA, 20 bp, Artificial Sequence
  MKO10091210_B_Hcfc1r1
  gRNA
ggacgcagggtagtagggac

SEQ ID NO: 91211 - DNA, 20 bp, Artificial Sequence
  MKO10091211_B_Hcfc1r1
  gRNA
tcttctccagtctttccccc

SEQ ID NO: 91212 - DNA, 20 bp, Artificial Sequence
  MKO10091212_B_Hcfc1
  gRNA
gggtgccaccccactaaggc

SEQ ID NO: 91213 - DNA, 20 bp, Artificial Sequence
  MKO10091213_B_Hcfc1
  gRNA
caacgacctctatgaactcc

SEQ ID NO: 91214 - DNA, 20 bp, Artificial Sequence
  MKO10091214_B_Hcfc1
  gRNA
actcgcctattggtgtttgg

SEQ ID NO: 91215 - DNA, 20 bp, Artificial Sequence
  MKO10091215_B_Hcfc2
  gRNA
ttccctccttgtccgcggct

SEQ ID NO: 91216 - DNA, 20 bp, Artificial Sequence
  MKO10091216_B_Hcfc2
  gRNA
atacttgtttcctataacac

SEQ ID NO: 91217 - DNA, 20 bp, Artificial Sequence
  MKO10091217_B_Hcfc2
  gRNA
ttcaactagttacaaaccag

SEQ ID NO: 91218 - DNA, 20 bp, Artificial Sequence
  MKO10091218_B_Hck
  gRNA
gcttccatctcggaggaacc

SEQ ID NO: 91219 - DNA, 20 bp, Artificial Sequence
  MKO10091219_B_Hck
  gRNA
actcctccagaaccaccatc

SEQ ID NO: 91220 - DNA, 20 bp, Artificial Sequence
  MKO10091220_B_Hck
  gRNA
actcgagccacatagttgct

SEQ ID NO: 91221 - DNA, 20 bp, Artificial Sequence
  MKO10091221_B_Hcls1
  gRNA
ctatggcggtcggtttggag

SEQ ID NO: 91222 - DNA, 20 bp, Artificial Sequence
  MKO10091222_B_Hcls1
  gRNA
gtagaatgacatctccgaga

SEQ ID NO: 91223 - DNA, 20 bp, Artificial Sequence
  MKO10091223_B_Hcls1
  gRNA
tccccaccgttgctccttct

SEQ ID NO: 91224 - DNA, 20 bp, Artificial Sequence
  MKO10091224_B_Hcn1
  gRNA
gccaacaaacattgcgtagc

SEQ ID NO: 91225 - DNA, 20 bp, Artificial Sequence
  MKO10091225_B_Hcn1
  gRNA
tactatgagcaccgatacca

SEQ ID NO: 91226 - DNA, 20 bp, Artificial Sequence
  MKO10091226_B_Hcn1
  gRNA
gcttaatgatcctctgagag

SEQ ID NO: 91227 - DNA, 20 bp, Artificial Sequence
  MKO10091227_B_Hcn2
  gRNA
accggtgttcatagtaatcg

SEQ ID NO: 91228 - DNA, 20 bp, Artificial Sequence
  MKO10091228_B_Hcn2
  gRNA
aggacgagaccaccgcgccc

SEQ ID NO: 91229 - DNA, 20 bp, Artificial Sequence
  MKO10091229_B_Hcn2
  gRNA
aagacttccccagcgactgc

SEQ ID NO: 91230 - DNA, 20 bp, Artificial Sequence
  MKO10091230_B_Hcn3
  gRNA
gtactacgagcatcgctacc

SEQ ID NO: 91231 - DNA, 20 bp, Artificial Sequence
  MKO10091231_B_Hcn3
  gRNA
tctcaccaccatgcggttca

SEQ ID NO: 91232 - DNA, 20 bp, Artificial Sequence
  MKO10091232_B_Hcn3
  gRNA
ctgggtctccatgaaccgca

SEQ ID NO: 91233 - DNA, 20 bp, Artificial Sequence
  MKO10091233_B_Hcn4
  gRNA
tcattcgatacattcatcag

SEQ ID NO: 91234 - DNA, 20 bp, Artificial Sequence
  MKO10091234_B_Hcn4
  gRNA
tatggacggcaggcacccgt

SEQ ID NO: 91235 - DNA, 20 bp, Artificial Sequence
  MKO10091235_B_Hcn4
  gRNA
gtacgcatcgtgaacctcat

SEQ ID NO: 91236 - DNA, 20 bp, Artificial Sequence
  MKO10091236_B_Hcrtr1
  gRNA
tccagatcttccgcaagctc

SEQ ID NO: 91237 - DNA, 20 bp, Artificial Sequence
  MKO10091237_B_Hcrtr1
  gRNA
gcggaactggaaacggccct

SEQ ID NO: 91238 - DNA, 20 bp, Artificial Sequence
  MKO10091238_B_Hcrtr1
  gRNA
ctggccgaagagccacgact

SEQ ID NO: 91239 - DNA, 20 bp, Artificial Sequence
  MKO10091239_B_Hcrtr2
  gRNA
tttacctctttagcacattg

SEQ ID NO: 91240 - DNA, 20 bp, Artificial Sequence
  MKO10091240_B_Hcrtr2
  gRNA
tccaaatattccgtaaactc

SEQ ID NO: 91241 - DNA, 20 bp, Artificial Sequence
  MKO10091241_B_Hcrtr2
  gRNA
tctcagtgatgtcaacaacg

SEQ ID NO: 91242 - DNA, 20 bp, Artificial Sequence
  MKO10091242_B_Hcrt
  gRNA
catgaactttccttctacaa

SEQ ID NO: 91243 - DNA, 20 bp, Artificial Sequence
  MKO10091243_B_Hcrt
  gRNA
cgctgcgggtatcctgactc

SEQ ID NO: 91244 - DNA, 20 bp, Artificial Sequence
  MKO10091244_B_Hcrt
  gRNA
ctaccaccgctttagcaccc

SEQ ID NO: 91245 - DNA, 20 bp, Artificial Sequence
  MKO10091245_B_Hcst
  gRNA
agagtctacatcaacatgcc

SEQ ID NO: 91246 - DNA, 20 bp, Artificial Sequence
  MKO10091246_B_Hcst
  gRNA
tgccgtggtcagcctctgcc

SEQ ID NO: 91247 - DNA, 20 bp, Artificial Sequence
  MKO10091247_B_Hcst
  gRNA
agtggctgcaagtcagacat

SEQ ID NO: 91248 - DNA, 20 bp, Artificial Sequence
  MKO10091248_B_Hc
  gRNA
acgacttgaagccagccaaa

SEQ ID NO: 91249 - DNA, 20 bp, Artificial Sequence
  MKO10091249_B_Hc
  gRNA
cccagtctctcacgtgtatc

SEQ ID NO: 91250 - DNA, 20 bp, Artificial Sequence
  MKO10091250_B_Hc
  gRNA
tgtacttacttgggattaga

SEQ ID NO: 91251 - DNA, 20 bp, Artificial Sequence
  MKO10091251_B_Hdac10
  gRNA
gctcctctttatccagggtc

SEQ ID NO: 91252 - DNA, 20 bp, Artificial Sequence
  MKO10091252_B_Hdac10
  gRNA
gtgcagcccccgctgccagc

SEQ ID NO: 91253 - DNA, 20 bp, Artificial Sequence
  MKO10091253_B_Hdac10
  gRNA
agcgggggctgcactgcagc

SEQ ID NO: 91254 - DNA, 20 bp, Artificial Sequence
  MKO10091254_B_Hdac11
  gRNA
ccagcactcaccaacattga

SEQ ID NO: 91255 - DNA, 20 bp, Artificial Sequence
  MKO10091255_B_Hdac11
  gRNA
aaggtgatcaacttcctgaa

SEQ ID NO: 91256 - DNA, 20 bp, Artificial Sequence
  MKO10091256_B_Hdac11
  gRNA
aggcccctgcggacccagac

SEQ ID NO: 91257 - DNA, 20 bp, Artificial Sequence
  MKO10091257_B_Hdac1
  gRNA
aggcatactttagcagttcc

SEQ ID NO: 91258 - DNA, 20 bp, Artificial Sequence
  MKO10091258_B_Hdac1
  gRNA
gatgttggaaactactatta

SEQ ID NO: 91259 - DNA, 20 bp, Artificial Sequence
  MKO10091259_B_Hdac1
  gRNA
cacaatttgctgctcaacta

SEQ ID NO: 91260 - DNA, 20 bp, Artificial Sequence
  MKO10091260_B_Hdac2
  gRNA
acttgatatactcatcgctg

SEQ ID NO: 91261 - DNA, 20 bp, Artificial Sequence
  MKO10091261_B_Hdac2
  gRNA
taacttacttaagtaattcg

SEQ ID NO: 91262 - DNA, 20 bp, Artificial Sequence
  MKO10091262_B_Hdac2
  gRNA
ccatgaagcctcatagaatc

SEQ ID NO: 91263 - DNA, 20 bp, Artificial Sequence
  MKO10091263_B_Hdac3
  gRNA
agtcagccccaccaatatgc

SEQ ID NO: 91264 - DNA, 20 bp, Artificial Sequence
  MKO10091264_B_Hdac3
  gRNA
cccaatgaaacctcatcgcc

SEQ ID NO: 91265 - DNA, 20 bp, Artificial Sequence
  MKO10091265_B_Hdac3
  gRNA
catagcctagtcctgcatta

SEQ ID NO: 91266 - DNA, 20 bp, Artificial Sequence
  MKO10091266_B_Hdac4
  gRNA
ctgcaatgagtatctgccgc

SEQ ID NO: 91267 - DNA, 20 bp, Artificial Sequence
  MKO10091267_B_Hdac4
  gRNA
agcaccagcggaaactggag

SEQ ID NO: 91268 - DNA, 20 bp, Artificial Sequence
  MKO10091268_B_Hdac4
  gRNA
gctgcagcagctcaagaaca

SEQ ID NO: 91269 - DNA, 20 bp, Artificial Sequence
  MKO10091269_B_Hdac5
  gRNA
agtccgtggcaggatttcca

SEQ ID NO: 91270 - DNA, 20 bp, Artificial Sequence
  MKO10091270_B_Hdac5
  gRNA
gctgctcatcctgcgcaaca

SEQ ID NO: 91271 - DNA, 20 bp, Artificial Sequence
  MKO10091271_B_Hdac5
  gRNA
tggcgtgggctcctttgact

SEQ ID NO: 91272 - DNA, 20 bp, Artificial Sequence
  MKO10091272_B_Hdac6
  gRNA
gcccttgaagccccacaact

SEQ ID NO: 91273 - DNA, 20 bp, Artificial Sequence
  MKO10091273_B_Hdac6
  gRNA
gggccgctgtgtgtcctttc

SEQ ID NO: 91274 - DNA, 20 bp, Artificial Sequence
  MKO10091274_B_Hdac6
  gRNA
gctcctccttctcagcgaac

SEQ ID NO: 91275 - DNA, 20 bp, Artificial Sequence
  MKO10091275_B_Hdac7
  gRNA
cactttcccttgcgtaaaac

SEQ ID NO: 91276 - DNA, 20 bp, Artificial Sequence
  MKO10091276_B_Hdac7
  gRNA
ctccatggacccaccaatgc

SEQ ID NO: 91277 - DNA, 20 bp, Artificial Sequence
  MKO10091277_B_Hdac7
  gRNA
gcagccccagtattccctac

SEQ ID NO: 91278 - DNA, 20 bp, Artificial Sequence
  MKO10091278_B_Hdac8
  gRNA
cttacctagtccatattcta

SEQ ID NO: 91279 - DNA, 20 bp, Artificial Sequence
  MKO10091279_B_Hdac8
  gRNA
agtgtaaagtagccatcaac

SEQ ID NO: 91280 - DNA, 20 bp, Artificial Sequence
  MKO10091280_B_Hdac8
  gRNA
gatggtcctcatcaccttct

SEQ ID NO: 91281 - DNA, 20 bp, Artificial Sequence
  MKO10091281_B_Hdac9
  gRNA
agcagcacgagaatttgaca

SEQ ID NO: 91282 - DNA, 20 bp, Artificial Sequence
  MKO10091282_B_Hdac9
  gRNA
cacggaatgattctttccat

SEQ ID NO: 91283 - DNA, 20 bp, Artificial Sequence
  MKO10091283_B_Hdac9
  gRNA
tccttgctatcttgagctcc

SEQ ID NO: 91284 - DNA, 20 bp, Artificial Sequence
  MKO10091284_B_Hdc
  gRNA
attgaacgagtcatcatgcc

SEQ ID NO: 91285 - DNA, 20 bp, Artificial Sequence
  MKO10091285_B_Hdc
  gRNA
cggccagcatgtctcctagc

SEQ ID NO: 91286 - DNA, 20 bp, Artificial Sequence
  MKO10091286_B_Hdc
  gRNA
cgtgaatcctaagcagttaa

SEQ ID NO: 91287 - DNA, 20 bp, Artificial Sequence
  MKO10091287_B_Hddc2
  gRNA
ctgtatacccagccagtccg

SEQ ID NO: 91288 - DNA, 20 bp, Artificial Sequence
  MKO10091288_B_Hddc2
  gRNA
agccaaattcgtgaagcagc

SEQ ID NO: 91289 - DNA, 20 bp, Artificial Sequence
  MKO10091289_B_Hddc2
  gRNA
ccagtgtgaaatgatccttc

SEQ ID NO: 91290 - DNA, 20 bp, Artificial Sequence
  MKO10091290_B_Hddc3
  gRNA
ggcactaaagcagctgttcg

SEQ ID NO: 91291 - DNA, 20 bp, Artificial Sequence
  MKO10091291_B_Hddc3
  gRNA
gtacttcgagtgggcagccc

SEQ ID NO: 91292 - DNA, 20 bp, Artificial Sequence
  MKO10091292_B_Hddc3
  gRNA
caccagcgcaatgggctcgg

SEQ ID NO: 91293 - DNA, 20 bp, Artificial Sequence
  MKO10091293_B_Hdgfl1
  gRNA
tcagcctcgcgctcttcagc

SEQ ID NO: 91294 - DNA, 20 bp, Artificial Sequence
  MKO10091294_B_Hdgfl1
  gRNA
ggaggcggctcctggtgcgt

SEQ ID NO: 91295 - DNA, 20 bp, Artificial Sequence
  MKO10091295_B_Hdgfl1
  gRNA
gctcctccacggcgtccagc

SEQ ID NO: 91296 - DNA, 20 bp, Artificial Sequence
  MKO10091296_B_Hdgfrp2
  gRNA
ccacgtcgctgccacaaccc

SEQ ID NO: 91297 - DNA, 20 bp, Artificial Sequence
  MKO10091297_B_Hdgfrp2
  gRNA
gcggaagacaccagtcttga

SEQ ID NO: 91298 - DNA, 20 bp, Artificial Sequence
  MKO10091298_B_Hdgfrp2
  gRNA
cagtgtgtccccatcagaag

SEQ ID NO: 91299 - DNA, 20 bp, Artificial Sequence
  MKO10091299_B_Hdgfrp3
  gRNA
agaagtcttctaaacagtcc

SEQ ID NO: 91300 - DNA, 20 bp, Artificial Sequence
  MKO10091300_B_Hdgfrp3
  gRNA
atagattgatgaactcccag

SEQ ID NO: 91301 - DNA, 20 bp, Artificial Sequence
  MKO10091301_B_Hdgfrp3
  gRNA
aatccaggagtgaaatttac

SEQ ID NO: 91302 - DNA, 20 bp, Artificial Sequence
  MKO10091302_B_Hdgf
  gRNA
tgagaggcccctgcctgtag

SEQ ID NO: 91303 - DNA, 20 bp, Artificial Sequence
  MKO10091303_B_Hdgf
  gRNA
ggtggagcccgaagcccatg

SEQ ID NO: 91304 - DNA, 20 bp, Artificial Sequence
  MKO10091304_B_Hdgf
  gRNA
tctcatgatctctgacgccc

SEQ ID NO: 91305 - DNA, 20 bp, Artificial Sequence
  MKO10091305_B_Hdhd1a
  gRNA
ccttcacccttattccgtaa

SEQ ID NO: 91306 - DNA, 20 bp, Artificial Sequence
  MKO10091306_B_Hdhd1a
  gRNA
acagttcaggcttgaagtcg

SEQ ID NO: 91307 - DNA, 20 bp, Artificial Sequence
  MKO10091307_B_Hdhd1a
  gRNA
gatcatcccccagaacgatg

SEQ ID NO: 91308 - DNA, 20 bp, Artificial Sequence
  MKO10091308_B_Hdhd2
  gRNA
cgcgcactgcctgagttcac

SEQ ID NO: 91309 - DNA, 20 bp, Artificial Sequence
  MKO10091309_B_Hdhd2
  gRNA
ttaagagcttcctgtgcgcc

SEQ ID NO: 91310 - DNA, 20 bp, Artificial Sequence
  MKO10091310_B_Hdhd2
  gRNA
caacgctgtggtcattggac

SEQ ID NO: 91311 - DNA, 20 bp, Artificial Sequence
  MKO10091311_B_Hdhd3
  gRNA
agaggtaactatcccccacg

SEQ ID NO: 91312 - DNA, 20 bp, Artificial Sequence
  MKO10091312_B_Hdhd3
  gRNA
ccagcttcagaccccgctta

SEQ ID NO: 91313 - DNA, 20 bp, Artificial Sequence
  MKO10091313_B_Hdhd3
  gRNA
aaaatccgtgggtcgggttt

SEQ ID NO: 91314 - DNA, 20 bp, Artificial Sequence
  MKO10091314_B_Hdlbp
  gRNA
cgtacagaaatcgtcttcac

SEQ ID NO: 91315 - DNA, 20 bp, Artificial Sequence
  MKO10091315_B_Hdlbp
  gRNA
gggccggatcttgttactcc

SEQ ID NO: 91316 - DNA, 20 bp, Artificial Sequence
  MKO10091316_B_Hdlbp
  gRNA
tcgcattaagaagatttatg

SEQ ID NO: 91317 - DNA, 20 bp, Artificial Sequence
  MKO10091317_B_Hdx
  gRNA
ttgtccgaagcaagctctca

SEQ ID NO: 91318 - DNA, 20 bp, Artificial Sequence
  MKO10091318_B_Hdx
  gRNA
actagatgctgtatgcaatg

SEQ ID NO: 91319 - DNA, 20 bp, Artificial Sequence
  MKO10091319_B_Hdx
  gRNA
atgtcgactgtgaaatagtt

SEQ ID NO: 91320 - DNA, 20 bp, Artificial Sequence
  MKO10091320_B_Heatr1
  gRNA
gcacaaatacccgtgtctca

SEQ ID NO: 91321 - DNA, 20 bp, Artificial Sequence
  MKO10091321_B_Heatr1
  gRNA
cctagtgacgagatctgtga

SEQ ID NO: 91322 - DNA, 20 bp, Artificial Sequence
  MKO10091322_B_Heatr1
  gRNA
cattccagacacttctgcgc

SEQ ID NO: 91323 - DNA, 20 bp, Artificial Sequence
  MKO10091323_B_Heatr2
  gRNA
ctccctctagagagccgccc

SEQ ID NO: 91324 - DNA, 20 bp, Artificial Sequence
  MKO10091324_B_Heatr2
  gRNA
ctcaccgtgctcagggtagt

SEQ ID NO: 91325 - DNA, 20 bp, Artificial Sequence
  MKO10091325_B_Heatr2
  gRNA
cagccatcccccgaccaccg

SEQ ID NO: 91326 - DNA, 20 bp, Artificial Sequence
  MKO10091326_B_Heatr3
  gRNA
aaaggacatcatgacgcccc

SEQ ID NO: 91327 - DNA, 20 bp, Artificial Sequence
  MKO10091327_B_Heatr3
  gRNA
ttgtgttacagtacttacgt

SEQ ID NO: 91328 - DNA, 20 bp, Artificial Sequence
  MKO10091328_B_Heatr3
  gRNA
tgtagagagcatagccaatg

SEQ ID NO: 91329 - DNA, 20 bp, Artificial Sequence
  MKO10091329_B_Heatr5a
  gRNA
agtctgcagagtatactgac

SEQ ID NO: 91330 - DNA, 20 bp, Artificial Sequence
  MKO10091330_B_Heatr5a
  gRNA
ctttatgtggagcacagacg

SEQ ID NO: 91331 - DNA, 20 bp, Artificial Sequence
  MKO10091331_B_Heatr5a
  gRNA
cttctttgtaggaggacgtc

SEQ ID NO: 91332 - DNA, 20 bp, Artificial Sequence
  MKO10091332_B_Heatr5b
  gRNA
ctcgatccctcctgaccgac

SEQ ID NO: 91333 - DNA, 20 bp, Artificial Sequence
  MKO10091333_B_Heatr5b
  gRNA
cttgcagccctttatagcat

SEQ ID NO: 91334 - DNA, 20 bp, Artificial Sequence
  MKO10091334_B_Heatr5b
  gRNA
aagtatccccaatgctataa

SEQ ID NO: 91335 - DNA, 20 bp, Artificial Sequence
  MKO10091335_B_Heatr6
  gRNA
tcttgtgcgagcttgtcagc

SEQ ID NO: 91336 - DNA, 20 bp, Artificial Sequence
  MKO10091336_B_Heatr6
  gRNA
ccactcttgcccagcaagtc

SEQ ID NO: 91337 - DNA, 20 bp, Artificial Sequence
  MKO10091337_B_Heatr6
  gRNA
gtcaacaggaaatctaagtt

SEQ ID NO: 91338 - DNA, 20 bp, Artificial Sequence
  MKO10091338_B_Hebp1
  gRNA
tcacaagccagacctcgtta

SEQ ID NO: 91339 - DNA, 20 bp, Artificial Sequence
  MKO10091339_B_Hebp1
  gRNA
taacgaggtctggcttgtga

SEQ ID NO: 91340 - DNA, 20 bp, Artificial Sequence
  MKO10091340_B_Hebp1
  gRNA
agggggcaagtttgctactg

SEQ ID NO: 91341 - DNA, 20 bp, Artificial Sequence
  MKO10091341_B_Hebp2
  gRNA
ctgagccctcggccaccccg

SEQ ID NO: 91342 - DNA, 20 bp, Artificial Sequence
  MKO10091342_B_Hebp2
  gRNA
gccagacctcggggtggccg

SEQ ID NO: 91343 - DNA, 20 bp, Artificial Sequence
  MKO10091343_B_Hebp2
  gRNA
cgttatttctatcaagtaat

SEQ ID NO: 91344 - DNA, 20 bp, Artificial Sequence
  MKO10091344_B_Heca
  gRNA
catgtatacctacgacatcc

SEQ ID NO: 91345 - DNA, 20 bp, Artificial Sequence
  MKO10091345_B_Heca
  gRNA
gcggcgtcgcccggcgcggt

SEQ ID NO: 91346 - DNA, 20 bp, Artificial Sequence
  MKO10091346_B_Heca
  gRNA
catcgtcttccatccgaaca

SEQ ID NO: 91347 - DNA, 20 bp, Artificial Sequence
  MKO10091347_B_Hectd1
  gRNA
tacagtctataagctgccga

SEQ ID NO: 91348 - DNA, 20 bp, Artificial Sequence
  MKO10091348_B_Hectd1
  gRNA
ctcatagatgcgattgacac

SEQ ID NO: 91349 - DNA, 20 bp, Artificial Sequence
  MKO10091349_B_Hectd1
  gRNA
ccgtgccataacatactacc

SEQ ID NO: 91350 - DNA, 20 bp, Artificial Sequence
  MKO10091350_B_Hectd2
  gRNA
ggcgggaccttcacttcaga

SEQ ID NO: 91351 - DNA, 20 bp, Artificial Sequence
  MKO10091351_B_Hectd2
  gRNA
tgtctttagggcttggacag

SEQ ID NO: 91352 - DNA, 20 bp, Artificial Sequence
  MKO10091352_B_Hectd2
  gRNA
ctcgactgtcacccagaaga

SEQ ID NO: 91353 - DNA, 20 bp, Artificial Sequence
  MKO10091353_B_Hectd3
  gRNA
ttagctatgtgcccccaaca

SEQ ID NO: 91354 - DNA, 20 bp, Artificial Sequence
  MKO10091354_B_Hectd3
  gRNA
ggatcccaggcgatgtgaat

SEQ ID NO: 91355 - DNA, 20 bp, Artificial Sequence
  MKO10091355_B_Hectd3
  gRNA
tatctgcgttgctatctgtc

SEQ ID NO: 91356 - DNA, 20 bp, Artificial Sequence
  MKO10091356_B_Hecw1
  gRNA
tataagaaccgtggagtcaa

SEQ ID NO: 91357 - DNA, 20 bp, Artificial Sequence
  MKO10091357_B_Hecw1
  gRNA
gggagaagctgatcagcctc

SEQ ID NO: 91358 - DNA, 20 bp, Artificial Sequence
  MKO10091358_B_Hecw1
  gRNA
acattccacaaagtaagagc

SEQ ID NO: 91359 - DNA, 20 bp, Artificial Sequence
  MKO10091359_B_Hecw2
  gRNA
gttcttcacggtaatacagg

SEQ ID NO: 91360 - DNA, 20 bp, Artificial Sequence
  MKO10091360_B_Hecw2
  gRNA
gcagggctccactaatacca

SEQ ID NO: 91361 - DNA, 20 bp, Artificial Sequence
  MKO10091361_B_Hecw2
  gRNA
ctcgtcagcttcacattgtc

SEQ ID NO: 91362 - DNA, 20 bp, Artificial Sequence
  MKO10091362_B_Heg1
  gRNA
ggcgggttgctgcactcgag

SEQ ID NO: 91363 - DNA, 20 bp, Artificial Sequence
  MKO10091363_B_Heg1
  gRNA
cctgcgcgccccactccacg

SEQ ID NO: 91364 - DNA, 20 bp, Artificial Sequence
  MKO10091364_B_Heg1
  gRNA
actccgggccaccattctcc

SEQ ID NO: 91365 - DNA, 20 bp, Artificial Sequence
  MKO10091365_B_Helb
  gRNA
aaattcctgtatgcgctcag

SEQ ID NO: 91366 - DNA, 20 bp, Artificial Sequence
  MKO10091366_B_Helb
  gRNA
cttagcctctgagcgcatac

SEQ ID NO: 91367 - DNA, 20 bp, Artificial Sequence
  MKO10091367_B_Helb
  gRNA
attctccacggttcgagttc

SEQ ID NO: 91368 - DNA, 20 bp, Artificial Sequence
  MKO10091368_B_Hells
  gRNA
caagcaaatgctgaagtctg

SEQ ID NO: 91369 - DNA, 20 bp, Artificial Sequence
  MKO10091369_B_Hells
  gRNA
tgaatcttataatatttcag

SEQ ID NO: 91370 - DNA, 20 bp, Artificial Sequence
  MKO10091370_B_Hells
  gRNA
atagtcatgaaaaagaaaag

SEQ ID NO: 91371 - DNA, 20 bp, Artificial Sequence
  MKO10091371_B_Helq
  gRNA
tttcccgccactcgttggca

SEQ ID NO: 91372 - DNA, 20 bp, Artificial Sequence
  MKO10091372_B_Helq
  gRNA
tcaaacgaaagatcgcttcc

SEQ ID NO: 91373 - DNA, 20 bp, Artificial Sequence
  MKO10091373_B_Helq
  gRNA
atgccttgatcgaaaccagc

SEQ ID NO: 91374 - DNA, 20 bp, Artificial Sequence
  MKO10091374_B_Helt
  gRNA
caaacgttacctgtttcgcc

SEQ ID NO: 91375 - DNA, 20 bp, Artificial Sequence
  MKO10091375_B_Helt
  gRNA
tttgcagagttccgggaaac

SEQ ID NO: 91376 - DNA, 20 bp, Artificial Sequence
  MKO10091376_B_Helt
  gRNA
cgcacaccagaatgtctgac

SEQ ID NO: 91377 - DNA, 20 bp, Artificial Sequence
  MKO10091377_B_Helz2
  gRNA
ggtagattggacacccgagc

SEQ ID NO: 91378 - DNA, 20 bp, Artificial Sequence
  MKO10091378_B_Helz2
  gRNA
atacttctttgctgctgcgc

SEQ ID NO: 91379 - DNA, 20 bp, Artificial Sequence
  MKO10091379_B_Helz2
  gRNA
agacatggaactgcgagaac

SEQ ID NO: 91380 - DNA, 20 bp, Artificial Sequence
  MKO10091380_B_Helz
  gRNA
agactcccctgacagtgact

SEQ ID NO: 91381 - DNA, 20 bp, Artificial Sequence
  MKO10091381_B_Helz
  gRNA
ctgtgctgcatgcagctgaa

SEQ ID NO: 91382 - DNA, 20 bp, Artificial Sequence
  MKO10091382_B_Helz
  gRNA
gacacttctcacagaaacag

SEQ ID NO: 91383 - DNA, 20 bp, Artificial Sequence
  MKO10091383_B_Hemgn
  gRNA
atcgtggcaagatggacatg

SEQ ID NO: 91384 - DNA, 20 bp, Artificial Sequence
  MKO10091384_B_Hemgn
  gRNA
caggtctcttgagaaccttg

SEQ ID NO: 91385 - DNA, 20 bp, Artificial Sequence
  MKO10091385_B_Hemgn
  gRNA
attgtgatgtctgcctcccc

SEQ ID NO: 91386 - DNA, 20 bp, Artificial Sequence
  MKO10091386_B_Hemk1
  gRNA
tatgtggccgtagattacag

SEQ ID NO: 91387 - DNA, 20 bp, Artificial Sequence
  MKO10091387_B_Hemk1
  gRNA
gacagcctaccttggggagc

SEQ ID NO: 91388 - DNA, 20 bp, Artificial Sequence
  MKO10091388_B_Hemk1
  gRNA
gcagagtcgagttgttgctg

SEQ ID NO: 91389 - DNA, 20 bp, Artificial Sequence
  MKO10091389_B_Hemt1
  gRNA
tgttacttatgtagcactta

SEQ ID NO: 91390 - DNA, 20 bp, Artificial Sequence
  MKO10091390_B_Hemt1
  gRNA
atacttacatctaggctcaa

SEQ ID NO: 91391 - DNA, 20 bp, Artificial Sequence
  MKO10091391_B_Hemt1
  gRNA
cttcttcttgtcaattctca

SEQ ID NO: 91392 - DNA, 20 bp, Artificial Sequence
  MKO10091392_B_Henmt1
  gRNA
gagagagactcccgcttgct

SEQ ID NO: 91393 - DNA, 20 bp, Artificial Sequence
  MKO10091393_B_Henmt1
  gRNA
tgataccgttgtttgtataa

SEQ ID NO: 91394 - DNA, 20 bp, Artificial Sequence
  MKO10091394_B_Henmt1
  gRNA
gcgtccctcagggtgactgt

SEQ ID NO: 91395 - DNA, 20 bp, Artificial Sequence
  MKO10091395_B_Hepacam2
  gRNA
acagtcatcataacttccgt

SEQ ID NO: 91396 - DNA, 20 bp, Artificial Sequence
  MKO10091396_B_Hepacam2
  gRNA
gtcaaaccccgtcagtgaga

SEQ ID NO: 91397 - DNA, 20 bp, Artificial Sequence
  MKO10091397_B_Hepacam2
  gRNA
caatccaaagggtgttgttt

SEQ ID NO: 91398 - DNA, 20 bp, Artificial Sequence
  MKO10091398_B_Hepacam
  gRNA
ggagcattcgggagtcattg

SEQ ID NO: 91399 - DNA, 20 bp, Artificial Sequence
  MKO10091399_B_Hepacam
  gRNA
gatgaccgcctaaaatcaga

SEQ ID NO: 91400 - DNA, 20 bp, Artificial Sequence
  MKO10091400_B_Hepacam
  gRNA
ctctatatcatcttgtctac

SEQ ID NO: 91401 - DNA, 20 bp, Artificial Sequence
  MKO10091401_B_Hephl1
  gRNA
tgggctaattggccccctgc

SEQ ID NO: 91402 - DNA, 20 bp, Artificial Sequence
  MKO10091402_B_Hephl1
  gRNA
cagacttgcgaccttatttc

SEQ ID NO: 91403 - DNA, 20 bp, Artificial Sequence
  MKO10091403_B_Hephl1
  gRNA
cctgagcctgagatgtgcgt

SEQ ID NO: 91404 - DNA, 20 bp, Artificial Sequence
  MKO10091404_B_Heph
  gRNA
gtaggctcactatacccaga

SEQ ID NO: 91405 - DNA, 20 bp, Artificial Sequence
  MKO10091405_B_Heph
  gRNA
gctccaagagacattgcaac

SEQ ID NO: 91406 - DNA, 20 bp, Artificial Sequence
  MKO10091406_B_Heph
  gRNA
ttctcataaaaaacaccgtg

SEQ ID NO: 91407 - DNA, 20 bp, Artificial Sequence
  MKO10091407_B_Herc1
  gRNA
gtagtagtttgtgtatcagc

SEQ ID NO: 91408 - DNA, 20 bp, Artificial Sequence
  MKO10091408_B_Herc1
  gRNA
tcaccagtctgaatgctatc

SEQ ID NO: 91409 - DNA, 20 bp, Artificial Sequence
  MKO10091409_B_Herc1
  gRNA
aagccttcagatgttctagt

SEQ ID NO: 91410 - DNA, 20 bp, Artificial Sequence
  MKO10091410_B_Herc2
  gRNA
attgacttggctctatacac

SEQ ID NO: 91411 - DNA, 20 bp, Artificial Sequence
  MKO10091411_B_Herc2
  gRNA
agagtgtagtggtagctgac

SEQ ID NO: 91412 - DNA, 20 bp, Artificial Sequence
  MKO10091412_B_Herc2
  gRNA
ctgtggtctgtggaacgaaa

SEQ ID NO: 91413 - DNA, 20 bp, Artificial Sequence
  MKO10091413_B_Herc3
  gRNA
tgatcagcatatcatacacg

SEQ ID NO: 91414 - DNA, 20 bp, Artificial Sequence
  MKO10091414_B_Herc3
  gRNA
aaacagctcccgagagagac

SEQ ID NO: 91415 - DNA, 20 bp, Artificial Sequence
  MKO10091415_B_Herc3
  gRNA
aaacttgtaatatggtctgc

SEQ ID NO: 91416 - DNA, 20 bp, Artificial Sequence
  MKO10091416_B_Herc4
  gRNA
ccattcatgcaagtcgcagc

SEQ ID NO: 91417 - DNA, 20 bp, Artificial Sequence
  MKO10091417_B_Herc4
  gRNA
ggatggggacgtaacaaatt

SEQ ID NO: 91418 - DNA, 20 bp, Artificial Sequence
  MKO10091418_B_Herc4
  gRNA
cacacgcaacctgtactatc

SEQ ID NO: 91419 - DNA, 20 bp, Artificial Sequence
  MKO10091419_B_Herc6
  gRNA
cactctttggccttatcaga

SEQ ID NO: 91420 - DNA, 20 bp, Artificial Sequence
  MKO10091420_B_Herc6
  gRNA
agccggttctgaagggcagc

SEQ ID NO: 91421 - DNA, 20 bp, Artificial Sequence
  MKO10091421_B_Herc6
  gRNA
caaagagtggtagtgtccac

SEQ ID NO: 91422 - DNA, 20 bp, Artificial Sequence
  MKO10091422_B_Herpud1
  gRNA
actgccttgcatagatctgc

SEQ ID NO: 91423 - DNA, 20 bp, Artificial Sequence
  MKO10091423_B_Herpud1
  gRNA
atcagcgtccagaggaccag

SEQ ID NO: 91424 - DNA, 20 bp, Artificial Sequence
  MKO10091424_B_Herpud1
  gRNA
catacctttgtgctggtttc

SEQ ID NO: 91425 - DNA, 20 bp, Artificial Sequence
  MKO10091425_B_Herpud2
  gRNA
tgcttcgtgacttcctctat

SEQ ID NO: 91426 - DNA, 20 bp, Artificial Sequence
  MKO10091426_B_Herpud2
  gRNA
tgccagaatacaccaacctc

SEQ ID NO: 91427 - DNA, 20 bp, Artificial Sequence
  MKO10091427_B_Herpud2
  gRNA
gcacaccttgcccaggaaac

SEQ ID NO: 91428 - DNA, 20 bp, Artificial Sequence
  MKO10091428_B_Hes1
  gRNA
ctgcagcgggcgcagatgac

SEQ ID NO: 91429 - DNA, 20 bp, Artificial Sequence
  MKO10091429_B_Hes1
  gRNA
gtccggtgtcgtgttgacac

SEQ ID NO: 91430 - DNA, 20 bp, Artificial Sequence
  MKO10091430_B_Hes1
  gRNA
agccagtgtcaacacgacac

SEQ ID NO: 91431 - DNA, 20 bp, Artificial Sequence
  MKO10091431_B_Hes2
  gRNA
ccgagcctgtctggcgcgac

SEQ ID NO: 91432 - DNA, 20 bp, Artificial Sequence
  MKO10091432_B_Hes2
  gRNA
gcagaacctaaagccgctgc

SEQ ID NO: 91433 - DNA, 20 bp, Artificial Sequence
  MKO10091433_B_Hes2
  gRNA
aatgactgtgcgcttcctac

SEQ ID NO: 91434 - DNA, 20 bp, Artificial Sequence
  MKO10091434_B_Hes3
  gRNA
gtgacacgttgatgcgtgca

SEQ ID NO: 91435 - DNA, 20 bp, Artificial Sequence
  MKO10091435_B_Hes3
  gRNA
cactaccttgcagtgagttc

SEQ ID NO: 91436 - DNA, 20 bp, Artificial Sequence
  MKO10091436_B_Hes3
  gRNA
tgtacttaacactcagctcc

SEQ ID NO: 91437 - DNA, 20 bp, Artificial Sequence
  MKO10091437_B_Hes5
  gRNA
aggcatggccccaagtaccg

SEQ ID NO: 91438 - DNA, 20 bp, Artificial Sequence
  MKO10091438_B_Hes5
  gRNA
cgacgcatcttctccaccac

SEQ ID NO: 91439 - DNA, 20 bp, Artificial Sequence
  MKO10091439_B_Hes5
  gRNA
actgagcatctccaccgcca

SEQ ID NO: 91440 - DNA, 20 bp, Artificial Sequence
  MKO10091440_B_Hes6
  gRNA
gcaagcgagcgcttcgctgc

SEQ ID NO: 91441 - DNA, 20 bp, Artificial Sequence
  MKO10091441_B_Hes6
  gRNA
aacctcggcgttctctagct

SEQ ID NO: 91442 - DNA, 20 bp, Artificial Sequence
  MKO10091442_B_Hes6
  gRNA
gtagaccatggctccgtccc

SEQ ID NO: 91443 - DNA, 20 bp, Artificial Sequence
  MKO10091443_B_Hes7
  gRNA
ccctattctcagctcgctcc

SEQ ID NO: 91444 - DNA, 20 bp, Artificial Sequence
  MKO10091444_B_Hes7
  gRNA
cggcgccgcttctccaccaa

SEQ ID NO: 91445 - DNA, 20 bp, Artificial Sequence
  MKO10091445_B_Hes7
  gRNA
gctacttgagggagcgaagc

SEQ ID NO: 91446 - DNA, 20 bp, Artificial Sequence
  MKO10091446_B_Hesx1
  gRNA
cagcatacctgagtcaccgc

SEQ ID NO: 91447 - DNA, 20 bp, Artificial Sequence
  MKO10091447_B_Hesx1
  gRNA
ctgagcaccttcccgaaggc

SEQ ID NO: 91448 - DNA, 20 bp, Artificial Sequence
  MKO10091448_B_Hesx1
  gRNA
atcgccgagcaaagatgaaa

SEQ ID NO: 91449 - DNA, 20 bp, Artificial Sequence
  MKO10091449_B_Hexa
  gRNA
agactttcagtcagcttgtt

SEQ ID NO: 91450 - DNA, 20 bp, Artificial Sequence
  MKO10091450_B_Hexa
  gRNA
tactcgcctctgagactgtc

SEQ ID NO: 91451 - DNA, 20 bp, Artificial Sequence
  MKO10091451_B_Hexa
  gRNA
agcgccccagacagtctcag

SEQ ID NO: 91452 - DNA, 20 bp, Artificial Sequence
  MKO10091452_B_Hexb
  gRNA
aggactcgcactctgactcg

SEQ ID NO: 91453 - DNA, 20 bp, Artificial Sequence
  MKO10091453_B_Hexb
  gRNA
ttacagtcccgaaagagtct

SEQ ID NO: 91454 - DNA, 20 bp, Artificial Sequence
  MKO10091454_B_Hexb
  gRNA
ttagtttaccaagactcttt

SEQ ID NO: 91455 - DNA, 20 bp, Artificial Sequence
  MKO10091455_B_Hexdc
  gRNA
tgagggccaagcatgcatac

SEQ ID NO: 91456 - DNA, 20 bp, Artificial Sequence
  MKO10091456_B_Hexdc
  gRNA
agggggaaacctcaaaacag

SEQ ID NO: 91457 - DNA, 20 bp, Artificial Sequence
  MKO10091457_B_Hexdc
  gRNA
atccctcaggaacagctaaa

SEQ ID NO: 91458 - DNA, 20 bp, Artificial Sequence
  MKO10091458_B_Hexim1
  gRNA
tcgagccgagatgttcgcca

SEQ ID NO: 91459 - DNA, 20 bp, Artificial Sequence
  MKO10091459_B_Hexim1
  gRNA
gtggtgttatagggcgcaac

SEQ ID NO: 91460 - DNA, 20 bp, Artificial Sequence
  MKO10091460_B_Hexim1
  gRNA
atcggctctccctccgccga

SEQ ID NO: 91461 - DNA, 20 bp, Artificial Sequence
  MKO10091461_B_Hexim2
  gRNA
cacagcgtcaccagctgctc

SEQ ID NO: 91462 - DNA, 20 bp, Artificial Sequence
  MKO10091462_B_Hexim2
  gRNA
cccgaaagaagcaccgtagg

SEQ ID NO: 91463 - DNA, 20 bp, Artificial Sequence
  MKO10091463_B_Hexim2
  gRNA
agggcccgtgaagcacatcg

SEQ ID NO: 91464 - DNA, 20 bp, Artificial Sequence
  MKO10091464_B_Hey1
  gRNA
aaaacctgggacgatgtcgt

SEQ ID NO: 91465 - DNA, 20 bp, Artificial Sequence
  MKO10091465_B_Hey1
  gRNA
acagtttgtctgagctgaga

SEQ ID NO: 91466 - DNA, 20 bp, Artificial Sequence
  MKO10091466_B_Hey1
  gRNA
ttccattacctgcttctcaa

SEQ ID NO: 91467 - DNA, 20 bp, Artificial Sequence
  MKO10091467_B_Hey2
  gRNA
gggatctgccaagttagaaa

SEQ ID NO: 91468 - DNA, 20 bp, Artificial Sequence
  MKO10091468_B_Hey2
  gRNA
gacaactacctctcagatta

SEQ ID NO: 91469 - DNA, 20 bp, Artificial Sequence
  MKO10091469_B_Hey2
  gRNA
ttgaagatgctccaggctac

SEQ ID NO: 91470 - DNA, 20 bp, Artificial Sequence
  MKO10091470_B_Heyl
  gRNA
cggaatttgttgcccagccg

SEQ ID NO: 91471 - DNA, 20 bp, Artificial Sequence
  MKO10091471_B_Heyl
  gRNA
gcccttcgcagatgcaagcc

SEQ ID NO: 91472 - DNA, 20 bp, Artificial Sequence
  MKO10091472_B_Heyl
  gRNA
tcacccctctgcgcttcttc

SEQ ID NO: 91473 - DNA, 20 bp, Artificial Sequence
  MKO10091473_B_Hfe2
  gRNA
cgctcagagcgcaaccgccg

SEQ ID NO: 91474 - DNA, 20 bp, Artificial Sequence
  MKO10091474_B_Hfe2
  gRNA
agggctgccgtggggggacc

SEQ ID NO: 91475 - DNA, 20 bp, Artificial Sequence
  MKO10091475_B_Hfe2
  gRNA
tgggccagtcccctagtccc

SEQ ID NO: 91476 - DNA, 20 bp, Artificial Sequence
  MKO10091476_B_Hfe
  gRNA
acggcgactctcatgattgt

SEQ ID NO: 91477 - DNA, 20 bp, Artificial Sequence
  MKO10091477_B_Hfe
  gRNA
tttagagcccttgcaatctc

SEQ ID NO: 91478 - DNA, 20 bp, Artificial Sequence
  MKO10091478_B_Hfe
  gRNA
tttatttccagtcacgaagt

SEQ ID NO: 91479 - DNA, 20 bp, Artificial Sequence
  MKO10091479_B_Hfm1
  gRNA
tctcagcctcatgatattca

SEQ ID NO: 91480 - DNA, 20 bp, Artificial Sequence
  MKO10091480_B_Hfm1
  gRNA
aaattaccttgaatatcatg

SEQ ID NO: 91481 - DNA, 20 bp, Artificial Sequence
  MKO10091481_B_Hfm1
  gRNA
atttctgaaatcagtggagc

SEQ ID NO: 91482 - DNA, 20 bp, Artificial Sequence
  MKO10091482_B_Hgd
  gRNA
ccgagagctgctcagcgtag

SEQ ID NO: 91483 - DNA, 20 bp, Artificial Sequence
  MKO10091483_B_Hgd
  gRNA
actttcttctcagacgcttt

SEQ ID NO: 91484 - DNA, 20 bp, Artificial Sequence
  MKO10091484_B_Hgd
  gRNA
tcagaggatcctcgctgtcc

SEQ ID NO: 91485 - DNA, 20 bp, Artificial Sequence
  MKO10091485_B_Hgfac
  gRNA
tccacagtgctcaccgagtc

SEQ ID NO: 91486 - DNA, 20 bp, Artificial Sequence
  MKO10091486_B_Hgfac
  gRNA
cccacgatccctgtgatctc

SEQ ID NO: 91487 - DNA, 20 bp, Artificial Sequence
  MKO10091487_B_Hgfac
  gRNA
tgttccagtacacatgacca

SEQ ID NO: 91488 - DNA, 20 bp, Artificial Sequence
  MKO10091488_B_Hgf
  gRNA
ccacttgacatactattgaa

SEQ ID NO: 91489 - DNA, 20 bp, Artificial Sequence
  MKO10091489_B_Hgf
  gRNA
ggatcatggaattccaaggc

SEQ ID NO: 91490 - DNA, 20 bp, Artificial Sequence
  MKO10091490_B_Hgf
  gRNA
tttgatgccactcttagtga

SEQ ID NO: 91491 - DNA, 20 bp, Artificial Sequence
  MKO10091491_B_Hgsnat
  gRNA
tcacgaaggttactgtccac

SEQ ID NO: 91492 - DNA, 20 bp, Artificial Sequence
  MKO10091492_B_Hgsnat
  gRNA
gtgagcatcgcattccttgt

SEQ ID NO: 91493 - DNA, 20 bp, Artificial Sequence
  MKO10091493_B_Hgsnat
  gRNA
catcgtcaatgagaatccag

SEQ ID NO: 91494 - DNA, 20 bp, Artificial Sequence
  MKO10091494_B_Hgs
  gRNA
ggcaagtggaagttaatgtt

SEQ ID NO: 91495 - DNA, 20 bp, Artificial Sequence
  MKO10091495_B_Hgs
  gRNA
caggtcgcagatctgtagaa

SEQ ID NO: 91496 - DNA, 20 bp, Artificial Sequence
  MKO10091496_B_Hgs
  gRNA
agagcatacaaagccacgtg

SEQ ID NO: 91497 - DNA, 20 bp, Artificial Sequence
  MKO10091497_B_Hhatl
  gRNA
gtttgccaaactctgcacga

SEQ ID NO: 91498 - DNA, 20 bp, Artificial Sequence
  MKO10091498_B_Hhatl
  gRNA
ggccagcttggcgtccttca

SEQ ID NO: 91499 - DNA, 20 bp, Artificial Sequence
  MKO10091499_B_Hhatl
  gRNA
gacaatgacatttcggaagt

SEQ ID NO: 91500 - DNA, 20 bp, Artificial Sequence
  MKO10091500_B_Hhat
  gRNA
caacctactccatctgcgca

SEQ ID NO: 91501 - DNA, 20 bp, Artificial Sequence
  MKO10091501_B_Hhat
  gRNA
taccttctttgtgagtaacg

SEQ ID NO: 91502 - DNA, 20 bp, Artificial Sequence
  MKO10091502_B_Hhat
  gRNA
actggatcaagaatttgagc

SEQ ID NO: 91503 - DNA, 20 bp, Artificial Sequence
  MKO10091503_B_Hhex
  gRNA
caacgaccagaccgtcgagc

SEQ ID NO: 91504 - DNA, 20 bp, Artificial Sequence
  MKO10091504_B_Hhex
  gRNA
acactgcgaacgatccaaag

SEQ ID NO: 91505 - DNA, 20 bp, Artificial Sequence
  MKO10091505_B_Hhex
  gRNA
ccccgactcggagatctcag

SEQ ID NO: 91506 - DNA, 20 bp, Artificial Sequence
  MKO10091506_B_Hhipl1
  gRNA
cgagaacctcaactcgaacc

SEQ ID NO: 91507 - DNA, 20 bp, Artificial Sequence
  MKO10091507_B_Hhipl1
  gRNA
cccccattgtgattggaagc

SEQ ID NO: 91508 - DNA, 20 bp, Artificial Sequence
  MKO10091508_B_Hhipl1
  gRNA
tttcgcctacccacacaagc

SEQ ID NO: 91509 - DNA, 20 bp, Artificial Sequence
  MKO10091509_B_Hhipl2
  gRNA
cgatcaactcaaccgcaacc

SEQ ID NO: 91510 - DNA, 20 bp, Artificial Sequence
  MKO10091510_B_Hhipl2
  gRNA
agcatttccgaacttgccaa

SEQ ID NO: 91511 - DNA, 20 bp, Artificial Sequence
  MKO10091511_B_Hhipl2
  gRNA
tgtgaatcccccaatctcaa

SEQ ID NO: 91512 - DNA, 20 bp, Artificial Sequence
  MKO10091512_B_Hhip
  gRNA
atctaactacttgggccaga

SEQ ID NO: 91513 - DNA, 20 bp, Artificial Sequence
  MKO10091513_B_Hhip
  gRNA
gaagtgctaggtccccatcc

SEQ ID NO: 91514 - DNA, 20 bp, Artificial Sequence
  MKO10091514_B_Hhip
  gRNA
ttcccgagaaagcaagtcag

SEQ ID NO: 91515 - DNA, 20 bp, Artificial Sequence
  MKO10091515_B_Hhla1
  gRNA
attgtagtgtctggtcttaa

SEQ ID NO: 91516 - DNA, 20 bp, Artificial Sequence
  MKO10091516_B_Hhla1
  gRNA
tgtacctgctgcatgaagaa

SEQ ID NO: 91517 - DNA, 20 bp, Artificial Sequence
  MKO10091517_B_Hhla1
  gRNA
gacagatccactgaccttgc

SEQ ID NO: 91518 - DNA, 20 bp, Artificial Sequence
  MKO10091518_B_Hiat1
  gRNA
cacgggctgatcttcatcag

SEQ ID NO: 91519 - DNA, 20 bp, Artificial Sequence
  MKO10091519_B_Hiat1
  gRNA
aaacatacatttctgatgaa

SEQ ID NO: 91520 - DNA, 20 bp, Artificial Sequence
  MKO10091520_B_Hiat1
  gRNA
atataactcaagagcatgaa

SEQ ID NO: 91521 - DNA, 20 bp, Artificial Sequence
  MKO10091521_B_Hiatl1
  gRNA
catgaaagaagtactgctta

SEQ ID NO: 91522 - DNA, 20 bp, Artificial Sequence
  MKO10091522_B_Hiatl1
  gRNA
cttgaatgagcccattcatg

SEQ ID NO: 91523 - DNA, 20 bp, Artificial Sequence
  MKO10091523_B_Hiatl1
  gRNA
ttgagtgaagtcagctacat

SEQ ID NO: 91524 - DNA, 20 bp, Artificial Sequence
  MKO10091524_B_Hibadh
  gRNA
cccagcagaagtagccgaaa

SEQ ID NO: 91525 - DNA, 20 bp, Artificial Sequence
  MKO10091525_B_Hibadh
  gRNA
aacacgtcatagaggatgag

SEQ ID NO: 91526 - DNA, 20 bp, Artificial Sequence
  MKO10091526_B_Hibadh
  gRNA
cagcacttaccaccggagac

SEQ ID NO: 91527 - DNA, 20 bp, Artificial Sequence
  MKO10091527_B_Hibch
  gRNA
cagcgttattctgcaacatc

SEQ ID NO: 91528 - DNA, 20 bp, Artificial Sequence
  MKO10091528_B_Hibch
  gRNA
tacatcttgaacaatgcaat

SEQ ID NO: 91529 - DNA, 20 bp, Artificial Sequence
  MKO10091529_B_Hibch
  gRNA
ggaggaaaggccttctgtgc

SEQ ID NO: 91530 - DNA, 20 bp, Artificial Sequence
  MKO10091530_B_Hic1
  gRNA
cgaaccggcagacgctgccg

SEQ ID NO: 91531 - DNA, 20 bp, Artificial Sequence
  MKO10091531_B_Hic1
  gRNA
cgtcgctgctccccgctttg

SEQ ID NO: 91532 - DNA, 20 bp, Artificial Sequence
  MKO10091532_B_Hic1
  gRNA
agcagctctcctagtccgcc

SEQ ID NO: 91533 - DNA, 20 bp, Artificial Sequence
  MKO10091533_B_Hic2
  gRNA
ctgctgctcacatggtttct

SEQ ID NO: 91534 - DNA, 20 bp, Artificial Sequence
  MKO10091534_B_Hic2
  gRNA
ggcgaccaacccgcagtcag

SEQ ID NO: 91535 - DNA, 20 bp, Artificial Sequence
  MKO10091535_B_Hic2
  gRNA
atacatagtgggcgccagta

SEQ ID NO: 91536 - DNA, 20 bp, Artificial Sequence
  MKO10091536_B_Hid1
  gRNA
cagctcaccggttcatgtca

SEQ ID NO: 91537 - DNA, 20 bp, Artificial Sequence
  MKO10091537_B_Hid1
  gRNA
gcagaagagcaaatcggcaa

SEQ ID NO: 91538 - DNA, 20 bp, Artificial Sequence
  MKO10091538_B_Hid1
  gRNA
agtgctgccttacatcttcg

SEQ ID NO: 91539 - DNA, 20 bp, Artificial Sequence
  MKO10091539_B_Hif1an
  gRNA
ctacaagctatacagcagcg

SEQ ID NO: 91540 - DNA, 20 bp, Artificial Sequence
  MKO10091540_B_Hif1an
  gRNA
cttccatgccaatgagcaac

SEQ ID NO: 91541 - DNA, 20 bp, Artificial Sequence
  MKO10091541_B_Hif1an
  gRNA
gcagacactcaatgacaccg

SEQ ID NO: 91542 - DNA, 20 bp, Artificial Sequence
  MKO10091542_B_Hif1a
  gRNA
caagatgtgagctcacattg

SEQ ID NO: 91543 - DNA, 20 bp, Artificial Sequence
  MKO10091543_B_Hif1a
  gRNA
tgtttgcagtttgaactaac

SEQ ID NO: 91544 - DNA, 20 bp, Artificial Sequence
  MKO10091544_B_Hif1a
  gRNA
gtgatggtgctaacagatga

SEQ ID NO: 91545 - DNA, 20 bp, Artificial Sequence
  MKO10091545_B_Hif3a
  gRNA
gcgcacgctcaacctcaaag

SEQ ID NO: 91546 - DNA, 20 bp, Artificial Sequence
  MKO10091546_B_Hif3a
  gRNA
tgggcactcactcggcctgg

SEQ ID NO: 91547 - DNA, 20 bp, Artificial Sequence
  MKO10091547_B_Hif3a
  gRNA
cgtcatggtactcaccgccg

SEQ ID NO: 91548 - DNA, 20 bp, Artificial Sequence
  MKO10091548_B_Higd1a
  gRNA
tttgcagcgattgttgccta

SEQ ID NO: 91549 - DNA, 20 bp, Artificial Sequence
  MKO10091549_B_Higd1a
  gRNA
tatgggctactccatgtatc

SEQ ID NO: 91550 - DNA, 20 bp, Artificial Sequence
  MKO10091550_B_Higd1a
  gRNA
caccagctcttctaaggctt

SEQ ID NO: 91551 - DNA, 20 bp, Artificial Sequence
  MKO10091551_B_Higd1b
  gRNA
tagaaccccgagccttcagc

SEQ ID NO: 91552 - DNA, 20 bp, Artificial Sequence
  MKO10091552_B_Higd1b
  gRNA
aggttgtcctcaccctcagg

SEQ ID NO: 91553 - DNA, 20 bp, Artificial Sequence
  MKO10091553_B_Higd1b
  gRNA
caggatcatgtctgctaaca

SEQ ID NO: 91554 - DNA, 20 bp, Artificial Sequence
  MKO10091554_B_Higd1c
  gRNA
gccagctgtcccgactcctc

SEQ ID NO: 91555 - DNA, 20 bp, Artificial Sequence
  MKO10091555_B_Higd1c
  gRNA
tgttctctactctatgtata

SEQ ID NO: 91556 - DNA, 20 bp, Artificial Sequence
  MKO10091556_B_Higd1c
  gRNA
tgccgcccaaggatgtgtgg

SEQ ID NO: 91557 - DNA, 20 bp, Artificial Sequence
  MKO10091557_B_Higd2a
  gRNA
tgccgctaaccccaacaaga

SEQ ID NO: 91558 - DNA, 20 bp, Artificial Sequence
  MKO10091558_B_Higd2a
  gRNA
ggcctttactgcttccaccg

SEQ ID NO: 91559 - DNA, 20 bp, Artificial Sequence
  MKO10091559_B_Higd2a
  gRNA
cacggtcgtagccatcttgt

SEQ ID NO: 91560 - DNA, 20 bp, Artificial Sequence
  MKO10091560_B_Hilpda
  gRNA
ctccatcactctaacaaaga

SEQ ID NO: 91561 - DNA, 20 bp, Artificial Sequence
  MKO10091561_B_Hilpda
  gRNA
gggaggttcactgcactcct

SEQ ID NO: 91562 - DNA, 20 bp, Artificial Sequence
  MKO10091562_B_Hilpda
  gRNA
ggatggtctggcaggccctt

SEQ ID NO: 91563 - DNA, 20 bp, Artificial Sequence
  MKO10091563_B_Hils1
  gRNA
gggccctcaagtccaaccac

SEQ ID NO: 91564 - DNA, 20 bp, Artificial Sequence
  MKO10091564_B_Hils1
  gRNA
cttcagaatcacatacgaca

SEQ ID NO: 91565 - DNA, 20 bp, Artificial Sequence
  MKO10091565_B_Hils1
  gRNA
tgcctttatcgagtagattc

SEQ ID NO: 91566 - DNA, 20 bp, Artificial Sequence
  MKO10091566_B_Hinfp
  gRNA
actcaccatggttccgcatg

SEQ ID NO: 91567 - DNA, 20 bp, Artificial Sequence
  MKO10091567_B_Hinfp
  gRNA
gtgtcttcgacaatcctgag

SEQ ID NO: 91568 - DNA, 20 bp, Artificial Sequence
  MKO10091568_B_Hinfp
  gRNA
cgttccggctctgaaagtcc

SEQ ID NO: 91569 - DNA, 20 bp, Artificial Sequence
  MKO10091569_B_Hint1
  gRNA
ggtatcaccagaaagtgtgt

SEQ ID NO: 91570 - DNA, 20 bp, Artificial Sequence
  MKO10091570_B_Hint1
  gRNA
agttcatctgccgaccccca

SEQ ID NO: 91571 - DNA, 20 bp, Artificial Sequence
  MKO10091571_B_Hint1
  gRNA
tcaagcaccaacacactttc

SEQ ID NO: 91572 - DNA, 20 bp, Artificial Sequence
  MKO10091572_B_Hint2
  gRNA
ctccaagtacgtgaatgtgc

SEQ ID NO: 91573 - DNA, 20 bp, Artificial Sequence
  MKO10091573_B_Hint2
  gRNA
gttccgtgacgtagctcctc

SEQ ID NO: 91574 - DNA, 20 bp, Artificial Sequence
  MKO10091574_B_Hint2
  gRNA
tctaggacacttactccttg

SEQ ID NO: 91575 - DNA, 20 bp, Artificial Sequence
  MKO10091575_B_Hint3
  gRNA
ctgggaaaaccatgcttgag

SEQ ID NO: 91576 - DNA, 20 bp, Artificial Sequence
  MKO10091576_B_Hint3
  gRNA
tcttatcaaagctggtttac

SEQ ID NO: 91577 - DNA, 20 bp, Artificial Sequence
  MKO10091577_B_Hint3
  gRNA
tgatatctttgaaacaaacc

SEQ ID NO: 91578 - DNA, 20 bp, Artificial Sequence
  MKO10091578_B_Hip1r
  gRNA
aggtcctgcatgactatcag

SEQ ID NO: 91579 - DNA, 20 bp, Artificial Sequence
  MKO10091579_B_Hip1r
  gRNA
ggccaccttcgtgaccagta

SEQ ID NO: 91580 - DNA, 20 bp, Artificial Sequence
  MKO10091580_B_Hip1r
  gRNA
tattcaccaggtgtccatac

SEQ ID NO: 91581 - DNA, 20 bp, Artificial Sequence
  MKO10091581_B_Hip1
  gRNA
gctgtccatacccctcgctc

SEQ ID NO: 91582 - DNA, 20 bp, Artificial Sequence
  MKO10091582_B_Hip1
  gRNA
atgagttaagcgacatgagc

SEQ ID NO: 91583 - DNA, 20 bp, Artificial Sequence
  MKO10091583_B_Hip1
  gRNA
ccgtgaaagagaaacatgcc

SEQ ID NO: 91584 - DNA, 20 bp, Artificial Sequence
  MKO10091584_B_Hipk1
  gRNA
tgtgacgatgagtcacctcc

SEQ ID NO: 91585 - DNA, 20 bp, Artificial Sequence
  MKO10091585_B_Hipk1
  gRNA
aggatctctgttaaaaaacc

SEQ ID NO: 91586 - DNA, 20 bp, Artificial Sequence
  MKO10091586_B_Hipk1
  gRNA
gtacccactgtggaggctta

SEQ ID NO: 91587 - DNA, 20 bp, Artificial Sequence
  MKO10091587_B_Hipk2
  gRNA
gttcagcaatgacacaacca

SEQ ID NO: 91588 - DNA, 20 bp, Artificial Sequence
  MKO10091588_B_Hipk2
  gRNA
cagactcaccgtatcctttg

SEQ ID NO: 91589 - DNA, 20 bp, Artificial Sequence
  MKO10091589_B_Hipk2
  gRNA
taattcccgtctctgcttca

SEQ ID NO: 91590 - DNA, 20 bp, Artificial Sequence
  MKO10091590_B_Hipk3
  gRNA
aggagagcaattgttgaatg

SEQ ID NO: 91591 - DNA, 20 bp, Artificial Sequence
  MKO10091591_B_Hipk3
  gRNA
gaaacagatatgtctcattc

SEQ ID NO: 91592 - DNA, 20 bp, Artificial Sequence
  MKO10091592_B_Hipk3
  gRNA
gacaggaatgaagtctaaag

SEQ ID NO: 91593 - DNA, 20 bp, Artificial Sequence
  MKO10091593_B_Hipk4
  gRNA
ggggtgacgcagggccgcac

SEQ ID NO: 91594 - DNA, 20 bp, Artificial Sequence
  MKO10091594_B_Hipk4
  gRNA
ccgattgaccggccgccata

SEQ ID NO: 91595 - DNA, 20 bp, Artificial Sequence
  MKO10091595_B_Hipk4
  gRNA
ctcggccagcatattcagtg

SEQ ID NO: 91596 - DNA, 20 bp, Artificial Sequence
  MKO10091596_B_Hira
  gRNA
ttgtcctccagttgcaaact

SEQ ID NO: 91597 - DNA, 20 bp, Artificial Sequence
  MKO10091597_B_Hira
  gRNA
ttcattccagggcaggattc

SEQ ID NO: 91598 - DNA, 20 bp, Artificial Sequence
  MKO10091598_B_Hira
  gRNA
tacctaagtgattgtccatc

SEQ ID NO: 91599 - DNA, 20 bp, Artificial Sequence
  MKO10091599_B_Hirip3
  gRNA
tcaggacccagaccgagagt

SEQ ID NO: 91600 - DNA, 20 bp, Artificial Sequence
  MKO10091600_B_Hirip3
  gRNA
ctgtctcgcaagcctccagt

SEQ ID NO: 91601 - DNA, 20 bp, Artificial Sequence
  MKO10091601_B_Hirip3
  gRNA
cacaggcggatgctggtacc

SEQ ID NO: 91602 - DNA, 20 bp, Artificial Sequence
  MKO10091602_B_Hist1h1a
  gRNA
gaacaacagccgcatcaaac

SEQ ID NO: 91603 - DNA, 20 bp, Artificial Sequence
  MKO10091603_B_Hist1h1a
  gRNA
gtagaagcagcctgagcgac

SEQ ID NO: 91604 - DNA, 20 bp, Artificial Sequence
  MKO10091604_B_Hist1h1a
  gRNA
tggctttgtcactttcgcct

SEQ ID NO: 91605 - DNA, 20 bp, Artificial Sequence
  MKO10091605_B_Hist1h1b
  gRNA
gcggcgaagcgcaaggccac

SEQ ID NO: 91606 - DNA, 20 bp, Artificial Sequence
  MKO10091606_B_Hist1h1b
  gRNA
tttgcccccgcagtcttctt

SEQ ID NO: 91607 - DNA, 20 bp, Artificial Sequence
  MKO10091607_B_Hist1h1b
  gRNA
cacgccgccgcgctccttag

SEQ ID NO: 91608 - DNA, 20 bp, Artificial Sequence
  MKO10091608_B_Hist1h1c
  gRNA
ccgcgcctgccttcttagcc

SEQ ID NO: 91609 - DNA, 20 bp, Artificial Sequence
  MKO10091609_B_Hist1h1c
  gRNA
ttctggcgaggccaaacccc

SEQ ID NO: 91610 - DNA, 20 bp, Artificial Sequence
  MKO10091610_B_Hist1h1c
  gRNA
gtctaaagccgtaaagccaa

SEQ ID NO: 91611 - DNA, 20 bp, Artificial Sequence
  MKO10091611_B_Hist1h1d
  gRNA
aggcgccgcgggagcggtct

SEQ ID NO: 91612 - DNA, 20 bp, Artificial Sequence
  MKO10091612_B_Hist1h1d
  gRNA
gcctaaagcttctaagccga

SEQ ID NO: 91613 - DNA, 20 bp, Artificial Sequence
  MKO10091613_B_Hist1h1d
  gRNA
cttggaaactttcttggcgc

SEQ ID NO: 91614 - DNA, 20 bp, Artificial Sequence
  MKO10091614_B_Hist1h1e
  gRNA
ggcgcgaagcgcaaaacctc

SEQ ID NO: 91615 - DNA, 20 bp, Artificial Sequence
  MKO10091615_B_Hist1h1e
  gRNA
gagccctgccaaggcgaaaa

SEQ ID NO: 91616 - DNA, 20 bp, Artificial Sequence
  MKO10091616_B_Hist1h1e
  gRNA
cttctcggcgggggccggtg

SEQ ID NO: 91617 - DNA, 20 bp, Artificial Sequence
  MKO10091617_B_Hist1h1t
  gRNA
cgtcgtaaccagccgcagcc

SEQ ID NO: 91618 - DNA, 20 bp, Artificial Sequence
  MKO10091618_B_Hist1h1t
  gRNA
gtaaaagccccgccaaagcc

SEQ ID NO: 91619 - DNA, 20 bp, Artificial Sequence
  MKO10091619_B_Hist1h1t
  gRNA
tcatgcagaagaccgatctg

SEQ ID NO: 91620 - DNA, 20 bp, Artificial Sequence
  MKO10091620_B_Hist1h2aa
  gRNA
agctggcgggcaacgcagcc

SEQ ID NO: 91621 - DNA, 20 bp, Artificial Sequence
  MKO10091621_B_Hist1h2aa
  gRNA
aggtcaagtctcgctcttcc

SEQ ID NO: 91622 - DNA, 20 bp, Artificial Sequence
  MKO10091622_B_Hist1h2aa
  gRNA
gctagaatacttgacagctg

SEQ ID NO: 91623 - DNA, 20 bp, Artificial Sequence
  MKO10091623_B_Hist1h2ab
  gRNA
gggtggcaaggcccgcgcta

SEQ ID NO: 91624 - DNA, 20 bp, Artificial Sequence
  MKO10091624_B_Hist1h2ab
  gRNA
cagccgatgcacgcggccta

SEQ ID NO: 91625 - DNA, 20 bp, Artificial Sequence
  MKO10091625_B_Hist1h2ab
  gRNA
tccccgtaggccgcgtgcat

SEQ ID NO: 91626 - DNA, 20 bp, Artificial Sequence
  MKO10091626_B_Hist1h2ac
  gRNA
gctccgcaagggtaactact

SEQ ID NO: 91627 - DNA, 20 bp, Artificial Sequence
  MKO10091627_B_Hist1h2ac
  gRNA
cgaggagctcaacaagctgc

SEQ ID NO: 91628 - DNA, 20 bp, Artificial Sequence
  MKO10091628_B_Hist1h2ac
  gRNA
cgccaggtagaccggggcgc

SEQ ID NO: 91629 - DNA, 20 bp, Artificial Sequence
  MKO10091629_B_Hist1h2ad
  gRNA
cgaggagctcaacaagctgc

SEQ ID NO: 91630 - DNA, 20 bp, Artificial Sequence
  MKO10091630_B_Hist1h2ad
  gRNA
gctccgagtagttgcccttg

SEQ ID NO: 91631 - DNA, 20 bp, Artificial Sequence
  MKO10091631_B_Hist1h2ad
  gRNA
cgcgtgaccatcgcgcaggg

SEQ ID NO: 91632 - DNA, 20 bp, Artificial Sequence
  MKO10091632_B_Hist1h2ae
  gRNA
aaactgcaggccggcccggg

SEQ ID NO: 91633 - DNA, 20 bp, Artificial Sequence
  MKO10091633_B_Hist1h2ae
  gRNA
cgaggagctcaacaagctgc

SEQ ID NO: 91634 - DNA, 20 bp, Artificial Sequence
  MKO10091634_B_Hist1h2ae
  gRNA
cgccaggtacaccggggcgc

SEQ ID NO: 91635 - DNA, 20 bp, Artificial Sequence
  MKO10091635_B_Hist1h2af
  gRNA
cgaggagctcaacaagctgt

SEQ ID NO: 91636 - DNA, 20 bp, Artificial Sequence
  MKO10091636_B_Hist1h2af
  gRNA
atggtggctctcggtcttct

SEQ ID NO: 91637 - DNA, 20 bp, Artificial Sequence
  MKO10091637_B_Hist1h2af
  gRNA
cgccaggtacaccggggcgc

SEQ ID NO: 91638 - DNA, 20 bp, Artificial Sequence
  MKO10091638_B_Hist1h2ag
  gRNA
cgcgtgaccatcgcgcaggg

SEQ ID NO: 91639 - DNA, 20 bp, Artificial Sequence
  MKO10091639_B_Hist1h2ag
  gRNA
gctccgagtagttgcccttg

SEQ ID NO: 91640 - DNA, 20 bp, Artificial Sequence
  MKO10091640_B_Hist1h2ag
  gRNA
gaagaccgagagccaccaca

SEQ ID NO: 91641 - DNA, 20 bp, Artificial Sequence
  MKO10091641_B_Hist1h2ah
  gRNA
gctccgagtagttgcccttg

SEQ ID NO: 91642 - DNA, 20 bp, Artificial Sequence
  MKO10091642_B_Hist1h2ah
  gRNA
cgcgtgaccatcgcgcaggg

SEQ ID NO: 91643 - DNA, 20 bp, Artificial Sequence
  MKO10091643_B_Hist1h2ah
  gRNA
cagccggtgcacgcggccca

SEQ ID NO: 91644 - DNA, 20 bp, Artificial Sequence
  MKO10091644_B_Hist1h2ai
  gRNA
cgaggagctcaacaagctgc

SEQ ID NO: 91645 - DNA, 20 bp, Artificial Sequence
  MKO10091645_B_Hist1h2ai
  gRNA
gctccgagtagttgcccttg

SEQ ID NO: 91646 - DNA, 20 bp, Artificial Sequence
  MKO10091646_B_Hist1h2ai
  gRNA
cgcgtgaccatcgcgcaggg

SEQ ID NO: 91647 - DNA, 20 bp, Artificial Sequence
  MKO10091647_B_Hist1h2ak
  gRNA
ggccgtcaggtactctagca

SEQ ID NO: 91648 - DNA, 20 bp, Artificial Sequence
  MKO10091648_B_Hist1h2ak
  gRNA
agccgtgctagagtacctga

SEQ ID NO: 91649 - DNA, 20 bp, Artificial Sequence
  MKO10091649_B_Hist1h2ak
  gRNA
gaagaccgagacccaccaca

SEQ ID NO: 91650 - DNA, 20 bp, Artificial Sequence
  MKO10091650_B_Hist1h2an
  gRNA
cgccaggtacaccggggcgc

SEQ ID NO: 91651 - DNA, 20 bp, Artificial Sequence
  MKO10091651_B_Hist1h2an
  gRNA
cgcgtgaccatcgcgcaggg

SEQ ID NO: 91652 - DNA, 20 bp, Artificial Sequence
  MKO10091652_B_Hist1h2an
  gRNA
gctccgagtagttgcccttg

SEQ ID NO: 91653 - DNA, 20 bp, Artificial Sequence
  MKO10091653_B_Hist1h2ao
  gRNA
gctccgagtagttgcccttg

SEQ ID NO: 91654 - DNA, 20 bp, Artificial Sequence
  MKO10091654_B_Hist1h2ao
  gRNA
cgcgtgaccatcgcgcaggg

SEQ ID NO: 91655 - DNA, 20 bp, Artificial Sequence
  MKO10091655_B_Hist1h2ao
  gRNA
cagccggtgcacgcggccca

SEQ ID NO: 91656 - DNA, 20 bp, Artificial Sequence
  MKO10091656_B_Hist1h2ap
  gRNA
cgcgtgaccatcgcgcaggg

SEQ ID NO: 91657 - DNA, 20 bp, Artificial Sequence
  MKO10091657_B_Hist1h2ap
  gRNA
gctccgagtagttgcccttg

SEQ ID NO: 91658 - DNA, 20 bp, Artificial Sequence
  MKO10091658_B_Hist1h2ap
  gRNA
gaagaccgagagccaccaca

SEQ ID NO: 91659 - DNA, 20 bp, Artificial Sequence
  MKO10091659_B_Hist1h2ba
  gRNA
tacttgagccatgccggagg

SEQ ID NO: 91660 - DNA, 20 bp, Artificial Sequence
  MKO10091660_B_Hist1h2ba
  gRNA
cagcaccttatagatgtaaa

SEQ ID NO: 91661 - DNA, 20 bp, Artificial Sequence
  MKO10091661_B_Hist1h2ba
  gRNA
ggtgctactatttccaagaa

SEQ ID NO: 91662 - DNA, 20 bp, Artificial Sequence
  MKO10091662_B_Hist1h2bb
  gRNA
cttcttctgcgccttagaga

SEQ ID NO: 91663 - DNA, 20 bp, Artificial Sequence
  MKO10091663_B_Hist1h2bb
  gRNA
atctaagaaagccatctcta

SEQ ID NO: 91664 - DNA, 20 bp, Artificial Sequence
  MKO10091664_B_Hist1h2bb
  gRNA
cctacgagctcacttggagc

SEQ ID NO: 91665 - DNA, 20 bp, Artificial Sequence
  MKO10091665_B_Hist1h2bc
  gRNA
ggagcggacttcgcaggctc

SEQ ID NO: 91666 - DNA, 20 bp, Artificial Sequence
  MKO10091666_B_Hist1h2bc
  gRNA
gccctccgacaccgcgtgct

SEQ ID NO: 91667 - DNA, 20 bp, Artificial Sequence
  MKO10091667_B_Hist1h2bc
  gRNA
ctccaagaaggccgtgacca

SEQ ID NO: 91668 - DNA, 20 bp, Artificial Sequence
  MKO10091668_B_Hist1h2be
  gRNA
taaatgaactcacttggagc

SEQ ID NO: 91669 - DNA, 20 bp, Artificial Sequence
  MKO10091669_B_Hist1h2be
  gRNA
gccttcttggagcccttctt

SEQ ID NO: 91670 - DNA, 20 bp, Artificial Sequence
  MKO10091670_B_Hist1h2be
  gRNA
gccctccgacaccgcgtgct

SEQ ID NO: 91671 - DNA, 20 bp, Artificial Sequence
  MKO10091671_B_Hist1h2bf
  gRNA
gccttcttggagcccttctt

SEQ ID NO: 91672 - DNA, 20 bp, Artificial Sequence
  MKO10091672_B_Hist1h2bf
  gRNA
ctccaagaaggccgtgacca

SEQ ID NO: 91673 - DNA, 20 bp, Artificial Sequence
  MKO10091673_B_Hist1h2bf
  gRNA
agccttggtgccctccgaca

SEQ ID NO: 91674 - DNA, 20 bp, Artificial Sequence
  MKO10091674_B_Hist1h2bg
  gRNA
gccttcttggagcccttctt

SEQ ID NO: 91675 - DNA, 20 bp, Artificial Sequence
  MKO10091675_B_Hist1h2bg
  gRNA
agccttggtgccctccgaca

SEQ ID NO: 91676 - DNA, 20 bp, Artificial Sequence
  MKO10091676_B_Hist1h2bg
  gRNA
ctccaagaaggccgtgacca

SEQ ID NO: 91677 - DNA, 20 bp, Artificial Sequence
  MKO10091677_B_Hist1h2bh
  gRNA
gtccgctcctgccccgaaga

SEQ ID NO: 91678 - DNA, 20 bp, Artificial Sequence
  MKO10091678_B_Hist1h2bh
  gRNA
gccttcttggagcccttctt

SEQ ID NO: 91679 - DNA, 20 bp, Artificial Sequence
  MKO10091679_B_Hist1h2bh
  gRNA
ggagcggacttggcgggctc

SEQ ID NO: 91680 - DNA, 20 bp, Artificial Sequence
  MKO10091680_B_Hist1h2bj
  gRNA
gtccgctcccgccccgaaga

SEQ ID NO: 91681 - DNA, 20 bp, Artificial Sequence
  MKO10091681_B_Hist1h2bj
  gRNA
gccttcttggagcccttctt

SEQ ID NO: 91682 - DNA, 20 bp, Artificial Sequence
  MKO10091682_B_Hist1h2bj
  gRNA
ggagcggacttcgcaggctc

SEQ ID NO: 91683 - DNA, 20 bp, Artificial Sequence
  MKO10091683_B_Hist1h2bk
  gRNA
ggagcggacttcgcaggctc

SEQ ID NO: 91684 - DNA, 20 bp, Artificial Sequence
  MKO10091684_B_Hist1h2bk
  gRNA
agccttggtgccctccgaca

SEQ ID NO: 91685 - DNA, 20 bp, Artificial Sequence
  MKO10091685_B_Hist1h2bk
  gRNA
ctccaagaaggccgtcacca

SEQ ID NO: 91686 - DNA, 20 bp, Artificial Sequence
  MKO10091686_B_Hist1h2bl
  gRNA
ggagcggacttggcgggctc

SEQ ID NO: 91687 - DNA, 20 bp, Artificial Sequence
  MKO10091687_B_Hist1h2bl
  gRNA
ctccaagaaggccgtcacca

SEQ ID NO: 91688 - DNA, 20 bp, Artificial Sequence
  MKO10091688_B_Hist1h2bl
  gRNA
gccctccgacaccgcgtgct

SEQ ID NO: 91689 - DNA, 20 bp, Artificial Sequence
  MKO10091689_B_Hist1h2bm
  gRNA
gccttcttggagcccttctt

SEQ ID NO: 91690 - DNA, 20 bp, Artificial Sequence
  MKO10091690_B_Hist1h2bm
  gRNA
gccctccgacaccgcgtgct

SEQ ID NO: 91691 - DNA, 20 bp, Artificial Sequence
  MKO10091691_B_Hist1h2bm
  gRNA
ctccaagaaggccgtcacca

SEQ ID NO: 91692 - DNA, 20 bp, Artificial Sequence
  MKO10091692_B_Hist1h2bn
  gRNA
taaaggaactcacttggagc

SEQ ID NO: 91693 - DNA, 20 bp, Artificial Sequence
  MKO10091693_B_Hist1h2bn
  gRNA
gtccgctcccgccccgaaga

SEQ ID NO: 91694 - DNA, 20 bp, Artificial Sequence
  MKO10091694_B_Hist1h2bn
  gRNA
agccttggtgccctccgaca

SEQ ID NO: 91695 - DNA, 20 bp, Artificial Sequence
  MKO10091695_B_Hist1h2bp
  gRNA
gcttcttgccatccttcttt

SEQ ID NO: 91696 - DNA, 20 bp, Artificial Sequence
  MKO10091696_B_Hist1h2bp
  gRNA
gtccgttcccgccccgaaga

SEQ ID NO: 91697 - DNA, 20 bp, Artificial Sequence
  MKO10091697_B_Hist1h2bp
  gRNA
tcacttggagctggtgtact

SEQ ID NO: 91698 - DNA, 20 bp, Artificial Sequence
  MKO10091698_B_Hist1h2bq
  gRNA
ggagcggacttcgcaggctc

SEQ ID NO: 91699 - DNA, 20 bp, Artificial Sequence
  MKO10091699_B_Hist1h2bq
  gRNA
ctccaagaaggccgtcacca

SEQ ID NO: 91700 - DNA, 20 bp, Artificial Sequence
  MKO10091700_B_Hist1h2bq
  gRNA
gccctccgacaccgcgtgct

SEQ ID NO: 91701 - DNA, 20 bp, Artificial Sequence
  MKO10091701_B_Hist1h2br
  gRNA
ggagcggacttcgcaggctc

SEQ ID NO: 91702 - DNA, 20 bp, Artificial Sequence
  MKO10091702_B_Hist1h2br
  gRNA
gccctccgacaccgcgtgct

SEQ ID NO: 91703 - DNA, 20 bp, Artificial Sequence
  MKO10091703_B_Hist1h2br
  gRNA
ctccaagaaggccgtcacca

SEQ ID NO: 91704 - DNA, 20 bp, Artificial Sequence
  MKO10091704_B_Hist1h3a
  gRNA
ttggtggctagctgcttgcg

SEQ ID NO: 91705 - DNA, 20 bp, Artificial Sequence
  MKO10091705_B_Hist1h3a
  gRNA
cagaccgctcgcaagtccac

SEQ ID NO: 91706 - DNA, 20 bp, Artificial Sequence
  MKO10091706_B_Hist1h3a
  gRNA
gtgaggcttcttcacgccgc

SEQ ID NO: 91707 - DNA, 20 bp, Artificial Sequence
  MKO10091707_B_Hist1h3b
  gRNA
gtgaggcttcttcacgccgc

SEQ ID NO: 91708 - DNA, 20 bp, Artificial Sequence
  MKO10091708_B_Hist1h3b
  gRNA
gcgtgtcaccatcatgccca

SEQ ID NO: 91709 - DNA, 20 bp, Artificial Sequence
  MKO10091709_B_Hist1h3b
  gRNA
ggccggggcgctcttgcggg

SEQ ID NO: 91710 - DNA, 20 bp, Artificial Sequence
  MKO10091710_B_Hist1h3c
  gRNA
gcgtgtcaccatcatgccca

SEQ ID NO: 91711 - DNA, 20 bp, Artificial Sequence
  MKO10091711_B_Hist1h3c
  gRNA
ggccggggcgctcttgcggg

SEQ ID NO: 91712 - DNA, 20 bp, Artificial Sequence
  MKO10091712_B_Hist1h3c
  gRNA
ttggtggccagctgcttgcg

SEQ ID NO: 91713 - DNA, 20 bp, Artificial Sequence
  MKO10091713_B_Hist1h3d
  gRNA
gtgaggcttcttcacgccgc

SEQ ID NO: 91714 - DNA, 20 bp, Artificial Sequence
  MKO10091714_B_Hist1h3d
  gRNA
gcgtgtcaccatcatgccca

SEQ ID NO: 91715 - DNA, 20 bp, Artificial Sequence
  MKO10091715_B_Hist1h3d
  gRNA
ggccggggcgctcttgcggg

SEQ ID NO: 91716 - DNA, 20 bp, Artificial Sequence
  MKO10091716_B_Hist1h3e
  gRNA
cctattaagcccgctcgccg

SEQ ID NO: 91717 - DNA, 20 bp, Artificial Sequence
  MKO10091717_B_Hist1h3e
  gRNA
gcgtgtcaccatcatgccca

SEQ ID NO: 91718 - DNA, 20 bp, Artificial Sequence
  MKO10091718_B_Hist1h3e
  gRNA
gtgaggcttcttcacgccgc

SEQ ID NO: 91719 - DNA, 20 bp, Artificial Sequence
  MKO10091719_B_Hist1h3f
  gRNA
cctattaagcccgctcgccg

SEQ ID NO: 91720 - DNA, 20 bp, Artificial Sequence
  MKO10091720_B_Hist1h3f
  gRNA
cagaccgctcgcaagtccac

SEQ ID NO: 91721 - DNA, 20 bp, Artificial Sequence
  MKO10091721_B_Hist1h3f
  gRNA
gcgtgtcaccatcatgccca

SEQ ID NO: 91722 - DNA, 20 bp, Artificial Sequence
  MKO10091722_B_Hist1h3g
  gRNA
cagctggcccgtcgcatccg

SEQ ID NO: 91723 - DNA, 20 bp, Artificial Sequence
  MKO10091723_B_Hist1h3g
  gRNA
gccgccggtagacttgcgag

SEQ ID NO: 91724 - DNA, 20 bp, Artificial Sequence
  MKO10091724_B_Hist1h3g
  gRNA
ctgtggcgctgcgcgagatc

SEQ ID NO: 91725 - DNA, 20 bp, Artificial Sequence
  MKO10091725_B_Hist1h3h
  gRNA
gtgaggcttcttcacgccgc

SEQ ID NO: 91726 - DNA, 20 bp, Artificial Sequence
  MKO10091726_B_Hist1h3h
  gRNA
gcgtgtcaccatcatgccca

SEQ ID NO: 91727 - DNA, 20 bp, Artificial Sequence
  MKO10091727_B_Hist1h3h
  gRNA
ggccggggcgctcttgcggg

SEQ ID NO: 91728 - DNA, 20 bp, Artificial Sequence
  MKO10091728_B_Hist1h3i
  gRNA
ggccggggcgctcttgcggg

SEQ ID NO: 91729 - DNA, 20 bp, Artificial Sequence
  MKO10091729_B_Hist1h3i
  gRNA
cagctggcccgtcgcattcg

SEQ ID NO: 91730 - DNA, 20 bp, Artificial Sequence
  MKO10091730_B_Hist1h3i
  gRNA
ttggtggccagctgcttgcg

SEQ ID NO: 91731 - DNA, 20 bp, Artificial Sequence
  MKO10091731_B_Hist1h4a
  gRNA
cgcaccctctacggattcgg

SEQ ID NO: 91732 - DNA, 20 bp, Artificial Sequence
  MKO10091732_B_Hist1h4a
  gRNA
ggaggaaaaggcctgggcaa

SEQ ID NO: 91733 - DNA, 20 bp, Artificial Sequence
  MKO10091733_B_Hist1h4a
  gRNA
gagcgcgtagaccacgtcca

SEQ ID NO: 91734 - DNA, 20 bp, Artificial Sequence
  MKO10091734_B_Hist1h4b
  gRNA
gcttagcgccacctttgccc

SEQ ID NO: 91735 - DNA, 20 bp, Artificial Sequence
  MKO10091735_B_Hist1h4b
  gRNA
cttaacccccgaatccgtag

SEQ ID NO: 91736 - DNA, 20 bp, Artificial Sequence
  MKO10091736_B_Hist1h4b
  gRNA
gagcgcgtagaccacgtcca

SEQ ID NO: 91737 - DNA, 20 bp, Artificial Sequence
  MKO10091737_B_Hist1h4c
  gRNA
ggtggtaaaggccttgggaa

SEQ ID NO: 91738 - DNA, 20 bp, Artificial Sequence
  MKO10091738_B_Hist1h4c
  gRNA
taatgccctggatgttatca

SEQ ID NO: 91739 - DNA, 20 bp, Artificial Sequence
  MKO10091739_B_Hist1h4c
  gRNA
cgccgaatccgtagagagtg

SEQ ID NO: 91740 - DNA, 20 bp, Artificial Sequence
  MKO10091740_B_Hist1h4d
  gRNA
agttctgcgcgacaacatcc

SEQ ID NO: 91741 - DNA, 20 bp, Artificial Sequence
  MKO10091741_B_Hist1h4d
  gRNA
gagcgcgtagacaacgtcca

SEQ ID NO: 91742 - DNA, 20 bp, Artificial Sequence
  MKO10091742_B_Hist1h4d
  gRNA
tttagccgccgaatccgtag

SEQ ID NO: 91743 - DNA, 20 bp, Artificial Sequence
  MKO10091743_B_Hist1h4f
  gRNA
ggtttcctcgtagatgagac

SEQ ID NO: 91744 - DNA, 20 bp, Artificial Sequence
  MKO10091744_B_Hist1h4f
  gRNA
ctcatctacgaggaaacccg

SEQ ID NO: 91745 - DNA, 20 bp, Artificial Sequence
  MKO10091745_B_Hist1h4f
  gRNA
cttaaccgccgaatccgtag

SEQ ID NO: 91746 - DNA, 20 bp, Artificial Sequence
  MKO10091746_B_Hist1h4h
  gRNA
tgttgtcacgcagcactttg

SEQ ID NO: 91747 - DNA, 20 bp, Artificial Sequence
  MKO10091747_B_Hist1h4h
  gRNA
agtgctgcgtgacaacatcc

SEQ ID NO: 91748 - DNA, 20 bp, Artificial Sequence
  MKO10091748_B_Hist1h4h
  gRNA
cttaaccgccgaatccgtag

SEQ ID NO: 91749 - DNA, 20 bp, Artificial Sequence
  MKO10091749_B_Hist1h4i
  gRNA
tgttgtcccgaagcactttg

SEQ ID NO: 91750 - DNA, 20 bp, Artificial Sequence
  MKO10091750_B_Hist1h4i
  gRNA
gtcttcatcatgtctggtcg

SEQ ID NO: 91751 - DNA, 20 bp, Artificial Sequence
  MKO10091751_B_Hist1h4i
  gRNA
ggaggaaaaggcctgggcaa

SEQ ID NO: 91752 - DNA, 20 bp, Artificial Sequence
  MKO10091752_B_Hist1h4j
  gRNA
agtgcagtcatgtctggcag

SEQ ID NO: 91753 - DNA, 20 bp, Artificial Sequence
  MKO10091753_B_Hist1h4j
  gRNA
gagcgcgtagaccacgtcca

SEQ ID NO: 91754 - DNA, 20 bp, Artificial Sequence
  MKO10091754_B_Hist1h4j
  gRNA
ggcgggaaagggctcggtaa

SEQ ID NO: 91755 - DNA, 20 bp, Artificial Sequence
  MKO10091755_B_Hist1h4k
  gRNA
ggcgggaaagggctcggtaa

SEQ ID NO: 91756 - DNA, 20 bp, Artificial Sequence
  MKO10091756_B_Hist1h4k
  gRNA
gagcgcgtagaccacgtcca

SEQ ID NO: 91757 - DNA, 20 bp, Artificial Sequence
  MKO10091757_B_Hist1h4k
  gRNA
agtgctgcgcgataacatcc

SEQ ID NO: 91758 - DNA, 20 bp, Artificial Sequence
  MKO10091758_B_Hist1h4m
  gRNA
gagcgcgtagaccacgtcca

SEQ ID NO: 91759 - DNA, 20 bp, Artificial Sequence
  MKO10091759_B_Hist1h4m
  gRNA
ggaggaaaaggcctgggcaa

SEQ ID NO: 91760 - DNA, 20 bp, Artificial Sequence
  MKO10091760_B_Hist1h4m
  gRNA
gcgcttggcgtgctccgtgt

SEQ ID NO: 91761 - DNA, 20 bp, Artificial Sequence
  MKO10091761_B_Hist1h4n
  gRNA
ggaggaaaaggcctgggcaa

SEQ ID NO: 91762 - DNA, 20 bp, Artificial Sequence
  MKO10091762_B_Hist1h4n
  gRNA
gagcgcgtagaccacgtcca

SEQ ID NO: 91763 - DNA, 20 bp, Artificial Sequence
  MKO10091763_B_Hist1h4n
  gRNA
agtgctgcgcgataacatcc

SEQ ID NO: 91764 - DNA, 20 bp, Artificial Sequence
  MKO10091764_B_Hist2h2aa1
  gRNA
cgaggagctcaacaagctgc

SEQ ID NO: 91765 - DNA, 20 bp, Artificial Sequence
  MKO10091765_B_Hist2h2aa1
  gRNA
gcctccttgcttgccacgac

SEQ ID NO: 91766 - DNA, 20 bp, Artificial Sequence
  MKO10091766_B_Hist2h2aa1
  gRNA
aaagtgacgatcgcgcaggg

SEQ ID NO: 91767 - DNA, 20 bp, Artificial Sequence
  MKO10091767_B_Hist2h2aa2
  gRNA
ggaagaccgcgacttggcct

SEQ ID NO: 91768 - DNA, 20 bp, Artificial Sequence
  MKO10091768_B_Hist2h2aa2
  gRNA
aaagtgacgatcgcgcaggg

SEQ ID NO: 91769 - DNA, 20 bp, Artificial Sequence
  MKO10091769_B_Hist2h2aa2
  gRNA
gcctccttgcttgccacgac

SEQ ID NO: 91770 - DNA, 20 bp, Artificial Sequence
  MKO10091770_B_Hist2h2ab
  gRNA
ggacgaccgcgacttcgcct

SEQ ID NO: 91771 - DNA, 20 bp, Artificial Sequence
  MKO10091771_B_Hist2h2ab
  gRNA
ggagtcaccatcgcccaggg

SEQ ID NO: 91772 - DNA, 20 bp, Artificial Sequence
  MKO10091772_B_Hist2h2ab
  gRNA
gccatctgcaactagctgtg

SEQ ID NO: 91773 - DNA, 20 bp, Artificial Sequence
  MKO10091773_B_Hist2h2ac
  gRNA
ccttgcctccctgtttgcca

SEQ ID NO: 91774 - DNA, 20 bp, Artificial Sequence
  MKO10091774_B_Hist2h2ac
  gRNA
caagaagaccgagagccaca

SEQ ID NO: 91775 - DNA, 20 bp, Artificial Sequence
  MKO10091775_B_Hist2h2ac
  gRNA
atggccagctgcagatggcg

SEQ ID NO: 91776 - DNA, 20 bp, Artificial Sequence
  MKO10091776_B_Hist2h2bb
  gRNA
gttggctaaacacgctgtgt

SEQ ID NO: 91777 - DNA, 20 bp, Artificial Sequence
  MKO10091777_B_Hist2h2bb
  gRNA
cttagatgagatgcccgtgt

SEQ ID NO: 91778 - DNA, 20 bp, Artificial Sequence
  MKO10091778_B_Hist2h2bb
  gRNA
gcgtgtttagccaactctcc

SEQ ID NO: 91779 - DNA, 20 bp, Artificial Sequence
  MKO10091779_B_Hist2h2be
  gRNA
ctttgagcgcatagcaaacg

SEQ ID NO: 91780 - DNA, 20 bp, Artificial Sequence
  MKO10091780_B_Hist2h2be
  gRNA
ccagttctccgggcagtaga

SEQ ID NO: 91781 - DNA, 20 bp, Artificial Sequence
  MKO10091781_B_Hist2h2be
  gRNA
agccttcttggaacccttct

SEQ ID NO: 91782 - DNA, 20 bp, Artificial Sequence
  MKO10091782_B_Hist2h3b
  gRNA
ggcgctcttgcgggcggcct

SEQ ID NO: 91783 - DNA, 20 bp, Artificial Sequence
  MKO10091783_B_Hist2h3b
  gRNA
acgcgtcaccatcatgccca

SEQ ID NO: 91784 - DNA, 20 bp, Artificial Sequence
  MKO10091784_B_Hist2h3b
  gRNA
cttgcgcggggccttgccgc

SEQ ID NO: 91785 - DNA, 20 bp, Artificial Sequence
  MKO10091785_B_Hist2h3c1
  gRNA
acgcgtcaccatcatgccca

SEQ ID NO: 91786 - DNA, 20 bp, Artificial Sequence
  MKO10091786_B_Hist2h3c1
  gRNA
cttgcgcggggccttgccgc

SEQ ID NO: 91787 - DNA, 20 bp, Artificial Sequence
  MKO10091787_B_Hist2h3c1
  gRNA
cagttggcccgccgcatccg

SEQ ID NO: 91788 - DNA, 20 bp, Artificial Sequence
  MKO10091788_B_Hist2h3c2
  gRNA
ggcgctcttgcgggcggcct

SEQ ID NO: 91789 - DNA, 20 bp, Artificial Sequence
  MKO10091789_B_Hist2h3c2
  gRNA
cagttggcccgccgcatccg

SEQ ID NO: 91790 - DNA, 20 bp, Artificial Sequence
  MKO10091790_B_Hist2h3c2
  gRNA
cttgcgcggggccttgccgc

SEQ ID NO: 91791 - DNA, 20 bp, Artificial Sequence
  MKO10091791_B_Hist2h4
  gRNA
agcgtacaccacatccatag

SEQ ID NO: 91792 - DNA, 20 bp, Artificial Sequence
  MKO10091792_B_Hist2h4
  gRNA
acattagccatgtctggcag

SEQ ID NO: 91793 - DNA, 20 bp, Artificial Sequence
  MKO10091793_B_Hist2h4
  gRNA
agtcttgcgtgacaacatcc

SEQ ID NO: 91794 - DNA, 20 bp, Artificial Sequence
  MKO10091794_B_Hist3h2a
  gRNA
gtaggggcctcacttgccct

SEQ ID NO: 91795 - DNA, 20 bp, Artificial Sequence
  MKO10091795_B_Hist3h2a
  gRNA
cagtggaagatgtctggtcg

SEQ ID NO: 91796 - DNA, 20 bp, Artificial Sequence
  MKO10091796_B_Hist3h2a
  gRNA
ccgcattaccagccaattcc

SEQ ID NO: 91797 - DNA, 20 bp, Artificial Sequence
  MKO10091797_B_Hist3h2ba
  gRNA
ggagtggagcgggaaggctc

SEQ ID NO: 91798 - DNA, 20 bp, Artificial Sequence
  MKO10091798_B_Hist3h2ba
  gRNA
gctttcttggagcctttctt

SEQ ID NO: 91799 - DNA, 20 bp, Artificial Sequence
  MKO10091799_B_Hist3h2ba
  gRNA
ggcatgcttggccagctccc

SEQ ID NO: 91800 - DNA, 20 bp, Artificial Sequence
  MKO10091800_B_Hist3h2bb-ps
  gRNA
ctccaaaaaggcggtcacca

SEQ ID NO: 91801 - DNA, 20 bp, Artificial Sequence
  MKO10091801_B_Hist3h2bb-ps
  gRNA
ggccaagcatgctgtgtccg

SEQ ID NO: 91802 - DNA, 20 bp, Artificial Sequence
  MKO10091802_B_Hist3h2bb-ps
  gRNA
gcacggctgtctgcacctcg

SEQ ID NO: 91803 - DNA, 20 bp, Artificial Sequence
  MKO10091803_B_Hist4h4
  gRNA
agccgtaaccgtcttgcgct

SEQ ID NO: 91804 - DNA, 20 bp, Artificial Sequence
  MKO10091804_B_Hist4h4
  gRNA
tttactaatatgtcaggacg

SEQ ID NO: 91805 - DNA, 20 bp, Artificial Sequence
  MKO10091805_B_Hist4h4
  gRNA
cgccacgccgagccaaccgc

SEQ ID NO: 91806 - DNA, 20 bp, Artificial Sequence
  MKO10091806_B_Hivep1
  gRNA
atgtgcttcttcaacatact

SEQ ID NO: 91807 - DNA, 20 bp, Artificial Sequence
  MKO10091807_B_Hivep1
  gRNA
gagagcattaggtaatcaaa

SEQ ID NO: 91808 - DNA, 20 bp, Artificial Sequence
  MKO10091808_B_Hivep1
  gRNA
attgctgaattcaactactg

SEQ ID NO: 91809 - DNA, 20 bp, Artificial Sequence
  MKO10091809_B_Hivep2
  gRNA
attcacggagataaagatct

SEQ ID NO: 91810 - DNA, 20 bp, Artificial Sequence
  MKO10091810_B_Hivep2
  gRNA
atccgaattaagatctttga

SEQ ID NO: 91811 - DNA, 20 bp, Artificial Sequence
  MKO10091811_B_Hivep2
  gRNA
ttacataacttgcatacata

SEQ ID NO: 91812 - DNA, 20 bp, Artificial Sequence
  MKO10091812_B_Hivep3
  gRNA
tcgaagatcttgaccctcgc

SEQ ID NO: 91813 - DNA, 20 bp, Artificial Sequence
  MKO10091813_B_Hivep3
  gRNA
tccgcacccacactgacgtc

SEQ ID NO: 91814 - DNA, 20 bp, Artificial Sequence
  MKO10091814_B_Hivep3
  gRNA
cctcacaaacatatctccct

SEQ ID NO: 91815 - DNA, 20 bp, Artificial Sequence
  MKO10091815_B_Hjurp
  gRNA
ctcatcgctgagctgcaaga

SEQ ID NO: 91816 - DNA, 20 bp, Artificial Sequence
  MKO10091816_B_Hjurp
  gRNA
tttcttaagggttgagagtt

SEQ ID NO: 91817 - DNA, 20 bp, Artificial Sequence
  MKO10091817_B_Hjurp
  gRNA
aaggtgattgacagattaaa

SEQ ID NO: 91818 - DNA, 20 bp, Artificial Sequence
  MKO10091818_B_Hk1
  gRNA
ctcaggccgtactgatcacg

SEQ ID NO: 91819 - DNA, 20 bp, Artificial Sequence
  MKO10091819_B_Hk1
  gRNA
ctgcacccgcaggattcgaa

SEQ ID NO: 91820 - DNA, 20 bp, Artificial Sequence
  MKO10091820_B_Hk1
  gRNA
cctccatacctcgtctattt

SEQ ID NO: 91821 - DNA, 20 bp, Artificial Sequence
  MKO10091821_B_Hk2
  gRNA
cactactcacccctctgcgc

SEQ ID NO: 91822 - DNA, 20 bp, Artificial Sequence
  MKO10091822_B_Hk2
  gRNA
ccagatctacgccattcccg

SEQ ID NO: 91823 - DNA, 20 bp, Artificial Sequence
  MKO10091823_B_Hk2
  gRNA
cccctgccaccagacgaaac

SEQ ID NO: 91824 - DNA, 20 bp, Artificial Sequence
  MKO10091824_B_Hk3
  gRNA
cacacgtagtgatgctcctg

SEQ ID NO: 91825 - DNA, 20 bp, Artificial Sequence
  MKO10091825_B_Hk3
  gRNA
tgcataccccgtggagaatc

SEQ ID NO: 91826 - DNA, 20 bp, Artificial Sequence
  MKO10091826_B_Hk3
  gRNA
ttagcaactggaccacatcc

SEQ ID NO: 91827 - DNA, 20 bp, Artificial Sequence
  MKO10091827_B_Hkdc1
  gRNA
caccttcaagacccgaaact

SEQ ID NO: 91828 - DNA, 20 bp, Artificial Sequence
  MKO10091828_B_Hkdc1
  gRNA
ccgagagccgcatgtgatac

SEQ ID NO: 91829 - DNA, 20 bp, Artificial Sequence
  MKO10091829_B_Hkdc1
  gRNA
ccccgcttacctgagccatc

SEQ ID NO: 91830 - DNA, 20 bp, Artificial Sequence
  MKO10091830_B_Hlcs
  gRNA
ctcccgagccactgcatgaa

SEQ ID NO: 91831 - DNA, 20 bp, Artificial Sequence
  MKO10091831_B_Hlcs
  gRNA
tctgagctgtgacgcaccac

SEQ ID NO: 91832 - DNA, 20 bp, Artificial Sequence
  MKO10091832_B_Hlcs
  gRNA
aacgcccctgtacttactgc

SEQ ID NO: 91833 - DNA, 20 bp, Artificial Sequence
  MKO10091833_B_Hlf
  gRNA
tcagagaacttccgtttgcg

SEQ ID NO: 91834 - DNA, 20 bp, Artificial Sequence
  MKO10091834_B_Hlf
  gRNA
atcttacaggggcccgtgcc

SEQ ID NO: 91835 - DNA, 20 bp, Artificial Sequence
  MKO10091835_B_Hlf
  gRNA
cgtcccccagtccgccttct

SEQ ID NO: 91836 - DNA, 20 bp, Artificial Sequence
  MKO10091836_B_Hltf
  gRNA
gactgcgaatacttccaaac

SEQ ID NO: 91837 - DNA, 20 bp, Artificial Sequence
  MKO10091837_B_Hltf
  gRNA
aaagtattacttgcaccaaa

SEQ ID NO: 91838 - DNA, 20 bp, Artificial Sequence
  MKO10091838_B_Hltf
  gRNA
tgtaatagtgtagttccttt

SEQ ID NO: 91839 - DNA, 20 bp, Artificial Sequence
  MKO10091839_B_Hlx
  gRNA
atctctagatcccattagcg

SEQ ID NO: 91840 - DNA, 20 bp, Artificial Sequence
  MKO10091840_B_Hlx
  gRNA
accacccgcgtccccgaagt

SEQ ID NO: 91841 - DNA, 20 bp, Artificial Sequence
  MKO10091841_B_Hlx
  gRNA
gatctcacatcgctgctaac

SEQ ID NO: 91842 - DNA, 20 bp, Artificial Sequence
  MKO10091842_B_Hmbox1
  gRNA
aatcctccgattggcaagaa

SEQ ID NO: 91843 - DNA, 20 bp, Artificial Sequence
  MKO10091843_B_Hmbox1
  gRNA
atctactccctcgtcgaagc

SEQ ID NO: 91844 - DNA, 20 bp, Artificial Sequence
  MKO10091844_B_Hmbox1
  gRNA
ggacagcagtgtgataaaag

SEQ ID NO: 91845 - DNA, 20 bp, Artificial Sequence
  MKO10091845_B_Hmbs
  gRNA
ctcagttgctatgtccacca

SEQ ID NO: 91846 - DNA, 20 bp, Artificial Sequence
  MKO10091846_B_Hmbs
  gRNA
atcaagaatcttgtctcccg

SEQ ID NO: 91847 - DNA, 20 bp, Artificial Sequence
  MKO10091847_B_Hmbs
  gRNA
atgctgaaagccttgtaccc

SEQ ID NO: 91848 - DNA, 20 bp, Artificial Sequence
  MKO10091848_B_Hmces
  gRNA
gacactccggagtgttgttt

SEQ ID NO: 91849 - DNA, 20 bp, Artificial Sequence
  MKO10091849_B_Hmces
  gRNA
ataattattcccatgcgatg

SEQ ID NO: 91850 - DNA, 20 bp, Artificial Sequence
  MKO10091850_B_Hmces
  gRNA
agatgaagtatggttgcctc

SEQ ID NO: 91851 - DNA, 20 bp, Artificial Sequence
  MKO10091851_B_Hmcn1
  gRNA
tttcactgatgcacgatcca

SEQ ID NO: 91852 - DNA, 20 bp, Artificial Sequence
  MKO10091852_B_Hmcn1
  gRNA
cacttgaccagaacttgtag

SEQ ID NO: 91853 - DNA, 20 bp, Artificial Sequence
  MKO10091853_B_Hmcn1
  gRNA
tgtgatgacaggaatcatat

SEQ ID NO: 91854 - DNA, 20 bp, Artificial Sequence
  MKO10091854_B_Hmg20a
  gRNA
tttcctactgaagaccttgt

SEQ ID NO: 91855 - DNA, 20 bp, Artificial Sequence
  MKO10091855_B_Hmg20a
  gRNA
aattacctcatgatcatgag

SEQ ID NO: 91856 - DNA, 20 bp, Artificial Sequence
  MKO10091856_B_Hmg20a
  gRNA
gatgtggctgcactgccata

SEQ ID NO: 91857 - DNA, 20 bp, Artificial Sequence
  MKO10091857_B_Hmg20b
  gRNA
cccggagatcacgaagatgt

SEQ ID NO: 91858 - DNA, 20 bp, Artificial Sequence
  MKO10091858_B_Hmg20b
  gRNA
ctcctagcggtacctggatg

SEQ ID NO: 91859 - DNA, 20 bp, Artificial Sequence
  MKO10091859_B_Hmg20b
  gRNA
cccttaccttgtgcccattc

SEQ ID NO: 91860 - DNA, 20 bp, Artificial Sequence
  MKO10091860_B_Hmga1-rs1
  gRNA
tgatcactgctcctcctcag

SEQ ID NO: 91861 - DNA, 20 bp, Artificial Sequence
  MKO10091861_B_Hmga1-rs1
  gRNA
gagaaggagaatgagcgagt

SEQ ID NO: 91862 - DNA, 20 bp, Artificial Sequence
  MKO10091862_B_Hmga1-rs1
  gRNA
ggaagaggagggcatctccc

SEQ ID NO: 91863 - DNA, 20 bp, Artificial Sequence
  MKO10091863_B_Hmga1
  gRNA
cccacaggagaaggaggaag

SEQ ID NO: 91864 - DNA, 20 bp, Artificial Sequence
  MKO10091864_B_Hmga1
  gRNA
ctcaccggaggctgcttgcg

SEQ ID NO: 91865 - DNA, 20 bp, Artificial Sequence
  MKO10091865_B_Hmga1
  gRNA
gagaaggagaatgagcgagt

SEQ ID NO: 91866 - DNA, 20 bp, Artificial Sequence
  MKO10091866_B_Hmga2
  gRNA
tccttactcacccatttcct

SEQ ID NO: 91867 - DNA, 20 bp, Artificial Sequence
  MKO10091867_B_Hmga2
  gRNA
ttgcagaaagcagagaccat

SEQ ID NO: 91868 - DNA, 20 bp, Artificial Sequence
  MKO10091868_B_Hmga2
  gRNA
cgttcagaagaagcctgctc

SEQ ID NO: 91869 - DNA, 20 bp, Artificial Sequence
  MKO10091869_B_Hmgb1
  gRNA
gaccatgtctgctaaagaaa

SEQ ID NO: 91870 - DNA, 20 bp, Artificial Sequence
  MKO10091870_B_Hmgb1
  gRNA
gagtaccgccccaaaatcaa

SEQ ID NO: 91871 - DNA, 20 bp, Artificial Sequence
  MKO10091871_B_Hmgb1
  gRNA
ctcatacttctccttcagct

SEQ ID NO: 91872 - DNA, 20 bp, Artificial Sequence
  MKO10091872_B_Hmgb2
  gRNA
ggaagatgacgaggaagaag

SEQ ID NO: 91873 - DNA, 20 bp, Artificial Sequence
  MKO10091873_B_Hmgb2
  gRNA
agggtgaccccaacaagccg

SEQ ID NO: 91874 - DNA, 20 bp, Artificial Sequence
  MKO10091874_B_Hmgb2
  gRNA
ttagctgctttctgctcata

SEQ ID NO: 91875 - DNA, 20 bp, Artificial Sequence
  MKO10091875_B_Hmgb3
  gRNA
gaaatcaaagtttgatgaaa

SEQ ID NO: 91876 - DNA, 20 bp, Artificial Sequence
  MKO10091876_B_Hmgb3
  gRNA
ctccttcagctttgctgcct

SEQ ID NO: 91877 - DNA, 20 bp, Artificial Sequence
  MKO10091877_B_Hmgb3
  gRNA
aagatcaaatccacaaaccc

SEQ ID NO: 91878 - DNA, 20 bp, Artificial Sequence
  MKO10091878_B_Hmgb4
  gRNA
tgaagcaagagaaccccgac

SEQ ID NO: 91879 - DNA, 20 bp, Artificial Sequence
  MKO10091879_B_Hmgb4
  gRNA
gggggcttccgcggtgcctt

SEQ ID NO: 91880 - DNA, 20 bp, Artificial Sequence
  MKO10091880_B_Hmgb4
  gRNA
tagcagagctcgataaagcc

SEQ ID NO: 91881 - DNA, 20 bp, Artificial Sequence
  MKO10091881_B_Hmgcll1
  gRNA
gaccatgctgaagtgatgcg

SEQ ID NO: 91882 - DNA, 20 bp, Artificial Sequence
  MKO10091882_B_Hmgcll1
  gRNA
tatgtgaaaatagtcgaagt

SEQ ID NO: 91883 - DNA, 20 bp, Artificial Sequence
  MKO10091883_B_Hmgcll1
  gRNA
atcaatcaactttcccaaac

SEQ ID NO: 91884 - DNA, 20 bp, Artificial Sequence
  MKO10091884_B_Hmgcl
  gRNA
tacccaccccagtgaagatc

SEQ ID NO: 91885 - DNA, 20 bp, Artificial Sequence
  MKO10091885_B_Hmgcl
  gRNA
tgaccactctgacgtcttga

SEQ ID NO: 91886 - DNA, 20 bp, Artificial Sequence
  MKO10091886_B_Hmgcl
  gRNA
gccaaagcaggtgaagatcg

SEQ ID NO: 91887 - DNA, 20 bp, Artificial Sequence
  MKO10091887_B_Hmgcr
  gRNA
agctcgtggaatggcaatcc

SEQ ID NO: 91888 - DNA, 20 bp, Artificial Sequence
  MKO10091888_B_Hmgcr
  gRNA
ttcctcgacaaagaactgac

SEQ ID NO: 91889 - DNA, 20 bp, Artificial Sequence
  MKO10091889_B_Hmgcr
  gRNA
agcctgtcagttctttgtcg

SEQ ID NO: 91890 - DNA, 20 bp, Artificial Sequence
  MKO10091890_B_Hmgcs1
  gRNA
agcgtttggcccaattagca

SEQ ID NO: 91891 - DNA, 20 bp, Artificial Sequence
  MKO10091891_B_Hmgcs1
  gRNA
ttctgcaccagtttacaata

SEQ ID NO: 91892 - DNA, 20 bp, Artificial Sequence
  MKO10091892_B_Hmgcs1
  gRNA
tcatgaagccaaaatcattc

SEQ ID NO: 91893 - DNA, 20 bp, Artificial Sequence
  MKO10091893_B_Hmgcs2
  gRNA
tcatatactgcacatcatcg

SEQ ID NO: 91894 - DNA, 20 bp, Artificial Sequence
  MKO10091894_B_Hmgcs2
  gRNA
ggctgcatagcatcgatcca

SEQ ID NO: 91895 - DNA, 20 bp, Artificial Sequence
  MKO10091895_B_Hmgcs2
  gRNA
gacattgcagtctacccgag

SEQ ID NO: 91896 - DNA, 20 bp, Artificial Sequence
  MKO10091896_B_Hmgn1
  gRNA
ccagaagcccgcccctgcca

SEQ ID NO: 91897 - DNA, 20 bp, Artificial Sequence
  MKO10091897_B_Hmgn1
  gRNA
cgcgaagccgaaaaaggccg

SEQ ID NO: 91898 - DNA, 20 bp, Artificial Sequence
  MKO10091898_B_Hmgn1
  gRNA
agcccaagcgccgctccgcg

SEQ ID NO: 91899 - DNA, 20 bp, Artificial Sequence
  MKO10091899_B_Hmgn2
  gRNA
agccacagagaagatctgcg

SEQ ID NO: 91900 - DNA, 20 bp, Artificial Sequence
  MKO10091900_B_Hmgn2
  gRNA
aacctcgcagatcttctctg

SEQ ID NO: 91901 - DNA, 20 bp, Artificial Sequence
  MKO10091901_B_Hmgn2
  gRNA
gccagagcccaaacctaaaa

SEQ ID NO: 91902 - DNA, 20 bp, Artificial Sequence
  MKO10091902_B_Hmgn3
  gRNA
tggaaccaagctaactaagc

SEQ ID NO: 91903 - DNA, 20 bp, Artificial Sequence
  MKO10091903_B_Hmgn3
  gRNA
gaaacctgttccaccaaaac

SEQ ID NO: 91904 - DNA, 20 bp, Artificial Sequence
  MKO10091904_B_Hmgn3
  gRNA
acaggacttacctttctctt

SEQ ID NO: 91905 - DNA, 20 bp, Artificial Sequence
  MKO10091905_B_Hmgn5
  gRNA
ggctgcaggtgatgtgagcc

SEQ ID NO: 91906 - DNA, 20 bp, Artificial Sequence
  MKO10091906_B_Hmgn5
  gRNA
ctaaaagagcatcaacttca

SEQ ID NO: 91907 - DNA, 20 bp, Artificial Sequence
  MKO10091907_B_Hmgn5
  gRNA
aaccaagaccacaaatgtcg

SEQ ID NO: 91908 - DNA, 20 bp, Artificial Sequence
  MKO10091908_B_Hmgxb3
  gRNA
ttctccacgaccgagtaagc

SEQ ID NO: 91909 - DNA, 20 bp, Artificial Sequence
  MKO10091909_B_Hmgxb3
  gRNA
ccacctaagtgccctacttg

SEQ ID NO: 91910 - DNA, 20 bp, Artificial Sequence
  MKO10091910_B_Hmgxb3
  gRNA
agactacaacatacacccgt

SEQ ID NO: 91911 - DNA, 20 bp, Artificial Sequence
  MKO10091911_B_Hmgxb4
  gRNA
aagaagtcgccgcgcaggtc

SEQ ID NO: 91912 - DNA, 20 bp, Artificial Sequence
  MKO10091912_B_Hmgxb4
  gRNA
tcccctgacgattactacta

SEQ ID NO: 91913 - DNA, 20 bp, Artificial Sequence
  MKO10091913_B_Hmgxb4
  gRNA
ggttcttacctatacctgga

SEQ ID NO: 91914 - DNA, 20 bp, Artificial Sequence
  MKO10091914_B_Hmha1
  gRNA
agctctgcgagtcatgcgcc

SEQ ID NO: 91915 - DNA, 20 bp, Artificial Sequence
  MKO10091915_B_Hmha1
  gRNA
cagtgtgtccgagttccttt

SEQ ID NO: 91916 - DNA, 20 bp, Artificial Sequence
  MKO10091916_B_Hmha1
  gRNA
agtggacagcagtactctcc

SEQ ID NO: 91917 - DNA, 20 bp, Artificial Sequence
  MKO10091917_B_Hmmr
  gRNA
agcaaagaagtctgtgtcaa

SEQ ID NO: 91918 - DNA, 20 bp, Artificial Sequence
  MKO10091918_B_Hmmr
  gRNA
aaaacttcagaagcaactaa

SEQ ID NO: 91919 - DNA, 20 bp, Artificial Sequence
  MKO10091919_B_Hmmr
  gRNA
tgtgaagagattagaaaaag

SEQ ID NO: 91920 - DNA, 20 bp, Artificial Sequence
  MKO10091920_B_Hmox1
  gRNA
gggatgagctagtgctgatc

SEQ ID NO: 91921 - DNA, 20 bp, Artificial Sequence
  MKO10091921_B_Hmox1
  gRNA
tcgtcagaggcctgctagcc

SEQ ID NO: 91922 - DNA, 20 bp, Artificial Sequence
  MKO10091922_B_Hmox1
  gRNA
gcccctgcagagacaccccg

SEQ ID NO: 91923 - DNA, 20 bp, Artificial Sequence
  MKO10091923_B_Hmox2
  gRNA
tcagcacagccacggttgtc

SEQ ID NO: 91924 - DNA, 20 bp, Artificial Sequence
  MKO10091924_B_Hmox2
  gRNA
ggtccttcacatgtagtacc

SEQ ID NO: 91925 - DNA, 20 bp, Artificial Sequence
  MKO10091925_B_Hmox2
  gRNA
gtctggctgagcagcataaa

SEQ ID NO: 91926 - DNA, 20 bp, Artificial Sequence
  MKO10091926_B_Hmx1
  gRNA
agagcaccggcacgcggacc

SEQ ID NO: 91927 - DNA, 20 bp, Artificial Sequence
  MKO10091927_B_Hmx1
  gRNA
cgcgcgaaggaagggcaccg

SEQ ID NO: 91928 - DNA, 20 bp, Artificial Sequence
  MKO10091928_B_Hmx1
  gRNA
acgacgcagggcccggcgac

SEQ ID NO: 91929 - DNA, 20 bp, Artificial Sequence
  MKO10091929_B_Hmx2
  gRNA
gggctcccgcggtgcctcgg

SEQ ID NO: 91930 - DNA, 20 bp, Artificial Sequence
  MKO10091930_B_Hmx2
  gRNA
agccaacatggcacacgcgt

SEQ ID NO: 91931 - DNA, 20 bp, Artificial Sequence
  MKO10091931_B_Hmx2
  gRNA
tgggcatgccgctcgtgttt

SEQ ID NO: 91932 - DNA, 20 bp, Artificial Sequence
  MKO10091932_B_Hmx3
  gRNA
ctgcgagagcgcgaagcccg

SEQ ID NO: 91933 - DNA, 20 bp, Artificial Sequence
  MKO10091933_B_Hmx3
  gRNA
gacgaccgtaggggcgacta

SEQ ID NO: 91934 - DNA, 20 bp, Artificial Sequence
  MKO10091934_B_Hmx3
  gRNA
tgaggtgaagcgacgcggcc

SEQ ID NO: 91935 - DNA, 20 bp, Artificial Sequence
  MKO10091935_B_Hn1l
  gRNA
atgtcactggtcttcccccc

SEQ ID NO: 91936 - DNA, 20 bp, Artificial Sequence
  MKO10091936_B_Hn1l
  gRNA
tgacagtcatgaacccagac

SEQ ID NO: 91937 - DNA, 20 bp, Artificial Sequence
  MKO10091937_B_Hn1l
  gRNA
ggttcatgactgtcaactgt

SEQ ID NO: 91938 - DNA, 20 bp, Artificial Sequence
  MKO10091938_B_Hn1
  gRNA
ggcacaggagcagcgggcac

SEQ ID NO: 91939 - DNA, 20 bp, Artificial Sequence
  MKO10091939_B_Hn1
  gRNA
cggaagagaaccccccatct

SEQ ID NO: 91940 - DNA, 20 bp, Artificial Sequence
  MKO10091940_B_Hn1
  gRNA
agccagcagaacagcctgtg

SEQ ID NO: 91941 - DNA, 20 bp, Artificial Sequence
  MKO10091941_B_Hnf1a
  gRNA
accatcttcgccacgcgcca

SEQ ID NO: 91942 - DNA, 20 bp, Artificial Sequence
  MKO10091942_B_Hnf1a
  gRNA
ctcactctaggtgtacggta

SEQ ID NO: 91943 - DNA, 20 bp, Artificial Sequence
  MKO10091943_B_Hnf1a
  gRNA
gtacgtccgcaagcagcgag

SEQ ID NO: 91944 - DNA, 20 bp, Artificial Sequence
  MKO10091944_B_Hnf1b
  gRNA
atgcgggcccccatttaaac

SEQ ID NO: 91945 - DNA, 20 bp, Artificial Sequence
  MKO10091945_B_Hnf1b
  gRNA
agacttgctgtaaaaccgac

SEQ ID NO: 91946 - DNA, 20 bp, Artificial Sequence
  MKO10091946_B_Hnf1b
  gRNA
tcttcgacaatcagtcacca

SEQ ID NO: 91947 - DNA, 20 bp, Artificial Sequence
  MKO10091947_B_Hnf4a
  gRNA
agctgctggtcctggtcgag

SEQ ID NO: 91948 - DNA, 20 bp, Artificial Sequence
  MKO10091948_B_Hnf4a
  gRNA
taagcctgcagtaacgacac

SEQ ID NO: 91949 - DNA, 20 bp, Artificial Sequence
  MKO10091949_B_Hnf4a
  gRNA
ggccttctgcgaactccttc

SEQ ID NO: 91950 - DNA, 20 bp, Artificial Sequence
  MKO10091950_B_Hnf4g
  gRNA
acatcatacctggtcatcca

SEQ ID NO: 91951 - DNA, 20 bp, Artificial Sequence
  MKO10091951_B_Hnf4g
  gRNA
tattcatacttgtggtctct

SEQ ID NO: 91952 - DNA, 20 bp, Artificial Sequence
  MKO10091952_B_Hnf4g
  gRNA
gcctttgcagccatcacaac

SEQ ID NO: 91953 - DNA, 20 bp, Artificial Sequence
  MKO10091953_B_Hnmt
  gRNA
ttgacaatttgttcagcact

SEQ ID NO: 91954 - DNA, 20 bp, Artificial Sequence
  MKO10091954_B_Hnmt
  gRNA
gaaattaagattctgagtgt

SEQ ID NO: 91955 - DNA, 20 bp, Artificial Sequence
  MKO10091955_B_Hnmt
  gRNA
ttagatgctgtattatgtaa

SEQ ID NO: 91956 - DNA, 20 bp, Artificial Sequence
  MKO10091956_B_Hnrnpa0
  gRNA
agcgactacggcaacggctt

SEQ ID NO: 91957 - DNA, 20 bp, Artificial Sequence
  MKO10091957_B_Hnrnpa0
  gRNA
agctgaagcgcgccgtgtcg

SEQ ID NO: 91958 - DNA, 20 bp, Artificial Sequence
  MKO10091958_B_Hnrnpa0
  gRNA
cttcgtgacctactcgaacg

SEQ ID NO: 91959 - DNA, 20 bp, Artificial Sequence
  MKO10091959_B_Hnrnpa1
  gRNA
tctcttgagacagctctctt

SEQ ID NO: 91960 - DNA, 20 bp, Artificial Sequence
  MKO10091960_B_Hnrnpa1
  gRNA
atccaaacaccaagagatcc

SEQ ID NO: 91961 - DNA, 20 bp, Artificial Sequence
  MKO10091961_B_Hnrnpa1
  gRNA
caatcttatccacagagtca

SEQ ID NO: 91962 - DNA, 20 bp, Artificial Sequence
  MKO10091962_B_Hnrnpa2b1
  gRNA
aaaacgtgctgtagcaagag

SEQ ID NO: 91963 - DNA, 20 bp, Artificial Sequence
  MKO10091963_B_Hnrnpa2b1
  gRNA
tggaattaaggaagatactg

SEQ ID NO: 91964 - DNA, 20 bp, Artificial Sequence
  MKO10091964_B_Hnrnpa2b1
  gRNA
ttgcaggagtctggaaaacc

SEQ ID NO: 91965 - DNA, 20 bp, Artificial Sequence
  MKO10091965_B_Hnrnpa3
  gRNA
ttctcttaagctatcatctg

SEQ ID NO: 91966 - DNA, 20 bp, Artificial Sequence
  MKO10091966_B_Hnrnpa3
  gRNA
tctctagaaacagctctctt

SEQ ID NO: 91967 - DNA, 20 bp, Artificial Sequence
  MKO10091967_B_Hnrnpa3
  gRNA
ccccaaacaaaacgttccag

SEQ ID NO: 91968 - DNA, 20 bp, Artificial Sequence
  MKO10091968_B_Hnrnpab
  gRNA
tcgtgtcattgaccctaaaa

SEQ ID NO: 91969 - DNA, 20 bp, Artificial Sequence
  MKO10091969_B_Hnrnpab
  gRNA
ccctcttgatcgtccagtgt

SEQ ID NO: 91970 - DNA, 20 bp, Artificial Sequence
  MKO10091970_B_Hnrnpab
  gRNA
tacacaggtcttagatcaga

SEQ ID NO: 91971 - DNA, 20 bp, Artificial Sequence
  MKO10091971_B_Hnrnpc
  gRNA
cttctccgtcccctctactc

SEQ ID NO: 91972 - DNA, 20 bp, Artificial Sequence
  MKO10091972_B_Hnrnpc
  gRNA
tttcagttcctcatttgact

SEQ ID NO: 91973 - DNA, 20 bp, Artificial Sequence
  MKO10091973_B_Hnrnpc
  gRNA
ggatgtacagttacccagcg

SEQ ID NO: 91974 - DNA, 20 bp, Artificial Sequence
  MKO10091974_B_Hnrnpdl
  gRNA
gcaaattgatagaccccaaa

SEQ ID NO: 91975 - DNA, 20 bp, Artificial Sequence
  MKO10091975_B_Hnrnpdl
  gRNA
cctagcacctcctcttccgc

SEQ ID NO: 91976 - DNA, 20 bp, Artificial Sequence
  MKO10091976_B_Hnrnpdl
  gRNA
ctttctaacagtttctttac

SEQ ID NO: 91977 - DNA, 20 bp, Artificial Sequence
  MKO10091977_B_Hnrnpd
  gRNA
tgaatccatagagctcccta

SEQ ID NO: 91978 - DNA, 20 bp, Artificial Sequence
  MKO10091978_B_Hnrnpd
  gRNA
gaaagtcattgatcctaaaa

SEQ ID NO: 91979 - DNA, 20 bp, Artificial Sequence
  MKO10091979_B_Hnrnpd
  gRNA
ccccttgatcgccctgtgat

SEQ ID NO: 91980 - DNA, 20 bp, Artificial Sequence
  MKO10091980_B_Hnrnpf
  gRNA
gtccatgatgctgggccctg

SEQ ID NO: 91981 - DNA, 20 bp, Artificial Sequence
  MKO10091981_B_Hnrnpf
  gRNA
gccctctcatgtggacgcag

SEQ ID NO: 91982 - DNA, 20 bp, Artificial Sequence
  MKO10091982_B_Hnrnpf
  gRNA
aggcttcggggactcccatt

SEQ ID NO: 91983 - DNA, 20 bp, Artificial Sequence
  MKO10091983_B_Hnrnph1
  gRNA
tgacccaccacgaaaactta

SEQ ID NO: 91984 - DNA, 20 bp, Artificial Sequence
  MKO10091984_B_Hnrnph1
  gRNA
cggcttagaggactcccttt

SEQ ID NO: 91985 - DNA, 20 bp, Artificial Sequence
  MKO10091985_B_Hnrnph1
  gRNA
caagtcaaacaacgttgaaa

SEQ ID NO: 91986 - DNA, 20 bp, Artificial Sequence
  MKO10091986_B_Hnrnph2
  gRNA
ggcactgtgtacatatgagg

SEQ ID NO: 91987 - DNA, 20 bp, Artificial Sequence
  MKO10091987_B_Hnrnph2
  gRNA
tggatatgaccaagttcttc

SEQ ID NO: 91988 - DNA, 20 bp, Artificial Sequence
  MKO10091988_B_Hnrnph2
  gRNA
tatttcaatgtgcactctca

SEQ ID NO: 91989 - DNA, 20 bp, Artificial Sequence
  MKO10091989_B_Hnrnph3
  gRNA
aacattgacgatggactacc

SEQ ID NO: 91990 - DNA, 20 bp, Artificial Sequence
  MKO10091990_B_Hnrnph3
  gRNA
ggctataataattatggcta

SEQ ID NO: 91991 - DNA, 20 bp, Artificial Sequence
  MKO10091991_B_Hnrnph3
  gRNA
atcgtcaatgttatcccatt

SEQ ID NO: 91992 - DNA, 20 bp, Artificial Sequence
  MKO10091992_B_Hnrnpk
  gRNA
atctagaaatactgatgaga

SEQ ID NO: 91993 - DNA, 20 bp, Artificial Sequence
  MKO10091993_B_Hnrnpk
  gRNA
aaaaggaggcaagaatatta

SEQ ID NO: 91994 - DNA, 20 bp, Artificial Sequence
  MKO10091994_B_Hnrnpk
  gRNA
gtttcagtcccagacagcag

SEQ ID NO: 91995 - DNA, 20 bp, Artificial Sequence
  MKO10091995_B_Hnrnpll
  gRNA
gtcagtcctttgcgcccaga

SEQ ID NO: 91996 - DNA, 20 bp, Artificial Sequence
  MKO10091996_B_Hnrnpll
  gRNA
tcccctgttgtccatgttcg

SEQ ID NO: 91997 - DNA, 20 bp, Artificial Sequence
  MKO10091997_B_Hnrnpll
  gRNA
tgagtgctgctttagccttc

SEQ ID NO: 91998 - DNA, 20 bp, Artificial Sequence
  MKO10091998_B_Hnrnpl
  gRNA
gatgtcagccccattgagtg

SEQ ID NO: 91999 - DNA, 20 bp, Artificial Sequence
  MKO10091999_B_Hnrnpl
  gRNA
gcaaagtgcccagcgcgcca

SEQ ID NO: 92000 - DNA, 20 bp, Artificial Sequence
  MKO10092000_B_Hnrnpl
  gRNA
tagcctgaactccgttcttc

SEQ ID NO: 92001 - DNA, 20 bp, Artificial Sequence
  MKO10092001_B_Hnrnpm
  gRNA
gacctactcagaatgagaag

SEQ ID NO: 92002 - DNA, 20 bp, Artificial Sequence
  MKO10092002_B_Hnrnpm
  gRNA
tggacgctgaaggaaagtca

SEQ ID NO: 92003 - DNA, 20 bp, Artificial Sequence
  MKO10092003_B_Hnrnpm
  gRNA
agttggtgaggtaacatacg

SEQ ID NO: 92004 - DNA, 20 bp, Artificial Sequence
  MKO10092004_B_Hnrnpr
  gRNA
tttaggattggtagcttatg

SEQ ID NO: 92005 - DNA, 20 bp, Artificial Sequence
  MKO10092005_B_Hnrnpr
  gRNA
atctctaggccttgcttgag

SEQ ID NO: 92006 - DNA, 20 bp, Artificial Sequence
  MKO10092006_B_Hnrnpr
  gRNA
ttatactttggatgtgacca

SEQ ID NO: 92007 - DNA, 20 bp, Artificial Sequence
  MKO10092007_B_Hnrnpul1
  gRNA
acggcctcgattctcttcaa

SEQ ID NO: 92008 - DNA, 20 bp, Artificial Sequence
  MKO10092008_B_Hnrnpul1
  gRNA
ctcgtagaattggttctgtc

SEQ ID NO: 92009 - DNA, 20 bp, Artificial Sequence
  MKO10092009_B_Hnrnpul1
  gRNA
cagcagcaagtatatcaccc

SEQ ID NO: 92010 - DNA, 20 bp, Artificial Sequence
  MKO10092010_B_Hnrnpul2
  gRNA
caaataagcaaagaccgata

SEQ ID NO: 92011 - DNA, 20 bp, Artificial Sequence
  MKO10092011_B_Hnrnpul2
  gRNA
tacttcttgccccagaccaa

SEQ ID NO: 92012 - DNA, 20 bp, Artificial Sequence
  MKO10092012_B_Hnrnpul2
  gRNA
caccttaccaagctgtgaac

SEQ ID NO: 92013 - DNA, 20 bp, Artificial Sequence
  MKO10092013_B_Hnrnpu
  gRNA
ggctggtcactaaccacaag

SEQ ID NO: 92014 - DNA, 20 bp, Artificial Sequence
  MKO10092014_B_Hnrnpu
  gRNA
tcgaagaaaacaagtacagc

SEQ ID NO: 92015 - DNA, 20 bp, Artificial Sequence
  MKO10092015_B_Hnrnpu
  gRNA
aaaagaccgcgagaagatca

SEQ ID NO: 92016 - DNA, 20 bp, Artificial Sequence
  MKO10092016_B_Hoga1
  gRNA
ggtggtgagccgcgtgcgcc

SEQ ID NO: 92017 - DNA, 20 bp, Artificial Sequence
  MKO10092017_B_Hoga1
  gRNA
cgctcgaggctggtcaggaa

SEQ ID NO: 92018 - DNA, 20 bp, Artificial Sequence
  MKO10092018_B_Hoga1
  gRNA
gggacactgtacaacaccac

SEQ ID NO: 92019 - DNA, 20 bp, Artificial Sequence
  MKO10092019_B_Homer1
  gRNA
acccacctgtgaaggggtac

SEQ ID NO: 92020 - DNA, 20 bp, Artificial Sequence
  MKO10092020_B_Homer1
  gRNA
gtccataaacagtgtttgcc

SEQ ID NO: 92021 - DNA, 20 bp, Artificial Sequence
  MKO10092021_B_Homer1
  gRNA
ttgacaccagaaagtatcaa

SEQ ID NO: 92022 - DNA, 20 bp, Artificial Sequence
  MKO10092022_B_Homer2
  gRNA
cccgaacttctgtgacgttt

SEQ ID NO: 92023 - DNA, 20 bp, Artificial Sequence
  MKO10092023_B_Homer2
  gRNA
gtcggctgggctcgcgtgag

SEQ ID NO: 92024 - DNA, 20 bp, Artificial Sequence
  MKO10092024_B_Homer2
  gRNA
agcagagccaacaccgtgtt

SEQ ID NO: 92025 - DNA, 20 bp, Artificial Sequence
  MKO10092025_B_Homer3
  gRNA
ccattgcccgaacttctgag

SEQ ID NO: 92026 - DNA, 20 bp, Artificial Sequence
  MKO10092026_B_Homer3
  gRNA
agaattcactagtactggcc

SEQ ID NO: 92027 - DNA, 20 bp, Artificial Sequence
  MKO10092027_B_Homer3
  gRNA
agatttctctcgagccagcc

SEQ ID NO: 92028 - DNA, 20 bp, Artificial Sequence
  MKO10092028_B_Homez
  gRNA
ctcgcccggagatcattcaa

SEQ ID NO: 92029 - DNA, 20 bp, Artificial Sequence
  MKO10092029_B_Homez
  gRNA
atcaagtaatgagaccgatg

SEQ ID NO: 92030 - DNA, 20 bp, Artificial Sequence
  MKO10092030_B_Homez
  gRNA
aatcttctcgtcgtgcccat

SEQ ID NO: 92031 - DNA, 20 bp, Artificial Sequence
  MKO10092031_B_Hook1
  gRNA
gatagtaacttgtaattcca

SEQ ID NO: 92032 - DNA, 20 bp, Artificial Sequence
  MKO10092032_B_Hook1
  gRNA
ttgatgaagaacttgtgcca

SEQ ID NO: 92033 - DNA, 20 bp, Artificial Sequence
  MKO10092033_B_Hook1
  gRNA
cactgagtgtgcagatcctg

SEQ ID NO: 92034 - DNA, 20 bp, Artificial Sequence
  MKO10092034_B_Hook2
  gRNA
cattcgttgttgaaccagga

SEQ ID NO: 92035 - DNA, 20 bp, Artificial Sequence
  MKO10092035_B_Hook2
  gRNA
tcgccaatgaggctcacatc

SEQ ID NO: 92036 - DNA, 20 bp, Artificial Sequence
  MKO10092036_B_Hook2
  gRNA
ttcaacaacgaatggctcca

SEQ ID NO: 92037 - DNA, 20 bp, Artificial Sequence
  MKO10092037_B_Hook3
  gRNA
cttcctgacgtgaacctcat

SEQ ID NO: 92038 - DNA, 20 bp, Artificial Sequence
  MKO10092038_B_Hook3
  gRNA
gaacggcgttgtcatgtccc

SEQ ID NO: 92039 - DNA, 20 bp, Artificial Sequence
  MKO10092039_B_Hook3
  gRNA
catccgaatgctccccaatg

SEQ ID NO: 92040 - DNA, 20 bp, Artificial Sequence
  MKO10092040_B_Hopx
  gRNA
gaaatggtttaagcagcgcc

SEQ ID NO: 92041 - DNA, 20 bp, Artificial Sequence
  MKO10092041_B_Hopx
  gRNA
ctcctccgtgagacccgcct

SEQ ID NO: 92042 - DNA, 20 bp, Artificial Sequence
  MKO10092042_B_Hopx
  gRNA
gctgtgcctcatcgcagccg

SEQ ID NO: 92043 - DNA, 20 bp, Artificial Sequence
  MKO10092043_B_Hormad1
  gRNA
aaagaagataaaaattgtcc

SEQ ID NO: 92044 - DNA, 20 bp, Artificial Sequence
  MKO10092044_B_Hormad1
  gRNA
tgcaagatactgaaacagct

SEQ ID NO: 92045 - DNA, 20 bp, Artificial Sequence
  MKO10092045_B_Hormad1
  gRNA
aatctttgatgtttgtgaag

SEQ ID NO: 92046 - DNA, 20 bp, Artificial Sequence
  MKO10092046_B_Hormad2
  gRNA
ggtcattacatattattaaa

SEQ ID NO: 92047 - DNA, 20 bp, Artificial Sequence
  MKO10092047_B_Hormad2
  gRNA
caactttaccatccaaacgg

SEQ ID NO: 92048 - DNA, 20 bp, Artificial Sequence
  MKO10092048_B_Hormad2
  gRNA
actcatgctcatttgtcact

SEQ ID NO: 92049 - DNA, 20 bp, Artificial Sequence
  MKO10092049_B_Hoxa10
  gRNA
ggacgctacggctgatctct

SEQ ID NO: 92050 - DNA, 20 bp, Artificial Sequence
  MKO10092050_B_Hoxa10
  gRNA
ccgtgccgtaggcctgcgac

SEQ ID NO: 92051 - DNA, 20 bp, Artificial Sequence
  MKO10092051_B_Hoxa10
  gRNA
ggcgggtcgaaaccgcgccc

SEQ ID NO: 92052 - DNA, 20 bp, Artificial Sequence
  MKO10092052_B_Hoxa11
  gRNA
tagctgagtagtactgtaac

SEQ ID NO: 92053 - DNA, 20 bp, Artificial Sequence
  MKO10092053_B_Hoxa11
  gRNA
tatgtcattgggcgcgaaga

SEQ ID NO: 92054 - DNA, 20 bp, Artificial Sequence
  MKO10092054_B_Hoxa11
  gRNA
cagcacgtcgccaggcacgc

SEQ ID NO: 92055 - DNA, 20 bp, Artificial Sequence
  MKO10092055_B_Hoxa13
  gRNA
gcagcttgaagaaacgctta

SEQ ID NO: 92056 - DNA, 20 bp, Artificial Sequence
  MKO10092056_B_Hoxa13
  gRNA
gcgccatcaggttgcggcac

SEQ ID NO: 92057 - DNA, 20 bp, Artificial Sequence
  MKO10092057_B_Hoxa13
  gRNA
caccgagaagttgccccccg

SEQ ID NO: 92058 - DNA, 20 bp, Artificial Sequence
  MKO10092058_B_Hoxa1
  gRNA
aagttctgcgcgccatagct

SEQ ID NO: 92059 - DNA, 20 bp, Artificial Sequence
  MKO10092059_B_Hoxa1
  gRNA
cagaacttcagtgcgcctta

SEQ ID NO: 92060 - DNA, 20 bp, Artificial Sequence
  MKO10092060_B_Hoxa1
  gRNA
cggcgacgaccgcttcctag

SEQ ID NO: 92061 - DNA, 20 bp, Artificial Sequence
  MKO10092061_B_Hoxa2
  gRNA
agtacctttgcagaccccgc

SEQ ID NO: 92062 - DNA, 20 bp, Artificial Sequence
  MKO10092062_B_Hoxa2
  gRNA
cgggctgccgcgactgcccg

SEQ ID NO: 92063 - DNA, 20 bp, Artificial Sequence
  MKO10092063_B_Hoxa2
  gRNA
tacgaatttgagcgagagat

SEQ ID NO: 92064 - DNA, 20 bp, Artificial Sequence
  MKO10092064_B_Hoxa3
  gRNA
aggcaacccataggcgcctt

SEQ ID NO: 92065 - DNA, 20 bp, Artificial Sequence
  MKO10092065_B_Hoxa3
  gRNA
tacgacagctcagcgatcta

SEQ ID NO: 92066 - DNA, 20 bp, Artificial Sequence
  MKO10092066_B_Hoxa3
  gRNA
gatcgctgagctgtcgtagt

SEQ ID NO: 92067 - DNA, 20 bp, Artificial Sequence
  MKO10092067_B_Hoxa4
  gRNA
cgatctcgatgcggcgccgc

SEQ ID NO: 92068 - DNA, 20 bp, Artificial Sequence
  MKO10092068_B_Hoxa4
  gRNA
tccttgcccttcgggcccgc

SEQ ID NO: 92069 - DNA, 20 bp, Artificial Sequence
  MKO10092069_B_Hoxa4
  gRNA
ctgccccccgtcgcgacagc

SEQ ID NO: 92070 - DNA, 20 bp, Artificial Sequence
  MKO10092070_B_Hoxa5
  gRNA
gcggaaagccccccctgccg

SEQ ID NO: 92071 - DNA, 20 bp, Artificial Sequence
  MKO10092071_B_Hoxa5
  gRNA
gttccgtgagcgaacaattc

SEQ ID NO: 92072 - DNA, 20 bp, Artificial Sequence
  MKO10092072_B_Hoxa5
  gRNA
gactcggcgagcatgcactc

SEQ ID NO: 92073 - DNA, 20 bp, Artificial Sequence
  MKO10092073_B_Hoxa6
  gRNA
ctgcccacaggtgccgtgta

SEQ ID NO: 92074 - DNA, 20 bp, Artificial Sequence
  MKO10092074_B_Hoxa6
  gRNA
aaccgggcatcctacgagta

SEQ ID NO: 92075 - DNA, 20 bp, Artificial Sequence
  MKO10092075_B_Hoxa6
  gRNA
ccccgtactcgtaggatgcc

SEQ ID NO: 92076 - DNA, 20 bp, Artificial Sequence
  MKO10092076_B_Hoxa7
  gRNA
cactgcagccccggaagacg

SEQ ID NO: 92077 - DNA, 20 bp, Artificial Sequence
  MKO10092077_B_Hoxa7
  gRNA
gccctcgtccgccttgtcgc

SEQ ID NO: 92078 - DNA, 20 bp, Artificial Sequence
  MKO10092078_B_Hoxa7
  gRNA
gtagccgcttctctgcgagt

SEQ ID NO: 92079 - DNA, 20 bp, Artificial Sequence
  MKO10092079_B_Hoxa9
  gRNA
gctcaacctcaccgaaaggc

SEQ ID NO: 92080 - DNA, 20 bp, Artificial Sequence
  MKO10092080_B_Hoxa9
  gRNA
caaacaccgccgccttggac

SEQ ID NO: 92081 - DNA, 20 bp, Artificial Sequence
  MKO10092081_B_Hoxa9
  gRNA
cgcgtgcactgggttccacg

SEQ ID NO: 92082 - DNA, 20 bp, Artificial Sequence
  MKO10092082_B_Hoxb13
  gRNA
ctgaacgccagattaccatc

SEQ ID NO: 92083 - DNA, 20 bp, Artificial Sequence
  MKO10092083_B_Hoxb13
  gRNA
gcccggcaattatgccacct

SEQ ID NO: 92084 - DNA, 20 bp, Artificial Sequence
  MKO10092084_B_Hoxb13
  gRNA
tgcaggagtttccgaagggt

SEQ ID NO: 92085 - DNA, 20 bp, Artificial Sequence
  MKO10092085_B_Hoxb1
  gRNA
ggggggttgcccgacagcta

SEQ ID NO: 92086 - DNA, 20 bp, Artificial Sequence
  MKO10092086_B_Hoxb1
  gRNA
cctagcgaaggtgtccgagc

SEQ ID NO: 92087 - DNA, 20 bp, Artificial Sequence
  MKO10092087_B_Hoxb1
  gRNA
agctgggctccgtagctcga

SEQ ID NO: 92088 - DNA, 20 bp, Artificial Sequence
  MKO10092088_B_Hoxb2
  gRNA
acctgatggtgatccgacct

SEQ ID NO: 92089 - DNA, 20 bp, Artificial Sequence
  MKO10092089_B_Hoxb2
  gRNA
ctggctctcccgcgtcgtcc

SEQ ID NO: 92090 - DNA, 20 bp, Artificial Sequence
  MKO10092090_B_Hoxb2
  gRNA
aaaaggcgaatcctgccgct

SEQ ID NO: 92091 - DNA, 20 bp, Artificial Sequence
  MKO10092091_B_Hoxb3
  gRNA
aaaagcggcccccccaagtg

SEQ ID NO: 92092 - DNA, 20 bp, Artificial Sequence
  MKO10092092_B_Hoxb3
  gRNA
gttggagccggcaccgcact

SEQ ID NO: 92093 - DNA, 20 bp, Artificial Sequence
  MKO10092093_B_Hoxb3
  gRNA
tcgggtccagcagaaggttg

SEQ ID NO: 92094 - DNA, 20 bp, Artificial Sequence
  MKO10092094_B_Hoxb4
  gRNA
gacgacgggctctttgcacg

SEQ ID NO: 92095 - DNA, 20 bp, Artificial Sequence
  MKO10092095_B_Hoxb4
  gRNA
gtgcactgtgcagcgctacg

SEQ ID NO: 92096 - DNA, 20 bp, Artificial Sequence
  MKO10092096_B_Hoxb4
  gRNA
atcgctacctgacgcgccgc

SEQ ID NO: 92097 - DNA, 20 bp, Artificial Sequence
  MKO10092097_B_Hoxb5
  gRNA
ggtagcgagtataggcggtc

SEQ ID NO: 92098 - DNA, 20 bp, Artificial Sequence
  MKO10092098_B_Hoxb5
  gRNA
cgcgctggcctcgtctattt

SEQ ID NO: 92099 - DNA, 20 bp, Artificial Sequence
  MKO10092099_B_Hoxb5
  gRNA
cacctctacggccgcgcccg

SEQ ID NO: 92100 - DNA, 20 bp, Artificial Sequence
  MKO10092100_B_Hoxb6
  gRNA
ttgcagcaccttcactcggc

SEQ ID NO: 92101 - DNA, 20 bp, Artificial Sequence
  MKO10092101_B_Hoxb6
  gRNA
gctccacgcccgtctacccg

SEQ ID NO: 92102 - DNA, 20 bp, Artificial Sequence
  MKO10092102_B_Hoxb6
  gRNA
cgcgtccttctcccggtaga

SEQ ID NO: 92103 - DNA, 20 bp, Artificial Sequence
  MKO10092103_B_Hoxb7
  gRNA
cctccgcttccgccttgtcc

SEQ ID NO: 92104 - DNA, 20 bp, Artificial Sequence
  MKO10092104_B_Hoxb7
  gRNA
gccgccttggcggggtcgcc

SEQ ID NO: 92105 - DNA, 20 bp, Artificial Sequence
  MKO10092105_B_Hoxb7
  gRNA
tggagcgaaaaccgaacttg

SEQ ID NO: 92106 - DNA, 20 bp, Artificial Sequence
  MKO10092106_B_Hoxb8
  gRNA
cctgggcggccgacccaccg

SEQ ID NO: 92107 - DNA, 20 bp, Artificial Sequence
  MKO10092107_B_Hoxb8
  gRNA
ggcaccagagaccgccgagc

SEQ ID NO: 92108 - DNA, 20 bp, Artificial Sequence
  MKO10092108_B_Hoxb8
  gRNA
cctccgcttgcgagtcagat

SEQ ID NO: 92109 - DNA, 20 bp, Artificial Sequence
  MKO10092109_B_Hoxb9
  gRNA
cttgtctctcactcagattg

SEQ ID NO: 92110 - DNA, 20 bp, Artificial Sequence
  MKO10092110_B_Hoxb9
  gRNA
gggcacgcccgagtacagtt

SEQ ID NO: 92111 - DNA, 20 bp, Artificial Sequence
  MKO10092111_B_Hoxb9
  gRNA
gtacgcgaacccgcggcagc

SEQ ID NO: 92112 - DNA, 20 bp, Artificial Sequence
  MKO10092112_B_Hoxc10
  gRNA
gttcccggatccgattctct

SEQ ID NO: 92113 - DNA, 20 bp, Artificial Sequence
  MKO10092113_B_Hoxc10
  gRNA
tgtaactccgaactcgtacg

SEQ ID NO: 92114 - DNA, 20 bp, Artificial Sequence
  MKO10092114_B_Hoxc10
  gRNA
caacccgcgcaccgaacatc

SEQ ID NO: 92115 - DNA, 20 bp, Artificial Sequence
  MKO10092115_B_Hoxc11
  gRNA
ttcctgaaaaatactgcagc

SEQ ID NO: 92116 - DNA, 20 bp, Artificial Sequence
  MKO10092116_B_Hoxc11
  gRNA
ggcgctgacttcggcgaacg

SEQ ID NO: 92117 - DNA, 20 bp, Artificial Sequence
  MKO10092117_B_Hoxc11
  gRNA
aagacgagtagctgttccga

SEQ ID NO: 92118 - DNA, 20 bp, Artificial Sequence
  MKO10092118_B_Hoxc12
  gRNA
ccgagagttccctccgacgc

SEQ ID NO: 92119 - DNA, 20 bp, Artificial Sequence
  MKO10092119_B_Hoxc12
  gRNA
aagtacgactacacggcgag

SEQ ID NO: 92120 - DNA, 20 bp, Artificial Sequence
  MKO10092120_B_Hoxc12
  gRNA
cacgtgcgagttggctcgcg

SEQ ID NO: 92121 - DNA, 20 bp, Artificial Sequence
  MKO10092121_B_Hoxc13
  gRNA
tctctttcacgcgtcgattc

SEQ ID NO: 92122 - DNA, 20 bp, Artificial Sequence
  MKO10092122_B_Hoxc13
  gRNA
gcgcattggcgcgccgcctc

SEQ ID NO: 92123 - DNA, 20 bp, Artificial Sequence
  MKO10092123_B_Hoxc13
  gRNA
agcgcgtcgtgacgcggctc

SEQ ID NO: 92124 - DNA, 20 bp, Artificial Sequence
  MKO10092124_B_Hoxc4
  gRNA
gtaggctgtcctcgagcgct

SEQ ID NO: 92125 - DNA, 20 bp, Artificial Sequence
  MKO10092125_B_Hoxc4
  gRNA
cctggcaattcgcgagccca

SEQ ID NO: 92126 - DNA, 20 bp, Artificial Sequence
  MKO10092126_B_Hoxc4
  gRNA
ccgtgggctcgcgaattgcc

SEQ ID NO: 92127 - DNA, 20 bp, Artificial Sequence
  MKO10092127_B_Hoxc5
  gRNA
caatccgccgtagcagtacc

SEQ ID NO: 92128 - DNA, 20 bp, Artificial Sequence
  MKO10092128_B_Hoxc5
  gRNA
accgctacctcactcgccgc

SEQ ID NO: 92129 - DNA, 20 bp, Artificial Sequence
  MKO10092129_B_Hoxc5
  gRNA
ttagctcgctcctccagcgc

SEQ ID NO: 92130 - DNA, 20 bp, Artificial Sequence
  MKO10092130_B_Hoxc6
  gRNA
tccttatcctgccacctcgc

SEQ ID NO: 92131 - DNA, 20 bp, Artificial Sequence
  MKO10092131_B_Hoxc6
  gRNA
aggggcaaccgccgacagcc

SEQ ID NO: 92132 - DNA, 20 bp, Artificial Sequence
  MKO10092132_B_Hoxc6
  gRNA
tctggtaccgagagtagatc

SEQ ID NO: 92133 - DNA, 20 bp, Artificial Sequence
  MKO10092133_B_Hoxc8
  gRNA
tgtcgaccgctgcgccgccc

SEQ ID NO: 92134 - DNA, 20 bp, Artificial Sequence
  MKO10092134_B_Hoxc8
  gRNA
ggactcgccgcctttgtatt

SEQ ID NO: 92135 - DNA, 20 bp, Artificial Sequence
  MKO10092135_B_Hoxc8
  gRNA
ttacagccggtatcagacct

SEQ ID NO: 92136 - DNA, 20 bp, Artificial Sequence
  MKO10092136_B_Hoxc9
  gRNA
cacctcgtaccgacggtccc

SEQ ID NO: 92137 - DNA, 20 bp, Artificial Sequence
  MKO10092137_B_Hoxc9
  gRNA
gcgagccgtacatgtagtcc

SEQ ID NO: 92138 - DNA, 20 bp, Artificial Sequence
  MKO10092138_B_Hoxc9
  gRNA
cagcgcgtccgcctcgggcg

SEQ ID NO: 92139 - DNA, 20 bp, Artificial Sequence
  MKO10092139_B_Hoxd10
  gRNA
ttacaccaagcaccaaacgc

SEQ ID NO: 92140 - DNA, 20 bp, Artificial Sequence
  MKO10092140_B_Hoxd10
  gRNA
cggggctgttattgtactct

SEQ ID NO: 92141 - DNA, 20 bp, Artificial Sequence
  MKO10092141_B_Hoxd10
  gRNA
ctgagtcagacctacgccac

SEQ ID NO: 92142 - DNA, 20 bp, Artificial Sequence
  MKO10092142_B_Hoxd11
  gRNA
aaaactcgcgttccagttcg

SEQ ID NO: 92143 - DNA, 20 bp, Artificial Sequence
  MKO10092143_B_Hoxd11
  gRNA
cgcgccaagtggccgtaccg

SEQ ID NO: 92144 - DNA, 20 bp, Artificial Sequence
  MKO10092144_B_Hoxd11
  gRNA
gtagtagggagcgtagcccc

SEQ ID NO: 92145 - DNA, 20 bp, Artificial Sequence
  MKO10092145_B_Hoxd12
  gRNA
agcgtaaggaattgtctaac

SEQ ID NO: 92146 - DNA, 20 bp, Artificial Sequence
  MKO10092146_B_Hoxd12
  gRNA
aggcaccaagtatgactacg

SEQ ID NO: 92147 - DNA, 20 bp, Artificial Sequence
  MKO10092147_B_Hoxd12
  gRNA
tgatgcgcccaccgcatctg

SEQ ID NO: 92148 - DNA, 20 bp, Artificial Sequence
  MKO10092148_B_Hoxd13
  gRNA
tgtgcgtctaccgacgggga

SEQ ID NO: 92149 - DNA, 20 bp, Artificial Sequence
  MKO10092149_B_Hoxd13
  gRNA
gaatgtgtccccgcgaacac

SEQ ID NO: 92150 - DNA, 20 bp, Artificial Sequence
  MKO10092150_B_Hoxd13
  gRNA
agcctacgccgtgcgacatg

SEQ ID NO: 92151 - DNA, 20 bp, Artificial Sequence
  MKO10092151_B_Hoxd1
  gRNA
tgaccggggaagcttaatcg

SEQ ID NO: 92152 - DNA, 20 bp, Artificial Sequence
  MKO10092152_B_Hoxd1
  gRNA
cgggccggcgtttgacttcc

SEQ ID NO: 92153 - DNA, 20 bp, Artificial Sequence
  MKO10092153_B_Hoxd1
  gRNA
cccgccggagaagaccgccg

SEQ ID NO: 92154 - DNA, 20 bp, Artificial Sequence
  MKO10092154_B_Hoxd3
  gRNA
ccgtagcctccaaagagtcc

SEQ ID NO: 92155 - DNA, 20 bp, Artificial Sequence
  MKO10092155_B_Hoxd3
  gRNA
gcaggcgtccctgagacgag

SEQ ID NO: 92156 - DNA, 20 bp, Artificial Sequence
  MKO10092156_B_Hoxd3
  gRNA
tgaggctcgaactcgggcgc

SEQ ID NO: 92157 - DNA, 20 bp, Artificial Sequence
  MKO10092157_B_Hoxd4
  gRNA
gggctccccgccggtgtagt

SEQ ID NO: 92158 - DNA, 20 bp, Artificial Sequence
  MKO10092158_B_Hoxd4
  gRNA
tgctcgccgaagtcgggccg

SEQ ID NO: 92159 - DNA, 20 bp, Artificial Sequence
  MKO10092159_B_Hoxd4
  gRNA
gttcaccatatacgaactca

SEQ ID NO: 92160 - DNA, 20 bp, Artificial Sequence
  MKO10092160_B_Hoxd8
  gRNA
aagacaagtttcctgcgtcc

SEQ ID NO: 92161 - DNA, 20 bp, Artificial Sequence
  MKO10092161_B_Hoxd8
  gRNA
attgatggcctcgcccgccg

SEQ ID NO: 92162 - DNA, 20 bp, Artificial Sequence
  MKO10092162_B_Hoxd8
  gRNA
ggccaggactacttccacgc

SEQ ID NO: 92163 - DNA, 20 bp, Artificial Sequence
  MKO10092163_B_Hoxd9
  gRNA
accggcgctacgaggtggcc

SEQ ID NO: 92164 - DNA, 20 bp, Artificial Sequence
  MKO10092164_B_Hoxd9
  gRNA
cgggacgctacgtacgctcc

SEQ ID NO: 92165 - DNA, 20 bp, Artificial Sequence
  MKO10092165_B_Hoxd9
  gRNA
aacgagttgcacgggaattc

SEQ ID NO: 92166 - DNA, 20 bp, Artificial Sequence
  MKO10092166_B_Hp1bp3
  gRNA
gatggacgcaatcttaactg

SEQ ID NO: 92167 - DNA, 20 bp, Artificial Sequence
  MKO10092167_B_Hp1bp3
  gRNA
agtttcccgggtagaattca

SEQ ID NO: 92168 - DNA, 20 bp, Artificial Sequence
  MKO10092168_B_Hp1bp3
  gRNA
cattcataagtacccgtctc

SEQ ID NO: 92169 - DNA, 20 bp, Artificial Sequence
  MKO10092169_B_Hpcal1
  gRNA
cacctttgatgaattcttcc

SEQ ID NO: 92170 - DNA, 20 bp, Artificial Sequence
  MKO10092170_B_Hpcal1
  gRNA
tttgcaggccatctacaaga

SEQ ID NO: 92171 - DNA, 20 bp, Artificial Sequence
  MKO10092171_B_Hpcal1
  gRNA
gtcctcaggcatcttcatca

SEQ ID NO: 92172 - DNA, 20 bp, Artificial Sequence
  MKO10092172_B_Hpcal4
  gRNA
taaggatgaccagattacgc

SEQ ID NO: 92173 - DNA, 20 bp, Artificial Sequence
  MKO10092173_B_Hpcal4
  gRNA
gctcgctgaactccgtgttc

SEQ ID NO: 92174 - DNA, 20 bp, Artificial Sequence
  MKO10092174_B_Hpcal4
  gRNA
gaacacggagttcagcgagc

SEQ ID NO: 92175 - DNA, 20 bp, Artificial Sequence
  MKO10092175_B_Hpca
  gRNA
ccctgcaggcaagctgtcgc

SEQ ID NO: 92176 - DNA, 20 bp, Artificial Sequence
  MKO10092176_B_Hpca
  gRNA
cgtcattgtttgtgtccatt

SEQ ID NO: 92177 - DNA, 20 bp, Artificial Sequence
  MKO10092177_B_Hpca
  gRNA
tgctgggatcacactgcagc

SEQ ID NO: 92178 - DNA, 20 bp, Artificial Sequence
  MKO10092178_B_Hpdl
  gRNA
ggctcgcggctgcatcatgc

SEQ ID NO: 92179 - DNA, 20 bp, Artificial Sequence
  MKO10092179_B_Hpdl
  gRNA
agaaagtgtcttcggcgaag

SEQ ID NO: 92180 - DNA, 20 bp, Artificial Sequence
  MKO10092180_B_Hpdl
  gRNA
agacagcgtccccgctgcgc

SEQ ID NO: 92181 - DNA, 20 bp, Artificial Sequence
  MKO10092181_B_Hpd
  gRNA
cttggcattgccaacccaga

SEQ ID NO: 92182 - DNA, 20 bp, Artificial Sequence
  MKO10092182_B_Hpd
  gRNA
atgtccctcacctttgttcc

SEQ ID NO: 92183 - DNA, 20 bp, Artificial Sequence
  MKO10092183_B_Hpd
  gRNA
tagacaacctacaacaacaa

SEQ ID NO: 92184 - DNA, 20 bp, Artificial Sequence
  MKO10092184_B_Hpgds
  gRNA
tttggctgggaagacagcgt

SEQ ID NO: 92185 - DNA, 20 bp, Artificial Sequence
  MKO10092185_B_Hpgds
  gRNA
acctcgccttctgaaagatt

SEQ ID NO: 92186 - DNA, 20 bp, Artificial Sequence
  MKO10092186_B_Hpgds
  gRNA
agatatttgaccaaaaacac

SEQ ID NO: 92187 - DNA, 20 bp, Artificial Sequence
  MKO10092187_B_Hpgd
  gRNA
actgttcgtccagtgtgatg

SEQ ID NO: 92188 - DNA, 20 bp, Artificial Sequence
  MKO10092188_B_Hpgd
  gRNA
cgtgaacaatgagaaaaact

SEQ ID NO: 92189 - DNA, 20 bp, Artificial Sequence
  MKO10092189_B_Hpgd
  gRNA
atcaatatgtcttcattagc

SEQ ID NO: 92190 - DNA, 20 bp, Artificial Sequence
  MKO10092190_B_Hpn
  gRNA
gcttgcggtgtttgacaaga

SEQ ID NO: 92191 - DNA, 20 bp, Artificial Sequence
  MKO10092191_B_Hpn
  gRNA
ggggccgcgtcctgggccat

SEQ ID NO: 92192 - DNA, 20 bp, Artificial Sequence
  MKO10092192_B_Hpn
  gRNA
ctctactcaccttggtacag

SEQ ID NO: 92193 - DNA, 20 bp, Artificial Sequence
  MKO10092193_B_Hprt
  gRNA
caactagaatgatcagtcaa

SEQ ID NO: 92194 - DNA, 20 bp, Artificial Sequence
  MKO10092194_B_Hprt
  gRNA
acttgctcgagatgtcatga

SEQ ID NO: 92195 - DNA, 20 bp, Artificial Sequence
  MKO10092195_B_Hprt
  gRNA
gatgatctctcaactttaac

SEQ ID NO: 92196 - DNA, 20 bp, Artificial Sequence
  MKO10092196_B_Hps1
  gRNA
ccatcaacgccagccccgag

SEQ ID NO: 92197 - DNA, 20 bp, Artificial Sequence
  MKO10092197_B_Hps1
  gRNA
caggcttcgtccacccgacc

SEQ ID NO: 92198 - DNA, 20 bp, Artificial Sequence
  MKO10092198_B_Hps1
  gRNA
cctacagctacctgcgggac

SEQ ID NO: 92199 - DNA, 20 bp, Artificial Sequence
  MKO10092199_B_Hps3
  gRNA
tgttatctgtctaaaaccca

SEQ ID NO: 92200 - DNA, 20 bp, Artificial Sequence
  MKO10092200_B_Hps3
  gRNA
atacttaccactttggtgaa

SEQ ID NO: 92201 - DNA, 20 bp, Artificial Sequence
  MKO10092201_B_Hps3
  gRNA
tctgttaaactggagtccac

SEQ ID NO: 92202 - DNA, 20 bp, Artificial Sequence
  MKO10092202_B_Hps4
  gRNA
gccttactttggtgcggtcc

SEQ ID NO: 92203 - DNA, 20 bp, Artificial Sequence
  MKO10092203_B_Hps4
  gRNA
caaacttgaggttccgcata

SEQ ID NO: 92204 - DNA, 20 bp, Artificial Sequence
  MKO10092204_B_Hps4
  gRNA
gcactcttaccttgtaggcc

SEQ ID NO: 92205 - DNA, 20 bp, Artificial Sequence
  MKO10092205_B_Hps5
  gRNA
gtcaaggtcttgtagttgtt

SEQ ID NO: 92206 - DNA, 20 bp, Artificial Sequence
  MKO10092206_B_Hps5
  gRNA
ctgtaggcttctggtatcac

SEQ ID NO: 92207 - DNA, 20 bp, Artificial Sequence
  MKO10092207_B_Hps5
  gRNA
attatgttgctgtagctacc

SEQ ID NO: 92208 - DNA, 20 bp, Artificial Sequence
  MKO10092208_B_Hps6
  gRNA
caacccgaggccgcctagtt

SEQ ID NO: 92209 - DNA, 20 bp, Artificial Sequence
  MKO10092209_B_Hps6
  gRNA
cgaggggtcgccctccggcc

SEQ ID NO: 92210 - DNA, 20 bp, Artificial Sequence
  MKO10092210_B_Hps6
  gRNA
gctgcaccgagcccttgtcc

SEQ ID NO: 92211 - DNA, 20 bp, Artificial Sequence
  MKO10092211_B_Hpse2
  gRNA
aacgtcattgctctcctaga

SEQ ID NO: 92212 - DNA, 20 bp, Artificial Sequence
  MKO10092212_B_Hpse2
  gRNA
tcctattacctgttaatatg

SEQ ID NO: 92213 - DNA, 20 bp, Artificial Sequence
  MKO10092213_B_Hpse2
  gRNA
tttgcccccgaagcgcagaa

SEQ ID NO: 92214 - DNA, 20 bp, Artificial Sequence
  MKO10092214_B_Hpse
  gRNA
cctgacatcggtcagcctcg

SEQ ID NO: 92215 - DNA, 20 bp, Artificial Sequence
  MKO10092215_B_Hpse
  gRNA
aaagctcacattctcatcga

SEQ ID NO: 92216 - DNA, 20 bp, Artificial Sequence
  MKO10092216_B_Hpse
  gRNA
ccgccaaatctcaagtatgc

SEQ ID NO: 92217 - DNA, 20 bp, Artificial Sequence
  MKO10092217_B_Hpx
  gRNA
acctcgctgagatcaactcc

SEQ ID NO: 92218 - DNA, 20 bp, Artificial Sequence
  MKO10092218_B_Hpx
  gRNA
tcaccgggtacatctgaatc

SEQ ID NO: 92219 - DNA, 20 bp, Artificial Sequence
  MKO10092219_B_Hpx
  gRNA
atacccaccagacgcagctg

SEQ ID NO: 92220 - DNA, 20 bp, Artificial Sequence
  MKO10092220_B_Hp
  gRNA
acatagccgtttgcaatctc

SEQ ID NO: 92221 - DNA, 20 bp, Artificial Sequence
  MKO10092221_B_Hp
  gRNA
ccttaaacgacgagaagcaa

SEQ ID NO: 92222 - DNA, 20 bp, Artificial Sequence
  MKO10092222_B_Hp
  gRNA
gccgacagttctacagacta

SEQ ID NO: 92223 - DNA, 20 bp, Artificial Sequence
  MKO10092223_B_Hrasls5
  gRNA
ggatacgcacctcaactgct

SEQ ID NO: 92224 - DNA, 20 bp, Artificial Sequence
  MKO10092224_B_Hrasls5
  gRNA
gctcacagttcccctcaatt

SEQ ID NO: 92225 - DNA, 20 bp, Artificial Sequence
  MKO10092225_B_Hrasls5
  gRNA
caattcgaaaaatctcaatc

SEQ ID NO: 92226 - DNA, 20 bp, Artificial Sequence
  MKO10092226_B_Hrasls
  gRNA
tttgtaaccttgctgcgcta

SEQ ID NO: 92227 - DNA, 20 bp, Artificial Sequence
  MKO10092227_B_Hrasls
  gRNA
tccgtccttgctatcagcac

SEQ ID NO: 92228 - DNA, 20 bp, Artificial Sequence
  MKO10092228_B_Hrasls
  gRNA
accatcggattggtggcagc

SEQ ID NO: 92229 - DNA, 20 bp, Artificial Sequence
  MKO10092229_B_Hras
  gRNA
ctcacggactagtgtataga

SEQ ID NO: 92230 - DNA, 20 bp, Artificial Sequence
  MKO10092230_B_Hras
  gRNA
gcagagctcacctctatagt

SEQ ID NO: 92231 - DNA, 20 bp, Artificial Sequence
  MKO10092231_B_Hras
  gRNA
catcaatgaccacctgtttc

SEQ ID NO: 92232 - DNA, 20 bp, Artificial Sequence
  MKO10092232_B_Hrct1
  gRNA
tcaccccggtcacatggtga

SEQ ID NO: 92233 - DNA, 20 bp, Artificial Sequence
  MKO10092233_B_Hrct1
  gRNA
agcggcgggctccatgagca

SEQ ID NO: 92234 - DNA, 20 bp, Artificial Sequence
  MKO10092234_B_Hrct1
  gRNA
cttccagatgttaggccttc

SEQ ID NO: 92235 - DNA, 20 bp, Artificial Sequence
  MKO10092235_B_Hrc
  gRNA
ggaacactgtgaccagtgtc

SEQ ID NO: 92236 - DNA, 20 bp, Artificial Sequence
  MKO10092236_B_Hrc
  gRNA
acacacttactgatacagag

SEQ ID NO: 92237 - DNA, 20 bp, Artificial Sequence
  MKO10092237_B_Hrc
  gRNA
acagtgacagctttcacatt

SEQ ID NO: 92238 - DNA, 20 bp, Artificial Sequence
  MKO10092238_B_Hrg
  gRNA
aaagcaagcccgtaaagccc

SEQ ID NO: 92239 - DNA, 20 bp, Artificial Sequence
  MKO10092239_B_Hrg
  gRNA
gatgaccttaccagaacttg

SEQ ID NO: 92240 - DNA, 20 bp, Artificial Sequence
  MKO10092240_B_Hrg
  gRNA
atgtgatagagtctgactgt

SEQ ID NO: 92241 - DNA, 20 bp, Artificial Sequence
  MKO10092241_B_Hrh1
  gRNA
gcacttgaaccgagagcgga

SEQ ID NO: 92242 - DNA, 20 bp, Artificial Sequence
  MKO10092242_B_Hrh1
  gRNA
ctggcatcacttcacgcccc

SEQ ID NO: 92243 - DNA, 20 bp, Artificial Sequence
  MKO10092243_B_Hrh1
  gRNA
agcggtagcgatcaatacac

SEQ ID NO: 92244 - DNA, 20 bp, Artificial Sequence
  MKO10092244_B_Hrh2
  gRNA
taagcactgatatgtagtga

SEQ ID NO: 92245 - DNA, 20 bp, Artificial Sequence
  MKO10092245_B_Hrh2
  gRNA
gcgaacaggggtgaccaaca

SEQ ID NO: 92246 - DNA, 20 bp, Artificial Sequence
  MKO10092246_B_Hrh2
  gRNA
agagctgttggtacgccatg

SEQ ID NO: 92247 - DNA, 20 bp, Artificial Sequence
  MKO10092247_B_Hrh3
  gRNA
gaggctcgaatccgccacga

SEQ ID NO: 92248 - DNA, 20 bp, Artificial Sequence
  MKO10092248_B_Hrh3
  gRNA
tatgtaccctatgtgctgac

SEQ ID NO: 92249 - DNA, 20 bp, Artificial Sequence
  MKO10092249_B_Hrh3
  gRNA
cagcacgatgttgaagactg

SEQ ID NO: 92250 - DNA, 20 bp, Artificial Sequence
  MKO10092250_B_Hrh4
  gRNA
aataattacttcgatgtcta

SEQ ID NO: 92251 - DNA, 20 bp, Artificial Sequence
  MKO10092251_B_Hrh4
  gRNA
ttccagttaaacaacacgtg

SEQ ID NO: 92252 - DNA, 20 bp, Artificial Sequence
  MKO10092252_B_Hrh4
  gRNA
gaagtggaatctgcatgttt

SEQ ID NO: 92253 - DNA, 20 bp, Artificial Sequence
  MKO10092253_B_Hrk
  gRNA
cggcgcaggtgaccgcgctg

SEQ ID NO: 92254 - DNA, 20 bp, Artificial Sequence
  MKO10092254_B_Hrk
  gRNA
gggccgcgcgcgacgccgca

SEQ ID NO: 92255 - DNA, 20 bp, Artificial Sequence
  MKO10092255_B_Hrk
  gRNA
acgctcgccccgggctgcgc

SEQ ID NO: 92256 - DNA, 20 bp, Artificial Sequence
  MKO10092256_B_Hrnr
  gRNA
tgttcccaacacgatgtttc

SEQ ID NO: 92257 - DNA, 20 bp, Artificial Sequence
  MKO10092257_B_Hrnr
  gRNA
taccagtatgccactgaata

SEQ ID NO: 92258 - DNA, 20 bp, Artificial Sequence
  MKO10092258_B_Hrnr
  gRNA
gtcacagttcccatattcag

SEQ ID NO: 92259 - DNA, 20 bp, Artificial Sequence
  MKO10092259_B_Hrsp12
  gRNA
tttcagtcaagctgtgcaag

SEQ ID NO: 92260 - DNA, 20 bp, Artificial Sequence
  MKO10092260_B_Hrsp12
  gRNA
ttcacaggctcttaaaaact

SEQ ID NO: 92261 - DNA, 20 bp, Artificial Sequence
  MKO10092261_B_Hrsp12
  gRNA
tccagggtagccttcctgcc

SEQ ID NO: 92262 - DNA, 20 bp, Artificial Sequence
  MKO10092262_B_Hr
  gRNA
tatccacaagtctggactcc

SEQ ID NO: 92263 - DNA, 20 bp, Artificial Sequence
  MKO10092263_B_Hr
  gRNA
tggcatcgactgcagcaatg

SEQ ID NO: 92264 - DNA, 20 bp, Artificial Sequence
  MKO10092264_B_Hr
  gRNA
acactcacctacgtgatttc

SEQ ID NO: 92265 - DNA, 20 bp, Artificial Sequence
  MKO10092265_B_Hs1bp3
  gRNA
gagctgaagagccccgcgtc

SEQ ID NO: 92266 - DNA, 20 bp, Artificial Sequence
  MKO10092266_B_Hs1bp3
  gRNA
cgaagatgtcgtccagttct

SEQ ID NO: 92267 - DNA, 20 bp, Artificial Sequence
  MKO10092267_B_Hs1bp3
  gRNA
ctaggatctggtactccaca

SEQ ID NO: 92268 - DNA, 20 bp, Artificial Sequence
  MKO10092268_B_Hs2st1
  gRNA
atgaagccaggcttctatca

SEQ ID NO: 92269 - DNA, 20 bp, Artificial Sequence
  MKO10092269_B_Hs2st1
  gRNA
atgtgtccgtgatagaagcc

SEQ ID NO: 92270 - DNA, 20 bp, Artificial Sequence
  MKO10092270_B_Hs2st1
  gRNA
taggaaactagcctctcaat

SEQ ID NO: 92271 - DNA, 20 bp, Artificial Sequence
  MKO10092271_B_Hs3st1
  gRNA
acctcctaatgcgggacggt

SEQ ID NO: 92272 - DNA, 20 bp, Artificial Sequence
  MKO10092272_B_Hs3st1
  gRNA
cgtgctgtccgactacaccc

SEQ ID NO: 92273 - DNA, 20 bp, Artificial Sequence
  MKO10092273_B_Hs3st1
  gRNA
cttgcgcaccccaatgatga

SEQ ID NO: 92274 - DNA, 20 bp, Artificial Sequence
  MKO10092274_B_Hs3st2
  gRNA
gactgcggttgcggaaggac

SEQ ID NO: 92275 - DNA, 20 bp, Artificial Sequence
  MKO10092275_B_Hs3st2
  gRNA
gctcactgggcgtcggcccc

SEQ ID NO: 92276 - DNA, 20 bp, Artificial Sequence
  MKO10092276_B_Hs3st2
  gRNA
gccgctctccactgacgaag

SEQ ID NO: 92277 - DNA, 20 bp, Artificial Sequence
  MKO10092277_B_Hs3st3a1
  gRNA
gcgctcaccccaccattgcg

SEQ ID NO: 92278 - DNA, 20 bp, Artificial Sequence
  MKO10092278_B_Hs3st3a1
  gRNA
cctctacgtcttctactgcc

SEQ ID NO: 92279 - DNA, 20 bp, Artificial Sequence
  MKO10092279_B_Hs3st3a1
  gRNA
gaactggcgatgtggcccgc

SEQ ID NO: 92280 - DNA, 20 bp, Artificial Sequence
  MKO10092280_B_Hs3st3b1
  gRNA
ctggctgagcgtgagtagcg

SEQ ID NO: 92281 - DNA, 20 bp, Artificial Sequence
  MKO10092281_B_Hs3st3b1
  gRNA
ccggtcctgtctcgatgtcc

SEQ ID NO: 92282 - DNA, 20 bp, Artificial Sequence
  MKO10092282_B_Hs3st3b1
  gRNA
ccgcagcacctcgcgcgcga

SEQ ID NO: 92283 - DNA, 20 bp, Artificial Sequence
  MKO10092283_B_Hs3st4
  gRNA
tcttggagcgccattcgcat

SEQ ID NO: 92284 - DNA, 20 bp, Artificial Sequence
  MKO10092284_B_Hs3st4
  gRNA
gggttcgctgcagttcccgc

SEQ ID NO: 92285 - DNA, 20 bp, Artificial Sequence
  MKO10092285_B_Hs3st4
  gRNA
cgcaggagtcgtgaagcgct

SEQ ID NO: 92286 - DNA, 20 bp, Artificial Sequence
  MKO10092286_B_Hs3st5
  gRNA
ggccatgctattcaaacagc

SEQ ID NO: 92287 - DNA, 20 bp, Artificial Sequence
  MKO10092287_B_Hs3st5
  gRNA
gaacagtttcatatcgtaga

SEQ ID NO: 92288 - DNA, 20 bp, Artificial Sequence
  MKO10092288_B_Hs3st5
  gRNA
tgccctgttgaaagtcgatt

SEQ ID NO: 92289 - DNA, 20 bp, Artificial Sequence
  MKO10092289_B_Hs3st6
  gRNA
cgcctggtcagtgatccagc

SEQ ID NO: 92290 - DNA, 20 bp, Artificial Sequence
  MKO10092290_B_Hs3st6
  gRNA
atggccggtagaaagcctgc

SEQ ID NO: 92291 - DNA, 20 bp, Artificial Sequence
  MKO10092291_B_Hs3st6
  gRNA
caccccgacgtccgtgcact

SEQ ID NO: 92292 - DNA, 20 bp, Artificial Sequence
  MKO10092292_B_Hs6st1
  gRNA
ctggtcgggctgcacgttgc

SEQ ID NO: 92293 - DNA, 20 bp, Artificial Sequence
  MKO10092293_B_Hs6st1
  gRNA
ctagaccgccgcgacccagc

SEQ ID NO: 92294 - DNA, 20 bp, Artificial Sequence
  MKO10092294_B_Hs6st1
  gRNA
agtgcagaacgtgcgcctcg

SEQ ID NO: 92295 - DNA, 20 bp, Artificial Sequence
  MKO10092295_B_Hs6st2
  gRNA
ttgctcctgacgcttccgcc

SEQ ID NO: 92296 - DNA, 20 bp, Artificial Sequence
  MKO10092296_B_Hs6st2
  gRNA
tcccactcttcgatgtgctc

SEQ ID NO: 92297 - DNA, 20 bp, Artificial Sequence
  MKO10092297_B_Hs6st2
  gRNA
ggttcttcaaacttcaactc

SEQ ID NO: 92298 - DNA, 20 bp, Artificial Sequence
  MKO10092298_B_Hs6st3
  gRNA
gcggagctgctccccgaagt

SEQ ID NO: 92299 - DNA, 20 bp, Artificial Sequence
  MKO10092299_B_Hs6st3
  gRNA
caccacgttcggccggcacc

SEQ ID NO: 92300 - DNA, 20 bp, Artificial Sequence
  MKO10092300_B_Hs6st3
  gRNA
ggtcgcggctcccgaggatg

SEQ ID NO: 92301 - DNA, 20 bp, Artificial Sequence
  MKO10092301_B_Hsbp1l1
  gRNA
ttaatgttgtagtcagagct

SEQ ID NO: 92302 - DNA, 20 bp, Artificial Sequence
  MKO10092302_B_Hsbp1l1
  gRNA
atgacctcatgactcaggcc

SEQ ID NO: 92303 - DNA, 20 bp, Artificial Sequence
  MKO10092303_B_Hsbp1l1
  gRNA
gttctgcagcaagtccccac

SEQ ID NO: 92304 - DNA, 20 bp, Artificial Sequence
  MKO10092304_B_Hsbp1
  gRNA
gaccatgcaggacatcacct

SEQ ID NO: 92305 - DNA, 20 bp, Artificial Sequence
  MKO10092305_B_Hsbp1
  gRNA
ggtcagcgatattcttctcc

SEQ ID NO: 92306 - DNA, 20 bp, Artificial Sequence
  MKO10092306_B_Hsbp1
  gRNA
tatcgctgacctcatgaccc

SEQ ID NO: 92307 - DNA, 20 bp, Artificial Sequence
  MKO10092307_B_Hscb
  gRNA
cttccatggcggcctcactt

SEQ ID NO: 92308 - DNA, 20 bp, Artificial Sequence
  MKO10092308_B_Hscb
  gRNA
tgatgcctataagactcttc

SEQ ID NO: 92309 - DNA, 20 bp, Artificial Sequence
  MKO10092309_B_Hscb
  gRNA
ccttacaagatatagtcctc

SEQ ID NO: 92310 - DNA, 20 bp, Artificial Sequence
  MKO10092310_B_Hsd11b1
  gRNA
ttgactgccaggtcggagga

SEQ ID NO: 92311 - DNA, 20 bp, Artificial Sequence
  MKO10092311_B_Hsd11b1
  gRNA
tgtcaaggcgggaaagctca

SEQ ID NO: 92312 - DNA, 20 bp, Artificial Sequence
  MKO10092312_B_Hsd11b1
  gRNA
ctctgcaagcaagtttgctc

SEQ ID NO: 92313 - DNA, 20 bp, Artificial Sequence
  MKO10092313_B_Hsd11b2
  gRNA
cctgggtagtagcggcttcg

SEQ ID NO: 92314 - DNA, 20 bp, Artificial Sequence
  MKO10092314_B_Hsd11b2
  gRNA
tgccatgggcttcacggtgc

SEQ ID NO: 92315 - DNA, 20 bp, Artificial Sequence
  MKO10092315_B_Hsd11b2
  gRNA
ggcagcaatagcactgctta

SEQ ID NO: 92316 - DNA, 20 bp, Artificial Sequence
  MKO10092316_B_Hsd17b10
  gRNA
cctagctacggccaaaagac

SEQ ID NO: 92317 - DNA, 20 bp, Artificial Sequence
  MKO10092317_B_Hsd17b10
  gRNA
cgtagctaggccaaggcccg

SEQ ID NO: 92318 - DNA, 20 bp, Artificial Sequence
  MKO10092318_B_Hsd17b10
  gRNA
catgcccactatgccccctt

SEQ ID NO: 92319 - DNA, 20 bp, Artificial Sequence
  MKO10092319_B_Hsd17b11
  gRNA
tcgcactcctgttcgtccca

SEQ ID NO: 92320 - DNA, 20 bp, Artificial Sequence
  MKO10092320_B_Hsd17b11
  gRNA
agcattctggtaaataacgc

SEQ ID NO: 92321 - DNA, 20 bp, Artificial Sequence
  MKO10092321_B_Hsd17b11
  gRNA
gccaacggcagcaaacttgc

SEQ ID NO: 92322 - DNA, 20 bp, Artificial Sequence
  MKO10092322_B_Hsd17b12
  gRNA
cgccaatctcaagaccagac

SEQ ID NO: 92323 - DNA, 20 bp, Artificial Sequence
  MKO10092323_B_Hsd17b12
  gRNA
tacaaacttactgatgttgt

SEQ ID NO: 92324 - DNA, 20 bp, Artificial Sequence
  MKO10092324_B_Hsd17b12
  gRNA
tgtatctcagttgttacagg

SEQ ID NO: 92325 - DNA, 20 bp, Artificial Sequence
  MKO10092325_B_Hsd17b13
  gRNA
cagcctgcctattccgtgtc

SEQ ID NO: 92326 - DNA, 20 bp, Artificial Sequence
  MKO10092326_B_Hsd17b13
  gRNA
caccacaaacacgtgcacga

SEQ ID NO: 92327 - DNA, 20 bp, Artificial Sequence
  MKO10092327_B_Hsd17b13
  gRNA
gggccggacacggaataggc

SEQ ID NO: 92328 - DNA, 20 bp, Artificial Sequence
  MKO10092328_B_Hsd17b14
  gRNA
tctttcctgtgtcacgtcac

SEQ ID NO: 92329 - DNA, 20 bp, Artificial Sequence
  MKO10092329_B_Hsd17b14
  gRNA
ccagaagctgacggaagccc

SEQ ID NO: 92330 - DNA, 20 bp, Artificial Sequence
  MKO10092330_B_Hsd17b14
  gRNA
tcaaggtgtatgtccccagc

SEQ ID NO: 92331 - DNA, 20 bp, Artificial Sequence
  MKO10092331_B_Hsd17b1
  gRNA
ttatgagcaagccctgagcg

SEQ ID NO: 92332 - DNA, 20 bp, Artificial Sequence
  MKO10092332_B_Hsd17b1
  gRNA
agcacatgaattgaacgctg

SEQ ID NO: 92333 - DNA, 20 bp, Artificial Sequence
  MKO10092333_B_Hsd17b1
  gRNA
gaccctcagtcacgcatgcc

SEQ ID NO: 92334 - DNA, 20 bp, Artificial Sequence
  MKO10092334_B_Hsd17b2
  gRNA
tgctggatgtcccgaagcac

SEQ ID NO: 92335 - DNA, 20 bp, Artificial Sequence
  MKO10092335_B_Hsd17b2
  gRNA
aacccacgccgagagcttta

SEQ ID NO: 92336 - DNA, 20 bp, Artificial Sequence
  MKO10092336_B_Hsd17b2
  gRNA
tcacggtttggccaagcacc

SEQ ID NO: 92337 - DNA, 20 bp, Artificial Sequence
  MKO10092337_B_Hsd17b3
  gRNA
cgggaaagcctattcatttg

SEQ ID NO: 92338 - DNA, 20 bp, Artificial Sequence
  MKO10092338_B_Hsd17b3
  gRNA
tacaacattgagtccatgtc

SEQ ID NO: 92339 - DNA, 20 bp, Artificial Sequence
  MKO10092339_B_Hsd17b3
  gRNA
tctcacgcagagaggaccac

SEQ ID NO: 92340 - DNA, 20 bp, Artificial Sequence
  MKO10092340_B_Hsd17b4
  gRNA
ctcctctttctgcaaacgcc

SEQ ID NO: 92341 - DNA, 20 bp, Artificial Sequence
  MKO10092341_B_Hsd17b4
  gRNA
gacgttgtggtcaacaatgc

SEQ ID NO: 92342 - DNA, 20 bp, Artificial Sequence
  MKO10092342_B_Hsd17b4
  gRNA
ttctcagattcagttgaagc

SEQ ID NO: 92343 - DNA, 20 bp, Artificial Sequence
  MKO10092343_B_Hsd17b6
  gRNA
acacttcatcaactctcgtt

SEQ ID NO: 92344 - DNA, 20 bp, Artificial Sequence
  MKO10092344_B_Hsd17b6
  gRNA
atctttcaagtgaacctcat

SEQ ID NO: 92345 - DNA, 20 bp, Artificial Sequence
  MKO10092345_B_Hsd17b6
  gRNA
tgccccgagccttctttacc

SEQ ID NO: 92346 - DNA, 20 bp, Artificial Sequence
  MKO10092346_B_Hsd17b7
  gRNA
cactgccgacgggttgcagg

SEQ ID NO: 92347 - DNA, 20 bp, Artificial Sequence
  MKO10092347_B_Hsd17b7
  gRNA
cttcattcagattcgggaac

SEQ ID NO: 92348 - DNA, 20 bp, Artificial Sequence
  MKO10092348_B_Hsd17b7
  gRNA
gtcctctcgcaatgcaaaga

SEQ ID NO: 92349 - DNA, 20 bp, Artificial Sequence
  MKO10092349_B_Hsd3b1
  gRNA
ccaacatcttgatgatcctc

SEQ ID NO: 92350 - DNA, 20 bp, Artificial Sequence
  MKO10092350_B_Hsd3b1
  gRNA
gctgctgtcattgatgtcac

SEQ ID NO: 92351 - DNA, 20 bp, Artificial Sequence
  MKO10092351_B_Hsd3b1
  gRNA
catcaatgacagcagcagtg

SEQ ID NO: 92352 - DNA, 20 bp, Artificial Sequence
  MKO10092352_B_Hsd3b2
  gRNA
gcagaggatcatccagttgt

SEQ ID NO: 92353 - DNA, 20 bp, Artificial Sequence
  MKO10092353_B_Hsd3b2
  gRNA
tcaccttgatgcttgtctct

SEQ ID NO: 92354 - DNA, 20 bp, Artificial Sequence
  MKO10092354_B_Hsd3b2
  gRNA
agacctagagacaagcatca

SEQ ID NO: 92355 - DNA, 20 bp, Artificial Sequence
  MKO10092355_B_Hsd3b3
  gRNA
tcaccttgatgcttgtccct

SEQ ID NO: 92356 - DNA, 20 bp, Artificial Sequence
  MKO10092356_B_Hsd3b3
  gRNA
aggtcttcaaacctgaaacc

SEQ ID NO: 92357 - DNA, 20 bp, Artificial Sequence
  MKO10092357_B_Hsd3b3
  gRNA
agacctagggacaagcatca

SEQ ID NO: 92358 - DNA, 20 bp, Artificial Sequence
  MKO10092358_B_Hsd3b4
  gRNA
cacctttcagattgacatct

SEQ ID NO: 92359 - DNA, 20 bp, Artificial Sequence
  MKO10092359_B_Hsd3b4
  gRNA
ggcaggtactcagctcctac

SEQ ID NO: 92360 - DNA, 20 bp, Artificial Sequence
  MKO10092360_B_Hsd3b4
  gRNA
tagtgttccgatccactctg

SEQ ID NO: 92361 - DNA, 20 bp, Artificial Sequence
  MKO10092361_B_Hsd3b5
  gRNA
cttcggtcgaaaacatgaag

SEQ ID NO: 92362 - DNA, 20 bp, Artificial Sequence
  MKO10092362_B_Hsd3b5
  gRNA
ctgtgttgaacatgcctgga

SEQ ID NO: 92363 - DNA, 20 bp, Artificial Sequence
  MKO10092363_B_Hsd3b5
  gRNA
atgcctgaagagagcctgcc

SEQ ID NO: 92364 - DNA, 20 bp, Artificial Sequence
  MKO10092364_B_Hsd3b6
  gRNA
gctcttcctcgttgccattc

SEQ ID NO: 92365 - DNA, 20 bp, Artificial Sequence
  MKO10092365_B_Hsd3b6
  gRNA
tcaccttgatgtttgtatct

SEQ ID NO: 92366 - DNA, 20 bp, Artificial Sequence
  MKO10092366_B_Hsd3b6
  gRNA
catcaatgacagctgcagtg

SEQ ID NO: 92367 - DNA, 20 bp, Artificial Sequence
  MKO10092367_B_Hsd3b7
  gRNA
ccatgctgctcgtgtagacc

SEQ ID NO: 92368 - DNA, 20 bp, Artificial Sequence
  MKO10092368_B_Hsd3b7
  gRNA
caccctgcacgttgactttg

SEQ ID NO: 92369 - DNA, 20 bp, Artificial Sequence
  MKO10092369_B_Hsd3b7
  gRNA
cctggtctacacgagcagca

SEQ ID NO: 92370 - DNA, 20 bp, Artificial Sequence
  MKO10092370_B_Hsdl1
  gRNA
agcacatagccgacacctac

SEQ ID NO: 92371 - DNA, 20 bp, Artificial Sequence
  MKO10092371_B_Hsdl1
  gRNA
gctgcacttcatccctcgcc

SEQ ID NO: 92372 - DNA, 20 bp, Artificial Sequence
  MKO10092372_B_Hsdl1
  gRNA
ggatgggggcgtaaatctcc

SEQ ID NO: 92373 - DNA, 20 bp, Artificial Sequence
  MKO10092373_B_Hsdl2
  gRNA
tttatcacaggtgcaagccg

SEQ ID NO: 92374 - DNA, 20 bp, Artificial Sequence
  MKO10092374_B_Hsdl2
  gRNA
cagtgctgtttgaaccacag

SEQ ID NO: 92375 - DNA, 20 bp, Artificial Sequence
  MKO10092375_B_Hsdl2
  gRNA
ccctgaacctaaacccactg

SEQ ID NO: 92376 - DNA, 20 bp, Artificial Sequence
  MKO10092376_B_Hsf1
  gRNA
gcagcgagaacgaggccctg

SEQ ID NO: 92377 - DNA, 20 bp, Artificial Sequence
  MKO10092377_B_Hsf1
  gRNA
tacgccaggacagtgtcacc

SEQ ID NO: 92378 - DNA, 20 bp, Artificial Sequence
  MKO10092378_B_Hsf1
  gRNA
cagcatccttgtttcttgcg

SEQ ID NO: 92379 - DNA, 20 bp, Artificial Sequence
  MKO10092379_B_Hsf2bp
  gRNA
cgacggaagtgatgcaaata

SEQ ID NO: 92380 - DNA, 20 bp, Artificial Sequence
  MKO10092380_B_Hsf2bp
  gRNA
accgtgaacacttcaaagcc

SEQ ID NO: 92381 - DNA, 20 bp, Artificial Sequence
  MKO10092381_B_Hsf2bp
  gRNA
tcacaaaactctccatcgtc

SEQ ID NO: 92382 - DNA, 20 bp, Artificial Sequence
  MKO10092382_B_Hsf2
  gRNA
aattattagtagtgctcaga

SEQ ID NO: 92383 - DNA, 20 bp, Artificial Sequence
  MKO10092383_B_Hsf2
  gRNA
cagcatccttatttcaagca

SEQ ID NO: 92384 - DNA, 20 bp, Artificial Sequence
  MKO10092384_B_Hsf2
  gRNA
aacaagaaactattgagtcc

SEQ ID NO: 92385 - DNA, 20 bp, Artificial Sequence
  MKO10092385_B_Hsf3
  gRNA
gtgcacagtacttctttctt

SEQ ID NO: 92386 - DNA, 20 bp, Artificial Sequence
  MKO10092386_B_Hsf3
  gRNA
accatacagtactaaaaaag

SEQ ID NO: 92387 - DNA, 20 bp, Artificial Sequence
  MKO10092387_B_Hsf3
  gRNA
tcatcaaatccaagataaaa

SEQ ID NO: 92388 - DNA, 20 bp, Artificial Sequence
  MKO10092388_B_Hsf4
  gRNA
cgcgctccagtagctgctcg

SEQ ID NO: 92389 - DNA, 20 bp, Artificial Sequence
  MKO10092389_B_Hsf4
  gRNA
gcaccgaccacctcatccgc

SEQ ID NO: 92390 - DNA, 20 bp, Artificial Sequence
  MKO10092390_B_Hsf4
  gRNA
ggcaagctatgggcgctggt

SEQ ID NO: 92391 - DNA, 20 bp, Artificial Sequence
  MKO10092391_B_Hsf5
  gRNA
gctaccattcagcacaccgc

SEQ ID NO: 92392 - DNA, 20 bp, Artificial Sequence
  MKO10092392_B_Hsf5
  gRNA
cttcgctctctgtatctagc

SEQ ID NO: 92393 - DNA, 20 bp, Artificial Sequence
  MKO10092393_B_Hsf5
  gRNA
caacccatcttccaccagtc

SEQ ID NO: 92394 - DNA, 20 bp, Artificial Sequence
  MKO10092394_B_Hsfy2
  gRNA
gaacccccttgagcaagaga

SEQ ID NO: 92395 - DNA, 20 bp, Artificial Sequence
  MKO10092395_B_Hsfy2
  gRNA
gaaacagcctgcatttccga

SEQ ID NO: 92396 - DNA, 20 bp, Artificial Sequence
  MKO10092396_B_Hsfy2
  gRNA
ctcagcgattcttgataaag

SEQ ID NO: 92397 - DNA, 20 bp, Artificial Sequence
  MKO10092397_B_Hsh2d
  gRNA
caactgaatgctcgagtcac

SEQ ID NO: 92398 - DNA, 20 bp, Artificial Sequence
  MKO10092398_B_Hsh2d
  gRNA
ccttaccacctttccacgcc

SEQ ID NO: 92399 - DNA, 20 bp, Artificial Sequence
  MKO10092399_B_Hsh2d
  gRNA
catggccttacttgtaggaa

SEQ ID NO: 92400 - DNA, 20 bp, Artificial Sequence
  MKO10092400_B_Hsp90aa1
  gRNA
cttccccgagtccagtttac

SEQ ID NO: 92401 - DNA, 20 bp, Artificial Sequence
  MKO10092401_B_Hsp90aa1
  gRNA
ggtggagaaggaacgagata

SEQ ID NO: 92402 - DNA, 20 bp, Artificial Sequence
  MKO10092402_B_Hsp90aa1
  gRNA
aatccgttacgagagcctga

SEQ ID NO: 92403 - DNA, 20 bp, Artificial Sequence
  MKO10092403_B_Hsp90ab1
  gRNA
gattcgatatgagagcctga

SEQ ID NO: 92404 - DNA, 20 bp, Artificial Sequence
  MKO10092404_B_Hsp90ab1
  gRNA
ttctctgtaggtgagcccat

SEQ ID NO: 92405 - DNA, 20 bp, Artificial Sequence
  MKO10092405_B_Hsp90ab1
  gRNA
ttctcaccttgactgccaag

SEQ ID NO: 92406 - DNA, 20 bp, Artificial Sequence
  MKO10092406_B_Hsp90b1
  gRNA
actgatgaaaatgcactcgc

SEQ ID NO: 92407 - DNA, 20 bp, Artificial Sequence
  MKO10092407_B_Hsp90b1
  gRNA
ggagttaacggtcaagatta

SEQ ID NO: 92408 - DNA, 20 bp, Artificial Sequence
  MKO10092408_B_Hsp90b1
  gRNA
ccttccaagctgaagtgaac

SEQ ID NO: 92409 - DNA, 20 bp, Artificial Sequence
  MKO10092409_B_Hspa12a
  gRNA
cagaatgtatccacgtgatg

SEQ ID NO: 92410 - DNA, 20 bp, Artificial Sequence
  MKO10092410_B_Hspa12a
  gRNA
tggcagcgtacccaaagctg

SEQ ID NO: 92411 - DNA, 20 bp, Artificial Sequence
  MKO10092411_B_Hspa12a
  gRNA
tttcttaccaagatatggga

SEQ ID NO: 92412 - DNA, 20 bp, Artificial Sequence
  MKO10092412_B_Hspa12b
  gRNA
gagcgataccacagctttcc

SEQ ID NO: 92413 - DNA, 20 bp, Artificial Sequence
  MKO10092413_B_Hspa12b
  gRNA
gggcgtgctccttgaagaaa

SEQ ID NO: 92414 - DNA, 20 bp, Artificial Sequence
  MKO10092414_B_Hspa12b
  gRNA
ctacaggctctagcccagag

SEQ ID NO: 92415 - DNA, 20 bp, Artificial Sequence
  MKO10092415_B_Hspa13
  gRNA
cgaggaatacctcggcatgc

SEQ ID NO: 92416 - DNA, 20 bp, Artificial Sequence
  MKO10092416_B_Hspa13
  gRNA
aatcgagagccgacaaactc

SEQ ID NO: 92417 - DNA, 20 bp, Artificial Sequence
  MKO10092417_B_Hspa13
  gRNA
gtgccaagtagcccgccaag

SEQ ID NO: 92418 - DNA, 20 bp, Artificial Sequence
  MKO10092418_B_Hspa14
  gRNA
ttatgccataccttctgcca

SEQ ID NO: 92419 - DNA, 20 bp, Artificial Sequence
  MKO10092419_B_Hspa14
  gRNA
gtgaaagtgaaacagatcct

SEQ ID NO: 92420 - DNA, 20 bp, Artificial Sequence
  MKO10092420_B_Hspa14
  gRNA
ctgatattcagtaaaatgaa

SEQ ID NO: 92421 - DNA, 20 bp, Artificial Sequence
  MKO10092421_B_Hspa1a
  gRNA
tcagttcgaagcgccccagc

SEQ ID NO: 92422 - DNA, 20 bp, Artificial Sequence
  MKO10092422_B_Hspa1a
  gRNA
caggggcgtgccacagatcg

SEQ ID NO: 92423 - DNA, 20 bp, Artificial Sequence
  MKO10092423_B_Hspa1a
  gRNA
cccaagggagcctctggctc

SEQ ID NO: 92424 - DNA, 20 bp, Artificial Sequence
  MKO10092424_B_Hspa1b
  gRNA
ggctgcgcacggcgtgtgag

SEQ ID NO: 92425 - DNA, 20 bp, Artificial Sequence
  MKO10092425_B_Hspa1b
  gRNA
tcagctcgaagcgccccagc

SEQ ID NO: 92426 - DNA, 20 bp, Artificial Sequence
  MKO10092426_B_Hspa1b
  gRNA
ggacgccgccaagaaccagg

SEQ ID NO: 92427 - DNA, 20 bp, Artificial Sequence
  MKO10092427_B_Hspa1l
  gRNA
tatcctgaacgtcacggcca

SEQ ID NO: 92428 - DNA, 20 bp, Artificial Sequence
  MKO10092428_B_Hspa1l
  gRNA
acttcctttatccaagccgt

SEQ ID NO: 92429 - DNA, 20 bp, Artificial Sequence
  MKO10092429_B_Hspa1l
  gRNA
tccgtaggcgactgcctcat

SEQ ID NO: 92430 - DNA, 20 bp, Artificial Sequence
  MKO10092430_B_Hspa2
  gRNA
ccggcgcacagcgcgcttgt

SEQ ID NO: 92431 - DNA, 20 bp, Artificial Sequence
  MKO10092431_B_Hspa2
  gRNA
cccaggtcgatgccgatagc

SEQ ID NO: 92432 - DNA, 20 bp, Artificial Sequence
  MKO10092432_B_Hspa2
  gRNA
tgatgatgcgcaacacgttg

SEQ ID NO: 92433 - DNA, 20 bp, Artificial Sequence
  MKO10092433_B_Hspa4l
  gRNA
tgatgaccccattgtgcaaa

SEQ ID NO: 92434 - DNA, 20 bp, Artificial Sequence
  MKO10092434_B_Hspa4l
  gRNA
gatcctctccgtttgcacaa

SEQ ID NO: 92435 - DNA, 20 bp, Artificial Sequence
  MKO10092435_B_Hspa4l
  gRNA
tctggatcccaaagatatac

SEQ ID NO: 92436 - DNA, 20 bp, Artificial Sequence
  MKO10092436_B_Hspa4
  gRNA
tttgttgcaggttacatata

SEQ ID NO: 92437 - DNA, 20 bp, Artificial Sequence
  MKO10092437_B_Hspa4
  gRNA
attgagaccagcaatctgtg

SEQ ID NO: 92438 - DNA, 20 bp, Artificial Sequence
  MKO10092438_B_Hspa4
  gRNA
gagacaacacagtctaccac

SEQ ID NO: 92439 - DNA, 20 bp, Artificial Sequence
  MKO10092439_B_Hspa5
  gRNA
gaacatccttgtgtttgacc

SEQ ID NO: 92440 - DNA, 20 bp, Artificial Sequence
  MKO10092440_B_Hspa5
  gRNA
ttgctggactgaatgtcatg

SEQ ID NO: 92441 - DNA, 20 bp, Artificial Sequence
  MKO10092441_B_Hspa5
  gRNA
cgacaagcaaccaaagatgc

SEQ ID NO: 92442 - DNA, 20 bp, Artificial Sequence
  MKO10092442_B_Hspa8
  gRNA
tatgtatttacctgcaccat

SEQ ID NO: 92443 - DNA, 20 bp, Artificial Sequence
  MKO10092443_B_Hspa8
  gRNA
acagatgccaaacgtctgat

SEQ ID NO: 92444 - DNA, 20 bp, Artificial Sequence
  MKO10092444_B_Hspa8
  gRNA
catacctgaatgagtacacc

SEQ ID NO: 92445 - DNA, 20 bp, Artificial Sequence
  MKO10092445_B_Hspa9
  gRNA
acaaatgctccaatctgact

SEQ ID NO: 92446 - DNA, 20 bp, Artificial Sequence
  MKO10092446_B_Hspa9
  gRNA
ttacagatcagaagcaatca

SEQ ID NO: 92447 - DNA, 20 bp, Artificial Sequence
  MKO10092447_B_Hspa9
  gRNA
tccccccaggatggctggaa

SEQ ID NO: 92448 - DNA, 20 bp, Artificial Sequence
  MKO10092448_B_Hspb11
  gRNA
tttgagcagtgggttgaaaa

SEQ ID NO: 92449 - DNA, 20 bp, Artificial Sequence
  MKO10092449_B_Hspb11
  gRNA
tttagatttagtacacacag

SEQ ID NO: 92450 - DNA, 20 bp, Artificial Sequence
  MKO10092450_B_Hspb11
  gRNA
tgtgcacagcatttctgcag

SEQ ID NO: 92451 - DNA, 20 bp, Artificial Sequence
  MKO10092451_B_Hspb1
  gRNA
ccacaggcaagcacgaagaa

SEQ ID NO: 92452 - DNA, 20 bp, Artificial Sequence
  MKO10092452_B_Hspb1
  gRNA
gatctccaccacgccttcct

SEQ ID NO: 92453 - DNA, 20 bp, Artificial Sequence
  MKO10092453_B_Hspb1
  gRNA
gcgtgcccttctcgctgctg

SEQ ID NO: 92454 - DNA, 20 bp, Artificial Sequence
  MKO10092454_B_Hspb2
  gRNA
cgaagcgctgctcgcccaga

SEQ ID NO: 92455 - DNA, 20 bp, Artificial Sequence
  MKO10092455_B_Hspb2
  gRNA
cccgcggcgcctccaagtta

SEQ ID NO: 92456 - DNA, 20 bp, Artificial Sequence
  MKO10092456_B_Hspb2
  gRNA
gaacatagtagccgtgatag

SEQ ID NO: 92457 - DNA, 20 bp, Artificial Sequence
  MKO10092457_B_Hspb3
  gRNA
agagaccccagtgcgttatc

SEQ ID NO: 92458 - DNA, 20 bp, Artificial Sequence
  MKO10092458_B_Hspb3
  gRNA
catacactatacgcactgcc

SEQ ID NO: 92459 - DNA, 20 bp, Artificial Sequence
  MKO10092459_B_Hspb3
  gRNA
aactcctcctgataacgcac

SEQ ID NO: 92460 - DNA, 20 bp, Artificial Sequence
  MKO10092460_B_Hspb6
  gRNA
ggcgctcctcgtgccgagca

SEQ ID NO: 92461 - DNA, 20 bp, Artificial Sequence
  MKO10092461_B_Hspb6
  gRNA
cgccgataccgcctgcctcc

SEQ ID NO: 92462 - DNA, 20 bp, Artificial Sequence
  MKO10092462_B_Hspb6
  gRNA
tggtgacggaagttgggcct

SEQ ID NO: 92463 - DNA, 20 bp, Artificial Sequence
  MKO10092463_B_Hspb7
  gRNA
accatcctctcgaagggccg

SEQ ID NO: 92464 - DNA, 20 bp, Artificial Sequence
  MKO10092464_B_Hspb7
  gRNA
ctcccgtgcccttccagccc

SEQ ID NO: 92465 - DNA, 20 bp, Artificial Sequence
  MKO10092465_B_Hspb7
  gRNA
gaagcttctctccgctctga

SEQ ID NO: 92466 - DNA, 20 bp, Artificial Sequence
  MKO10092466_B_Hspb8
  gRNA
gcctgcgccgagaccccttt

SEQ ID NO: 92467 - DNA, 20 bp, Artificial Sequence
  MKO10092467_B_Hspb8
  gRNA
caaacatgaagagaagcagc

SEQ ID NO: 92468 - DNA, 20 bp, Artificial Sequence
  MKO10092468_B_Hspb8
  gRNA
accgctctcctcccgccttc

SEQ ID NO: 92469 - DNA, 20 bp, Artificial Sequence
  MKO10092469_B_Hspb9
  gRNA
tggggagccctcgcgccctc

SEQ ID NO: 92470 - DNA, 20 bp, Artificial Sequence
  MKO10092470_B_Hspb9
  gRNA
ccacttgattccgttcagca

SEQ ID NO: 92471 - DNA, 20 bp, Artificial Sequence
  MKO10092471_B_Hspb9
  gRNA
atctgacggtgaccggccag

SEQ ID NO: 92472 - DNA, 20 bp, Artificial Sequence
  MKO10092472_B_Hspbap1
  gRNA
tgtgaccagtctagtatctc

SEQ ID NO: 92473 - DNA, 20 bp, Artificial Sequence
  MKO10092473_B_Hspbap1
  gRNA
ccagaaagctcgaagacata

SEQ ID NO: 92474 - DNA, 20 bp, Artificial Sequence
  MKO10092474_B_Hspbap1
  gRNA
ggcattaccttccttgtacc

SEQ ID NO: 92475 - DNA, 20 bp, Artificial Sequence
  MKO10092475_B_Hspbp1
  gRNA
cattgtccatgttctcgcac

SEQ ID NO: 92476 - DNA, 20 bp, Artificial Sequence
  MKO10092476_B_Hspbp1
  gRNA
tccaggtcttgtccgagagc

SEQ ID NO: 92477 - DNA, 20 bp, Artificial Sequence
  MKO10092477_B_Hspbp1
  gRNA
gttgctgcagttcctccgcc

SEQ ID NO: 92478 - DNA, 20 bp, Artificial Sequence
  MKO10092478_B_Hspd1
  gRNA
ctgtgattattgaacagagt

SEQ ID NO: 92479 - DNA, 20 bp, Artificial Sequence
  MKO10092479_B_Hspd1
  gRNA
gttgctacaatttctgcaaa

SEQ ID NO: 92480 - DNA, 20 bp, Artificial Sequence
  MKO10092480_B_Hspd1
  gRNA
catttctgatgcaatgaaaa

SEQ ID NO: 92481 - DNA, 20 bp, Artificial Sequence
  MKO10092481_B_Hspe1
  gRNA
gagcctgtcagtgtgaaagt

SEQ ID NO: 92482 - DNA, 20 bp, Artificial Sequence
  MKO10092482_B_Hspe1
  gRNA
tttagagatagtgacattct

SEQ ID NO: 92483 - DNA, 20 bp, Artificial Sequence
  MKO10092483_B_Hspe1
  gRNA
gccacctttggttacagttt

SEQ ID NO: 92484 - DNA, 20 bp, Artificial Sequence
  MKO10092484_B_Hspg2
  gRNA
cacagctggagcccgaatac

SEQ ID NO: 92485 - DNA, 20 bp, Artificial Sequence
  MKO10092485_B_Hspg2
  gRNA
ctgctggcagatgatgcatc

SEQ ID NO: 92486 - DNA, 20 bp, Artificial Sequence
  MKO10092486_B_Hspg2
  gRNA
tgaacaccacactgacaatc

SEQ ID NO: 92487 - DNA, 20 bp, Artificial Sequence
  MKO10092487_B_Hsph1
  gRNA
cccaatgaaaaatggtggcg

SEQ ID NO: 92488 - DNA, 20 bp, Artificial Sequence
  MKO10092488_B_Hsph1
  gRNA
ctttaacttagtcagcagca

SEQ ID NO: 92489 - DNA, 20 bp, Artificial Sequence
  MKO10092489_B_Hsph1
  gRNA
tggagttgcagccaaaaacc

SEQ ID NO: 92490 - DNA, 20 bp, Artificial Sequence
  MKO10092490_B_Htatip2
  gRNA
ttgatcgactctcagtgttt

SEQ ID NO: 92491 - DNA, 20 bp, Artificial Sequence
  MKO10092491_B_Htatip2
  gRNA
cagacttgagcacataatct

SEQ ID NO: 92492 - DNA, 20 bp, Artificial Sequence
  MKO10092492_B_Htatip2
  gRNA
caccgctccagccttgcttc

SEQ ID NO: 92493 - DNA, 20 bp, Artificial Sequence
  MKO10092493_B_Htatsf1
  gRNA
aatacaaatgtatacgtgtc

SEQ ID NO: 92494 - DNA, 20 bp, Artificial Sequence
  MKO10092494_B_Htatsf1
  gRNA
aattcatccactgtgatgtc

SEQ ID NO: 92495 - DNA, 20 bp, Artificial Sequence
  MKO10092495_B_Htatsf1
  gRNA
tctccctccagacatcacag

SEQ ID NO: 92496 - DNA, 20 bp, Artificial Sequence
  MKO10092496_B_Htr1a
  gRNA
caccagcttcggaacatcgt

SEQ ID NO: 92497 - DNA, 20 bp, Artificial Sequence
  MKO10092497_B_Htr1a
  gRNA
atcgttgccgcctgtcccga

SEQ ID NO: 92498 - DNA, 20 bp, Artificial Sequence
  MKO10092498_B_Htr1a
  gRNA
gggacaggcggcaacgatac

SEQ ID NO: 92499 - DNA, 20 bp, Artificial Sequence
  MKO10092499_B_Htr1b
  gRNA
caacgcctttgtaatcgcta

SEQ ID NO: 92500 - DNA, 20 bp, Artificial Sequence
  MKO10092500_B_Htr1b
  gRNA
tcccacaactgcagcgccga

SEQ ID NO: 92501 - DNA, 20 bp, Artificial Sequence
  MKO10092501_B_Htr1b
  gRNA
ccacaccagcacgatcatga

SEQ ID NO: 92502 - DNA, 20 bp, Artificial Sequence
  MKO10092502_B_Htr1d
  gRNA
gaagcgcttcccgtagaggg

SEQ ID NO: 92503 - DNA, 20 bp, Artificial Sequence
  MKO10092503_B_Htr1d
  gRNA
ccacgtatatgcggccatac

SEQ ID NO: 92504 - DNA, 20 bp, Artificial Sequence
  MKO10092504_B_Htr1d
  gRNA
cgaggagatgtccgactgcc

SEQ ID NO: 92505 - DNA, 20 bp, Artificial Sequence
  MKO10092505_B_Htr1f
  gRNA
agtggctgctttgcgttctc

SEQ ID NO: 92506 - DNA, 20 bp, Artificial Sequence
  MKO10092506_B_Htr1f
  gRNA
caccgtgaaaagtcccagat

SEQ ID NO: 92507 - DNA, 20 bp, Artificial Sequence
  MKO10092507_B_Htr1f
  gRNA
tccacaatttactccacgtt

SEQ ID NO: 92508 - DNA, 20 bp, Artificial Sequence
  MKO10092508_B_Htr2a
  gRNA
gaccagtatgtttcccgcaa

SEQ ID NO: 92509 - DNA, 20 bp, Artificial Sequence
  MKO10092509_B_Htr2a
  gRNA
gcactgaatgtaccgtgaga

SEQ ID NO: 92510 - DNA, 20 bp, Artificial Sequence
  MKO10092510_B_Htr2a
  gRNA
ggttctggatagccacgtag

SEQ ID NO: 92511 - DNA, 20 bp, Artificial Sequence
  MKO10092511_B_Htr2b
  gRNA
gccatcccagtccctattaa

SEQ ID NO: 92512 - DNA, 20 bp, Artificial Sequence
  MKO10092512_B_Htr2b
  gRNA
ttgcactgattggcctgaat

SEQ ID NO: 92513 - DNA, 20 bp, Artificial Sequence
  MKO10092513_B_Htr2b
  gRNA
cagttgaaaagagaacatcg

SEQ ID NO: 92514 - DNA, 20 bp, Artificial Sequence
  MKO10092514_B_Htr2c
  gRNA
ctagatatttgtgccccgtc

SEQ ID NO: 92515 - DNA, 20 bp, Artificial Sequence
  MKO10092515_B_Htr2c
  gRNA
atcacgactattgaaagtgc

SEQ ID NO: 92516 - DNA, 20 bp, Artificial Sequence
  MKO10092516_B_Htr2c
  gRNA
gggcaacattctcgttatca

SEQ ID NO: 92517 - DNA, 20 bp, Artificial Sequence
  MKO10092517_B_Htr3a
  gRNA
gggtgcggcctgtgcgggac

SEQ ID NO: 92518 - DNA, 20 bp, Artificial Sequence
  MKO10092518_B_Htr3a
  gRNA
gttgtagatgtcaaggctac

SEQ ID NO: 92519 - DNA, 20 bp, Artificial Sequence
  MKO10092519_B_Htr3a
  gRNA
gtgacattgtcgaagtcctc

SEQ ID NO: 92520 - DNA, 20 bp, Artificial Sequence
  MKO10092520_B_Htr3b
  gRNA
agaccacctggatgggcttg

SEQ ID NO: 92521 - DNA, 20 bp, Artificial Sequence
  MKO10092521_B_Htr3b
  gRNA
atcgaacagactagagttcc

SEQ ID NO: 92522 - DNA, 20 bp, Artificial Sequence
  MKO10092522_B_Htr3b
  gRNA
aaaaattaaagacaagcgtg

SEQ ID NO: 92523 - DNA, 20 bp, Artificial Sequence
  MKO10092523_B_Htr4
  gRNA
catgcactcaccttagtaca

SEQ ID NO: 92524 - DNA, 20 bp, Artificial Sequence
  MKO10092524_B_Htr4
  gRNA
tcaccagcaccgaaaccagc

SEQ ID NO: 92525 - DNA, 20 bp, Artificial Sequence
  MKO10092525_B_Htr4
  gRNA
tatgaaagggtccacaatat

SEQ ID NO: 92526 - DNA, 20 bp, Artificial Sequence
  MKO10092526_B_Htr5a
  gRNA
agagcacaaacactccgatg

SEQ ID NO: 92527 - DNA, 20 bp, Artificial Sequence
  MKO10092527_B_Htr5a
  gRNA
caatagctctggaccgctac

SEQ ID NO: 92528 - DNA, 20 bp, Artificial Sequence
  MKO10092528_B_Htr5a
  gRNA
ctacaccgtgttctccaccg

SEQ ID NO: 92529 - DNA, 20 bp, Artificial Sequence
  MKO10092529_B_Htr5b
  gRNA
gccacgagtctccgcttgtc

SEQ ID NO: 92530 - DNA, 20 bp, Artificial Sequence
  MKO10092530_B_Htr5b
  gRNA
agttgtccgttgggcgacgt

SEQ ID NO: 92531 - DNA, 20 bp, Artificial Sequence
  MKO10092531_B_Htr5b
  gRNA
gtaccaccgcccgccgtctg

SEQ ID NO: 92532 - DNA, 20 bp, Artificial Sequence
  MKO10092532_B_Htr6
  gRNA
agtggatgctgccgtatctc

SEQ ID NO: 92533 - DNA, 20 bp, Artificial Sequence
  MKO10092533_B_Htr6
  gRNA
gtctgaccaccaagcatagc

SEQ ID NO: 92534 - DNA, 20 bp, Artificial Sequence
  MKO10092534_B_Htr6
  gRNA
gtgcccaggacaccacgccc

SEQ ID NO: 92535 - DNA, 20 bp, Artificial Sequence
  MKO10092535_B_Htr7
  gRNA
cgtgcagcacatgacgtcca

SEQ ID NO: 92536 - DNA, 20 bp, Artificial Sequence
  MKO10092536_B_Htr7
  gRNA
agacaaaactgtgaccactg

SEQ ID NO: 92537 - DNA, 20 bp, Artificial Sequence
  MKO10092537_B_Htr7
  gRNA
attgtccgggggcgcgtccc

SEQ ID NO: 92538 - DNA, 20 bp, Artificial Sequence
  MKO10092538_B_Htra1
  gRNA
ggagaagatcgccccggctg

SEQ ID NO: 92539 - DNA, 20 bp, Artificial Sequence
  MKO10092539_B_Htra1
  gRNA
gattgtgacaaatgctcacg

SEQ ID NO: 92540 - DNA, 20 bp, Artificial Sequence
  MKO10092540_B_Htra1
  gRNA
caccaacaaaaaccgggtca

SEQ ID NO: 92541 - DNA, 20 bp, Artificial Sequence
  MKO10092541_B_Htra2
  gRNA
cgcgatgcagaaactcccta

SEQ ID NO: 92542 - DNA, 20 bp, Artificial Sequence
  MKO10092542_B_Htra2
  gRNA
ccatcccttctgatcgcctt

SEQ ID NO: 92543 - DNA, 20 bp, Artificial Sequence
  MKO10092543_B_Htra2
  gRNA
ctgcagaacacgatcacatc

SEQ ID NO: 92544 - DNA, 20 bp, Artificial Sequence
  MKO10092544_B_Htra3
  gRNA
gttcaacttcatcgccgatg

SEQ ID NO: 92545 - DNA, 20 bp, Artificial Sequence
  MKO10092545_B_Htra3
  gRNA
cttggggtggattacaatcg

SEQ ID NO: 92546 - DNA, 20 bp, Artificial Sequence
  MKO10092546_B_Htra3
  gRNA
gcggcacattccggccaaac

SEQ ID NO: 92547 - DNA, 20 bp, Artificial Sequence
  MKO10092547_B_Htra4
  gRNA
tccacttgcagctgttccgc

SEQ ID NO: 92548 - DNA, 20 bp, Artificial Sequence
  MKO10092548_B_Htra4
  gRNA
ctgcagaacaccgtgactgc

SEQ ID NO: 92549 - DNA, 20 bp, Artificial Sequence
  MKO10092549_B_Htra4
  gRNA
cagatcacctctcaccaacc

SEQ ID NO: 92550 - DNA, 20 bp, Artificial Sequence
  MKO10092550_B_Htt
  gRNA
gaagtttgcgtgctgccctg

SEQ ID NO: 92551 - DNA, 20 bp, Artificial Sequence
  MKO10092551_B_Htt
  gRNA
tgatggattctaatcttcca

SEQ ID NO: 92552 - DNA, 20 bp, Artificial Sequence
  MKO10092552_B_Htt
  gRNA
cccaagagtttctgaaattc

SEQ ID NO: 92553 - DNA, 20 bp, Artificial Sequence
  MKO10092553_B_Hunk
  gRNA
atgcattacctgtggagagc

SEQ ID NO: 92554 - DNA, 20 bp, Artificial Sequence
  MKO10092554_B_Hunk
  gRNA
gacaataatatcaagctgat

SEQ ID NO: 92555 - DNA, 20 bp, Artificial Sequence
  MKO10092555_B_Hunk
  gRNA
ctgcgccagaactgcttgcc

SEQ ID NO: 92556 - DNA, 20 bp, Artificial Sequence
  MKO10092556_B_Hus1b
  gRNA
gcagtctttccatcgccttc

SEQ ID NO: 92557 - DNA, 20 bp, Artificial Sequence
  MKO10092557_B_Hus1b
  gRNA
gcaccctcacaggcaaatcg

SEQ ID NO: 92558 - DNA, 20 bp, Artificial Sequence
  MKO10092558_B_Hus1b
  gRNA
tggtccacgatttgcctgtg

SEQ ID NO: 92559 - DNA, 20 bp, Artificial Sequence
  MKO10092559_B_Hus1
  gRNA
tcttaccgtgtctgtagagc

SEQ ID NO: 92560 - DNA, 20 bp, Artificial Sequence
  MKO10092560_B_Hus1
  gRNA
aggttcttccgagaagactg

SEQ ID NO: 92561 - DNA, 20 bp, Artificial Sequence
  MKO10092561_B_Hus1
  gRNA
ccacatgctcacgcctccac

SEQ ID NO: 92562 - DNA, 20 bp, Artificial Sequence
  MKO10092562_B_Huwe1
  gRNA
tcaaactatatcacacgtct

SEQ ID NO: 92563 - DNA, 20 bp, Artificial Sequence
  MKO10092563_B_Huwe1
  gRNA
tgatttgctgcagttccaag

SEQ ID NO: 92564 - DNA, 20 bp, Artificial Sequence
  MKO10092564_B_Huwe1
  gRNA
taatgatgagcaactcctct

SEQ ID NO: 92565 - DNA, 20 bp, Artificial Sequence
  MKO10092565_B_Hvcn1
  gRNA
caccttggttctgcgagtga

SEQ ID NO: 92566 - DNA, 20 bp, Artificial Sequence
  MKO10092566_B_Hvcn1
  gRNA
ttgaaacactttacggtggt

SEQ ID NO: 92567 - DNA, 20 bp, Artificial Sequence
  MKO10092567_B_Hvcn1
  gRNA
agccaccacttcgaagctct

SEQ ID NO: 92568 - DNA, 20 bp, Artificial Sequence
  MKO10092568_B_Hyal1
  gRNA
cgcagatggctatgaaattc

SEQ ID NO: 92569 - DNA, 20 bp, Artificial Sequence
  MKO10092569_B_Hyal1
  gRNA
ctcagacaaaacaagtacca

SEQ ID NO: 92570 - DNA, 20 bp, Artificial Sequence
  MKO10092570_B_Hyal1
  gRNA
aatgaagcccttcagtcctg

SEQ ID NO: 92571 - DNA, 20 bp, Artificial Sequence
  MKO10092571_B_Hyal2
  gRNA
tgaaccccagcttcgacccg

SEQ ID NO: 92572 - DNA, 20 bp, Artificial Sequence
  MKO10092572_B_Hyal2
  gRNA
cgtcatcttctggggcgact

SEQ ID NO: 92573 - DNA, 20 bp, Artificial Sequence
  MKO10092573_B_Hyal2
  gRNA
gtggaccttatctctaccat

SEQ ID NO: 92574 - DNA, 20 bp, Artificial Sequence
  MKO10092574_B_Hyal3
  gRNA
cagcccaacccgaataacaa

SEQ ID NO: 92575 - DNA, 20 bp, Artificial Sequence
  MKO10092575_B_Hyal3
  gRNA
gacgacctgatgcagactat

SEQ ID NO: 92576 - DNA, 20 bp, Artificial Sequence
  MKO10092576_B_Hyal3
  gRNA
tcactccaatagtctgcatc

SEQ ID NO: 92577 - DNA, 20 bp, Artificial Sequence
  MKO10092577_B_Hyal4
  gRNA
cgtcacctttgcaagaataa

SEQ ID NO: 92578 - DNA, 20 bp, Artificial Sequence
  MKO10092578_B_Hyal4
  gRNA
caagatctaattagtaccat

SEQ ID NO: 92579 - DNA, 20 bp, Artificial Sequence
  MKO10092579_B_Hyal4
  gRNA
agaaagtgctgcgttgggag

SEQ ID NO: 92580 - DNA, 20 bp, Artificial Sequence
  MKO10092580_B_Hyal5
  gRNA
tacttacctcatatagatat

SEQ ID NO: 92581 - DNA, 20 bp, Artificial Sequence
  MKO10092581_B_Hyal5
  gRNA
tccccacattaccattccag

SEQ ID NO: 92582 - DNA, 20 bp, Artificial Sequence
  MKO10092582_B_Hyal5
  gRNA
tcttagtttatcacaaacta

SEQ ID NO: 92583 - DNA, 20 bp, Artificial Sequence
  MKO10092583_B_Hyal6
  gRNA
tctgtgagacaaactgttca

SEQ ID NO: 92584 - DNA, 20 bp, Artificial Sequence
  MKO10092584_B_Hyal6
  gRNA
gtggggaggatatgaatatt

SEQ ID NO: 92585 - DNA, 20 bp, Artificial Sequence
  MKO10092585_B_Hyal6
  gRNA
gaggatttagtgcacacaat

SEQ ID NO: 92586 - DNA, 20 bp, Artificial Sequence
  MKO10092586_B_Hydin
  gRNA
cttccgatgcatggccccca

SEQ ID NO: 92587 - DNA, 20 bp, Artificial Sequence
  MKO10092587_B_Hydin
  gRNA
cttcacagggagaatagttc

SEQ ID NO: 92588 - DNA, 20 bp, Artificial Sequence
  MKO10092588_B_Hydin
  gRNA
aatatgatttcagacggaaa

SEQ ID NO: 92589 - DNA, 20 bp, Artificial Sequence
  MKO10092589_B_Hyi
  gRNA
acccaatctgcagttgcaga

SEQ ID NO: 92590 - DNA, 20 bp, Artificial Sequence
  MKO10092590_B_Hyi
  gRNA
gcaggctgtgctgtatgcca

SEQ ID NO: 92591 - DNA, 20 bp, Artificial Sequence
  MKO10092591_B_Hyi
  gRNA
caccatctgcaactgcagat

SEQ ID NO: 92592 - DNA, 20 bp, Artificial Sequence
  MKO10092592_B_Hykk
  gRNA
ccctgagccaaagtcgaaac

SEQ ID NO: 92593 - DNA, 20 bp, Artificial Sequence
  MKO10092593_B_Hykk
  gRNA
ccaattggataaagccctag

SEQ ID NO: 92594 - DNA, 20 bp, Artificial Sequence
  MKO10092594_B_Hykk
  gRNA
cctgcctctctacagccgtc

SEQ ID NO: 92595 - DNA, 20 bp, Artificial Sequence
  MKO10092595_B_Hyls1
  gRNA
gtcactagcacttccccgtc

SEQ ID NO: 92596 - DNA, 20 bp, Artificial Sequence
  MKO10092596_B_Hyls1
  gRNA
gcagctaacattcgttcttc

SEQ ID NO: 92597 - DNA, 20 bp, Artificial Sequence
  MKO10092597_B_Hyls1
  gRNA
cttggacggaggttctgttc

SEQ ID NO: 92598 - DNA, 20 bp, Artificial Sequence
  MKO10092598_B_Hyou1
  gRNA
cttgttcaatacaatctcca

SEQ ID NO: 92599 - DNA, 20 bp, Artificial Sequence
  MKO10092599_B_Hyou1
  gRNA
aaggtggccattgtcaagcc

SEQ ID NO: 92600 - DNA, 20 bp, Artificial Sequence
  MKO10092600_B_Hyou1
  gRNA
gcagctgcagttctctcccg

SEQ ID NO: 92601 - DNA, 20 bp, Artificial Sequence
  MKO10092601_B_Hypk
  gRNA
ttaaacttaccgctcttgtt

SEQ ID NO: 92602 - DNA, 20 bp, Artificial Sequence
  MKO10092602_B_Hypk
  gRNA
aagcacattatcagttggtt

SEQ ID NO: 92603 - DNA, 20 bp, Artificial Sequence
  MKO10092603_B_Hypk
  gRNA
cactatcaagaaggaagatc

SEQ ID NO: 92604 - DNA, 20 bp, Artificial Sequence
  MKO10092604_B_I830012O16Rik
  gRNA
cagagtttaaatgttcgagc

SEQ ID NO: 92605 - DNA, 20 bp, Artificial Sequence
  MKO10092605_B_I830012O16Rik
  gRNA
agaggttaaacagcaaacat

SEQ ID NO: 92606 - DNA, 20 bp, Artificial Sequence
  MKO10092606_B_I830012O16Rik
  gRNA
tcacgtggggaaactacgcc

SEQ ID NO: 92607 - DNA, 20 bp, Artificial Sequence
  MKO10092607_B_I830077J02Rik
  gRNA
cagcagaaccccagcaaaaa

SEQ ID NO: 92608 - DNA, 20 bp, Artificial Sequence
  MKO10092608_B_I830077J02Rik
  gRNA
gctggtcactggggctgtcg

SEQ ID NO: 92609 - DNA, 20 bp, Artificial Sequence
  MKO10092609_B_I830077J02Rik
  gRNA
ttacttggggttgaagaaat

SEQ ID NO: 92610 - DNA, 20 bp, Artificial Sequence
  MKO10092610_B_Iah1
  gRNA
aaccgcctgaactcagttgt

SEQ ID NO: 92611 - DNA, 20 bp, Artificial Sequence
  MKO10092611_B_Iah1
  gRNA
aagaagattgtaacggccac

SEQ ID NO: 92612 - DNA, 20 bp, Artificial Sequence
  MKO10092612_B_Iah1
  gRNA
ttacaagtagcccgagactg

SEQ ID NO: 92613 - DNA, 20 bp, Artificial Sequence
  MKO10092613_B_Iapp
  gRNA
tgacaggtgtagctctcaag

SEQ ID NO: 92614 - DNA, 20 bp, Artificial Sequence
  MKO10092614_B_Iapp
  gRNA
agtcctcccaccaaccaacg

SEQ ID NO: 92615 - DNA, 20 bp, Artificial Sequence
  MKO10092615_B_Iapp
  gRNA
gatcgaatacatatggcaag

SEQ ID NO: 92616 - DNA, 20 bp, Artificial Sequence
  MKO10092616_B_Iars2
  gRNA
agctgcttggcttcgtactt

SEQ ID NO: 92617 - DNA, 20 bp, Artificial Sequence
  MKO10092617_B_Iars2
  gRNA
gatgagggagaccaatatac

SEQ ID NO: 92618 - DNA, 20 bp, Artificial Sequence
  MKO10092618_B_Iars2
  gRNA
tctagccagatcatttgctc

SEQ ID NO: 92619 - DNA, 20 bp, Artificial Sequence
  MKO10092619_B_Iars
  gRNA
cctcgtgtacagaggcgtga

SEQ ID NO: 92620 - DNA, 20 bp, Artificial Sequence
  MKO10092620_B_Iars
  gRNA
tgatgagatactccgctgag

SEQ ID NO: 92621 - DNA, 20 bp, Artificial Sequence
  MKO10092621_B_Iars
  gRNA
gtacgaaatcgataagacac

SEQ ID NO: 92622 - DNA, 20 bp, Artificial Sequence
  MKO10092622_B_Iba57
  gRNA
cattggtcgatagtcccaac

SEQ ID NO: 92623 - DNA, 20 bp, Artificial Sequence
  MKO10092623_B_Iba57
  gRNA
gctccacggtgaccttccgc

SEQ ID NO: 92624 - DNA, 20 bp, Artificial Sequence
  MKO10092624_B_Iba57
  gRNA
ggctgtgactgccgtggtgc

SEQ ID NO: 92625 - DNA, 20 bp, Artificial Sequence
  MKO10092625_B_Ibsp
  gRNA
ccaggagacttcaaacgaag

SEQ ID NO: 92626 - DNA, 20 bp, Artificial Sequence
  MKO10092626_B_Ibsp
  gRNA
agctgttacacccgagagtg

SEQ ID NO: 92627 - DNA, 20 bp, Artificial Sequence
  MKO10092627_B_Ibsp
  gRNA
tgcttataaagaaagtagcg

SEQ ID NO: 92628 - DNA, 20 bp, Artificial Sequence
  MKO10092628_B_Ibtk
  gRNA
caaacatcaccccgagctgc

SEQ ID NO: 92629 - DNA, 20 bp, Artificial Sequence
  MKO10092629_B_Ibtk
  gRNA
gagtggggtttatgtcaagc

SEQ ID NO: 92630 - DNA, 20 bp, Artificial Sequence
  MKO10092630_B_Ibtk
  gRNA
aggtgtaaacctgccctttc

SEQ ID NO: 92631 - DNA, 20 bp, Artificial Sequence
  MKO10092631_B_Ica1l
  gRNA
gactcaagctggcgaaatga

SEQ ID NO: 92632 - DNA, 20 bp, Artificial Sequence
  MKO10092632_B_Ica1l
  gRNA
tcactcactcactacctacc

SEQ ID NO: 92633 - DNA, 20 bp, Artificial Sequence
  MKO10092633_B_Ica1l
  gRNA
caagttcattgcatgtctcc

SEQ ID NO: 92634 - DNA, 20 bp, Artificial Sequence
  MKO10092634_B_Ica1
  gRNA
ggaaagtttcttcgatctca

SEQ ID NO: 92635 - DNA, 20 bp, Artificial Sequence
  MKO10092635_B_Ica1
  gRNA
ctgacttatcttgagcaaac

SEQ ID NO: 92636 - DNA, 20 bp, Artificial Sequence
  MKO10092636_B_Ica1
  gRNA
ctggctgacagtgaaccgca

SEQ ID NO: 92637 - DNA, 20 bp, Artificial Sequence
  MKO10092637_B_Icam1
  gRNA
ctgtttgagctgagcgagat

SEQ ID NO: 92638 - DNA, 20 bp, Artificial Sequence
  MKO10092638_B_Icam1
  gRNA
tttctcatgccgcacagaac

SEQ ID NO: 92639 - DNA, 20 bp, Artificial Sequence
  MKO10092639_B_Icam1
  gRNA
ccactcacaatacacggtga

SEQ ID NO: 92640 - DNA, 20 bp, Artificial Sequence
  MKO10092640_B_Icam2
  gRNA
ggaccatatgtagacctcaa

SEQ ID NO: 92641 - DNA, 20 bp, Artificial Sequence
  MKO10092641_B_Icam2
  gRNA
gctttcccgaacacgtgaaa

SEQ ID NO: 92642 - DNA, 20 bp, Artificial Sequence
  MKO10092642_B_Icam2
  gRNA
gtatatcatccgcagcatct

SEQ ID NO: 92643 - DNA, 20 bp, Artificial Sequence
  MKO10092643_B_Icam4
  gRNA
cgctgcgtcgtcacttgcgc

SEQ ID NO: 92644 - DNA, 20 bp, Artificial Sequence
  MKO10092644_B_Icam4
  gRNA
agtgacgacgcagcgcacct

SEQ ID NO: 92645 - DNA, 20 bp, Artificial Sequence
  MKO10092645_B_Icam4
  gRNA
ctctacctccatcgcaaccc

SEQ ID NO: 92646 - DNA, 20 bp, Artificial Sequence
  MKO10092646_B_Icam5
  gRNA
cccttgcagagcgaccggat

SEQ ID NO: 92647 - DNA, 20 bp, Artificial Sequence
  MKO10092647_B_Icam5
  gRNA
gtcaatgtgaggctcgctcg

SEQ ID NO: 92648 - DNA, 20 bp, Artificial Sequence
  MKO10092648_B_Icam5
  gRNA
cacgacgcacatcagctgtt

SEQ ID NO: 92649 - DNA, 20 bp, Artificial Sequence
  MKO10092649_B_Ick
  gRNA
agaatgcatgaaccttcggg

SEQ ID NO: 92650 - DNA, 20 bp, Artificial Sequence
  MKO10092650_B_Ick
  gRNA
atgccagtccttgcaatatc

SEQ ID NO: 92651 - DNA, 20 bp, Artificial Sequence
  MKO10092651_B_Ick
  gRNA
cttgtgaaaatcgccgactt

SEQ ID NO: 92652 - DNA, 20 bp, Artificial Sequence
  MKO10092652_B_Icmt
  gRNA
ggcatagaccacgccacaga

SEQ ID NO: 92653 - DNA, 20 bp, Artificial Sequence
  MKO10092653_B_Icmt
  gRNA
tcacgctcgagaacatcttc

SEQ ID NO: 92654 - DNA, 20 bp, Artificial Sequence
  MKO10092654_B_Icmt
  gRNA
ccagccaaagtgattccaag

SEQ ID NO: 92655 - DNA, 20 bp, Artificial Sequence
  MKO10092655_B_Icosl
  gRNA
agacgccatttcaacttgag

SEQ ID NO: 92656 - DNA, 20 bp, Artificial Sequence
  MKO10092656_B_Icosl
  gRNA
tgcaggtgtaggtacgttcc

SEQ ID NO: 92657 - DNA, 20 bp, Artificial Sequence
  MKO10092657_B_Icosl
  gRNA
atacccggcatgtgaactcc

SEQ ID NO: 92658 - DNA, 20 bp, Artificial Sequence
  MKO10092658_B_Icos
  gRNA
tgcagaagtaatagcttccc

SEQ ID NO: 92659 - DNA, 20 bp, Artificial Sequence
  MKO10092659_B_Icos
  gRNA
atgaacatgtattcactatt

SEQ ID NO: 92660 - DNA, 20 bp, Artificial Sequence
  MKO10092660_B_Icos
  gRNA
taatagtgaatacatgttca

SEQ ID NO: 92661 - DNA, 20 bp, Artificial Sequence
  MKO10092661_B_Ict1
  gRNA
cccgtccgcagtgaattcca

SEQ ID NO: 92662 - DNA, 20 bp, Artificial Sequence
  MKO10092662_B_Ict1
  gRNA
acccagagggatgtaactgc

SEQ ID NO: 92663 - DNA, 20 bp, Artificial Sequence
  MKO10092663_B_Ict1
  gRNA
ggttaagcatatcttactgt

SEQ ID NO: 92664 - DNA, 20 bp, Artificial Sequence
  MKO10092664_B_Id1
  gRNA
gatcgcatcttgtgtcgctg

SEQ ID NO: 92665 - DNA, 20 bp, Artificial Sequence
  MKO10092665_B_Id1
  gRNA
gatcagtgccttggcggccg

SEQ ID NO: 92666 - DNA, 20 bp, Artificial Sequence
  MKO10092666_B_Id1
  gRNA
agcatgtaatcgactacatc

SEQ ID NO: 92667 - DNA, 20 bp, Artificial Sequence
  MKO10092667_B_Id2
  gRNA
tcattcgacataagctcaga

SEQ ID NO: 92668 - DNA, 20 bp, Artificial Sequence
  MKO10092668_B_Id2
  gRNA
cgatagtgggatgcgagtcc

SEQ ID NO: 92669 - DNA, 20 bp, Artificial Sequence
  MKO10092669_B_Id2
  gRNA
tgtaatcgatgacgtgctgc

SEQ ID NO: 92670 - DNA, 20 bp, Artificial Sequence
  MKO10092670_B_Id3
  gRNA
ttgtgatctccaaggacaag

SEQ ID NO: 92671 - DNA, 20 bp, Artificial Sequence
  MKO10092671_B_Id3
  gRNA
accactgctactcgcgcctg

SEQ ID NO: 92672 - DNA, 20 bp, Artificial Sequence
  MKO10092672_B_Id3
  gRNA
ctaagaggctcctcggtcga

SEQ ID NO: 92673 - DNA, 20 bp, Artificial Sequence
  MKO10092673_B_Id4
  gRNA
gctgtcaccctgcttgttca

SEQ ID NO: 92674 - DNA, 20 bp, Artificial Sequence
  MKO10092674_B_Id4
  gRNA
ttgcggcccgaggggcgcac

SEQ ID NO: 92675 - DNA, 20 bp, Artificial Sequence
  MKO10092675_B_Id4
  gRNA
agtcgttcatatcgcactgc

SEQ ID NO: 92676 - DNA, 20 bp, Artificial Sequence
  MKO10092676_B_Ide
  gRNA
gcttcaccaccaggttagtg

SEQ ID NO: 92677 - DNA, 20 bp, Artificial Sequence
  MKO10092677_B_Ide
  gRNA
agaatgtgatgaacgatgcc

SEQ ID NO: 92678 - DNA, 20 bp, Artificial Sequence
  MKO10092678_B_Ide
  gRNA
tcagaccctccaaatattcc

SEQ ID NO: 92679 - DNA, 20 bp, Artificial Sequence
  MKO10092679_B_Idh1
  gRNA
tcgtgatgccaccaatgacc

SEQ ID NO: 92680 - DNA, 20 bp, Artificial Sequence
  MKO10092680_B_Idh1
  gRNA
tggcaccatccgaaacattc

SEQ ID NO: 92681 - DNA, 20 bp, Artificial Sequence
  MKO10092681_B_Idh1
  gRNA
actattctgaagaagtatga

SEQ ID NO: 92682 - DNA, 20 bp, Artificial Sequence
  MKO10092682_B_Idh2
  gRNA
ggggatgtacaacaccgacg

SEQ ID NO: 92683 - DNA, 20 bp, Artificial Sequence
  MKO10092683_B_Idh2
  gRNA
tggacggtgacgagatgacc

SEQ ID NO: 92684 - DNA, 20 bp, Artificial Sequence
  MKO10092684_B_Idh2
  gRNA
caaggtggagaagccggtag

SEQ ID NO: 92685 - DNA, 20 bp, Artificial Sequence
  MKO10092685_B_Idh3a
  gRNA
gcttctaggcacctattcag

SEQ ID NO: 92686 - DNA, 20 bp, Artificial Sequence
  MKO10092686_B_Idh3a
  gRNA
gggatcatccactttcctcc

SEQ ID NO: 92687 - DNA, 20 bp, Artificial Sequence
  MKO10092687_B_Idh3a
  gRNA
tgcattccacaacacaaaac

SEQ ID NO: 92688 - DNA, 20 bp, Artificial Sequence
  MKO10092688_B_Idh3b
  gRNA
tcacgccgcttcccagagcc

SEQ ID NO: 92689 - DNA, 20 bp, Artificial Sequence
  MKO10092689_B_Idh3b
  gRNA
tgatgctccttaaattccac

SEQ ID NO: 92690 - DNA, 20 bp, Artificial Sequence
  MKO10092690_B_Idh3b
  gRNA
cacgccgtctccaggcagca

SEQ ID NO: 92691 - DNA, 20 bp, Artificial Sequence
  MKO10092691_B_Idh3g
  gRNA
tgcatgttaagtctgtattc

SEQ ID NO: 92692 - DNA, 20 bp, Artificial Sequence
  MKO10092692_B_Idh3g
  gRNA
catacagtgactatgatccc

SEQ ID NO: 92693 - DNA, 20 bp, Artificial Sequence
  MKO10092693_B_Idh3g
  gRNA
acaggttctggctgcccatg

SEQ ID NO: 92694 - DNA, 20 bp, Artificial Sequence
  MKO10092694_B_Idi1
  gRNA
gatgaaaatgacaataaaat

SEQ ID NO: 92695 - DNA, 20 bp, Artificial Sequence
  MKO10092695_B_Idi1
  gRNA
catctgatctctgctgtaac

SEQ ID NO: 92696 - DNA, 20 bp, Artificial Sequence
  MKO10092696_B_Idi1
  gRNA
gatgctaaaattacctttcc

SEQ ID NO: 92697 - DNA, 20 bp, Artificial Sequence
  MKO10092697_B_Idi2
  gRNA
tgaactccagctcaaacgtc

SEQ ID NO: 92698 - DNA, 20 bp, Artificial Sequence
  MKO10092698_B_Idi2
  gRNA
tctcctccagacgtttgagc

SEQ ID NO: 92699 - DNA, 20 bp, Artificial Sequence
  MKO10092699_B_Idi2
  gRNA
ctcacctggaaatgtgtact

SEQ ID NO: 92700 - DNA, 20 bp, Artificial Sequence
  MKO10092700_B_Idnk
  gRNA
agcacggtcatggaggcacc

SEQ ID NO: 92701 - DNA, 20 bp, Artificial Sequence
  MKO10092701_B_Idnk
  gRNA
ggggcgcatcacttcctcct

SEQ ID NO: 92702 - DNA, 20 bp, Artificial Sequence
  MKO10092702_B_Idnk
  gRNA
ggccagcagcgcacccacag

SEQ ID NO: 92703 - DNA, 20 bp, Artificial Sequence
  MKO10092703_B_Ido1
  gRNA
aggggatgacgatgttcgaa

SEQ ID NO: 92704 - DNA, 20 bp, Artificial Sequence
  MKO10092704_B_Ido1
  gRNA
cttctctgagagctcgcagt

SEQ ID NO: 92705 - DNA, 20 bp, Artificial Sequence
  MKO10092705_B_Ido1
  gRNA
gtcttatgcagactgtgtcc

SEQ ID NO: 92706 - DNA, 20 bp, Artificial Sequence
  MKO10092706_B_Ido2
  gRNA
tggcggttctcgattaagtg

SEQ ID NO: 92707 - DNA, 20 bp, Artificial Sequence
  MKO10092707_B_Ido2
  gRNA
cttgggactcccgcctatcc

SEQ ID NO: 92708 - DNA, 20 bp, Artificial Sequence
  MKO10092708_B_Ido2
  gRNA
cgaccagaccgttggaaatc

SEQ ID NO: 92709 - DNA, 20 bp, Artificial Sequence
  MKO10092709_B_Ids
  gRNA
gcttgtggtacccaactgcc

SEQ ID NO: 92710 - DNA, 20 bp, Artificial Sequence
  MKO10092710_B_Ids
  gRNA
tctgctttgtcctgtcgatg

SEQ ID NO: 92711 - DNA, 20 bp, Artificial Sequence
  MKO10092711_B_Ids
  gRNA
gatgccagctggtcaatgtt

SEQ ID NO: 92712 - DNA, 20 bp, Artificial Sequence
  MKO10092712_B_Idua
  gRNA
acacgttgtcaaagtcatgg

SEQ ID NO: 92713 - DNA, 20 bp, Artificial Sequence
  MKO10092713_B_Idua
  gRNA
ggtccaagaatgcatccaag

SEQ ID NO: 92714 - DNA, 20 bp, Artificial Sequence
  MKO10092714_B_Idua
  gRNA
ctattcaccaatgtatctcc

SEQ ID NO: 92715 - DNA, 20 bp, Artificial Sequence
  MKO10092715_B_Ier2
  gRNA
taccactctcgcatgcagcg

SEQ ID NO: 92716 - DNA, 20 bp, Artificial Sequence
  MKO10092716_B_Ier2
  gRNA
acctcgcccgcgtcctccaa

SEQ ID NO: 92717 - DNA, 20 bp, Artificial Sequence
  MKO10092717_B_Ier2
  gRNA
gccgacgccccccacgtgcg

SEQ ID NO: 92718 - DNA, 20 bp, Artificial Sequence
  MKO10092718_B_Ier3ip1
  gRNA
cgccatcgccgtgctgcacg

SEQ ID NO: 92719 - DNA, 20 bp, Artificial Sequence
  MKO10092719_B_Ier3ip1
  gRNA
attgagtttactattatcaa

SEQ ID NO: 92720 - DNA, 20 bp, Artificial Sequence
  MKO10092720_B_Ier3ip1
  gRNA
attgtattgcttctgttatt

SEQ ID NO: 92721 - DNA, 20 bp, Artificial Sequence
  MKO10092721_B_Ier3
  gRNA
ccggcgccagctaccaaccg

SEQ ID NO: 92722 - DNA, 20 bp, Artificial Sequence
  MKO10092722_B_Ier3
  gRNA
gcgagaagtgttcaaacgcg

SEQ ID NO: 92723 - DNA, 20 bp, Artificial Sequence
  MKO10092723_B_Ier3
  gRNA
tgcgcccattactgcgcccc

SEQ ID NO: 92724 - DNA, 20 bp, Artificial Sequence
  MKO10092724_B_Ier5l
  gRNA
cgcgccccggtagaagccag

SEQ ID NO: 92725 - DNA, 20 bp, Artificial Sequence
  MKO10092725_B_Ier5l
  gRNA
tttgagatgttggacgcgtc

SEQ ID NO: 92726 - DNA, 20 bp, Artificial Sequence
  MKO10092726_B_Ier5l
  gRNA
cttctaccggggcgcgtacc

SEQ ID NO: 92727 - DNA, 20 bp, Artificial Sequence
  MKO10092727_B_Ier5
  gRNA
ccgggggacagccgcacggg

SEQ ID NO: 92728 - DNA, 20 bp, Artificial Sequence
  MKO10092728_B_Ier5
  gRNA
tggctcggacgcgtgccccg

SEQ ID NO: 92729 - DNA, 20 bp, Artificial Sequence
  MKO10092729_B_Ier5
  gRNA
ttcccccgatccggccaccg

SEQ ID NO: 92730 - DNA, 20 bp, Artificial Sequence
  MKO10092730_B_Iffo1
  gRNA
gatgtccatgtcgactttca

SEQ ID NO: 92731 - DNA, 20 bp, Artificial Sequence
  MKO10092731_B_Iffo1
  gRNA
ctggctgtaggaggcccaag

SEQ ID NO: 92732 - DNA, 20 bp, Artificial Sequence
  MKO10092732_B_Iffo1
  gRNA
tagctcctcttggcaggcat

SEQ ID NO: 92733 - DNA, 20 bp, Artificial Sequence
  MKO10092733_B_Iffo2
  gRNA
acgcatgaaccttcagacca

SEQ ID NO: 92734 - DNA, 20 bp, Artificial Sequence
  MKO10092734_B_Iffo2
  gRNA
ccctaagaagaaagatcgta

SEQ ID NO: 92735 - DNA, 20 bp, Artificial Sequence
  MKO10092735_B_Iffo2
  gRNA
ggcttcggatgaagacatct

SEQ ID NO: 92736 - DNA, 20 bp, Artificial Sequence
  MKO10092736_B_Ifi202b
  gRNA
tgatttccagagtgtaatat

SEQ ID NO: 92737 - DNA, 20 bp, Artificial Sequence
  MKO10092737_B_Ifi202b
  gRNA
gccactgctgttgaagtatt

SEQ ID NO: 92738 - DNA, 20 bp, Artificial Sequence
  MKO10092738_B_Ifi202b
  gRNA
tccaaatacttcaacagcag

SEQ ID NO: 92739 - DNA, 20 bp, Artificial Sequence
  MKO10092739_B_Ifi203
  gRNA
tttgtctagtccagcatctt

SEQ ID NO: 92740 - DNA, 20 bp, Artificial Sequence
  MKO10092740_B_Ifi203
  gRNA
tggtgaccttcttctctaga

SEQ ID NO: 92741 - DNA, 20 bp, Artificial Sequence
  MKO10092741_B_Ifi203
  gRNA
ccctacagttcaaaagaaaa

SEQ ID NO: 92742 - DNA, 20 bp, Artificial Sequence
  MKO10092742_B_Ifi204
  gRNA
cagaatcagaacattcccag

SEQ ID NO: 92743 - DNA, 20 bp, Artificial Sequence
  MKO10092743_B_Ifi204
  gRNA
attatgagagaagaagagac

SEQ ID NO: 92744 - DNA, 20 bp, Artificial Sequence
  MKO10092744_B_Ifi204
  gRNA
agtaacaggagaaacatcac

SEQ ID NO: 92745 - DNA, 20 bp, Artificial Sequence
  MKO10092745_B_Ifi205
  gRNA
agtaacagaagaaacatcac

SEQ ID NO: 92746 - DNA, 20 bp, Artificial Sequence
  MKO10092746_B_Ifi205
  gRNA
cagaaccagaacattcccag

SEQ ID NO: 92747 - DNA, 20 bp, Artificial Sequence
  MKO10092747_B_Ifi205
  gRNA
ctcagagcccctgacagtga

SEQ ID NO: 92748 - DNA, 20 bp, Artificial Sequence
  MKO10092748_B_Ifi27l2a
  gRNA
cagagacaaacctcctccta

SEQ ID NO: 92749 - DNA, 20 bp, Artificial Sequence
  MKO10092749_B_Ifi27l2a
  gRNA
tggagttgcagcaggaagcc

SEQ ID NO: 92750 - DNA, 20 bp, Artificial Sequence
  MKO10092750_B_Ifi27l2a
  gRNA
ttgttgatgtggagagtcca

SEQ ID NO: 92751 - DNA, 20 bp, Artificial Sequence
  MKO10092751_B_Ifi27l2b
  gRNA
tttctccctaggaaaatttg

SEQ ID NO: 92752 - DNA, 20 bp, Artificial Sequence
  MKO10092752_B_Ifi27l2b
  gRNA
tctccctacagctctggctg

SEQ ID NO: 92753 - DNA, 20 bp, Artificial Sequence
  MKO10092753_B_Ifi27l2b
  gRNA
aacagccaccaggatgatgt

SEQ ID NO: 92754 - DNA, 20 bp, Artificial Sequence
  MKO10092754_B_Ifi27
  gRNA
acccttcgaaccagctagaa

SEQ ID NO: 92755 - DNA, 20 bp, Artificial Sequence
  MKO10092755_B_Ifi27
  gRNA
cctgttaacacagagtgccc

SEQ ID NO: 92756 - DNA, 20 bp, Artificial Sequence
  MKO10092756_B_Ifi27
  gRNA
gggccagttacctccaatgg

SEQ ID NO: 92757 - DNA, 20 bp, Artificial Sequence
  MKO10092757_B_Ifi30
  gRNA
tacactccagctccccgtgc

SEQ ID NO: 92758 - DNA, 20 bp, Artificial Sequence
  MKO10092758_B_Ifi30
  gRNA
catctcctccatacagacga

SEQ ID NO: 92759 - DNA, 20 bp, Artificial Sequence
  MKO10092759_B_Ifi30
  gRNA
gggagttccacgtgccagca

SEQ ID NO: 92760 - DNA, 20 bp, Artificial Sequence
  MKO10092760_B_Ifi35
  gRNA
aaccactaacgagcaccctg

SEQ ID NO: 92761 - DNA, 20 bp, Artificial Sequence
  MKO10092761_B_Ifi35
  gRNA
attccaaggccaaactaagc

SEQ ID NO: 92762 - DNA, 20 bp, Artificial Sequence
  MKO10092762_B_Ifi35
  gRNA
tggaataccagaggaacttc

SEQ ID NO: 92763 - DNA, 20 bp, Artificial Sequence
  MKO10092763_B_Ifi44l
  gRNA
gtagaccttgtgatgagctt

SEQ ID NO: 92764 - DNA, 20 bp, Artificial Sequence
  MKO10092764_B_Ifi44l
  gRNA
aactgtgacttctctaagcc

SEQ ID NO: 92765 - DNA, 20 bp, Artificial Sequence
  MKO10092765_B_Ifi44l
  gRNA
gagagagtttcacttgtctc

SEQ ID NO: 92766 - DNA, 20 bp, Artificial Sequence
  MKO10092766_B_Ifi44
  gRNA
gtacaggacatattccatca

SEQ ID NO: 92767 - DNA, 20 bp, Artificial Sequence
  MKO10092767_B_Ifi44
  gRNA
tacatcatctgtgtgcaagc

SEQ ID NO: 92768 - DNA, 20 bp, Artificial Sequence
  MKO10092768_B_Ifi44
  gRNA
cgaagagacttgataaaaca

SEQ ID NO: 92769 - DNA, 20 bp, Artificial Sequence
  MKO10092769_B_Ifi47
  gRNA
gcagatgaatccgctgatgt

SEQ ID NO: 92770 - DNA, 20 bp, Artificial Sequence
  MKO10092770_B_Ifi47
  gRNA
cttcgtggcccagccctcga

SEQ ID NO: 92771 - DNA, 20 bp, Artificial Sequence
  MKO10092771_B_Ifi47
  gRNA
gtgactaatctcatcaaaac

SEQ ID NO: 92772 - DNA, 20 bp, Artificial Sequence
  MKO10092772_B_Ifih1
  gRNA
acttctgattaacgatgtct

SEQ ID NO: 92773 - DNA, 20 bp, Artificial Sequence
  MKO10092773_B_Ifih1
  gRNA
ggcaccatgggaagtgattc

SEQ ID NO: 92774 - DNA, 20 bp, Artificial Sequence
  MKO10092774_B_Ifih1
  gRNA
agctgcttcgatgaaagtct

SEQ ID NO: 92775 - DNA, 20 bp, Artificial Sequence
  MKO10092775_B_Ifit1
  gRNA
atgcagccaaatatttccgt

SEQ ID NO: 92776 - DNA, 20 bp, Artificial Sequence
  MKO10092776_B_Ifit1
  gRNA
actgaacaacaagaccctcg

SEQ ID NO: 92777 - DNA, 20 bp, Artificial Sequence
  MKO10092777_B_Ifit1
  gRNA
aggaggttgtgcatccccaa

SEQ ID NO: 92778 - DNA, 20 bp, Artificial Sequence
  MKO10092778_B_Ifit2
  gRNA
actgaaagttgccataccga

SEQ ID NO: 92779 - DNA, 20 bp, Artificial Sequence
  MKO10092779_B_Ifit2
  gRNA
gtctcacagtacaacgagta

SEQ ID NO: 92780 - DNA, 20 bp, Artificial Sequence
  MKO10092780_B_Ifit2
  gRNA
ccccatatagtaatgcacat

SEQ ID NO: 92781 - DNA, 20 bp, Artificial Sequence
  MKO10092781_B_Ifit3
  gRNA
ccaggagaactttcaggtac

SEQ ID NO: 92782 - DNA, 20 bp, Artificial Sequence
  MKO10092782_B_Ifit3
  gRNA
tcacctggggaaactacgcc

SEQ ID NO: 92783 - DNA, 20 bp, Artificial Sequence
  MKO10092783_B_Ifit3
  gRNA
ggtcgaacatttaaactctg

SEQ ID NO: 92784 - DNA, 20 bp, Artificial Sequence
  MKO10092784_B_Ifitm10
  gRNA
gtgatctcttacatagcaga

SEQ ID NO: 92785 - DNA, 20 bp, Artificial Sequence
  MKO10092785_B_Ifitm10
  gRNA
actctgactaatacgaatag

SEQ ID NO: 92786 - DNA, 20 bp, Artificial Sequence
  MKO10092786_B_Ifitm10
  gRNA
gttgtctcgctgtgccatcc

SEQ ID NO: 92787 - DNA, 20 bp, Artificial Sequence
  MKO10092787_B_Ifitm1
  gRNA
acagacaacgatgacgacga

SEQ ID NO: 92788 - DNA, 20 bp, Artificial Sequence
  MKO10092788_B_Ifitm1
  gRNA
ccagaccacatggtcaggcg

SEQ ID NO: 92789 - DNA, 20 bp, Artificial Sequence
  MKO10092789_B_Ifitm1
  gRNA
ccgtgaggatggtgaagaac

SEQ ID NO: 92790 - DNA, 20 bp, Artificial Sequence
  MKO10092790_B_Ifitm2
  gRNA
aagatggtgggcgatgtggt

SEQ ID NO: 92791 - DNA, 20 bp, Artificial Sequence
  MKO10092791_B_Ifitm2
  gRNA
cacactcaccttcacagagt

SEQ ID NO: 92792 - DNA, 20 bp, Artificial Sequence
  MKO10092792_B_Ifitm2
  gRNA
cctcacaacagctgagttgc

SEQ ID NO: 92793 - DNA, 20 bp, Artificial Sequence
  MKO10092793_B_Ifitm3
  gRNA
ctgacagaagccgatccgtg

SEQ ID NO: 92794 - DNA, 20 bp, Artificial Sequence
  MKO10092794_B_Ifitm3
  gRNA
gggctgtcctccactggcag

SEQ ID NO: 92795 - DNA, 20 bp, Artificial Sequence
  MKO10092795_B_Ifitm3
  gRNA
aatgatgatgacactaacaa

SEQ ID NO: 92796 - DNA, 20 bp, Artificial Sequence
  MKO10092796_B_Ifitm5
  gRNA
atagtcctcctcatcaaact

SEQ ID NO: 92797 - DNA, 20 bp, Artificial Sequence
  MKO10092797_B_Ifitm5
  gRNA
gaccagagcatgtgatctcg

SEQ ID NO: 92798 - DNA, 20 bp, Artificial Sequence
  MKO10092798_B_Ifitm5
  gRNA
ccgggctccatcatcccgca

SEQ ID NO: 92799 - DNA, 20 bp, Artificial Sequence
  MKO10092799_B_Ifitm6
  gRNA
aagatggtgggcgacatgac

SEQ ID NO: 92800 - DNA, 20 bp, Artificial Sequence
  MKO10092800_B_Ifitm6
  gRNA
ttatacagctttaacttact

SEQ ID NO: 92801 - DNA, 20 bp, Artificial Sequence
  MKO10092801_B_Ifitm6
  gRNA
tttcattgcctacatctact

SEQ ID NO: 92802 - DNA, 20 bp, Artificial Sequence
  MKO10092802_B_Ifitm7
  gRNA
ttgtcgaagaagttgaggtg

SEQ ID NO: 92803 - DNA, 20 bp, Artificial Sequence
  MKO10092803_B_Ifitm7
  gRNA
tcatatgtagcttctacccc

SEQ ID NO: 92804 - DNA, 20 bp, Artificial Sequence
  MKO10092804_B_Ifitm7
  gRNA
ctaagagtctgtgcttataa

SEQ ID NO: 92805 - DNA, 20 bp, Artificial Sequence
  MKO10092805_B_Ifltd1
  gRNA
gttcgctcacgttctcggct

SEQ ID NO: 92806 - DNA, 20 bp, Artificial Sequence
  MKO10092806_B_Ifltd1
  gRNA
cacaagatggtcgtgcagtc

SEQ ID NO: 92807 - DNA, 20 bp, Artificial Sequence
  MKO10092807_B_Ifltd1
  gRNA
agctccaccttatcgtccag

SEQ ID NO: 92808 - DNA, 20 bp, Artificial Sequence
  MKO10092808_B_Ifna11
  gRNA
tgggtaagatctcgcagcac

SEQ ID NO: 92809 - DNA, 20 bp, Artificial Sequence
  MKO10092809_B_Ifna11
  gRNA
gctgcatcagacaaccttgc

SEQ ID NO: 92810 - DNA, 20 bp, Artificial Sequence
  MKO10092810_B_Ifna11
  gRNA
tgagcctcctcatttgtgcc

SEQ ID NO: 92811 - DNA, 20 bp, Artificial Sequence
  MKO10092811_B_Ifna12
  gRNA
gcaggagcctcccctgaccc

SEQ ID NO: 92812 - DNA, 20 bp, Artificial Sequence
  MKO10092812_B_Ifna12
  gRNA
ccctgctagtgatgagctac

SEQ ID NO: 92813 - DNA, 20 bp, Artificial Sequence
  MKO10092813_B_Ifna12
  gRNA
cttgagccttcttgatctgc

SEQ ID NO: 92814 - DNA, 20 bp, Artificial Sequence
  MKO10092814_B_Ifna13
  gRNA
gtcttcctcagccaacttgc

SEQ ID NO: 92815 - DNA, 20 bp, Artificial Sequence
  MKO10092815_B_Ifna13
  gRNA
taggccttgtgctttcctga

SEQ ID NO: 92816 - DNA, 20 bp, Artificial Sequence
  MKO10092816_B_Ifna13
  gRNA
agagtctcctcatttgttcc

SEQ ID NO: 92817 - DNA, 20 bp, Artificial Sequence
  MKO10092817_B_Ifna14
  gRNA
accagtagctcatcaccagc

SEQ ID NO: 92818 - DNA, 20 bp, Artificial Sequence
  MKO10092818_B_Ifna14
  gRNA
agtgttgaggtcattgcaga

SEQ ID NO: 92819 - DNA, 20 bp, Artificial Sequence
  MKO10092819_B_Ifna14
  gRNA
ggactcacttctcttctttc

SEQ ID NO: 92820 - DNA, 20 bp, Artificial Sequence
  MKO10092820_B_Ifna1
  gRNA
ctgtctgatgcagcaggtgg

SEQ ID NO: 92821 - DNA, 20 bp, Artificial Sequence
  MKO10092821_B_Ifna1
  gRNA
agagtctcctcatttgtacc

SEQ ID NO: 92822 - DNA, 20 bp, Artificial Sequence
  MKO10092822_B_Ifna1
  gRNA
gcaggaatttcccctgaccc

SEQ ID NO: 92823 - DNA, 20 bp, Artificial Sequence
  MKO10092823_B_Ifna2
  gRNA
ggagcctcctcatctgtgcc

SEQ ID NO: 92824 - DNA, 20 bp, Artificial Sequence
  MKO10092824_B_Ifna2
  gRNA
gcaaacctgtctgatgcagc

SEQ ID NO: 92825 - DNA, 20 bp, Artificial Sequence
  MKO10092825_B_Ifna2
  gRNA
ggataaccagcagatccaga

SEQ ID NO: 92826 - DNA, 20 bp, Artificial Sequence
  MKO10092826_B_Ifna4
  gRNA
ctcttcctcaaccaacttgc

SEQ ID NO: 92827 - DNA, 20 bp, Artificial Sequence
  MKO10092827_B_Ifna4
  gRNA
caagagggccttgacagtcc

SEQ ID NO: 92828 - DNA, 20 bp, Artificial Sequence
  MKO10092828_B_Ifna4
  gRNA
ctgtgctttcctcatgatcc

SEQ ID NO: 92829 - DNA, 20 bp, Artificial Sequence
  MKO10092829_B_Ifna5
  gRNA
cttcattgcagaatgagtct

SEQ ID NO: 92830 - DNA, 20 bp, Artificial Sequence
  MKO10092830_B_Ifna5
  gRNA
ggtgggtgcccagcagatcc

SEQ ID NO: 92831 - DNA, 20 bp, Artificial Sequence
  MKO10092831_B_Ifna5
  gRNA
cctgctgggtcagctcactc

SEQ ID NO: 92832 - DNA, 20 bp, Artificial Sequence
  MKO10092832_B_Ifna6
  gRNA
cagggatggcttgagcctcc

SEQ ID NO: 92833 - DNA, 20 bp, Artificial Sequence
  MKO10092833_B_Ifna6
  gRNA
gcaggaatctcccctgaccc

SEQ ID NO: 92834 - DNA, 20 bp, Artificial Sequence
  MKO10092834_B_Ifna6
  gRNA
ctgggcatccaccttctcca

SEQ ID NO: 92835 - DNA, 20 bp, Artificial Sequence
  MKO10092835_B_Ifna7
  gRNA
gcatcttcctgggtcagagg

SEQ ID NO: 92836 - DNA, 20 bp, Artificial Sequence
  MKO10092836_B_Ifna7
  gRNA
actcaatcttgccagcaact

SEQ ID NO: 92837 - DNA, 20 bp, Artificial Sequence
  MKO10092837_B_Ifna7
  gRNA
aaggtcatatcctagagagc

SEQ ID NO: 92838 - DNA, 20 bp, Artificial Sequence
  MKO10092838_B_Ifna9
  gRNA
caagaaaatcttgacactcc

SEQ ID NO: 92839 - DNA, 20 bp, Artificial Sequence
  MKO10092839_B_Ifna9
  gRNA
aatatttcttcatagccagc

SEQ ID NO: 92840 - DNA, 20 bp, Artificial Sequence
  MKO10092840_B_Ifna9
  gRNA
ttatcaccaccaagaccatc

SEQ ID NO: 92841 - DNA, 20 bp, Artificial Sequence
  MKO10092841_B_Ifnab
  gRNA
accagtagctcatcactgcc

SEQ ID NO: 92842 - DNA, 20 bp, Artificial Sequence
  MKO10092842_B_Ifnab
  gRNA
gaaagtgctgagcctagcca

SEQ ID NO: 92843 - DNA, 20 bp, Artificial Sequence
  MKO10092843_B_Ifnab
  gRNA
tcctggcagtgatgagctac

SEQ ID NO: 92844 - DNA, 20 bp, Artificial Sequence
  MKO10092844_B_Ifnar1
  gRNA
atgtagacgtctatattctc

SEQ ID NO: 92845 - DNA, 20 bp, Artificial Sequence
  MKO10092845_B_Ifnar1
  gRNA
aagggaacagcacatcttcg

SEQ ID NO: 92846 - DNA, 20 bp, Artificial Sequence
  MKO10092846_B_Ifnar1
  gRNA
ccgtttattccattctacac

SEQ ID NO: 92847 - DNA, 20 bp, Artificial Sequence
  MKO10092847_B_Ifnar2
  gRNA
agacttgttctctaattccc

SEQ ID NO: 92848 - DNA, 20 bp, Artificial Sequence
  MKO10092848_B_Ifnar2
  gRNA
agctgagcaggatgcgttca

SEQ ID NO: 92849 - DNA, 20 bp, Artificial Sequence
  MKO10092849_B_Ifnar2
  gRNA
tctcctcagcttgtgtcttg

SEQ ID NO: 92850 - DNA, 20 bp, Artificial Sequence
  MKO10092850_B_Ifnb1
  gRNA
gatcttgaagtccgccctgt

SEQ ID NO: 92851 - DNA, 20 bp, Artificial Sequence
  MKO10092851_B_Ifnb1
  gRNA
gaaagatcaacctcacctac

SEQ ID NO: 92852 - DNA, 20 bp, Artificial Sequence
  MKO10092852_B_Ifnb1
  gRNA
tccacttgaagagctattac

SEQ ID NO: 92853 - DNA, 20 bp, Artificial Sequence
  MKO10092853_B_Ifne
  gRNA
ggagcgtgaagatctgctga

SEQ ID NO: 92854 - DNA, 20 bp, Artificial Sequence
  MKO10092854_B_Ifne
  gRNA
agggaatccgtttcggttct

SEQ ID NO: 92855 - DNA, 20 bp, Artificial Sequence
  MKO10092855_B_Ifne
  gRNA
gagtcctcaccagtaccaag

SEQ ID NO: 92856 - DNA, 20 bp, Artificial Sequence
  MKO10092856_B_Ifngr1
  gRNA
ccaggaaaggtcgggccccc

SEQ ID NO: 92857 - DNA, 20 bp, Artificial Sequence
  MKO10092857_B_Ifngr1
  gRNA
tggtattcccagcatacgac

SEQ ID NO: 92858 - DNA, 20 bp, Artificial Sequence
  MKO10092858_B_Ifngr1
  gRNA
gatcctacatacgaaacata

SEQ ID NO: 92859 - DNA, 20 bp, Artificial Sequence
  MKO10092859_B_Ifngr2
  gRNA
tctgtgatgtccgtacagtt

SEQ ID NO: 92860 - DNA, 20 bp, Artificial Sequence
  MKO10092860_B_Ifngr2
  gRNA
ttcagtatcttgtccactac

SEQ ID NO: 92861 - DNA, 20 bp, Artificial Sequence
  MKO10092861_B_Ifngr2
  gRNA
cactggtcttgggtcattgc

SEQ ID NO: 92862 - DNA, 20 bp, Artificial Sequence
  MKO10092862_B_Ifng
  gRNA
gaacgctacacactgcatct

SEQ ID NO: 92863 - DNA, 20 bp, Artificial Sequence
  MKO10092863_B_Ifng
  gRNA
agagtctcttcttggatatc

SEQ ID NO: 92864 - DNA, 20 bp, Artificial Sequence
  MKO10092864_B_Ifng
  gRNA
aagagataatctggctctgc

SEQ ID NO: 92865 - DNA, 20 bp, Artificial Sequence
  MKO10092865_B_Ifnk
  gRNA
cagggaacatcctcactccg

SEQ ID NO: 92866 - DNA, 20 bp, Artificial Sequence
  MKO10092866_B_Ifnk
  gRNA
ctaactatcttcaatcttaa

SEQ ID NO: 92867 - DNA, 20 bp, Artificial Sequence
  MKO10092867_B_Ifnk
  gRNA
acactgggaacgtatcagat

SEQ ID NO: 92868 - DNA, 20 bp, Artificial Sequence
  MKO10092868_B_Ifnl2
  gRNA
gcagttcccacctcttcccc

SEQ ID NO: 92869 - DNA, 20 bp, Artificial Sequence
  MKO10092869_B_Ifnl2
  gRNA
cgagccgccgcctctcccgc

SEQ ID NO: 92870 - DNA, 20 bp, Artificial Sequence
  MKO10092870_B_Ifnl2
  gRNA
cggggacctgggctctgctg

SEQ ID NO: 92871 - DNA, 20 bp, Artificial Sequence
  MKO10092871_B_Ifnl3
  gRNA
gcagttcccacctcatctcc

SEQ ID NO: 92872 - DNA, 20 bp, Artificial Sequence
  MKO10092872_B_Ifnl3
  gRNA
cgagtcgccgcctctcccgc

SEQ ID NO: 92873 - DNA, 20 bp, Artificial Sequence
  MKO10092873_B_Ifnl3
  gRNA
cgggggcttgggctctgctg

SEQ ID NO: 92874 - DNA, 20 bp, Artificial Sequence
  MKO10092874_B_Ifnlr1
  gRNA
cctatttcgtgacctaccaa

SEQ ID NO: 92875 - DNA, 20 bp, Artificial Sequence
  MKO10092875_B_Ifnlr1
  gRNA
taccgtcaaaaaggtattcc

SEQ ID NO: 92876 - DNA, 20 bp, Artificial Sequence
  MKO10092876_B_Ifnlr1
  gRNA
cgaccagtggagcattgtgc

SEQ ID NO: 92877 - DNA, 20 bp, Artificial Sequence
  MKO10092877_B_Ifnz
  gRNA
atgcctttgccttcagatag

SEQ ID NO: 92878 - DNA, 20 bp, Artificial Sequence
  MKO10092878_B_Ifnz
  gRNA
gggcctcttctcgcagacag

SEQ ID NO: 92879 - DNA, 20 bp, Artificial Sequence
  MKO10092879_B_Ifnz
  gRNA
gctgcctgtgcatctattcc

SEQ ID NO: 92880 - DNA, 20 bp, Artificial Sequence
  MKO10092880_B_Ifrd1
  gRNA
caatagtgcgaagacaagac

SEQ ID NO: 92881 - DNA, 20 bp, Artificial Sequence
  MKO10092881_B_Ifrd1
  gRNA
ttgacctaacccttgataag

SEQ ID NO: 92882 - DNA, 20 bp, Artificial Sequence
  MKO10092882_B_Ifrd1
  gRNA
agacttagagtacaagttga

SEQ ID NO: 92883 - DNA, 20 bp, Artificial Sequence
  MKO10092883_B_Ifrd2
  gRNA
gtacagcaagccccactgcc

SEQ ID NO: 92884 - DNA, 20 bp, Artificial Sequence
  MKO10092884_B_Ifrd2
  gRNA
cctggcctcccgcctacttc

SEQ ID NO: 92885 - DNA, 20 bp, Artificial Sequence
  MKO10092885_B_Ifrd2
  gRNA
agaggtacctcttgtcagtc

SEQ ID NO: 92886 - DNA, 20 bp, Artificial Sequence
  MKO10092886_B_Ift122
  gRNA
ctgacaagagcatcattatc

SEQ ID NO: 92887 - DNA, 20 bp, Artificial Sequence
  MKO10092887_B_Ift122
  gRNA
caaagacaccgtgtactgtg

SEQ ID NO: 92888 - DNA, 20 bp, Artificial Sequence
  MKO10092888_B_Ift122
  gRNA
tttgtctctccacgtcaaca

SEQ ID NO: 92889 - DNA, 20 bp, Artificial Sequence
  MKO10092889_B_Ift140
  gRNA
cctcttgagaccccgtcttc

SEQ ID NO: 92890 - DNA, 20 bp, Artificial Sequence
  MKO10092890_B_Ift140
  gRNA
atggcaatgtcagtcgtatg

SEQ ID NO: 92891 - DNA, 20 bp, Artificial Sequence
  MKO10092891_B_Ift140
  gRNA
acaaggcttatcctggctat

SEQ ID NO: 92892 - DNA, 20 bp, Artificial Sequence
  MKO10092892_B_Ift172
  gRNA
tccgcaggatggagctgcga

SEQ ID NO: 92893 - DNA, 20 bp, Artificial Sequence
  MKO10092893_B_Ift172
  gRNA
catcatacagaagtaccact

SEQ ID NO: 92894 - DNA, 20 bp, Artificial Sequence
  MKO10092894_B_Ift172
  gRNA
atcatctatgtctacaagat

SEQ ID NO: 92895 - DNA, 20 bp, Artificial Sequence
  MKO10092895_B_Ift20
  gRNA
ggccagtttcagaaaattgt

SEQ ID NO: 92896 - DNA, 20 bp, Artificial Sequence
  MKO10092896_B_Ift20
  gRNA
cagcaagttccgagcaccaa

SEQ ID NO: 92897 - DNA, 20 bp, Artificial Sequence
  MKO10092897_B_Ift20
  gRNA
cttctcgttctctgcttctt

SEQ ID NO: 92898 - DNA, 20 bp, Artificial Sequence
  MKO10092898_B_Ift27
  gRNA
tcccctgcagacaactggag

SEQ ID NO: 92899 - DNA, 20 bp, Artificial Sequence
  MKO10092899_B_Ift27
  gRNA
cattggtcacatcatagaca

SEQ ID NO: 92900 - DNA, 20 bp, Artificial Sequence
  MKO10092900_B_Ift27
  gRNA
ggagctgttctctgaaatgc

SEQ ID NO: 92901 - DNA, 20 bp, Artificial Sequence
  MKO10092901_B_Ift43
  gRNA
cgtcgtcgtctgaccccatc

SEQ ID NO: 92902 - DNA, 20 bp, Artificial Sequence
  MKO10092902_B_Ift43
  gRNA
cctccgacagcagaacctga

SEQ ID NO: 92903 - DNA, 20 bp, Artificial Sequence
  MKO10092903_B_Ift43
  gRNA
gcccagcctccctgccttcg

SEQ ID NO: 92904 - DNA, 20 bp, Artificial Sequence
  MKO10092904_B_Ift46
  gRNA
gactggcagatgctcgtagt

SEQ ID NO: 92905 - DNA, 20 bp, Artificial Sequence
  MKO10092905_B_Ift46
  gRNA
ctcccagctgacaccgcagc

SEQ ID NO: 92906 - DNA, 20 bp, Artificial Sequence
  MKO10092906_B_Ift46
  gRNA
cgacgatgactcctctgaga

SEQ ID NO: 92907 - DNA, 20 bp, Artificial Sequence
  MKO10092907_B_Ift52
  gRNA
gtgaaactatggatcacagc

SEQ ID NO: 92908 - DNA, 20 bp, Artificial Sequence
  MKO10092908_B_Ift52
  gRNA
ctgaagaagtatcttgacag

SEQ ID NO: 92909 - DNA, 20 bp, Artificial Sequence
  MKO10092909_B_Ift52
  gRNA
tggggatatccttgtgatgc

SEQ ID NO: 92910 - DNA, 20 bp, Artificial Sequence
  MKO10092910_B_Ift57
  gRNA
tttgctctgcctaccaaccc

SEQ ID NO: 92911 - DNA, 20 bp, Artificial Sequence
  MKO10092911_B_Ift57
  gRNA
cgagttaacattaagtaaag

SEQ ID NO: 92912 - DNA, 20 bp, Artificial Sequence
  MKO10092912_B_Ift57
  gRNA
cctccttcaaaattaaagtc

SEQ ID NO: 92913 - DNA, 20 bp, Artificial Sequence
  MKO10092913_B_Ift74
  gRNA
ttagacaaatcttactatct

SEQ ID NO: 92914 - DNA, 20 bp, Artificial Sequence
  MKO10092914_B_Ift74
  gRNA
tgtatttgtcatatgaaaag

SEQ ID NO: 92915 - DNA, 20 bp, Artificial Sequence
  MKO10092915_B_Ift74
  gRNA
gttgaaattaaagactttca

SEQ ID NO: 92916 - DNA, 20 bp, Artificial Sequence
  MKO10092916_B_Ift80
  gRNA
caccagtgtactcagtagcc

SEQ ID NO: 92917 - DNA, 20 bp, Artificial Sequence
  MKO10092917_B_Ift80
  gRNA
agatcaactttagcccagca

SEQ ID NO: 92918 - DNA, 20 bp, Artificial Sequence
  MKO10092918_B_Ift80
  gRNA
gaaaaggttctttatacagc

SEQ ID NO: 92919 - DNA, 20 bp, Artificial Sequence
  MKO10092919_B_Ift81
  gRNA
gtttcttcaagatgagaccg

SEQ ID NO: 92920 - DNA, 20 bp, Artificial Sequence
  MKO10092920_B_Ift81
  gRNA
tatccttaagtacaaacctc

SEQ ID NO: 92921 - DNA, 20 bp, Artificial Sequence
  MKO10092921_B_Ift81
  gRNA
tgtgagcagctcaaaacatc

SEQ ID NO: 92922 - DNA, 20 bp, Artificial Sequence
  MKO10092922_B_Ift88
  gRNA
accgatgacagggacaattc

SEQ ID NO: 92923 - DNA, 20 bp, Artificial Sequence
  MKO10092923_B_Ift88
  gRNA
ccaacctcgcaaagctgcct

SEQ ID NO: 92924 - DNA, 20 bp, Artificial Sequence
  MKO10092924_B_Ift88
  gRNA
tcttcccattgatgatgtca

SEQ ID NO: 92925 - DNA, 20 bp, Artificial Sequence
  MKO10092925_B_Igbp1b
  gRNA
aacacttcgagtgaggacga

SEQ ID NO: 92926 - DNA, 20 bp, Artificial Sequence
  MKO10092926_B_Igbp1b
  gRNA
aggctgacgatgagcgtgtc

SEQ ID NO: 92927 - DNA, 20 bp, Artificial Sequence
  MKO10092927_B_Igbp1b
  gRNA
gggcgcgctgacgctgaagc

SEQ ID NO: 92928 - DNA, 20 bp, Artificial Sequence
  MKO10092928_B_Igbp1
  gRNA
tgacagcaatccacctccga

SEQ ID NO: 92929 - DNA, 20 bp, Artificial Sequence
  MKO10092929_B_Igbp1
  gRNA
caaatgatctagacgcttgc

SEQ ID NO: 92930 - DNA, 20 bp, Artificial Sequence
  MKO10092930_B_Igbp1
  gRNA
cactcaccgtcatagttgcc

SEQ ID NO: 92931 - DNA, 20 bp, Artificial Sequence
  MKO10092931_B_Igdcc3
  gRNA
cagtcggaaggctcgtctcc

SEQ ID NO: 92932 - DNA, 20 bp, Artificial Sequence
  MKO10092932_B_Igdcc3
  gRNA
accaccctcctcacccgtga

SEQ ID NO: 92933 - DNA, 20 bp, Artificial Sequence
  MKO10092933_B_Igdcc3
  gRNA
cacactccagcaccgcagtc

SEQ ID NO: 92934 - DNA, 20 bp, Artificial Sequence
  MKO10092934_B_Igdcc4
  gRNA
gcaccccgagtcccagattg

SEQ ID NO: 92935 - DNA, 20 bp, Artificial Sequence
  MKO10092935_B_Igdcc4
  gRNA
gagtgtagtgatggagtgcg

SEQ ID NO: 92936 - DNA, 20 bp, Artificial Sequence
  MKO10092936_B_Igdcc4
  gRNA
cagctgctgggcctccgacc

SEQ ID NO: 92937 - DNA, 20 bp, Artificial Sequence
  MKO10092937_B_Igf1r
  gRNA
actcttctacaactacgcac

SEQ ID NO: 92938 - DNA, 20 bp, Artificial Sequence
  MKO10092938_B_Igf1r
  gRNA
catgaagttctccaactccg

SEQ ID NO: 92939 - DNA, 20 bp, Artificial Sequence
  MKO10092939_B_Igf1r
  gRNA
ccacgacgatgagtgcatgc

SEQ ID NO: 92940 - DNA, 20 bp, Artificial Sequence
  MKO10092940_B_Igf1
  gRNA
ttgtggatgagtgttgcttc

SEQ ID NO: 92941 - DNA, 20 bp, Artificial Sequence
  MKO10092941_B_Igf1
  gRNA
acaagaaaacgaagctgcaa

SEQ ID NO: 92942 - DNA, 20 bp, Artificial Sequence
  MKO10092942_B_Igf1
  gRNA
gaccctttgcggggctgagc

SEQ ID NO: 92943 - DNA, 20 bp, Artificial Sequence
  MKO10092943_B_Igf2bp1
  gRNA
cttacttcccatcggagctg

SEQ ID NO: 92944 - DNA, 20 bp, Artificial Sequence
  MKO10092944_B_Igf2bp1
  gRNA
ctgtaccgtactgagccagc

SEQ ID NO: 92945 - DNA, 20 bp, Artificial Sequence
  MKO10092945_B_Igf2bp1
  gRNA
cactgaaagtgagacagctg

SEQ ID NO: 92946 - DNA, 20 bp, Artificial Sequence
  MKO10092946_B_Igf2bp2
  gRNA
cacctatatgacaagagaag

SEQ ID NO: 92947 - DNA, 20 bp, Artificial Sequence
  MKO10092947_B_Igf2bp2
  gRNA
tgcctcttctcttgtcatat

SEQ ID NO: 92948 - DNA, 20 bp, Artificial Sequence
  MKO10092948_B_Igf2bp2
  gRNA
gttggctgaatatgggacag

SEQ ID NO: 92949 - DNA, 20 bp, Artificial Sequence
  MKO10092949_B_Igf2bp3
  gRNA
ctccccagtgaacacggatt

SEQ ID NO: 92950 - DNA, 20 bp, Artificial Sequence
  MKO10092950_B_Igf2bp3
  gRNA
ctcttacctcccattgtaag

SEQ ID NO: 92951 - DNA, 20 bp, Artificial Sequence
  MKO10092951_B_Igf2bp3
  gRNA
tccgctcacctctgccgttt

SEQ ID NO: 92952 - DNA, 20 bp, Artificial Sequence
  MKO10092952_B_Igf2r
  gRNA
ccaccatttagcttgatcag

SEQ ID NO: 92953 - DNA, 20 bp, Artificial Sequence
  MKO10092953_B_Igf2r
  gRNA
gacagagaactgccgctcag

SEQ ID NO: 92954 - DNA, 20 bp, Artificial Sequence
  MKO10092954_B_Igf2r
  gRNA
ccatagtggtgttgaattcc

SEQ ID NO: 92955 - DNA, 20 bp, Artificial Sequence
  MKO10092955_B_Igf2
  gRNA
tgcgaccccggcgggcacgc

SEQ ID NO: 92956 - DNA, 20 bp, Artificial Sequence
  MKO10092956_B_Igf2
  gRNA
ttgtgctgcatcgctgctta

SEQ ID NO: 92957 - DNA, 20 bp, Artificial Sequence
  MKO10092957_B_Igf2
  gRNA
gagatgggcggcagcgtcgc

SEQ ID NO: 92958 - DNA, 20 bp, Artificial Sequence
  MKO10092958_B_Igfals
  gRNA
ctaactgcctgatacgattg

SEQ ID NO: 92959 - DNA, 20 bp, Artificial Sequence
  MKO10092959_B_Igfals
  gRNA
agctcggccacaatcgtatc

SEQ ID NO: 92960 - DNA, 20 bp, Artificial Sequence
  MKO10092960_B_Igfals
  gRNA
atccgcctgcacactttcgc

SEQ ID NO: 92961 - DNA, 20 bp, Artificial Sequence
  MKO10092961_B_Igfbp1
  gRNA
cctcgcgggatggggccatc

SEQ ID NO: 92962 - DNA, 20 bp, Artificial Sequence
  MKO10092962_B_Igfbp1
  gRNA
ccgggcccgcatgctgctat

SEQ ID NO: 92963 - DNA, 20 bp, Artificial Sequence
  MKO10092963_B_Igfbp1
  gRNA
aatccattcttgttgcagtt

SEQ ID NO: 92964 - DNA, 20 bp, Artificial Sequence
  MKO10092964_B_Igfbp2
  gRNA
ccatgcgccttccggatgat

SEQ ID NO: 92965 - DNA, 20 bp, Artificial Sequence
  MKO10092965_B_Igfbp2
  gRNA
ctcggggtctccccggatgg

SEQ ID NO: 92966 - DNA, 20 bp, Artificial Sequence
  MKO10092966_B_Igfbp2
  gRNA
ggccggaagcccctcaagtc

SEQ ID NO: 92967 - DNA, 20 bp, Artificial Sequence
  MKO10092967_B_Igfbp3
  gRNA
ttctgtctcccgcttagact

SEQ ID NO: 92968 - DNA, 20 bp, Artificial Sequence
  MKO10092968_B_Igfbp3
  gRNA
atgtacgtcgtctttcccct

SEQ ID NO: 92969 - DNA, 20 bp, Artificial Sequence
  MKO10092969_B_Igfbp3
  gRNA
tctactggctctgcacgctg

SEQ ID NO: 92970 - DNA, 20 bp, Artificial Sequence
  MKO10092970_B_Igfbp4
  gRNA
acggacagcgtggcaagtgc

SEQ ID NO: 92971 - DNA, 20 bp, Artificial Sequence
  MKO10092971_B_Igfbp4
  gRNA
acttgccacgctgtccgtcc

SEQ ID NO: 92972 - DNA, 20 bp, Artificial Sequence
  MKO10092972_B_Igfbp4
  gRNA
cttgctccgatctctaattt

SEQ ID NO: 92973 - DNA, 20 bp, Artificial Sequence
  MKO10092973_B_Igfbp5
  gRNA
caagtacggaatgaagctgc

SEQ ID NO: 92974 - DNA, 20 bp, Artificial Sequence
  MKO10092974_B_Igfbp5
  gRNA
ctgcccaactgtgaccgcaa

SEQ ID NO: 92975 - DNA, 20 bp, Artificial Sequence
  MKO10092975_B_Igfbp5
  gRNA
cactcgcatttccgagctga

SEQ ID NO: 92976 - DNA, 20 bp, Artificial Sequence
  MKO10092976_B_Igfbp6
  gRNA
tcttccgaggcggagcacgt

SEQ ID NO: 92977 - DNA, 20 bp, Artificial Sequence
  MKO10092977_B_Igfbp6
  gRNA
ggaatcgccgtggcccctgc

SEQ ID NO: 92978 - DNA, 20 bp, Artificial Sequence
  MKO10092978_B_Igfbp6
  gRNA
accatctcactatcttgaac

SEQ ID NO: 92979 - DNA, 20 bp, Artificial Sequence
  MKO10092979_B_Igfbp7
  gRNA
cgcggcagccaaaattacag

SEQ ID NO: 92980 - DNA, 20 bp, Artificial Sequence
  MKO10092980_B_Igfbp7
  gRNA
gcaggtatctcctctaagta

SEQ ID NO: 92981 - DNA, 20 bp, Artificial Sequence
  MKO10092981_B_Igfbp7
  gRNA
tactgaccttgttccagatg

SEQ ID NO: 92982 - DNA, 20 bp, Artificial Sequence
  MKO10092982_B_Igfbpl1
  gRNA
gtgacattgtgaatatctcg

SEQ ID NO: 92983 - DNA, 20 bp, Artificial Sequence
  MKO10092983_B_Igfbpl1
  gRNA
cagaagggccccctcgcacc

SEQ ID NO: 92984 - DNA, 20 bp, Artificial Sequence
  MKO10092984_B_Igfbpl1
  gRNA
tccaacccctcggtgccctc

SEQ ID NO: 92985 - DNA, 20 bp, Artificial Sequence
  MKO10092985_B_Igfl3
  gRNA
taactccttcaagtataaac

SEQ ID NO: 92986 - DNA, 20 bp, Artificial Sequence
  MKO10092986_B_Igfl3
  gRNA
gtactcctgtttatacttga

SEQ ID NO: 92987 - DNA, 20 bp, Artificial Sequence
  MKO10092987_B_Igfl3
  gRNA
ccgtgcaatcccaagtgtga

SEQ ID NO: 92988 - DNA, 20 bp, Artificial Sequence
  MKO10092988_B_Igflr1
  gRNA
aggcttccattgacgcagcc

SEQ ID NO: 92989 - DNA, 20 bp, Artificial Sequence
  MKO10092989_B_Igflr1
  gRNA
agaaaagtccgttcccgtcc

SEQ ID NO: 92990 - DNA, 20 bp, Artificial Sequence
  MKO10092990_B_Igflr1
  gRNA
tgagacaaaacctggtcggc

SEQ ID NO: 92991 - DNA, 20 bp, Artificial Sequence
  MKO10092991_B_Igfn1
  gRNA
atgaattgtttacgatagcc

SEQ ID NO: 92992 - DNA, 20 bp, Artificial Sequence
  MKO10092992_B_Igfn1
  gRNA
gactcagagccggagccgtc

SEQ ID NO: 92993 - DNA, 20 bp, Artificial Sequence
  MKO10092993_B_Igfn1
  gRNA
gagcttctagagtacaacct

SEQ ID NO: 92994 - DNA, 20 bp, Artificial Sequence
  MKO10092994_B_Ighmbp2
  gRNA
cactgcaggtccaaacttcc

SEQ ID NO: 92995 - DNA, 20 bp, Artificial Sequence
  MKO10092995_B_Ighmbp2
  gRNA
aaaatcctcacgtatttcca

SEQ ID NO: 92996 - DNA, 20 bp, Artificial Sequence
  MKO10092996_B_Ighmbp2
  gRNA
ggatgatggcaagttctttc

SEQ ID NO: 92997 - DNA, 20 bp, Artificial Sequence
  MKO10092997_B_Igip
  gRNA
caagactttggtaaattaac

SEQ ID NO: 92998 - DNA, 20 bp, Artificial Sequence
  MKO10092998_B_Igip
  gRNA
cagtggactaagtttataag

SEQ ID NO: 92999 - DNA, 20 bp, Artificial Sequence
  MKO10092999_B_Igip
  gRNA
agctttaatctgggtaacta

SEQ ID NO: 93000 - DNA, 20 bp, Artificial Sequence
  MKO10093000_B_Igj
  gRNA
tgtgtacccgagttacctct

SEQ ID NO: 93001 - DNA, 20 bp, Artificial Sequence
  MKO10093001_B_Igj
  gRNA
aatcttacacgtctgacaaa

SEQ ID NO: 93002 - DNA, 20 bp, Artificial Sequence
  MKO10093002_B_Igj
  gRNA
caaggctgcttgcaccattt

SEQ ID NO: 93003 - DNA, 20 bp, Artificial Sequence
  MKO10093003_B_Igll1
  gRNA
atctactgtgaggcatccac

SEQ ID NO: 93004 - DNA, 20 bp, Artificial Sequence
  MKO10093004_B_Igll1
  gRNA
acttacctaggattgtgagc

SEQ ID NO: 93005 - DNA, 20 bp, Artificial Sequence
  MKO10093005_B_Igll1
  gRNA
aggagaacttcacactgcct

SEQ ID NO: 93006 - DNA, 20 bp, Artificial Sequence
  MKO10093006_B_Iglon5
  gRNA
gcccgacagccgccgtgtgc

SEQ ID NO: 93007 - DNA, 20 bp, Artificial Sequence
  MKO10093007_B_Iglon5
  gRNA
accgttggaccagtgatccc

SEQ ID NO: 93008 - DNA, 20 bp, Artificial Sequence
  MKO10093008_B_Iglon5
  gRNA
tgtgaacatctcctcacccg

SEQ ID NO: 93009 - DNA, 20 bp, Artificial Sequence
  MKO10093009_B_Igsf10
  gRNA
caaagtgcacaccccgcaac

SEQ ID NO: 93010 - DNA, 20 bp, Artificial Sequence
  MKO10093010_B_Igsf10
  gRNA
ttcacctaaaacgccaacga

SEQ ID NO: 93011 - DNA, 20 bp, Artificial Sequence
  MKO10093011_B_Igsf10
  gRNA
gtctacacctagtggattag

SEQ ID NO: 93012 - DNA, 20 bp, Artificial Sequence
  MKO10093012_B_Igsf11
  gRNA
caatgcaaaccagcccgaac

SEQ ID NO: 93013 - DNA, 20 bp, Artificial Sequence
  MKO10093013_B_Igsf11
  gRNA
cggtaaatcctaccctcccg

SEQ ID NO: 93014 - DNA, 20 bp, Artificial Sequence
  MKO10093014_B_Igsf11
  gRNA
tgacgtcactgccgaggtcc

SEQ ID NO: 93015 - DNA, 20 bp, Artificial Sequence
  MKO10093015_B_Igsf1
  gRNA
tctcttctcagggctcaatc

SEQ ID NO: 93016 - DNA, 20 bp, Artificial Sequence
  MKO10093016_B_Igsf1
  gRNA
gatgtaaaccccttcattct

SEQ ID NO: 93017 - DNA, 20 bp, Artificial Sequence
  MKO10093017_B_Igsf1
  gRNA
ttacccagtgaagtcatacc

SEQ ID NO: 93018 - DNA, 20 bp, Artificial Sequence
  MKO10093018_B_Igsf21
  gRNA
ctccatgtgcgagtagttcg

SEQ ID NO: 93019 - DNA, 20 bp, Artificial Sequence
  MKO10093019_B_Igsf21
  gRNA
tggtaccggctaaagggggc

SEQ ID NO: 93020 - DNA, 20 bp, Artificial Sequence
  MKO10093020_B_Igsf21
  gRNA
accacacgatctcacgcata

SEQ ID NO: 93021 - DNA, 20 bp, Artificial Sequence
  MKO10093021_B_Igsf23
  gRNA
tggctagtgcgaggacgtcc

SEQ ID NO: 93022 - DNA, 20 bp, Artificial Sequence
  MKO10093022_B_Igsf23
  gRNA
gtcactgtagattatgccct

SEQ ID NO: 93023 - DNA, 20 bp, Artificial Sequence
  MKO10093023_B_Igsf23
  gRNA
aggtaagtgcccagctgatc

SEQ ID NO: 93024 - DNA, 20 bp, Artificial Sequence
  MKO10093024_B_Igsf3
  gRNA
agagcgccgcgccagtaccc

SEQ ID NO: 93025 - DNA, 20 bp, Artificial Sequence
  MKO10093025_B_Igsf3
  gRNA
tgtggtgtcagcgcagcgac

SEQ ID NO: 93026 - DNA, 20 bp, Artificial Sequence
  MKO10093026_B_Igsf3
  gRNA
ccgggacggcaccttgcagc

SEQ ID NO: 93027 - DNA, 20 bp, Artificial Sequence
  MKO10093027_B_Igsf5
  gRNA
aaggcccagcactgccgacc

SEQ ID NO: 93028 - DNA, 20 bp, Artificial Sequence
  MKO10093028_B_Igsf5
  gRNA
acctacctgtcagctgagcc

SEQ ID NO: 93029 - DNA, 20 bp, Artificial Sequence
  MKO10093029_B_Igsf5
  gRNA
atgctgagatggagggcagc

SEQ ID NO: 93030 - DNA, 20 bp, Artificial Sequence
  MKO10093030_B_Igsf6
  gRNA
tcttggcagtcaaaatctaa

SEQ ID NO: 93031 - DNA, 20 bp, Artificial Sequence
  MKO10093031_B_Igsf6
  gRNA
tactttgaagaggactatga

SEQ ID NO: 93032 - DNA, 20 bp, Artificial Sequence
  MKO10093032_B_Igsf6
  gRNA
attataccataagagatatg

SEQ ID NO: 93033 - DNA, 20 bp, Artificial Sequence
  MKO10093033_B_Igsf8
  gRNA
accactgtacggccgctgag

SEQ ID NO: 93034 - DNA, 20 bp, Artificial Sequence
  MKO10093034_B_Igsf8
  gRNA
gcccaggtactgcgtatctg

SEQ ID NO: 93035 - DNA, 20 bp, Artificial Sequence
  MKO10093035_B_Igsf8
  gRNA
agggactgatcggtaccgaa

SEQ ID NO: 93036 - DNA, 20 bp, Artificial Sequence
  MKO10093036_B_Igsf9b
  gRNA
acgtaccgttaatggtgaga

SEQ ID NO: 93037 - DNA, 20 bp, Artificial Sequence
  MKO10093037_B_Igsf9b
  gRNA
cccgaaagcagtacacgtca

SEQ ID NO: 93038 - DNA, 20 bp, Artificial Sequence
  MKO10093038_B_Igsf9b
  gRNA
gcaagtgtgatcagcacccg

SEQ ID NO: 93039 - DNA, 20 bp, Artificial Sequence
  MKO10093039_B_Igsf9
  gRNA
cgctgcctcgctccacccga

SEQ ID NO: 93040 - DNA, 20 bp, Artificial Sequence
  MKO10093040_B_Igsf9
  gRNA
ggcggttaccttgcgctgtg

SEQ ID NO: 93041 - DNA, 20 bp, Artificial Sequence
  MKO10093041_B_Igsf9
  gRNA
aaattccgaggacaagacct

SEQ ID NO: 93042 - DNA, 20 bp, Artificial Sequence
  MKO10093042_B_Igtp
  gRNA
caactttgtgactaaatcca

SEQ ID NO: 93043 - DNA, 20 bp, Artificial Sequence
  MKO10093043_B_Igtp
  gRNA
tcaagcgcctcatcagcccg

SEQ ID NO: 93044 - DNA, 20 bp, Artificial Sequence
  MKO10093044_B_Igtp
  gRNA
tatccgggagaatctccagc

SEQ ID NO: 93045 - DNA, 20 bp, Artificial Sequence
  MKO10093045_B_Ihh
  gRNA
cagggtcttctccggcacgt

SEQ ID NO: 93046 - DNA, 20 bp, Artificial Sequence
  MKO10093046_B_Ihh
  gRNA
agactcaggatcctccgcgt

SEQ ID NO: 93047 - DNA, 20 bp, Artificial Sequence
  MKO10093047_B_Ihh
  gRNA
cttgccttcgtagcgcccgc

SEQ ID NO: 93048 - DNA, 20 bp, Artificial Sequence
  MKO10093048_B_Iigp1
  gRNA
agttaaggcggatgtcctgc

SEQ ID NO: 93049 - DNA, 20 bp, Artificial Sequence
  MKO10093049_B_Iigp1
  gRNA
tgttatgtcagagtccacct

SEQ ID NO: 93050 - DNA, 20 bp, Artificial Sequence
  MKO10093050_B_Iigp1
  gRNA
acaccccaatatacccaatg

SEQ ID NO: 93051 - DNA, 20 bp, Artificial Sequence
  MKO10093051_B_Ikbip
  gRNA
ggaagatcttctacgagtcg

SEQ ID NO: 93052 - DNA, 20 bp, Artificial Sequence
  MKO10093052_B_Ikbip
  gRNA
acaatcagaaaagtttgcga

SEQ ID NO: 93053 - DNA, 20 bp, Artificial Sequence
  MKO10093053_B_Ikbip
  gRNA
tgatggcaggaaaaaccccg

SEQ ID NO: 93054 - DNA, 20 bp, Artificial Sequence
  MKO10093054_B_Ikbkap
  gRNA
agaagcagcagttcttgatc

SEQ ID NO: 93055 - DNA, 20 bp, Artificial Sequence
  MKO10093055_B_Ikbkap
  gRNA
atgcagccacttccatcctc

SEQ ID NO: 93056 - DNA, 20 bp, Artificial Sequence
  MKO10093056_B_Ikbkap
  gRNA
gtggtatctctgtcatgagc

SEQ ID NO: 93057 - DNA, 20 bp, Artificial Sequence
  MKO10093057_B_Ikbkb
  gRNA
ctcctgtcggcattgcttga

SEQ ID NO: 93058 - DNA, 20 bp, Artificial Sequence
  MKO10093058_B_Ikbkb
  gRNA
taggctgaaccatcccaatg

SEQ ID NO: 93059 - DNA, 20 bp, Artificial Sequence
  MKO10093059_B_Ikbkb
  gRNA
taaggacagctccttcccgc

SEQ ID NO: 93060 - DNA, 20 bp, Artificial Sequence
  MKO10093060_B_Ikbke
  gRNA
gtccatcgggacatcaaacc

SEQ ID NO: 93061 - DNA, 20 bp, Artificial Sequence
  MKO10093061_B_Ikbke
  gRNA
gaagaccctgagaacacgtt

SEQ ID NO: 93062 - DNA, 20 bp, Artificial Sequence
  MKO10093062_B_Ikbke
  gRNA
tcccaggtttgatgtcccga

SEQ ID NO: 93063 - DNA, 20 bp, Artificial Sequence
  MKO10093063_B_Ikbkg
  gRNA
aggctgccttgcgaatggag

SEQ ID NO: 93064 - DNA, 20 bp, Artificial Sequence
  MKO10093064_B_Ikbkg
  gRNA
gttggatgaacaagcacccc

SEQ ID NO: 93065 - DNA, 20 bp, Artificial Sequence
  MKO10093065_B_Ikbkg
  gRNA
tctcctcccgctggctgacc

SEQ ID NO: 93066 - DNA, 20 bp, Artificial Sequence
  MKO10093066_B_Ikzf1
  gRNA
ggccttccgggcatgtaccc

SEQ ID NO: 93067 - DNA, 20 bp, Artificial Sequence
  MKO10093067_B_Ikzf1
  gRNA
gaagacaatggatgtcgatg

SEQ ID NO: 93068 - DNA, 20 bp, Artificial Sequence
  MKO10093068_B_Ikzf1
  gRNA
ggccggtgagggcgtccctc

SEQ ID NO: 93069 - DNA, 20 bp, Artificial Sequence
  MKO10093069_B_Ikzf2
  gRNA
catattggcgtgttcccctt

SEQ ID NO: 93070 - DNA, 20 bp, Artificial Sequence
  MKO10093070_B_Ikzf2
  gRNA
acccctaattgagagcagcg

SEQ ID NO: 93071 - DNA, 20 bp, Artificial Sequence
  MKO10093071_B_Ikzf2
  gRNA
ctacaagcagcgcagctcac

SEQ ID NO: 93072 - DNA, 20 bp, Artificial Sequence
  MKO10093072_B_Ikzf3
  gRNA
ctgtagtcattcagagcgtc

SEQ ID NO: 93073 - DNA, 20 bp, Artificial Sequence
  MKO10093073_B_Ikzf3
  gRNA
aagatgaactgcgacgtgtg

SEQ ID NO: 93074 - DNA, 20 bp, Artificial Sequence
  MKO10093074_B_Ikzf3
  gRNA
tttagatatacaaccgactg

SEQ ID NO: 93075 - DNA, 20 bp, Artificial Sequence
  MKO10093075_B_Ikzf4
  gRNA
cccccgagtgcagcttgatg

SEQ ID NO: 93076 - DNA, 20 bp, Artificial Sequence
  MKO10093076_B_Ikzf4
  gRNA
aagctcaagtgcgacgtctg

SEQ ID NO: 93077 - DNA, 20 bp, Artificial Sequence
  MKO10093077_B_Ikzf4
  gRNA
tcacccagccgctcgctcag

SEQ ID NO: 93078 - DNA, 20 bp, Artificial Sequence
  MKO10093078_B_Ikzf5
  gRNA
tgaaaagaaaccagagcctt

SEQ ID NO: 93079 - DNA, 20 bp, Artificial Sequence
  MKO10093079_B_Ikzf5
  gRNA
tgttcacatgatgcgtctgc

SEQ ID NO: 93080 - DNA, 20 bp, Artificial Sequence
  MKO10093080_B_Ikzf5
  gRNA
cctgatgtgctcaatgagcc

SEQ ID NO: 93081 - DNA, 20 bp, Artificial Sequence
  MKO10093081_B_Ik
  gRNA
tcatcctcattgtactccct

SEQ ID NO: 93082 - DNA, 20 bp, Artificial Sequence
  MKO10093082_B_Ik
  gRNA
tcatccacatcgtggccatc

SEQ ID NO: 93083 - DNA, 20 bp, Artificial Sequence
  MKO10093083_B_Ik
  gRNA
gagaactcgcagagaaatac

SEQ ID NO: 93084 - DNA, 20 bp, Artificial Sequence
  MKO10093084_B_Il10ra
  gRNA
ggtgaacgttgtgagatcac

SEQ ID NO: 93085 - DNA, 20 bp, Artificial Sequence
  MKO10093085_B_Il10ra
  gRNA
tgagtacgaacaagtcttca

SEQ ID NO: 93086 - DNA, 20 bp, Artificial Sequence
  MKO10093086_B_Il10ra
  gRNA
cttggaatcccgaattaaca

SEQ ID NO: 93087 - DNA, 20 bp, Artificial Sequence
  MKO10093087_B_Il10rb
  gRNA
tgaattggcggatgaacatt

SEQ ID NO: 93088 - DNA, 20 bp, Artificial Sequence
  MKO10093088_B_Il10rb
  gRNA
aatgattccaccccctgaga

SEQ ID NO: 93089 - DNA, 20 bp, Artificial Sequence
  MKO10093089_B_Il10rb
  gRNA
gaattcattctgaccttctc

SEQ ID NO: 93090 - DNA, 20 bp, Artificial Sequence
  MKO10093090_B_Il10
  gRNA
cttgggttgccaagccttat

SEQ ID NO: 93091 - DNA, 20 bp, Artificial Sequence
  MKO10093091_B_Il10
  gRNA
gaagatgtcaaattcattca

SEQ ID NO: 93092 - DNA, 20 bp, Artificial Sequence
  MKO10093092_B_Il10
  gRNA
cccacacagctccaagacca

SEQ ID NO: 93093 - DNA, 20 bp, Artificial Sequence
  MKO10093093_B_Il11ra1
  gRNA
cacagcatcacgggcctgcc

SEQ ID NO: 93094 - DNA, 20 bp, Artificial Sequence
  MKO10093094_B_Il11ra1
  gRNA
ctaactcacagcccagcttc

SEQ ID NO: 93095 - DNA, 20 bp, Artificial Sequence
  MKO10093095_B_Il11ra1
  gRNA
cctccaggactccagtgtcc

SEQ ID NO: 93096 - DNA, 20 bp, Artificial Sequence
  MKO10093096_B_Il11ra2
  gRNA
ctaactcacagcccagcttc

SEQ ID NO: 93097 - DNA, 20 bp, Artificial Sequence
  MKO10093097_B_Il11ra2
  gRNA
tcctgaagtctcttgccaag

SEQ ID NO: 93098 - DNA, 20 bp, Artificial Sequence
  MKO10093098_B_Il11ra2
  gRNA
acacatacctgtaggaagta

SEQ ID NO: 93099 - DNA, 20 bp, Artificial Sequence
  MKO10093099_B_Il11
  gRNA
ttcagaccctcgagcagatc

SEQ ID NO: 93100 - DNA, 20 bp, Artificial Sequence
  MKO10093100_B_Il11
  gRNA
agactgtgatctccgtcagc

SEQ ID NO: 93101 - DNA, 20 bp, Artificial Sequence
  MKO10093101_B_Il11
  gRNA
tcccaatgtcccagcgctca

SEQ ID NO: 93102 - DNA, 20 bp, Artificial Sequence
  MKO10093102_B_Il12a
  gRNA
aagaagtctctctagtagcc

SEQ ID NO: 93103 - DNA, 20 bp, Artificial Sequence
  MKO10093103_B_Il12a
  gRNA
tcttcagcaggtttcgggac

SEQ ID NO: 93104 - DNA, 20 bp, Artificial Sequence
  MKO10093104_B_Il12a
  gRNA
cctcctaaaccacctcagtt

SEQ ID NO: 93105 - DNA, 20 bp, Artificial Sequence
  MKO10093105_B_Il12b
  gRNA
gactggactcccgatgcccc

SEQ ID NO: 93106 - DNA, 20 bp, Artificial Sequence
  MKO10093106_B_Il12b
  gRNA
aatttggtgcttcacacttc

SEQ ID NO: 93107 - DNA, 20 bp, Artificial Sequence
  MKO10093107_B_Il12b
  gRNA
cagtacacctgccacaaagg

SEQ ID NO: 93108 - DNA, 20 bp, Artificial Sequence
  MKO10093108_B_Il12rb1
  gRNA
cgctgccgctacttctcctc

SEQ ID NO: 93109 - DNA, 20 bp, Artificial Sequence
  MKO10093109_B_Il12rb1
  gRNA
cctccgaaccatacccacac

SEQ ID NO: 93110 - DNA, 20 bp, Artificial Sequence
  MKO10093110_B_Il12rb1
  gRNA
gtcggacctgaggctccctc

SEQ ID NO: 93111 - DNA, 20 bp, Artificial Sequence
  MKO10093111_B_Il12rb2
  gRNA
gagatctccaccccacatac

SEQ ID NO: 93112 - DNA, 20 bp, Artificial Sequence
  MKO10093112_B_Il12rb2
  gRNA
ttccaggacgtgctgttaag

SEQ ID NO: 93113 - DNA, 20 bp, Artificial Sequence
  MKO10093113_B_Il12rb2
  gRNA
tcaaaacatatcatgtgtcc

SEQ ID NO: 93114 - DNA, 20 bp, Artificial Sequence
  MKO10093114_B_Il13ra1
  gRNA
aaaatctctgcacgataata

SEQ ID NO: 93115 - DNA, 20 bp, Artificial Sequence
  MKO10093115_B_Il13ra1
  gRNA
tgactgagctcaagtgcatt

SEQ ID NO: 93116 - DNA, 20 bp, Artificial Sequence
  MKO10093116_B_Il13ra1
  gRNA
acatcagaacgttcaaataa

SEQ ID NO: 93117 - DNA, 20 bp, Artificial Sequence
  MKO10093117_B_Il13ra2
  gRNA
tcagaatatactgtcttgcc

SEQ ID NO: 93118 - DNA, 20 bp, Artificial Sequence
  MKO10093118_B_Il13ra2
  gRNA
tcaaacagactataattact

SEQ ID NO: 93119 - DNA, 20 bp, Artificial Sequence
  MKO10093119_B_Il13ra2
  gRNA
gatgggtttgatcttaataa

SEQ ID NO: 93120 - DNA, 20 bp, Artificial Sequence
  MKO10093120_B_Il13
  gRNA
acaaagcaactgtttcgcca

SEQ ID NO: 93121 - DNA, 20 bp, Artificial Sequence
  MKO10093121_B_Il13
  gRNA
ctctgggcttcatggcgctc

SEQ ID NO: 93122 - DNA, 20 bp, Artificial Sequence
  MKO10093122_B_Il13
  gRNA
ctcctcattagaaggggccg

SEQ ID NO: 93123 - DNA, 20 bp, Artificial Sequence
  MKO10093123_B_Il15ra
  gRNA
cacagttccaaaatgacgaa

SEQ ID NO: 93124 - DNA, 20 bp, Artificial Sequence
  MKO10093124_B_Il15ra
  gRNA
tagttcctgcagaagttgtt

SEQ ID NO: 93125 - DNA, 20 bp, Artificial Sequence
  MKO10093125_B_Il15ra
  gRNA
tcaccttgatttgatgtacc

SEQ ID NO: 93126 - DNA, 20 bp, Artificial Sequence
  MKO10093126_B_Il15
  gRNA
atatcttacatctatccagt

SEQ ID NO: 93127 - DNA, 20 bp, Artificial Sequence
  MKO10093127_B_Il15
  gRNA
gtcactgtcagtgtataaag

SEQ ID NO: 93128 - DNA, 20 bp, Artificial Sequence
  MKO10093128_B_Il15
  gRNA
cagcactctgtcttctaaca

SEQ ID NO: 93129 - DNA, 20 bp, Artificial Sequence
  MKO10093129_B_Il16
  gRNA
gctgtgctcagtgaccgagt

SEQ ID NO: 93130 - DNA, 20 bp, Artificial Sequence
  MKO10093130_B_Il16
  gRNA
gcccttcatcagcactatgt

SEQ ID NO: 93131 - DNA, 20 bp, Artificial Sequence
  MKO10093131_B_Il16
  gRNA
ctcttcacataaattccaat

SEQ ID NO: 93132 - DNA, 20 bp, Artificial Sequence
  MKO10093132_B_Il17a
  gRNA
cctccgcattgacacagcgc

SEQ ID NO: 93133 - DNA, 20 bp, Artificial Sequence
  MKO10093133_B_Il17a
  gRNA
ctgccttcactgtagccgcc

SEQ ID NO: 93134 - DNA, 20 bp, Artificial Sequence
  MKO10093134_B_Il17a
  gRNA
accacagatgaagctctccc

SEQ ID NO: 93135 - DNA, 20 bp, Artificial Sequence
  MKO10093135_B_Il17b
  gRNA
ggacagaggcggcggcgcac

SEQ ID NO: 93136 - DNA, 20 bp, Artificial Sequence
  MKO10093136_B_Il17b
  gRNA
gatggactggccgcacagcc

SEQ ID NO: 93137 - DNA, 20 bp, Artificial Sequence
  MKO10093137_B_Il17b
  gRNA
gcaccacgtaccaggctgtg

SEQ ID NO: 93138 - DNA, 20 bp, Artificial Sequence
  MKO10093138_B_Il17c
  gRNA
aggattgtgatgcgccacag

SEQ ID NO: 93139 - DNA, 20 bp, Artificial Sequence
  MKO10093139_B_Il17c
  gRNA
cccaccaagatcccccgtcc

SEQ ID NO: 93140 - DNA, 20 bp, Artificial Sequence
  MKO10093140_B_Il17c
  gRNA
cctcagcagagtagcaccgc

SEQ ID NO: 93141 - DNA, 20 bp, Artificial Sequence
  MKO10093141_B_Il17d
  gRNA
tgctgctggggcccgccgac

SEQ ID NO: 93142 - DNA, 20 bp, Artificial Sequence
  MKO10093142_B_Il17d
  gRNA
cgacgcgatgttggggacac

SEQ ID NO: 93143 - DNA, 20 bp, Artificial Sequence
  MKO10093143_B_Il17d
  gRNA
agacgggtgtgctgcgaaag

SEQ ID NO: 93144 - DNA, 20 bp, Artificial Sequence
  MKO10093144_B_Il17f
  gRNA
gcatcactcgagacccccac

SEQ ID NO: 93145 - DNA, 20 bp, Artificial Sequence
  MKO10093145_B_Il17f
  gRNA
ctctcacagtgttatcctcc

SEQ ID NO: 93146 - DNA, 20 bp, Artificial Sequence
  MKO10093146_B_Il17f
  gRNA
cactcaccatggctgtttca

SEQ ID NO: 93147 - DNA, 20 bp, Artificial Sequence
  MKO10093147_B_Il17ra
  gRNA
gtccactcaacatgcaacac

SEQ ID NO: 93148 - DNA, 20 bp, Artificial Sequence
  MKO10093148_B_Il17ra
  gRNA
gaacagtcacttcatactcc

SEQ ID NO: 93149 - DNA, 20 bp, Artificial Sequence
  MKO10093149_B_Il17ra
  gRNA
agccagcatcctgtacctcg

SEQ ID NO: 93150 - DNA, 20 bp, Artificial Sequence
  MKO10093150_B_Il17rb
  gRNA
ttgtcttgacgagttccact

SEQ ID NO: 93151 - DNA, 20 bp, Artificial Sequence
  MKO10093151_B_Il17rb
  gRNA
agacttgagggacctccaag

SEQ ID NO: 93152 - DNA, 20 bp, Artificial Sequence
  MKO10093152_B_Il17rb
  gRNA
ttcctgcagactattcagtg

SEQ ID NO: 93153 - DNA, 20 bp, Artificial Sequence
  MKO10093153_B_Il17rc
  gRNA
ttgcgccctctgtgtccgtg

SEQ ID NO: 93154 - DNA, 20 bp, Artificial Sequence
  MKO10093154_B_Il17rc
  gRNA
ggtccaggtgcccgctgacc

SEQ ID NO: 93155 - DNA, 20 bp, Artificial Sequence
  MKO10093155_B_Il17rc
  gRNA
cctcaccgttcctagactcc

SEQ ID NO: 93156 - DNA, 20 bp, Artificial Sequence
  MKO10093156_B_Il17rd
  gRNA
gtgccaacagctgattctaa

SEQ ID NO: 93157 - DNA, 20 bp, Artificial Sequence
  MKO10093157_B_Il17rd
  gRNA
ccgtctcaaatttcatattc

SEQ ID NO: 93158 - DNA, 20 bp, Artificial Sequence
  MKO10093158_B_Il17rd
  gRNA
accccgtgttctgaagaaga

SEQ ID NO: 93159 - DNA, 20 bp, Artificial Sequence
  MKO10093159_B_Il17re
  gRNA
agggtttcgcagggtgtgag

SEQ ID NO: 93160 - DNA, 20 bp, Artificial Sequence
  MKO10093160_B_Il17re
  gRNA
gttgtaccttaaagcagagc

SEQ ID NO: 93161 - DNA, 20 bp, Artificial Sequence
  MKO10093161_B_Il17re
  gRNA
tctgccctgcatgtgcatag

SEQ ID NO: 93162 - DNA, 20 bp, Artificial Sequence
  MKO10093162_B_Il18bp
  gRNA
tgagcttccagttaagacag

SEQ ID NO: 93163 - DNA, 20 bp, Artificial Sequence
  MKO10093163_B_Il18bp
  gRNA
aaccattgcccagccagtag

SEQ ID NO: 93164 - DNA, 20 bp, Artificial Sequence
  MKO10093164_B_Il18bp
  gRNA
agtgctgggtactgcttagt

SEQ ID NO: 93165 - DNA, 20 bp, Artificial Sequence
  MKO10093165_B_Il18r1
  gRNA
tgttgtaccgtgtcccatta

SEQ ID NO: 93166 - DNA, 20 bp, Artificial Sequence
  MKO10093166_B_Il18r1
  gRNA
ctaccacatgaatttgtgat

SEQ ID NO: 93167 - DNA, 20 bp, Artificial Sequence
  MKO10093167_B_Il18r1
  gRNA
taactatgaagagctgatcc

SEQ ID NO: 93168 - DNA, 20 bp, Artificial Sequence
  MKO10093168_B_Il18rap
  gRNA
gtggttaaagtgagaaccat

SEQ ID NO: 93169 - DNA, 20 bp, Artificial Sequence
  MKO10093169_B_Il18rap
  gRNA
taagactgtcttgatacaac

SEQ ID NO: 93170 - DNA, 20 bp, Artificial Sequence
  MKO10093170_B_Il18rap
  gRNA
ggatcccattacagatacac

SEQ ID NO: 93171 - DNA, 20 bp, Artificial Sequence
  MKO10093171_B_Il18
  gRNA
ggaaatgatcttgttcttac

SEQ ID NO: 93172 - DNA, 20 bp, Artificial Sequence
  MKO10093172_B_Il18
  gRNA
ttctttcagaaacgtgttcc

SEQ ID NO: 93173 - DNA, 20 bp, Artificial Sequence
  MKO10093173_B_Il18
  gRNA
aactccatcttgttgtgtcc

SEQ ID NO: 93174 - DNA, 20 bp, Artificial Sequence
  MKO10093174_B_Il19
  gRNA
catccatgacaactacaatc

SEQ ID NO: 93175 - DNA, 20 bp, Artificial Sequence
  MKO10093175_B_Il19
  gRNA
gtcatgcagcacacatctcc

SEQ ID NO: 93176 - DNA, 20 bp, Artificial Sequence
  MKO10093176_B_Il19
  gRNA
atggtaccttaatgctcctg

SEQ ID NO: 93177 - DNA, 20 bp, Artificial Sequence
  MKO10093177_B_Il1a
  gRNA
aacactatctcagcaccact

SEQ ID NO: 93178 - DNA, 20 bp, Artificial Sequence
  MKO10093178_B_Il1a
  gRNA
gtatcagcaacgtcaagcaa

SEQ ID NO: 93179 - DNA, 20 bp, Artificial Sequence
  MKO10093179_B_Il1a
  gRNA
tccttctatgatgcaagcta

SEQ ID NO: 93180 - DNA, 20 bp, Artificial Sequence
  MKO10093180_B_Il1b
  gRNA
gtccgtcaacttcaaagaac

SEQ ID NO: 93181 - DNA, 20 bp, Artificial Sequence
  MKO10093181_B_Il1b
  gRNA
gctgctgcgagatttgaagc

SEQ ID NO: 93182 - DNA, 20 bp, Artificial Sequence
  MKO10093182_B_Il1b
  gRNA
cctgtagtgcagttgtctaa

SEQ ID NO: 93183 - DNA, 20 bp, Artificial Sequence
  MKO10093183_B_Il1f10
  gRNA
tggggaccttggagcggtct

SEQ ID NO: 93184 - DNA, 20 bp, Artificial Sequence
  MKO10093184_B_Il1f10
  gRNA
acggaatggccagctcctgc

SEQ ID NO: 93185 - DNA, 20 bp, Artificial Sequence
  MKO10093185_B_Il1f10
  gRNA
tttgttcacctcccttgtat

SEQ ID NO: 93186 - DNA, 20 bp, Artificial Sequence
  MKO10093186_B_Il1f5
  gRNA
ctggcatccagtgcccgatt

SEQ ID NO: 93187 - DNA, 20 bp, Artificial Sequence
  MKO10093187_B_Il1f5
  gRNA
gtgcagatacagtaccttca

SEQ ID NO: 93188 - DNA, 20 bp, Artificial Sequence
  MKO10093188_B_Il1f5
  gRNA
tggaggactgcacgcagaga

SEQ ID NO: 93189 - DNA, 20 bp, Artificial Sequence
  MKO10093189_B_Il1f6
  gRNA
cagacagcgatgaaccaacc

SEQ ID NO: 93190 - DNA, 20 bp, Artificial Sequence
  MKO10093190_B_Il1f6
  gRNA
acactcttgagacgaacagg

SEQ ID NO: 93191 - DNA, 20 bp, Artificial Sequence
  MKO10093191_B_Il1f6
  gRNA
cttgctcccatgccaatatc

SEQ ID NO: 93192 - DNA, 20 bp, Artificial Sequence
  MKO10093192_B_Il1f8
  gRNA
gctagcaacaatgtcaagcc

SEQ ID NO: 93193 - DNA, 20 bp, Artificial Sequence
  MKO10093193_B_Il1f8
  gRNA
gatttctgttcttgattccc

SEQ ID NO: 93194 - DNA, 20 bp, Artificial Sequence
  MKO10093194_B_Il1f8
  gRNA
gattacctttctttacatct

SEQ ID NO: 93195 - DNA, 20 bp, Artificial Sequence
  MKO10093195_B_Il1f9
  gRNA
atgttccacctgtccgggtg

SEQ ID NO: 93196 - DNA, 20 bp, Artificial Sequence
  MKO10093196_B_Il1f9
  gRNA
gtacccagagtctcttgaac

SEQ ID NO: 93197 - DNA, 20 bp, Artificial Sequence
  MKO10093197_B_Il1f9
  gRNA
tatattgcctcctccaagac

SEQ ID NO: 93198 - DNA, 20 bp, Artificial Sequence
  MKO10093198_B_Il1r1
  gRNA
cagcaagacccccatatcag

SEQ ID NO: 93199 - DNA, 20 bp, Artificial Sequence
  MKO10093199_B_Il1r1
  gRNA
acgaaattaccttataccac

SEQ ID NO: 93200 - DNA, 20 bp, Artificial Sequence
  MKO10093200_B_Il1r1
  gRNA
tgaaaataatgagttacccg

SEQ ID NO: 93201 - DNA, 20 bp, Artificial Sequence
  MKO10093201_B_Il1r2
  gRNA
gatgtcggagtgaggtgcca

SEQ ID NO: 93202 - DNA, 20 bp, Artificial Sequence
  MKO10093202_B_Il1r2
  gRNA
ttcatctccagcaacgctga

SEQ ID NO: 93203 - DNA, 20 bp, Artificial Sequence
  MKO10093203_B_Il1r2
  gRNA
ggagacaactgtcagtttcg

SEQ ID NO: 93204 - DNA, 20 bp, Artificial Sequence
  MKO10093204_B_Il1rapl1
  gRNA
gaatccataccttgtaccaa

SEQ ID NO: 93205 - DNA, 20 bp, Artificial Sequence
  MKO10093205_B_Il1rapl1
  gRNA
acgactgagttaactgttac

SEQ ID NO: 93206 - DNA, 20 bp, Artificial Sequence
  MKO10093206_B_Il1rapl1
  gRNA
acagttcaggagactcaact

SEQ ID NO: 93207 - DNA, 20 bp, Artificial Sequence
  MKO10093207_B_Il1rapl2
  gRNA
gtaccgggctcaggctcatg

SEQ ID NO: 93208 - DNA, 20 bp, Artificial Sequence
  MKO10093208_B_Il1rapl2
  gRNA
tatccgcaccaactacagca

SEQ ID NO: 93209 - DNA, 20 bp, Artificial Sequence
  MKO10093209_B_Il1rapl2
  gRNA
agctggacatctataacact

SEQ ID NO: 93210 - DNA, 20 bp, Artificial Sequence
  MKO10093210_B_Il1rap
  gRNA
ctttcataatgtactacccg

SEQ ID NO: 93211 - DNA, 20 bp, Artificial Sequence
  MKO10093211_B_Il1rap
  gRNA
ggaaagtatccgtctacatt

SEQ ID NO: 93212 - DNA, 20 bp, Artificial Sequence
  MKO10093212_B_Il1rap
  gRNA
cacccgaagcatgactctgc

SEQ ID NO: 93213 - DNA, 20 bp, Artificial Sequence
  MKO10093213_B_Il1rl1
  gRNA
gtcgagtacatcaaataatc

SEQ ID NO: 93214 - DNA, 20 bp, Artificial Sequence
  MKO10093214_B_Il1rl1
  gRNA
tggaaccaactacatcgtga

SEQ ID NO: 93215 - DNA, 20 bp, Artificial Sequence
  MKO10093215_B_Il1rl1
  gRNA
cacgttgtcaatgaacaagt

SEQ ID NO: 93216 - DNA, 20 bp, Artificial Sequence
  MKO10093216_B_Il1rl2
  gRNA
ttatcagaggaagttgagta

SEQ ID NO: 93217 - DNA, 20 bp, Artificial Sequence
  MKO10093217_B_Il1rl2
  gRNA
aactccattgaagttccact

SEQ ID NO: 93218 - DNA, 20 bp, Artificial Sequence
  MKO10093218_B_Il1rl2
  gRNA
acaagaagctttgctcctga

SEQ ID NO: 93219 - DNA, 20 bp, Artificial Sequence
  MKO10093219_B_Il1rn
  gRNA
ggcagtactattggtcttcc

SEQ ID NO: 93220 - DNA, 20 bp, Artificial Sequence
  MKO10093220_B_Il1rn
  gRNA
cctgaaggcttgcatcttgc

SEQ ID NO: 93221 - DNA, 20 bp, Artificial Sequence
  MKO10093221_B_Il1rn
  gRNA
gaggcagcctgccgcccttc

SEQ ID NO: 93222 - DNA, 20 bp, Artificial Sequence
  MKO10093222_B_Il20ra
  gRNA
cactctgtattgtgtccacg

SEQ ID NO: 93223 - DNA, 20 bp, Artificial Sequence
  MKO10093223_B_Il20ra
  gRNA
tcaactccgtgtagactctc

SEQ ID NO: 93224 - DNA, 20 bp, Artificial Sequence
  MKO10093224_B_Il20ra
  gRNA
acatgaagaatgtcctgcat

SEQ ID NO: 93225 - DNA, 20 bp, Artificial Sequence
  MKO10093225_B_Il20rb
  gRNA
ccttgcatctccacacacgt

SEQ ID NO: 93226 - DNA, 20 bp, Artificial Sequence
  MKO10093226_B_Il20rb
  gRNA
gctctattgtgtggagtatc

SEQ ID NO: 93227 - DNA, 20 bp, Artificial Sequence
  MKO10093227_B_Il20rb
  gRNA
cactgaacatgggctgcatc

SEQ ID NO: 93228 - DNA, 20 bp, Artificial Sequence
  MKO10093228_B_Il20
  gRNA
aattctgagtcacttcatag

SEQ ID NO: 93229 - DNA, 20 bp, Artificial Sequence
  MKO10093229_B_Il20
  gRNA
cattcttctgagatggatgg

SEQ ID NO: 93230 - DNA, 20 bp, Artificial Sequence
  MKO10093230_B_Il20
  gRNA
tgagtctttgaaagacataa

SEQ ID NO: 93231 - DNA, 20 bp, Artificial Sequence
  MKO10093231_B_Il21r
  gRNA
ccaggtgagactgagtatgc

SEQ ID NO: 93232 - DNA, 20 bp, Artificial Sequence
  MKO10093232_B_Il21r
  gRNA
ggttggggctccgtgtctcc

SEQ ID NO: 93233 - DNA, 20 bp, Artificial Sequence
  MKO10093233_B_Il21r
  gRNA
agaccttctgcagcctacac

SEQ ID NO: 93234 - DNA, 20 bp, Artificial Sequence
  MKO10093234_B_Il21
  gRNA
gagtttggccttctgaaaac

SEQ ID NO: 93235 - DNA, 20 bp, Artificial Sequence
  MKO10093235_B_Il21
  gRNA
atcagctccacaagatgtaa

SEQ ID NO: 93236 - DNA, 20 bp, Artificial Sequence
  MKO10093236_B_Il21
  gRNA
aattcctagaaagactaaaa

SEQ ID NO: 93237 - DNA, 20 bp, Artificial Sequence
  MKO10093237_B_Il22ra1
  gRNA
cgatcagtcatctttgtgac

SEQ ID NO: 93238 - DNA, 20 bp, Artificial Sequence
  MKO10093238_B_Il22ra1
  gRNA
gatccgctggcagcccgcct

SEQ ID NO: 93239 - DNA, 20 bp, Artificial Sequence
  MKO10093239_B_Il22ra1
  gRNA
actttgagaacatcttgacg

SEQ ID NO: 93240 - DNA, 20 bp, Artificial Sequence
  MKO10093240_B_Il22ra2
  gRNA
gacccatacgagctgtatta

SEQ ID NO: 93241 - DNA, 20 bp, Artificial Sequence
  MKO10093241_B_Il22ra2
  gRNA
tcattccagctactgcgtag

SEQ ID NO: 93242 - DNA, 20 bp, Artificial Sequence
  MKO10093242_B_Il22ra2
  gRNA
ggcgtcagagatacacgagc

SEQ ID NO: 93243 - DNA, 20 bp, Artificial Sequence
  MKO10093243_B_Il22
  gRNA
gctgagctgattgctgagtt

SEQ ID NO: 93244 - DNA, 20 bp, Artificial Sequence
  MKO10093244_B_Il22
  gRNA
tcagtgctacctgatgaagc

SEQ ID NO: 93245 - DNA, 20 bp, Artificial Sequence
  MKO10093245_B_Il22
  gRNA
tcagccttctgacattcttc

SEQ ID NO: 93246 - DNA, 20 bp, Artificial Sequence
  MKO10093246_B_Il23a
  gRNA
caagatccttcgaagcctcc

SEQ ID NO: 93247 - DNA, 20 bp, Artificial Sequence
  MKO10093247_B_Il23a
  gRNA
caacttcacacctccctact

SEQ ID NO: 93248 - DNA, 20 bp, Artificial Sequence
  MKO10093248_B_Il23a
  gRNA
aaccatcttcacactggata

SEQ ID NO: 93249 - DNA, 20 bp, Artificial Sequence
  MKO10093249_B_Il23r
  gRNA
tgtgtcatttatgaatactc

SEQ ID NO: 93250 - DNA, 20 bp, Artificial Sequence
  MKO10093250_B_Il23r
  gRNA
accatctgaagagcacataa

SEQ ID NO: 93251 - DNA, 20 bp, Artificial Sequence
  MKO10093251_B_Il23r
  gRNA
atctccactgactcactgca

SEQ ID NO: 93252 - DNA, 20 bp, Artificial Sequence
  MKO10093252_B_Il24
  gRNA
tgttgaagccgcaggttctg

SEQ ID NO: 93253 - DNA, 20 bp, Artificial Sequence
  MKO10093253_B_Il24
  gRNA
tttgggtcttgccaagtgac

SEQ ID NO: 93254 - DNA, 20 bp, Artificial Sequence
  MKO10093254_B_Il24
  gRNA
tgttcaagtagaacttcagc

SEQ ID NO: 93255 - DNA, 20 bp, Artificial Sequence
  MKO10093255_B_Il25
  gRNA
aggatggccccctcaacagc

SEQ ID NO: 93256 - DNA, 20 bp, Artificial Sequence
  MKO10093256_B_Il25
  gRNA
agtgggacggagttgcccag

SEQ ID NO: 93257 - DNA, 20 bp, Artificial Sequence
  MKO10093257_B_Il25
  gRNA
cccactttaccacaaccaga

SEQ ID NO: 93258 - DNA, 20 bp, Artificial Sequence
  MKO10093258_B_Il27ra
  gRNA
ccactgcagtgctacagcgt

SEQ ID NO: 93259 - DNA, 20 bp, Artificial Sequence
  MKO10093259_B_Il27ra
  gRNA
aatggtcacccaactctgtt

SEQ ID NO: 93260 - DNA, 20 bp, Artificial Sequence
  MKO10093260_B_Il27ra
  gRNA
cctcacctaagaatggcgtc

SEQ ID NO: 93261 - DNA, 20 bp, Artificial Sequence
  MKO10093261_B_Il27
  gRNA
ggtcccgaacagcccgagac

SEQ ID NO: 93262 - DNA, 20 bp, Artificial Sequence
  MKO10093262_B_Il27
  gRNA
gcttcctcgctaccacactt

SEQ ID NO: 93263 - DNA, 20 bp, Artificial Sequence
  MKO10093263_B_Il27
  gRNA
gcacaggcacctccgctttc

SEQ ID NO: 93264 - DNA, 20 bp, Artificial Sequence
  MKO10093264_B_Il2ra
  gRNA
tttccgaagactaaaggaat

SEQ ID NO: 93265 - DNA, 20 bp, Artificial Sequence
  MKO10093265_B_Il2ra
  gRNA
gtgtctgtatgacccacccg

SEQ ID NO: 93266 - DNA, 20 bp, Artificial Sequence
  MKO10093266_B_Il2ra
  gRNA
tcttacctgtaaggttctct

SEQ ID NO: 93267 - DNA, 20 bp, Artificial Sequence
  MKO10093267_B_Il2rb
  gRNA
ttacctctgggaacgacccg

SEQ ID NO: 93268 - DNA, 20 bp, Artificial Sequence
  MKO10093268_B_Il2rb
  gRNA
tccatgccaagtcgaacctg

SEQ ID NO: 93269 - DNA, 20 bp, Artificial Sequence
  MKO10093269_B_Il2rb
  gRNA
tctgtctgcagttcgcctgg

SEQ ID NO: 93270 - DNA, 20 bp, Artificial Sequence
  MKO10093270_B_Il2rg
  gRNA
ccaacctcacgctgcactat

SEQ ID NO: 93271 - DNA, 20 bp, Artificial Sequence
  MKO10093271_B_Il2rg
  gRNA
agctgaaacggtacacattt

SEQ ID NO: 93272 - DNA, 20 bp, Artificial Sequence
  MKO10093272_B_Il2rg
  gRNA
cccgattaccaagattctgt

SEQ ID NO: 93273 - DNA, 20 bp, Artificial Sequence
  MKO10093273_B_Il2
  gRNA
ctccacttcaagctctacag

SEQ ID NO: 93274 - DNA, 20 bp, Artificial Sequence
  MKO10093274_B_Il2
  gRNA
aaatccagaacatgccgcag

SEQ ID NO: 93275 - DNA, 20 bp, Artificial Sequence
  MKO10093275_B_Il2
  gRNA
acaggaacctgaaactcccc

SEQ ID NO: 93276 - DNA, 20 bp, Artificial Sequence
  MKO10093276_B_Il31ra
  gRNA
tctgtcgaagtaaaagacgc

SEQ ID NO: 93277 - DNA, 20 bp, Artificial Sequence
  MKO10093277_B_Il31ra
  gRNA
tgaacctgaatcgtagagcc

SEQ ID NO: 93278 - DNA, 20 bp, Artificial Sequence
  MKO10093278_B_Il31ra
  gRNA
gaactgtcaacagtagccac

SEQ ID NO: 93279 - DNA, 20 bp, Artificial Sequence
  MKO10093279_B_Il31
  gRNA
tgctatgatgaccgagatgt

SEQ ID NO: 93280 - DNA, 20 bp, Artificial Sequence
  MKO10093280_B_Il31
  gRNA
gtcgccatgatcttccacac

SEQ ID NO: 93281 - DNA, 20 bp, Artificial Sequence
  MKO10093281_B_Il31
  gRNA
ggtacctgtgtggaagatca

SEQ ID NO: 93282 - DNA, 20 bp, Artificial Sequence
  MKO10093282_B_Il33
  gRNA
tactgcatgagactccgttc

SEQ ID NO: 93283 - DNA, 20 bp, Artificial Sequence
  MKO10093283_B_Il33
  gRNA
gatctcttcctagaatcccg

SEQ ID NO: 93284 - DNA, 20 bp, Artificial Sequence
  MKO10093284_B_Il33
  gRNA
gttgacacattgagcatcca

SEQ ID NO: 93285 - DNA, 20 bp, Artificial Sequence
  MKO10093285_B_Il34
  gRNA
gaacgtacagcggagcctca

SEQ ID NO: 93286 - DNA, 20 bp, Artificial Sequence
  MKO10093286_B_Il34
  gRNA
attacttccccatcaactac

SEQ ID NO: 93287 - DNA, 20 bp, Artificial Sequence
  MKO10093287_B_Il34
  gRNA
cacagcaatcctgtagttga

SEQ ID NO: 93288 - DNA, 20 bp, Artificial Sequence
  MKO10093288_B_Il3ra
  gRNA
agcgcggccactgccgttga

SEQ ID NO: 93289 - DNA, 20 bp, Artificial Sequence
  MKO10093289_B_Il3ra
  gRNA
tgcacgtcacccgttgcttt

SEQ ID NO: 93290 - DNA, 20 bp, Artificial Sequence
  MKO10093290_B_Il3ra
  gRNA
agccttgatgtcaacaccgc

SEQ ID NO: 93291 - DNA, 20 bp, Artificial Sequence
  MKO10093291_B_Il3
  gRNA
ttgataacgtatctgtcctc

SEQ ID NO: 93292 - DNA, 20 bp, Artificial Sequence
  MKO10093292_B_Il3
  gRNA
gcagagtcattcgcagatgt

SEQ ID NO: 93293 - DNA, 20 bp, Artificial Sequence
  MKO10093293_B_Il3
  gRNA
tacatctgcgaatgactctg

SEQ ID NO: 93294 - DNA, 20 bp, Artificial Sequence
  MKO10093294_B_Il4i1
  gRNA
tggccgccaggacaagacgc

SEQ ID NO: 93295 - DNA, 20 bp, Artificial Sequence
  MKO10093295_B_Il4i1
  gRNA
cacagtatgatgagaacacg

SEQ ID NO: 93296 - DNA, 20 bp, Artificial Sequence
  MKO10093296_B_Il4i1
  gRNA
ccaccttgttgagtgccatc

SEQ ID NO: 93297 - DNA, 20 bp, Artificial Sequence
  MKO10093297_B_Il4ra
  gRNA
tgcagtccacagcgctatcc

SEQ ID NO: 93298 - DNA, 20 bp, Artificial Sequence
  MKO10093298_B_Il4ra
  gRNA
gaaacctcacatgcatcccg

SEQ ID NO: 93299 - DNA, 20 bp, Artificial Sequence
  MKO10093299_B_Il4ra
  gRNA
gttgatcgggaagctcagcc

SEQ ID NO: 93300 - DNA, 20 bp, Artificial Sequence
  MKO10093300_B_Il4
  gRNA
cagagagtgagctcgtctgt

SEQ ID NO: 93301 - DNA, 20 bp, Artificial Sequence
  MKO10093301_B_Il4
  gRNA
tcttctttctcgaatgtacc

SEQ ID NO: 93302 - DNA, 20 bp, Artificial Sequence
  MKO10093302_B_Il4
  gRNA
aatcacttgagagagatcat

SEQ ID NO: 93303 - DNA, 20 bp, Artificial Sequence
  MKO10093303_B_Il5ra
  gRNA
acacttacttcgtcttcttg

SEQ ID NO: 93304 - DNA, 20 bp, Artificial Sequence
  MKO10093304_B_Il5ra
  gRNA
gaagagcagccatacaactc

SEQ ID NO: 93305 - DNA, 20 bp, Artificial Sequence
  MKO10093305_B_Il5ra
  gRNA
ctgttcagtccacttgccat

SEQ ID NO: 93306 - DNA, 20 bp, Artificial Sequence
  MKO10093306_B_Il5
  gRNA
agatttctccaatgcatagc

SEQ ID NO: 93307 - DNA, 20 bp, Artificial Sequence
  MKO10093307_B_Il5
  gRNA
agctctgttgacaagcaatg

SEQ ID NO: 93308 - DNA, 20 bp, Artificial Sequence
  MKO10093308_B_Il5
  gRNA
cattgcttgtcaacagagct

SEQ ID NO: 93309 - DNA, 20 bp, Artificial Sequence
  MKO10093309_B_Il6ra
  gRNA
accgttaccctgatttgccc

SEQ ID NO: 93310 - DNA, 20 bp, Artificial Sequence
  MKO10093310_B_Il6ra
  gRNA
ccatacctggaaggccgcgc

SEQ ID NO: 93311 - DNA, 20 bp, Artificial Sequence
  MKO10093311_B_Il6ra
  gRNA
ttgtcaacgccatctgtgag

SEQ ID NO: 93312 - DNA, 20 bp, Artificial Sequence
  MKO10093312_B_Il6st
  gRNA
ccagtatattaaagctatca

SEQ ID NO: 93313 - DNA, 20 bp, Artificial Sequence
  MKO10093313_B_Il6st
  gRNA
cttctaagtacctttatcca

SEQ ID NO: 93314 - DNA, 20 bp, Artificial Sequence
  MKO10093314_B_Il6st
  gRNA
acaatgcaagtcaaatttgt

SEQ ID NO: 93315 - DNA, 20 bp, Artificial Sequence
  MKO10093315_B_Il6
  gRNA
ccttccctacttcacaagtc

SEQ ID NO: 93316 - DNA, 20 bp, Artificial Sequence
  MKO10093316_B_Il6
  gRNA
ttgtgaagtagggaaggccg

SEQ ID NO: 93317 - DNA, 20 bp, Artificial Sequence
  MKO10093317_B_Il6
  gRNA
aagtcactttgagatctact

SEQ ID NO: 93318 - DNA, 20 bp, Artificial Sequence
  MKO10093318_B_Il7r
  gRNA
agcctttgaagtaatcgtta

SEQ ID NO: 93319 - DNA, 20 bp, Artificial Sequence
  MKO10093319_B_Il7r
  gRNA
agacatcaacacagctaatc

SEQ ID NO: 93320 - DNA, 20 bp, Artificial Sequence
  MKO10093320_B_Il7r
  gRNA
cttgcagcttgttaagagtt

SEQ ID NO: 93321 - DNA, 20 bp, Artificial Sequence
  MKO10093321_B_Il7
  gRNA
ttattacaggacaaaatgac

SEQ ID NO: 93322 - DNA, 20 bp, Artificial Sequence
  MKO10093322_B_Il7
  gRNA
acatgtatgtgatgatacaa

SEQ ID NO: 93323 - DNA, 20 bp, Artificial Sequence
  MKO10093323_B_Il7
  gRNA
tttctctcagtagtctcttt

SEQ ID NO: 93324 - DNA, 20 bp, Artificial Sequence
  MKO10093324_B_Il9r
  gRNA
tccaccctcacctggtaaag

SEQ ID NO: 93325 - DNA, 20 bp, Artificial Sequence
  MKO10093325_B_Il9r
  gRNA
cttccgcaatgcatcttccc

SEQ ID NO: 93326 - DNA, 20 bp, Artificial Sequence
  MKO10093326_B_Il9r
  gRNA
ggagtctcggtcccagagca

SEQ ID NO: 93327 - DNA, 20 bp, Artificial Sequence
  MKO10093327_B_Il9
  gRNA
ccgtcaaaatgcagctgcag

SEQ ID NO: 93328 - DNA, 20 bp, Artificial Sequence
  MKO10093328_B_Il9
  gRNA
tgacagtgtgttgcctgcca

SEQ ID NO: 93329 - DNA, 20 bp, Artificial Sequence
  MKO10093329_B_Il9
  gRNA
gacggagagacacaagcagc

SEQ ID NO: 93330 - DNA, 20 bp, Artificial Sequence
  MKO10093330_B_Ildr1
  gRNA
cgtgtctcctggagcctcga

SEQ ID NO: 93331 - DNA, 20 bp, Artificial Sequence
  MKO10093331_B_Ildr1
  gRNA
cacgtcaggagacccagata

SEQ ID NO: 93332 - DNA, 20 bp, Artificial Sequence
  MKO10093332_B_Ildr1
  gRNA
tacccgctgttgctgccctg

SEQ ID NO: 93333 - DNA, 20 bp, Artificial Sequence
  MKO10093333_B_Ildr2
  gRNA
ctactgtatcatcaccaccc

SEQ ID NO: 93334 - DNA, 20 bp, Artificial Sequence
  MKO10093334_B_Ildr2
  gRNA
cttccagagtgggtgtttgt

SEQ ID NO: 93335 - DNA, 20 bp, Artificial Sequence
  MKO10093335_B_Ildr2
  gRNA
cataatctccacagcaaaac

SEQ ID NO: 93336 - DNA, 20 bp, Artificial Sequence
  MKO10093336_B_Ilf2
  gRNA
tgtgattgacaacttgattg

SEQ ID NO: 93337 - DNA, 20 bp, Artificial Sequence
  MKO10093337_B_Ilf2
  gRNA
ctcaccacttcaaatgttcc

SEQ ID NO: 93338 - DNA, 20 bp, Artificial Sequence
  MKO10093338_B_Ilf2
  gRNA
tccagaggagggcctggtgg

SEQ ID NO: 93339 - DNA, 20 bp, Artificial Sequence
  MKO10093339_B_Ilf3
  gRNA
gaagcccacaaccgcccttc

SEQ ID NO: 93340 - DNA, 20 bp, Artificial Sequence
  MKO10093340_B_Ilf3
  gRNA
gtatgaaatactccagtctg

SEQ ID NO: 93341 - DNA, 20 bp, Artificial Sequence
  MKO10093341_B_Ilf3
  gRNA
tcgcagcatcatccacagac

SEQ ID NO: 93342 - DNA, 20 bp, Artificial Sequence
  MKO10093342_B_Ilkap
  gRNA
tgtacctgagtcagtactgc

SEQ ID NO: 93343 - DNA, 20 bp, Artificial Sequence
  MKO10093343_B_Ilkap
  gRNA
gctctttgaggacctgcccc

SEQ ID NO: 93344 - DNA, 20 bp, Artificial Sequence
  MKO10093344_B_Ilkap
  gRNA
ctaggttctcttgccacatc

SEQ ID NO: 93345 - DNA, 20 bp, Artificial Sequence
  MKO10093345_B_Ilk
  gRNA
ccccttagagagcttctccg

SEQ ID NO: 93346 - DNA, 20 bp, Artificial Sequence
  MKO10093346_B_Ilk
  gRNA
aacctcggagaagctctcta

SEQ ID NO: 93347 - DNA, 20 bp, Artificial Sequence
  MKO10093347_B_Ilk
  gRNA
ggaaggggaccactcgcaca

SEQ ID NO: 93348 - DNA, 20 bp, Artificial Sequence
  MKO10093348_B_Iltifb
  gRNA
tcagtgctacctgatgaagc

SEQ ID NO: 93349 - DNA, 20 bp, Artificial Sequence
  MKO10093349_B_Iltifb
  gRNA
gctgagctgattgctgagtt

SEQ ID NO: 93350 - DNA, 20 bp, Artificial Sequence
  MKO10093350_B_Iltifb
  gRNA
acatccagaagaatgtcaga

SEQ ID NO: 93351 - DNA, 20 bp, Artificial Sequence
  MKO10093351_B_Ilvbl
  gRNA
caagttgcccaatagcctca

SEQ ID NO: 93352 - DNA, 20 bp, Artificial Sequence
  MKO10093352_B_Ilvbl
  gRNA
tcggatacccagcttctcac

SEQ ID NO: 93353 - DNA, 20 bp, Artificial Sequence
  MKO10093353_B_Ilvbl
  gRNA
catgaggctattgggcaact

SEQ ID NO: 93354 - DNA, 20 bp, Artificial Sequence
  MKO10093354_B_Immp1l
  gRNA
attaatcatcagaaaatctc

SEQ ID NO: 93355 - DNA, 20 bp, Artificial Sequence
  MKO10093355_B_Immp1l
  gRNA
tttggatgccataaaaatgt

SEQ ID NO: 93356 - DNA, 20 bp, Artificial Sequence
  MKO10093356_B_Immp1l
  gRNA
cggctcttaaatacatcaga

SEQ ID NO: 93357 - DNA, 20 bp, Artificial Sequence
  MKO10093357_B_Immp2l
  gRNA
aagagagtgatcgctcttga

SEQ ID NO: 93358 - DNA, 20 bp, Artificial Sequence
  MKO10093358_B_Immp2l
  gRNA
aaagtaccacatctgaggac

SEQ ID NO: 93359 - DNA, 20 bp, Artificial Sequence
  MKO10093359_B_Immp2l
  gRNA
ccacttaccccttctcaccg

SEQ ID NO: 93360 - DNA, 20 bp, Artificial Sequence
  MKO10093360_B_Immt
  gRNA
tactccacttcaagcagttc

SEQ ID NO: 93361 - DNA, 20 bp, Artificial Sequence
  MKO10093361_B_Immt
  gRNA
tttcatcacctctgatacac

SEQ ID NO: 93362 - DNA, 20 bp, Artificial Sequence
  MKO10093362_B_Immt
  gRNA
gcactatcctgtatgccaaa

SEQ ID NO: 93363 - DNA, 20 bp, Artificial Sequence
  MKO10093363_B_Imp3
  gRNA
gcgccagctcgcgcaccgct

SEQ ID NO: 93364 - DNA, 20 bp, Artificial Sequence
  MKO10093364_B_Imp3
  gRNA
gtaccggctgcagcggcgcg

SEQ ID NO: 93365 - DNA, 20 bp, Artificial Sequence
  MKO10093365_B_Imp3
  gRNA
ggagcagggtcatgtccgcg

SEQ ID NO: 93366 - DNA, 20 bp, Artificial Sequence
  MKO10093366_B_Imp4
  gRNA
tgttctctagctccgtcggg

SEQ ID NO: 93367 - DNA, 20 bp, Artificial Sequence
  MKO10093367_B_Imp4
  gRNA
gtaactcggtgggaatcagc

SEQ ID NO: 93368 - DNA, 20 bp, Artificial Sequence
  MKO10093368_B_Imp4
  gRNA
tgattcccaccgagttacgc

SEQ ID NO: 93369 - DNA, 20 bp, Artificial Sequence
  MKO10093369_B_Impa1
  gRNA
gaagttagtcgttccatcaa

SEQ ID NO: 93370 - DNA, 20 bp, Artificial Sequence
  MKO10093370_B_Impa1
  gRNA
aagataagatgtacaccggc

SEQ ID NO: 93371 - DNA, 20 bp, Artificial Sequence
  MKO10093371_B_Impa1
  gRNA
gccaattgaaacagctacaa

SEQ ID NO: 93372 - DNA, 20 bp, Artificial Sequence
  MKO10093372_B_Impa2
  gRNA
tgctcacccacagcccgacc

SEQ ID NO: 93373 - DNA, 20 bp, Artificial Sequence
  MKO10093373_B_Impa2
  gRNA
ttgtttctgagttgcgaaag

SEQ ID NO: 93374 - DNA, 20 bp, Artificial Sequence
  MKO10093374_B_Impa2
  gRNA
acgaaccccacctgtctccc

SEQ ID NO: 93375 - DNA, 20 bp, Artificial Sequence
  MKO10093375_B_Impact
  gRNA
cttagcgctccctggctgaa

SEQ ID NO: 93376 - DNA, 20 bp, Artificial Sequence
  MKO10093376_B_Impact
  gRNA
gatgttgccaagtgagtacc

SEQ ID NO: 93377 - DNA, 20 bp, Artificial Sequence
  MKO10093377_B_Impact
  gRNA
ctgtaaacaaagtgtccatt

SEQ ID NO: 93378 - DNA, 20 bp, Artificial Sequence
  MKO10093378_B_Impad1
  gRNA
ctcccactagataaatactg

SEQ ID NO: 93379 - DNA, 20 bp, Artificial Sequence
  MKO10093379_B_Impad1
  gRNA
tcgaaagtatgtcactacca

SEQ ID NO: 93380 - DNA, 20 bp, Artificial Sequence
  MKO10093380_B_Impad1
  gRNA
caggttgctcttcagacgtt

SEQ ID NO: 93381 - DNA, 20 bp, Artificial Sequence
  MKO10093381_B_Impdh1
  gRNA
caatgaagtacggaaggtca

SEQ ID NO: 93382 - DNA, 20 bp, Artificial Sequence
  MKO10093382_B_Impdh1
  gRNA
acatcacccacagtatgtga

SEQ ID NO: 93383 - DNA, 20 bp, Artificial Sequence
  MKO10093383_B_Impdh1
  gRNA
agcgacttcctgatcctccc

SEQ ID NO: 93384 - DNA, 20 bp, Artificial Sequence
  MKO10093384_B_Impdh2
  gRNA
caatgaagttcggaaagtga

SEQ ID NO: 93385 - DNA, 20 bp, Artificial Sequence
  MKO10093385_B_Impdh2
  gRNA
ttgtagcttacaggaggtat

SEQ ID NO: 93386 - DNA, 20 bp, Artificial Sequence
  MKO10093386_B_Impdh2
  gRNA
cacccacctcttccaagaac

SEQ ID NO: 93387 - DNA, 20 bp, Artificial Sequence
  MKO10093387_B_Impg1
  gRNA
gcacctagatcttcttcagc

SEQ ID NO: 93388 - DNA, 20 bp, Artificial Sequence
  MKO10093388_B_Impg1
  gRNA
ctttcaattgtttcgattct

SEQ ID NO: 93389 - DNA, 20 bp, Artificial Sequence
  MKO10093389_B_Impg1
  gRNA
agcacctactgaagcccctg

SEQ ID NO: 93390 - DNA, 20 bp, Artificial Sequence
  MKO10093390_B_Impg2
  gRNA
cgatctattctgttcccaaa

SEQ ID NO: 93391 - DNA, 20 bp, Artificial Sequence
  MKO10093391_B_Impg2
  gRNA
cccacaggactgatccttgc

SEQ ID NO: 93392 - DNA, 20 bp, Artificial Sequence
  MKO10093392_B_Impg2
  gRNA
tcctgcaaggatcagtcctg

SEQ ID NO: 93393 - DNA, 20 bp, Artificial Sequence
  MKO10093393_B_Inadl
  gRNA
agaatgtgatagctccggga

SEQ ID NO: 93394 - DNA, 20 bp, Artificial Sequence
  MKO10093394_B_Inadl
  gRNA
ctcaccggtttggagctttc

SEQ ID NO: 93395 - DNA, 20 bp, Artificial Sequence
  MKO10093395_B_Inadl
  gRNA
ttattaagactgccccaacc

SEQ ID NO: 93396 - DNA, 20 bp, Artificial Sequence
  MKO10093396_B_Ina
  gRNA
gaagagacgcggtttagcac

SEQ ID NO: 93397 - DNA, 20 bp, Artificial Sequence
  MKO10093397_B_Ina
  gRNA
acgccaccttcgggaatacc

SEQ ID NO: 93398 - DNA, 20 bp, Artificial Sequence
  MKO10093398_B_Ina
  gRNA
acattgagatcgcagcttac

SEQ ID NO: 93399 - DNA, 20 bp, Artificial Sequence
  MKO10093399_B_Inca1
  gRNA
cactacaaaatactttgacg

SEQ ID NO: 93400 - DNA, 20 bp, Artificial Sequence
  MKO10093400_B_Inca1
  gRNA
gtttgtcctaccagaattgg

SEQ ID NO: 93401 - DNA, 20 bp, Artificial Sequence
  MKO10093401_B_Inca1
  gRNA
cctagcctgcaccctcttga

SEQ ID NO: 93402 - DNA, 20 bp, Artificial Sequence
  MKO10093402_B_Incenp
  gRNA
gaggcgggtgtctaacattc

SEQ ID NO: 93403 - DNA, 20 bp, Artificial Sequence
  MKO10093403_B_Incenp
  gRNA
tccttcaggtcacagttacc

SEQ ID NO: 93404 - DNA, 20 bp, Artificial Sequence
  MKO10093404_B_Incenp
  gRNA
gttgaagtgcctcagaatgt

SEQ ID NO: 93405 - DNA, 20 bp, Artificial Sequence
  MKO10093405_B_Inf2
  gRNA
agcgtcagtgcgtggccctc

SEQ ID NO: 93406 - DNA, 20 bp, Artificial Sequence
  MKO10093406_B_Inf2
  gRNA
cactcatgatgacgctgaag

SEQ ID NO: 93407 - DNA, 20 bp, Artificial Sequence
  MKO10093407_B_Inf2
  gRNA
cattccagggctacagctgc

SEQ ID NO: 93408 - DNA, 20 bp, Artificial Sequence
  MKO10093408_B_Ing1
  gRNA
ctcgctctccccacggcact

SEQ ID NO: 93409 - DNA, 20 bp, Artificial Sequence
  MKO10093409_B_Ing1
  gRNA
tcagcgagacgttcctctgc

SEQ ID NO: 93410 - DNA, 20 bp, Artificial Sequence
  MKO10093410_B_Ing1
  gRNA
tggatctgctccccgttggc

SEQ ID NO: 93411 - DNA, 20 bp, Artificial Sequence
  MKO10093411_B_Ing2
  gRNA
tgtcacccagatgctcgaat

SEQ ID NO: 93412 - DNA, 20 bp, Artificial Sequence
  MKO10093412_B_Ing2
  gRNA
tctccaccaattcgagcatc

SEQ ID NO: 93413 - DNA, 20 bp, Artificial Sequence
  MKO10093413_B_Ing2
  gRNA
agaagatctttccggttgac

SEQ ID NO: 93414 - DNA, 20 bp, Artificial Sequence
  MKO10093414_B_Ing3
  gRNA
caaagaagaataaacccgag

SEQ ID NO: 93415 - DNA, 20 bp, Artificial Sequence
  MKO10093415_B_Ing3
  gRNA
catctgttcttctcgccact

SEQ ID NO: 93416 - DNA, 20 bp, Artificial Sequence
  MKO10093416_B_Ing3
  gRNA
tacttaccaaatcataaatc

SEQ ID NO: 93417 - DNA, 20 bp, Artificial Sequence
  MKO10093417_B_Ing4
  gRNA
ccttcagatcagcctcaaaa

SEQ ID NO: 93418 - DNA, 20 bp, Artificial Sequence
  MKO10093418_B_Ing4
  gRNA
tgtacgtaccctctgtcctt

SEQ ID NO: 93419 - DNA, 20 bp, Artificial Sequence
  MKO10093419_B_Ing4
  gRNA
tatgacagctcttctagcaa

SEQ ID NO: 93420 - DNA, 20 bp, Artificial Sequence
  MKO10093420_B_Ing5
  gRNA
ccaggtcagcatcaagtctt

SEQ ID NO: 93421 - DNA, 20 bp, Artificial Sequence
  MKO10093421_B_Ing5
  gRNA
aggccggcggacgtcagaag

SEQ ID NO: 93422 - DNA, 20 bp, Artificial Sequence
  MKO10093422_B_Ing5
  gRNA
accttccctgtgaacttcag

SEQ ID NO: 93423 - DNA, 20 bp, Artificial Sequence
  MKO10093423_B_Inha
  gRNA
cgaggcagacgccttattcc

SEQ ID NO: 93424 - DNA, 20 bp, Artificial Sequence
  MKO10093424_B_Inha
  gRNA
cgtagggacctcatgctccc

SEQ ID NO: 93425 - DNA, 20 bp, Artificial Sequence
  MKO10093425_B_Inha
  gRNA
ggcatgcgcagcgggttcct

SEQ ID NO: 93426 - DNA, 20 bp, Artificial Sequence
  MKO10093426_B_Inhba
  gRNA
cggggctgagccgtgcccct

SEQ ID NO: 93427 - DNA, 20 bp, Artificial Sequence
  MKO10093427_B_Inhba
  gRNA
ccccgcctacgcctgcgatg

SEQ ID NO: 93428 - DNA, 20 bp, Artificial Sequence
  MKO10093428_B_Inhba
  gRNA
ccgaagaccaccctcatcgc

SEQ ID NO: 93429 - DNA, 20 bp, Artificial Sequence
  MKO10093429_B_Inhbb
  gRNA
tcaccggggtccacgaacac

SEQ ID NO: 93430 - DNA, 20 bp, Artificial Sequence
  MKO10093430_B_Inhbb
  gRNA
ggcggcccccaacgcccgac

SEQ ID NO: 93431 - DNA, 20 bp, Artificial Sequence
  MKO10093431_B_Inhbb
  gRNA
gcagacatcgcatccgcaaa

SEQ ID NO: 93432 - DNA, 20 bp, Artificial Sequence
  MKO10093432_B_Inhbc
  gRNA
caccacgtactgacttgtca

SEQ ID NO: 93433 - DNA, 20 bp, Artificial Sequence
  MKO10093433_B_Inhbc
  gRNA
cctggcaatcgatacctcgc

SEQ ID NO: 93434 - DNA, 20 bp, Artificial Sequence
  MKO10093434_B_Inhbc
  gRNA
cataagctaactacacccgc

SEQ ID NO: 93435 - DNA, 20 bp, Artificial Sequence
  MKO10093435_B_Inhbe
  gRNA
agatctgcgtgcccgtcctg

SEQ ID NO: 93436 - DNA, 20 bp, Artificial Sequence
  MKO10093436_B_Inhbe
  gRNA
ctcactccgcaagccgctag

SEQ ID NO: 93437 - DNA, 20 bp, Artificial Sequence
  MKO10093437_B_Inhbe
  gRNA
gtcccgcagcggtgctgtta

SEQ ID NO: 93438 - DNA, 20 bp, Artificial Sequence
  MKO10093438_B_Inip
  gRNA
gctttcttcattcggggtca

SEQ ID NO: 93439 - DNA, 20 bp, Artificial Sequence
  MKO10093439_B_Inip
  gRNA
catgctcacgcacattcctc

SEQ ID NO: 93440 - DNA, 20 bp, Artificial Sequence
  MKO10093440_B_Inip
  gRNA
ctccagaccctctcttacca

SEQ ID NO: 93441 - DNA, 20 bp, Artificial Sequence
  MKO10093441_B_Inmt
  gRNA
gtcctgatcgacattggctc

SEQ ID NO: 93442 - DNA, 20 bp, Artificial Sequence
  MKO10093442_B_Inmt
  gRNA
ctctaccagaccttctctac

SEQ ID NO: 93443 - DNA, 20 bp, Artificial Sequence
  MKO10093443_B_Inmt
  gRNA
gccagagtggaagctgtagt

SEQ ID NO: 93444 - DNA, 20 bp, Artificial Sequence
  MKO10093444_B_Ino80b
  gRNA
ccgctcctagcgggcgtgga

SEQ ID NO: 93445 - DNA, 20 bp, Artificial Sequence
  MKO10093445_B_Ino80b
  gRNA
tccttccgcaggggaaacgc

SEQ ID NO: 93446 - DNA, 20 bp, Artificial Sequence
  MKO10093446_B_Ino80b
  gRNA
ctctggagcagtaccgcgcc

SEQ ID NO: 93447 - DNA, 20 bp, Artificial Sequence
  MKO10093447_B_Ino80c
  gRNA
ttaggatcgttcagttgcca

SEQ ID NO: 93448 - DNA, 20 bp, Artificial Sequence
  MKO10093448_B_Ino80c
  gRNA
catatgcttaccacaaagtt

SEQ ID NO: 93449 - DNA, 20 bp, Artificial Sequence
  MKO10093449_B_Ino80c
  gRNA
agccatgaatgagagtaaaa

SEQ ID NO: 93450 - DNA, 20 bp, Artificial Sequence
  MKO10093450_B_Ino80d
  gRNA
tagcctgacggtgcctaccc

SEQ ID NO: 93451 - DNA, 20 bp, Artificial Sequence
  MKO10093451_B_Ino80d
  gRNA
caggtcagacgacgacgaca

SEQ ID NO: 93452 - DNA, 20 bp, Artificial Sequence
  MKO10093452_B_Ino80d
  gRNA
gtcgagactctgcccgctcc

SEQ ID NO: 93453 - DNA, 20 bp, Artificial Sequence
  MKO10093453_B_Ino80e
  gRNA
cagcagatgttcagcgatgc

SEQ ID NO: 93454 - DNA, 20 bp, Artificial Sequence
  MKO10093454_B_Ino80e
  gRNA
caactcaccgagctcaggta

SEQ ID NO: 93455 - DNA, 20 bp, Artificial Sequence
  MKO10093455_B_Ino80e
  gRNA
ctgacacgccagcccctaag

SEQ ID NO: 93456 - DNA, 20 bp, Artificial Sequence
  MKO10093456_B_Ino80
  gRNA
cagtaccagtactacagtgc

SEQ ID NO: 93457 - DNA, 20 bp, Artificial Sequence
  MKO10093457_B_Ino80
  gRNA
tttaagtgatgagtccagtg

SEQ ID NO: 93458 - DNA, 20 bp, Artificial Sequence
  MKO10093458_B_Ino80
  gRNA
tccagaatcaaaatctgaca

SEQ ID NO: 93459 - DNA, 20 bp, Artificial Sequence
  MKO10093459_B_Inpp1
  gRNA
tgagccagcgcttccgatgc

SEQ ID NO: 93460 - DNA, 20 bp, Artificial Sequence
  MKO10093460_B_Inpp1
  gRNA
gctgattgatgactcccatt

SEQ ID NO: 93461 - DNA, 20 bp, Artificial Sequence
  MKO10093461_B_Inpp1
  gRNA
cccaaaacctaactacttta

SEQ ID NO: 93462 - DNA, 20 bp, Artificial Sequence
  MKO10093462_B_Inpp4a
  gRNA
tgaggatgatagtctgatac

SEQ ID NO: 93463 - DNA, 20 bp, Artificial Sequence
  MKO10093463_B_Inpp4a
  gRNA
atgcgagttcaagatgatgg

SEQ ID NO: 93464 - DNA, 20 bp, Artificial Sequence
  MKO10093464_B_Inpp4a
  gRNA
gacctcctgacttaaaacct

SEQ ID NO: 93465 - DNA, 20 bp, Artificial Sequence
  MKO10093465_B_Inpp4b
  gRNA
ctcgtcagggtctgctccac

SEQ ID NO: 93466 - DNA, 20 bp, Artificial Sequence
  MKO10093466_B_Inpp4b
  gRNA
gccagcctgcagggatcttg

SEQ ID NO: 93467 - DNA, 20 bp, Artificial Sequence
  MKO10093467_B_Inpp4b
  gRNA
ccgagaatgaattccaactg

SEQ ID NO: 93468 - DNA, 20 bp, Artificial Sequence
  MKO10093468_B_Inpp5a
  gRNA
cgaggcctccatgtcccatg

SEQ ID NO: 93469 - DNA, 20 bp, Artificial Sequence
  MKO10093469_B_Inpp5a
  gRNA
acgcaatgaaagaatacaac

SEQ ID NO: 93470 - DNA, 20 bp, Artificial Sequence
  MKO10093470_B_Inpp5a
  gRNA
cagtgcaaggccatgaagtg

SEQ ID NO: 93471 - DNA, 20 bp, Artificial Sequence
  MKO10093471_B_Inpp5b
  gRNA
acacaccagaacgttcctcc

SEQ ID NO: 93472 - DNA, 20 bp, Artificial Sequence
  MKO10093472_B_Inpp5b
  gRNA
ttacctacctggacaggctc

SEQ ID NO: 93473 - DNA, 20 bp, Artificial Sequence
  MKO10093473_B_Inpp5b
  gRNA
aggatgtagagttcaccatc

SEQ ID NO: 93474 - DNA, 20 bp, Artificial Sequence
  MKO10093474_B_Inpp5d
  gRNA
catccgaaggtgtccccatg

SEQ ID NO: 93475 - DNA, 20 bp, Artificial Sequence
  MKO10093475_B_Inpp5d
  gRNA
tcttgtaaaagtcgatgagc

SEQ ID NO: 93476 - DNA, 20 bp, Artificial Sequence
  MKO10093476_B_Inpp5d
  gRNA
ggaattgtgtttacacttac

SEQ ID NO: 93477 - DNA, 20 bp, Artificial Sequence
  MKO10093477_B_Inpp5e
  gRNA
acatgtccctgtttatccgt

SEQ ID NO: 93478 - DNA, 20 bp, Artificial Sequence
  MKO10093478_B_Inpp5e
  gRNA
ctgagtgtagtcagcctcgg

SEQ ID NO: 93479 - DNA, 20 bp, Artificial Sequence
  MKO10093479_B_Inpp5e
  gRNA
cgtgtctcagatcaagacca

SEQ ID NO: 93480 - DNA, 20 bp, Artificial Sequence
  MKO10093480_B_Inpp5f
  gRNA
ccaggcaagaagcagatccg

SEQ ID NO: 93481 - DNA, 20 bp, Artificial Sequence
  MKO10093481_B_Inpp5f
  gRNA
ccacggatctgcttcttgcc

SEQ ID NO: 93482 - DNA, 20 bp, Artificial Sequence
  MKO10093482_B_Inpp5f
  gRNA
aagtgacaatacagcaatct

SEQ ID NO: 93483 - DNA, 20 bp, Artificial Sequence
  MKO10093483_B_Inpp5j
  gRNA
agtcgcctcagtctcaatcc

SEQ ID NO: 93484 - DNA, 20 bp, Artificial Sequence
  MKO10093484_B_Inpp5j
  gRNA
ccatgaagagctcactccac

SEQ ID NO: 93485 - DNA, 20 bp, Artificial Sequence
  MKO10093485_B_Inpp5j
  gRNA
cttgagccgcttgttgatca

SEQ ID NO: 93486 - DNA, 20 bp, Artificial Sequence
  MKO10093486_B_Inpp5k
  gRNA
tccttacccagtacccgtag

SEQ ID NO: 93487 - DNA, 20 bp, Artificial Sequence
  MKO10093487_B_Inpp5k
  gRNA
gtataacaatgaccagcgcc

SEQ ID NO: 93488 - DNA, 20 bp, Artificial Sequence
  MKO10093488_B_Inpp5k
  gRNA
gaacaaccaagacctgaatc

SEQ ID NO: 93489 - DNA, 20 bp, Artificial Sequence
  MKO10093489_B_Inppl1
  gRNA
ataggcctataagctcaccc

SEQ ID NO: 93490 - DNA, 20 bp, Artificial Sequence
  MKO10093490_B_Inppl1
  gRNA
acctaccgcattctgccaga

SEQ ID NO: 93491 - DNA, 20 bp, Artificial Sequence
  MKO10093491_B_Inppl1
  gRNA
tctcctggaagcactcctaa

SEQ ID NO: 93492 - DNA, 20 bp, Artificial Sequence
  MKO10093492_B_Ins1
  gRNA
cctccaacgccaaggtctga

SEQ ID NO: 93493 - DNA, 20 bp, Artificial Sequence
  MKO10093493_B_Ins1
  gRNA
acccaagtcccgccgtgaag

SEQ ID NO: 93494 - DNA, 20 bp, Artificial Sequence
  MKO10093494_B_Ins1
  gRNA
tagagagcctctaccaggtg

SEQ ID NO: 93495 - DNA, 20 bp, Artificial Sequence
  MKO10093495_B_Ins2
  gRNA
ctccctggcagtggcacaac

SEQ ID NO: 93496 - DNA, 20 bp, Artificial Sequence
  MKO10093496_B_Ins2
  gRNA
acccatgtcccgccgtgaag

SEQ ID NO: 93497 - DNA, 20 bp, Artificial Sequence
  MKO10093497_B_Ins2
  gRNA
attgtttcaacatggccctg

SEQ ID NO: 93498 - DNA, 20 bp, Artificial Sequence
  MKO10093498_B_Insc
  gRNA
tctgtgccgcatcatagcca

SEQ ID NO: 93499 - DNA, 20 bp, Artificial Sequence
  MKO10093499_B_Insc
  gRNA
cgagcactttggtcagctac

SEQ ID NO: 93500 - DNA, 20 bp, Artificial Sequence
  MKO10093500_B_Insc
  gRNA
cgtgatgtagatattgtctg

SEQ ID NO: 93501 - DNA, 20 bp, Artificial Sequence
  MKO10093501_B_Insig1
  gRNA
cgatggtaatcccaagccca

SEQ ID NO: 93502 - DNA, 20 bp, Artificial Sequence
  MKO10093502_B_Insig1
  gRNA
atttcctctatatccgttct

SEQ ID NO: 93503 - DNA, 20 bp, Artificial Sequence
  MKO10093503_B_Insig1
  gRNA
ggagccaagaacggatatag

SEQ ID NO: 93504 - DNA, 20 bp, Artificial Sequence
  MKO10093504_B_Insig2
  gRNA
acccaactgttagtctacaa

SEQ ID NO: 93505 - DNA, 20 bp, Artificial Sequence
  MKO10093505_B_Insig2
  gRNA
caccattgtagactaacagt

SEQ ID NO: 93506 - DNA, 20 bp, Artificial Sequence
  MKO10093506_B_Insig2
  gRNA
agcttaccattgccagttga

SEQ ID NO: 93507 - DNA, 20 bp, Artificial Sequence
  MKO10093507_B_Insl3
  gRNA
gtgcaccgctgctgtcttac

SEQ ID NO: 93508 - DNA, 20 bp, Artificial Sequence
  MKO10093508_B_Insl3
  gRNA
gcagagcttggcgcgtgcct

SEQ ID NO: 93509 - DNA, 20 bp, Artificial Sequence
  MKO10093509_B_Insl3
  gRNA
cccgcaccagcgtgcgcacc

SEQ ID NO: 93510 - DNA, 20 bp, Artificial Sequence
  MKO10093510_B_Insl5
  gRNA
taactgttctcacgtagtcc

SEQ ID NO: 93511 - DNA, 20 bp, Artificial Sequence
  MKO10093511_B_Insl5
  gRNA
cagagcttgcagatctcgtc

SEQ ID NO: 93512 - DNA, 20 bp, Artificial Sequence
  MKO10093512_B_Insl5
  gRNA
ctgtcctgagagatccgtct

SEQ ID NO: 93513 - DNA, 20 bp, Artificial Sequence
  MKO10093513_B_Insl6
  gRNA
tttgctcctccatctcgaac

SEQ ID NO: 93514 - DNA, 20 bp, Artificial Sequence
  MKO10093514_B_Insl6
  gRNA
ttcttctgagagacgcctgc

SEQ ID NO: 93515 - DNA, 20 bp, Artificial Sequence
  MKO10093515_B_Insl6
  gRNA
ctttccccactactcacgca

SEQ ID NO: 93516 - DNA, 20 bp, Artificial Sequence
  MKO10093516_B_Insm1
  gRNA
ctcggggttgccgaagtgcg

SEQ ID NO: 93517 - DNA, 20 bp, Artificial Sequence
  MKO10093517_B_Insm1
  gRNA
ttgtgctgcgccagcgcgaa

SEQ ID NO: 93518 - DNA, 20 bp, Artificial Sequence
  MKO10093518_B_Insm1
  gRNA
ccacccgtctgagaatagac

SEQ ID NO: 93519 - DNA, 20 bp, Artificial Sequence
  MKO10093519_B_Insm2
  gRNA
ggtactcgacgcgcacgatg

SEQ ID NO: 93520 - DNA, 20 bp, Artificial Sequence
  MKO10093520_B_Insm2
  gRNA
cacgggccgagcccgtctca

SEQ ID NO: 93521 - DNA, 20 bp, Artificial Sequence
  MKO10093521_B_Insm2
  gRNA
cgtcgtcctgcggaggtgcg

SEQ ID NO: 93522 - DNA, 20 bp, Artificial Sequence
  MKO10093522_B_Insrr
  gRNA
cacagcgccaggactcatat

SEQ ID NO: 93523 - DNA, 20 bp, Artificial Sequence
  MKO10093523_B_Insrr
  gRNA
gctgccctcgtagatgccga

SEQ ID NO: 93524 - DNA, 20 bp, Artificial Sequence
  MKO10093524_B_Insrr
  gRNA
ggatgaggtttccctccacg

SEQ ID NO: 93525 - DNA, 20 bp, Artificial Sequence
  MKO10093525_B_Insr
  gRNA
cccctcggatgttgatgatc

SEQ ID NO: 93526 - DNA, 20 bp, Artificial Sequence
  MKO10093526_B_Insr
  gRNA
ttgttccggatgtccatacc

SEQ ID NO: 93527 - DNA, 20 bp, Artificial Sequence
  MKO10093527_B_Insr
  gRNA
tcttctcaccttcgaggatt

SEQ ID NO: 93528 - DNA, 20 bp, Artificial Sequence
  MKO10093528_B_Ints10
  gRNA
tgtactcactccgtaagaac

SEQ ID NO: 93529 - DNA, 20 bp, Artificial Sequence
  MKO10093529_B_Ints10
  gRNA
gcatcatcacgtcagcattg

SEQ ID NO: 93530 - DNA, 20 bp, Artificial Sequence
  MKO10093530_B_Ints10
  gRNA
ggtttatttgaaacccttcc

SEQ ID NO: 93531 - DNA, 20 bp, Artificial Sequence
  MKO10093531_B_Ints12
  gRNA
atgggagaggatcgtgtctc

SEQ ID NO: 93532 - DNA, 20 bp, Artificial Sequence
  MKO10093532_B_Ints12
  gRNA
attcaagagaaccgaagtta

SEQ ID NO: 93533 - DNA, 20 bp, Artificial Sequence
  MKO10093533_B_Ints12
  gRNA
agccatactcaaatccttgc

SEQ ID NO: 93534 - DNA, 20 bp, Artificial Sequence
  MKO10093534_B_Ints1
  gRNA
ggtatacattgaagactcgc

SEQ ID NO: 93535 - DNA, 20 bp, Artificial Sequence
  MKO10093535_B_Ints1
  gRNA
agccatttctccatcgatta

SEQ ID NO: 93536 - DNA, 20 bp, Artificial Sequence
  MKO10093536_B_Ints1
  gRNA
cgagattgaagccgctgagc

SEQ ID NO: 93537 - DNA, 20 bp, Artificial Sequence
  MKO10093537_B_Ints2
  gRNA
tgtaggggcctgatcaaaaa

SEQ ID NO: 93538 - DNA, 20 bp, Artificial Sequence
  MKO10093538_B_Ints2
  gRNA
ctttgagagtgcagtgtact

SEQ ID NO: 93539 - DNA, 20 bp, Artificial Sequence
  MKO10093539_B_Ints2
  gRNA
tccatttctaacacgcagca

SEQ ID NO: 93540 - DNA, 20 bp, Artificial Sequence
  MKO10093540_B_Ints3
  gRNA
ctctctctcggagacaccag

SEQ ID NO: 93541 - DNA, 20 bp, Artificial Sequence
  MKO10093541_B_Ints3
  gRNA
actagtaaagagtggagttc

SEQ ID NO: 93542 - DNA, 20 bp, Artificial Sequence
  MKO10093542_B_Ints3
  gRNA
ctaggcagatctcctcatgc

SEQ ID NO: 93543 - DNA, 20 bp, Artificial Sequence
  MKO10093543_B_Ints4
  gRNA
tggctttacacagatctatg

SEQ ID NO: 93544 - DNA, 20 bp, Artificial Sequence
  MKO10093544_B_Ints4
  gRNA
attctctccagactgcataa

SEQ ID NO: 93545 - DNA, 20 bp, Artificial Sequence
  MKO10093545_B_Ints4
  gRNA
gggggtagtcaggattctct

SEQ ID NO: 93546 - DNA, 20 bp, Artificial Sequence
  MKO10093546_B_Ints5
  gRNA
ctctgactacctgagaggcg

SEQ ID NO: 93547 - DNA, 20 bp, Artificial Sequence
  MKO10093547_B_Ints5
  gRNA
tgaagcggccacgttcagac

SEQ ID NO: 93548 - DNA, 20 bp, Artificial Sequence
  MKO10093548_B_Ints5
  gRNA
cagggccacccgcacattaa

SEQ ID NO: 93549 - DNA, 20 bp, Artificial Sequence
  MKO10093549_B_Ints6
  gRNA
ctgttctgattccaccgaca

SEQ ID NO: 93550 - DNA, 20 bp, Artificial Sequence
  MKO10093550_B_Ints6
  gRNA
cgactcttggccaatcccta

SEQ ID NO: 93551 - DNA, 20 bp, Artificial Sequence
  MKO10093551_B_Ints6
  gRNA
ggctgttaccttgatagcat

SEQ ID NO: 93552 - DNA, 20 bp, Artificial Sequence
  MKO10093552_B_Ints7
  gRNA
gactctggcggatactgtga

SEQ ID NO: 93553 - DNA, 20 bp, Artificial Sequence
  MKO10093553_B_Ints7
  gRNA
caaactcggggagcagtgtg

SEQ ID NO: 93554 - DNA, 20 bp, Artificial Sequence
  MKO10093554_B_Ints7
  gRNA
cgggtacttctggaaaagcc

SEQ ID NO: 93555 - DNA, 20 bp, Artificial Sequence
  MKO10093555_B_Ints8
  gRNA
ccaggtttagcctgtttgac

SEQ ID NO: 93556 - DNA, 20 bp, Artificial Sequence
  MKO10093556_B_Ints8
  gRNA
aagttgctgcacatttgaag

SEQ ID NO: 93557 - DNA, 20 bp, Artificial Sequence
  MKO10093557_B_Ints8
  gRNA
ccaacttacacatttagttg

SEQ ID NO: 93558 - DNA, 20 bp, Artificial Sequence
  MKO10093558_B_Ints9
  gRNA
acagtccaacataatagtag

SEQ ID NO: 93559 - DNA, 20 bp, Artificial Sequence
  MKO10093559_B_Ints9
  gRNA
taggagctaaaagagtgctc

SEQ ID NO: 93560 - DNA, 20 bp, Artificial Sequence
  MKO10093560_B_Ints9
  gRNA
gcctgaattctgcttaccag

SEQ ID NO: 93561 - DNA, 20 bp, Artificial Sequence
  MKO10093561_B_Intu
  gRNA
gaaactcctctgcgggtcag

SEQ ID NO: 93562 - DNA, 20 bp, Artificial Sequence
  MKO10093562_B_Intu
  gRNA
gtccacacctgcattggccc

SEQ ID NO: 93563 - DNA, 20 bp, Artificial Sequence
  MKO10093563_B_Intu
  gRNA
ctcagaaactcaagagcgtg

SEQ ID NO: 93564 - DNA, 20 bp, Artificial Sequence
  MKO10093564_B_Invs
  gRNA
ggagggctgttctccggcta

SEQ ID NO: 93565 - DNA, 20 bp, Artificial Sequence
  MKO10093565_B_Invs
  gRNA
tatttcgaaccccacttcac

SEQ ID NO: 93566 - DNA, 20 bp, Artificial Sequence
  MKO10093566_B_Invs
  gRNA
ggctcctgtgccgagtgctc

SEQ ID NO: 93567 - DNA, 20 bp, Artificial Sequence
  MKO10093567_B_Ip6k1
  gRNA
tggccgtggactctccatcg

SEQ ID NO: 93568 - DNA, 20 bp, Artificial Sequence
  MKO10093568_B_Ip6k1
  gRNA
cgcattgcggaagccctcga

SEQ ID NO: 93569 - DNA, 20 bp, Artificial Sequence
  MKO10093569_B_Ip6k1
  gRNA
ggtgtaccacgttctcaagc

SEQ ID NO: 93570 - DNA, 20 bp, Artificial Sequence
  MKO10093570_B_Ip6k2
  gRNA
ggtacgccagcaccggaaag

SEQ ID NO: 93571 - DNA, 20 bp, Artificial Sequence
  MKO10093571_B_Ip6k2
  gRNA
gcagatgagtttggggcctc

SEQ ID NO: 93572 - DNA, 20 bp, Artificial Sequence
  MKO10093572_B_Ip6k2
  gRNA
tgctggcgtacccagtcctt

SEQ ID NO: 93573 - DNA, 20 bp, Artificial Sequence
  MKO10093573_B_Ip6k3
  gRNA
gtaccatcacagtgcgtctc

SEQ ID NO: 93574 - DNA, 20 bp, Artificial Sequence
  MKO10093574_B_Ip6k3
  gRNA
ctgccagagagctaccgctc

SEQ ID NO: 93575 - DNA, 20 bp, Artificial Sequence
  MKO10093575_B_Ip6k3
  gRNA
actgggagcacagacgagtc

SEQ ID NO: 93576 - DNA, 20 bp, Artificial Sequence
  MKO10093576_B_Ipcef1
  gRNA
atgttacagtgagagcgagc

SEQ ID NO: 93577 - DNA, 20 bp, Artificial Sequence
  MKO10093577_B_Ipcef1
  gRNA
ccaccaggaatccatcacaa

SEQ ID NO: 93578 - DNA, 20 bp, Artificial Sequence
  MKO10093578_B_Ipcef1
  gRNA
ctttgcagcagagaatttgc

SEQ ID NO: 93579 - DNA, 20 bp, Artificial Sequence
  MKO10093579_B_Ipmk
  gRNA
ttaccctcatgccgagcacc

SEQ ID NO: 93580 - DNA, 20 bp, Artificial Sequence
  MKO10093580_B_Ipmk
  gRNA
ttaggcctcttccatagtgc

SEQ ID NO: 93581 - DNA, 20 bp, Artificial Sequence
  MKO10093581_B_Ipmk
  gRNA
cctaacgaaagagaccctga

SEQ ID NO: 93582 - DNA, 20 bp, Artificial Sequence
  MKO10093582_B_Ipo11
  gRNA
cgaacactgctatcgttaaa

SEQ ID NO: 93583 - DNA, 20 bp, Artificial Sequence
  MKO10093583_B_Ipo11
  gRNA
gccaccgtacatttatatca

SEQ ID NO: 93584 - DNA, 20 bp, Artificial Sequence
  MKO10093584_B_Ipo11
  gRNA
ctttaatgaaccaataaacc

SEQ ID NO: 93585 - DNA, 20 bp, Artificial Sequence
  MKO10093585_B_Ipo13
  gRNA
aatccatactcctcgtcaga

SEQ ID NO: 93586 - DNA, 20 bp, Artificial Sequence
  MKO10093586_B_Ipo13
  gRNA
ccggccagtctacttccagc

SEQ ID NO: 93587 - DNA, 20 bp, Artificial Sequence
  MKO10093587_B_Ipo13
  gRNA
cagcaatacggcagatgcca

SEQ ID NO: 93588 - DNA, 20 bp, Artificial Sequence
  MKO10093588_B_Ipo4
  gRNA
gcagaaggctgaacaatcgc

SEQ ID NO: 93589 - DNA, 20 bp, Artificial Sequence
  MKO10093589_B_Ipo4
  gRNA
ccagatccgccagtttgcag

SEQ ID NO: 93590 - DNA, 20 bp, Artificial Sequence
  MKO10093590_B_Ipo4
  gRNA
agtgccagtacctctttctc

SEQ ID NO: 93591 - DNA, 20 bp, Artificial Sequence
  MKO10093591_B_Ipo5
  gRNA
agttcagtgtatgcaagatc

SEQ ID NO: 93592 - DNA, 20 bp, Artificial Sequence
  MKO10093592_B_Ipo5
  gRNA
aagctgcccttcacatattt

SEQ ID NO: 93593 - DNA, 20 bp, Artificial Sequence
  MKO10093593_B_Ipo5
  gRNA
ctatttctaggctagacaaa

SEQ ID NO: 93594 - DNA, 20 bp, Artificial Sequence
  MKO10093594_B_Ipo7
  gRNA
taaacatacctgataagctc

SEQ ID NO: 93595 - DNA, 20 bp, Artificial Sequence
  MKO10093595_B_Ipo7
  gRNA
ataaagcgatccttcagaac

SEQ ID NO: 93596 - DNA, 20 bp, Artificial Sequence
  MKO10093596_B_Ipo7
  gRNA
cctggtgtggcttcccgatc

SEQ ID NO: 93597 - DNA, 20 bp, Artificial Sequence
  MKO10093597_B_Ipo8
  gRNA
gtggcctacctcaccaaatc

SEQ ID NO: 93598 - DNA, 20 bp, Artificial Sequence
  MKO10093598_B_Ipo8
  gRNA
aatattctatgctctcgttc

SEQ ID NO: 93599 - DNA, 20 bp, Artificial Sequence
  MKO10093599_B_Ipo8
  gRNA
gactatgatccgaagcaagc

SEQ ID NO: 93600 - DNA, 20 bp, Artificial Sequence
  MKO10093600_B_Ipo9
  gRNA
agtcatcttgaaacagtatg

SEQ ID NO: 93601 - DNA, 20 bp, Artificial Sequence
  MKO10093601_B_Ipo9
  gRNA
gatgtataagatattcacca

SEQ ID NO: 93602 - DNA, 20 bp, Artificial Sequence
  MKO10093602_B_Ipo9
  gRNA
ttcagaatttggtgttcacc

SEQ ID NO: 93603 - DNA, 20 bp, Artificial Sequence
  MKO10093603_B_Ippk
  gRNA
aaccttaccttcttcttatt

SEQ ID NO: 93604 - DNA, 20 bp, Artificial Sequence
  MKO10093604_B_Ippk
  gRNA
atgctgaagtatctcttctg

SEQ ID NO: 93605 - DNA, 20 bp, Artificial Sequence
  MKO10093605_B_Ippk
  gRNA
aagatacagtgtgaaagacc

SEQ ID NO: 93606 - DNA, 20 bp, Artificial Sequence
  MKO10093606_B_Ipp
  gRNA
ttgataccttcagccagtac

SEQ ID NO: 93607 - DNA, 20 bp, Artificial Sequence
  MKO10093607_B_Ipp
  gRNA
catagctgtgactaatgtcc

SEQ ID NO: 93608 - DNA, 20 bp, Artificial Sequence
  MKO10093608_B_Ipp
  gRNA
tcttcttagctgcaatgcag

SEQ ID NO: 93609 - DNA, 20 bp, Artificial Sequence
  MKO10093609_B_Iqca
  gRNA
tggagtgatgggtcgcattc

SEQ ID NO: 93610 - DNA, 20 bp, Artificial Sequence
  MKO10093610_B_Iqca
  gRNA
gtgtccgtactttctggatc

SEQ ID NO: 93611 - DNA, 20 bp, Artificial Sequence
  MKO10093611_B_Iqca
  gRNA
atgcggactgaacctccctg

SEQ ID NO: 93612 - DNA, 20 bp, Artificial Sequence
  MKO10093612_B_Iqcb1
  gRNA
catgttcaactgatacagaa

SEQ ID NO: 93613 - DNA, 20 bp, Artificial Sequence
  MKO10093613_B_Iqcb1
  gRNA
agaatatactacagatcaac

SEQ ID NO: 93614 - DNA, 20 bp, Artificial Sequence
  MKO10093614_B_Iqcb1
  gRNA
atgtttgtaaccttctcccc

SEQ ID NO: 93615 - DNA, 20 bp, Artificial Sequence
  MKO10093615_B_Iqcc
  gRNA
aagagccaacccccgagtgc

SEQ ID NO: 93616 - DNA, 20 bp, Artificial Sequence
  MKO10093616_B_Iqcc
  gRNA
gcaggccatcaacagtcgaa

SEQ ID NO: 93617 - DNA, 20 bp, Artificial Sequence
  MKO10093617_B_Iqcc
  gRNA
tacctcctttcgactgttga

SEQ ID NO: 93618 - DNA, 20 bp, Artificial Sequence
  MKO10093618_B_Iqcd
  gRNA
ggtactgtgcccgaagcgcc

SEQ ID NO: 93619 - DNA, 20 bp, Artificial Sequence
  MKO10093619_B_Iqcd
  gRNA
atggccagtccgtggtagga

SEQ ID NO: 93620 - DNA, 20 bp, Artificial Sequence
  MKO10093620_B_Iqcd
  gRNA
tctccgaaaacttgaacacc

SEQ ID NO: 93621 - DNA, 20 bp, Artificial Sequence
  MKO10093621_B_Iqce
  gRNA
cccgagccccacgcttacct

SEQ ID NO: 93622 - DNA, 20 bp, Artificial Sequence
  MKO10093622_B_Iqce
  gRNA
gccatacttacttggtgatg

SEQ ID NO: 93623 - DNA, 20 bp, Artificial Sequence
  MKO10093623_B_Iqce
  gRNA
cgactcaatgtcagattcaa

SEQ ID NO: 93624 - DNA, 20 bp, Artificial Sequence
  MKO10093624_B_Iqcf1
  gRNA
gtaggtgcattaagttcttc

SEQ ID NO: 93625 - DNA, 20 bp, Artificial Sequence
  MKO10093625_B_Iqcf1
  gRNA
gccggttgcttaaggctgtc

SEQ ID NO: 93626 - DNA, 20 bp, Artificial Sequence
  MKO10093626_B_Iqcf1
  gRNA
tccgcatgtggcgtatccgc

SEQ ID NO: 93627 - DNA, 20 bp, Artificial Sequence
  MKO10093627_B_Iqcf3
  gRNA
tgaatcactcctctcaagaa

SEQ ID NO: 93628 - DNA, 20 bp, Artificial Sequence
  MKO10093628_B_Iqcf3
  gRNA
cagataaagccattcttgag

SEQ ID NO: 93629 - DNA, 20 bp, Artificial Sequence
  MKO10093629_B_Iqcf3
  gRNA
agaaacagaaaacgttaacg

SEQ ID NO: 93630 - DNA, 20 bp, Artificial Sequence
  MKO10093630_B_Iqcf4
  gRNA
agggcttacctctaacttcg

SEQ ID NO: 93631 - DNA, 20 bp, Artificial Sequence
  MKO10093631_B_Iqcf4
  gRNA
tataccagcgccacgacgcc

SEQ ID NO: 93632 - DNA, 20 bp, Artificial Sequence
  MKO10093632_B_Iqcf4
  gRNA
cctgcgtccttattcagtcg

SEQ ID NO: 93633 - DNA, 20 bp, Artificial Sequence
  MKO10093633_B_Iqcf5
  gRNA
gaagaaacggcggatggctc

SEQ ID NO: 93634 - DNA, 20 bp, Artificial Sequence
  MKO10093634_B_Iqcf5
  gRNA
agccgcagatgtttctgtca

SEQ ID NO: 93635 - DNA, 20 bp, Artificial Sequence
  MKO10093635_B_Iqcf5
  gRNA
gaatgctgttcgcatcatcc

SEQ ID NO: 93636 - DNA, 20 bp, Artificial Sequence
  MKO10093636_B_Iqcf6
  gRNA
acactctgctcattatccac

SEQ ID NO: 93637 - DNA, 20 bp, Artificial Sequence
  MKO10093637_B_Iqcf6
  gRNA
ggcccgcagacgattcctcc

SEQ ID NO: 93638 - DNA, 20 bp, Artificial Sequence
  MKO10093638_B_Iqcf6
  gRNA
ctttgacctcatagcggctg

SEQ ID NO: 93639 - DNA, 20 bp, Artificial Sequence
  MKO10093639_B_Iqcg
  gRNA
agaatcttgcatctccatca

SEQ ID NO: 93640 - DNA, 20 bp, Artificial Sequence
  MKO10093640_B_Iqcg
  gRNA
aacagttacttgatgtcaaa

SEQ ID NO: 93641 - DNA, 20 bp, Artificial Sequence
  MKO10093641_B_Iqcg
  gRNA
cagtgtctccagagtcatca

SEQ ID NO: 93642 - DNA, 20 bp, Artificial Sequence
  MKO10093642_B_Iqch
  gRNA
gctgctgtaactgctagcta

SEQ ID NO: 93643 - DNA, 20 bp, Artificial Sequence
  MKO10093643_B_Iqch
  gRNA
tgaggaccttcatcagttaa

SEQ ID NO: 93644 - DNA, 20 bp, Artificial Sequence
  MKO10093644_B_Iqch
  gRNA
tggcgacctcaaaagcatcg

SEQ ID NO: 93645 - DNA, 20 bp, Artificial Sequence
  MKO10093645_B_Iqcj
  gRNA
tctgcagcatccagcgagca

SEQ ID NO: 93646 - DNA, 20 bp, Artificial Sequence
  MKO10093646_B_Iqcj
  gRNA
ttctagtcaccagctggcca

SEQ ID NO: 93647 - DNA, 20 bp, Artificial Sequence
  MKO10093647_B_Iqcj
  gRNA
aatgttattctccacatcca

SEQ ID NO: 93648 - DNA, 20 bp, Artificial Sequence
  MKO10093648_B_Iqck
  gRNA
tgaagcaggctggccattcc

SEQ ID NO: 93649 - DNA, 20 bp, Artificial Sequence
  MKO10093649_B_Iqck
  gRNA
cagggcacaggaggcatcgc

SEQ ID NO: 93650 - DNA, 20 bp, Artificial Sequence
  MKO10093650_B_Iqck
  gRNA
cctgcgatttcctgactgag

SEQ ID NO: 93651 - DNA, 20 bp, Artificial Sequence
  MKO10093651_B_Iqgap1
  gRNA
caaggtagactccgtttcta

SEQ ID NO: 93652 - DNA, 20 bp, Artificial Sequence
  MKO10093652_B_Iqgap1
  gRNA
gccctggttacctgagggcg

SEQ ID NO: 93653 - DNA, 20 bp, Artificial Sequence
  MKO10093653_B_Iqgap1
  gRNA
aggcaacccaatctcatcca

SEQ ID NO: 93654 - DNA, 20 bp, Artificial Sequence
  MKO10093654_B_Iqgap2
  gRNA
tagcaatcgtggatgatgaa

SEQ ID NO: 93655 - DNA, 20 bp, Artificial Sequence
  MKO10093655_B_Iqgap2
  gRNA
caagttcttcgctccaaaaa

SEQ ID NO: 93656 - DNA, 20 bp, Artificial Sequence
  MKO10093656_B_Iqgap2
  gRNA
tatctgtgtgtcgaaaatga

SEQ ID NO: 93657 - DNA, 20 bp, Artificial Sequence
  MKO10093657_B_Iqgap3
  gRNA
ccacgtcgtagatcttcttc

SEQ ID NO: 93658 - DNA, 20 bp, Artificial Sequence
  MKO10093658_B_Iqgap3
  gRNA
tcgcctatcagtacctctgc

SEQ ID NO: 93659 - DNA, 20 bp, Artificial Sequence
  MKO10093659_B_Iqgap3
  gRNA
ctctctgcggtagcccacat

SEQ ID NO: 93660 - DNA, 20 bp, Artificial Sequence
  MKO10093660_B_Iqsec1
  gRNA
ggcctccgtgtgcgctgttg

SEQ ID NO: 93661 - DNA, 20 bp, Artificial Sequence
  MKO10093661_B_Iqsec1
  gRNA
cttcgtgcccgacacgccag

SEQ ID NO: 93662 - DNA, 20 bp, Artificial Sequence
  MKO10093662_B_Iqsec1
  gRNA
agccgcgctcaatgagatac

SEQ ID NO: 93663 - DNA, 20 bp, Artificial Sequence
  MKO10093663_B_Iqsec2
  gRNA
ccgggaagatggtagccgtg

SEQ ID NO: 93664 - DNA, 20 bp, Artificial Sequence
  MKO10093664_B_Iqsec2
  gRNA
gccctgaactgccacccatc

SEQ ID NO: 93665 - DNA, 20 bp, Artificial Sequence
  MKO10093665_B_Iqsec2
  gRNA
agcacagcggttgatagtcc

SEQ ID NO: 93666 - DNA, 20 bp, Artificial Sequence
  MKO10093666_B_Iqsec3
  gRNA
acgggctggccccctccgcg

SEQ ID NO: 93667 - DNA, 20 bp, Artificial Sequence
  MKO10093667_B_Iqsec3
  gRNA
gccacaccgatgggggtgtc

SEQ ID NO: 93668 - DNA, 20 bp, Artificial Sequence
  MKO10093668_B_Iqsec3
  gRNA
atccagttcctgatctcacg

SEQ ID NO: 93669 - DNA, 20 bp, Artificial Sequence
  MKO10093669_B_Iqub
  gRNA
gttatttgcagtacataatg

SEQ ID NO: 93670 - DNA, 20 bp, Artificial Sequence
  MKO10093670_B_Iqub
  gRNA
aagccctctattcttctgac

SEQ ID NO: 93671 - DNA, 20 bp, Artificial Sequence
  MKO10093671_B_Iqub
  gRNA
atatccagtcagaagaatag

SEQ ID NO: 93672 - DNA, 20 bp, Artificial Sequence
  MKO10093672_B_Irak1bp1
  gRNA
cctaaggcggcaggcctgtc

SEQ ID NO: 93673 - DNA, 20 bp, Artificial Sequence
  MKO10093673_B_Irak1bp1
  gRNA
agtagaaaatgcgtatcaca

SEQ ID NO: 93674 - DNA, 20 bp, Artificial Sequence
  MKO10093674_B_Irak1bp1
  gRNA
cgaagattctcaacagaacc

SEQ ID NO: 93675 - DNA, 20 bp, Artificial Sequence
  MKO10093675_B_Irak1
  gRNA
gccttggggcagcggtgctt

SEQ ID NO: 93676 - DNA, 20 bp, Artificial Sequence
  MKO10093676_B_Irak1
  gRNA
tgcgcgaccagacagagctg

SEQ ID NO: 93677 - DNA, 20 bp, Artificial Sequence
  MKO10093677_B_Irak1
  gRNA
aagatggtagtggtggcccg

SEQ ID NO: 93678 - DNA, 20 bp, Artificial Sequence
  MKO10093678_B_Irak2
  gRNA
ccaaagccaccgaatcagcg

SEQ ID NO: 93679 - DNA, 20 bp, Artificial Sequence
  MKO10093679_B_Irak2
  gRNA
acatctaccagctgccgtcc

SEQ ID NO: 93680 - DNA, 20 bp, Artificial Sequence
  MKO10093680_B_Irak2
  gRNA
ggtggatttaccttagactg

SEQ ID NO: 93681 - DNA, 20 bp, Artificial Sequence
  MKO10093681_B_Irak3
  gRNA
gatattcgaagtatacagag

SEQ ID NO: 93682 - DNA, 20 bp, Artificial Sequence
  MKO10093682_B_Irak3
  gRNA
taccatagttgatgattaag

SEQ ID NO: 93683 - DNA, 20 bp, Artificial Sequence
  MKO10093683_B_Irak3
  gRNA
agcttccagagtatcctaga

SEQ ID NO: 93684 - DNA, 20 bp, Artificial Sequence
  MKO10093684_B_Irak4
  gRNA
gagcttcttcaccgccacga

SEQ ID NO: 93685 - DNA, 20 bp, Artificial Sequence
  MKO10093685_B_Irak4
  gRNA
agaacacagctgcgagccac

SEQ ID NO: 93686 - DNA, 20 bp, Artificial Sequence
  MKO10093686_B_Irak4
  gRNA
cgggggcaaacagctcaatc

SEQ ID NO: 93687 - DNA, 20 bp, Artificial Sequence
  MKO10093687_B_Ireb2
  gRNA
ttcgtacagcagcttccaat

SEQ ID NO: 93688 - DNA, 20 bp, Artificial Sequence
  MKO10093688_B_Ireb2
  gRNA
caggtagtctggcctcgaca

SEQ ID NO: 93689 - DNA, 20 bp, Artificial Sequence
  MKO10093689_B_Ireb2
  gRNA
tgccggggatcgtgtgattc

SEQ ID NO: 93690 - DNA, 20 bp, Artificial Sequence
  MKO10093690_B_Irf1
  gRNA
gctctgctgtgcgggtgtac

SEQ ID NO: 93691 - DNA, 20 bp, Artificial Sequence
  MKO10093691_B_Irf1
  gRNA
agcacgctgctaagcacggc

SEQ ID NO: 93692 - DNA, 20 bp, Artificial Sequence
  MKO10093692_B_Irf1
  gRNA
accctgcccacctgtgtgaa

SEQ ID NO: 93693 - DNA, 20 bp, Artificial Sequence
  MKO10093693_B_Irf2bp1
  gRNA
ccgtggcggaaggggcacgc

SEQ ID NO: 93694 - DNA, 20 bp, Artificial Sequence
  MKO10093694_B_Irf2bp1
  gRNA
ttctggcaatgtttacgcgg

SEQ ID NO: 93695 - DNA, 20 bp, Artificial Sequence
  MKO10093695_B_Irf2bp1
  gRNA
tgcaagcgtcccgccgccag

SEQ ID NO: 93696 - DNA, 20 bp, Artificial Sequence
  MKO10093696_B_Irf2bp2
  gRNA
ccgcttcaggcggtgtggtc

SEQ ID NO: 93697 - DNA, 20 bp, Artificial Sequence
  MKO10093697_B_Irf2bp2
  gRNA
cctcgtagttgacgcagccg

SEQ ID NO: 93698 - DNA, 20 bp, Artificial Sequence
  MKO10093698_B_Irf2bp2
  gRNA
ggtcaacggttctgccgcgc

SEQ ID NO: 93699 - DNA, 20 bp, Artificial Sequence
  MKO10093699_B_Irf2bpl
  gRNA
tgcgtgatgccaggcgacgc

SEQ ID NO: 93700 - DNA, 20 bp, Artificial Sequence
  MKO10093700_B_Irf2bpl
  gRNA
ccataacgctccagaccgga

SEQ ID NO: 93701 - DNA, 20 bp, Artificial Sequence
  MKO10093701_B_Irf2bpl
  gRNA
ttctccgaacccgtatgccg

SEQ ID NO: 93702 - DNA, 20 bp, Artificial Sequence
  MKO10093702_B_Irf2
  gRNA
acaacgccttcagagtctac

SEQ ID NO: 93703 - DNA, 20 bp, Artificial Sequence
  MKO10093703_B_Irf2
  gRNA
agaaccagttgagtcatctt

SEQ ID NO: 93704 - DNA, 20 bp, Artificial Sequence
  MKO10093704_B_Irf2
  gRNA
agagagagttaagcacatca

SEQ ID NO: 93705 - DNA, 20 bp, Artificial Sequence
  MKO10093705_B_Irf3
  gRNA
acgtccggcttatccttccc

SEQ ID NO: 93706 - DNA, 20 bp, Artificial Sequence
  MKO10093706_B_Irf3
  gRNA
ctaaccgcaacacttctttc

SEQ ID NO: 93707 - DNA, 20 bp, Artificial Sequence
  MKO10093707_B_Irf3
  gRNA
aacctaccgaagttatttga

SEQ ID NO: 93708 - DNA, 20 bp, Artificial Sequence
  MKO10093708_B_Irf4
  gRNA
ctgacccatacaaggtgtac

SEQ ID NO: 93709 - DNA, 20 bp, Artificial Sequence
  MKO10093709_B_Irf4
  gRNA
acaatcctgtacaccttgta

SEQ ID NO: 93710 - DNA, 20 bp, Artificial Sequence
  MKO10093710_B_Irf4
  gRNA
gctgaagccttggcgctctc

SEQ ID NO: 93711 - DNA, 20 bp, Artificial Sequence
  MKO10093711_B_Irf5
  gRNA
ttgggaggcccaggtagcgc

SEQ ID NO: 93712 - DNA, 20 bp, Artificial Sequence
  MKO10093712_B_Irf5
  gRNA
tgtcccagacccaaatctcc

SEQ ID NO: 93713 - DNA, 20 bp, Artificial Sequence
  MKO10093713_B_Irf5
  gRNA
tcccagaacgtaatcatcag

SEQ ID NO: 93714 - DNA, 20 bp, Artificial Sequence
  MKO10093714_B_Irf6
  gRNA
ctgctcctaacctgattgag

SEQ ID NO: 93715 - DNA, 20 bp, Artificial Sequence
  MKO10093715_B_Irf6
  gRNA
caggatcgtctaccccttcc

SEQ ID NO: 93716 - DNA, 20 bp, Artificial Sequence
  MKO10093716_B_Irf6
  gRNA
agagagctgatccatagctc

SEQ ID NO: 93717 - DNA, 20 bp, Artificial Sequence
  MKO10093717_B_Irf7
  gRNA
tacgaacttagccgggagct

SEQ ID NO: 93718 - DNA, 20 bp, Artificial Sequence
  MKO10093718_B_Irf7
  gRNA
acggagcaatggctgaagtg

SEQ ID NO: 93719 - DNA, 20 bp, Artificial Sequence
  MKO10093719_B_Irf7
  gRNA
cagcaatgctctgcccacac

SEQ ID NO: 93720 - DNA, 20 bp, Artificial Sequence
  MKO10093720_B_Irf8
  gRNA
acttcgctcatgcagcctgc

SEQ ID NO: 93721 - DNA, 20 bp, Artificial Sequence
  MKO10093721_B_Irf8
  gRNA
gccttctgtggatgagtaca

SEQ ID NO: 93722 - DNA, 20 bp, Artificial Sequence
  MKO10093722_B_Irf8
  gRNA
gcctatgacacacaccattc

SEQ ID NO: 93723 - DNA, 20 bp, Artificial Sequence
  MKO10093723_B_Irf9
  gRNA
caacaagagttccgaatttg

SEQ ID NO: 93724 - DNA, 20 bp, Artificial Sequence
  MKO10093724_B_Irf9
  gRNA
cgatccagctccgcagcttt

SEQ ID NO: 93725 - DNA, 20 bp, Artificial Sequence
  MKO10093725_B_Irf9
  gRNA
aacataggcggtggtggcaa

SEQ ID NO: 93726 - DNA, 20 bp, Artificial Sequence
  MKO10093726_B_Irg1
  gRNA
caacgttgaacgccagcagc

SEQ ID NO: 93727 - DNA, 20 bp, Artificial Sequence
  MKO10093727_B_Irg1
  gRNA
tccgaatgataccatctgtc

SEQ ID NO: 93728 - DNA, 20 bp, Artificial Sequence
  MKO10093728_B_Irg1
  gRNA
tggtcgaccccaaacagtgc

SEQ ID NO: 93729 - DNA, 20 bp, Artificial Sequence
  MKO10093729_B_Irgc1
  gRNA
cgggggtatcagcttcggca

SEQ ID NO: 93730 - DNA, 20 bp, Artificial Sequence
  MKO10093730_B_Irgc1
  gRNA
ccaccagcgtgccgaaaaca

SEQ ID NO: 93731 - DNA, 20 bp, Artificial Sequence
  MKO10093731_B_Irgc1
  gRNA
gggagcggatgacggagcgc

SEQ ID NO: 93732 - DNA, 20 bp, Artificial Sequence
  MKO10093732_B_Irgm1
  gRNA
accatcacacagttcctgcg

SEQ ID NO: 93733 - DNA, 20 bp, Artificial Sequence
  MKO10093733_B_Irgm1
  gRNA
gaagtacccccccgtgttcc

SEQ ID NO: 93734 - DNA, 20 bp, Artificial Sequence
  MKO10093734_B_Irgm1
  gRNA
tttgtcacgtcataccaaac

SEQ ID NO: 93735 - DNA, 20 bp, Artificial Sequence
  MKO10093735_B_Irgm2
  gRNA
ctggctcggttgtatcgcac

SEQ ID NO: 93736 - DNA, 20 bp, Artificial Sequence
  MKO10093736_B_Irgm2
  gRNA
agataaagtattgccgtctt

SEQ ID NO: 93737 - DNA, 20 bp, Artificial Sequence
  MKO10093737_B_Irgm2
  gRNA
tatccgggatagtcttcaga

SEQ ID NO: 93738 - DNA, 20 bp, Artificial Sequence
  MKO10093738_B_Irgq
  gRNA
cagggcggactttcccgagc

SEQ ID NO: 93739 - DNA, 20 bp, Artificial Sequence
  MKO10093739_B_Irgq
  gRNA
ggcgcgctcacgtcgtgcta

SEQ ID NO: 93740 - DNA, 20 bp, Artificial Sequence
  MKO10093740_B_Irgq
  gRNA
ggcaacgcgcacgcgcttcc

SEQ ID NO: 93741 - DNA, 20 bp, Artificial Sequence
  MKO10093741_B_Irs1
  gRNA
atgcaccacttggaacgtcg

SEQ ID NO: 93742 - DNA, 20 bp, Artificial Sequence
  MKO10093742_B_Irs1
  gRNA
ccatcagcgttcccctgcgc

SEQ ID NO: 93743 - DNA, 20 bp, Artificial Sequence
  MKO10093743_B_Irs1
  gRNA
cctgcgcaggggaacgctga

SEQ ID NO: 93744 - DNA, 20 bp, Artificial Sequence
  MKO10093744_B_Irs2
  gRNA
cttatgaacattcgccgctg

SEQ ID NO: 93745 - DNA, 20 bp, Artificial Sequence
  MKO10093745_B_Irs2
  gRNA
cgttcggccgtcaccggtcc

SEQ ID NO: 93746 - DNA, 20 bp, Artificial Sequence
  MKO10093746_B_Irs2
  gRNA
cggctaaggggcgcgcgcac

SEQ ID NO: 93747 - DNA, 20 bp, Artificial Sequence
  MKO10093747_B_Irs3
  gRNA
gcgctgagcgcccgagttcc

SEQ ID NO: 93748 - DNA, 20 bp, Artificial Sequence
  MKO10093748_B_Irs3
  gRNA
cgcgcgcttgctaatagtgc

SEQ ID NO: 93749 - DNA, 20 bp, Artificial Sequence
  MKO10093749_B_Irs3
  gRNA
cacagagccgcacgtcgggc

SEQ ID NO: 93750 - DNA, 20 bp, Artificial Sequence
  MKO10093750_B_Irs4
  gRNA
cggtagtattcgagtcgagc

SEQ ID NO: 93751 - DNA, 20 bp, Artificial Sequence
  MKO10093751_B_Irs4
  gRNA
tacaggatgatcacgcgccg

SEQ ID NO: 93752 - DNA, 20 bp, Artificial Sequence
  MKO10093752_B_Irs4
  gRNA
gctgtgtcttaccgacgaag

SEQ ID NO: 93753 - DNA, 20 bp, Artificial Sequence
  MKO10093753_B_Irx1
  gRNA
gtgcggaggccttctcacca

SEQ ID NO: 93754 - DNA, 20 bp, Artificial Sequence
  MKO10093754_B_Irx1
  gRNA
agcactcacttgtcgcgcac

SEQ ID NO: 93755 - DNA, 20 bp, Artificial Sequence
  MKO10093755_B_Irx1
  gRNA
atacagctcgctggccccgc

SEQ ID NO: 93756 - DNA, 20 bp, Artificial Sequence
  MKO10093756_B_Irx2
  gRNA
ccgcggtattgtaccgcaga

SEQ ID NO: 93757 - DNA, 20 bp, Artificial Sequence
  MKO10093757_B_Irx2
  gRNA
tggttgcttgaggtccgacg

SEQ ID NO: 93758 - DNA, 20 bp, Artificial Sequence
  MKO10093758_B_Irx2
  gRNA
tccgcgttcagcccgtaccc

SEQ ID NO: 93759 - DNA, 20 bp, Artificial Sequence
  MKO10093759_B_Irx3
  gRNA
ggcgccgtaaccctgagcgg

SEQ ID NO: 93760 - DNA, 20 bp, Artificial Sequence
  MKO10093760_B_Irx3
  gRNA
gtctcttaccgccttggcac

SEQ ID NO: 93761 - DNA, 20 bp, Artificial Sequence
  MKO10093761_B_Irx3
  gRNA
tacagatcgctgtagtgcct

SEQ ID NO: 93762 - DNA, 20 bp, Artificial Sequence
  MKO10093762_B_Irx4
  gRNA
gtcgtcgcagatacacccgt

SEQ ID NO: 93763 - DNA, 20 bp, Artificial Sequence
  MKO10093763_B_Irx4
  gRNA
ctcaattctgccgccgcgct

SEQ ID NO: 93764 - DNA, 20 bp, Artificial Sequence
  MKO10093764_B_Irx4
  gRNA
cgcggcgcaagaatgccacc

SEQ ID NO: 93765 - DNA, 20 bp, Artificial Sequence
  MKO10093765_B_Irx5
  gRNA
gtaccagccgtccgcctcgc

SEQ ID NO: 93766 - DNA, 20 bp, Artificial Sequence
  MKO10093766_B_Irx5
  gRNA
acggaaccgcagcgaggacg

SEQ ID NO: 93767 - DNA, 20 bp, Artificial Sequence
  MKO10093767_B_Irx5
  gRNA
tcactaccccgcgagtgtgc

SEQ ID NO: 93768 - DNA, 20 bp, Artificial Sequence
  MKO10093768_B_Irx6
  gRNA
aggagaatcctcttcgcctt

SEQ ID NO: 93769 - DNA, 20 bp, Artificial Sequence
  MKO10093769_B_Irx6
  gRNA
aattgagcagtgctggccgc

SEQ ID NO: 93770 - DNA, 20 bp, Artificial Sequence
  MKO10093770_B_Irx6
  gRNA
gcccagcagccgactgtcat

SEQ ID NO: 93771 - DNA, 20 bp, Artificial Sequence
  MKO10093771_B_Isca1
  gRNA
gtgcgaaccaggggctgtaa

SEQ ID NO: 93772 - DNA, 20 bp, Artificial Sequence
  MKO10093772_B_Isca1
  gRNA
aaagcacagctaaccctgtt

SEQ ID NO: 93773 - DNA, 20 bp, Artificial Sequence
  MKO10093773_B_Isca1
  gRNA
aaagctctcaccgcagccac

SEQ ID NO: 93774 - DNA, 20 bp, Artificial Sequence
  MKO10093774_B_Isca2
  gRNA
cacctgggctcccttaacga

SEQ ID NO: 93775 - DNA, 20 bp, Artificial Sequence
  MKO10093775_B_Isca2
  gRNA
atgagcttcggatcagttct

SEQ ID NO: 93776 - DNA, 20 bp, Artificial Sequence
  MKO10093776_B_Isca2
  gRNA
cgataccttcccgagcgcct

SEQ ID NO: 93777 - DNA, 20 bp, Artificial Sequence
  MKO10093777_B_Iscu
  gRNA
ttcatgacgtcaccacatgc

SEQ ID NO: 93778 - DNA, 20 bp, Artificial Sequence
  MKO10093778_B_Iscu
  gRNA
ctggagcagtgcagtttcac

SEQ ID NO: 93779 - DNA, 20 bp, Artificial Sequence
  MKO10093779_B_Iscu
  gRNA
tccagggctcactgcttctc

SEQ ID NO: 93780 - DNA, 20 bp, Artificial Sequence
  MKO10093780_B_Isg15
  gRNA
ggaggggaccagtgtgccta

SEQ ID NO: 93781 - DNA, 20 bp, Artificial Sequence
  MKO10093781_B_Isg15
  gRNA
cggtcttaccctttccagtc

SEQ ID NO: 93782 - DNA, 20 bp, Artificial Sequence
  MKO10093782_B_Isg15
  gRNA
gatgggggccttaggcacac

SEQ ID NO: 93783 - DNA, 20 bp, Artificial Sequence
  MKO10093783_B_Isg20l2
  gRNA
ttcctcggtggaagatgccc

SEQ ID NO: 93784 - DNA, 20 bp, Artificial Sequence
  MKO10093784_B_Isg20l2
  gRNA
tccgggaagtgtctctggtg

SEQ ID NO: 93785 - DNA, 20 bp, Artificial Sequence
  MKO10093785_B_Isg20l2
  gRNA
ttcctttaggttggaaatac

SEQ ID NO: 93786 - DNA, 20 bp, Artificial Sequence
  MKO10093786_B_Isg20
  gRNA
tgaagtcgtgcttcaggtca

SEQ ID NO: 93787 - DNA, 20 bp, Artificial Sequence
  MKO10093787_B_Isg20
  gRNA
cagcgactcagagcccagcg

SEQ ID NO: 93788 - DNA, 20 bp, Artificial Sequence
  MKO10093788_B_Isg20
  gRNA
tgtgtctgcagaacaactgg

SEQ ID NO: 93789 - DNA, 20 bp, Artificial Sequence
  MKO10093789_B_Isl1
  gRNA
gattgccgcaaccaacacac

SEQ ID NO: 93790 - DNA, 20 bp, Artificial Sequence
  MKO10093790_B_Isl1
  gRNA
gtcccagagtcatccgagtg

SEQ ID NO: 93791 - DNA, 20 bp, Artificial Sequence
  MKO10093791_B_Isl1
  gRNA
tcccatggtggctgctagtc

SEQ ID NO: 93792 - DNA, 20 bp, Artificial Sequence
  MKO10093792_B_Isl2
  gRNA
gcgtgtcgcccgacctcgag

SEQ ID NO: 93793 - DNA, 20 bp, Artificial Sequence
  MKO10093793_B_Isl2
  gRNA
ccccatccgccatgagaacg

SEQ ID NO: 93794 - DNA, 20 bp, Artificial Sequence
  MKO10093794_B_Isl2
  gRNA
tgtcccgcgcccgcatcacc

SEQ ID NO: 93795 - DNA, 20 bp, Artificial Sequence
  MKO10093795_B_Islr2
  gRNA
gcgagccggtctccagactc

SEQ ID NO: 93796 - DNA, 20 bp, Artificial Sequence
  MKO10093796_B_Islr2
  gRNA
ggccttcgtcaacgtcacgc

SEQ ID NO: 93797 - DNA, 20 bp, Artificial Sequence
  MKO10093797_B_Islr2
  gRNA
gcagcgcgctcaagttacga

SEQ ID NO: 93798 - DNA, 20 bp, Artificial Sequence
  MKO10093798_B_Islr
  gRNA
cagcgcggtgagcggtgcga

SEQ ID NO: 93799 - DNA, 20 bp, Artificial Sequence
  MKO10093799_B_Islr
  gRNA
aggctgctaaaggcgtcccg

SEQ ID NO: 93800 - DNA, 20 bp, Artificial Sequence
  MKO10093800_B_Islr
  gRNA
cattcacaccccgggcggca

SEQ ID NO: 93801 - DNA, 20 bp, Artificial Sequence
  MKO10093801_B_Ism1
  gRNA
tactgtcatacttgtcatcc

SEQ ID NO: 93802 - DNA, 20 bp, Artificial Sequence
  MKO10093802_B_Ism1
  gRNA
gctggacggtcccatcctct

SEQ ID NO: 93803 - DNA, 20 bp, Artificial Sequence
  MKO10093803_B_Ism1
  gRNA
ggaagggttggtggacaacc

SEQ ID NO: 93804 - DNA, 20 bp, Artificial Sequence
  MKO10093804_B_Isoc1
  gRNA
gctggtcggccgaggcatcg

SEQ ID NO: 93805 - DNA, 20 bp, Artificial Sequence
  MKO10093805_B_Isoc1
  gRNA
gatcatcgtgaccactagtg

SEQ ID NO: 93806 - DNA, 20 bp, Artificial Sequence
  MKO10093806_B_Isoc1
  gRNA
cgatgtgaacctcgatgcct

SEQ ID NO: 93807 - DNA, 20 bp, Artificial Sequence
  MKO10093807_B_Isoc2a
  gRNA
gtctcaccaagatgcaggct

SEQ ID NO: 93808 - DNA, 20 bp, Artificial Sequence
  MKO10093808_B_Isoc2a
  gRNA
aggctcagcagcccgctgtc

SEQ ID NO: 93809 - DNA, 20 bp, Artificial Sequence
  MKO10093809_B_Isoc2a
  gRNA
gtactgctctgtcagcaaaa

SEQ ID NO: 93810 - DNA, 20 bp, Artificial Sequence
  MKO10093810_B_Isoc2b
  gRNA
gcccccgcttcaacaggagt

SEQ ID NO: 93811 - DNA, 20 bp, Artificial Sequence
  MKO10093811_B_Isoc2b
  gRNA
cctcctggaccgtgggctac

SEQ ID NO: 93812 - DNA, 20 bp, Artificial Sequence
  MKO10093812_B_Isoc2b
  gRNA
aacagtccgatgtctgtgac

SEQ ID NO: 93813 - DNA, 20 bp, Artificial Sequence
  MKO10093813_B_Ispd
  gRNA
catctatgaagcgtatcagc

SEQ ID NO: 93814 - DNA, 20 bp, Artificial Sequence
  MKO10093814_B_Ispd
  gRNA
gcagctgaagccatgattaa

SEQ ID NO: 93815 - DNA, 20 bp, Artificial Sequence
  MKO10093815_B_Ispd
  gRNA
tggaacagagtgcttgcagt

SEQ ID NO: 93816 - DNA, 20 bp, Artificial Sequence
  MKO10093816_B_Ist1
  gRNA
tatcattcacagtcccgatc

SEQ ID NO: 93817 - DNA, 20 bp, Artificial Sequence
  MKO10093817_B_Ist1
  gRNA
agccccacccaaaatcctag

SEQ ID NO: 93818 - DNA, 20 bp, Artificial Sequence
  MKO10093818_B_Ist1
  gRNA
gccacttctgactgaagccg

SEQ ID NO: 93819 - DNA, 20 bp, Artificial Sequence
  MKO10093819_B_Isx
  gRNA
acccactgctatgactacat

SEQ ID NO: 93820 - DNA, 20 bp, Artificial Sequence
  MKO10093820_B_Isx
  gRNA
tccaggcagacaactatccc

SEQ ID NO: 93821 - DNA, 20 bp, Artificial Sequence
  MKO10093821_B_Isx
  gRNA
agggccaagccggcctcacc

SEQ ID NO: 93822 - DNA, 20 bp, Artificial Sequence
  MKO10093822_B_Isy1
  gRNA
tcgtcaagctcagctggaag

SEQ ID NO: 93823 - DNA, 20 bp, Artificial Sequence
  MKO10093823_B_Isy1
  gRNA
cattggcgagatctcaaaaa

SEQ ID NO: 93824 - DNA, 20 bp, Artificial Sequence
  MKO10093824_B_Isy1
  gRNA
cctgcaggactgccctggcg

SEQ ID NO: 93825 - DNA, 20 bp, Artificial Sequence
  MKO10093825_B_Isyna1
  gRNA
ctgcgcgcgccgcatggcct

SEQ ID NO: 93826 - DNA, 20 bp, Artificial Sequence
  MKO10093826_B_Isyna1
  gRNA
ccaatcggctgcgcctaacc

SEQ ID NO: 93827 - DNA, 20 bp, Artificial Sequence
  MKO10093827_B_Isyna1
  gRNA
gaccttatccaatcccgcac

SEQ ID NO: 93828 - DNA, 20 bp, Artificial Sequence
  MKO10093828_B_Itch
  gRNA
ccaataaaacatcagacttc

SEQ ID NO: 93829 - DNA, 20 bp, Artificial Sequence
  MKO10093829_B_Itch
  gRNA
ggtactacacagaatgatga

SEQ ID NO: 93830 - DNA, 20 bp, Artificial Sequence
  MKO10093830_B_Itch
  gRNA
tgtgaggggctgcttccact

SEQ ID NO: 93831 - DNA, 20 bp, Artificial Sequence
  MKO10093831_B_Itfg1
  gRNA
gatctaattcctgatgtgtt

SEQ ID NO: 93832 - DNA, 20 bp, Artificial Sequence
  MKO10093832_B_Itfg1
  gRNA
gaatccccatcataatcacc

SEQ ID NO: 93833 - DNA, 20 bp, Artificial Sequence
  MKO10093833_B_Itfg1
  gRNA
caccctcctagcagtatctg

SEQ ID NO: 93834 - DNA, 20 bp, Artificial Sequence
  MKO10093834_B_Itfg2
  gRNA
ggtaggatacacagaccgtg

SEQ ID NO: 93835 - DNA, 20 bp, Artificial Sequence
  MKO10093835_B_Itfg2
  gRNA
gcagttaaatgagctagttg

SEQ ID NO: 93836 - DNA, 20 bp, Artificial Sequence
  MKO10093836_B_Itfg2
  gRNA
gtggtagcagtcagcgcaga

SEQ ID NO: 93837 - DNA, 20 bp, Artificial Sequence
  MKO10093837_B_Itfg3
  gRNA
aacgttcccactaaagctgc

SEQ ID NO: 93838 - DNA, 20 bp, Artificial Sequence
  MKO10093838_B_Itfg3
  gRNA
agacctcctgatcctcgccc

SEQ ID NO: 93839 - DNA, 20 bp, Artificial Sequence
  MKO10093839_B_Itfg3
  gRNA
cagtatattctcctgccctg

SEQ ID NO: 93840 - DNA, 20 bp, Artificial Sequence
  MKO10093840_B_Itga10
  gRNA
cacagtgctccatgtaccaa

SEQ ID NO: 93841 - DNA, 20 bp, Artificial Sequence
  MKO10093841_B_Itga10
  gRNA
ggtggccctgtgaagagtcg

SEQ ID NO: 93842 - DNA, 20 bp, Artificial Sequence
  MKO10093842_B_Itga10
  gRNA
cctgctgtgaatatgcacct

SEQ ID NO: 93843 - DNA, 20 bp, Artificial Sequence
  MKO10093843_B_Itga11
  gRNA
caactgcaccaagctcaacc

SEQ ID NO: 93844 - DNA, 20 bp, Artificial Sequence
  MKO10093844_B_Itga11
  gRNA
gtacagcagcatgatatcag

SEQ ID NO: 93845 - DNA, 20 bp, Artificial Sequence
  MKO10093845_B_Itga11
  gRNA
ggaagctcctactacaccac

SEQ ID NO: 93846 - DNA, 20 bp, Artificial Sequence
  MKO10093846_B_Itga1
  gRNA
gatgtctataagtgtccagt

SEQ ID NO: 93847 - DNA, 20 bp, Artificial Sequence
  MKO10093847_B_Itga1
  gRNA
atcaatgccttgtgtgaagt

SEQ ID NO: 93848 - DNA, 20 bp, Artificial Sequence
  MKO10093848_B_Itga1
  gRNA
caacagtatgaaaacgaaga

SEQ ID NO: 93849 - DNA, 20 bp, Artificial Sequence
  MKO10093849_B_Itga2b
  gRNA
ggccctaaacgcaagtcaag

SEQ ID NO: 93850 - DNA, 20 bp, Artificial Sequence
  MKO10093850_B_Itga2b
  gRNA
cctacacagcgtgtccatcg

SEQ ID NO: 93851 - DNA, 20 bp, Artificial Sequence
  MKO10093851_B_Itga2b
  gRNA
gacaagcgatactgtgaagc

SEQ ID NO: 93852 - DNA, 20 bp, Artificial Sequence
  MKO10093852_B_Itga2
  gRNA
acttgtacacatctcccatt

SEQ ID NO: 93853 - DNA, 20 bp, Artificial Sequence
  MKO10093853_B_Itga2
  gRNA
aacactcactagaaagcctc

SEQ ID NO: 93854 - DNA, 20 bp, Artificial Sequence
  MKO10093854_B_Itga2
  gRNA
tggcttccctgagaaccgaa

SEQ ID NO: 93855 - DNA, 20 bp, Artificial Sequence
  MKO10093855_B_Itga3
  gRNA
gatgactataccaaccggac

SEQ ID NO: 93856 - DNA, 20 bp, Artificial Sequence
  MKO10093856_B_Itga3
  gRNA
cttaccaggactctacctgc

SEQ ID NO: 93857 - DNA, 20 bp, Artificial Sequence
  MKO10093857_B_Itga3
  gRNA
gggccctgcaggtagagtcc

SEQ ID NO: 93858 - DNA, 20 bp, Artificial Sequence
  MKO10093858_B_Itga4
  gRNA
ttatccagacttgtgggcac

SEQ ID NO: 93859 - DNA, 20 bp, Artificial Sequence
  MKO10093859_B_Itga4
  gRNA
ttagattatacgagaaaatt

SEQ ID NO: 93860 - DNA, 20 bp, Artificial Sequence
  MKO10093860_B_Itga4
  gRNA
aaagggtgacccccagccac

SEQ ID NO: 93861 - DNA, 20 bp, Artificial Sequence
  MKO10093861_B_Itga5
  gRNA
ggagcaacagttcgggccca

SEQ ID NO: 93862 - DNA, 20 bp, Artificial Sequence
  MKO10093862_B_Itga5
  gRNA
tctgtgcgccagctatacag

SEQ ID NO: 93863 - DNA, 20 bp, Artificial Sequence
  MKO10093863_B_Itga5
  gRNA
aaggctaacactagccagcc

SEQ ID NO: 93864 - DNA, 20 bp, Artificial Sequence
  MKO10093864_B_Itga6
  gRNA
tcaacacgaagcaggagtcg

SEQ ID NO: 93865 - DNA, 20 bp, Artificial Sequence
  MKO10093865_B_Itga6
  gRNA
aggtgatgtcacagctgtac

SEQ ID NO: 93866 - DNA, 20 bp, Artificial Sequence
  MKO10093866_B_Itga6
  gRNA
gaacagtgactcccatccac

SEQ ID NO: 93867 - DNA, 20 bp, Artificial Sequence
  MKO10093867_B_Itga7
  gRNA
ctctctgtcgagactcatat

SEQ ID NO: 93868 - DNA, 20 bp, Artificial Sequence
  MKO10093868_B_Itga7
  gRNA
aaactttggaccctgctgac

SEQ ID NO: 93869 - DNA, 20 bp, Artificial Sequence
  MKO10093869_B_Itga7
  gRNA
gctacagagtggacattgac

SEQ ID NO: 93870 - DNA, 20 bp, Artificial Sequence
  MKO10093870_B_Itga8
  gRNA
cacttactggtggtgtcaaa

SEQ ID NO: 93871 - DNA, 20 bp, Artificial Sequence
  MKO10093871_B_Itga8
  gRNA
cttgtgcccctttgtatcac

SEQ ID NO: 93872 - DNA, 20 bp, Artificial Sequence
  MKO10093872_B_Itga8
  gRNA
tctgaaacctaatccagcga

SEQ ID NO: 93873 - DNA, 20 bp, Artificial Sequence
  MKO10093873_B_Itga9
  gRNA
cccttcttccagcgaagcac

SEQ ID NO: 93874 - DNA, 20 bp, Artificial Sequence
  MKO10093874_B_Itga9
  gRNA
gtgctgccgacctgcagctt

SEQ ID NO: 93875 - DNA, 20 bp, Artificial Sequence
  MKO10093875_B_Itga9
  gRNA
tttcatgaggtcaaagtcta

SEQ ID NO: 93876 - DNA, 20 bp, Artificial Sequence
  MKO10093876_B_Itgad
  gRNA
gacatgttcactgcctctag

SEQ ID NO: 93877 - DNA, 20 bp, Artificial Sequence
  MKO10093877_B_Itgad
  gRNA
tgttcctctagactcgtggt

SEQ ID NO: 93878 - DNA, 20 bp, Artificial Sequence
  MKO10093878_B_Itgad
  gRNA
gcacaagctctctgtgcagt

SEQ ID NO: 93879 - DNA, 20 bp, Artificial Sequence
  MKO10093879_B_Itgae
  gRNA
tcccgaccaatgtcactccc

SEQ ID NO: 93880 - DNA, 20 bp, Artificial Sequence
  MKO10093880_B_Itgae
  gRNA
ccagtccacatccaaattga

SEQ ID NO: 93881 - DNA, 20 bp, Artificial Sequence
  MKO10093881_B_Itgae
  gRNA
ccttcaatttggatgtggac

SEQ ID NO: 93882 - DNA, 20 bp, Artificial Sequence
  MKO10093882_B_Itgal
  gRNA
acggcctacgcagagcttct

SEQ ID NO: 93883 - DNA, 20 bp, Artificial Sequence
  MKO10093883_B_Itgal
  gRNA
gctggcaacagatgccgcca

SEQ ID NO: 93884 - DNA, 20 bp, Artificial Sequence
  MKO10093884_B_Itgal
  gRNA
cccgtgttgtccccctcacc

SEQ ID NO: 93885 - DNA, 20 bp, Artificial Sequence
  MKO10093885_B_Itgam
  gRNA
accttccaagagaatgcaaa

SEQ ID NO: 93886 - DNA, 20 bp, Artificial Sequence
  MKO10093886_B_Itgam
  gRNA
aaggacatattcacagcctc

SEQ ID NO: 93887 - DNA, 20 bp, Artificial Sequence
  MKO10093887_B_Itgam
  gRNA
tatgtccttgggcctgtccc

SEQ ID NO: 93888 - DNA, 20 bp, Artificial Sequence
  MKO10093888_B_Itgav
  gRNA
tttaagtcccaccagtggtt

SEQ ID NO: 93889 - DNA, 20 bp, Artificial Sequence
  MKO10093889_B_Itgav
  gRNA
ttatgccaaagatgacccac

SEQ ID NO: 93890 - DNA, 20 bp, Artificial Sequence
  MKO10093890_B_Itgav
  gRNA
cctgtgctccattgtaccac

SEQ ID NO: 93891 - DNA, 20 bp, Artificial Sequence
  MKO10093891_B_Itgax
  gRNA
tgtgatagccacatttgtag

SEQ ID NO: 93892 - DNA, 20 bp, Artificial Sequence
  MKO10093892_B_Itgax
  gRNA
taactcaccctggagggaga

SEQ ID NO: 93893 - DNA, 20 bp, Artificial Sequence
  MKO10093893_B_Itgax
  gRNA
agagagaatatatacttgac

SEQ ID NO: 93894 - DNA, 20 bp, Artificial Sequence
  MKO10093894_B_Itgb1bp1
  gRNA
gagttccgaataaagtatgt

SEQ ID NO: 93895 - DNA, 20 bp, Artificial Sequence
  MKO10093895_B_Itgb1bp1
  gRNA
aaattacatagatgtcgccc

SEQ ID NO: 93896 - DNA, 20 bp, Artificial Sequence
  MKO10093896_B_Itgb1bp1
  gRNA
atgccctgtatctaatcatc

SEQ ID NO: 93897 - DNA, 20 bp, Artificial Sequence
  MKO10093897_B_Itgb1bp2
  gRNA
gattcctgtcgctatcaccc

SEQ ID NO: 93898 - DNA, 20 bp, Artificial Sequence
  MKO10093898_B_Itgb1bp2
  gRNA
ctctttacttaggcctttct

SEQ ID NO: 93899 - DNA, 20 bp, Artificial Sequence
  MKO10093899_B_Itgb1bp2
  gRNA
tataagaagtggtagcagtt

SEQ ID NO: 93900 - DNA, 20 bp, Artificial Sequence
  MKO10093900_B_Itgb1
  gRNA
attacttcagacttccgcat

SEQ ID NO: 93901 - DNA, 20 bp, Artificial Sequence
  MKO10093901_B_Itgb1
  gRNA
gcaacgcatatctggaaact

SEQ ID NO: 93902 - DNA, 20 bp, Artificial Sequence
  MKO10093902_B_Itgb1
  gRNA
tatacattctccgcaagatt

SEQ ID NO: 93903 - DNA, 20 bp, Artificial Sequence
  MKO10093903_B_Itgb2l
  gRNA
tcaagcggcaacattcaaag

SEQ ID NO: 93904 - DNA, 20 bp, Artificial Sequence
  MKO10093904_B_Itgb2l
  gRNA
tgaccggatacagtcctgac

SEQ ID NO: 93905 - DNA, 20 bp, Artificial Sequence
  MKO10093905_B_Itgb2l
  gRNA
gcacctgtcaggactgtatc

SEQ ID NO: 93906 - DNA, 20 bp, Artificial Sequence
  MKO10093906_B_Itgb2
  gRNA
ctcaccgatgcggccagact

SEQ ID NO: 93907 - DNA, 20 bp, Artificial Sequence
  MKO10093907_B_Itgb2
  gRNA
ctcaacgagatcaccgagtc

SEQ ID NO: 93908 - DNA, 20 bp, Artificial Sequence
  MKO10093908_B_Itgb2
  gRNA
gcaactgatttccggaaacc

SEQ ID NO: 93909 - DNA, 20 bp, Artificial Sequence
  MKO10093909_B_Itgb3bp
  gRNA
acagcttattctcctactac

SEQ ID NO: 93910 - DNA, 20 bp, Artificial Sequence
  MKO10093910_B_Itgb3bp
  gRNA
agttaaaagatcactgaaac

SEQ ID NO: 93911 - DNA, 20 bp, Artificial Sequence
  MKO10093911_B_Itgb3bp
  gRNA
cccatccctgtctttcactg

SEQ ID NO: 93912 - DNA, 20 bp, Artificial Sequence
  MKO10093912_B_Itgb3
  gRNA
cgtgctgacgctaaccgacc

SEQ ID NO: 93913 - DNA, 20 bp, Artificial Sequence
  MKO10093913_B_Itgb3
  gRNA
cggctttgacgccatcatgc

SEQ ID NO: 93914 - DNA, 20 bp, Artificial Sequence
  MKO10093914_B_Itgb3
  gRNA
agtaagcttgcgcatctgag

SEQ ID NO: 93915 - DNA, 20 bp, Artificial Sequence
  MKO10093915_B_Itgb4
  gRNA
ctcaccagcgactacaccat

SEQ ID NO: 93916 - DNA, 20 bp, Artificial Sequence
  MKO10093916_B_Itgb4
  gRNA
gagatacctggctgcggtgc

SEQ ID NO: 93917 - DNA, 20 bp, Artificial Sequence
  MKO10093917_B_Itgb4
  gRNA
ctgcagccagaagctccgcc

SEQ ID NO: 93918 - DNA, 20 bp, Artificial Sequence
  MKO10093918_B_Itgb5
  gRNA
attgcagtgagcctccggcc

SEQ ID NO: 93919 - DNA, 20 bp, Artificial Sequence
  MKO10093919_B_Itgb5
  gRNA
tagagggtcgcgggcacccg

SEQ ID NO: 93920 - DNA, 20 bp, Artificial Sequence
  MKO10093920_B_Itgb5
  gRNA
gggctcaacatatgcactag

SEQ ID NO: 93921 - DNA, 20 bp, Artificial Sequence
  MKO10093921_B_Itgb6
  gRNA
gctaatattgacacacctga

SEQ ID NO: 93922 - DNA, 20 bp, Artificial Sequence
  MKO10093922_B_Itgb6
  gRNA
aaagcccagtctaaagttgc

SEQ ID NO: 93923 - DNA, 20 bp, Artificial Sequence
  MKO10093923_B_Itgb6
  gRNA
atttacctcctgggagcacc

SEQ ID NO: 93924 - DNA, 20 bp, Artificial Sequence
  MKO10093924_B_Itgb7
  gRNA
ccacccatgccccagccgac

SEQ ID NO: 93925 - DNA, 20 bp, Artificial Sequence
  MKO10093925_B_Itgb7
  gRNA
gtcacacattctgtgcgcat

SEQ ID NO: 93926 - DNA, 20 bp, Artificial Sequence
  MKO10093926_B_Itgb7
  gRNA
cataaggtaatataggtcca

SEQ ID NO: 93927 - DNA, 20 bp, Artificial Sequence
  MKO10093927_B_Itgb8
  gRNA
agacttctcccggtgtcacc

SEQ ID NO: 93928 - DNA, 20 bp, Artificial Sequence
  MKO10093928_B_Itgb8
  gRNA
gtctcagtccaactgcatcc

SEQ ID NO: 93929 - DNA, 20 bp, Artificial Sequence
  MKO10093929_B_Itgb8
  gRNA
ctccagctgggtccggaatg

SEQ ID NO: 93930 - DNA, 20 bp, Artificial Sequence
  MKO10093930_B_Itgbl1
  gRNA
ggccacggtaattgtgactg

SEQ ID NO: 93931 - DNA, 20 bp, Artificial Sequence
  MKO10093931_B_Itgbl1
  gRNA
ttgctacagactttgccatc

SEQ ID NO: 93932 - DNA, 20 bp, Artificial Sequence
  MKO10093932_B_Itgbl1
  gRNA
tccagtgtgacatcacccca

SEQ ID NO: 93933 - DNA, 20 bp, Artificial Sequence
  MKO10093933_B_Itih1
  gRNA
gccagcgctctcccctaaaa

SEQ ID NO: 93934 - DNA, 20 bp, Artificial Sequence
  MKO10093934_B_Itih1
  gRNA
tttgcagaagcgacacgctg

SEQ ID NO: 93935 - DNA, 20 bp, Artificial Sequence
  MKO10093935_B_Itih1
  gRNA
ctacgtcatcaccagccaag

SEQ ID NO: 93936 - DNA, 20 bp, Artificial Sequence
  MKO10093936_B_Itih2
  gRNA
cttccattctcttgcacaaa

SEQ ID NO: 93937 - DNA, 20 bp, Artificial Sequence
  MKO10093937_B_Itih2
  gRNA
ttgcctgtgaataaagagct

SEQ ID NO: 93938 - DNA, 20 bp, Artificial Sequence
  MKO10093938_B_Itih2
  gRNA
ctcccatttgtgcaagagaa

SEQ ID NO: 93939 - DNA, 20 bp, Artificial Sequence
  MKO10093939_B_Itih3
  gRNA
aagttcttaccccctctggg

SEQ ID NO: 93940 - DNA, 20 bp, Artificial Sequence
  MKO10093940_B_Itih3
  gRNA
tcaatctgcaggaccattga

SEQ ID NO: 93941 - DNA, 20 bp, Artificial Sequence
  MKO10093941_B_Itih3
  gRNA
attcacagtgtctgtcaacg

SEQ ID NO: 93942 - DNA, 20 bp, Artificial Sequence
  MKO10093942_B_Itih4
  gRNA
taccttcgaactcatatacc

SEQ ID NO: 93943 - DNA, 20 bp, Artificial Sequence
  MKO10093943_B_Itih4
  gRNA
agacccgggagtccaccgtg

SEQ ID NO: 93944 - DNA, 20 bp, Artificial Sequence
  MKO10093944_B_Itih4
  gRNA
tccgaccactactgccgaga

SEQ ID NO: 93945 - DNA, 20 bp, Artificial Sequence
  MKO10093945_B_Itih5
  gRNA
tacttactcattatcgtctg

SEQ ID NO: 93946 - DNA, 20 bp, Artificial Sequence
  MKO10093946_B_Itih5
  gRNA
ttataggagacagcgtgtat

SEQ ID NO: 93947 - DNA, 20 bp, Artificial Sequence
  MKO10093947_B_Itih5
  gRNA
acaccgtggtgaaggcatag

SEQ ID NO: 93948 - DNA, 20 bp, Artificial Sequence
  MKO10093948_B_Itk
  gRNA
ccctacgacccatccaagaa

SEQ ID NO: 93949 - DNA, 20 bp, Artificial Sequence
  MKO10093949_B_Itk
  gRNA
tgggtgctgacccttaaaga

SEQ ID NO: 93950 - DNA, 20 bp, Artificial Sequence
  MKO10093950_B_Itk
  gRNA
cctgaaaagggtatttatag

SEQ ID NO: 93951 - DNA, 20 bp, Artificial Sequence
  MKO10093951_B_Itln1
  gRNA
cacttgggacataatctgtt

SEQ ID NO: 93952 - DNA, 20 bp, Artificial Sequence
  MKO10093952_B_Itln1
  gRNA
tttccttctccgtatttcac

SEQ ID NO: 93953 - DNA, 20 bp, Artificial Sequence
  MKO10093953_B_Itln1
  gRNA
ggaaagtgttggactgacaa

SEQ ID NO: 93954 - DNA, 20 bp, Artificial Sequence
  MKO10093954_B_Itm2a
  gRNA
ggagctcagagttgtcccgc

SEQ ID NO: 93955 - DNA, 20 bp, Artificial Sequence
  MKO10093955_B_Itm2a
  gRNA
cagtttctctgatagcgatc

SEQ ID NO: 93956 - DNA, 20 bp, Artificial Sequence
  MKO10093956_B_Itm2a
  gRNA
ttacaagtacttcatgccca

SEQ ID NO: 93957 - DNA, 20 bp, Artificial Sequence
  MKO10093957_B_Itm2b
  gRNA
ggatcgctgtccgcaaactc

SEQ ID NO: 93958 - DNA, 20 bp, Artificial Sequence
  MKO10093958_B_Itm2b
  gRNA
attccaggacccgggtgacg

SEQ ID NO: 93959 - DNA, 20 bp, Artificial Sequence
  MKO10093959_B_Itm2b
  gRNA
gttgaagtcgtgcacaatgt

SEQ ID NO: 93960 - DNA, 20 bp, Artificial Sequence
  MKO10093960_B_Itm2c
  gRNA
agcctcctttccgggagcgg

SEQ ID NO: 93961 - DNA, 20 bp, Artificial Sequence
  MKO10093961_B_Itm2c
  gRNA
gtacctgtagatgtagaccg

SEQ ID NO: 93962 - DNA, 20 bp, Artificial Sequence
  MKO10093962_B_Itm2c
  gRNA
cgatgacgtagcacttgtct

SEQ ID NO: 93963 - DNA, 20 bp, Artificial Sequence
  MKO10093963_B_Itpa
  gRNA
ttctgagcctccaaagtgca

SEQ ID NO: 93964 - DNA, 20 bp, Artificial Sequence
  MKO10093964_B_Itpa
  gRNA
tgcctcccgacacttctgta

SEQ ID NO: 93965 - DNA, 20 bp, Artificial Sequence
  MKO10093965_B_Itpa
  gRNA
acaggtgcagggccctgtcc

SEQ ID NO: 93966 - DNA, 20 bp, Artificial Sequence
  MKO10093966_B_Itpk1
  gRNA
gatctttcggataagttcgt

SEQ ID NO: 93967 - DNA, 20 bp, Artificial Sequence
  MKO10093967_B_Itpk1
  gRNA
aatctgctcgccgcctttca

SEQ ID NO: 93968 - DNA, 20 bp, Artificial Sequence
  MKO10093968_B_Itpk1
  gRNA
gctgaccgatgtcatcctcg

SEQ ID NO: 93969 - DNA, 20 bp, Artificial Sequence
  MKO10093969_B_Itpka
  gRNA
ctttcgcattgagggcatca

SEQ ID NO: 93970 - DNA, 20 bp, Artificial Sequence
  MKO10093970_B_Itpka
  gRNA
gcaagtgacccgtgtctttg

SEQ ID NO: 93971 - DNA, 20 bp, Artificial Sequence
  MKO10093971_B_Itpka
  gRNA
ctttcagaaagcgctactcc

SEQ ID NO: 93972 - DNA, 20 bp, Artificial Sequence
  MKO10093972_B_Itpkb
  gRNA
tcccgccactgcatgtaacg

SEQ ID NO: 93973 - DNA, 20 bp, Artificial Sequence
  MKO10093973_B_Itpkb
  gRNA
cgtcactcaccaagatgttc

SEQ ID NO: 93974 - DNA, 20 bp, Artificial Sequence
  MKO10093974_B_Itpkb
  gRNA
ccttcaagaagaagtacccc

SEQ ID NO: 93975 - DNA, 20 bp, Artificial Sequence
  MKO10093975_B_Itpkc
  gRNA
tgcaccatgccataataagc

SEQ ID NO: 93976 - DNA, 20 bp, Artificial Sequence
  MKO10093976_B_Itpkc
  gRNA
catcttgcagtccatgatag

SEQ ID NO: 93977 - DNA, 20 bp, Artificial Sequence
  MKO10093977_B_Itpkc
  gRNA
ttaccttgatgccttcaatc

SEQ ID NO: 93978 - DNA, 20 bp, Artificial Sequence
  MKO10093978_B_Itpr1
  gRNA
ttctacaagcttcgctccat

SEQ ID NO: 93979 - DNA, 20 bp, Artificial Sequence
  MKO10093979_B_Itpr1
  gRNA
ctcgtccaacgtcaccctca

SEQ ID NO: 93980 - DNA, 20 bp, Artificial Sequence
  MKO10093980_B_Itpr1
  gRNA
cactgcatctgtagtgctgt

SEQ ID NO: 93981 - DNA, 20 bp, Artificial Sequence
  MKO10093981_B_Itpr2
  gRNA
ttggcaaggtctcccgcctc

SEQ ID NO: 93982 - DNA, 20 bp, Artificial Sequence
  MKO10093982_B_Itpr2
  gRNA
tgggcagagtatcgattcat

SEQ ID NO: 93983 - DNA, 20 bp, Artificial Sequence
  MKO10093983_B_Itpr2
  gRNA
cttgtagcatgctgcagagc

SEQ ID NO: 93984 - DNA, 20 bp, Artificial Sequence
  MKO10093984_B_Itpr3
  gRNA
aacccccccaagaagttccg

SEQ ID NO: 93985 - DNA, 20 bp, Artificial Sequence
  MKO10093985_B_Itpr3
  gRNA
cacggggacgtggtgaagta

SEQ ID NO: 93986 - DNA, 20 bp, Artificial Sequence
  MKO10093986_B_Itpr3
  gRNA
tttgtcctgtttagtctgct

SEQ ID NO: 93987 - DNA, 20 bp, Artificial Sequence
  MKO10093987_B_Itpripl1
  gRNA
gacccagaatttcgatgtcc

SEQ ID NO: 93988 - DNA, 20 bp, Artificial Sequence
  MKO10093988_B_Itpripl1
  gRNA
tggacctggacacgctagct

SEQ ID NO: 93989 - DNA, 20 bp, Artificial Sequence
  MKO10093989_B_Itpripl1
  gRNA
ctcccgggggtaagatctga

SEQ ID NO: 93990 - DNA, 20 bp, Artificial Sequence
  MKO10093990_B_Itpripl2
  gRNA
cagcgcggttgctgtccacg

SEQ ID NO: 93991 - DNA, 20 bp, Artificial Sequence
  MKO10093991_B_Itpripl2
  gRNA
atccgccagcgcctgttgcc

SEQ ID NO: 93992 - DNA, 20 bp, Artificial Sequence
  MKO10093992_B_Itpripl2
  gRNA
ggcagcagccatagtccgtg

SEQ ID NO: 93993 - DNA, 20 bp, Artificial Sequence
  MKO10093993_B_Itprip
  gRNA
aagagtccgctgcaagacga

SEQ ID NO: 93994 - DNA, 20 bp, Artificial Sequence
  MKO10093994_B_Itprip
  gRNA
gaatactcgctaatgagcgc

SEQ ID NO: 93995 - DNA, 20 bp, Artificial Sequence
  MKO10093995_B_Itprip
  gRNA
actcatacttgtgggcgatg

SEQ ID NO: 93996 - DNA, 20 bp, Artificial Sequence
  MKO10093996_B_Itsn1
  gRNA
aaacttaccaccgaaaggtg

SEQ ID NO: 93997 - DNA, 20 bp, Artificial Sequence
  MKO10093997_B_Itsn1
  gRNA
actttacaggtgatcaagcg

SEQ ID NO: 93998 - DNA, 20 bp, Artificial Sequence
  MKO10093998_B_Itsn1
  gRNA
gctcagtttcccacaccttt

SEQ ID NO: 93999 - DNA, 20 bp, Artificial Sequence
  MKO10093999_B_Itsn2
  gRNA
ctaggggagcaggcatcatt

SEQ ID NO: 94000 - DNA, 20 bp, Artificial Sequence
  MKO10094000_B_Itsn2
  gRNA
tttgataacctcaaaccttc

SEQ ID NO: 94001 - DNA, 20 bp, Artificial Sequence
  MKO10094001_B_Itsn2
  gRNA
agtacatcctcattaccaaa

SEQ ID NO: 94002 - DNA, 20 bp, Artificial Sequence
  MKO10094002_B_Ivd
  gRNA
gccatgagtgaacccaatgc

SEQ ID NO: 94003 - DNA, 20 bp, Artificial Sequence
  MKO10094003_B_Ivd
  gRNA
ttgatcaatctcttgggcct

SEQ ID NO: 94004 - DNA, 20 bp, Artificial Sequence
  MKO10094004_B_Ivd
  gRNA
ctcatcagtggtgagttcat

SEQ ID NO: 94005 - DNA, 20 bp, Artificial Sequence
  MKO10094005_B_Ivl
  gRNA
ttatcaaggaccaaaaagcc

SEQ ID NO: 94006 - DNA, 20 bp, Artificial Sequence
  MKO10094006_B_Ivl
  gRNA
tttactagtgcttgatccag

SEQ ID NO: 94007 - DNA, 20 bp, Artificial Sequence
  MKO10094007_B_Ivl
  gRNA
agattactcacatctagaac

SEQ ID NO: 94008 - DNA, 20 bp, Artificial Sequence
  MKO10094008_B_Ivns1abp
  gRNA
gccatgagatgctagcacac

SEQ ID NO: 94009 - DNA, 20 bp, Artificial Sequence
  MKO10094009_B_Ivns1abp
  gRNA
ctactccttacctttagtct

SEQ ID NO: 94010 - DNA, 20 bp, Artificial Sequence
  MKO10094010_B_Ivns1abp
  gRNA
ttcacatgagaaactccatg

SEQ ID NO: 94011 - DNA, 20 bp, Artificial Sequence
  MKO10094011_B_Iws1
  gRNA
caaaccccgagtcagcgact

SEQ ID NO: 94012 - DNA, 20 bp, Artificial Sequence
  MKO10094012_B_Iws1
  gRNA
ctctgatagtgatgttgtat

SEQ ID NO: 94013 - DNA, 20 bp, Artificial Sequence
  MKO10094013_B_Iws1
  gRNA
tttgggagtgacagtgagtc

SEQ ID NO: 94014 - DNA, 20 bp, Artificial Sequence
  MKO10094014_B_Iyd
  gRNA
tcctcgtctgagggtgctcc

SEQ ID NO: 94015 - DNA, 20 bp, Artificial Sequence
  MKO10094015_B_Iyd
  gRNA
cactgatctcgttgtagtag

SEQ ID NO: 94016 - DNA, 20 bp, Artificial Sequence
  MKO10094016_B_Iyd
  gRNA
gatcagagagattatcgaag

SEQ ID NO: 94017 - DNA, 20 bp, Artificial Sequence
  MKO10094017_B_Izumo1
  gRNA
cctaggagagctctttataa

SEQ ID NO: 94018 - DNA, 20 bp, Artificial Sequence
  MKO10094018_B_Izumo1
  gRNA
gtggatgcttcgtcatcaaa

SEQ ID NO: 94019 - DNA, 20 bp, Artificial Sequence
  MKO10094019_B_Izumo1
  gRNA
gttctttgtcccaacaaatg

SEQ ID NO: 94020 - DNA, 20 bp, Artificial Sequence
  MKO10094020_B_Izumo2
  gRNA
gaaccaagcccagtatataa

SEQ ID NO: 94021 - DNA, 20 bp, Artificial Sequence
  MKO10094021_B_Izumo2
  gRNA
cttcagggaacatgccatca

SEQ ID NO: 94022 - DNA, 20 bp, Artificial Sequence
  MKO10094022_B_Izumo2
  gRNA
ttcctcagacgttcctctgc

SEQ ID NO: 94023 - DNA, 20 bp, Artificial Sequence
  MKO10094023_B_Izumo3
  gRNA
taaggagtctttatcattca

SEQ ID NO: 94024 - DNA, 20 bp, Artificial Sequence
  MKO10094024_B_Izumo3
  gRNA
atgtgatcaaattgagagaa

SEQ ID NO: 94025 - DNA, 20 bp, Artificial Sequence
  MKO10094025_B_Izumo3
  gRNA
tcgattgttggaactgtctt

SEQ ID NO: 94026 - DNA, 20 bp, Artificial Sequence
  MKO10094026_B_Izumo4
  gRNA
attgactgtcagcgtcactg

SEQ ID NO: 94027 - DNA, 20 bp, Artificial Sequence
  MKO10094027_B_Izumo4
  gRNA
agtagccaaagcaaatgacg

SEQ ID NO: 94028 - DNA, 20 bp, Artificial Sequence
  MKO10094028_B_Izumo4
  gRNA
caggggaagatgtacttccc

SEQ ID NO: 94029 - DNA, 20 bp, Artificial Sequence
  MKO10094029_B_Jade1
  gRNA
tcgttgccgtcctcgccatc

SEQ ID NO: 94030 - DNA, 20 bp, Artificial Sequence
  MKO10094030_B_Jade1
  gRNA
cctcaggcttgtcaacgaca

SEQ ID NO: 94031 - DNA, 20 bp, Artificial Sequence
  MKO10094031_B_Jade1
  gRNA
aggtactactcctcccatgc

SEQ ID NO: 94032 - DNA, 20 bp, Artificial Sequence
  MKO10094032_B_Jade2
  gRNA
gctgggcatcgagtacgacg

SEQ ID NO: 94033 - DNA, 20 bp, Artificial Sequence
  MKO10094033_B_Jade2
  gRNA
agtacgcatcgatctcatcc

SEQ ID NO: 94034 - DNA, 20 bp, Artificial Sequence
  MKO10094034_B_Jade2
  gRNA
ttctcccattcttgtcgcca

SEQ ID NO: 94035 - DNA, 20 bp, Artificial Sequence
  MKO10094035_B_Jade3
  gRNA
ctctgagatcttccaacgta

SEQ ID NO: 94036 - DNA, 20 bp, Artificial Sequence
  MKO10094036_B_Jade3
  gRNA
ctgatccaatctgctagact

SEQ ID NO: 94037 - DNA, 20 bp, Artificial Sequence
  MKO10094037_B_Jade3
  gRNA
agccttgcttctgttgtcta

SEQ ID NO: 94038 - DNA, 20 bp, Artificial Sequence
  MKO10094038_B_Jag1
  gRNA
atgggtcctgattgcaacaa

SEQ ID NO: 94039 - DNA, 20 bp, Artificial Sequence
  MKO10094039_B_Jag1
  gRNA
cttacgaatagtgtcattac

SEQ ID NO: 94040 - DNA, 20 bp, Artificial Sequence
  MKO10094040_B_Jag1
  gRNA
ggcctccaccagcaaagtgt

SEQ ID NO: 94041 - DNA, 20 bp, Artificial Sequence
  MKO10094041_B_Jag2
  gRNA
cactatacctgcgaccagta

SEQ ID NO: 94042 - DNA, 20 bp, Artificial Sequence
  MKO10094042_B_Jag2
  gRNA
ggcatactcaccatctggag

SEQ ID NO: 94043 - DNA, 20 bp, Artificial Sequence
  MKO10094043_B_Jag2
  gRNA
agtcccaggcctccacgatg

SEQ ID NO: 94044 - DNA, 20 bp, Artificial Sequence
  MKO10094044_B_Jagn1
  gRNA
agcgataggccttgccatgg

SEQ ID NO: 94045 - DNA, 20 bp, Artificial Sequence
  MKO10094045_B_Jagn1
  gRNA
gcaactctaccgccatggca

SEQ ID NO: 94046 - DNA, 20 bp, Artificial Sequence
  MKO10094046_B_Jagn1
  gRNA
gcttcttgatttcgtacttg

SEQ ID NO: 94047 - DNA, 20 bp, Artificial Sequence
  MKO10094047_B_Jak1
  gRNA
gaaggcgtacctgatgtctt

SEQ ID NO: 94048 - DNA, 20 bp, Artificial Sequence
  MKO10094048_B_Jak1
  gRNA
gtatgatttgatcaaatgcc

SEQ ID NO: 94049 - DNA, 20 bp, Artificial Sequence
  MKO10094049_B_Jak1
  gRNA
tagaaagtcacctccactcc

SEQ ID NO: 94050 - DNA, 20 bp, Artificial Sequence
  MKO10094050_B_Jak2
  gRNA
cgttaatgagtgaaaccgaa

SEQ ID NO: 94051 - DNA, 20 bp, Artificial Sequence
  MKO10094051_B_Jak2
  gRNA
atctgtacctgattcgcttc

SEQ ID NO: 94052 - DNA, 20 bp, Artificial Sequence
  MKO10094052_B_Jak2
  gRNA
ctgccactacagtaccaatg

SEQ ID NO: 94053 - DNA, 20 bp, Artificial Sequence
  MKO10094053_B_Jak3
  gRNA
aatctttgcgcagcccaaag

SEQ ID NO: 94054 - DNA, 20 bp, Artificial Sequence
  MKO10094054_B_Jak3
  gRNA
gacccagcaccgcagtgacc

SEQ ID NO: 94055 - DNA, 20 bp, Artificial Sequence
  MKO10094055_B_Jak3
  gRNA
cccggtgggccttagcatga

SEQ ID NO: 94056 - DNA, 20 bp, Artificial Sequence
  MKO10094056_B_Jakmip1
  gRNA
tctccacgttctccctcgtg

SEQ ID NO: 94057 - DNA, 20 bp, Artificial Sequence
  MKO10094057_B_Jakmip1
  gRNA
tgctgcagctgaagcgctct

SEQ ID NO: 94058 - DNA, 20 bp, Artificial Sequence
  MKO10094058_B_Jakmip1
  gRNA
taccagatggacgagatcaa

SEQ ID NO: 94059 - DNA, 20 bp, Artificial Sequence
  MKO10094059_B_Jakmip2
  gRNA
gtcttctaactttcgtatag

SEQ ID NO: 94060 - DNA, 20 bp, Artificial Sequence
  MKO10094060_B_Jakmip2
  gRNA
attccgctcatctccaagca

SEQ ID NO: 94061 - DNA, 20 bp, Artificial Sequence
  MKO10094061_B_Jakmip2
  gRNA
catcagttcatcgtttctct

SEQ ID NO: 94062 - DNA, 20 bp, Artificial Sequence
  MKO10094062_B_Jakmip3
  gRNA
atccacgccaaactcttggc

SEQ ID NO: 94063 - DNA, 20 bp, Artificial Sequence
  MKO10094063_B_Jakmip3
  gRNA
cgggaacttccttatgcaag

SEQ ID NO: 94064 - DNA, 20 bp, Artificial Sequence
  MKO10094064_B_Jakmip3
  gRNA
tctcctgcaccgcttgcata

SEQ ID NO: 94065 - DNA, 20 bp, Artificial Sequence
  MKO10094065_B_Jam2
  gRNA
ctccttggtctactaccaac

SEQ ID NO: 94066 - DNA, 20 bp, Artificial Sequence
  MKO10094066_B_Jam2
  gRNA
gttgttcctagaggctattt

SEQ ID NO: 94067 - DNA, 20 bp, Artificial Sequence
  MKO10094067_B_Jam2
  gRNA
aaagtcatgctagaagtact

SEQ ID NO: 94068 - DNA, 20 bp, Artificial Sequence
  MKO10094068_B_Jam3
  gRNA
agtgttgccgtcttgcctac

SEQ ID NO: 94069 - DNA, 20 bp, Artificial Sequence
  MKO10094069_B_Jam3
  gRNA
ttcagccatctatcgctgtg

SEQ ID NO: 94070 - DNA, 20 bp, Artificial Sequence
  MKO10094070_B_Jam3
  gRNA
ccctttaggctgcatgatag

SEQ ID NO: 94071 - DNA, 20 bp, Artificial Sequence
  MKO10094071_B_Jarid2
  gRNA
actcaccatttaccgccttc

SEQ ID NO: 94072 - DNA, 20 bp, Artificial Sequence
  MKO10094072_B_Jarid2
  gRNA
gcccgttgtgtacatgctta

SEQ ID NO: 94073 - DNA, 20 bp, Artificial Sequence
  MKO10094073_B_Jarid2
  gRNA
cacaactccagtgaagatag

SEQ ID NO: 94074 - DNA, 20 bp, Artificial Sequence
  MKO10094074_B_Jazf1
  gRNA
tccgcaaaccattcaaatgc

SEQ ID NO: 94075 - DNA, 20 bp, Artificial Sequence
  MKO10094075_B_Jazf1
  gRNA
cacaggcagcgagtatgatg

SEQ ID NO: 94076 - DNA, 20 bp, Artificial Sequence
  MKO10094076_B_Jazf1
  gRNA
gctgcagcagccgacctatg

SEQ ID NO: 94077 - DNA, 20 bp, Artificial Sequence
  MKO10094077_B_Jdp2
  gRNA
tcgtgcgcacagatagcgtc

SEQ ID NO: 94078 - DNA, 20 bp, Artificial Sequence
  MKO10094078_B_Jdp2
  gRNA
aacgcacagagtttctgcag

SEQ ID NO: 94079 - DNA, 20 bp, Artificial Sequence
  MKO10094079_B_Jdp2
  gRNA
tgcgttccttcttcttgttc

SEQ ID NO: 94080 - DNA, 20 bp, Artificial Sequence
  MKO10094080_B_Jkamp
  gRNA
tagagccagtcgtaaagttc

SEQ ID NO: 94081 - DNA, 20 bp, Artificial Sequence
  MKO10094081_B_Jkamp
  gRNA
gcatgccttggactctactg

SEQ ID NO: 94082 - DNA, 20 bp, Artificial Sequence
  MKO10094082_B_Jkamp
  gRNA
tcttcccacagtagagtcca

SEQ ID NO: 94083 - DNA, 20 bp, Artificial Sequence
  MKO10094083_B_Jmjd1c
  gRNA
catgatcgttatgaatgatc

SEQ ID NO: 94084 - DNA, 20 bp, Artificial Sequence
  MKO10094084_B_Jmjd1c
  gRNA
gacaagattctgccacccag

SEQ ID NO: 94085 - DNA, 20 bp, Artificial Sequence
  MKO10094085_B_Jmjd1c
  gRNA
aaatatgattgtgtatcacg

SEQ ID NO: 94086 - DNA, 20 bp, Artificial Sequence
  MKO10094086_B_Jmjd4
  gRNA
tgcaggagacgcggttgtac

SEQ ID NO: 94087 - DNA, 20 bp, Artificial Sequence
  MKO10094087_B_Jmjd4
  gRNA
ggcgttcggggtctgaatga

SEQ ID NO: 94088 - DNA, 20 bp, Artificial Sequence
  MKO10094088_B_Jmjd4
  gRNA
ttaccaggttgtacacttga

SEQ ID NO: 94089 - DNA, 20 bp, Artificial Sequence
  MKO10094089_B_Jmjd6
  gRNA
tgagtccgagtctgacgagc

SEQ ID NO: 94090 - DNA, 20 bp, Artificial Sequence
  MKO10094090_B_Jmjd6
  gRNA
ggccaccgcgttctggaact

SEQ ID NO: 94091 - DNA, 20 bp, Artificial Sequence
  MKO10094091_B_Jmjd6
  gRNA
accgtcttgtgccacacaac

SEQ ID NO: 94092 - DNA, 20 bp, Artificial Sequence
  MKO10094092_B_Jmjd7
  gRNA
caccttaccttaagtaggac

SEQ ID NO: 94093 - DNA, 20 bp, Artificial Sequence
  MKO10094093_B_Jmjd7
  gRNA
tgttacatccacccagcgac

SEQ ID NO: 94094 - DNA, 20 bp, Artificial Sequence
  MKO10094094_B_Jmjd7
  gRNA
aatctgtactgtgtagtctc

SEQ ID NO: 94095 - DNA, 20 bp, Artificial Sequence
  MKO10094095_B_Jmjd8
  gRNA
ctcaagcccgtcatcttgca

SEQ ID NO: 94096 - DNA, 20 bp, Artificial Sequence
  MKO10094096_B_Jmjd8
  gRNA
agcgttgcacagtggagcgt

SEQ ID NO: 94097 - DNA, 20 bp, Artificial Sequence
  MKO10094097_B_Jmjd8
  gRNA
cacatactgctgcatgaatt

SEQ ID NO: 94098 - DNA, 20 bp, Artificial Sequence
  MKO10094098_B_Jmy
  gRNA
tgtagactctcaattcttcg

SEQ ID NO: 94099 - DNA, 20 bp, Artificial Sequence
  MKO10094099_B_Jmy
  gRNA
agttctcgcatgtctcggaa

SEQ ID NO: 94100 - DNA, 20 bp, Artificial Sequence
  MKO10094100_B_Jmy
  gRNA
ttccatggagaatgattatt

SEQ ID NO: 94101 - DNA, 20 bp, Artificial Sequence
  MKO10094101_B_Josd1
  gRNA
aaaacatgagttgcgtgcca

SEQ ID NO: 94102 - DNA, 20 bp, Artificial Sequence
  MKO10094102_B_Josd1
  gRNA
ccaaacagcttcatagcctt

SEQ ID NO: 94103 - DNA, 20 bp, Artificial Sequence
  MKO10094103_B_Josd1
  gRNA
cattgctcttactaatgtca

SEQ ID NO: 94104 - DNA, 20 bp, Artificial Sequence
  MKO10094104_B_Josd2
  gRNA
tgactccatcctcgtccccc

SEQ ID NO: 94105 - DNA, 20 bp, Artificial Sequence
  MKO10094105_B_Josd2
  gRNA
acccagtgtcggcggcgcag

SEQ ID NO: 94106 - DNA, 20 bp, Artificial Sequence
  MKO10094106_B_Josd2
  gRNA
gaacccccatcgcagtctct

SEQ ID NO: 94107 - DNA, 20 bp, Artificial Sequence
  MKO10094107_B_Jph1
  gRNA
ttagggggaccccacttgtt

SEQ ID NO: 94108 - DNA, 20 bp, Artificial Sequence
  MKO10094108_B_Jph1
  gRNA
ctcttgctatgtcgcactcc

SEQ ID NO: 94109 - DNA, 20 bp, Artificial Sequence
  MKO10094109_B_Jph1
  gRNA
taattccatcatgattgtcc

SEQ ID NO: 94110 - DNA, 20 bp, Artificial Sequence
  MKO10094110_B_Jph2
  gRNA
cagccggcccgccacgccgt

SEQ ID NO: 94111 - DNA, 20 bp, Artificial Sequence
  MKO10094111_B_Jph2
  gRNA
gtccaacatcgcccgtacat

SEQ ID NO: 94112 - DNA, 20 bp, Artificial Sequence
  MKO10094112_B_Jph2
  gRNA
gatcttgctgaacatcggcc

SEQ ID NO: 94113 - DNA, 20 bp, Artificial Sequence
  MKO10094113_B_Jph3
  gRNA
gatgtcctgcgatgatatcg

SEQ ID NO: 94114 - DNA, 20 bp, Artificial Sequence
  MKO10094114_B_Jph3
  gRNA
atggtgatcctgctcaacat

SEQ ID NO: 94115 - DNA, 20 bp, Artificial Sequence
  MKO10094115_B_Jph3
  gRNA
gatcaccatgacgaccaaga

SEQ ID NO: 94116 - DNA, 20 bp, Artificial Sequence
  MKO10094116_B_Jph4
  gRNA
agccttctccgcgacgctgc

SEQ ID NO: 94117 - DNA, 20 bp, Artificial Sequence
  MKO10094117_B_Jph4
  gRNA
cactcctcgggccaagcttt

SEQ ID NO: 94118 - DNA, 20 bp, Artificial Sequence
  MKO10094118_B_Jph4
  gRNA
agccagcagcgtcgcggaga

SEQ ID NO: 94119 - DNA, 20 bp, Artificial Sequence
  MKO10094119_B_Jrkl
  gRNA
atgtgttgcaccaatgcaac

SEQ ID NO: 94120 - DNA, 20 bp, Artificial Sequence
  MKO10094120_B_Jrkl
  gRNA
aggctcatccaagcaattgg

SEQ ID NO: 94121 - DNA, 20 bp, Artificial Sequence
  MKO10094121_B_Jrkl
  gRNA
aaaaaagaactctgcccgtt

SEQ ID NO: 94122 - DNA, 20 bp, Artificial Sequence
  MKO10094122_B_Jrk
  gRNA
gggccctatgctcatcgaaa

SEQ ID NO: 94123 - DNA, 20 bp, Artificial Sequence
  MKO10094123_B_Jrk
  gRNA
cgcctgccgagagtctgagc

SEQ ID NO: 94124 - DNA, 20 bp, Artificial Sequence
  MKO10094124_B_Jrk
  gRNA
tggaccgggtgctctatgag

SEQ ID NO: 94125 - DNA, 20 bp, Artificial Sequence
  MKO10094125_B_Jsrp1
  gRNA
actcacatgggtccagtcac

SEQ ID NO: 94126 - DNA, 20 bp, Artificial Sequence
  MKO10094126_B_Jsrp1
  gRNA
gctggcgacgcttccttctt

SEQ ID NO: 94127 - DNA, 20 bp, Artificial Sequence
  MKO10094127_B_Jsrp1
  gRNA
tgcctttcagacgcagtggc

SEQ ID NO: 94128 - DNA, 20 bp, Artificial Sequence
  MKO10094128_B_Jtb
  gRNA
gcacttcaacttcgccatgt

SEQ ID NO: 94129 - DNA, 20 bp, Artificial Sequence
  MKO10094129_B_Jtb
  gRNA
acaatctggaagttagaaca

SEQ ID NO: 94130 - DNA, 20 bp, Artificial Sequence
  MKO10094130_B_Jtb
  gRNA
taccctgtagaaccacactc

SEQ ID NO: 94131 - DNA, 20 bp, Artificial Sequence
  MKO10094131_B_Junb
  gRNA
acacgttggggggcgtcacg

SEQ ID NO: 94132 - DNA, 20 bp, Artificial Sequence
  MKO10094132_B_Junb
  gRNA
taagagtcgtcgtgatagaa

SEQ ID NO: 94133 - DNA, 20 bp, Artificial Sequence
  MKO10094133_B_Junb
  gRNA
atccgccaggttgagcgcca

SEQ ID NO: 94134 - DNA, 20 bp, Artificial Sequence
  MKO10094134_B_Jund
  gRNA
cgaagccagcagcccgtcgg

SEQ ID NO: 94135 - DNA, 20 bp, Artificial Sequence
  MKO10094135_B_Jund
  gRNA
gcgggtgcgtcgagcgtcgc

SEQ ID NO: 94136 - DNA, 20 bp, Artificial Sequence
  MKO10094136_B_Jund
  gRNA
ggtagtggtcaccagcccgt

SEQ ID NO: 94137 - DNA, 20 bp, Artificial Sequence
  MKO10094137_B_Jun
  gRNA
tcgttcctccagtccgagag

SEQ ID NO: 94138 - DNA, 20 bp, Artificial Sequence
  MKO10094138_B_Jun
  gRNA
cttagggttactgtagccgt

SEQ ID NO: 94139 - DNA, 20 bp, Artificial Sequence
  MKO10094139_B_Jun
  gRNA
gaaagcgcaaaactccgagc

SEQ ID NO: 94140 - DNA, 20 bp, Artificial Sequence
  MKO10094140_B_Jup
  gRNA
tagcaacaagcccgccatcg

SEQ ID NO: 94141 - DNA, 20 bp, Artificial Sequence
  MKO10094141_B_Jup
  gRNA
gacaaccaatctgcagcgcc

SEQ ID NO: 94142 - DNA, 20 bp, Artificial Sequence
  MKO10094142_B_Jup
  gRNA
cgatggccgacttgagcaac

SEQ ID NO: 94143 - DNA, 20 bp, Artificial Sequence
  MKO10094143_B_Kalrn
  gRNA
ttcaccttaccttggcacgc

SEQ ID NO: 94144 - DNA, 20 bp, Artificial Sequence
  MKO10094144_B_Kalrn
  gRNA
aggggtccaccagcttcgtg

SEQ ID NO: 94145 - DNA, 20 bp, Artificial Sequence
  MKO10094145_B_Kalrn
  gRNA
gccccgcatgtcgatgatga

SEQ ID NO: 94146 - DNA, 20 bp, Artificial Sequence
  MKO10094146_B_Kank1
  gRNA
gtcacactcgtcatctgact

SEQ ID NO: 94147 - DNA, 20 bp, Artificial Sequence
  MKO10094147_B_Kank1
  gRNA
agacttaccgtagaggccag

SEQ ID NO: 94148 - DNA, 20 bp, Artificial Sequence
  MKO10094148_B_Kank1
  gRNA
gggcagggtacttccttgca

SEQ ID NO: 94149 - DNA, 20 bp, Artificial Sequence
  MKO10094149_B_Kank2
  gRNA
tgcagtggccacgaccagtc

SEQ ID NO: 94150 - DNA, 20 bp, Artificial Sequence
  MKO10094150_B_Kank2
  gRNA
cgccattgactcccacaaac

SEQ ID NO: 94151 - DNA, 20 bp, Artificial Sequence
  MKO10094151_B_Kank2
  gRNA
cagaccctgaagtcaaccag

SEQ ID NO: 94152 - DNA, 20 bp, Artificial Sequence
  MKO10094152_B_Kank3
  gRNA
cccaagagtctgcagttcgt

SEQ ID NO: 94153 - DNA, 20 bp, Artificial Sequence
  MKO10094153_B_Kank3
  gRNA
atcgctgttgccatcctcac

SEQ ID NO: 94154 - DNA, 20 bp, Artificial Sequence
  MKO10094154_B_Kank3
  gRNA
ccctgactggattgtgcacc

SEQ ID NO: 94155 - DNA, 20 bp, Artificial Sequence
  MKO10094155_B_Kank4
  gRNA
tgctcagctcgatttcgtcc

SEQ ID NO: 94156 - DNA, 20 bp, Artificial Sequence
  MKO10094156_B_Kank4
  gRNA
cgcgttaagaaattcctctg

SEQ ID NO: 94157 - DNA, 20 bp, Artificial Sequence
  MKO10094157_B_Kank4
  gRNA
tggtatccccagtttccggc

SEQ ID NO: 94158 - DNA, 20 bp, Artificial Sequence
  MKO10094158_B_Kansl1l
  gRNA
taaaggctcttcactcctct

SEQ ID NO: 94159 - DNA, 20 bp, Artificial Sequence
  MKO10094159_B_Kansl1l
  gRNA
tagaggcacgaatctgcctg

SEQ ID NO: 94160 - DNA, 20 bp, Artificial Sequence
  MKO10094160_B_Kansl1l
  gRNA
tgccattagccagacatttg

SEQ ID NO: 94161 - DNA, 20 bp, Artificial Sequence
  MKO10094161_B_Kansl1
  gRNA
ctgttaacaactccattgac

SEQ ID NO: 94162 - DNA, 20 bp, Artificial Sequence
  MKO10094162_B_Kansl1
  gRNA
gagcagctattgtcagccgc

SEQ ID NO: 94163 - DNA, 20 bp, Artificial Sequence
  MKO10094163_B_Kansl1
  gRNA
agtaagtctgttgtatgatc

SEQ ID NO: 94164 - DNA, 20 bp, Artificial Sequence
  MKO10094164_B_Kansl2
  gRNA
caaatgaagaagagcaaccc

SEQ ID NO: 94165 - DNA, 20 bp, Artificial Sequence
  MKO10094165_B_Kansl2
  gRNA
ttgatcactgtctatgctat

SEQ ID NO: 94166 - DNA, 20 bp, Artificial Sequence
  MKO10094166_B_Kansl2
  gRNA
tgtctatacagctgaagaag

SEQ ID NO: 94167 - DNA, 20 bp, Artificial Sequence
  MKO10094167_B_Kansl3
  gRNA
gtcagacgttccaatagatg

SEQ ID NO: 94168 - DNA, 20 bp, Artificial Sequence
  MKO10094168_B_Kansl3
  gRNA
acagccacgcgacgcagcac

SEQ ID NO: 94169 - DNA, 20 bp, Artificial Sequence
  MKO10094169_B_Kansl3
  gRNA
gtgaccgtctccacatctat

SEQ ID NO: 94170 - DNA, 20 bp, Artificial Sequence
  MKO10094170_B_Kap
  gRNA
gagactggattcccagctaa

SEQ ID NO: 94171 - DNA, 20 bp, Artificial Sequence
  MKO10094171_B_Kap
  gRNA
tacacatacctaattctgac

SEQ ID NO: 94172 - DNA, 20 bp, Artificial Sequence
  MKO10094172_B_Kap
  gRNA
ctggtgatcactgtcttctg

SEQ ID NO: 94173 - DNA, 20 bp, Artificial Sequence
  MKO10094173_B_Kars
  gRNA
ccacgccattgtcagccgtg

SEQ ID NO: 94174 - DNA, 20 bp, Artificial Sequence
  MKO10094174_B_Kars
  gRNA
tgcttccgctcccaaccaca

SEQ ID NO: 94175 - DNA, 20 bp, Artificial Sequence
  MKO10094175_B_Kars
  gRNA
ctcatcttctatgacctgcg

SEQ ID NO: 94176 - DNA, 20 bp, Artificial Sequence
  MKO10094176_B_Kat2a
  gRNA
ctggaggtccatgcggggtg

SEQ ID NO: 94177 - DNA, 20 bp, Artificial Sequence
  MKO10094177_B_Kat2a
  gRNA
cgccctacctgttcaatgtt

SEQ ID NO: 94178 - DNA, 20 bp, Artificial Sequence
  MKO10094178_B_Kat2a
  gRNA
ccgtagctgtgagcaccctt

SEQ ID NO: 94179 - DNA, 20 bp, Artificial Sequence
  MKO10094179_B_Kat2b
  gRNA
tatgcttacctgttcaatac

SEQ ID NO: 94180 - DNA, 20 bp, Artificial Sequence
  MKO10094180_B_Kat2b
  gRNA
taggtagaagtacacttgtt

SEQ ID NO: 94181 - DNA, 20 bp, Artificial Sequence
  MKO10094181_B_Kat2b
  gRNA
tgagaagcccagtattgaac

SEQ ID NO: 94182 - DNA, 20 bp, Artificial Sequence
  MKO10094182_B_Kat5
  gRNA
ggacccaggaagtccgttct

SEQ ID NO: 94183 - DNA, 20 bp, Artificial Sequence
  MKO10094183_B_Kat5
  gRNA
gccactcatcttcgttgtcc

SEQ ID NO: 94184 - DNA, 20 bp, Artificial Sequence
  MKO10094184_B_Kat5
  gRNA
tccccagggggagataatcg

SEQ ID NO: 94185 - DNA, 20 bp, Artificial Sequence
  MKO10094185_B_Kat6a
  gRNA
tgcagctcctgtcgtgacca

SEQ ID NO: 94186 - DNA, 20 bp, Artificial Sequence
  MKO10094186_B_Kat6a
  gRNA
gctattgccgcagtccgcgc

SEQ ID NO: 94187 - DNA, 20 bp, Artificial Sequence
  MKO10094187_B_Kat6a
  gRNA
ctcgtctcctgcgcggactg

SEQ ID NO: 94188 - DNA, 20 bp, Artificial Sequence
  MKO10094188_B_Kat6b
  gRNA
cccaaacagaagctacatat

SEQ ID NO: 94189 - DNA, 20 bp, Artificial Sequence
  MKO10094189_B_Kat6b
  gRNA
tgccacaatctgcacaagac

SEQ ID NO: 94190 - DNA, 20 bp, Artificial Sequence
  MKO10094190_B_Kat6b
  gRNA
ccactttccagaatgccaaa

SEQ ID NO: 94191 - DNA, 20 bp, Artificial Sequence
  MKO10094191_B_Kat7
  gRNA
cctctcagctgacgaatgca

SEQ ID NO: 94192 - DNA, 20 bp, Artificial Sequence
  MKO10094192_B_Kat7
  gRNA
ccttgcattcgtcagctgag

SEQ ID NO: 94193 - DNA, 20 bp, Artificial Sequence
  MKO10094193_B_Kat7
  gRNA
ctcgagatctgtagaaaaat

SEQ ID NO: 94194 - DNA, 20 bp, Artificial Sequence
  MKO10094194_B_Kat8
  gRNA
tttcgagtgatcttgcgctc

SEQ ID NO: 94195 - DNA, 20 bp, Artificial Sequence
  MKO10094195_B_Kat8
  gRNA
gaagagctaccgcttccacc

SEQ ID NO: 94196 - DNA, 20 bp, Artificial Sequence
  MKO10094196_B_Kat8
  gRNA
ccagtctcgagtgaatgacc

SEQ ID NO: 94197 - DNA, 20 bp, Artificial Sequence
  MKO10094197_B_Katna1
  gRNA
caaggacttagtagaagctt

SEQ ID NO: 94198 - DNA, 20 bp, Artificial Sequence
  MKO10094198_B_Katna1
  gRNA
tgcctgtacctgttgagcga

SEQ ID NO: 94199 - DNA, 20 bp, Artificial Sequence
  MKO10094199_B_Katna1
  gRNA
cgtttcctaggtcctggtaa

SEQ ID NO: 94200 - DNA, 20 bp, Artificial Sequence
  MKO10094200_B_Katnal1
  gRNA
tagtccttgtcccgacttgc

SEQ ID NO: 94201 - DNA, 20 bp, Artificial Sequence
  MKO10094201_B_Katnal1
  gRNA
cgtttagagaccctgcagta

SEQ ID NO: 94202 - DNA, 20 bp, Artificial Sequence
  MKO10094202_B_Katnal1
  gRNA
agcgagattcccaagtttga

SEQ ID NO: 94203 - DNA, 20 bp, Artificial Sequence
  MKO10094203_B_Katnal2
  gRNA
tgtcaaggaacaccttaaac

SEQ ID NO: 94204 - DNA, 20 bp, Artificial Sequence
  MKO10094204_B_Katnal2
  gRNA
cagtcaccttgacctgttta

SEQ ID NO: 94205 - DNA, 20 bp, Artificial Sequence
  MKO10094205_B_Katnal2
  gRNA
ttcttccctccacttcgtga

SEQ ID NO: 94206 - DNA, 20 bp, Artificial Sequence
  MKO10094206_B_Katnb1
  gRNA
attagttcttcgaacactca

SEQ ID NO: 94207 - DNA, 20 bp, Artificial Sequence
  MKO10094207_B_Katnb1
  gRNA
atgactgccgagtcaacctg

SEQ ID NO: 94208 - DNA, 20 bp, Artificial Sequence
  MKO10094208_B_Katnb1
  gRNA
ttatggaccacaggttgact

SEQ ID NO: 94209 - DNA, 20 bp, Artificial Sequence
  MKO10094209_B_Katnbl1
  gRNA
ggcaatctaccacaactcca

SEQ ID NO: 94210 - DNA, 20 bp, Artificial Sequence
  MKO10094210_B_Katnbl1
  gRNA
aattcctgctgaatagaacc

SEQ ID NO: 94211 - DNA, 20 bp, Artificial Sequence
  MKO10094211_B_Katnbl1
  gRNA
aacttgtagcttatttagtg

SEQ ID NO: 94212 - DNA, 20 bp, Artificial Sequence
  MKO10094212_B_Kazald1
  gRNA
cggtaggtgccctcatcact

SEQ ID NO: 94213 - DNA, 20 bp, Artificial Sequence
  MKO10094213_B_Kazald1
  gRNA
acaaactccgtgattgcagc

SEQ ID NO: 94214 - DNA, 20 bp, Artificial Sequence
  MKO10094214_B_Kazald1
  gRNA
agagttgggcgattactact

SEQ ID NO: 94215 - DNA, 20 bp, Artificial Sequence
  MKO10094215_B_Kazn
  gRNA
gactcaccttgccggtctgc

SEQ ID NO: 94216 - DNA, 20 bp, Artificial Sequence
  MKO10094216_B_Kazn
  gRNA
tgaggtccagctgggagcgc

SEQ ID NO: 94217 - DNA, 20 bp, Artificial Sequence
  MKO10094217_B_Kazn
  gRNA
cccacttctctcgctccagc

SEQ ID NO: 94218 - DNA, 20 bp, Artificial Sequence
  MKO10094218_B_Kbtbd11
  gRNA
acgacccgcgagctgaccga

SEQ ID NO: 94219 - DNA, 20 bp, Artificial Sequence
  MKO10094219_B_Kbtbd11
  gRNA
cgtttattgctaccaggcgg

SEQ ID NO: 94220 - DNA, 20 bp, Artificial Sequence
  MKO10094220_B_Kbtbd11
  gRNA
ccgccttatgcgcccgtagt

SEQ ID NO: 94221 - DNA, 20 bp, Artificial Sequence
  MKO10094221_B_Kbtbd12
  gRNA
ccttgcaggtatcatgatag

SEQ ID NO: 94222 - DNA, 20 bp, Artificial Sequence
  MKO10094222_B_Kbtbd12
  gRNA
caacgttcagaccgtagcca

SEQ ID NO: 94223 - DNA, 20 bp, Artificial Sequence
  MKO10094223_B_Kbtbd12
  gRNA
tggtctccatgccatagcga

SEQ ID NO: 94224 - DNA, 20 bp, Artificial Sequence
  MKO10094224_B_Kbtbd13
  gRNA
gtgcgtgctcaccgccacgt

SEQ ID NO: 94225 - DNA, 20 bp, Artificial Sequence
  MKO10094225_B_Kbtbd13
  gRNA
gggtcgcagcgccgccacgt

SEQ ID NO: 94226 - DNA, 20 bp, Artificial Sequence
  MKO10094226_B_Kbtbd13
  gRNA
cactgccgttgtcgagtatg

SEQ ID NO: 94227 - DNA, 20 bp, Artificial Sequence
  MKO10094227_B_Kbtbd2
  gRNA
cggcagcgtccacattcctc

SEQ ID NO: 94228 - DNA, 20 bp, Artificial Sequence
  MKO10094228_B_Kbtbd2
  gRNA
cgaatatgctgtgtccttat

SEQ ID NO: 94229 - DNA, 20 bp, Artificial Sequence
  MKO10094229_B_Kbtbd2
  gRNA
caacatgtagctcctatttc

SEQ ID NO: 94230 - DNA, 20 bp, Artificial Sequence
  MKO10094230_B_Kbtbd3
  gRNA
gctaactgatgtccactctc

SEQ ID NO: 94231 - DNA, 20 bp, Artificial Sequence
  MKO10094231_B_Kbtbd3
  gRNA
agaaccttgtacacacttaa

SEQ ID NO: 94232 - DNA, 20 bp, Artificial Sequence
  MKO10094232_B_Kbtbd3
  gRNA
ttaagtacaacttagagtcc

SEQ ID NO: 94233 - DNA, 20 bp, Artificial Sequence
  MKO10094233_B_Kbtbd4
  gRNA
ggctaccatggagtcaccag

SEQ ID NO: 94234 - DNA, 20 bp, Artificial Sequence
  MKO10094234_B_Kbtbd4
  gRNA
caagctagtccttagtgact

SEQ ID NO: 94235 - DNA, 20 bp, Artificial Sequence
  MKO10094235_B_Kbtbd4
  gRNA
ttggatcaatttcaataaag

SEQ ID NO: 94236 - DNA, 20 bp, Artificial Sequence
  MKO10094236_B_Kbtbd7
  gRNA
gcgaaatgcaccagatcagt

SEQ ID NO: 94237 - DNA, 20 bp, Artificial Sequence
  MKO10094237_B_Kbtbd7
  gRNA
tatcaccaaatcgcagctgc

SEQ ID NO: 94238 - DNA, 20 bp, Artificial Sequence
  MKO10094238_B_Kbtbd7
  gRNA
gccgtctcctttgactagct

SEQ ID NO: 94239 - DNA, 20 bp, Artificial Sequence
  MKO10094239_B_Kbtbd8
  gRNA
ccctgtagtaatggccgcgt

SEQ ID NO: 94240 - DNA, 20 bp, Artificial Sequence
  MKO10094240_B_Kbtbd8
  gRNA
ctcaaaacaatgtacgatga

SEQ ID NO: 94241 - DNA, 20 bp, Artificial Sequence
  MKO10094241_B_Kbtbd8
  gRNA
attggagggcgtgtttacga

SEQ ID NO: 94242 - DNA, 20 bp, Artificial Sequence
  MKO10094242_B_Kcmf1
  gRNA
cgatgcagtgcatattaaca

SEQ ID NO: 94243 - DNA, 20 bp, Artificial Sequence
  MKO10094243_B_Kcmf1
  gRNA
tccaggtaacgctgcacata

SEQ ID NO: 94244 - DNA, 20 bp, Artificial Sequence
  MKO10094244_B_Kcmf1
  gRNA
cttgttaatatgcactgcat

SEQ ID NO: 94245 - DNA, 20 bp, Artificial Sequence
  MKO10094245_B_Kcna10
  gRNA
ctcgctacccagttcataga

SEQ ID NO: 94246 - DNA, 20 bp, Artificial Sequence
  MKO10094246_B_Kcna10
  gRNA
aagctttctcgacactctaa

SEQ ID NO: 94247 - DNA, 20 bp, Artificial Sequence
  MKO10094247_B_Kcna10
  gRNA
tcaccagacgaatgatcctc

SEQ ID NO: 94248 - DNA, 20 bp, Artificial Sequence
  MKO10094248_B_Kcna1
  gRNA
cgagaaggagtaccagcgcc

SEQ ID NO: 94249 - DNA, 20 bp, Artificial Sequence
  MKO10094249_B_Kcna1
  gRNA
aagtagcgcatgcgtttctt

SEQ ID NO: 94250 - DNA, 20 bp, Artificial Sequence
  MKO10094250_B_Kcna1
  gRNA
ggctccttgtgtgccatcgc

SEQ ID NO: 94251 - DNA, 20 bp, Artificial Sequence
  MKO10094251_B_Kcna2
  gRNA
cgtgcccttagatatcttct

SEQ ID NO: 94252 - DNA, 20 bp, Artificial Sequence
  MKO10094252_B_Kcna2
  gRNA
agcttgtcacttgcaagtac

SEQ ID NO: 94253 - DNA, 20 bp, Artificial Sequence
  MKO10094253_B_Kcna2
  gRNA
cccgatggtgctgttggaat

SEQ ID NO: 94254 - DNA, 20 bp, Artificial Sequence
  MKO10094254_B_Kcna3
  gRNA
agattgctgcggcgagcgtg

SEQ ID NO: 94255 - DNA, 20 bp, Artificial Sequence
  MKO10094255_B_Kcna3
  gRNA
gcagcaatcttgctcgcccg

SEQ ID NO: 94256 - DNA, 20 bp, Artificial Sequence
  MKO10094256_B_Kcna3
  gRNA
gtctttctcatcgcgaaact

SEQ ID NO: 94257 - DNA, 20 bp, Artificial Sequence
  MKO10094257_B_Kcna4
  gRNA
gagcgagtctctcccgctct

SEQ ID NO: 94258 - DNA, 20 bp, Artificial Sequence
  MKO10094258_B_Kcna4
  gRNA
tcttcaggcggcctcctgac

SEQ ID NO: 94259 - DNA, 20 bp, Artificial Sequence
  MKO10094259_B_Kcna4
  gRNA
caatagagattaagatgacc

SEQ ID NO: 94260 - DNA, 20 bp, Artificial Sequence
  MKO10094260_B_Kcna5
  gRNA
tgattattgagtccagccgt

SEQ ID NO: 94261 - DNA, 20 bp, Artificial Sequence
  MKO10094261_B_Kcna5
  gRNA
gggcatacagagaccttcgc

SEQ ID NO: 94262 - DNA, 20 bp, Artificial Sequence
  MKO10094262_B_Kcna5
  gRNA
ggctgacccattcttcatcg

SEQ ID NO: 94263 - DNA, 20 bp, Artificial Sequence
  MKO10094263_B_Kcna6
  gRNA
gatgaccaatactgagacga

SEQ ID NO: 94264 - DNA, 20 bp, Artificial Sequence
  MKO10094264_B_Kcna6
  gRNA
tggaaactctgtgtatcgtc

SEQ ID NO: 94265 - DNA, 20 bp, Artificial Sequence
  MKO10094265_B_Kcna6
  gRNA
cagtatacccacgtcacttg

SEQ ID NO: 94266 - DNA, 20 bp, Artificial Sequence
  MKO10094266_B_Kcna7
  gRNA
gatgaacctaattgacttcg

SEQ ID NO: 94267 - DNA, 20 bp, Artificial Sequence
  MKO10094267_B_Kcna7
  gRNA
gtcggtcgaagaaatactcg

SEQ ID NO: 94268 - DNA, 20 bp, Artificial Sequence
  MKO10094268_B_Kcna7
  gRNA
cgtgcgccggccgtctcagc

SEQ ID NO: 94269 - DNA, 20 bp, Artificial Sequence
  MKO10094269_B_Kcnab1
  gRNA
tctaggaatcttgggaaatc

SEQ ID NO: 94270 - DNA, 20 bp, Artificial Sequence
  MKO10094270_B_Kcnab1
  gRNA
agagtttcatgcttgggtct

SEQ ID NO: 94271 - DNA, 20 bp, Artificial Sequence
  MKO10094271_B_Kcnab1
  gRNA
ccaggaacatgggtgacatt

SEQ ID NO: 94272 - DNA, 20 bp, Artificial Sequence
  MKO10094272_B_Kcnab2
  gRNA
atcttacctcatccgtgatc

SEQ ID NO: 94273 - DNA, 20 bp, Artificial Sequence
  MKO10094273_B_Kcnab2
  gRNA
gatgccattatcgtaggcca

SEQ ID NO: 94274 - DNA, 20 bp, Artificial Sequence
  MKO10094274_B_Kcnab2
  gRNA
atacttaccaagccccaggc

SEQ ID NO: 94275 - DNA, 20 bp, Artificial Sequence
  MKO10094275_B_Kcnab3
  gRNA
taactcaccaaggccaagac

SEQ ID NO: 94276 - DNA, 20 bp, Artificial Sequence
  MKO10094276_B_Kcnab3
  gRNA
ctgagagccaaacgtgaccc

SEQ ID NO: 94277 - DNA, 20 bp, Artificial Sequence
  MKO10094277_B_Kcnab3
  gRNA
tgctcttgagaatattgcca

SEQ ID NO: 94278 - DNA, 20 bp, Artificial Sequence
  MKO10094278_B_Kcnb1
  gRNA
gatgacgccctctgtgcgcg

SEQ ID NO: 94279 - DNA, 20 bp, Artificial Sequence
  MKO10094279_B_Kcnb1
  gRNA
gtgcgacgactacagcctcg

SEQ ID NO: 94280 - DNA, 20 bp, Artificial Sequence
  MKO10094280_B_Kcnb1
  gRNA
gcagcaaggcgtgctcgcgc

SEQ ID NO: 94281 - DNA, 20 bp, Artificial Sequence
  MKO10094281_B_Kcnb2
  gRNA
taactcgtccgtggctgcaa

SEQ ID NO: 94282 - DNA, 20 bp, Artificial Sequence
  MKO10094282_B_Kcnb2
  gRNA
ctgcaagaaaacgacgagtt

SEQ ID NO: 94283 - DNA, 20 bp, Artificial Sequence
  MKO10094283_B_Kcnb2
  gRNA
atcttacgagaataagtacc

SEQ ID NO: 94284 - DNA, 20 bp, Artificial Sequence
  MKO10094284_B_Kcnc1
  gRNA
gcagtcttcgttcgccagcg

SEQ ID NO: 94285 - DNA, 20 bp, Artificial Sequence
  MKO10094285_B_Kcnc1
  gRNA
cacccaagtgcggtactacc

SEQ ID NO: 94286 - DNA, 20 bp, Artificial Sequence
  MKO10094286_B_Kcnc1
  gRNA
tgcccgagcgggtaaagggc

SEQ ID NO: 94287 - DNA, 20 bp, Artificial Sequence
  MKO10094287_B_Kcnc2
  gRNA
gcctggtacccccgacattg

SEQ ID NO: 94288 - DNA, 20 bp, Artificial Sequence
  MKO10094288_B_Kcnc2
  gRNA
tgtaatcacctgtcgtcaac

SEQ ID NO: 94289 - DNA, 20 bp, Artificial Sequence
  MKO10094289_B_Kcnc2
  gRNA
gattacacgtgcgcttctga

SEQ ID NO: 94290 - DNA, 20 bp, Artificial Sequence
  MKO10094290_B_Kcnc3
  gRNA
ttgaggacccctactcgtcg

SEQ ID NO: 94291 - DNA, 20 bp, Artificial Sequence
  MKO10094291_B_Kcnc3
  gRNA
ggtcccggctgtagcgaccc

SEQ ID NO: 94292 - DNA, 20 bp, Artificial Sequence
  MKO10094292_B_Kcnc3
  gRNA
atctactatgccgaacgcat

SEQ ID NO: 94293 - DNA, 20 bp, Artificial Sequence
  MKO10094293_B_Kcnc4
  gRNA
ccgaatgtgggcgctcttcg

SEQ ID NO: 94294 - DNA, 20 bp, Artificial Sequence
  MKO10094294_B_Kcnc4
  gRNA
atatcaccagcgtgcgcttc

SEQ ID NO: 94295 - DNA, 20 bp, Artificial Sequence
  MKO10094295_B_Kcnc4
  gRNA
gacactgggacgcacgcttt

SEQ ID NO: 94296 - DNA, 20 bp, Artificial Sequence
  MKO10094296_B_Kcnd1
  gRNA
accagcgtgctgacaagcgc

SEQ ID NO: 94297 - DNA, 20 bp, Artificial Sequence
  MKO10094297_B_Kcnd1
  gRNA
agtacttacgtttgaggggc

SEQ ID NO: 94298 - DNA, 20 bp, Artificial Sequence
  MKO10094298_B_Kcnd1
  gRNA
agacgagctaactttcagtg

SEQ ID NO: 94299 - DNA, 20 bp, Artificial Sequence
  MKO10094299_B_Kcnd2
  gRNA
cccaggtacctgttggatag

SEQ ID NO: 94300 - DNA, 20 bp, Artificial Sequence
  MKO10094300_B_Kcnd2
  gRNA
acagtcctcggaggatgaac

SEQ ID NO: 94301 - DNA, 20 bp, Artificial Sequence
  MKO10094301_B_Kcnd2
  gRNA
aggatccgagcagccaaaag

SEQ ID NO: 94302 - DNA, 20 bp, Artificial Sequence
  MKO10094302_B_Kcnd3
  gRNA
ggcattggagcttcccgttt

SEQ ID NO: 94303 - DNA, 20 bp, Artificial Sequence
  MKO10094303_B_Kcnd3
  gRNA
ctaaagttggagactatcac

SEQ ID NO: 94304 - DNA, 20 bp, Artificial Sequence
  MKO10094304_B_Kcnd3
  gRNA
caatgaccaggacaccgctg

SEQ ID NO: 94305 - DNA, 20 bp, Artificial Sequence
  MKO10094305_B_Kcne1l
  gRNA
catcggaaccggcccgagca

SEQ ID NO: 94306 - DNA, 20 bp, Artificial Sequence
  MKO10094306_B_Kcne1l
  gRNA
ccgcgaggcgaccagcgcca

SEQ ID NO: 94307 - DNA, 20 bp, Artificial Sequence
  MKO10094307_B_Kcne1l
  gRNA
ccttggcctcgacgagcttg

SEQ ID NO: 94308 - DNA, 20 bp, Artificial Sequence
  MKO10094308_B_Kcne1
  gRNA
gaaaggcaaggccgtcttcc

SEQ ID NO: 94309 - DNA, 20 bp, Artificial Sequence
  MKO10094309_B_Kcne1
  gRNA
ttacatccgatccaagaagc

SEQ ID NO: 94310 - DNA, 20 bp, Artificial Sequence
  MKO10094310_B_Kcne1
  gRNA
gctctacatcctcatggtgc

SEQ ID NO: 94311 - DNA, 20 bp, Artificial Sequence
  MKO10094311_B_Kcne2
  gRNA
tgagcacggtgaagtcgaag

SEQ ID NO: 94312 - DNA, 20 bp, Artificial Sequence
  MKO10094312_B_Kcne2
  gRNA
gatgacgtagtagaagttct

SEQ ID NO: 94313 - DNA, 20 bp, Artificial Sequence
  MKO10094313_B_Kcne2
  gRNA
cggcatgttctcgttcatcg

SEQ ID NO: 94314 - DNA, 20 bp, Artificial Sequence
  MKO10094314_B_Kcne3
  gRNA
cgatcctcagtttgattgtc

SEQ ID NO: 94315 - DNA, 20 bp, Artificial Sequence
  MKO10094315_B_Kcne3
  gRNA
gtaccaggtctcagtcccgt

SEQ ID NO: 94316 - DNA, 20 bp, Artificial Sequence
  MKO10094316_B_Kcne3
  gRNA
agttgtcattacgaccagga

SEQ ID NO: 94317 - DNA, 20 bp, Artificial Sequence
  MKO10094317_B_Kcne4
  gRNA
ccttcactgctgtcgttgag

SEQ ID NO: 94318 - DNA, 20 bp, Artificial Sequence
  MKO10094318_B_Kcne4
  gRNA
ggagggggctgatgacgagc

SEQ ID NO: 94319 - DNA, 20 bp, Artificial Sequence
  MKO10094319_B_Kcne4
  gRNA
cggcaattcaatgctgagga

SEQ ID NO: 94320 - DNA, 20 bp, Artificial Sequence
  MKO10094320_B_Kcnf1
  gRNA
taccatacccgagctgcaag

SEQ ID NO: 94321 - DNA, 20 bp, Artificial Sequence
  MKO10094321_B_Kcnf1
  gRNA
cgggggttctcgcagcgacc

SEQ ID NO: 94322 - DNA, 20 bp, Artificial Sequence
  MKO10094322_B_Kcnf1
  gRNA
atgacacacttgaacgcgtc

SEQ ID NO: 94323 - DNA, 20 bp, Artificial Sequence
  MKO10094323_B_Kcng1
  gRNA
gtcgaagaagaactcgttgc

SEQ ID NO: 94324 - DNA, 20 bp, Artificial Sequence
  MKO10094324_B_Kcng1
  gRNA
caacgtcttcatcgtcgagt

SEQ ID NO: 94325 - DNA, 20 bp, Artificial Sequence
  MKO10094325_B_Kcng1
  gRNA
agccgccgcaagccgagcac

SEQ ID NO: 94326 - DNA, 20 bp, Artificial Sequence
  MKO10094326_B_Kcng2
  gRNA
gtgccgcaacctgttcgtgc

SEQ ID NO: 94327 - DNA, 20 bp, Artificial Sequence
  MKO10094327_B_Kcng2
  gRNA
cgccacgtcattatcaacgt

SEQ ID NO: 94328 - DNA, 20 bp, Artificial Sequence
  MKO10094328_B_Kcng2
  gRNA
ccgacagcgcctgcgcgacg

SEQ ID NO: 94329 - DNA, 20 bp, Artificial Sequence
  MKO10094329_B_Kcng3
  gRNA
ccgatctaaacttgagctcg

SEQ ID NO: 94330 - DNA, 20 bp, Artificial Sequence
  MKO10094330_B_Kcng3
  gRNA
aagtgtgcgacgactacgac

SEQ ID NO: 94331 - DNA, 20 bp, Artificial Sequence
  MKO10094331_B_Kcng3
  gRNA
gcgcccggtactcgctgtcc

SEQ ID NO: 94332 - DNA, 20 bp, Artificial Sequence
  MKO10094332_B_Kcng4
  gRNA
gaagctcacgatcaccccga

SEQ ID NO: 94333 - DNA, 20 bp, Artificial Sequence
  MKO10094333_B_Kcng4
  gRNA
actgcgagcgacacatagta

SEQ ID NO: 94334 - DNA, 20 bp, Artificial Sequence
  MKO10094334_B_Kcng4
  gRNA
gagccaggcgcattacgtag

SEQ ID NO: 94335 - DNA, 20 bp, Artificial Sequence
  MKO10094335_B_Kcnh1
  gRNA
tttgcaggagtcgtcctcga

SEQ ID NO: 94336 - DNA, 20 bp, Artificial Sequence
  MKO10094336_B_Kcnh1
  gRNA
ggccccgcagaacacgtttc

SEQ ID NO: 94337 - DNA, 20 bp, Artificial Sequence
  MKO10094337_B_Kcnh1
  gRNA
tccatcattgctgtacacga

SEQ ID NO: 94338 - DNA, 20 bp, Artificial Sequence
  MKO10094338_B_Kcnh2
  gRNA
taatggttcggtagcgtaca

SEQ ID NO: 94339 - DNA, 20 bp, Artificial Sequence
  MKO10094339_B_Kcnh2
  gRNA
acaggggcccctctaccagc

SEQ ID NO: 94340 - DNA, 20 bp, Artificial Sequence
  MKO10094340_B_Kcnh2
  gRNA
cctcaaaggcgaccctttcc

SEQ ID NO: 94341 - DNA, 20 bp, Artificial Sequence
  MKO10094341_B_Kcnh3
  gRNA
ggtccgccaacagatccgaa

SEQ ID NO: 94342 - DNA, 20 bp, Artificial Sequence
  MKO10094342_B_Kcnh3
  gRNA
atcagcgagaccaagaaccg

SEQ ID NO: 94343 - DNA, 20 bp, Artificial Sequence
  MKO10094343_B_Kcnh3
  gRNA
cctgcttgccacactctacg

SEQ ID NO: 94344 - DNA, 20 bp, Artificial Sequence
  MKO10094344_B_Kcnh4
  gRNA
cctcgccacattctacgtcg

SEQ ID NO: 94345 - DNA, 20 bp, Artificial Sequence
  MKO10094345_B_Kcnh4
  gRNA
attcctggtgagccaagtcc

SEQ ID NO: 94346 - DNA, 20 bp, Artificial Sequence
  MKO10094346_B_Kcnh4
  gRNA
taccgtgattattgtcccca

SEQ ID NO: 94347 - DNA, 20 bp, Artificial Sequence
  MKO10094347_B_Kcnh5
  gRNA
ttgtcaaagcccgtgtcaat

SEQ ID NO: 94348 - DNA, 20 bp, Artificial Sequence
  MKO10094348_B_Kcnh5
  gRNA
gaaatgcccaaattgtggac

SEQ ID NO: 94349 - DNA, 20 bp, Artificial Sequence
  MKO10094349_B_Kcnh5
  gRNA
ccgtcattactataaactac

SEQ ID NO: 94350 - DNA, 20 bp, Artificial Sequence
  MKO10094350_B_Kcnh6
  gRNA
gggccaggtcctcgaaattg

SEQ ID NO: 94351 - DNA, 20 bp, Artificial Sequence
  MKO10094351_B_Kcnh6
  gRNA
aatcgccgtccactatttca

SEQ ID NO: 94352 - DNA, 20 bp, Artificial Sequence
  MKO10094352_B_Kcnh6
  gRNA
aacctggagaagcaccgctc

SEQ ID NO: 94353 - DNA, 20 bp, Artificial Sequence
  MKO10094353_B_Kcnh7
  gRNA
gacaatggtcgaaatgtcaa

SEQ ID NO: 94354 - DNA, 20 bp, Artificial Sequence
  MKO10094354_B_Kcnh7
  gRNA
ctgggcaatatcatgcctct

SEQ ID NO: 94355 - DNA, 20 bp, Artificial Sequence
  MKO10094355_B_Kcnh7
  gRNA
attaccattcttgtgatagt

SEQ ID NO: 94356 - DNA, 20 bp, Artificial Sequence
  MKO10094356_B_Kcnh8
  gRNA
accagcgtttccagagtata

SEQ ID NO: 94357 - DNA, 20 bp, Artificial Sequence
  MKO10094357_B_Kcnh8
  gRNA
gccgtcctttatcacatctc

SEQ ID NO: 94358 - DNA, 20 bp, Artificial Sequence
  MKO10094358_B_Kcnh8
  gRNA
accctttgccacttgggcat

SEQ ID NO: 94359 - DNA, 20 bp, Artificial Sequence
  MKO10094359_B_Kcnip1
  gRNA
ccaccacaggagtgccctag

SEQ ID NO: 94360 - DNA, 20 bp, Artificial Sequence
  MKO10094360_B_Kcnip1
  gRNA
tcttcattgaccacaccgct

SEQ ID NO: 94361 - DNA, 20 bp, Artificial Sequence
  MKO10094361_B_Kcnip1
  gRNA
tttagagggtcgcctttgtt

SEQ ID NO: 94362 - DNA, 20 bp, Artificial Sequence
  MKO10094362_B_Kcnip2
  gRNA
ctcctcgttgacaattccgc

SEQ ID NO: 94363 - DNA, 20 bp, Artificial Sequence
  MKO10094363_B_Kcnip2
  gRNA
gagaaaagtagcgtagttgc

SEQ ID NO: 94364 - DNA, 20 bp, Artificial Sequence
  MKO10094364_B_Kcnip2
  gRNA
gttcacacgcagagagttgc

SEQ ID NO: 94365 - DNA, 20 bp, Artificial Sequence
  MKO10094365_B_Kcnip3
  gRNA
ttcaatgccttcgatgctga

SEQ ID NO: 94366 - DNA, 20 bp, Artificial Sequence
  MKO10094366_B_Kcnip3
  gRNA
cacggtgcgccatcagccag

SEQ ID NO: 94367 - DNA, 20 bp, Artificial Sequence
  MKO10094367_B_Kcnip3
  gRNA
cccctgcaggagtgtcccac

SEQ ID NO: 94368 - DNA, 20 bp, Artificial Sequence
  MKO10094368_B_Kcnip4
  gRNA
caaagctcacagctccattg

SEQ ID NO: 94369 - DNA, 20 bp, Artificial Sequence
  MKO10094369_B_Kcnip4
  gRNA
ttactcacagttctttccac

SEQ ID NO: 94370 - DNA, 20 bp, Artificial Sequence
  MKO10094370_B_Kcnip4
  gRNA
agacagcgtggaagatgagc

SEQ ID NO: 94371 - DNA, 20 bp, Artificial Sequence
  MKO10094371_B_Kcnj10
  gRNA
cgcgatagcaccgtacgcta

SEQ ID NO: 94372 - DNA, 20 bp, Artificial Sequence
  MKO10094372_B_Kcnj10
  gRNA
aaagatctcccgctccgcag

SEQ ID NO: 94373 - DNA, 20 bp, Artificial Sequence
  MKO10094373_B_Kcnj10
  gRNA
gaggagactcttccgcatat

SEQ ID NO: 94374 - DNA, 20 bp, Artificial Sequence
  MKO10094374_B_Kcnj11
  gRNA
cggagccatgctgtcccgaa

SEQ ID NO: 94375 - DNA, 20 bp, Artificial Sequence
  MKO10094375_B_Kcnj11
  gRNA
ccctgaccctcgcctcgtcg

SEQ ID NO: 94376 - DNA, 20 bp, Artificial Sequence
  MKO10094376_B_Kcnj11
  gRNA
ctcattgtgcagaatatcgt

SEQ ID NO: 94377 - DNA, 20 bp, Artificial Sequence
  MKO10094377_B_Kcnj12
  gRNA
gcctctaggccacacaagcc

SEQ ID NO: 94378 - DNA, 20 bp, Artificial Sequence
  MKO10094378_B_Kcnj12
  gRNA
cgagaagtcacaacgctacc

SEQ ID NO: 94379 - DNA, 20 bp, Artificial Sequence
  MKO10094379_B_Kcnj12
  gRNA
actgtttggcattagccgtc

SEQ ID NO: 94380 - DNA, 20 bp, Artificial Sequence
  MKO10094380_B_Kcnj13
  gRNA
tacagcagagacacgaacgt

SEQ ID NO: 94381 - DNA, 20 bp, Artificial Sequence
  MKO10094381_B_Kcnj13
  gRNA
tttgcagctctaatgactcg

SEQ ID NO: 94382 - DNA, 20 bp, Artificial Sequence
  MKO10094382_B_Kcnj13
  gRNA
cggccacagcacacttcaga

SEQ ID NO: 94383 - DNA, 20 bp, Artificial Sequence
  MKO10094383_B_Kcnj14
  gRNA
ccacttccatcgaacatatg

SEQ ID NO: 94384 - DNA, 20 bp, Artificial Sequence
  MKO10094384_B_Kcnj14
  gRNA
cacttaggtagcgcgcgccc

SEQ ID NO: 94385 - DNA, 20 bp, Artificial Sequence
  MKO10094385_B_Kcnj14
  gRNA
ccacccattgcggcacagtc

SEQ ID NO: 94386 - DNA, 20 bp, Artificial Sequence
  MKO10094386_B_Kcnj15
  gRNA
ctcgctccccttctcccacc

SEQ ID NO: 94387 - DNA, 20 bp, Artificial Sequence
  MKO10094387_B_Kcnj15
  gRNA
tgaccagttgggcgactaag

SEQ ID NO: 94388 - DNA, 20 bp, Artificial Sequence
  MKO10094388_B_Kcnj15
  gRNA
caaccgtcatcgacatgaag

SEQ ID NO: 94389 - DNA, 20 bp, Artificial Sequence
  MKO10094389_B_Kcnj16
  gRNA
tagctacaggatcgtcaatg

SEQ ID NO: 94390 - DNA, 20 bp, Artificial Sequence
  MKO10094390_B_Kcnj16
  gRNA
tgatatctggatcgcttaat

SEQ ID NO: 94391 - DNA, 20 bp, Artificial Sequence
  MKO10094391_B_Kcnj16
  gRNA
tcccgtctctcataccaatg

SEQ ID NO: 94392 - DNA, 20 bp, Artificial Sequence
  MKO10094392_B_Kcnj1
  gRNA
ccaccgtcttaccaaagtta

SEQ ID NO: 94393 - DNA, 20 bp, Artificial Sequence
  MKO10094393_B_Kcnj1
  gRNA
gtatgatgtgcggacttggc

SEQ ID NO: 94394 - DNA, 20 bp, Artificial Sequence
  MKO10094394_B_Kcnj1
  gRNA
cgagtggatttccataactt

SEQ ID NO: 94395 - DNA, 20 bp, Artificial Sequence
  MKO10094395_B_Kcnj2
  gRNA
gctctagaggtacgcttgcc

SEQ ID NO: 94396 - DNA, 20 bp, Artificial Sequence
  MKO10094396_B_Kcnj2
  gRNA
tcctgcactgttgtcgggta

SEQ ID NO: 94397 - DNA, 20 bp, Artificial Sequence
  MKO10094397_B_Kcnj2
  gRNA
tccatacccgacaacagtgc

SEQ ID NO: 94398 - DNA, 20 bp, Artificial Sequence
  MKO10094398_B_Kcnj3
  gRNA
atcacgtggcaaattgtgag

SEQ ID NO: 94399 - DNA, 20 bp, Artificial Sequence
  MKO10094399_B_Kcnj3
  gRNA
agctcgaacatcatacacag

SEQ ID NO: 94400 - DNA, 20 bp, Artificial Sequence
  MKO10094400_B_Kcnj3
  gRNA
ctcagaaaaagcctatagtt

SEQ ID NO: 94401 - DNA, 20 bp, Artificial Sequence
  MKO10094401_B_Kcnj4
  gRNA
gccgtttacgtgcatgatac

SEQ ID NO: 94402 - DNA, 20 bp, Artificial Sequence
  MKO10094402_B_Kcnj4
  gRNA
gctgtcatctccgttcgaga

SEQ ID NO: 94403 - DNA, 20 bp, Artificial Sequence
  MKO10094403_B_Kcnj4
  gRNA
gcgccagcgcgtgtccacgc

SEQ ID NO: 94404 - DNA, 20 bp, Artificial Sequence
  MKO10094404_B_Kcnj5
  gRNA
ctggcggagatgaagcggag

SEQ ID NO: 94405 - DNA, 20 bp, Artificial Sequence
  MKO10094405_B_Kcnj5
  gRNA
gctcttctcgttgatctcgt

SEQ ID NO: 94406 - DNA, 20 bp, Artificial Sequence
  MKO10094406_B_Kcnj5
  gRNA
agtttcggaggtcccctacc

SEQ ID NO: 94407 - DNA, 20 bp, Artificial Sequence
  MKO10094407_B_Kcnj6
  gRNA
tgatgtaggagcttcgggct

SEQ ID NO: 94408 - DNA, 20 bp, Artificial Sequence
  MKO10094408_B_Kcnj6
  gRNA
accccacgttgatatcagtc

SEQ ID NO: 94409 - DNA, 20 bp, Artificial Sequence
  MKO10094409_B_Kcnj6
  gRNA
ggtggctgattgcgtacatc

SEQ ID NO: 94410 - DNA, 20 bp, Artificial Sequence
  MKO10094410_B_Kcnj8
  gRNA
ctccgctcttggcgatgaag

SEQ ID NO: 94411 - DNA, 20 bp, Artificial Sequence
  MKO10094411_B_Kcnj8
  gRNA
aagatattattgctctcgat

SEQ ID NO: 94412 - DNA, 20 bp, Artificial Sequence
  MKO10094412_B_Kcnj8
  gRNA
ggctacgcttgtcaatcacg

SEQ ID NO: 94413 - DNA, 20 bp, Artificial Sequence
  MKO10094413_B_Kcnj9
  gRNA
ccaagctcgaagctcgtacc

SEQ ID NO: 94414 - DNA, 20 bp, Artificial Sequence
  MKO10094414_B_Kcnj9
  gRNA
cggtcgctgtaacgtgcagc

SEQ ID NO: 94415 - DNA, 20 bp, Artificial Sequence
  MKO10094415_B_Kcnj9
  gRNA
aggcggccacgaagccgttg

SEQ ID NO: 94416 - DNA, 20 bp, Artificial Sequence
  MKO10094416_B_Kcnk10
  gRNA
aatattgctccgagcactga

SEQ ID NO: 94417 - DNA, 20 bp, Artificial Sequence
  MKO10094417_B_Kcnk10
  gRNA
gaccaacttggaaccatctt

SEQ ID NO: 94418 - DNA, 20 bp, Artificial Sequence
  MKO10094418_B_Kcnk10
  gRNA
acgctgaccacagtaggctt

SEQ ID NO: 94419 - DNA, 20 bp, Artificial Sequence
  MKO10094419_B_Kcnk12
  gRNA
ccagcgcgggcgcagcgcgt

SEQ ID NO: 94420 - DNA, 20 bp, Artificial Sequence
  MKO10094420_B_Kcnk12
  gRNA
ccggcaggcgcgcatgatga

SEQ ID NO: 94421 - DNA, 20 bp, Artificial Sequence
  MKO10094421_B_Kcnk12
  gRNA
cgcgcagccgaacagtccgt

SEQ ID NO: 94422 - DNA, 20 bp, Artificial Sequence
  MKO10094422_B_Kcnk13
  gRNA
tgacagtgatcagccgctcc

SEQ ID NO: 94423 - DNA, 20 bp, Artificial Sequence
  MKO10094423_B_Kcnk13
  gRNA
gtccatgcggatgcccgccc

SEQ ID NO: 94424 - DNA, 20 bp, Artificial Sequence
  MKO10094424_B_Kcnk13
  gRNA
tggcttcctcgtagtggcgg

SEQ ID NO: 94425 - DNA, 20 bp, Artificial Sequence
  MKO10094425_B_Kcnk15
  gRNA
ctccagctcgcggtagtcgt

SEQ ID NO: 94426 - DNA, 20 bp, Artificial Sequence
  MKO10094426_B_Kcnk15
  gRNA
ccagccctcgaagtgcgcga

SEQ ID NO: 94427 - DNA, 20 bp, Artificial Sequence
  MKO10094427_B_Kcnk15
  gRNA
actttgcccgagtccgtgcc

SEQ ID NO: 94428 - DNA, 20 bp, Artificial Sequence
  MKO10094428_B_Kcnk16
  gRNA
acgcgaagtagaagccctca

SEQ ID NO: 94429 - DNA, 20 bp, Artificial Sequence
  MKO10094429_B_Kcnk16
  gRNA
aacatagtccccgaagccaa

SEQ ID NO: 94430 - DNA, 20 bp, Artificial Sequence
  MKO10094430_B_Kcnk16
  gRNA
gacctgccctgcctccgtgc

SEQ ID NO: 94431 - DNA, 20 bp, Artificial Sequence
  MKO10094431_B_Kcnk18
  gRNA
cctggggcgccttgagccac

SEQ ID NO: 94432 - DNA, 20 bp, Artificial Sequence
  MKO10094432_B_Kcnk18
  gRNA
ccccagtggttgaaggtagc

SEQ ID NO: 94433 - DNA, 20 bp, Artificial Sequence
  MKO10094433_B_Kcnk18
  gRNA
agcagcacccaccagcgcat

SEQ ID NO: 94434 - DNA, 20 bp, Artificial Sequence
  MKO10094434_B_Kcnk1
  gRNA
cacgctggaccacggccgtc

SEQ ID NO: 94435 - DNA, 20 bp, Artificial Sequence
  MKO10094435_B_Kcnk1
  gRNA
cgtgctccatgatgtgaacc

SEQ ID NO: 94436 - DNA, 20 bp, Artificial Sequence
  MKO10094436_B_Kcnk1
  gRNA
ttcacaggttacctgctcct

SEQ ID NO: 94437 - DNA, 20 bp, Artificial Sequence
  MKO10094437_B_Kcnk2
  gRNA
agtggcggcccctgacttgc

SEQ ID NO: 94438 - DNA, 20 bp, Artificial Sequence
  MKO10094438_B_Kcnk2
  gRNA
ctgcgtcaactccaccgagc

SEQ ID NO: 94439 - DNA, 20 bp, Artificial Sequence
  MKO10094439_B_Kcnk2
  gRNA
aacatctccccacgaactga

SEQ ID NO: 94440 - DNA, 20 bp, Artificial Sequence
  MKO10094440_B_Kcnk3
  gRNA
cgctgccgctcgatcatctc

SEQ ID NO: 94441 - DNA, 20 bp, Artificial Sequence
  MKO10094441_B_Kcnk3
  gRNA
gaaagtccagcgctcgtagt

SEQ ID NO: 94442 - DNA, 20 bp, Artificial Sequence
  MKO10094442_B_Kcnk3
  gRNA
ctccacgcaggtgtcggacg

SEQ ID NO: 94443 - DNA, 20 bp, Artificial Sequence
  MKO10094443_B_Kcnk4
  gRNA
ctgggtttgcgccccctccc

SEQ ID NO: 94444 - DNA, 20 bp, Artificial Sequence
  MKO10094444_B_Kcnk4
  gRNA
ccaagaagattgcttcgatg

SEQ ID NO: 94445 - DNA, 20 bp, Artificial Sequence
  MKO10094445_B_Kcnk4
  gRNA
ccacatcgaagcaatcttct

SEQ ID NO: 94446 - DNA, 20 bp, Artificial Sequence
  MKO10094446_B_Kcnk5
  gRNA
cttctcaggttatggcaatg

SEQ ID NO: 94447 - DNA, 20 bp, Artificial Sequence
  MKO10094447_B_Kcnk5
  gRNA
gtcccccgaagaacttgccc

SEQ ID NO: 94448 - DNA, 20 bp, Artificial Sequence
  MKO10094448_B_Kcnk5
  gRNA
gatcccgccctttgtgttca

SEQ ID NO: 94449 - DNA, 20 bp, Artificial Sequence
  MKO10094449_B_Kcnk6
  gRNA
ttcaaggtaggcgaagaccg

SEQ ID NO: 94450 - DNA, 20 bp, Artificial Sequence
  MKO10094450_B_Kcnk6
  gRNA
cgccgtgtttccgacctcca

SEQ ID NO: 94451 - DNA, 20 bp, Artificial Sequence
  MKO10094451_B_Kcnk6
  gRNA
cctaggggactacgtgcctg

SEQ ID NO: 94452 - DNA, 20 bp, Artificial Sequence
  MKO10094452_B_Kcnk7
  gRNA
ccagcaggtgggccataagc

SEQ ID NO: 94453 - DNA, 20 bp, Artificial Sequence
  MKO10094453_B_Kcnk7
  gRNA
gctgcctgacgccccagtct

SEQ ID NO: 94454 - DNA, 20 bp, Artificial Sequence
  MKO10094454_B_Kcnk7
  gRNA
ccgatacctgctcctgctta

SEQ ID NO: 94455 - DNA, 20 bp, Artificial Sequence
  MKO10094455_B_Kcnk9
  gRNA
gccgaagaagtccgtctcag

SEQ ID NO: 94456 - DNA, 20 bp, Artificial Sequence
  MKO10094456_B_Kcnk9
  gRNA
cctgaccatgaataccgatg

SEQ ID NO: 94457 - DNA, 20 bp, Artificial Sequence
  MKO10094457_B_Kcnk9
  gRNA
acttcttgatacgtttcagc

SEQ ID NO: 94458 - DNA, 20 bp, Artificial Sequence
  MKO10094458_B_Kcnma1
  gRNA
ttacccgcaagccaaagtag

SEQ ID NO: 94459 - DNA, 20 bp, Artificial Sequence
  MKO10094459_B_Kcnma1
  gRNA
tttcacattacagatcgaca

SEQ ID NO: 94460 - DNA, 20 bp, Artificial Sequence
  MKO10094460_B_Kcnma1
  gRNA
agtctatgaagtatattacg

SEQ ID NO: 94461 - DNA, 20 bp, Artificial Sequence
  MKO10094461_B_Kcnmb1
  gRNA
gaataagacccccggtcagc

SEQ ID NO: 94462 - DNA, 20 bp, Artificial Sequence
  MKO10094462_B_Kcnmb1
  gRNA
cagctgatacattgacccaa

SEQ ID NO: 94463 - DNA, 20 bp, Artificial Sequence
  MKO10094463_B_Kcnmb1
  gRNA
gtcttccgtgtgatacagca

SEQ ID NO: 94464 - DNA, 20 bp, Artificial Sequence
  MKO10094464_B_Kcnmb2
  gRNA
tacgtgaacctgacatcttc

SEQ ID NO: 94465 - DNA, 20 bp, Artificial Sequence
  MKO10094465_B_Kcnmb2
  gRNA
tgctgcgctcctacatgcag

SEQ ID NO: 94466 - DNA, 20 bp, Artificial Sequence
  MKO10094466_B_Kcnmb2
  gRNA
gcagcagtgtgattcccagc

SEQ ID NO: 94467 - DNA, 20 bp, Artificial Sequence
  MKO10094467_B_Kcnmb3
  gRNA
gccatcgggactgtagaaac

SEQ ID NO: 94468 - DNA, 20 bp, Artificial Sequence
  MKO10094468_B_Kcnmb3
  gRNA
ccctgtagcgtgatttggac

SEQ ID NO: 94469 - DNA, 20 bp, Artificial Sequence
  MKO10094469_B_Kcnmb3
  gRNA
ccaaagcttccatcaagcgc

SEQ ID NO: 94470 - DNA, 20 bp, Artificial Sequence
  MKO10094470_B_Kcnmb4
  gRNA
tctcttacagggcgggatat

SEQ ID NO: 94471 - DNA, 20 bp, Artificial Sequence
  MKO10094471_B_Kcnmb4
  gRNA
cgccttgaccgccaggctct

SEQ ID NO: 94472 - DNA, 20 bp, Artificial Sequence
  MKO10094472_B_Kcnmb4
  gRNA
tgacgctctccgagttcttc

SEQ ID NO: 94473 - DNA, 20 bp, Artificial Sequence
  MKO10094473_B_Kcnn1
  gRNA
ttccaacttccgagccacga

SEQ ID NO: 94474 - DNA, 20 bp, Artificial Sequence
  MKO10094474_B_Kcnn1
  gRNA
gtaccacgcccgagagatcc

SEQ ID NO: 94475 - DNA, 20 bp, Artificial Sequence
  MKO10094475_B_Kcnn1
  gRNA
ggccgtcgtggctcggaagt

SEQ ID NO: 94476 - DNA, 20 bp, Artificial Sequence
  MKO10094476_B_Kcnn2
  gRNA
tgatcgtggagagactgata

SEQ ID NO: 94477 - DNA, 20 bp, Artificial Sequence
  MKO10094477_B_Kcnn2
  gRNA
tagtgacatcctgttgatca

SEQ ID NO: 94478 - DNA, 20 bp, Artificial Sequence
  MKO10094478_B_Kcnn2
  gRNA
tttcaggtaccatgatcaac

SEQ ID NO: 94479 - DNA, 20 bp, Artificial Sequence
  MKO10094479_B_Kcnn3
  gRNA
ttatccaccgtcatcctgct

SEQ ID NO: 94480 - DNA, 20 bp, Artificial Sequence
  MKO10094480_B_Kcnn3
  gRNA
cggcaggtaccatgatcagc

SEQ ID NO: 94481 - DNA, 20 bp, Artificial Sequence
  MKO10094481_B_Kcnn3
  gRNA
tccatcacgttcctttccat

SEQ ID NO: 94482 - DNA, 20 bp, Artificial Sequence
  MKO10094482_B_Kcnn4
  gRNA
gcctcacctctttggcataa

SEQ ID NO: 94483 - DNA, 20 bp, Artificial Sequence
  MKO10094483_B_Kcnn4
  gRNA
acgtggtacctggcaccatg

SEQ ID NO: 94484 - DNA, 20 bp, Artificial Sequence
  MKO10094484_B_Kcnn4
  gRNA
gggtgatcaaacacttaacc

SEQ ID NO: 94485 - DNA, 20 bp, Artificial Sequence
  MKO10094485_B_Kcnq1
  gRNA
gcttccgggcaaaacgtagc

SEQ ID NO: 94486 - DNA, 20 bp, Artificial Sequence
  MKO10094486_B_Kcnq1
  gRNA
gtcctttggaacccacgcag

SEQ ID NO: 94487 - DNA, 20 bp, Artificial Sequence
  MKO10094487_B_Kcnq1
  gRNA
caccgggaccctcttctgga

SEQ ID NO: 94488 - DNA, 20 bp, Artificial Sequence
  MKO10094488_B_Kcnq2
  gRNA
ccaggaaatcgtgactatcg

SEQ ID NO: 94489 - DNA, 20 bp, Artificial Sequence
  MKO10094489_B_Kcnq2
  gRNA
tgccacccctccggtccata

SEQ ID NO: 94490 - DNA, 20 bp, Artificial Sequence
  MKO10094490_B_Kcnq2
  gRNA
gctcttctcgtactccttga

SEQ ID NO: 94491 - DNA, 20 bp, Artificial Sequence
  MKO10094491_B_Kcnq3
  gRNA
gtggacggctaaagtttgcc

SEQ ID NO: 94492 - DNA, 20 bp, Artificial Sequence
  MKO10094492_B_Kcnq3
  gRNA
ggccgtgctcaccaccttca

SEQ ID NO: 94493 - DNA, 20 bp, Artificial Sequence
  MKO10094493_B_Kcnq3
  gRNA
cacagtctcatattccttga

SEQ ID NO: 94494 - DNA, 20 bp, Artificial Sequence
  MKO10094494_B_Kcnq4
  gRNA
cgtggtctatgcgcacagta

SEQ ID NO: 94495 - DNA, 20 bp, Artificial Sequence
  MKO10094495_B_Kcnq4
  gRNA
tggagtatataatccgtgtc

SEQ ID NO: 94496 - DNA, 20 bp, Artificial Sequence
  MKO10094496_B_Kcnq4
  gRNA
caagataaggagacactcgt

SEQ ID NO: 94497 - DNA, 20 bp, Artificial Sequence
  MKO10094497_B_Kcnq5
  gRNA
tggagttcatcattcgaatc

SEQ ID NO: 94498 - DNA, 20 bp, Artificial Sequence
  MKO10094498_B_Kcnq5
  gRNA
gatcctgcgtatggtgcgca

SEQ ID NO: 94499 - DNA, 20 bp, Artificial Sequence
  MKO10094499_B_Kcnq5
  gRNA
ttcgtgatgatcgttgtctt

SEQ ID NO: 94500 - DNA, 20 bp, Artificial Sequence
  MKO10094500_B_Kcnrg
  gRNA
aacaaatgtcttgggcctac

SEQ ID NO: 94501 - DNA, 20 bp, Artificial Sequence
  MKO10094501_B_Kcnrg
  gRNA
ccaatcaagatctgctgtca

SEQ ID NO: 94502 - DNA, 20 bp, Artificial Sequence
  MKO10094502_B_Kcnrg
  gRNA
ataacaacccctcaagtcct

SEQ ID NO: 94503 - DNA, 20 bp, Artificial Sequence
  MKO10094503_B_Kcns1
  gRNA
gcggcctcgggctgcatcct

SEQ ID NO: 94504 - DNA, 20 bp, Artificial Sequence
  MKO10094504_B_Kcns1
  gRNA
gccgctccagataccgcgcg

SEQ ID NO: 94505 - DNA, 20 bp, Artificial Sequence
  MKO10094505_B_Kcns1
  gRNA
tggccacgtgctgccgcgcg

SEQ ID NO: 94506 - DNA, 20 bp, Artificial Sequence
  MKO10094506_B_Kcns2
  gRNA
gctcctctgccactcgcgag

SEQ ID NO: 94507 - DNA, 20 bp, Artificial Sequence
  MKO10094507_B_Kcns2
  gRNA
caggggttgcccatcgaact

SEQ ID NO: 94508 - DNA, 20 bp, Artificial Sequence
  MKO10094508_B_Kcns2
  gRNA
tccatcctcgacgtcggtat

SEQ ID NO: 94509 - DNA, 20 bp, Artificial Sequence
  MKO10094509_B_Kcns3
  gRNA
tccagatccttcggctcatg

SEQ ID NO: 94510 - DNA, 20 bp, Artificial Sequence
  MKO10094510_B_Kcns3
  gRNA
cattcccttctatgccacgt

SEQ ID NO: 94511 - DNA, 20 bp, Artificial Sequence
  MKO10094511_B_Kcns3
  gRNA
atcactgaccacgatgccaa

SEQ ID NO: 94512 - DNA, 20 bp, Artificial Sequence
  MKO10094512_B_Kcnt1
  gRNA
cattgacatagaactccacc

SEQ ID NO: 94513 - DNA, 20 bp, Artificial Sequence
  MKO10094513_B_Kcnt1
  gRNA
aactcaccagtggaactcag

SEQ ID NO: 94514 - DNA, 20 bp, Artificial Sequence
  MKO10094514_B_Kcnt1
  gRNA
tcatgtggaagatttcagcc

SEQ ID NO: 94515 - DNA, 20 bp, Artificial Sequence
  MKO10094515_B_Kcnt2
  gRNA
gtaacctgtaaaccccataa

SEQ ID NO: 94516 - DNA, 20 bp, Artificial Sequence
  MKO10094516_B_Kcnt2
  gRNA
ccttataactgagataacca

SEQ ID NO: 94517 - DNA, 20 bp, Artificial Sequence
  MKO10094517_B_Kcnt2
  gRNA
ataagcagcttaacaacttc

SEQ ID NO: 94518 - DNA, 20 bp, Artificial Sequence
  MKO10094518_B_Kcnu1
  gRNA
ttctttccagtcctgttcga

SEQ ID NO: 94519 - DNA, 20 bp, Artificial Sequence
  MKO10094519_B_Kcnu1
  gRNA
cgatgcttagtacaaagaca

SEQ ID NO: 94520 - DNA, 20 bp, Artificial Sequence
  MKO10094520_B_Kcnu1
  gRNA
cttattatttgaagagtaat

SEQ ID NO: 94521 - DNA, 20 bp, Artificial Sequence
  MKO10094521_B_Kcnv1
  gRNA
tgtctatgcccggagcataa

SEQ ID NO: 94522 - DNA, 20 bp, Artificial Sequence
  MKO10094522_B_Kcnv1
  gRNA
gtgtgcatcagctggttcac

SEQ ID NO: 94523 - DNA, 20 bp, Artificial Sequence
  MKO10094523_B_Kcnv1
  gRNA
gcaaggaggtctatgatgtt

SEQ ID NO: 94524 - DNA, 20 bp, Artificial Sequence
  MKO10094524_B_Kcnv2
  gRNA
catgtacccggagacccacc

SEQ ID NO: 94525 - DNA, 20 bp, Artificial Sequence
  MKO10094525_B_Kcnv2
  gRNA
ttccagaggcgttgacgttg

SEQ ID NO: 94526 - DNA, 20 bp, Artificial Sequence
  MKO10094526_B_Kcnv2
  gRNA
caactaccccaaaacgcgcc

SEQ ID NO: 94527 - DNA, 20 bp, Artificial Sequence
  MKO10094527_B_Kcp
  gRNA
gaccataagactgcccattg

SEQ ID NO: 94528 - DNA, 20 bp, Artificial Sequence
  MKO10094528_B_Kcp
  gRNA
ctgtaccacctgccgctgtc

SEQ ID NO: 94529 - DNA, 20 bp, Artificial Sequence
  MKO10094529_B_Kcp
  gRNA
ggcaggaaccgtgcagtgcc

SEQ ID NO: 94530 - DNA, 20 bp, Artificial Sequence
  MKO10094530_B_Kctd10
  gRNA
tgcctacttgtagggcggcc

SEQ ID NO: 94531 - DNA, 20 bp, Artificial Sequence
  MKO10094531_B_Kctd10
  gRNA
cacgttcagcttcacgtact

SEQ ID NO: 94532 - DNA, 20 bp, Artificial Sequence
  MKO10094532_B_Kctd10
  gRNA
gatgacgggtaccttgcaga

SEQ ID NO: 94533 - DNA, 20 bp, Artificial Sequence
  MKO10094533_B_Kctd11
  gRNA
ggcctagccgcaaaaaattg

SEQ ID NO: 94534 - DNA, 20 bp, Artificial Sequence
  MKO10094534_B_Kctd11
  gRNA
gctacctcccgacgatcttc

SEQ ID NO: 94535 - DNA, 20 bp, Artificial Sequence
  MKO10094535_B_Kctd11
  gRNA
ttgcgctttgtgcgccactg

SEQ ID NO: 94536 - DNA, 20 bp, Artificial Sequence
  MKO10094536_B_Kctd12b
  gRNA
aaactgccgcactcctcggt

SEQ ID NO: 94537 - DNA, 20 bp, Artificial Sequence
  MKO10094537_B_Kctd12b
  gRNA
attgaacgtagtgtcaatgc

SEQ ID NO: 94538 - DNA, 20 bp, Artificial Sequence
  MKO10094538_B_Kctd12b
  gRNA
ctatcgaggctcctatactc

SEQ ID NO: 94539 - DNA, 20 bp, Artificial Sequence
  MKO10094539_B_Kctd12
  gRNA
cccactagatcacgacaatc

SEQ ID NO: 94540 - DNA, 20 bp, Artificial Sequence
  MKO10094540_B_Kctd12
  gRNA
tgctgcgcgctcgcaccgcg

SEQ ID NO: 94541 - DNA, 20 bp, Artificial Sequence
  MKO10094541_B_Kctd12
  gRNA
cagcgacgtcttgccgcaca

SEQ ID NO: 94542 - DNA, 20 bp, Artificial Sequence
  MKO10094542_B_Kctd13
  gRNA
aaactagccctgcgcttcca

SEQ ID NO: 94543 - DNA, 20 bp, Artificial Sequence
  MKO10094543_B_Kctd13
  gRNA
ttgtgtagaagcttcaccac

SEQ ID NO: 94544 - DNA, 20 bp, Artificial Sequence
  MKO10094544_B_Kctd13
  gRNA
gggcctcaccttggaggtgc

SEQ ID NO: 94545 - DNA, 20 bp, Artificial Sequence
  MKO10094545_B_Kctd14
  gRNA
cagcactgagctagacgcca

SEQ ID NO: 94546 - DNA, 20 bp, Artificial Sequence
  MKO10094546_B_Kctd14
  gRNA
tagacactacaaagacgcgc

SEQ ID NO: 94547 - DNA, 20 bp, Artificial Sequence
  MKO10094547_B_Kctd14
  gRNA
catacaaagtcctccgtcat

SEQ ID NO: 94548 - DNA, 20 bp, Artificial Sequence
  MKO10094548_B_Kctd15
  gRNA
cgaggcagcgcctagtccag

SEQ ID NO: 94549 - DNA, 20 bp, Artificial Sequence
  MKO10094549_B_Kctd15
  gRNA
ggctgcgacgtctttgctct

SEQ ID NO: 94550 - DNA, 20 bp, Artificial Sequence
  MKO10094550_B_Kctd15
  gRNA
aaagaacatattcgctgaac

SEQ ID NO: 94551 - DNA, 20 bp, Artificial Sequence
  MKO10094551_B_Kctd16
  gRNA
tttcgctcagggaagcgatc

SEQ ID NO: 94552 - DNA, 20 bp, Artificial Sequence
  MKO10094552_B_Kctd16
  gRNA
cgaggatgtcaagcaaagcc

SEQ ID NO: 94553 - DNA, 20 bp, Artificial Sequence
  MKO10094553_B_Kctd16
  gRNA
ctgcaccggacctttcttga

SEQ ID NO: 94554 - DNA, 20 bp, Artificial Sequence
  MKO10094554_B_Kctd17
  gRNA
gaagctcttcgccctgacac

SEQ ID NO: 94555 - DNA, 20 bp, Artificial Sequence
  MKO10094555_B_Kctd17
  gRNA
tgattcgaatcatcaaagac

SEQ ID NO: 94556 - DNA, 20 bp, Artificial Sequence
  MKO10094556_B_Kctd17
  gRNA
tctttgatgattcgaatcag

SEQ ID NO: 94557 - DNA, 20 bp, Artificial Sequence
  MKO10094557_B_Kctd18
  gRNA
agagtctttgtgccgcttta

SEQ ID NO: 94558 - DNA, 20 bp, Artificial Sequence
  MKO10094558_B_Kctd18
  gRNA
tgacgcaggcttccgtgtaa

SEQ ID NO: 94559 - DNA, 20 bp, Artificial Sequence
  MKO10094559_B_Kctd18
  gRNA
agccacccacattcagccga

SEQ ID NO: 94560 - DNA, 20 bp, Artificial Sequence
  MKO10094560_B_Kctd19
  gRNA
tgcagcgagttccgcttcat

SEQ ID NO: 94561 - DNA, 20 bp, Artificial Sequence
  MKO10094561_B_Kctd19
  gRNA
gcaacatacccatattcatc

SEQ ID NO: 94562 - DNA, 20 bp, Artificial Sequence
  MKO10094562_B_Kctd19
  gRNA
ggagacaccacctccgtgtg

SEQ ID NO: 94563 - DNA, 20 bp, Artificial Sequence
  MKO10094563_B_Kctd1
  gRNA
tcagtgaatatgtcctccga

SEQ ID NO: 94564 - DNA, 20 bp, Artificial Sequence
  MKO10094564_B_Kctd1
  gRNA
tcaccaaataccccgaatcc

SEQ ID NO: 94565 - DNA, 20 bp, Artificial Sequence
  MKO10094565_B_Kctd1
  gRNA
tgtggccgcccacgtcgatg

SEQ ID NO: 94566 - DNA, 20 bp, Artificial Sequence
  MKO10094566_B_Kctd20
  gRNA
aaagggggagtatgtgatcg

SEQ ID NO: 94567 - DNA, 20 bp, Artificial Sequence
  MKO10094567_B_Kctd20
  gRNA
tcccaggattattacaaaac

SEQ ID NO: 94568 - DNA, 20 bp, Artificial Sequence
  MKO10094568_B_Kctd20
  gRNA
ccgctgtttccaaatctctc

SEQ ID NO: 94569 - DNA, 20 bp, Artificial Sequence
  MKO10094569_B_Kctd21
  gRNA
aactgcttcattgaccgtga

SEQ ID NO: 94570 - DNA, 20 bp, Artificial Sequence
  MKO10094570_B_Kctd21
  gRNA
aggagatgggtctgctgcgc

SEQ ID NO: 94571 - DNA, 20 bp, Artificial Sequence
  MKO10094571_B_Kctd21
  gRNA
cctccatgctggaagacgac

SEQ ID NO: 94572 - DNA, 20 bp, Artificial Sequence
  MKO10094572_B_Kctd2
  gRNA
acaatatcgcatctctcgtg

SEQ ID NO: 94573 - DNA, 20 bp, Artificial Sequence
  MKO10094573_B_Kctd2
  gRNA
gctcttcctcttgacactgc

SEQ ID NO: 94574 - DNA, 20 bp, Artificial Sequence
  MKO10094574_B_Kctd2
  gRNA
gtttaggataggaccaaagt

SEQ ID NO: 94575 - DNA, 20 bp, Artificial Sequence
  MKO10094575_B_Kctd3
  gRNA
atgattcctagtttgctgag

SEQ ID NO: 94576 - DNA, 20 bp, Artificial Sequence
  MKO10094576_B_Kctd3
  gRNA
gagtcagcattaatgttctc

SEQ ID NO: 94577 - DNA, 20 bp, Artificial Sequence
  MKO10094577_B_Kctd3
  gRNA
acttgcagatatttattgat

SEQ ID NO: 94578 - DNA, 20 bp, Artificial Sequence
  MKO10094578_B_Kctd4
  gRNA
gtcctaaacttcctacgaaa

SEQ ID NO: 94579 - DNA, 20 bp, Artificial Sequence
  MKO10094579_B_Kctd4
  gRNA
cgaagggaggcacaacagcg

SEQ ID NO: 94580 - DNA, 20 bp, Artificial Sequence
  MKO10094580_B_Kctd4
  gRNA
gctgtgaacaattgaccctt

SEQ ID NO: 94581 - DNA, 20 bp, Artificial Sequence
  MKO10094581_B_Kctd5
  gRNA
ctcaccttggctttctcgct

SEQ ID NO: 94582 - DNA, 20 bp, Artificial Sequence
  MKO10094582_B_Kctd5
  gRNA
gtaccgtgtgctgcagtgcc

SEQ ID NO: 94583 - DNA, 20 bp, Artificial Sequence
  MKO10094583_B_Kctd5
  gRNA
ttcatttccatagttgtaag

SEQ ID NO: 94584 - DNA, 20 bp, Artificial Sequence
  MKO10094584_B_Kctd6
  gRNA
taccacgttgacacgctacc

SEQ ID NO: 94585 - DNA, 20 bp, Artificial Sequence
  MKO10094585_B_Kctd6
  gRNA
tgtgatgcacccgagtattg

SEQ ID NO: 94586 - DNA, 20 bp, Artificial Sequence
  MKO10094586_B_Kctd6
  gRNA
gtttcacgatccgcaatact

SEQ ID NO: 94587 - DNA, 20 bp, Artificial Sequence
  MKO10094587_B_Kctd7
  gRNA
gtcgtcttcggcttcggagc

SEQ ID NO: 94588 - DNA, 20 bp, Artificial Sequence
  MKO10094588_B_Kctd7
  gRNA
cccggcttcgcgcagtacag

SEQ ID NO: 94589 - DNA, 20 bp, Artificial Sequence
  MKO10094589_B_Kctd7
  gRNA
cgaagccgaagacgacttcc

SEQ ID NO: 94590 - DNA, 20 bp, Artificial Sequence
  MKO10094590_B_Kctd8
  gRNA
ctatccaaggttaaggtgtt

SEQ ID NO: 94591 - DNA, 20 bp, Artificial Sequence
  MKO10094591_B_Kctd8
  gRNA
tgcctggttatctcgcaccg

SEQ ID NO: 94592 - DNA, 20 bp, Artificial Sequence
  MKO10094592_B_Kctd8
  gRNA
ggtcgatgaagaagcgcgcg

SEQ ID NO: 94593 - DNA, 20 bp, Artificial Sequence
  MKO10094593_B_Kctd9
  gRNA
ccgcttaccttgccgttgct

SEQ ID NO: 94594 - DNA, 20 bp, Artificial Sequence
  MKO10094594_B_Kctd9
  gRNA
aaagccaccagtgtatataa

SEQ ID NO: 94595 - DNA, 20 bp, Artificial Sequence
  MKO10094595_B_Kctd9
  gRNA
cagacagatgctagaccacc

SEQ ID NO: 94596 - DNA, 20 bp, Artificial Sequence
  MKO10094596_B_Kdelc1
  gRNA
cgtcctttcgatctaaaacc

SEQ ID NO: 94597 - DNA, 20 bp, Artificial Sequence
  MKO10094597_B_Kdelc1
  gRNA
cctgtgtcactataccttaa

SEQ ID NO: 94598 - DNA, 20 bp, Artificial Sequence
  MKO10094598_B_Kdelc1
  gRNA
tttctagaacagagtcagtc

SEQ ID NO: 94599 - DNA, 20 bp, Artificial Sequence
  MKO10094599_B_Kdelc2
  gRNA
actccacactcgaagcaatg

SEQ ID NO: 94600 - DNA, 20 bp, Artificial Sequence
  MKO10094600_B_Kdelc2
  gRNA
gagatacaggatgcacgaga

SEQ ID NO: 94601 - DNA, 20 bp, Artificial Sequence
  MKO10094601_B_Kdelc2
  gRNA
taaatacggaccagctcttt

SEQ ID NO: 94602 - DNA, 20 bp, Artificial Sequence
  MKO10094602_B_Kdelr1
  gRNA
atctggcgctaccacttcga

SEQ ID NO: 94603 - DNA, 20 bp, Artificial Sequence
  MKO10094603_B_Kdelr1
  gRNA
actctacaacacctgcatga

SEQ ID NO: 94604 - DNA, 20 bp, Artificial Sequence
  MKO10094604_B_Kdelr1
  gRNA
gagccaagtcctgtttgctg

SEQ ID NO: 94605 - DNA, 20 bp, Artificial Sequence
  MKO10094605_B_Kdelr2
  gRNA
cctctaccgcgctctgtacc

SEQ ID NO: 94606 - DNA, 20 bp, Artificial Sequence
  MKO10094606_B_Kdelr2
  gRNA
cttatacaacacgtctatga

SEQ ID NO: 94607 - DNA, 20 bp, Artificial Sequence
  MKO10094607_B_Kdelr2
  gRNA
ggtatcgtgatttccatcat

SEQ ID NO: 94608 - DNA, 20 bp, Artificial Sequence
  MKO10094608_B_Kdelr3
  gRNA
ttcctcctggtccccgtgac

SEQ ID NO: 94609 - DNA, 20 bp, Artificial Sequence
  MKO10094609_B_Kdelr3
  gRNA
tgaagttcgagaagaggtcc

SEQ ID NO: 94610 - DNA, 20 bp, Artificial Sequence
  MKO10094610_B_Kdelr3
  gRNA
agaccaaagcgaaaagaatc

SEQ ID NO: 94611 - DNA, 20 bp, Artificial Sequence
  MKO10094611_B_Kdm1a
  gRNA
aactcaccagacggctcttc

SEQ ID NO: 94612 - DNA, 20 bp, Artificial Sequence
  MKO10094612_B_Kdm1a
  gRNA
ccatgaccgaatgacctctc

SEQ ID NO: 94613 - DNA, 20 bp, Artificial Sequence
  MKO10094613_B_Kdm1a
  gRNA
tgtaaggcgcttccagctgc

SEQ ID NO: 94614 - DNA, 20 bp, Artificial Sequence
  MKO10094614_B_Kdm1b
  gRNA
cgatggtatcacctttcctg

SEQ ID NO: 94615 - DNA, 20 bp, Artificial Sequence
  MKO10094615_B_Kdm1b
  gRNA
gctttgaccactactacaga

SEQ ID NO: 94616 - DNA, 20 bp, Artificial Sequence
  MKO10094616_B_Kdm1b
  gRNA
gctttgcaagcgcttctgaa

SEQ ID NO: 94617 - DNA, 20 bp, Artificial Sequence
  MKO10094617_B_Kdm2a
  gRNA
tatggtgcagcggccttcca

SEQ ID NO: 94618 - DNA, 20 bp, Artificial Sequence
  MKO10094618_B_Kdm2a
  gRNA
ttaatgtagagtatatccag

SEQ ID NO: 94619 - DNA, 20 bp, Artificial Sequence
  MKO10094619_B_Kdm2a
  gRNA
acatcattcactgtgaagtc

SEQ ID NO: 94620 - DNA, 20 bp, Artificial Sequence
  MKO10094620_B_Kdm2b
  gRNA
ttggaggcatacttaaagcc

SEQ ID NO: 94621 - DNA, 20 bp, Artificial Sequence
  MKO10094621_B_Kdm2b
  gRNA
gtggatgatctcgttgcaga

SEQ ID NO: 94622 - DNA, 20 bp, Artificial Sequence
  MKO10094622_B_Kdm2b
  gRNA
tgtccgaagtgtaaccatgc

SEQ ID NO: 94623 - DNA, 20 bp, Artificial Sequence
  MKO10094623_B_Kdm3a
  gRNA
tgactgtctgattatcagta

SEQ ID NO: 94624 - DNA, 20 bp, Artificial Sequence
  MKO10094624_B_Kdm3a
  gRNA
aactcttcaagtcaactgtg

SEQ ID NO: 94625 - DNA, 20 bp, Artificial Sequence
  MKO10094625_B_Kdm3a
  gRNA
tgggagccataacttctgtt

SEQ ID NO: 94626 - DNA, 20 bp, Artificial Sequence
  MKO10094626_B_Kdm3b
  gRNA
aacgaagctctcgatccaca

SEQ ID NO: 94627 - DNA, 20 bp, Artificial Sequence
  MKO10094627_B_Kdm3b
  gRNA
cacccccctagtagataagc

SEQ ID NO: 94628 - DNA, 20 bp, Artificial Sequence
  MKO10094628_B_Kdm3b
  gRNA
tttaggtccctatagtgtcc

SEQ ID NO: 94629 - DNA, 20 bp, Artificial Sequence
  MKO10094629_B_Kdm4a
  gRNA
tgtggaagacgtccttcgcc

SEQ ID NO: 94630 - DNA, 20 bp, Artificial Sequence
  MKO10094630_B_Kdm4a
  gRNA
gcccagcccgatgagctcct

SEQ ID NO: 94631 - DNA, 20 bp, Artificial Sequence
  MKO10094631_B_Kdm4a
  gRNA
aagaacttgagcgtaaatac

SEQ ID NO: 94632 - DNA, 20 bp, Artificial Sequence
  MKO10094632_B_Kdm4b
  gRNA
tgtattcacgccctcaatga

SEQ ID NO: 94633 - DNA, 20 bp, Artificial Sequence
  MKO10094633_B_Kdm4b
  gRNA
gcggtactcccccacagtca

SEQ ID NO: 94634 - DNA, 20 bp, Artificial Sequence
  MKO10094634_B_Kdm4b
  gRNA
tcataggtacgccataccac

SEQ ID NO: 94635 - DNA, 20 bp, Artificial Sequence
  MKO10094635_B_Kdm4c
  gRNA
aataccccttatctctattt

SEQ ID NO: 94636 - DNA, 20 bp, Artificial Sequence
  MKO10094636_B_Kdm4c
  gRNA
aagatttggaacgcaaatac

SEQ ID NO: 94637 - DNA, 20 bp, Artificial Sequence
  MKO10094637_B_Kdm4c
  gRNA
atactgtactccaagatact

SEQ ID NO: 94638 - DNA, 20 bp, Artificial Sequence
  MKO10094638_B_Kdm4d
  gRNA
ggagacttaatagtcgactc

SEQ ID NO: 94639 - DNA, 20 bp, Artificial Sequence
  MKO10094639_B_Kdm4d
  gRNA
atcgtgagacctggcgaagc

SEQ ID NO: 94640 - DNA, 20 bp, Artificial Sequence
  MKO10094640_B_Kdm4d
  gRNA
ttccacagttcatatcgctc

SEQ ID NO: 94641 - DNA, 20 bp, Artificial Sequence
  MKO10094641_B_Kdm5a
  gRNA
tactcacctcaagttcattc

SEQ ID NO: 94642 - DNA, 20 bp, Artificial Sequence
  MKO10094642_B_Kdm5a
  gRNA
tggatcaactggcaaaattt

SEQ ID NO: 94643 - DNA, 20 bp, Artificial Sequence
  MKO10094643_B_Kdm5a
  gRNA
ccagcgcctgaatgaacttg

SEQ ID NO: 94644 - DNA, 20 bp, Artificial Sequence
  MKO10094644_B_Kdm5b
  gRNA
ataaacttcatttcaccccg

SEQ ID NO: 94645 - DNA, 20 bp, Artificial Sequence
  MKO10094645_B_Kdm5b
  gRNA
gctcccaatactttgcaatc

SEQ ID NO: 94646 - DNA, 20 bp, Artificial Sequence
  MKO10094646_B_Kdm5b
  gRNA
acccatcttggtggcaattt

SEQ ID NO: 94647 - DNA, 20 bp, Artificial Sequence
  MKO10094647_B_Kdm5c
  gRNA
ttcatagtgagagcgtagca

SEQ ID NO: 94648 - DNA, 20 bp, Artificial Sequence
  MKO10094648_B_Kdm5c
  gRNA
cacacgcccatttgataatg

SEQ ID NO: 94649 - DNA, 20 bp, Artificial Sequence
  MKO10094649_B_Kdm5c
  gRNA
ccctatgaaatgtaccagtc

SEQ ID NO: 94650 - DNA, 20 bp, Artificial Sequence
  MKO10094650_B_Kdm5d
  gRNA
caacgccttaattacccatc

SEQ ID NO: 94651 - DNA, 20 bp, Artificial Sequence
  MKO10094651_B_Kdm5d
  gRNA
tcatttagcctctgaattcg

SEQ ID NO: 94652 - DNA, 20 bp, Artificial Sequence
  MKO10094652_B_Kdm5d
  gRNA
ttaccttattaaggctgtaa

SEQ ID NO: 94653 - DNA, 20 bp, Artificial Sequence
  MKO10094653_B_Kdm6a
  gRNA
cgccaggatgaaggccctgc

SEQ ID NO: 94654 - DNA, 20 bp, Artificial Sequence
  MKO10094654_B_Kdm6a
  gRNA
actgtaaactgtagtacctc

SEQ ID NO: 94655 - DNA, 20 bp, Artificial Sequence
  MKO10094655_B_Kdm6a
  gRNA
accactgaaatgcattgtaa

SEQ ID NO: 94656 - DNA, 20 bp, Artificial Sequence
  MKO10094656_B_Kdm6b
  gRNA
aacaaaccctattatgctcc

SEQ ID NO: 94657 - DNA, 20 bp, Artificial Sequence
  MKO10094657_B_Kdm6b
  gRNA
ggttcagcagatctcttcac

SEQ ID NO: 94658 - DNA, 20 bp, Artificial Sequence
  MKO10094658_B_Kdm6b
  gRNA
cggcatgaaagttccagagc

SEQ ID NO: 94659 - DNA, 20 bp, Artificial Sequence
  MKO10094659_B_Kdm7a
  gRNA
tggatttgatgtccctatta

SEQ ID NO: 94660 - DNA, 20 bp, Artificial Sequence
  MKO10094660_B_Kdm7a
  gRNA
actttgtatccgaaaattca

SEQ ID NO: 94661 - DNA, 20 bp, Artificial Sequence
  MKO10094661_B_Kdm7a
  gRNA
acatccatcactgaaaaagc

SEQ ID NO: 94662 - DNA, 20 bp, Artificial Sequence
  MKO10094662_B_Kdm8
  gRNA
atccgctctaacatgacatc

SEQ ID NO: 94663 - DNA, 20 bp, Artificial Sequence
  MKO10094663_B_Kdm8
  gRNA
actggccgtgcatgaagaag

SEQ ID NO: 94664 - DNA, 20 bp, Artificial Sequence
  MKO10094664_B_Kdm8
  gRNA
tcagcaccagctcttcgacc

SEQ ID NO: 94665 - DNA, 20 bp, Artificial Sequence
  MKO10094665_B_Kdr
  gRNA
gagcctacaagtgctcgtac

SEQ ID NO: 94666 - DNA, 20 bp, Artificial Sequence
  MKO10094666_B_Kdr
  gRNA
aaagcctatctcgctgtccc

SEQ ID NO: 94667 - DNA, 20 bp, Artificial Sequence
  MKO10094667_B_Kdr
  gRNA
atttcctgggacagcgagat

SEQ ID NO: 94668 - DNA, 20 bp, Artificial Sequence
  MKO10094668_B_Kdsr
  gRNA
gacatgctggtcaactgtgc

SEQ ID NO: 94669 - DNA, 20 bp, Artificial Sequence
  MKO10094669_B_Kdsr
  gRNA
gctattgagtgctacaaaca

SEQ ID NO: 94670 - DNA, 20 bp, Artificial Sequence
  MKO10094670_B_Kdsr
  gRNA
gcactctattaatgacaaac

SEQ ID NO: 94671 - DNA, 20 bp, Artificial Sequence
  MKO10094671_B_Keap1
  gRNA
tagtcgcgccaatgttgaca

SEQ ID NO: 94672 - DNA, 20 bp, Artificial Sequence
  MKO10094672_B_Keap1
  gRNA
ggggctttgacgggactaac

SEQ ID NO: 94673 - DNA, 20 bp, Artificial Sequence
  MKO10094673_B_Keap1
  gRNA
ttgatcaatttgcttccgac

SEQ ID NO: 94674 - DNA, 20 bp, Artificial Sequence
  MKO10094674_B_Keg1
  gRNA
cttgaccttgcccaagttag

SEQ ID NO: 94675 - DNA, 20 bp, Artificial Sequence
  MKO10094675_B_Keg1
  gRNA
ctagataagtgttgttgtag

SEQ ID NO: 94676 - DNA, 20 bp, Artificial Sequence
  MKO10094676_B_Keg1
  gRNA
aagtcttggagccactaact

SEQ ID NO: 94677 - DNA, 20 bp, Artificial Sequence
  MKO10094677_B_Kel
  gRNA
gacagctagcagcacccatc

SEQ ID NO: 94678 - DNA, 20 bp, Artificial Sequence
  MKO10094678_B_Kel
  gRNA
tccaggagctccatacacac

SEQ ID NO: 94679 - DNA, 20 bp, Artificial Sequence
  MKO10094679_B_Kel
  gRNA
tcttacaaggaccacagttc

SEQ ID NO: 94680 - DNA, 20 bp, Artificial Sequence
  MKO10094680_B_Kera
  gRNA
ccccttctcaatcccgtagt

SEQ ID NO: 94681 - DNA, 20 bp, Artificial Sequence
  MKO10094681_B_Kera
  gRNA
acaactgagctacctgcgtc

SEQ ID NO: 94682 - DNA, 20 bp, Artificial Sequence
  MKO10094682_B_Kera
  gRNA
caccacactgcgtgcagaac

SEQ ID NO: 94683 - DNA, 20 bp, Artificial Sequence
  MKO10094683_B_Khdc1a
  gRNA
tgatgaataccttcacaccc

SEQ ID NO: 94684 - DNA, 20 bp, Artificial Sequence
  MKO10094684_B_Khdc1a
  gRNA
cccaaagcatttaccaatgg

SEQ ID NO: 94685 - DNA, 20 bp, Artificial Sequence
  MKO10094685_B_Khdc1a
  gRNA
agatgatgctactgcagatc

SEQ ID NO: 94686 - DNA, 20 bp, Artificial Sequence
  MKO10094686_B_Khdc1b
  gRNA
taccaaatatgtagtcttcc

SEQ ID NO: 94687 - DNA, 20 bp, Artificial Sequence
  MKO10094687_B_Khdc1b
  gRNA
caggaatgagtgacctccgc

SEQ ID NO: 94688 - DNA, 20 bp, Artificial Sequence
  MKO10094688_B_Khdc1b
  gRNA
acccacagccttgccttaag

SEQ ID NO: 94689 - DNA, 20 bp, Artificial Sequence
  MKO10094689_B_Khdc1c
  gRNA
tgatgaataccttcacaccc

SEQ ID NO: 94690 - DNA, 20 bp, Artificial Sequence
  MKO10094690_B_Khdc1c
  gRNA
cccaaagcatttaccaatgg

SEQ ID NO: 94691 - DNA, 20 bp, Artificial Sequence
  MKO10094691_B_Khdc1c
  gRNA
agatgatgctactgcagatc

SEQ ID NO: 94692 - DNA, 20 bp, Artificial Sequence
  MKO10094692_B_Khdc3
  gRNA
cattcgacatggaaccactt

SEQ ID NO: 94693 - DNA, 20 bp, Artificial Sequence
  MKO10094693_B_Khdc3
  gRNA
ctgcaccgaagccgactgcg

SEQ ID NO: 94694 - DNA, 20 bp, Artificial Sequence
  MKO10094694_B_Khdc3
  gRNA
aacatgatttccagtagccg

SEQ ID NO: 94695 - DNA, 20 bp, Artificial Sequence
  MKO10094695_B_Khdrbs1
  gRNA
gtgtgaagcttatgctctta

SEQ ID NO: 94696 - DNA, 20 bp, Artificial Sequence
  MKO10094696_B_Khdrbs1
  gRNA
acctttggatactgcttgac

SEQ ID NO: 94697 - DNA, 20 bp, Artificial Sequence
  MKO10094697_B_Khdrbs1
  gRNA
tctttgcaccagtctcttcc

SEQ ID NO: 94698 - DNA, 20 bp, Artificial Sequence
  MKO10094698_B_Khdrbs2
  gRNA
aaattcgtcaagagcaactc

SEQ ID NO: 94699 - DNA, 20 bp, Artificial Sequence
  MKO10094699_B_Khdrbs2
  gRNA
cattcaagtaagacaactcc

SEQ ID NO: 94700 - DNA, 20 bp, Artificial Sequence
  MKO10094700_B_Khdrbs2
  gRNA
gggtgctaaaatgtctatcc

SEQ ID NO: 94701 - DNA, 20 bp, Artificial Sequence
  MKO10094701_B_Khdrbs3
  gRNA
acacttcaatgagcacgtgc

SEQ ID NO: 94702 - DNA, 20 bp, Artificial Sequence
  MKO10094702_B_Khdrbs3
  gRNA
atccgggcatatgcttctgc

SEQ ID NO: 94703 - DNA, 20 bp, Artificial Sequence
  MKO10094703_B_Khdrbs3
  gRNA
ggaagagaagtacattgacg

SEQ ID NO: 94704 - DNA, 20 bp, Artificial Sequence
  MKO10094704_B_Khk
  gRNA
gccccagggccggaatgcat

SEQ ID NO: 94705 - DNA, 20 bp, Artificial Sequence
  MKO10094705_B_Khk
  gRNA
tctctatctccaccgacacc

SEQ ID NO: 94706 - DNA, 20 bp, Artificial Sequence
  MKO10094706_B_Khk
  gRNA
tgcatcgtcaacaactccaa

SEQ ID NO: 94707 - DNA, 20 bp, Artificial Sequence
  MKO10094707_B_Khnyn
  gRNA
cttgccatccatgactcgtg

SEQ ID NO: 94708 - DNA, 20 bp, Artificial Sequence
  MKO10094708_B_Khnyn
  gRNA
caaagacggttatgtcacgg

SEQ ID NO: 94709 - DNA, 20 bp, Artificial Sequence
  MKO10094709_B_Khnyn
  gRNA
cctgacaccctcacgagtca

SEQ ID NO: 94710 - DNA, 20 bp, Artificial Sequence
  MKO10094710_B_Khsrp
  gRNA
ctcaagcccaccatgccatc

SEQ ID NO: 94711 - DNA, 20 bp, Artificial Sequence
  MKO10094711_B_Khsrp
  gRNA
agtggacttacagtctccct

SEQ ID NO: 94712 - DNA, 20 bp, Artificial Sequence
  MKO10094712_B_Khsrp
  gRNA
ccctagattgcagccaaaat

SEQ ID NO: 94713 - DNA, 20 bp, Artificial Sequence
  MKO10094713_B_Kidins220
  gRNA
ggtgccaacccaagtgtcac

SEQ ID NO: 94714 - DNA, 20 bp, Artificial Sequence
  MKO10094714_B_Kidins220
  gRNA
actgatgatagctgctgaac

SEQ ID NO: 94715 - DNA, 20 bp, Artificial Sequence
  MKO10094715_B_Kidins220
  gRNA
caaaggcaggacggatgttg

SEQ ID NO: 94716 - DNA, 20 bp, Artificial Sequence
  MKO10094716_B_Kif11
  gRNA
taatttcaggatcctctggc

SEQ ID NO: 94717 - DNA, 20 bp, Artificial Sequence
  MKO10094717_B_Kif11
  gRNA
tttcacagatatggtcagac

SEQ ID NO: 94718 - DNA, 20 bp, Artificial Sequence
  MKO10094718_B_Kif11
  gRNA
ataataacttcatctagaat

SEQ ID NO: 94719 - DNA, 20 bp, Artificial Sequence
  MKO10094719_B_Kif12
  gRNA
acgtttggccagactggttc

SEQ ID NO: 94720 - DNA, 20 bp, Artificial Sequence
  MKO10094720_B_Kif12
  gRNA
gcagagtgcattgcactgtt

SEQ ID NO: 94721 - DNA, 20 bp, Artificial Sequence
  MKO10094721_B_Kif12
  gRNA
ggtgcgtcccatgagcacag

SEQ ID NO: 94722 - DNA, 20 bp, Artificial Sequence
  MKO10094722_B_Kif13a
  gRNA
acaagcattgtatccctgaa

SEQ ID NO: 94723 - DNA, 20 bp, Artificial Sequence
  MKO10094723_B_Kif13a
  gRNA
tcctccttccaacactaagc

SEQ ID NO: 94724 - DNA, 20 bp, Artificial Sequence
  MKO10094724_B_Kif13a
  gRNA
aattctcgagaaagcctttc

SEQ ID NO: 94725 - DNA, 20 bp, Artificial Sequence
  MKO10094725_B_Kif13b
  gRNA
ctgcccataagcaaagatac

SEQ ID NO: 94726 - DNA, 20 bp, Artificial Sequence
  MKO10094726_B_Kif13b
  gRNA
ttgcttatgatcactgtttc

SEQ ID NO: 94727 - DNA, 20 bp, Artificial Sequence
  MKO10094727_B_Kif13b
  gRNA
tctgaagaatgttctcccca

SEQ ID NO: 94728 - DNA, 20 bp, Artificial Sequence
  MKO10094728_B_Kif14
  gRNA
agagtaaacttgtttcatat

SEQ ID NO: 94729 - DNA, 20 bp, Artificial Sequence
  MKO10094729_B_Kif14
  gRNA
agccttcaaaagctctgtcc

SEQ ID NO: 94730 - DNA, 20 bp, Artificial Sequence
  MKO10094730_B_Kif14
  gRNA
aagagatcttcacagaatct

SEQ ID NO: 94731 - DNA, 20 bp, Artificial Sequence
  MKO10094731_B_Kif15
  gRNA
attgtggaatcatgcatgag

SEQ ID NO: 94732 - DNA, 20 bp, Artificial Sequence
  MKO10094732_B_Kif15
  gRNA
aacaacttactatgcaaaga

SEQ ID NO: 94733 - DNA, 20 bp, Artificial Sequence
  MKO10094733_B_Kif15
  gRNA
attctcattctaaccagcca

SEQ ID NO: 94734 - DNA, 20 bp, Artificial Sequence
  MKO10094734_B_Kif16b
  gRNA
ggccaagttcatcattcaaa

SEQ ID NO: 94735 - DNA, 20 bp, Artificial Sequence
  MKO10094735_B_Kif16b
  gRNA
atttcttgtgagacataatc

SEQ ID NO: 94736 - DNA, 20 bp, Artificial Sequence
  MKO10094736_B_Kif16b
  gRNA
gttgtgaaatctgcatttga

SEQ ID NO: 94737 - DNA, 20 bp, Artificial Sequence
  MKO10094737_B_Kif17
  gRNA
ggcccagtgcgagcgcgtca

SEQ ID NO: 94738 - DNA, 20 bp, Artificial Sequence
  MKO10094738_B_Kif17
  gRNA
tcagggtgtagccaaccgca

SEQ ID NO: 94739 - DNA, 20 bp, Artificial Sequence
  MKO10094739_B_Kif17
  gRNA
ctcgtgcagggtgtcaccga

SEQ ID NO: 94740 - DNA, 20 bp, Artificial Sequence
  MKO10094740_B_Kif18a
  gRNA
agacactgcattcacgtcag

SEQ ID NO: 94741 - DNA, 20 bp, Artificial Sequence
  MKO10094741_B_Kif18a
  gRNA
tagcactgccgtgtcatacc

SEQ ID NO: 94742 - DNA, 20 bp, Artificial Sequence
  MKO10094742_B_Kif18a
  gRNA
cccctagcctaaatcttcag

SEQ ID NO: 94743 - DNA, 20 bp, Artificial Sequence
  MKO10094743_B_Kif18b
  gRNA
cagacgcctgtacagttcca

SEQ ID NO: 94744 - DNA, 20 bp, Artificial Sequence
  MKO10094744_B_Kif18b
  gRNA
caggcgtctggaagcccgcc

SEQ ID NO: 94745 - DNA, 20 bp, Artificial Sequence
  MKO10094745_B_Kif18b
  gRNA
aggacccctcaccatccgtg

SEQ ID NO: 94746 - DNA, 20 bp, Artificial Sequence
  MKO10094746_B_Kif19a
  gRNA
tctcctcgatggctcggaac

SEQ ID NO: 94747 - DNA, 20 bp, Artificial Sequence
  MKO10094747_B_Kif19a
  gRNA
cgtccatcttgtgagcgatg

SEQ ID NO: 94748 - DNA, 20 bp, Artificial Sequence
  MKO10094748_B_Kif19a
  gRNA
tgtgcccgcagaatgtcgtc

SEQ ID NO: 94749 - DNA, 20 bp, Artificial Sequence
  MKO10094749_B_Kif1a
  gRNA
caccgaggtatgtgaccagt

SEQ ID NO: 94750 - DNA, 20 bp, Artificial Sequence
  MKO10094750_B_Kif1a
  gRNA
acgcaccgccaccttcacag

SEQ ID NO: 94751 - DNA, 20 bp, Artificial Sequence
  MKO10094751_B_Kif1a
  gRNA
gctcatttcccgggagttga

SEQ ID NO: 94752 - DNA, 20 bp, Artificial Sequence
  MKO10094752_B_Kif1b
  gRNA
tgggaaatcctacacgatga

SEQ ID NO: 94753 - DNA, 20 bp, Artificial Sequence
  MKO10094753_B_Kif1b
  gRNA
caccgaggtgtgggaccagt

SEQ ID NO: 94754 - DNA, 20 bp, Artificial Sequence
  MKO10094754_B_Kif1b
  gRNA
tcagctttgactactcctac

SEQ ID NO: 94755 - DNA, 20 bp, Artificial Sequence
  MKO10094755_B_Kif1c
  gRNA
tcaccttcgactattcttac

SEQ ID NO: 94756 - DNA, 20 bp, Artificial Sequence
  MKO10094756_B_Kif1c
  gRNA
ggggcttacctctactgaat

SEQ ID NO: 94757 - DNA, 20 bp, Artificial Sequence
  MKO10094757_B_Kif1c
  gRNA
cccagcccccgtctgcccgt

SEQ ID NO: 94758 - DNA, 20 bp, Artificial Sequence
  MKO10094758_B_Kif20a
  gRNA
aactggctcatctacaccta

SEQ ID NO: 94759 - DNA, 20 bp, Artificial Sequence
  MKO10094759_B_Kif20a
  gRNA
ttgccttgaagagtaatgag

SEQ ID NO: 94760 - DNA, 20 bp, Artificial Sequence
  MKO10094760_B_Kif20a
  gRNA
tctgttacaggctctactgg

SEQ ID NO: 94761 - DNA, 20 bp, Artificial Sequence
  MKO10094761_B_Kif20b
  gRNA
ctagggctgtgtgcaagttt

SEQ ID NO: 94762 - DNA, 20 bp, Artificial Sequence
  MKO10094762_B_Kif20b
  gRNA
attatcatctgatcaagaga

SEQ ID NO: 94763 - DNA, 20 bp, Artificial Sequence
  MKO10094763_B_Kif20b
  gRNA
cagagctcttctcacttaag

SEQ ID NO: 94764 - DNA, 20 bp, Artificial Sequence
  MKO10094764_B_Kif21a
  gRNA
gctcggtgcgcgtggctgtc

SEQ ID NO: 94765 - DNA, 20 bp, Artificial Sequence
  MKO10094765_B_Kif21a
  gRNA
tacttgtccataggcaaaca

SEQ ID NO: 94766 - DNA, 20 bp, Artificial Sequence
  MKO10094766_B_Kif21a
  gRNA
cgcaggcatgttgggcgctg

SEQ ID NO: 94767 - DNA, 20 bp, Artificial Sequence
  MKO10094767_B_Kif21b
  gRNA
acctgcggtgtcgggcatcg

SEQ ID NO: 94768 - DNA, 20 bp, Artificial Sequence
  MKO10094768_B_Kif21b
  gRNA
ctggggctctcccggggtaa

SEQ ID NO: 94769 - DNA, 20 bp, Artificial Sequence
  MKO10094769_B_Kif21b
  gRNA
cacacacgcgcatctggcac

SEQ ID NO: 94770 - DNA, 20 bp, Artificial Sequence
  MKO10094770_B_Kif22
  gRNA
tgttccctcggcagtcttcg

SEQ ID NO: 94771 - DNA, 20 bp, Artificial Sequence
  MKO10094771_B_Kif22
  gRNA
agtgctcttctcgccataga

SEQ ID NO: 94772 - DNA, 20 bp, Artificial Sequence
  MKO10094772_B_Kif22
  gRNA
gcccatcctaaggcacttgc

SEQ ID NO: 94773 - DNA, 20 bp, Artificial Sequence
  MKO10094773_B_Kif23
  gRNA
ctgttgagtcgatagccctc

SEQ ID NO: 94774 - DNA, 20 bp, Artificial Sequence
  MKO10094774_B_Kif23
  gRNA
gacctcattcatggcaagaa

SEQ ID NO: 94775 - DNA, 20 bp, Artificial Sequence
  MKO10094775_B_Kif23
  gRNA
gacaaaccttaaagatccag

SEQ ID NO: 94776 - DNA, 20 bp, Artificial Sequence
  MKO10094776_B_Kif24
  gRNA
cagccagagcatacaatcct

SEQ ID NO: 94777 - DNA, 20 bp, Artificial Sequence
  MKO10094777_B_Kif24
  gRNA
tggccttcgagagctccaag

SEQ ID NO: 94778 - DNA, 20 bp, Artificial Sequence
  MKO10094778_B_Kif24
  gRNA
aaacccaggattgtatgctc

SEQ ID NO: 94779 - DNA, 20 bp, Artificial Sequence
  MKO10094779_B_Kif26a
  gRNA
cgggtgatgcttcttgcgct

SEQ ID NO: 94780 - DNA, 20 bp, Artificial Sequence
  MKO10094780_B_Kif26a
  gRNA
cacgccttcgacatacgttc

SEQ ID NO: 94781 - DNA, 20 bp, Artificial Sequence
  MKO10094781_B_Kif26a
  gRNA
agcattggggtcctcgtgac

SEQ ID NO: 94782 - DNA, 20 bp, Artificial Sequence
  MKO10094782_B_Kif26b
  gRNA
catctcttaccgtgcgaaga

SEQ ID NO: 94783 - DNA, 20 bp, Artificial Sequence
  MKO10094783_B_Kif26b
  gRNA
atcaatatctagacggcacc

SEQ ID NO: 94784 - DNA, 20 bp, Artificial Sequence
  MKO10094784_B_Kif26b
  gRNA
aggggagcctccgcaacaga

SEQ ID NO: 94785 - DNA, 20 bp, Artificial Sequence
  MKO10094785_B_Kif27
  gRNA
ccaactctagaagatctctt

SEQ ID NO: 94786 - DNA, 20 bp, Artificial Sequence
  MKO10094786_B_Kif27
  gRNA
gtcgtatatagaagtttata

SEQ ID NO: 94787 - DNA, 20 bp, Artificial Sequence
  MKO10094787_B_Kif27
  gRNA
cctgcaatctattcactttc

SEQ ID NO: 94788 - DNA, 20 bp, Artificial Sequence
  MKO10094788_B_Kif2a
  gRNA
gacgagggtggaggtagttc

SEQ ID NO: 94789 - DNA, 20 bp, Artificial Sequence
  MKO10094789_B_Kif2a
  gRNA
tgtgcagaagacgattgctc

SEQ ID NO: 94790 - DNA, 20 bp, Artificial Sequence
  MKO10094790_B_Kif2a
  gRNA
ctgggctcaatatcttcatc

SEQ ID NO: 94791 - DNA, 20 bp, Artificial Sequence
  MKO10094791_B_Kif2b
  gRNA
cgagactatgcgcatgattg

SEQ ID NO: 94792 - DNA, 20 bp, Artificial Sequence
  MKO10094792_B_Kif2b
  gRNA
atgatcgcgacaatctcacc

SEQ ID NO: 94793 - DNA, 20 bp, Artificial Sequence
  MKO10094793_B_Kif2b
  gRNA
atgcgcatagtctcgaagtt

SEQ ID NO: 94794 - DNA, 20 bp, Artificial Sequence
  MKO10094794_B_Kif2c
  gRNA
atcgaaggaggtaccacaaa

SEQ ID NO: 94795 - DNA, 20 bp, Artificial Sequence
  MKO10094795_B_Kif2c
  gRNA
aactgcttgcgagagtttgt

SEQ ID NO: 94796 - DNA, 20 bp, Artificial Sequence
  MKO10094796_B_Kif2c
  gRNA
gatccattccaccgaaacac

SEQ ID NO: 94797 - DNA, 20 bp, Artificial Sequence
  MKO10094797_B_Kif3a
  gRNA
tttggttcgagtgtcatact

SEQ ID NO: 94798 - DNA, 20 bp, Artificial Sequence
  MKO10094798_B_Kif3a
  gRNA
tgaagaagttcgagaccttt

SEQ ID NO: 94799 - DNA, 20 bp, Artificial Sequence
  MKO10094799_B_Kif3a
  gRNA
tcagggaccatctttgcata

SEQ ID NO: 94800 - DNA, 20 bp, Artificial Sequence
  MKO10094800_B_Kif3b
  gRNA
ctcgactctccatttgctgc

SEQ ID NO: 94801 - DNA, 20 bp, Artificial Sequence
  MKO10094801_B_Kif3b
  gRNA
agaacacatcaaagagcgcc

SEQ ID NO: 94802 - DNA, 20 bp, Artificial Sequence
  MKO10094802_B_Kif3b
  gRNA
aaacgaacagcagaagatcc

SEQ ID NO: 94803 - DNA, 20 bp, Artificial Sequence
  MKO10094803_B_Kif3c
  gRNA
gtaggtaccacgtagctcca

SEQ ID NO: 94804 - DNA, 20 bp, Artificial Sequence
  MKO10094804_B_Kif3c
  gRNA
caacatcttctgttgctcgt

SEQ ID NO: 94805 - DNA, 20 bp, Artificial Sequence
  MKO10094805_B_Kif3c
  gRNA
tgagaacttcatcccccctg

SEQ ID NO: 94806 - DNA, 20 bp, Artificial Sequence
  MKO10094806_B_Kif4
  gRNA
atctggaaaaacgtattcaa

SEQ ID NO: 94807 - DNA, 20 bp, Artificial Sequence
  MKO10094807_B_Kif4
  gRNA
ttacaatctccattgagcaa

SEQ ID NO: 94808 - DNA, 20 bp, Artificial Sequence
  MKO10094808_B_Kif4
  gRNA
gcagtagctccactcataaa

SEQ ID NO: 94809 - DNA, 20 bp, Artificial Sequence
  MKO10094809_B_Kif5a
  gRNA
aatggcacaatcttcgctta

SEQ ID NO: 94810 - DNA, 20 bp, Artificial Sequence
  MKO10094810_B_Kif5a
  gRNA
cttacctttgacgatctgca

SEQ ID NO: 94811 - DNA, 20 bp, Artificial Sequence
  MKO10094811_B_Kif5a
  gRNA
ctcagggaaaacgcatacca

SEQ ID NO: 94812 - DNA, 20 bp, Artificial Sequence
  MKO10094812_B_Kif5b
  gRNA
gaaacattacctccatcgtg

SEQ ID NO: 94813 - DNA, 20 bp, Artificial Sequence
  MKO10094813_B_Kif5b
  gRNA
ggtaaacttcatgatccaga

SEQ ID NO: 94814 - DNA, 20 bp, Artificial Sequence
  MKO10094814_B_Kif5b
  gRNA
aagataagggacttgttaga

SEQ ID NO: 94815 - DNA, 20 bp, Artificial Sequence
  MKO10094815_B_Kif5c
  gRNA
gctgccgcccaacacaaccc

SEQ ID NO: 94816 - DNA, 20 bp, Artificial Sequence
  MKO10094816_B_Kif5c
  gRNA
ttaccttgatatgaaactcc

SEQ ID NO: 94817 - DNA, 20 bp, Artificial Sequence
  MKO10094817_B_Kif5c
  gRNA
aaaatatcatgtgcaatcct

SEQ ID NO: 94818 - DNA, 20 bp, Artificial Sequence
  MKO10094818_B_Kif6
  gRNA
actgctcaaaaatgtacgac

SEQ ID NO: 94819 - DNA, 20 bp, Artificial Sequence
  MKO10094819_B_Kif6
  gRNA
aattgtcttaccccgagacc

SEQ ID NO: 94820 - DNA, 20 bp, Artificial Sequence
  MKO10094820_B_Kif6
  gRNA
cgaatgtggctatgacctgc

SEQ ID NO: 94821 - DNA, 20 bp, Artificial Sequence
  MKO10094821_B_Kif7
  gRNA
gggaaatgtcattagcgccc

SEQ ID NO: 94822 - DNA, 20 bp, Artificial Sequence
  MKO10094822_B_Kif7
  gRNA
cccgatcatcttcccgaagc

SEQ ID NO: 94823 - DNA, 20 bp, Artificial Sequence
  MKO10094823_B_Kif7
  gRNA
cctggtgcatgtatcctacc

SEQ ID NO: 94824 - DNA, 20 bp, Artificial Sequence
  MKO10094824_B_Kif9
  gRNA
acggagaattacaagcaccg

SEQ ID NO: 94825 - DNA, 20 bp, Artificial Sequence
  MKO10094825_B_Kif9
  gRNA
gcaggtaccatcatgtgtta

SEQ ID NO: 94826 - DNA, 20 bp, Artificial Sequence
  MKO10094826_B_Kif9
  gRNA
ctccagctaaaatgggtact

SEQ ID NO: 94827 - DNA, 20 bp, Artificial Sequence
  MKO10094827_B_Kifap3
  gRNA
ccatccctcaaagctaagcg

SEQ ID NO: 94828 - DNA, 20 bp, Artificial Sequence
  MKO10094828_B_Kifap3
  gRNA
atctcccatttctccaagaa

SEQ ID NO: 94829 - DNA, 20 bp, Artificial Sequence
  MKO10094829_B_Kifap3
  gRNA
ttcctttcgttctcccaaca

SEQ ID NO: 94830 - DNA, 20 bp, Artificial Sequence
  MKO10094830_B_Kifc1
  gRNA
gccacctactgccaggcttc

SEQ ID NO: 94831 - DNA, 20 bp, Artificial Sequence
  MKO10094831_B_Kifc1
  gRNA
gcccacctgcagtgtggccc

SEQ ID NO: 94832 - DNA, 20 bp, Artificial Sequence
  MKO10094832_B_Kifc1
  gRNA
ccaatagcagagcacccacg

SEQ ID NO: 94833 - DNA, 20 bp, Artificial Sequence
  MKO10094833_B_Kifc2
  gRNA
tgagttcctctccgtccagt

SEQ ID NO: 94834 - DNA, 20 bp, Artificial Sequence
  MKO10094834_B_Kifc2
  gRNA
accggccaggctgttcagct

SEQ ID NO: 94835 - DNA, 20 bp, Artificial Sequence
  MKO10094835_B_Kifc2
  gRNA
tggcatggacacggagcccc

SEQ ID NO: 94836 - DNA, 20 bp, Artificial Sequence
  MKO10094836_B_Kifc3
  gRNA
gaaggcagtacacgagaacc

SEQ ID NO: 94837 - DNA, 20 bp, Artificial Sequence
  MKO10094837_B_Kifc3
  gRNA
ccagccggtggtgccctgcg

SEQ ID NO: 94838 - DNA, 20 bp, Artificial Sequence
  MKO10094838_B_Kifc3
  gRNA
tcagactggcgatagtctca

SEQ ID NO: 94839 - DNA, 20 bp, Artificial Sequence
  MKO10094839_B_Kifc5b
  gRNA
gcccacctgcattgtggccc

SEQ ID NO: 94840 - DNA, 20 bp, Artificial Sequence
  MKO10094840_B_Kifc5b
  gRNA
tgtcagcaagcagcctcaag

SEQ ID NO: 94841 - DNA, 20 bp, Artificial Sequence
  MKO10094841_B_Kifc5b
  gRNA
cctggtgggtgctctgctgt

SEQ ID NO: 94842 - DNA, 20 bp, Artificial Sequence
  MKO10094842_B_Kin
  gRNA
agtcggtcagtgtctcccac

SEQ ID NO: 94843 - DNA, 20 bp, Artificial Sequence
  MKO10094843_B_Kin
  gRNA
ggaattccgaaatgactttc

SEQ ID NO: 94844 - DNA, 20 bp, Artificial Sequence
  MKO10094844_B_Kin
  gRNA
tcatcaaagacaactgttgc

SEQ ID NO: 94845 - DNA, 20 bp, Artificial Sequence
  MKO10094845_B_Kir3dl1
  gRNA
cctgcatgttctgttgtcac

SEQ ID NO: 94846 - DNA, 20 bp, Artificial Sequence
  MKO10094846_B_Kir3dl1
  gRNA
actggagtctgaccattcat

SEQ ID NO: 94847 - DNA, 20 bp, Artificial Sequence
  MKO10094847_B_Kir3dl1
  gRNA
tcacatgtcagctactcaat

SEQ ID NO: 94848 - DNA, 20 bp, Artificial Sequence
  MKO10094848_B_Kir3dl2
  gRNA
cctggagtgcagatccacag

SEQ ID NO: 94849 - DNA, 20 bp, Artificial Sequence
  MKO10094849_B_Kir3dl2
  gRNA
agcatctatagttccccttt

SEQ ID NO: 94850 - DNA, 20 bp, Artificial Sequence
  MKO10094850_B_Kir3dl2
  gRNA
gtaggttcctgcatgttctg

SEQ ID NO: 94851 - DNA, 20 bp, Artificial Sequence
  MKO10094851_B_Kirrel2
  gRNA
ctccagggtggtcccggtac

SEQ ID NO: 94852 - DNA, 20 bp, Artificial Sequence
  MKO10094852_B_Kirrel2
  gRNA
gatctgcagagcgcgaagcc

SEQ ID NO: 94853 - DNA, 20 bp, Artificial Sequence
  MKO10094853_B_Kirrel2
  gRNA
cgagatgggatccggctgga

SEQ ID NO: 94854 - DNA, 20 bp, Artificial Sequence
  MKO10094854_B_Kirrel3
  gRNA
tccatcatctggctacgtaa

SEQ ID NO: 94855 - DNA, 20 bp, Artificial Sequence
  MKO10094855_B_Kirrel3
  gRNA
ctccttcagccagcaacccc

SEQ ID NO: 94856 - DNA, 20 bp, Artificial Sequence
  MKO10094856_B_Kirrel3
  gRNA
ccaagccatctttgatccac

SEQ ID NO: 94857 - DNA, 20 bp, Artificial Sequence
  MKO10094857_B_Kirrel
  gRNA
gtacaatcccagagtagtta

SEQ ID NO: 94858 - DNA, 20 bp, Artificial Sequence
  MKO10094858_B_Kirrel
  gRNA
ctgcagcctggccacggtac

SEQ ID NO: 94859 - DNA, 20 bp, Artificial Sequence
  MKO10094859_B_Kirrel
  gRNA
aacctgctgccaccatcatt

SEQ ID NO: 94860 - DNA, 20 bp, Artificial Sequence
  MKO10094860_B_Kiss1r
  gRNA
gtgcggggcgtacagccgca

SEQ ID NO: 94861 - DNA, 20 bp, Artificial Sequence
  MKO10094861_B_Kiss1r
  gRNA
cttcgcgctctacaacctgc

SEQ ID NO: 94862 - DNA, 20 bp, Artificial Sequence
  MKO10094862_B_Kiss1r
  gRNA
attcgtcaactacatccagc

SEQ ID NO: 94863 - DNA, 20 bp, Artificial Sequence
  MKO10094863_B_Kiss1
  gRNA
cagtgcgtacctgtggatcc

SEQ ID NO: 94864 - DNA, 20 bp, Artificial Sequence
  MKO10094864_B_Kiss1
  gRNA
ctgcagggctgcgcgctcgt

SEQ ID NO: 94865 - DNA, 20 bp, Artificial Sequence
  MKO10094865_B_Kiss1
  gRNA
cgcctgatccctgcgccccg

SEQ ID NO: 94866 - DNA, 20 bp, Artificial Sequence
  MKO10094866_B_Kitl
  gRNA
agggttatcatatagtcatt

SEQ ID NO: 94867 - DNA, 20 bp, Artificial Sequence
  MKO10094867_B_Kitl
  gRNA
tagatccattgatgccttta

SEQ ID NO: 94868 - DNA, 20 bp, Artificial Sequence
  MKO10094868_B_Kitl
  gRNA
atataaaagaatctccgaag

SEQ ID NO: 94869 - DNA, 20 bp, Artificial Sequence
  MKO10094869_B_Kit
  gRNA
tcggcaagagttgacgattc

SEQ ID NO: 94870 - DNA, 20 bp, Artificial Sequence
  MKO10094870_B_Kit
  gRNA
ccgtacctgcccgcactttg

SEQ ID NO: 94871 - DNA, 20 bp, Artificial Sequence
  MKO10094871_B_Kit
  gRNA
tgacttcaattatgaacgcc

SEQ ID NO: 94872 - DNA, 20 bp, Artificial Sequence
  MKO10094872_B_Klb
  gRNA
tttgatgaaatccgcgtgtt

SEQ ID NO: 94873 - DNA, 20 bp, Artificial Sequence
  MKO10094873_B_Klb
  gRNA
gtagtcgccgtccccgtgga

SEQ ID NO: 94874 - DNA, 20 bp, Artificial Sequence
  MKO10094874_B_Klb
  gRNA
accaggcacattcgaaagtg

SEQ ID NO: 94875 - DNA, 20 bp, Artificial Sequence
  MKO10094875_B_Klc1
  gRNA
gcggctacgagatccctgca

SEQ ID NO: 94876 - DNA, 20 bp, Artificial Sequence
  MKO10094876_B_Klc1
  gRNA
ctgatacctgcgcctcgctc

SEQ ID NO: 94877 - DNA, 20 bp, Artificial Sequence
  MKO10094877_B_Klc1
  gRNA
tgattcttccaaagagccgt

SEQ ID NO: 94878 - DNA, 20 bp, Artificial Sequence
  MKO10094878_B_Klc2
  gRNA
ccagctcctcacgcaaccac

SEQ ID NO: 94879 - DNA, 20 bp, Artificial Sequence
  MKO10094879_B_Klc2
  gRNA
tcacctgctcaatgatgccc

SEQ ID NO: 94880 - DNA, 20 bp, Artificial Sequence
  MKO10094880_B_Klc2
  gRNA
tagccagggcatcattgagc

SEQ ID NO: 94881 - DNA, 20 bp, Artificial Sequence
  MKO10094881_B_Klc3
  gRNA
cccccctcgccgagacagct

SEQ ID NO: 94882 - DNA, 20 bp, Artificial Sequence
  MKO10094882_B_Klc3
  gRNA
gaggcagtatgacccgcccg

SEQ ID NO: 94883 - DNA, 20 bp, Artificial Sequence
  MKO10094883_B_Klc3
  gRNA
gcgtctgttcccggatctgc

SEQ ID NO: 94884 - DNA, 20 bp, Artificial Sequence
  MKO10094884_B_Klc4
  gRNA
actctgcaagcaagcgctag

SEQ ID NO: 94885 - DNA, 20 bp, Artificial Sequence
  MKO10094885_B_Klc4
  gRNA
cacctaggtgatgctggcgc

SEQ ID NO: 94886 - DNA, 20 bp, Artificial Sequence
  MKO10094886_B_Klc4
  gRNA
tactgacggctgggtggtcc

SEQ ID NO: 94887 - DNA, 20 bp, Artificial Sequence
  MKO10094887_B_Klf10
  gRNA
tcttggctgataggtggcgt

SEQ ID NO: 94888 - DNA, 20 bp, Artificial Sequence
  MKO10094888_B_Klf10
  gRNA
ggtcgctcctcataaaccga

SEQ ID NO: 94889 - DNA, 20 bp, Artificial Sequence
  MKO10094889_B_Klf10
  gRNA
tcatgtccatgagctgcgac

SEQ ID NO: 94890 - DNA, 20 bp, Artificial Sequence
  MKO10094890_B_Klf11
  gRNA
atgaactgtctcgccaccgc

SEQ ID NO: 94891 - DNA, 20 bp, Artificial Sequence
  MKO10094891_B_Klf11
  gRNA
gttgacggctccgtgagctc

SEQ ID NO: 94892 - DNA, 20 bp, Artificial Sequence
  MKO10094892_B_Klf11
  gRNA
gctccaccggccccggcgac

SEQ ID NO: 94893 - DNA, 20 bp, Artificial Sequence
  MKO10094893_B_Klf12
  gRNA
agtttcattaacgctatcta

SEQ ID NO: 94894 - DNA, 20 bp, Artificial Sequence
  MKO10094894_B_Klf12
  gRNA
tacttactcttgtactgctc

SEQ ID NO: 94895 - DNA, 20 bp, Artificial Sequence
  MKO10094895_B_Klf12
  gRNA
cagagtcaaaaccgagcttg

SEQ ID NO: 94896 - DNA, 20 bp, Artificial Sequence
  MKO10094896_B_Klf13
  gRNA
acggcactatcgcacgcaca

SEQ ID NO: 94897 - DNA, 20 bp, Artificial Sequence
  MKO10094897_B_Klf13
  gRNA
cgcgttgacgagcgccgcga

SEQ ID NO: 94898 - DNA, 20 bp, Artificial Sequence
  MKO10094898_B_Klf13
  gRNA
gccggcgcgcctgcttgtcc

SEQ ID NO: 94899 - DNA, 20 bp, Artificial Sequence
  MKO10094899_B_Klf14
  gRNA
agccgctgcgctcgcgcctt

SEQ ID NO: 94900 - DNA, 20 bp, Artificial Sequence
  MKO10094900_B_Klf14
  gRNA
actcggcagcgaagtagtcc

SEQ ID NO: 94901 - DNA, 20 bp, Artificial Sequence
  MKO10094901_B_Klf14
  gRNA
cgttgcgcgccggtgcagca

SEQ ID NO: 94902 - DNA, 20 bp, Artificial Sequence
  MKO10094902_B_Klf15
  gRNA
gatctgcagtagcaccggca

SEQ ID NO: 94903 - DNA, 20 bp, Artificial Sequence
  MKO10094903_B_Klf15
  gRNA
agttgatggcgcgtactgcg

SEQ ID NO: 94904 - DNA, 20 bp, Artificial Sequence
  MKO10094904_B_Klf15
  gRNA
tgtgcgagaagaaattcgcg

SEQ ID NO: 94905 - DNA, 20 bp, Artificial Sequence
  MKO10094905_B_Klf16
  gRNA
gcggaagccgggatgtcgcc

SEQ ID NO: 94906 - DNA, 20 bp, Artificial Sequence
  MKO10094906_B_Klf16
  gRNA
gaccggagaggtgccccccg

SEQ ID NO: 94907 - DNA, 20 bp, Artificial Sequence
  MKO10094907_B_Klf16
  gRNA
tgtgcgcgccacgcgccgcg

SEQ ID NO: 94908 - DNA, 20 bp, Artificial Sequence
  MKO10094908_B_Klf17
  gRNA
cggcatggagcaggacaata

SEQ ID NO: 94909 - DNA, 20 bp, Artificial Sequence
  MKO10094909_B_Klf17
  gRNA
ggctatgcaccagcctccca

SEQ ID NO: 94910 - DNA, 20 bp, Artificial Sequence
  MKO10094910_B_Klf17
  gRNA
tcacactcatcgcatttatg

SEQ ID NO: 94911 - DNA, 20 bp, Artificial Sequence
  MKO10094911_B_Klf1
  gRNA
acgaactgacgcgccactac

SEQ ID NO: 94912 - DNA, 20 bp, Artificial Sequence
  MKO10094912_B_Klf1
  gRNA
catcagtacactcaccaccc

SEQ ID NO: 94913 - DNA, 20 bp, Artificial Sequence
  MKO10094913_B_Klf1
  gRNA
ccaccttgaggaagtcctcc

SEQ ID NO: 94914 - DNA, 20 bp, Artificial Sequence
  MKO10094914_B_Klf2
  gRNA
ttcgccagcccgtgcgagcg

SEQ ID NO: 94915 - DNA, 20 bp, Artificial Sequence
  MKO10094915_B_Klf2
  gRNA
agaagccttatcattgcaac

SEQ ID NO: 94916 - DNA, 20 bp, Artificial Sequence
  MKO10094916_B_Klf2
  gRNA
gtcgcacaagtggcactgaa

SEQ ID NO: 94917 - DNA, 20 bp, Artificial Sequence
  MKO10094917_B_Klf3
  gRNA
ccttccgtcatcgtgcagcc

SEQ ID NO: 94918 - DNA, 20 bp, Artificial Sequence
  MKO10094918_B_Klf3
  gRNA
cttcccaggctgcacgatga

SEQ ID NO: 94919 - DNA, 20 bp, Artificial Sequence
  MKO10094919_B_Klf3
  gRNA
gggtaatagtcagtcctctg

SEQ ID NO: 94920 - DNA, 20 bp, Artificial Sequence
  MKO10094920_B_Klf4
  gRNA
ctagaggcccatttgagcgc

SEQ ID NO: 94921 - DNA, 20 bp, Artificial Sequence
  MKO10094921_B_Klf4
  gRNA
accgcaaacacacagggcac

SEQ ID NO: 94922 - DNA, 20 bp, Artificial Sequence
  MKO10094922_B_Klf4
  gRNA
ccttacctgtgtgagttcgc

SEQ ID NO: 94923 - DNA, 20 bp, Artificial Sequence
  MKO10094923_B_Klf5
  gRNA
acctacccgtatgagtcctc

SEQ ID NO: 94924 - DNA, 20 bp, Artificial Sequence
  MKO10094924_B_Klf5
  gRNA
tgggttgtgaatcgccagtt

SEQ ID NO: 94925 - DNA, 20 bp, Artificial Sequence
  MKO10094925_B_Klf5
  gRNA
gcttcatgtgcagcgcgagg

SEQ ID NO: 94926 - DNA, 20 bp, Artificial Sequence
  MKO10094926_B_Klf6
  gRNA
acttcgaaccttcccaggtg

SEQ ID NO: 94927 - DNA, 20 bp, Artificial Sequence
  MKO10094927_B_Klf6
  gRNA
agacacttccgaaagcatac

SEQ ID NO: 94928 - DNA, 20 bp, Artificial Sequence
  MKO10094928_B_Klf6
  gRNA
ttaaatgctcccactgtgac

SEQ ID NO: 94929 - DNA, 20 bp, Artificial Sequence
  MKO10094929_B_Klf7
  gRNA
gtcgttctaggtgtttctcc

SEQ ID NO: 94930 - DNA, 20 bp, Artificial Sequence
  MKO10094930_B_Klf7
  gRNA
ctacaacttgtccacgacac

SEQ ID NO: 94931 - DNA, 20 bp, Artificial Sequence
  MKO10094931_B_Klf7
  gRNA
agtcaccttacctgtcgcag

SEQ ID NO: 94932 - DNA, 20 bp, Artificial Sequence
  MKO10094932_B_Klf8
  gRNA
tttgcttaggccagcgacaa

SEQ ID NO: 94933 - DNA, 20 bp, Artificial Sequence
  MKO10094933_B_Klf8
  gRNA
atgtaaaatcggctggccac

SEQ ID NO: 94934 - DNA, 20 bp, Artificial Sequence
  MKO10094934_B_Klf8
  gRNA
gcactctcatcactatcact

SEQ ID NO: 94935 - DNA, 20 bp, Artificial Sequence
  MKO10094935_B_Klf9
  gRNA
ccttaaaaagttctcgcgct

SEQ ID NO: 94936 - DNA, 20 bp, Artificial Sequence
  MKO10094936_B_Klf9
  gRNA
cacggcggcgcggttggaga

SEQ ID NO: 94937 - DNA, 20 bp, Artificial Sequence
  MKO10094937_B_Klf9
  gRNA
agcgacgtgaccaccgaatc

SEQ ID NO: 94938 - DNA, 20 bp, Artificial Sequence
  MKO10094938_B_Klhdc10
  gRNA
caagttagatctcaacacca

SEQ ID NO: 94939 - DNA, 20 bp, Artificial Sequence
  MKO10094939_B_Klhdc10
  gRNA
cctcccgattcatcatagtc

SEQ ID NO: 94940 - DNA, 20 bp, Artificial Sequence
  MKO10094940_B_Klhdc10
  gRNA
ccacacaacggtgtccactg

SEQ ID NO: 94941 - DNA, 20 bp, Artificial Sequence
  MKO10094941_B_Klhdc1
  gRNA
agtttatcacgtggtgtggg

SEQ ID NO: 94942 - DNA, 20 bp, Artificial Sequence
  MKO10094942_B_Klhdc1
  gRNA
acgatattgatagtgggctg

SEQ ID NO: 94943 - DNA, 20 bp, Artificial Sequence
  MKO10094943_B_Klhdc1
  gRNA
gtcaatttacgaacaagaga

SEQ ID NO: 94944 - DNA, 20 bp, Artificial Sequence
  MKO10094944_B_Klhdc2
  gRNA
tcatagagtaatcaagtgag

SEQ ID NO: 94945 - DNA, 20 bp, Artificial Sequence
  MKO10094945_B_Klhdc2
  gRNA
gttcccaatactttatcttc

SEQ ID NO: 94946 - DNA, 20 bp, Artificial Sequence
  MKO10094946_B_Klhdc2
  gRNA
cttctgacagttctacatgc

SEQ ID NO: 94947 - DNA, 20 bp, Artificial Sequence
  MKO10094947_B_Klhdc3
  gRNA
cgtgtgaggacagtcgagcc

SEQ ID NO: 94948 - DNA, 20 bp, Artificial Sequence
  MKO10094948_B_Klhdc3
  gRNA
atccagcttgtggatgtcgt

SEQ ID NO: 94949 - DNA, 20 bp, Artificial Sequence
  MKO10094949_B_Klhdc3
  gRNA
gaatgtccgtcccgtgcccc

SEQ ID NO: 94950 - DNA, 20 bp, Artificial Sequence
  MKO10094950_B_Klhdc4
  gRNA
tgaaatattcacctccgaaa

SEQ ID NO: 94951 - DNA, 20 bp, Artificial Sequence
  MKO10094951_B_Klhdc4
  gRNA
tcccaggcgctgtgctcatc

SEQ ID NO: 94952 - DNA, 20 bp, Artificial Sequence
  MKO10094952_B_Klhdc4
  gRNA
aatgggctatgagggcctcc

SEQ ID NO: 94953 - DNA, 20 bp, Artificial Sequence
  MKO10094953_B_Klhdc7a
  gRNA
gctgctccgattctcgaccc

SEQ ID NO: 94954 - DNA, 20 bp, Artificial Sequence
  MKO10094954_B_Klhdc7a
  gRNA
caaggaccgcacggccgaga

SEQ ID NO: 94955 - DNA, 20 bp, Artificial Sequence
  MKO10094955_B_Klhdc7a
  gRNA
gacgaagccgctaacacagc

SEQ ID NO: 94956 - DNA, 20 bp, Artificial Sequence
  MKO10094956_B_Klhdc7b
  gRNA
atgcgctacaacacagtgac

SEQ ID NO: 94957 - DNA, 20 bp, Artificial Sequence
  MKO10094957_B_Klhdc7b
  gRNA
tgttgcccaataccgtgcag

SEQ ID NO: 94958 - DNA, 20 bp, Artificial Sequence
  MKO10094958_B_Klhdc7b
  gRNA
cacctttcccgtggcccacg

SEQ ID NO: 94959 - DNA, 20 bp, Artificial Sequence
  MKO10094959_B_Klhdc8a
  gRNA
ctaccgcatcgctcagtccc

SEQ ID NO: 94960 - DNA, 20 bp, Artificial Sequence
  MKO10094960_B_Klhdc8a
  gRNA
aaggaggtggcagcgtatct

SEQ ID NO: 94961 - DNA, 20 bp, Artificial Sequence
  MKO10094961_B_Klhdc8a
  gRNA
cacagcggggcgtgggcatg

SEQ ID NO: 94962 - DNA, 20 bp, Artificial Sequence
  MKO10094962_B_Klhdc8b
  gRNA
agtgcttccaccgcttgact

SEQ ID NO: 94963 - DNA, 20 bp, Artificial Sequence
  MKO10094963_B_Klhdc8b
  gRNA
gaagcactgtgtctacggga

SEQ ID NO: 94964 - DNA, 20 bp, Artificial Sequence
  MKO10094964_B_Klhdc8b
  gRNA
ggccccacaatttctactcc

SEQ ID NO: 94965 - DNA, 20 bp, Artificial Sequence
  MKO10094965_B_Klhdc9
  gRNA
ggacccttcgctgtactatt

SEQ ID NO: 94966 - DNA, 20 bp, Artificial Sequence
  MKO10094966_B_Klhdc9
  gRNA
tgccacacaacctcacgatc

SEQ ID NO: 94967 - DNA, 20 bp, Artificial Sequence
  MKO10094967_B_Klhdc9
  gRNA
cacttccccagtacagaccg

SEQ ID NO: 94968 - DNA, 20 bp, Artificial Sequence
  MKO10094968_B_Klhl10
  gRNA
tttaaccctcgtagcaattt

SEQ ID NO: 94969 - DNA, 20 bp, Artificial Sequence
  MKO10094969_B_Klhl10
  gRNA
ttattgagtatgcgtacact

SEQ ID NO: 94970 - DNA, 20 bp, Artificial Sequence
  MKO10094970_B_Klhl10
  gRNA
ccagacacagctccgacttg

SEQ ID NO: 94971 - DNA, 20 bp, Artificial Sequence
  MKO10094971_B_Klhl11
  gRNA
tgtcaaaccagagcggctag

SEQ ID NO: 94972 - DNA, 20 bp, Artificial Sequence
  MKO10094972_B_Klhl11
  gRNA
ggtgtacatgtactcgataa

SEQ ID NO: 94973 - DNA, 20 bp, Artificial Sequence
  MKO10094973_B_Klhl11
  gRNA
agcatggagactgccgtcgc

SEQ ID NO: 94974 - DNA, 20 bp, Artificial Sequence
  MKO10094974_B_Klhl12
  gRNA
aagccgtatgttgacattca

SEQ ID NO: 94975 - DNA, 20 bp, Artificial Sequence
  MKO10094975_B_Klhl12
  gRNA
gcatccgaacatactgtaag

SEQ ID NO: 94976 - DNA, 20 bp, Artificial Sequence
  MKO10094976_B_Klhl12
  gRNA
cccagaacaagggcccggct

SEQ ID NO: 94977 - DNA, 20 bp, Artificial Sequence
  MKO10094977_B_Klhl13
  gRNA
tgtgatgtgacactgatgcc

SEQ ID NO: 94978 - DNA, 20 bp, Artificial Sequence
  MKO10094978_B_Klhl13
  gRNA
cagcacttgaaactgtgcct

SEQ ID NO: 94979 - DNA, 20 bp, Artificial Sequence
  MKO10094979_B_Klhl13
  gRNA
tttcagatcacttgtggaag

SEQ ID NO: 94980 - DNA, 20 bp, Artificial Sequence
  MKO10094980_B_Klhl14
  gRNA
gttggatccaactattaaat

SEQ ID NO: 94981 - DNA, 20 bp, Artificial Sequence
  MKO10094981_B_Klhl14
  gRNA
tttctacctctacaacgcag

SEQ ID NO: 94982 - DNA, 20 bp, Artificial Sequence
  MKO10094982_B_Klhl14
  gRNA
cagtttctatgcatgccgct

SEQ ID NO: 94983 - DNA, 20 bp, Artificial Sequence
  MKO10094983_B_Klhl15
  gRNA
gtggcacgaagttgtctagc

SEQ ID NO: 94984 - DNA, 20 bp, Artificial Sequence
  MKO10094984_B_Klhl15
  gRNA
acaacccagataccgatcag

SEQ ID NO: 94985 - DNA, 20 bp, Artificial Sequence
  MKO10094985_B_Klhl15
  gRNA
cgcaagtagtcaccaactgc

SEQ ID NO: 94986 - DNA, 20 bp, Artificial Sequence
  MKO10094986_B_Klhl17
  gRNA
tcaaacatgacgtagacact

SEQ ID NO: 94987 - DNA, 20 bp, Artificial Sequence
  MKO10094987_B_Klhl17
  gRNA
gccgagctcgctctgcctcg

SEQ ID NO: 94988 - DNA, 20 bp, Artificial Sequence
  MKO10094988_B_Klhl17
  gRNA
tccaactgcctgggcattcg

SEQ ID NO: 94989 - DNA, 20 bp, Artificial Sequence
  MKO10094989_B_Klhl18
  gRNA
tgtcgttcgtaaacatagca

SEQ ID NO: 94990 - DNA, 20 bp, Artificial Sequence
  MKO10094990_B_Klhl18
  gRNA
cttggaagacgtgcttgagc

SEQ ID NO: 94991 - DNA, 20 bp, Artificial Sequence
  MKO10094991_B_Klhl18
  gRNA
gcactcgatctgataagaac

SEQ ID NO: 94992 - DNA, 20 bp, Artificial Sequence
  MKO10094992_B_Klhl1
  gRNA
tgaagagctccataaactac

SEQ ID NO: 94993 - DNA, 20 bp, Artificial Sequence
  MKO10094993_B_Klhl1
  gRNA
tgcccttattcctaaacagt

SEQ ID NO: 94994 - DNA, 20 bp, Artificial Sequence
  MKO10094994_B_Klhl1
  gRNA
agtttatggagctcttcagc

SEQ ID NO: 94995 - DNA, 20 bp, Artificial Sequence
  MKO10094995_B_Klhl20
  gRNA
gtaacaagccgctgcaccct

SEQ ID NO: 94996 - DNA, 20 bp, Artificial Sequence
  MKO10094996_B_Klhl20
  gRNA
ctgggtcaaatacagtattc

SEQ ID NO: 94997 - DNA, 20 bp, Artificial Sequence
  MKO10094997_B_Klhl20
  gRNA
ctgaatactgtatttgaccc

SEQ ID NO: 94998 - DNA, 20 bp, Artificial Sequence
  MKO10094998_B_Klhl21
  gRNA
acaaccccactaaagacgaa

SEQ ID NO: 94999 - DNA, 20 bp, Artificial Sequence
  MKO10094999_B_Klhl21
  gRNA
ttgacccacaggtacacgtt

SEQ ID NO: 95000 - DNA, 20 bp, Artificial Sequence
  MKO10095000_B_Klhl21
  gRNA
atgaccatgccaccgactcc

SEQ ID NO: 95001 - DNA, 20 bp, Artificial Sequence
  MKO10095001_B_Klhl22
  gRNA
acgggcctgtgcgacgggcc

SEQ ID NO: 95002 - DNA, 20 bp, Artificial Sequence
  MKO10095002_B_Klhl22
  gRNA
tggcattgtaagacacaccg

SEQ ID NO: 95003 - DNA, 20 bp, Artificial Sequence
  MKO10095003_B_Klhl22
  gRNA
tggaaccagcgattgtgcct

SEQ ID NO: 95004 - DNA, 20 bp, Artificial Sequence
  MKO10095004_B_Klhl23
  gRNA
cctatcgcaaacatgattaa

SEQ ID NO: 95005 - DNA, 20 bp, Artificial Sequence
  MKO10095005_B_Klhl23
  gRNA
acgatccagatcttaataag

SEQ ID NO: 95006 - DNA, 20 bp, Artificial Sequence
  MKO10095006_B_Klhl23
  gRNA
attactgcgagcccacaccc

SEQ ID NO: 95007 - DNA, 20 bp, Artificial Sequence
  MKO10095007_B_Klhl24
  gRNA
ttccgtccaacgatttgaaa

SEQ ID NO: 95008 - DNA, 20 bp, Artificial Sequence
  MKO10095008_B_Klhl24
  gRNA
taggtctactggctattcag

SEQ ID NO: 95009 - DNA, 20 bp, Artificial Sequence
  MKO10095009_B_Klhl24
  gRNA
cctgcagtgacaagctgtat

SEQ ID NO: 95010 - DNA, 20 bp, Artificial Sequence
  MKO10095010_B_Klhl25
  gRNA
cctatgctgattgcccgctt

SEQ ID NO: 95011 - DNA, 20 bp, Artificial Sequence
  MKO10095011_B_Klhl25
  gRNA
atgagaactcgtagagccgt

SEQ ID NO: 95012 - DNA, 20 bp, Artificial Sequence
  MKO10095012_B_Klhl25
  gRNA
tgtccccaatccgcgtccac

SEQ ID NO: 95013 - DNA, 20 bp, Artificial Sequence
  MKO10095013_B_Klhl26
  gRNA
tgaagcctttcatgcgcaca

SEQ ID NO: 95014 - DNA, 20 bp, Artificial Sequence
  MKO10095014_B_Klhl26
  gRNA
agagccccgagcgcccgagc

SEQ ID NO: 95015 - DNA, 20 bp, Artificial Sequence
  MKO10095015_B_Klhl26
  gRNA
gtccttgcagcttggccgac

SEQ ID NO: 95016 - DNA, 20 bp, Artificial Sequence
  MKO10095016_B_Klhl28
  gRNA
atggccccgctcacatgaac

SEQ ID NO: 95017 - DNA, 20 bp, Artificial Sequence
  MKO10095017_B_Klhl28
  gRNA
aatgaaaactgtgcccgtat

SEQ ID NO: 95018 - DNA, 20 bp, Artificial Sequence
  MKO10095018_B_Klhl28
  gRNA
ctgggagatggttgcgccca

SEQ ID NO: 95019 - DNA, 20 bp, Artificial Sequence
  MKO10095019_B_Klhl29
  gRNA
caatgccaagactctactcg

SEQ ID NO: 95020 - DNA, 20 bp, Artificial Sequence
  MKO10095020_B_Klhl29
  gRNA
ggccgcctcgagtagagtct

SEQ ID NO: 95021 - DNA, 20 bp, Artificial Sequence
  MKO10095021_B_Klhl29
  gRNA
atgctttcgctctgcgttgc

SEQ ID NO: 95022 - DNA, 20 bp, Artificial Sequence
  MKO10095022_B_Klhl2
  gRNA
cttcccacagcgggttgaag

SEQ ID NO: 95023 - DNA, 20 bp, Artificial Sequence
  MKO10095023_B_Klhl2
  gRNA
gcatgttaatgaagagcgtg

SEQ ID NO: 95024 - DNA, 20 bp, Artificial Sequence
  MKO10095024_B_Klhl2
  gRNA
accaaaggctatccgaagtg

SEQ ID NO: 95025 - DNA, 20 bp, Artificial Sequence
  MKO10095025_B_Klhl30
  gRNA
aagccccacttgtggtaatc

SEQ ID NO: 95026 - DNA, 20 bp, Artificial Sequence
  MKO10095026_B_Klhl30
  gRNA
ccaggcctgggtggtcgacc

SEQ ID NO: 95027 - DNA, 20 bp, Artificial Sequence
  MKO10095027_B_Klhl30
  gRNA
aacagtgatgtttacgtcac

SEQ ID NO: 95028 - DNA, 20 bp, Artificial Sequence
  MKO10095028_B_Klhl31
  gRNA
attatgttcaaaccgtaccg

SEQ ID NO: 95029 - DNA, 20 bp, Artificial Sequence
  MKO10095029_B_Klhl31
  gRNA
cgcactgccgatgtagccgc

SEQ ID NO: 95030 - DNA, 20 bp, Artificial Sequence
  MKO10095030_B_Klhl31
  gRNA
gcccaaagcgccgctcgagg

SEQ ID NO: 95031 - DNA, 20 bp, Artificial Sequence
  MKO10095031_B_Klhl32
  gRNA
ggagttcgcatatacaggac

SEQ ID NO: 95032 - DNA, 20 bp, Artificial Sequence
  MKO10095032_B_Klhl32
  gRNA
cctctttcacctcactttgt

SEQ ID NO: 95033 - DNA, 20 bp, Artificial Sequence
  MKO10095033_B_Klhl32
  gRNA
ccgcctgacgtccctgagtg

SEQ ID NO: 95034 - DNA, 20 bp, Artificial Sequence
  MKO10095034_B_Klhl33
  gRNA
catgggtctggtacgaactg

SEQ ID NO: 95035 - DNA, 20 bp, Artificial Sequence
  MKO10095035_B_Klhl33
  gRNA
caccattgtctcgtccacct

SEQ ID NO: 95036 - DNA, 20 bp, Artificial Sequence
  MKO10095036_B_Klhl33
  gRNA
gatggacagctttatgccct

SEQ ID NO: 95037 - DNA, 20 bp, Artificial Sequence
  MKO10095037_B_Klhl34
  gRNA
gtgctgtattgtacgccacc

SEQ ID NO: 95038 - DNA, 20 bp, Artificial Sequence
  MKO10095038_B_Klhl34
  gRNA
tgccgattctgaactacctc

SEQ ID NO: 95039 - DNA, 20 bp, Artificial Sequence
  MKO10095039_B_Klhl34
  gRNA
cgctgtaggccggccgctga

SEQ ID NO: 95040 - DNA, 20 bp, Artificial Sequence
  MKO10095040_B_Klhl35
  gRNA
cgaaatgacatttacgtttc

SEQ ID NO: 95041 - DNA, 20 bp, Artificial Sequence
  MKO10095041_B_Klhl35
  gRNA
acatcaacagccgtgacgtc

SEQ ID NO: 95042 - DNA, 20 bp, Artificial Sequence
  MKO10095042_B_Klhl35
  gRNA
ctcaagacaccgctgcaaga

SEQ ID NO: 95043 - DNA, 20 bp, Artificial Sequence
  MKO10095043_B_Klhl36
  gRNA
cagcacatcgaagcgctcca

SEQ ID NO: 95044 - DNA, 20 bp, Artificial Sequence
  MKO10095044_B_Klhl36
  gRNA
gtccatgaaccagcgccgtg

SEQ ID NO: 95045 - DNA, 20 bp, Artificial Sequence
  MKO10095045_B_Klhl36
  gRNA
gtcggtggccggaacgagaa

SEQ ID NO: 95046 - DNA, 20 bp, Artificial Sequence
  MKO10095046_B_Klhl38
  gRNA
aaagaccgaaggatgcacca

SEQ ID NO: 95047 - DNA, 20 bp, Artificial Sequence
  MKO10095047_B_Klhl38
  gRNA
ggggaacagatcgtcattgt

SEQ ID NO: 95048 - DNA, 20 bp, Artificial Sequence
  MKO10095048_B_Klhl38
  gRNA
atcaggtttaccacatttcc

SEQ ID NO: 95049 - DNA, 20 bp, Artificial Sequence
  MKO10095049_B_Klhl3
  gRNA
aggtcatgaatgagctgcga

SEQ ID NO: 95050 - DNA, 20 bp, Artificial Sequence
  MKO10095050_B_Klhl3
  gRNA
tccaggctgacctccgcatc

SEQ ID NO: 95051 - DNA, 20 bp, Artificial Sequence
  MKO10095051_B_Klhl3
  gRNA
cttggacgagagttgcagca

SEQ ID NO: 95052 - DNA, 20 bp, Artificial Sequence
  MKO10095052_B_Klhl40
  gRNA
ccgtggccccaaagagcgat

SEQ ID NO: 95053 - DNA, 20 bp, Artificial Sequence
  MKO10095053_B_Klhl40
  gRNA
ggctctcaacgccatctacg

SEQ ID NO: 95054 - DNA, 20 bp, Artificial Sequence
  MKO10095054_B_Klhl40
  gRNA
tgccaccaatgacatagacc

SEQ ID NO: 95055 - DNA, 20 bp, Artificial Sequence
  MKO10095055_B_Klhl41
  gRNA
aaaggcaagattgtgatcgc

SEQ ID NO: 95056 - DNA, 20 bp, Artificial Sequence
  MKO10095056_B_Klhl41
  gRNA
cggcaaagaccttcaaacag

SEQ ID NO: 95057 - DNA, 20 bp, Artificial Sequence
  MKO10095057_B_Klhl41
  gRNA
cacaggatcgtagcatagca

SEQ ID NO: 95058 - DNA, 20 bp, Artificial Sequence
  MKO10095058_B_Klhl42
  gRNA
acaatcccgagcaagatgcg

SEQ ID NO: 95059 - DNA, 20 bp, Artificial Sequence
  MKO10095059_B_Klhl42
  gRNA
aggtctcaaacagcgtccag

SEQ ID NO: 95060 - DNA, 20 bp, Artificial Sequence
  MKO10095060_B_Klhl42
  gRNA
gcagtgcgcatgtcaagttc

SEQ ID NO: 95061 - DNA, 20 bp, Artificial Sequence
  MKO10095061_B_Klhl4
  gRNA
agggtatttaccggtgagct

SEQ ID NO: 95062 - DNA, 20 bp, Artificial Sequence
  MKO10095062_B_Klhl4
  gRNA
ctccaaatgagcgaatccct

SEQ ID NO: 95063 - DNA, 20 bp, Artificial Sequence
  MKO10095063_B_Klhl4
  gRNA
actgccattactctcaccac

SEQ ID NO: 95064 - DNA, 20 bp, Artificial Sequence
  MKO10095064_B_Klhl5
  gRNA
cggtccttcgcggatgccca

SEQ ID NO: 95065 - DNA, 20 bp, Artificial Sequence
  MKO10095065_B_Klhl5
  gRNA
tgacatgaacatcccgaacg

SEQ ID NO: 95066 - DNA, 20 bp, Artificial Sequence
  MKO10095066_B_Klhl5
  gRNA
ccgcgaaggaccgaatcccc

SEQ ID NO: 95067 - DNA, 20 bp, Artificial Sequence
  MKO10095067_B_Klhl6
  gRNA
tccgtggtacttcgtggaga

SEQ ID NO: 95068 - DNA, 20 bp, Artificial Sequence
  MKO10095068_B_Klhl6
  gRNA
aacccgctgaacattctgct

SEQ ID NO: 95069 - DNA, 20 bp, Artificial Sequence
  MKO10095069_B_Klhl6
  gRNA
gaggcataagatggtcgtat

SEQ ID NO: 95070 - DNA, 20 bp, Artificial Sequence
  MKO10095070_B_Klhl7
  gRNA
tgggcgtcatgaacaacatg

SEQ ID NO: 95071 - DNA, 20 bp, Artificial Sequence
  MKO10095071_B_Klhl7
  gRNA
catgaaccccgccagcagct

SEQ ID NO: 95072 - DNA, 20 bp, Artificial Sequence
  MKO10095072_B_Klhl7
  gRNA
tggaatttgcttatactgct

SEQ ID NO: 95073 - DNA, 20 bp, Artificial Sequence
  MKO10095073_B_Klhl8
  gRNA
ccatgatgggaacgaacacc

SEQ ID NO: 95074 - DNA, 20 bp, Artificial Sequence
  MKO10095074_B_Klhl8
  gRNA
gaccagaaatgaacagccgc

SEQ ID NO: 95075 - DNA, 20 bp, Artificial Sequence
  MKO10095075_B_Klhl8
  gRNA
tcacacccacatgtcgcctg

SEQ ID NO: 95076 - DNA, 20 bp, Artificial Sequence
  MKO10095076_B_Klhl9
  gRNA
tgcatccacttattataacg

SEQ ID NO: 95077 - DNA, 20 bp, Artificial Sequence
  MKO10095077_B_Klhl9
  gRNA
aaccgaactgtgcgtgttgc

SEQ ID NO: 95078 - DNA, 20 bp, Artificial Sequence
  MKO10095078_B_Klhl9
  gRNA
gcgaatagtattcgcagctt

SEQ ID NO: 95079 - DNA, 20 bp, Artificial Sequence
  MKO10095079_B_Klk10
  gRNA
tcgtggggcatttacccatg

SEQ ID NO: 95080 - DNA, 20 bp, Artificial Sequence
  MKO10095080_B_Klk10
  gRNA
tcgccaactcgagctctcag

SEQ ID NO: 95081 - DNA, 20 bp, Artificial Sequence
  MKO10095081_B_Klk10
  gRNA
atgggtaaatgccccacgag

SEQ ID NO: 95082 - DNA, 20 bp, Artificial Sequence
  MKO10095082_B_Klk11
  gRNA
agccattacgtgatcctcct

SEQ ID NO: 95083 - DNA, 20 bp, Artificial Sequence
  MKO10095083_B_Klk11
  gRNA
gcacccacggcttgcggcag

SEQ ID NO: 95084 - DNA, 20 bp, Artificial Sequence
  MKO10095084_B_Klk11
  gRNA
tccccacactgtgtcgctgc

SEQ ID NO: 95085 - DNA, 20 bp, Artificial Sequence
  MKO10095085_B_Klk12
  gRNA
gggccacgggccggacagca

SEQ ID NO: 95086 - DNA, 20 bp, Artificial Sequence
  MKO10095086_B_Klk12
  gRNA
gtgtccttgtggaccgcaag

SEQ ID NO: 95087 - DNA, 20 bp, Artificial Sequence
  MKO10095087_B_Klk12
  gRNA
ctcaggtacgtggtgcgcct

SEQ ID NO: 95088 - DNA, 20 bp, Artificial Sequence
  MKO10095088_B_Klk13
  gRNA
atctgagcgcagttcaatgt

SEQ ID NO: 95089 - DNA, 20 bp, Artificial Sequence
  MKO10095089_B_Klk13
  gRNA
cattgaactgcgctcagatg

SEQ ID NO: 95090 - DNA, 20 bp, Artificial Sequence
  MKO10095090_B_Klk13
  gRNA
caggcagctctactgatccg

SEQ ID NO: 95091 - DNA, 20 bp, Artificial Sequence
  MKO10095091_B_Klk14
  gRNA
gcatgccatcgagcctaccc

SEQ ID NO: 95092 - DNA, 20 bp, Artificial Sequence
  MKO10095092_B_Klk14
  gRNA
ccacacaggaagcgatgccc

SEQ ID NO: 95093 - DNA, 20 bp, Artificial Sequence
  MKO10095093_B_Klk14
  gRNA
tccagctgtggtaattgcac

SEQ ID NO: 95094 - DNA, 20 bp, Artificial Sequence
  MKO10095094_B_Klk15
  gRNA
gctctggaccatcgaacttg

SEQ ID NO: 95095 - DNA, 20 bp, Artificial Sequence
  MKO10095095_B_Klk15
  gRNA
ggaaagcgccacaattaaac

SEQ ID NO: 95096 - DNA, 20 bp, Artificial Sequence
  MKO10095096_B_Klk15
  gRNA
gcggcagtcaacacccagcg

SEQ ID NO: 95097 - DNA, 20 bp, Artificial Sequence
  MKO10095097_B_Klk1b11
  gRNA
ttacttacctgacatggcag

SEQ ID NO: 95098 - DNA, 20 bp, Artificial Sequence
  MKO10095098_B_Klk1b11
  gRNA
ctgggttgtggattatgagg

SEQ ID NO: 95099 - DNA, 20 bp, Artificial Sequence
  MKO10095099_B_Klk1b11
  gRNA
gagtcctgttggaccgtaac

SEQ ID NO: 95100 - DNA, 20 bp, Artificial Sequence
  MKO10095100_B_Klk1b16
  gRNA
catgctgtgtacaatagaga

SEQ ID NO: 95101 - DNA, 20 bp, Artificial Sequence
  MKO10095101_B_Klk1b16
  gRNA
gatagcacatgtctagtgtc

SEQ ID NO: 95102 - DNA, 20 bp, Artificial Sequence
  MKO10095102_B_Klk1b16
  gRNA
ccccgcaaatgtgttccttg

SEQ ID NO: 95103 - DNA, 20 bp, Artificial Sequence
  MKO10095103_B_Klk1b1
  gRNA
cgcatatatattccttgtag

SEQ ID NO: 95104 - DNA, 20 bp, Artificial Sequence
  MKO10095104_B_Klk1b1
  gRNA
tcatggggctataacccatg

SEQ ID NO: 95105 - DNA, 20 bp, Artificial Sequence
  MKO10095105_B_Klk1b1
  gRNA
agtgtgtcactcaggggttt

SEQ ID NO: 95106 - DNA, 20 bp, Artificial Sequence
  MKO10095106_B_Klk1b21
  gRNA
gtggggtgtggtcattcatg

SEQ ID NO: 95107 - DNA, 20 bp, Artificial Sequence
  MKO10095107_B_Klk1b21
  gRNA
gtgagaagaattctcaaccc

SEQ ID NO: 95108 - DNA, 20 bp, Artificial Sequence
  MKO10095108_B_Klk1b21
  gRNA
ttactcacttgccatagcag

SEQ ID NO: 95109 - DNA, 20 bp, Artificial Sequence
  MKO10095109_B_Klk1b22
  gRNA
tgtgaaagcccatatactga

SEQ ID NO: 95110 - DNA, 20 bp, Artificial Sequence
  MKO10095110_B_Klk1b22
  gRNA
tacttagatgagtacctatg

SEQ ID NO: 95111 - DNA, 20 bp, Artificial Sequence
  MKO10095111_B_Klk1b22
  gRNA
ggtgcattgggttcaccaca

SEQ ID NO: 95112 - DNA, 20 bp, Artificial Sequence
  MKO10095112_B_Klk1b24
  gRNA
ttgctcttgtccttaggttg

SEQ ID NO: 95113 - DNA, 20 bp, Artificial Sequence
  MKO10095113_B_Klk1b24
  gRNA
gcttgatgaacacacactga

SEQ ID NO: 95114 - DNA, 20 bp, Artificial Sequence
  MKO10095114_B_Klk1b24
  gRNA
atctgtgactttatgtaagt

SEQ ID NO: 95115 - DNA, 20 bp, Artificial Sequence
  MKO10095115_B_Klk1b26
  gRNA
ccccacaaatgtgttccttt

SEQ ID NO: 95116 - DNA, 20 bp, Artificial Sequence
  MKO10095116_B_Klk1b26
  gRNA
ggtggctgtgtactaccaaa

SEQ ID NO: 95117 - DNA, 20 bp, Artificial Sequence
  MKO10095117_B_Klk1b26
  gRNA
ggccatttgatgtggttcct

SEQ ID NO: 95118 - DNA, 20 bp, Artificial Sequence
  MKO10095118_B_Klk1b27
  gRNA
atctgtgactttatgtacgt

SEQ ID NO: 95119 - DNA, 20 bp, Artificial Sequence
  MKO10095119_B_Klk1b27
  gRNA
ttgctcttgtcctcaggatg

SEQ ID NO: 95120 - DNA, 20 bp, Artificial Sequence
  MKO10095120_B_Klk1b27
  gRNA
acaccagccagcataatgtt

SEQ ID NO: 95121 - DNA, 20 bp, Artificial Sequence
  MKO10095121_B_Klk1b3
  gRNA
actctagcaactacaaggtt

SEQ ID NO: 95122 - DNA, 20 bp, Artificial Sequence
  MKO10095122_B_Klk1b3
  gRNA
tcatggggccataccccatg

SEQ ID NO: 95123 - DNA, 20 bp, Artificial Sequence
  MKO10095123_B_Klk1b3
  gRNA
cgatacacccaatatttatg

SEQ ID NO: 95124 - DNA, 20 bp, Artificial Sequence
  MKO10095124_B_Klk1b4
  gRNA
ataagtttggtgtagacact

SEQ ID NO: 95125 - DNA, 20 bp, Artificial Sequence
  MKO10095125_B_Klk1b4
  gRNA
actgtgagaattcccaaccc

SEQ ID NO: 95126 - DNA, 20 bp, Artificial Sequence
  MKO10095126_B_Klk1b4
  gRNA
tggtggctcatacacttgtg

SEQ ID NO: 95127 - DNA, 20 bp, Artificial Sequence
  MKO10095127_B_Klk1b5
  gRNA
acagatgttatgttgtgtgc

SEQ ID NO: 95128 - DNA, 20 bp, Artificial Sequence
  MKO10095128_B_Klk1b5
  gRNA
agagttaaacttaataagtt

SEQ ID NO: 95129 - DNA, 20 bp, Artificial Sequence
  MKO10095129_B_Klk1b5
  gRNA
gctttgacacagtcctcatt

SEQ ID NO: 95130 - DNA, 20 bp, Artificial Sequence
  MKO10095130_B_Klk1b8
  gRNA
gaacccagttgcgttccaac

SEQ ID NO: 95131 - DNA, 20 bp, Artificial Sequence
  MKO10095131_B_Klk1b8
  gRNA
tatagaaaaccacaatgtga

SEQ ID NO: 95132 - DNA, 20 bp, Artificial Sequence
  MKO10095132_B_Klk1b8
  gRNA
catctgtcaccttcacattg

SEQ ID NO: 95133 - DNA, 20 bp, Artificial Sequence
  MKO10095133_B_Klk1b9
  gRNA
tcatggggctttaccccatg

SEQ ID NO: 95134 - DNA, 20 bp, Artificial Sequence
  MKO10095134_B_Klk1b9
  gRNA
gtgtcctgttggatgccaac

SEQ ID NO: 95135 - DNA, 20 bp, Artificial Sequence
  MKO10095135_B_Klk1b9
  gRNA
tgccatagtgtctttgatcc

SEQ ID NO: 95136 - DNA, 20 bp, Artificial Sequence
  MKO10095136_B_Klk1
  gRNA
cacattgatatttggtgaag

SEQ ID NO: 95137 - DNA, 20 bp, Artificial Sequence
  MKO10095137_B_Klk1
  gRNA
agccatagtttctcttatcc

SEQ ID NO: 95138 - DNA, 20 bp, Artificial Sequence
  MKO10095138_B_Klk1
  gRNA
acagatgacatgttgtgtgc

SEQ ID NO: 95139 - DNA, 20 bp, Artificial Sequence
  MKO10095139_B_Klk4
  gRNA
gtcagcagcacattgcttac

SEQ ID NO: 95140 - DNA, 20 bp, Artificial Sequence
  MKO10095140_B_Klk4
  gRNA
gatccggctgctgacacttg

SEQ ID NO: 95141 - DNA, 20 bp, Artificial Sequence
  MKO10095141_B_Klk4
  gRNA
gttagtgaacttgcagagat

SEQ ID NO: 95142 - DNA, 20 bp, Artificial Sequence
  MKO10095142_B_Klk5
  gRNA
tgcttgtgactgtgccaccg

SEQ ID NO: 95143 - DNA, 20 bp, Artificial Sequence
  MKO10095143_B_Klk5
  gRNA
agcagctctcgaattgtgaa

SEQ ID NO: 95144 - DNA, 20 bp, Artificial Sequence
  MKO10095144_B_Klk5
  gRNA
cagagtgttcagaatccgtc

SEQ ID NO: 95145 - DNA, 20 bp, Artificial Sequence
  MKO10095145_B_Klk6
  gRNA
ccacgacaatgacatcatga

SEQ ID NO: 95146 - DNA, 20 bp, Artificial Sequence
  MKO10095146_B_Klk6
  gRNA
gggtcctcattgacccacag

SEQ ID NO: 95147 - DNA, 20 bp, Artificial Sequence
  MKO10095147_B_Klk6
  gRNA
ccatcatgatgtcattgtcg

SEQ ID NO: 95148 - DNA, 20 bp, Artificial Sequence
  MKO10095148_B_Klk7
  gRNA
agggctcacattgcacgtgt

SEQ ID NO: 95149 - DNA, 20 bp, Artificial Sequence
  MKO10095149_B_Klk7
  gRNA
gttccccatagggtgactca

SEQ ID NO: 95150 - DNA, 20 bp, Artificial Sequence
  MKO10095150_B_Klk7
  gRNA
gtaaagaaggctcgcaccca

SEQ ID NO: 95151 - DNA, 20 bp, Artificial Sequence
  MKO10095151_B_Klk8
  gRNA
ggtgtgcgacgggatgctcc

SEQ ID NO: 95152 - DNA, 20 bp, Artificial Sequence
  MKO10095152_B_Klk8
  gRNA
cacagatcagtctctcgccc

SEQ ID NO: 95153 - DNA, 20 bp, Artificial Sequence
  MKO10095153_B_Klk8
  gRNA
gtatacactctcgaccttcc

SEQ ID NO: 95154 - DNA, 20 bp, Artificial Sequence
  MKO10095154_B_Klk9
  gRNA
cactaacgtctttgactacc

SEQ ID NO: 95155 - DNA, 20 bp, Artificial Sequence
  MKO10095155_B_Klk9
  gRNA
aggtacctgtgggtccgcct

SEQ ID NO: 95156 - DNA, 20 bp, Artificial Sequence
  MKO10095156_B_Klk9
  gRNA
gggtggccgaggctcttgcc

SEQ ID NO: 95157 - DNA, 20 bp, Artificial Sequence
  MKO10095157_B_Klkb1
  gRNA
tgcacatcttctgacagtac

SEQ ID NO: 95158 - DNA, 20 bp, Artificial Sequence
  MKO10095158_B_Klkb1
  gRNA
caagtcctttgtatatgtct

SEQ ID NO: 95159 - DNA, 20 bp, Artificial Sequence
  MKO10095159_B_Klkb1
  gRNA
aattatttgtgcacagtttc

SEQ ID NO: 95160 - DNA, 20 bp, Artificial Sequence
  MKO10095160_B_Klra10
  gRNA
gtcttatgacaagaaaaaaa

SEQ ID NO: 95161 - DNA, 20 bp, Artificial Sequence
  MKO10095161_B_Klra10
  gRNA
ctgcaactattaccagaaga

SEQ ID NO: 95162 - DNA, 20 bp, Artificial Sequence
  MKO10095162_B_Klra10
  gRNA
ataactgcagcaacatgcaa

SEQ ID NO: 95163 - DNA, 20 bp, Artificial Sequence
  MKO10095163_B_Klra12
  gRNA
caagttgatgtcactttgcg

SEQ ID NO: 95164 - DNA, 20 bp, Artificial Sequence
  MKO10095164_B_Klra12
  gRNA
ccttctgaagatagacgatg

SEQ ID NO: 95165 - DNA, 20 bp, Artificial Sequence
  MKO10095165_B_Klra12
  gRNA
agctatcacaatgagctgca

SEQ ID NO: 95166 - DNA, 20 bp, Artificial Sequence
  MKO10095166_B_Klra15
  gRNA
ctctgtttacatctactcca

SEQ ID NO: 95167 - DNA, 20 bp, Artificial Sequence
  MKO10095167_B_Klra15
  gRNA
gcagaggtgttaaagtatac

SEQ ID NO: 95168 - DNA, 20 bp, Artificial Sequence
  MKO10095168_B_Klra15
  gRNA
ctgaaacagctaccagaaga

SEQ ID NO: 95169 - DNA, 20 bp, Artificial Sequence
  MKO10095169_B_Klra17
  gRNA
ctctattgtaggtggaagcc

SEQ ID NO: 95170 - DNA, 20 bp, Artificial Sequence
  MKO10095170_B_Klra17
  gRNA
agcagaaccagtgtatttcc

SEQ ID NO: 95171 - DNA, 20 bp, Artificial Sequence
  MKO10095171_B_Klra17
  gRNA
agctatcacaatgagatgcc

SEQ ID NO: 95172 - DNA, 20 bp, Artificial Sequence
  MKO10095172_B_Klra18
  gRNA
gcagaacgagatgaggctca

SEQ ID NO: 95173 - DNA, 20 bp, Artificial Sequence
  MKO10095173_B_Klra18
  gRNA
ctgcaacagttaccagtcga

SEQ ID NO: 95174 - DNA, 20 bp, Artificial Sequence
  MKO10095174_B_Klra18
  gRNA
ctctgtttacatctactcca

SEQ ID NO: 95175 - DNA, 20 bp, Artificial Sequence
  MKO10095175_B_Klra19
  gRNA
tttaagagtgttcagtatgc

SEQ ID NO: 95176 - DNA, 20 bp, Artificial Sequence
  MKO10095176_B_Klra19
  gRNA
tagggacaggtgttaaatac

SEQ ID NO: 95177 - DNA, 20 bp, Artificial Sequence
  MKO10095177_B_Klra19
  gRNA
ctgcaactgttataagaaga

SEQ ID NO: 95178 - DNA, 20 bp, Artificial Sequence
  MKO10095178_B_Klra1
  gRNA
ccttcagacagttgctgggt

SEQ ID NO: 95179 - DNA, 20 bp, Artificial Sequence
  MKO10095179_B_Klra1
  gRNA
ccaacccagcaactgtctga

SEQ ID NO: 95180 - DNA, 20 bp, Artificial Sequence
  MKO10095180_B_Klra1
  gRNA
ctgaaacagctaccagaaga

SEQ ID NO: 95181 - DNA, 20 bp, Artificial Sequence
  MKO10095181_B_Klra21
  gRNA
tattcccaagatgagtgagc

SEQ ID NO: 95182 - DNA, 20 bp, Artificial Sequence
  MKO10095182_B_Klra21
  gRNA
gagtcccctcaagtctcacc

SEQ ID NO: 95183 - DNA, 20 bp, Artificial Sequence
  MKO10095183_B_Klra21
  gRNA
tttaagtgtgttcagtccct

SEQ ID NO: 95184 - DNA, 20 bp, Artificial Sequence
  MKO10095184_B_Klra22
  gRNA
ctctgtttacatctactcca

SEQ ID NO: 95185 - DNA, 20 bp, Artificial Sequence
  MKO10095185_B_Klra22
  gRNA
gcagaggtgttaaagtatac

SEQ ID NO: 95186 - DNA, 20 bp, Artificial Sequence
  MKO10095186_B_Klra22
  gRNA
ctgaaacagctaccagaaga

SEQ ID NO: 95187 - DNA, 20 bp, Artificial Sequence
  MKO10095187_B_Klra23
  gRNA
gattccagaagatcagtgcc

SEQ ID NO: 95188 - DNA, 20 bp, Artificial Sequence
  MKO10095188_B_Klra23
  gRNA
caagttgatgtcactttgcg

SEQ ID NO: 95189 - DNA, 20 bp, Artificial Sequence
  MKO10095189_B_Klra23
  gRNA
ctgtctcctcaagcctcacc

SEQ ID NO: 95190 - DNA, 20 bp, Artificial Sequence
  MKO10095190_B_Klra2
  gRNA
aaagagttaagttgtaagcc

SEQ ID NO: 95191 - DNA, 20 bp, Artificial Sequence
  MKO10095191_B_Klra2
  gRNA
acctctgtggcccacatctc

SEQ ID NO: 95192 - DNA, 20 bp, Artificial Sequence
  MKO10095192_B_Klra2
  gRNA
aactatcacaatgaacttcc

SEQ ID NO: 95193 - DNA, 20 bp, Artificial Sequence
  MKO10095193_B_Klra33
  gRNA
ctctgtttacatctactcca

SEQ ID NO: 95194 - DNA, 20 bp, Artificial Sequence
  MKO10095194_B_Klra33
  gRNA
gcagaggtgttaaagtatac

SEQ ID NO: 95195 - DNA, 20 bp, Artificial Sequence
  MKO10095195_B_Klra33
  gRNA
tttaagtgtgttcagttccc

SEQ ID NO: 95196 - DNA, 20 bp, Artificial Sequence
  MKO10095196_B_Klra3
  gRNA
aatccaatccagtaattctc

SEQ ID NO: 95197 - DNA, 20 bp, Artificial Sequence
  MKO10095197_B_Klra3
  gRNA
tcatcatgaacaaaacgaca

SEQ ID NO: 95198 - DNA, 20 bp, Artificial Sequence
  MKO10095198_B_Klra3
  gRNA
ctgcaactgttacaagaaga

SEQ ID NO: 95199 - DNA, 20 bp, Artificial Sequence
  MKO10095199_B_Klra4
  gRNA
ctctgtttacatctactcca

SEQ ID NO: 95200 - DNA, 20 bp, Artificial Sequence
  MKO10095200_B_Klra4
  gRNA
gcagaggtgttaaagtatac

SEQ ID NO: 95201 - DNA, 20 bp, Artificial Sequence
  MKO10095201_B_Klra4
  gRNA
tttaagtgtgttcagttccc

SEQ ID NO: 95202 - DNA, 20 bp, Artificial Sequence
  MKO10095202_B_Klra5
  gRNA
tagggacaggtgttaaacac

SEQ ID NO: 95203 - DNA, 20 bp, Artificial Sequence
  MKO10095203_B_Klra5
  gRNA
ctgcaactgttactagaaga

SEQ ID NO: 95204 - DNA, 20 bp, Artificial Sequence
  MKO10095204_B_Klra5
  gRNA
acagaaattccttcagttcc

SEQ ID NO: 95205 - DNA, 20 bp, Artificial Sequence
  MKO10095205_B_Klra6
  gRNA
ttagagtttcatggatttct

SEQ ID NO: 95206 - DNA, 20 bp, Artificial Sequence
  MKO10095206_B_Klra6
  gRNA
tttaagagtgttcagtatgc

SEQ ID NO: 95207 - DNA, 20 bp, Artificial Sequence
  MKO10095207_B_Klra6
  gRNA
tagggacaggtgttaaatac

SEQ ID NO: 95208 - DNA, 20 bp, Artificial Sequence
  MKO10095208_B_Klra7
  gRNA
cccagagaagcttgctacag

SEQ ID NO: 95209 - DNA, 20 bp, Artificial Sequence
  MKO10095209_B_Klra7
  gRNA
aagctcattgtgatagcttg

SEQ ID NO: 95210 - DNA, 20 bp, Artificial Sequence
  MKO10095210_B_Klra7
  gRNA
gcagaaactagtgaggactg

SEQ ID NO: 95211 - DNA, 20 bp, Artificial Sequence
  MKO10095211_B_Klra8
  gRNA
atgttattctagagagttac

SEQ ID NO: 95212 - DNA, 20 bp, Artificial Sequence
  MKO10095212_B_Klra8
  gRNA
tattccagaagttcatagct

SEQ ID NO: 95213 - DNA, 20 bp, Artificial Sequence
  MKO10095213_B_Klra8
  gRNA
tttaagtgtgttcagtccct

SEQ ID NO: 95214 - DNA, 20 bp, Artificial Sequence
  MKO10095214_B_Klra9
  gRNA
ggattacatcaaaagagaac

SEQ ID NO: 95215 - DNA, 20 bp, Artificial Sequence
  MKO10095215_B_Klra9
  gRNA
ctgcaactattaccagaaga

SEQ ID NO: 95216 - DNA, 20 bp, Artificial Sequence
  MKO10095216_B_Klra9
  gRNA
ttcatcttctatcttcacaa

SEQ ID NO: 95217 - DNA, 20 bp, Artificial Sequence
  MKO10095217_B_Klrb1a
  gRNA
ttgattgtagagattcctac

SEQ ID NO: 95218 - DNA, 20 bp, Artificial Sequence
  MKO10095218_B_Klrb1a
  gRNA
acacattgccagacatgaac

SEQ ID NO: 95219 - DNA, 20 bp, Artificial Sequence
  MKO10095219_B_Klrb1a
  gRNA
gacatcttaccagttcttct

SEQ ID NO: 95220 - DNA, 20 bp, Artificial Sequence
  MKO10095220_B_Klrb1b
  gRNA
tcgacattccttccaagtgt

SEQ ID NO: 95221 - DNA, 20 bp, Artificial Sequence
  MKO10095221_B_Klrb1b
  gRNA
cgaattgattgtgataaaaa

SEQ ID NO: 95222 - DNA, 20 bp, Artificial Sequence
  MKO10095222_B_Klrb1b
  gRNA
gagaacagaacacatacaac

SEQ ID NO: 95223 - DNA, 20 bp, Artificial Sequence
  MKO10095223_B_Klrb1c
  gRNA
gaggaaggtcaagctgactg

SEQ ID NO: 95224 - DNA, 20 bp, Artificial Sequence
  MKO10095224_B_Klrb1c
  gRNA
ctaagacactcatcccaatc

SEQ ID NO: 95225 - DNA, 20 bp, Artificial Sequence
  MKO10095225_B_Klrb1c
  gRNA
ctccttgtcctgaccctgat

SEQ ID NO: 95226 - DNA, 20 bp, Artificial Sequence
  MKO10095226_B_Klrb1f
  gRNA
atttgtgcagaacttgataa

SEQ ID NO: 95227 - DNA, 20 bp, Artificial Sequence
  MKO10095227_B_Klrb1f
  gRNA
cttcttctcttgagcctgat

SEQ ID NO: 95228 - DNA, 20 bp, Artificial Sequence
  MKO10095228_B_Klrb1f
  gRNA
gagaacaggactgaactaac

SEQ ID NO: 95229 - DNA, 20 bp, Artificial Sequence
  MKO10095229_B_Klrb1
  gRNA
attattgcagaacttctcaa

SEQ ID NO: 95230 - DNA, 20 bp, Artificial Sequence
  MKO10095230_B_Klrb1
  gRNA
gaaaacaggactgaaccaac

SEQ ID NO: 95231 - DNA, 20 bp, Artificial Sequence
  MKO10095231_B_Klrb1
  gRNA
gctcttcttagatgcctgtc

SEQ ID NO: 95232 - DNA, 20 bp, Artificial Sequence
  MKO10095232_B_Klrc1
  gRNA
cctccagagaaactcattgc

SEQ ID NO: 95233 - DNA, 20 bp, Artificial Sequence
  MKO10095233_B_Klrc1
  gRNA
aatctctttcactgatctca

SEQ ID NO: 95234 - DNA, 20 bp, Artificial Sequence
  MKO10095234_B_Klrc1
  gRNA
gctttacatagatagtgaag

SEQ ID NO: 95235 - DNA, 20 bp, Artificial Sequence
  MKO10095235_B_Klrc2
  gRNA
cctgacctctgcccttccga

SEQ ID NO: 95236 - DNA, 20 bp, Artificial Sequence
  MKO10095236_B_Klrc2
  gRNA
agagtcatgagtcacctgct

SEQ ID NO: 95237 - DNA, 20 bp, Artificial Sequence
  MKO10095237_B_Klrc2
  gRNA
cctccagagaagctcatcgc

SEQ ID NO: 95238 - DNA, 20 bp, Artificial Sequence
  MKO10095238_B_Klrc3
  gRNA
ctttctgcaatccctttcac

SEQ ID NO: 95239 - DNA, 20 bp, Artificial Sequence
  MKO10095239_B_Klrc3
  gRNA
cctccagagaagctcatcgc

SEQ ID NO: 95240 - DNA, 20 bp, Artificial Sequence
  MKO10095240_B_Klrc3
  gRNA
cttacatggagaaacaattc

SEQ ID NO: 95241 - DNA, 20 bp, Artificial Sequence
  MKO10095241_B_Klrd1
  gRNA
aaccaccactgtagaattcc

SEQ ID NO: 95242 - DNA, 20 bp, Artificial Sequence
  MKO10095242_B_Klrd1
  gRNA
ttatagtttctaggatcact

SEQ ID NO: 95243 - DNA, 20 bp, Artificial Sequence
  MKO10095243_B_Klrd1
  gRNA
atgcattccaatccagaaaa

SEQ ID NO: 95244 - DNA, 20 bp, Artificial Sequence
  MKO10095244_B_Klre1
  gRNA
ctcacactttgtggtaaaag

SEQ ID NO: 95245 - DNA, 20 bp, Artificial Sequence
  MKO10095245_B_Klre1
  gRNA
tcttctactattcagcaaga

SEQ ID NO: 95246 - DNA, 20 bp, Artificial Sequence
  MKO10095246_B_Klre1
  gRNA
ctcttaactccagtctcata

SEQ ID NO: 95247 - DNA, 20 bp, Artificial Sequence
  MKO10095247_B_Klrg1
  gRNA
ttaccaacagcttgatacag

SEQ ID NO: 95248 - DNA, 20 bp, Artificial Sequence
  MKO10095248_B_Klrg1
  gRNA
gaagctgtttggagagtacc

SEQ ID NO: 95249 - DNA, 20 bp, Artificial Sequence
  MKO10095249_B_Klrg1
  gRNA
gcacctctgtatcaagctgt

SEQ ID NO: 95250 - DNA, 20 bp, Artificial Sequence
  MKO10095250_B_Klrg2
  gRNA
tttggaagaaggcaggctcg

SEQ ID NO: 95251 - DNA, 20 bp, Artificial Sequence
  MKO10095251_B_Klrg2
  gRNA
agctagcatacctcctctag

SEQ ID NO: 95252 - DNA, 20 bp, Artificial Sequence
  MKO10095252_B_Klrg2
  gRNA
actgcagttctcctagaccc

SEQ ID NO: 95253 - DNA, 20 bp, Artificial Sequence
  MKO10095253_B_Klri1
  gRNA
tgggtggattcttcacaaaa

SEQ ID NO: 95254 - DNA, 20 bp, Artificial Sequence
  MKO10095254_B_Klri1
  gRNA
gaaccaacagttcctggttg

SEQ ID NO: 95255 - DNA, 20 bp, Artificial Sequence
  MKO10095255_B_Klri1
  gRNA
gtggtgctgatgacaaccac

SEQ ID NO: 95256 - DNA, 20 bp, Artificial Sequence
  MKO10095256_B_Klri2
  gRNA
ccatcattcctgtcacatag

SEQ ID NO: 95257 - DNA, 20 bp, Artificial Sequence
  MKO10095257_B_Klri2
  gRNA
cgcagactgactctctaccc

SEQ ID NO: 95258 - DNA, 20 bp, Artificial Sequence
  MKO10095258_B_Klri2
  gRNA
agagagtcagtctgcgtgtg

SEQ ID NO: 95259 - DNA, 20 bp, Artificial Sequence
  MKO10095259_B_Klrk1
  gRNA
ttcaaagagacgtttcagcc

SEQ ID NO: 95260 - DNA, 20 bp, Artificial Sequence
  MKO10095260_B_Klrk1
  gRNA
cttgacagtattgtgcaaca

SEQ ID NO: 95261 - DNA, 20 bp, Artificial Sequence
  MKO10095261_B_Klrk1
  gRNA
cacttacctcttgaggaaac

SEQ ID NO: 95262 - DNA, 20 bp, Artificial Sequence
  MKO10095262_B_Kl
  gRNA
taacatgaagttccgccaat

SEQ ID NO: 95263 - DNA, 20 bp, Artificial Sequence
  MKO10095263_B_Kl
  gRNA
gacccgcatttctcgaagta

SEQ ID NO: 95264 - DNA, 20 bp, Artificial Sequence
  MKO10095264_B_Kl
  gRNA
tacactgtgtgcaccgaatg

SEQ ID NO: 95265 - DNA, 20 bp, Artificial Sequence
  MKO10095265_B_Kmo
  gRNA
acttctttcccgaaagagag

SEQ ID NO: 95266 - DNA, 20 bp, Artificial Sequence
  MKO10095266_B_Kmo
  gRNA
ggctttcatgggcacacctt

SEQ ID NO: 95267 - DNA, 20 bp, Artificial Sequence
  MKO10095267_B_Kmo
  gRNA
attcctctttgcaagaaagc

SEQ ID NO: 95268 - DNA, 20 bp, Artificial Sequence
  MKO10095268_B_Kmt2a
  gRNA
acacagctcgtttgcggcca

SEQ ID NO: 95269 - DNA, 20 bp, Artificial Sequence
  MKO10095269_B_Kmt2a
  gRNA
aggcggtgcggacaatgtcc

SEQ ID NO: 95270 - DNA, 20 bp, Artificial Sequence
  MKO10095270_B_Kmt2a
  gRNA
ccaccttgagtgccttaccg

SEQ ID NO: 95271 - DNA, 20 bp, Artificial Sequence
  MKO10095271_B_Kmt2b
  gRNA
ctgaggcggggtacatcttc

SEQ ID NO: 95272 - DNA, 20 bp, Artificial Sequence
  MKO10095272_B_Kmt2b
  gRNA
aagccctgcagtacaaaccg

SEQ ID NO: 95273 - DNA, 20 bp, Artificial Sequence
  MKO10095273_B_Kmt2b
  gRNA
agctaagagagatcgagcct

SEQ ID NO: 95274 - DNA, 20 bp, Artificial Sequence
  MKO10095274_B_Kmt2c
  gRNA
ttggcgtagaagccaaaatc

SEQ ID NO: 95275 - DNA, 20 bp, Artificial Sequence
  MKO10095275_B_Kmt2c
  gRNA
ttccaaggtaaggtaagtcc

SEQ ID NO: 95276 - DNA, 20 bp, Artificial Sequence
  MKO10095276_B_Kmt2c
  gRNA
catggatggactggagacga

SEQ ID NO: 95277 - DNA, 20 bp, Artificial Sequence
  MKO10095277_B_Kmt2d
  gRNA
cagagagcacaacgccgtgc

SEQ ID NO: 95278 - DNA, 20 bp, Artificial Sequence
  MKO10095278_B_Kmt2d
  gRNA
cacatcattggtgtgcagcg

SEQ ID NO: 95279 - DNA, 20 bp, Artificial Sequence
  MKO10095279_B_Kmt2d
  gRNA
tgtccatccctctctccgac

SEQ ID NO: 95280 - DNA, 20 bp, Artificial Sequence
  MKO10095280_B_Kmt2e
  gRNA
tatgtgaacgttgtcagccc

SEQ ID NO: 95281 - DNA, 20 bp, Artificial Sequence
  MKO10095281_B_Kmt2e
  gRNA
atccgtagaagctagccctg

SEQ ID NO: 95282 - DNA, 20 bp, Artificial Sequence
  MKO10095282_B_Kmt2e
  gRNA
ttggatttctcaactaccac

SEQ ID NO: 95283 - DNA, 20 bp, Artificial Sequence
  MKO10095283_B_Kncn
  gRNA
ctgagttaggatggattctc

SEQ ID NO: 95284 - DNA, 20 bp, Artificial Sequence
  MKO10095284_B_Kncn
  gRNA
ctgagaatccatcctaactc

SEQ ID NO: 95285 - DNA, 20 bp, Artificial Sequence
  MKO10095285_B_Kncn
  gRNA
tctcttccaggagcccgcag

SEQ ID NO: 95286 - DNA, 20 bp, Artificial Sequence
  MKO10095286_B_Kndc1
  gRNA
cttaccctggaatgctccga

SEQ ID NO: 95287 - DNA, 20 bp, Artificial Sequence
  MKO10095287_B_Kndc1
  gRNA
catgaagcacacgtttccac

SEQ ID NO: 95288 - DNA, 20 bp, Artificial Sequence
  MKO10095288_B_Kndc1
  gRNA
tgccgcagtctctcagccat

SEQ ID NO: 95289 - DNA, 20 bp, Artificial Sequence
  MKO10095289_B_Kng1
  gRNA
agtcacagtcctgccatgcg

SEQ ID NO: 95290 - DNA, 20 bp, Artificial Sequence
  MKO10095290_B_Kng1
  gRNA
atcgacagatagtccagacc

SEQ ID NO: 95291 - DNA, 20 bp, Artificial Sequence
  MKO10095291_B_Kng1
  gRNA
ctccttgattagatacttga

SEQ ID NO: 95292 - DNA, 20 bp, Artificial Sequence
  MKO10095292_B_Kng2
  gRNA
cagacctgcaagattactcc

SEQ ID NO: 95293 - DNA, 20 bp, Artificial Sequence
  MKO10095293_B_Kng2
  gRNA
gtggtactcctctgtcacta

SEQ ID NO: 95294 - DNA, 20 bp, Artificial Sequence
  MKO10095294_B_Kng2
  gRNA
cccacctggagtaatcttgc

SEQ ID NO: 95295 - DNA, 20 bp, Artificial Sequence
  MKO10095295_B_Knop1
  gRNA
ttatagacgcttctcctccg

SEQ ID NO: 95296 - DNA, 20 bp, Artificial Sequence
  MKO10095296_B_Knop1
  gRNA
agaagagattgatcgtgagt

SEQ ID NO: 95297 - DNA, 20 bp, Artificial Sequence
  MKO10095297_B_Knop1
  gRNA
gggtttgtcggtcaagacag

SEQ ID NO: 95298 - DNA, 20 bp, Artificial Sequence
  MKO10095298_B_Knstrn
  gRNA
tcgtagccgggtggcttggc

SEQ ID NO: 95299 - DNA, 20 bp, Artificial Sequence
  MKO10095299_B_Knstrn
  gRNA
accgtttaataagcaaaaac

SEQ ID NO: 95300 - DNA, 20 bp, Artificial Sequence
  MKO10095300_B_Knstrn
  gRNA
cttccataggcaggtgaaag

SEQ ID NO: 95301 - DNA, 20 bp, Artificial Sequence
  MKO10095301_B_Kntc1
  gRNA
atgttgcttctaacgaacaa

SEQ ID NO: 95302 - DNA, 20 bp, Artificial Sequence
  MKO10095302_B_Kntc1
  gRNA
ctgcaacgattataaaccca

SEQ ID NO: 95303 - DNA, 20 bp, Artificial Sequence
  MKO10095303_B_Kntc1
  gRNA
gaagcaaacgctgttcacca

SEQ ID NO: 95304 - DNA, 20 bp, Artificial Sequence
  MKO10095304_B_Kpna1
  gRNA
ctaagcaactcgatgaaaat

SEQ ID NO: 95305 - DNA, 20 bp, Artificial Sequence
  MKO10095305_B_Kpna1
  gRNA
ccatctccatgttatttatc

SEQ ID NO: 95306 - DNA, 20 bp, Artificial Sequence
  MKO10095306_B_Kpna1
  gRNA
tatcatatcagtcatgtcag

SEQ ID NO: 95307 - DNA, 20 bp, Artificial Sequence
  MKO10095307_B_Kpna2
  gRNA
ccgccgaatagaagttaatg

SEQ ID NO: 95308 - DNA, 20 bp, Artificial Sequence
  MKO10095308_B_Kpna2
  gRNA
tctgttgaggacattgttaa

SEQ ID NO: 95309 - DNA, 20 bp, Artificial Sequence
  MKO10095309_B_Kpna2
  gRNA
ctcctatagacaacatcatc

SEQ ID NO: 95310 - DNA, 20 bp, Artificial Sequence
  MKO10095310_B_Kpna3
  gRNA
aacactagaagctatattac

SEQ ID NO: 95311 - DNA, 20 bp, Artificial Sequence
  MKO10095311_B_Kpna3
  gRNA
aatcttctaagctttcttct

SEQ ID NO: 95312 - DNA, 20 bp, Artificial Sequence
  MKO10095312_B_Kpna4
  gRNA
ctgcacttaattgaattcct

SEQ ID NO: 95313 - DNA, 20 bp, Artificial Sequence
  MKO10095313_B_Kpna4
  gRNA
ttgaacaatagcttctagag

SEQ ID NO: 95314 - DNA, 20 bp, Artificial Sequence
  MKO10095314_B_Kpna4
  gRNA
atgaagttgtagttgaatta

SEQ ID NO: 95315 - DNA, 20 bp, Artificial Sequence
  MKO10095315_B_Kpna6
  gRNA
gaacaatgccttaaaccctg

SEQ ID NO: 95316 - DNA, 20 bp, Artificial Sequence
  MKO10095316_B_Kpna6
  gRNA
tagcaaccacgcagaaattc

SEQ ID NO: 95317 - DNA, 20 bp, Artificial Sequence
  MKO10095317_B_Kpna6
  gRNA
attcgataattgtccttccc

SEQ ID NO: 95318 - DNA, 20 bp, Artificial Sequence
  MKO10095318_B_Kpna7
  gRNA
gaagcaatcctctgttgtcg

SEQ ID NO: 95319 - DNA, 20 bp, Artificial Sequence
  MKO10095319_B_Kpna7
  gRNA
cactgtggtacctggcagcc

SEQ ID NO: 95320 - DNA, 20 bp, Artificial Sequence
  MKO10095320_B_Kpna7
  gRNA
cgatctgttctccagtgaca

SEQ ID NO: 95321 - DNA, 20 bp, Artificial Sequence
  MKO10095321_B_Kpnb1
  gRNA
gtaaccaatagcttccaatg

SEQ ID NO: 95322 - DNA, 20 bp, Artificial Sequence
  MKO10095322_B_Kpnb1
  gRNA
gcctagtaacaatgtgaagc

SEQ ID NO: 95323 - DNA, 20 bp, Artificial Sequence
  MKO10095323_B_Kpnb1
  gRNA
ggcacgcaccagattctcca

SEQ ID NO: 95324 - DNA, 20 bp, Artificial Sequence
  MKO10095324_B_Kprp
  gRNA
ccttcggtatccaggcgaca

SEQ ID NO: 95325 - DNA, 20 bp, Artificial Sequence
  MKO10095325_B_Kprp
  gRNA
ctgtggacgaggatacggac

SEQ ID NO: 95326 - DNA, 20 bp, Artificial Sequence
  MKO10095326_B_Kprp
  gRNA
cgtggatatggacgtggtgc

SEQ ID NO: 95327 - DNA, 20 bp, Artificial Sequence
  MKO10095327_B_Kptn
  gRNA
actcacctgcaatagagtcc

SEQ ID NO: 95328 - DNA, 20 bp, Artificial Sequence
  MKO10095328_B_Kptn
  gRNA
tccttgtagagatgaatagc

SEQ ID NO: 95329 - DNA, 20 bp, Artificial Sequence
  MKO10095329_B_Kptn
  gRNA
tacaacctggactctattgc

SEQ ID NO: 95330 - DNA, 20 bp, Artificial Sequence
  MKO10095330_B_Kras
  gRNA
aatcacacttattccctacc

SEQ ID NO: 95331 - DNA, 20 bp, Artificial Sequence
  MKO10095331_B_Kras
  gRNA
cctccccagttctcatgtac

SEQ ID NO: 95332 - DNA, 20 bp, Artificial Sequence
  MKO10095332_B_Kras
  gRNA
tctcgacacagcaggtcaag

SEQ ID NO: 95333 - DNA, 20 bp, Artificial Sequence
  MKO10095333_B_Krba1
  gRNA
taagggacaaaaaccccatt

SEQ ID NO: 95334 - DNA, 20 bp, Artificial Sequence
  MKO10095334_B_Krba1
  gRNA
cctgggaactatgctccaaa

SEQ ID NO: 95335 - DNA, 20 bp, Artificial Sequence
  MKO10095335_B_Krba1
  gRNA
tctccggaagagaattgagc

SEQ ID NO: 95336 - DNA, 20 bp, Artificial Sequence
  MKO10095336_B_Krcc1
  gRNA
ctttgggaccagtctattct

SEQ ID NO: 95337 - DNA, 20 bp, Artificial Sequence
  MKO10095337_B_Krcc1
  gRNA
tgtgaactactgcatgatct

SEQ ID NO: 95338 - DNA, 20 bp, Artificial Sequence
  MKO10095338_B_Krcc1
  gRNA
agtcttatcttgtcatgagc

SEQ ID NO: 95339 - DNA, 20 bp, Artificial Sequence
  MKO10095339_B_Kremen1
  gRNA
tcagcgtgttgtacggatgc

SEQ ID NO: 95340 - DNA, 20 bp, Artificial Sequence
  MKO10095340_B_Kremen1
  gRNA
agcatgaggacggagtctac

SEQ ID NO: 95341 - DNA, 20 bp, Artificial Sequence
  MKO10095341_B_Kremen1
  gRNA
gaccacacgcagccctgcgg

SEQ ID NO: 95342 - DNA, 20 bp, Artificial Sequence
  MKO10095342_B_Kremen2
  gRNA
ggacgactaggcatctatga

SEQ ID NO: 95343 - DNA, 20 bp, Artificial Sequence
  MKO10095343_B_Kremen2
  gRNA
tgtgcagccctggtgctacg

SEQ ID NO: 95344 - DNA, 20 bp, Artificial Sequence
  MKO10095344_B_Kremen2
  gRNA
tgtctctgccacgtagcacc

SEQ ID NO: 95345 - DNA, 20 bp, Artificial Sequence
  MKO10095345_B_Kri1
  gRNA
aggagccgccagcagccttg

SEQ ID NO: 95346 - DNA, 20 bp, Artificial Sequence
  MKO10095346_B_Kri1
  gRNA
gcatctttctggtaaattcg

SEQ ID NO: 95347 - DNA, 20 bp, Artificial Sequence
  MKO10095347_B_Kri1
  gRNA
ctaggaatttgatccccagc

SEQ ID NO: 95348 - DNA, 20 bp, Artificial Sequence
  MKO10095348_B_Krit1
  gRNA
aagtgttgcaaagtgagtac

SEQ ID NO: 95349 - DNA, 20 bp, Artificial Sequence
  MKO10095349_B_Krit1
  gRNA
ttgcatgaagttcccattga

SEQ ID NO: 95350 - DNA, 20 bp, Artificial Sequence
  MKO10095350_B_Krit1
  gRNA
accaatttctcctgcaaacc

SEQ ID NO: 95351 - DNA, 20 bp, Artificial Sequence
  MKO10095351_B_Krr1
  gRNA
gtagcatgttaaagcaacgc

SEQ ID NO: 95352 - DNA, 20 bp, Artificial Sequence
  MKO10095352_B_Krr1
  gRNA
ctgttcaaaggaaacgctcc

SEQ ID NO: 95353 - DNA, 20 bp, Artificial Sequence
  MKO10095353_B_Krr1
  gRNA
ccatgacgtagcagtttgtc

SEQ ID NO: 95354 - DNA, 20 bp, Artificial Sequence
  MKO10095354_B_Krt10
  gRNA
tttctgcaagttgttcgtat

SEQ ID NO: 95355 - DNA, 20 bp, Artificial Sequence
  MKO10095355_B_Krt10
  gRNA
ttgcttcagatacgagaatg

SEQ ID NO: 95356 - DNA, 20 bp, Artificial Sequence
  MKO10095356_B_Krt10
  gRNA
cgaaagtctgaacgaagagc

SEQ ID NO: 95357 - DNA, 20 bp, Artificial Sequence
  MKO10095357_B_Krt12
  gRNA
accttggtgagatccactcc

SEQ ID NO: 95358 - DNA, 20 bp, Artificial Sequence
  MKO10095358_B_Krt12
  gRNA
gccttgcgttgtcaatctgc

SEQ ID NO: 95359 - DNA, 20 bp, Artificial Sequence
  MKO10095359_B_Krt12
  gRNA
atttctacattgacctcacc

SEQ ID NO: 95360 - DNA, 20 bp, Artificial Sequence
  MKO10095360_B_Krt13
  gRNA
gactctggctaagactgacc

SEQ ID NO: 95361 - DNA, 20 bp, Artificial Sequence
  MKO10095361_B_Krt13
  gRNA
gctgaccttgcgccagagcg

SEQ ID NO: 95362 - DNA, 20 bp, Artificial Sequence
  MKO10095362_B_Krt13
  gRNA
cagatggtaccatgctcagc

SEQ ID NO: 95363 - DNA, 20 bp, Artificial Sequence
  MKO10095363_B_Krt14
  gRNA
gatggacgccgcccctggtg

SEQ ID NO: 95364 - DNA, 20 bp, Artificial Sequence
  MKO10095364_B_Krt14
  gRNA
gcagatcgacaatgcccgcc

SEQ ID NO: 95365 - DNA, 20 bp, Artificial Sequence
  MKO10095365_B_Krt14
  gRNA
gcatccgtaccatgctgagc

SEQ ID NO: 95366 - DNA, 20 bp, Artificial Sequence
  MKO10095366_B_Krt15
  gRNA
cggcctccacgccctgacgc

SEQ ID NO: 95367 - DNA, 20 bp, Artificial Sequence
  MKO10095367_B_Krt15
  gRNA
ctattgcagagaaaaaccgt

SEQ ID NO: 95368 - DNA, 20 bp, Artificial Sequence
  MKO10095368_B_Krt15
  gRNA
gaatgagctgaccctgcgtc

SEQ ID NO: 95369 - DNA, 20 bp, Artificial Sequence
  MKO10095369_B_Krt16
  gRNA
gaccctgtccagagctgacc

SEQ ID NO: 95370 - DNA, 20 bp, Artificial Sequence
  MKO10095370_B_Krt16
  gRNA
cctaggagatgcttgccttg

SEQ ID NO: 95371 - DNA, 20 bp, Artificial Sequence
  MKO10095371_B_Krt16
  gRNA
ccccacctttctcaggaacc

SEQ ID NO: 95372 - DNA, 20 bp, Artificial Sequence
  MKO10095372_B_Krt17
  gRNA
ccagatccttgtggccaccg

SEQ ID NO: 95373 - DNA, 20 bp, Artificial Sequence
  MKO10095373_B_Krt17
  gRNA
cacctcgcggttcagctcct

SEQ ID NO: 95374 - DNA, 20 bp, Artificial Sequence
  MKO10095374_B_Krt17
  gRNA
gatgcagattgagaatctca

SEQ ID NO: 95375 - DNA, 20 bp, Artificial Sequence
  MKO10095375_B_Krt18
  gRNA
cgacatccatggactccgca

SEQ ID NO: 95376 - DNA, 20 bp, Artificial Sequence
  MKO10095376_B_Krt18
  gRNA
tctgagccagcgcttcatac

SEQ ID NO: 95377 - DNA, 20 bp, Artificial Sequence
  MKO10095377_B_Krt18
  gRNA
cttggactccatgaaaaacc

SEQ ID NO: 95378 - DNA, 20 bp, Artificial Sequence
  MKO10095378_B_Krt19
  gRNA
atcttggctaggtcgacacc

SEQ ID NO: 95379 - DNA, 20 bp, Artificial Sequence
  MKO10095379_B_Krt19
  gRNA
tctgcatacccgagcaaggt

SEQ ID NO: 95380 - DNA, 20 bp, Artificial Sequence
  MKO10095380_B_Krt19
  gRNA
gtcaatctgtaggacaatct

SEQ ID NO: 95381 - DNA, 20 bp, Artificial Sequence
  MKO10095381_B_Krt1
  gRNA
tggtcctgtactcttccacc

SEQ ID NO: 95382 - DNA, 20 bp, Artificial Sequence
  MKO10095382_B_Krt1
  gRNA
aggtaccttgctctggtaaa

SEQ ID NO: 95383 - DNA, 20 bp, Artificial Sequence
  MKO10095383_B_Krt1
  gRNA
cttggcctgaagctcaactt

SEQ ID NO: 95384 - DNA, 20 bp, Artificial Sequence
  MKO10095384_B_Krt20
  gRNA
aggaagttgaggttcttcgc

SEQ ID NO: 95385 - DNA, 20 bp, Artificial Sequence
  MKO10095385_B_Krt20
  gRNA
gagacgcacctaccagaacc

SEQ ID NO: 95386 - DNA, 20 bp, Artificial Sequence
  MKO10095386_B_Krt20
  gRNA
aggattcgaggttcaagtca

SEQ ID NO: 95387 - DNA, 20 bp, Artificial Sequence
  MKO10095387_B_Krt222
  gRNA
tgcttctcaacacgaagatg

SEQ ID NO: 95388 - DNA, 20 bp, Artificial Sequence
  MKO10095388_B_Krt222
  gRNA
agatattatggttgtatcca

SEQ ID NO: 95389 - DNA, 20 bp, Artificial Sequence
  MKO10095389_B_Krt222
  gRNA
ttacttactgaatggtgccg

SEQ ID NO: 95390 - DNA, 20 bp, Artificial Sequence
  MKO10095390_B_Krt23
  gRNA
ggccctagagattgacctgc

SEQ ID NO: 95391 - DNA, 20 bp, Artificial Sequence
  MKO10095391_B_Krt23
  gRNA
gtgaaggtggacactactcc

SEQ ID NO: 95392 - DNA, 20 bp, Artificial Sequence
  MKO10095392_B_Krt23
  gRNA
acagatagtggacggtaaga

SEQ ID NO: 95393 - DNA, 20 bp, Artificial Sequence
  MKO10095393_B_Krt24
  gRNA
ttgcgccaggagtgaagtaa

SEQ ID NO: 95394 - DNA, 20 bp, Artificial Sequence
  MKO10095394_B_Krt24
  gRNA
gatggccgagcagaaccgcc

SEQ ID NO: 95395 - DNA, 20 bp, Artificial Sequence
  MKO10095395_B_Krt24
  gRNA
caattccattacttcactcc

SEQ ID NO: 95396 - DNA, 20 bp, Artificial Sequence
  MKO10095396_B_Krt25
  gRNA
gaagcgaacgctccaaaccc

SEQ ID NO: 95397 - DNA, 20 bp, Artificial Sequence
  MKO10095397_B_Krt25
  gRNA
gtcaatctgcagtacagcgt

SEQ ID NO: 95398 - DNA, 20 bp, Artificial Sequence
  MKO10095398_B_Krt25
  gRNA
caacatgagagctgagtatg

SEQ ID NO: 95399 - DNA, 20 bp, Artificial Sequence
  MKO10095399_B_Krt26
  gRNA
gctcgtccaacactctgcga

SEQ ID NO: 95400 - DNA, 20 bp, Artificial Sequence
  MKO10095400_B_Krt26
  gRNA
gtggttctgcaaaatgcatc

SEQ ID NO: 95401 - DNA, 20 bp, Artificial Sequence
  MKO10095401_B_Krt26
  gRNA
gatgaacgcagcccccagcg

SEQ ID NO: 95402 - DNA, 20 bp, Artificial Sequence
  MKO10095402_B_Krt27
  gRNA
caacatgagagccgagtacg

SEQ ID NO: 95403 - DNA, 20 bp, Artificial Sequence
  MKO10095403_B_Krt27
  gRNA
cagcagatttcagacgatgc

SEQ ID NO: 95404 - DNA, 20 bp, Artificial Sequence
  MKO10095404_B_Krt27
  gRNA
aaatgacaacgcaagactga

SEQ ID NO: 95405 - DNA, 20 bp, Artificial Sequence
  MKO10095405_B_Krt28
  gRNA
tgatgtctgcctcgacattt

SEQ ID NO: 95406 - DNA, 20 bp, Artificial Sequence
  MKO10095406_B_Krt28
  gRNA
aaagtcctgcagtgcgcagc

SEQ ID NO: 95407 - DNA, 20 bp, Artificial Sequence
  MKO10095407_B_Krt28
  gRNA
cacccttcaccaaaatgtcg

SEQ ID NO: 95408 - DNA, 20 bp, Artificial Sequence
  MKO10095408_B_Krt2
  gRNA
aggcagccgcaccacaaacc

SEQ ID NO: 95409 - DNA, 20 bp, Artificial Sequence
  MKO10095409_B_Krt2
  gRNA
ctgtgctagtatgtccagcc

SEQ ID NO: 95410 - DNA, 20 bp, Artificial Sequence
  MKO10095410_B_Krt2
  gRNA
gatgatcgcccataagagca

SEQ ID NO: 95411 - DNA, 20 bp, Artificial Sequence
  MKO10095411_B_Krt31
  gRNA
cattctctgatttgctgcac

SEQ ID NO: 95412 - DNA, 20 bp, Artificial Sequence
  MKO10095412_B_Krt31
  gRNA
cctccaggtcagacttgcac

SEQ ID NO: 95413 - DNA, 20 bp, Artificial Sequence
  MKO10095413_B_Krt31
  gRNA
gagacgcacagtcaacgccc

SEQ ID NO: 95414 - DNA, 20 bp, Artificial Sequence
  MKO10095414_B_Krt32
  gRNA
gagtattgactgttcgtctc

SEQ ID NO: 95415 - DNA, 20 bp, Artificial Sequence
  MKO10095415_B_Krt32
  gRNA
cctctagatcagccttatta

SEQ ID NO: 95416 - DNA, 20 bp, Artificial Sequence
  MKO10095416_B_Krt32
  gRNA
ggctcaagtagagtccctga

SEQ ID NO: 95417 - DNA, 20 bp, Artificial Sequence
  MKO10095417_B_Krt33a
  gRNA
gtggcaaatctgagaacgcc

SEQ ID NO: 95418 - DNA, 20 bp, Artificial Sequence
  MKO10095418_B_Krt33a
  gRNA
gctgcaggcccagcatgaac

SEQ ID NO: 95419 - DNA, 20 bp, Artificial Sequence
  MKO10095419_B_Krt33a
  gRNA
tctcgttgagtactcggttc

SEQ ID NO: 95420 - DNA, 20 bp, Artificial Sequence
  MKO10095420_B_Krt33b
  gRNA
gtgtctcaagcaaaaccatg

SEQ ID NO: 95421 - DNA, 20 bp, Artificial Sequence
  MKO10095421_B_Krt33b
  gRNA
cactacacaccatgctgtgc

SEQ ID NO: 95422 - DNA, 20 bp, Artificial Sequence
  MKO10095422_B_Krt33b
  gRNA
tcagctcgatgatctctgcc

SEQ ID NO: 95423 - DNA, 20 bp, Artificial Sequence
  MKO10095423_B_Krt34
  gRNA
gaccctctgcaagtctgact

SEQ ID NO: 95424 - DNA, 20 bp, Artificial Sequence
  MKO10095424_B_Krt34
  gRNA
aagacgcacagtcaacgccc

SEQ ID NO: 95425 - DNA, 20 bp, Artificial Sequence
  MKO10095425_B_Krt34
  gRNA
cttggtcctgaagtcatcag

SEQ ID NO: 95426 - DNA, 20 bp, Artificial Sequence
  MKO10095426_B_Krt35
  gRNA
tccccagactctttgcagca

SEQ ID NO: 95427 - DNA, 20 bp, Artificial Sequence
  MKO10095427_B_Krt35
  gRNA
tgcacagagtcagatcatcc

SEQ ID NO: 95428 - DNA, 20 bp, Artificial Sequence
  MKO10095428_B_Krt35
  gRNA
gagacgcactgtcaactctc

SEQ ID NO: 95429 - DNA, 20 bp, Artificial Sequence
  MKO10095429_B_Krt36
  gRNA
gcgatgccagtatgagacgc

SEQ ID NO: 95430 - DNA, 20 bp, Artificial Sequence
  MKO10095430_B_Krt36
  gRNA
ggagttgtccctgcgacagc

SEQ ID NO: 95431 - DNA, 20 bp, Artificial Sequence
  MKO10095431_B_Krt36
  gRNA
tcagctcaatgatctctgtc

SEQ ID NO: 95432 - DNA, 20 bp, Artificial Sequence
  MKO10095432_B_Krt39
  gRNA
ctcaatctcgagggcactta

SEQ ID NO: 95433 - DNA, 20 bp, Artificial Sequence
  MKO10095433_B_Krt39
  gRNA
gtgcctcaaaacgaaccatg

SEQ ID NO: 95434 - DNA, 20 bp, Artificial Sequence
  MKO10095434_B_Krt39
  gRNA
gtcaatttgtgagaccagtc

SEQ ID NO: 95435 - DNA, 20 bp, Artificial Sequence
  MKO10095435_B_Krt40
  gRNA
catctttcatagactccacg

SEQ ID NO: 95436 - DNA, 20 bp, Artificial Sequence
  MKO10095436_B_Krt40
  gRNA
cgccaagctgctcacgaagc

SEQ ID NO: 95437 - DNA, 20 bp, Artificial Sequence
  MKO10095437_B_Krt40
  gRNA
tttgcagttgtccacctgaa

SEQ ID NO: 95438 - DNA, 20 bp, Artificial Sequence
  MKO10095438_B_Krt42
  gRNA
ggagctccgtgatctctgtc

SEQ ID NO: 95439 - DNA, 20 bp, Artificial Sequence
  MKO10095439_B_Krt42
  gRNA
gcagattgacaacgctcgcc

SEQ ID NO: 95440 - DNA, 20 bp, Artificial Sequence
  MKO10095440_B_Krt42
  gRNA
ggtgggcggggacgtcaatg

SEQ ID NO: 95441 - DNA, 20 bp, Artificial Sequence
  MKO10095441_B_Krt4
  gRNA
cctctgcgatgatgccatcc

SEQ ID NO: 95442 - DNA, 20 bp, Artificial Sequence
  MKO10095442_B_Krt4
  gRNA
atggcatcatcgcagaggtc

SEQ ID NO: 95443 - DNA, 20 bp, Artificial Sequence
  MKO10095443_B_Krt4
  gRNA
agctgcagagaatgacttcg

SEQ ID NO: 95444 - DNA, 20 bp, Artificial Sequence
  MKO10095444_B_Krt5
  gRNA
tgccaaccgcagccgaacag

SEQ ID NO: 95445 - DNA, 20 bp, Artificial Sequence
  MKO10095445_B_Krt5
  gRNA
actcagcctctgttcggctg

SEQ ID NO: 95446 - DNA, 20 bp, Artificial Sequence
  MKO10095446_B_Krt5
  gRNA
taacaacctccgtagacagc

SEQ ID NO: 95447 - DNA, 20 bp, Artificial Sequence
  MKO10095447_B_Krt6a
  gRNA
tgaattcgtgaccctgaaga

SEQ ID NO: 95448 - DNA, 20 bp, Artificial Sequence
  MKO10095448_B_Krt6a
  gRNA
tgttcctcagctctgagtcc

SEQ ID NO: 95449 - DNA, 20 bp, Artificial Sequence
  MKO10095449_B_Krt6a
  gRNA
tcacatctcagacacatctg

SEQ ID NO: 95450 - DNA, 20 bp, Artificial Sequence
  MKO10095450_B_Krt6b
  gRNA
tgttcctcagctctgagtcc

SEQ ID NO: 95451 - DNA, 20 bp, Artificial Sequence
  MKO10095451_B_Krt6b
  gRNA
tgaatttgtaaccgtgaaaa

SEQ ID NO: 95452 - DNA, 20 bp, Artificial Sequence
  MKO10095452_B_Krt6b
  gRNA
tcacatctcagacacatctg

SEQ ID NO: 95453 - DNA, 20 bp, Artificial Sequence
  MKO10095453_B_Krt71
  gRNA
cattctctgcagctgtccgc

SEQ ID NO: 95454 - DNA, 20 bp, Artificial Sequence
  MKO10095454_B_Krt71
  gRNA
tgccaacaaggtggaactgc

SEQ ID NO: 95455 - DNA, 20 bp, Artificial Sequence
  MKO10095455_B_Krt71
  gRNA
caaggtggacaccatggacc

SEQ ID NO: 95456 - DNA, 20 bp, Artificial Sequence
  MKO10095456_B_Krt72
  gRNA
cagctgccggttattgtcca

SEQ ID NO: 95457 - DNA, 20 bp, Artificial Sequence
  MKO10095457_B_Krt72
  gRNA
ctgatgtaactctcatgcac

SEQ ID NO: 95458 - DNA, 20 bp, Artificial Sequence
  MKO10095458_B_Krt72
  gRNA
tggacctaaacaactccaag

SEQ ID NO: 95459 - DNA, 20 bp, Artificial Sequence
  MKO10095459_B_Krt73
  gRNA
actcggagctgaggggcatg

SEQ ID NO: 95460 - DNA, 20 bp, Artificial Sequence
  MKO10095460_B_Krt73
  gRNA
caatgtcctcgtactgagct

SEQ ID NO: 95461 - DNA, 20 bp, Artificial Sequence
  MKO10095461_B_Krt73
  gRNA
ctgatgtgggcctcataaac

SEQ ID NO: 95462 - DNA, 20 bp, Artificial Sequence
  MKO10095462_B_Krt75
  gRNA
aggacattgccaaccgaagc

SEQ ID NO: 95463 - DNA, 20 bp, Artificial Sequence
  MKO10095463_B_Krt75
  gRNA
agacgaaattaacaagcgtg

SEQ ID NO: 95464 - DNA, 20 bp, Artificial Sequence
  MKO10095464_B_Krt75
  gRNA
ctgaccagatcaacttctac

SEQ ID NO: 95465 - DNA, 20 bp, Artificial Sequence
  MKO10095465_B_Krt76
  gRNA
cactgacatgactctgtatc

SEQ ID NO: 95466 - DNA, 20 bp, Artificial Sequence
  MKO10095466_B_Krt76
  gRNA
cagatgaaatcaactttctg

SEQ ID NO: 95467 - DNA, 20 bp, Artificial Sequence
  MKO10095467_B_Krt76
  gRNA
tggagctttcatgaacaaag

SEQ ID NO: 95468 - DNA, 20 bp, Artificial Sequence
  MKO10095468_B_Krt77
  gRNA
tgttctttaggtgcggttcc

SEQ ID NO: 95469 - DNA, 20 bp, Artificial Sequence
  MKO10095469_B_Krt77
  gRNA
cccatacagtgtgtctactt

SEQ ID NO: 95470 - DNA, 20 bp, Artificial Sequence
  MKO10095470_B_Krt77
  gRNA
taccaatgtcatcttgtcaa

SEQ ID NO: 95471 - DNA, 20 bp, Artificial Sequence
  MKO10095471_B_Krt78
  gRNA
aaacctgcctagcccgactc

SEQ ID NO: 95472 - DNA, 20 bp, Artificial Sequence
  MKO10095472_B_Krt78
  gRNA
ctgtgcccaggacgtggatg

SEQ ID NO: 95473 - DNA, 20 bp, Artificial Sequence
  MKO10095473_B_Krt78
  gRNA
tttccagagcaagatggatt

SEQ ID NO: 95474 - DNA, 20 bp, Artificial Sequence
  MKO10095474_B_Krt79
  gRNA
caccaacgtgatactgtcca

SEQ ID NO: 95475 - DNA, 20 bp, Artificial Sequence
  MKO10095475_B_Krt79
  gRNA
ggatgtagatgccgcataca

SEQ ID NO: 95476 - DNA, 20 bp, Artificial Sequence
  MKO10095476_B_Krt79
  gRNA
aatcaacaaacgcactgccc

SEQ ID NO: 95477 - DNA, 20 bp, Artificial Sequence
  MKO10095477_B_Krt7
  gRNA
ggatgccgcctacacgaaca

SEQ ID NO: 95478 - DNA, 20 bp, Artificial Sequence
  MKO10095478_B_Krt7
  gRNA
ccagcttccccgaatctttg

SEQ ID NO: 95479 - DNA, 20 bp, Artificial Sequence
  MKO10095479_B_Krt7
  gRNA
acccctccaggtacgcttcc

SEQ ID NO: 95480 - DNA, 20 bp, Artificial Sequence
  MKO10095480_B_Krt80
  gRNA
gatctccaagcgcacagacc

SEQ ID NO: 95481 - DNA, 20 bp, Artificial Sequence
  MKO10095481_B_Krt80
  gRNA
accaactgctggagacccga

SEQ ID NO: 95482 - DNA, 20 bp, Artificial Sequence
  MKO10095482_B_Krt80
  gRNA
aaactccaggtctgtgcgct

SEQ ID NO: 95483 - DNA, 20 bp, Artificial Sequence
  MKO10095483_B_Krt81
  gRNA
cagagccacaaactcattct

SEQ ID NO: 95484 - DNA, 20 bp, Artificial Sequence
  MKO10095484_B_Krt81
  gRNA
ctacctgcgcaagtcagatc

SEQ ID NO: 95485 - DNA, 20 bp, Artificial Sequence
  MKO10095485_B_Krt81
  gRNA
cctcgtcatacattctcctc

SEQ ID NO: 95486 - DNA, 20 bp, Artificial Sequence
  MKO10095486_B_Krt82
  gRNA
ccgtgaatacctcctcaaac

SEQ ID NO: 95487 - DNA, 20 bp, Artificial Sequence
  MKO10095487_B_Krt82
  gRNA
ccttacccggcactggtacc

SEQ ID NO: 95488 - DNA, 20 bp, Artificial Sequence
  MKO10095488_B_Krt82
  gRNA
gacaaactcattctcagcac

SEQ ID NO: 95489 - DNA, 20 bp, Artificial Sequence
  MKO10095489_B_Krt83
  gRNA
agccgagctcaaccatgtgc

SEQ ID NO: 95490 - DNA, 20 bp, Artificial Sequence
  MKO10095490_B_Krt83
  gRNA
cacaaattcattctcagaag

SEQ ID NO: 95491 - DNA, 20 bp, Artificial Sequence
  MKO10095491_B_Krt83
  gRNA
actcagcctcagcacggcta

SEQ ID NO: 95492 - DNA, 20 bp, Artificial Sequence
  MKO10095492_B_Krt84
  gRNA
cttccagatcagatttgttc

SEQ ID NO: 95493 - DNA, 20 bp, Artificial Sequence
  MKO10095493_B_Krt84
  gRNA
ctggatcagagtatccacat

SEQ ID NO: 95494 - DNA, 20 bp, Artificial Sequence
  MKO10095494_B_Krt84
  gRNA
ataactatatcaccaacctg

SEQ ID NO: 95495 - DNA, 20 bp, Artificial Sequence
  MKO10095495_B_Krt85
  gRNA
tgctgagctcaaccatgcgc

SEQ ID NO: 95496 - DNA, 20 bp, Artificial Sequence
  MKO10095496_B_Krt85
  gRNA
tgacagatgtgtctgagatg

SEQ ID NO: 95497 - DNA, 20 bp, Artificial Sequence
  MKO10095497_B_Krt85
  gRNA
ttgggtcagagcctctgcgt

SEQ ID NO: 95498 - DNA, 20 bp, Artificial Sequence
  MKO10095498_B_Krt86
  gRNA
cctccaggtctgacttgcgc

SEQ ID NO: 95499 - DNA, 20 bp, Artificial Sequence
  MKO10095499_B_Krt86
  gRNA
cctcttcttgtagccctcca

SEQ ID NO: 95500 - DNA, 20 bp, Artificial Sequence
  MKO10095500_B_Krt86
  gRNA
tctcaccttggtgcggtacc

SEQ ID NO: 95501 - DNA, 20 bp, Artificial Sequence
  MKO10095501_B_Krt8
  gRNA
ctttaccttaatctggtaca

SEQ ID NO: 95502 - DNA, 20 bp, Artificial Sequence
  MKO10095502_B_Krt8
  gRNA
agaccctcaccttcttgatg

SEQ ID NO: 95503 - DNA, 20 bp, Artificial Sequence
  MKO10095503_B_Krt8
  gRNA
ccccatgcaggtgcgcttcc

SEQ ID NO: 95504 - DNA, 20 bp, Artificial Sequence
  MKO10095504_B_Krt9
  gRNA
ttgtcatttgctgctcaatc

SEQ ID NO: 95505 - DNA, 20 bp, Artificial Sequence
  MKO10095505_B_Krt9
  gRNA
ggttatggcgaaatctgatc

SEQ ID NO: 95506 - DNA, 20 bp, Artificial Sequence
  MKO10095506_B_Krt9
  gRNA
gaggaacaacaaaactctcg

SEQ ID NO: 95507 - DNA, 20 bp, Artificial Sequence
  MKO10095507_B_Krtap1-3
  gRNA
ggtgccaccagtggaacatg

SEQ ID NO: 95508 - DNA, 20 bp, Artificial Sequence
  MKO10095508_B_Krtap1-3
  gRNA
ccgtgagctgccgtgttaga

SEQ ID NO: 95509 - DNA, 20 bp, Artificial Sequence
  MKO10095509_B_Krtap1-3
  gRNA
acagaagctagtagcgcagc

SEQ ID NO: 95510 - DNA, 20 bp, Artificial Sequence
  MKO10095510_B_Krtap1-4
  gRNA
acagaaactagtagcgcagc

SEQ ID NO: 95511 - DNA, 20 bp, Artificial Sequence
  MKO10095511_B_Krtap1-4
  gRNA
gaacctggttcttaacagct

SEQ ID NO: 95512 - DNA, 20 bp, Artificial Sequence
  MKO10095512_B_Krtap1-4
  gRNA
gcctgagctgccgtgttaga

SEQ ID NO: 95513 - DNA, 20 bp, Artificial Sequence
  MKO10095513_B_Krtap1-5
  gRNA
tagcctgtcccacagcagct

SEQ ID NO: 95514 - DNA, 20 bp, Artificial Sequence
  MKO10095514_B_Krtap1-5
  gRNA
tatacagctcaccacacagc

SEQ ID NO: 95515 - DNA, 20 bp, Artificial Sequence
  MKO10095515_B_Krtap1-5
  gRNA
tgctgtgctactagcttctg

SEQ ID NO: 95516 - DNA, 20 bp, Artificial Sequence
  MKO10095516_B_Krtap10-10
  gRNA
ccagaatatctggccaccca

SEQ ID NO: 95517 - DNA, 20 bp, Artificial Sequence
  MKO10095517_B_Krtap10-10
  gRNA
tatgaggctgaacccagttg

SEQ ID NO: 95518 - DNA, 20 bp, Artificial Sequence
  MKO10095518_B_Krtap10-10
  gRNA
cctcagagctaagttgacct

SEQ ID NO: 95519 - DNA, 20 bp, Artificial Sequence
  MKO10095519_B_Krtap10-4
  gRNA
ttcctggtgacagctgactt

SEQ ID NO: 95520 - DNA, 20 bp, Artificial Sequence
  MKO10095520_B_Krtap10-4
  gRNA
tttccagtctgactctgacc

SEQ ID NO: 95521 - DNA, 20 bp, Artificial Sequence
  MKO10095521_B_Krtap10-4
  gRNA
gatctctcctcctgcttcct

SEQ ID NO: 95522 - DNA, 20 bp, Artificial Sequence
  MKO10095522_B_Krtap11-1
  gRNA
tctgtcgattgcaagttacc

SEQ ID NO: 95523 - DNA, 20 bp, Artificial Sequence
  MKO10095523_B_Krtap11-1
  gRNA
gcagtgtaacgtcctccaac

SEQ ID NO: 95524 - DNA, 20 bp, Artificial Sequence
  MKO10095524_B_Krtap11-1
  gRNA
cgtgacgcagactgcctgag

SEQ ID NO: 95525 - DNA, 20 bp, Artificial Sequence
  MKO10095525_B_Krtap12-1
  gRNA
ggactagacacacaacagga

SEQ ID NO: 95526 - DNA, 20 bp, Artificial Sequence
  MKO10095526_B_Krtap12-1
  gRNA
tggacacaaagcaggatgcc

SEQ ID NO: 95527 - DNA, 20 bp, Artificial Sequence
  MKO10095527_B_Krtap12-1
  gRNA
ccagccctcctgccccactc

SEQ ID NO: 95528 - DNA, 20 bp, Artificial Sequence
  MKO10095528_B_Krtap13-1
  gRNA
ccagtggctttagaccacaa

SEQ ID NO: 95529 - DNA, 20 bp, Artificial Sequence
  MKO10095529_B_Krtap13-1
  gRNA
gtttccagaatagcagccgt

SEQ ID NO: 95530 - DNA, 20 bp, Artificial Sequence
  MKO10095530_B_Krtap13-1
  gRNA
aacttctcttcccgctccag

SEQ ID NO: 95531 - DNA, 20 bp, Artificial Sequence
  MKO10095531_B_Krtap13
  gRNA
agcttctagagccatagccc

SEQ ID NO: 95532 - DNA, 20 bp, Artificial Sequence
  MKO10095532_B_Krtap13
  gRNA
ggcttcagatctctgaatta

SEQ ID NO: 95533 - DNA, 20 bp, Artificial Sequence
  MKO10095533_B_Krtap13
  gRNA
cagcagctccacaccctgcc

SEQ ID NO: 95534 - DNA, 20 bp, Artificial Sequence
  MKO10095534_B_Krtap14
  gRNA
tactcatgagttcctgtaat

SEQ ID NO: 95535 - DNA, 20 bp, Artificial Sequence
  MKO10095535_B_Krtap14
  gRNA
ctcttaacacagtaggtagt

SEQ ID NO: 95536 - DNA, 20 bp, Artificial Sequence
  MKO10095536_B_Krtap14
  gRNA
aacccctggaaccaaatccc

SEQ ID NO: 95537 - DNA, 20 bp, Artificial Sequence
  MKO10095537_B_Krtap15
  gRNA
aaatgtcttcgccaacattt

SEQ ID NO: 95538 - DNA, 20 bp, Artificial Sequence
  MKO10095538_B_Krtap15
  gRNA
actcagcatcgtgatacacc

SEQ ID NO: 95539 - DNA, 20 bp, Artificial Sequence
  MKO10095539_B_Krtap15
  gRNA
aagctctggcattcgctctc

SEQ ID NO: 95540 - DNA, 20 bp, Artificial Sequence
  MKO10095540_B_Krtap16-1
  gRNA
aacaggatttcagtagaaac

SEQ ID NO: 95541 - DNA, 20 bp, Artificial Sequence
  MKO10095541_B_Krtap16-1
  gRNA
ggctatggaggcttcggata

SEQ ID NO: 95542 - DNA, 20 bp, Artificial Sequence
  MKO10095542_B_Krtap16-1
  gRNA
tctggctatggaggctttgg

SEQ ID NO: 95543 - DNA, 20 bp, Artificial Sequence
  MKO10095543_B_Krtap16-3
  gRNA
tgttatagagaagacatcta

SEQ ID NO: 95544 - DNA, 20 bp, Artificial Sequence
  MKO10095544_B_Krtap16-3
  gRNA
agatgaagccataaattcga

SEQ ID NO: 95545 - DNA, 20 bp, Artificial Sequence
  MKO10095545_B_Krtap16-3
  gRNA
agcactttcctctctaaaga

SEQ ID NO: 95546 - DNA, 20 bp, Artificial Sequence
  MKO10095546_B_Krtap17-1
  gRNA
cagcaattgaggcagtctcc

SEQ ID NO: 95547 - DNA, 20 bp, Artificial Sequence
  MKO10095547_B_Krtap17-1
  gRNA
ggctgcgggtctagctgctg

SEQ ID NO: 95548 - DNA, 20 bp, Artificial Sequence
  MKO10095548_B_Krtap17-1
  gRNA
gccgccaccaccgcagcatc

SEQ ID NO: 95549 - DNA, 20 bp, Artificial Sequence
  MKO10095549_B_Krtap19-1
  gRNA
ggctctgactatggaggcta

SEQ ID NO: 95550 - DNA, 20 bp, Artificial Sequence
  MKO10095550_B_Krtap19-1
  gRNA
aaaatcatgagctactacag

SEQ ID NO: 95551 - DNA, 20 bp, Artificial Sequence
  MKO10095551_B_Krtap19-1
  gRNA
tactatggaggcctgggcta

SEQ ID NO: 95552 - DNA, 20 bp, Artificial Sequence
  MKO10095552_B_Krtap19-3
  gRNA
agccactacagcagctacta

SEQ ID NO: 95553 - DNA, 20 bp, Artificial Sequence
  MKO10095553_B_Krtap19-3
  gRNA
ttcggatatggctctggata

SEQ ID NO: 95554 - DNA, 20 bp, Artificial Sequence
  MKO10095554_B_Krtap19-3
  gRNA
agctgccatagccgtagccc

SEQ ID NO: 95555 - DNA, 20 bp, Artificial Sequence
  MKO10095555_B_Krtap19-4
  gRNA
gtagctgttgtagtaactca

SEQ ID NO: 95556 - DNA, 20 bp, Artificial Sequence
  MKO10095556_B_Krtap19-4
  gRNA
ttcagcctttcagtagaagg

SEQ ID NO: 95557 - DNA, 20 bp, Artificial Sequence
  MKO10095557_B_Krtap19-4
  gRNA
agttactacaacagctacta

SEQ ID NO: 95558 - DNA, 20 bp, Artificial Sequence
  MKO10095558_B_Krtap19-5
  gRNA
gtagctgccgtagtagctca

SEQ ID NO: 95559 - DNA, 20 bp, Artificial Sequence
  MKO10095559_B_Krtap19-5
  gRNA
atccatatcctccataataa

SEQ ID NO: 95560 - DNA, 20 bp, Artificial Sequence
  MKO10095560_B_Krtap19-5
  gRNA
ggaatgcatttcagtagaat

SEQ ID NO: 95561 - DNA, 20 bp, Artificial Sequence
  MKO10095561_B_Krtap19-9b
  gRNA
tacttcagtccctctttcta

SEQ ID NO: 95562 - DNA, 20 bp, Artificial Sequence
  MKO10095562_B_Krtap19-9b
  gRNA
tatggctatggttccagcta

SEQ ID NO: 95563 - DNA, 20 bp, Artificial Sequence
  MKO10095563_B_Krtap19-9b
  gRNA
cttgggggctatggtggcta

SEQ ID NO: 95564 - DNA, 20 bp, Artificial Sequence
  MKO10095564_B_Krtap2-4
  gRNA
cagggcgacacactgtggtc

SEQ ID NO: 95565 - DNA, 20 bp, Artificial Sequence
  MKO10095565_B_Krtap2-4
  gRNA
ggacactgggcggcagcagc

SEQ ID NO: 95566 - DNA, 20 bp, Artificial Sequence
  MKO10095566_B_Krtap2-4
  gRNA
ggtccctgcagcagcagggc

SEQ ID NO: 95567 - DNA, 20 bp, Artificial Sequence
  MKO10095567_B_Krtap20-2
  gRNA
tactatggaggcctgggctg

SEQ ID NO: 95568 - DNA, 20 bp, Artificial Sequence
  MKO10095568_B_Krtap20-2
  gRNA
cctgacaccatgtgttacta

SEQ ID NO: 95569 - DNA, 20 bp, Artificial Sequence
  MKO10095569_B_Krtap20-2
  gRNA
cacagccatagccatagcct

SEQ ID NO: 95570 - DNA, 20 bp, Artificial Sequence
  MKO10095570_B_Krtap21-1
  gRNA
accatgtgctgcaactacta

SEQ ID NO: 95571 - DNA, 20 bp, Artificial Sequence
  MKO10095571_B_Krtap21-1
  gRNA
tatggctccaggtatggctg

SEQ ID NO: 95572 - DNA, 20 bp, Artificial Sequence
  MKO10095572_B_Krtap21-1
  gRNA
tatggctcaggctatggttg

SEQ ID NO: 95573 - DNA, 20 bp, Artificial Sequence
  MKO10095573_B_Krtap22-2
  gRNA
gggctacggctatggtagcc

SEQ ID NO: 95574 - DNA, 20 bp, Artificial Sequence
  MKO10095574_B_Krtap22-2
  gRNA
cacagccatagccgtagccc

SEQ ID NO: 95575 - DNA, 20 bp, Artificial Sequence
  MKO10095575_B_Krtap22-2
  gRNA
ggctatggtggtctgggcta

SEQ ID NO: 95576 - DNA, 20 bp, Artificial Sequence
  MKO10095576_B_Krtap24-1
  gRNA
atcgatcagtagcaatgcag

SEQ ID NO: 95577 - DNA, 20 bp, Artificial Sequence
  MKO10095577_B_Krtap24-1
  gRNA
tgcggggcctgaagattctt

SEQ ID NO: 95578 - DNA, 20 bp, Artificial Sequence
  MKO10095578_B_Krtap24-1
  gRNA
gatgatgtaaaccctacctt

SEQ ID NO: 95579 - DNA, 20 bp, Artificial Sequence
  MKO10095579_B_Krtap26-1
  gRNA
atccaatagctgccgacctc

SEQ ID NO: 95580 - DNA, 20 bp, Artificial Sequence
  MKO10095580_B_Krtap26-1
  gRNA
gtgccaaacacagggatcga

SEQ ID NO: 95581 - DNA, 20 bp, Artificial Sequence
  MKO10095581_B_Krtap26-1
  gRNA
cgtcctgtaagctgtgtatc

SEQ ID NO: 95582 - DNA, 20 bp, Artificial Sequence
  MKO10095582_B_Krtap27-1
  gRNA
cacttggccatgtaacttgc

SEQ ID NO: 95583 - DNA, 20 bp, Artificial Sequence
  MKO10095583_B_Krtap27-1
  gRNA
ctaccaacctgcaagttaca

SEQ ID NO: 95584 - DNA, 20 bp, Artificial Sequence
  MKO10095584_B_Krtap27-1
  gRNA
tagcccagagacaatactgc

SEQ ID NO: 95585 - DNA, 20 bp, Artificial Sequence
  MKO10095585_B_Krtap3-1
  gRNA
ctgaccacctacgtgcagcc

SEQ ID NO: 95586 - DNA, 20 bp, Artificial Sequence
  MKO10095586_B_Krtap3-1
  gRNA
tggtcaggttgatgccactc

SEQ ID NO: 95587 - DNA, 20 bp, Artificial Sequence
  MKO10095587_B_Krtap3-1
  gRNA
gcaagagttgagcagccagc

SEQ ID NO: 95588 - DNA, 20 bp, Artificial Sequence
  MKO10095588_B_Krtap3-2
  gRNA
tcagacaagtcctgccgctg

SEQ ID NO: 95589 - DNA, 20 bp, Artificial Sequence
  MKO10095589_B_Krtap3-2
  gRNA
acacagggctcctcacagcc

SEQ ID NO: 95590 - DNA, 20 bp, Artificial Sequence
  MKO10095590_B_Krtap3-2
  gRNA
gcacctgcccacacaccatt

SEQ ID NO: 95591 - DNA, 20 bp, Artificial Sequence
  MKO10095591_B_Krtap3-3
  gRNA
tcagacaagtcctgccgctg

SEQ ID NO: 95592 - DNA, 20 bp, Artificial Sequence
  MKO10095592_B_Krtap3-3
  gRNA
acacagggctcctcacagcc

SEQ ID NO: 95593 - DNA, 20 bp, Artificial Sequence
  MKO10095593_B_Krtap3-3
  gRNA
gcacctgcccacacaccatt

SEQ ID NO: 95594 - DNA, 20 bp, Artificial Sequence
  MKO10095594_B_Krtap31-1
  gRNA
gctgcaagaccgcctcctgc

SEQ ID NO: 95595 - DNA, 20 bp, Artificial Sequence
  MKO10095595_B_Krtap31-1
  gRNA
gaggcggtcttgcagcagca

SEQ ID NO: 95596 - DNA, 20 bp, Artificial Sequence
  MKO10095596_B_Krtap31-1
  gRNA
ggaggtggtcttgcagcagc

SEQ ID NO: 95597 - DNA, 20 bp, Artificial Sequence
  MKO10095597_B_Krtap31-2
  gRNA
gctgcaagaccacctcctgc

SEQ ID NO: 95598 - DNA, 20 bp, Artificial Sequence
  MKO10095598_B_Krtap31-2
  gRNA
gaggtggtcttgcagcagca

SEQ ID NO: 95599 - DNA, 20 bp, Artificial Sequence
  MKO10095599_B_Krtap31-2
  gRNA
agaggtggcttcgtgcacac

SEQ ID NO: 95600 - DNA, 20 bp, Artificial Sequence
  MKO10095600_B_Krtap4-13
  gRNA
tgggctggcagcacacagac

SEQ ID NO: 95601 - DNA, 20 bp, Artificial Sequence
  MKO10095601_B_Krtap4-13
  gRNA
gcactgaggcctgcagcagc

SEQ ID NO: 95602 - DNA, 20 bp, Artificial Sequence
  MKO10095602_B_Krtap4-13
  gRNA
gcagctggggcggcagcagc

SEQ ID NO: 95603 - DNA, 20 bp, Artificial Sequence
  MKO10095603_B_Krtap4-16
  gRNA
gcggcagcaggtggtctggc

SEQ ID NO: 95604 - DNA, 20 bp, Artificial Sequence
  MKO10095604_B_Krtap4-16
  gRNA
ctggccgcagctctcctggc

SEQ ID NO: 95605 - DNA, 20 bp, Artificial Sequence
  MKO10095605_B_Krtap4-16
  gRNA
tccgcagctggggcggcaag

SEQ ID NO: 95606 - DNA, 20 bp, Artificial Sequence
  MKO10095606_B_Krtap4-1
  gRNA
acaggaaggtcgacagcagc

SEQ ID NO: 95607 - DNA, 20 bp, Artificial Sequence
  MKO10095607_B_Krtap4-1
  gRNA
gctgcagacccagttgctgc

SEQ ID NO: 95608 - DNA, 20 bp, Artificial Sequence
  MKO10095608_B_Krtap4-1
  gRNA
gtgtggcacagcacatgggg

SEQ ID NO: 95609 - DNA, 20 bp, Artificial Sequence
  MKO10095609_B_Krtap4-2
  gRNA
cggcaacaggggctgcagca

SEQ ID NO: 95610 - DNA, 20 bp, Artificial Sequence
  MKO10095610_B_Krtap4-2
  gRNA
gcaactagaaccacagcagc

SEQ ID NO: 95611 - DNA, 20 bp, Artificial Sequence
  MKO10095611_B_Krtap4-2
  gRNA
gcggcagcagggtcggcagc

SEQ ID NO: 95612 - DNA, 20 bp, Artificial Sequence
  MKO10095612_B_Krtap4-6
  gRNA
taccgcccagcgtgctctag

SEQ ID NO: 95613 - DNA, 20 bp, Artificial Sequence
  MKO10095613_B_Krtap4-6
  gRNA
tggtctggcaacagatgggg

SEQ ID NO: 95614 - DNA, 20 bp, Artificial Sequence
  MKO10095614_B_Krtap4-6
  gRNA
gtagcaggtggtcctgcagc

SEQ ID NO: 95615 - DNA, 20 bp, Artificial Sequence
  MKO10095615_B_Krtap4-7
  gRNA
gctgtcgccccagctgctgt

SEQ ID NO: 95616 - DNA, 20 bp, Artificial Sequence
  MKO10095616_B_Krtap4-7
  gRNA
tctgaggagggctgtagcca

SEQ ID NO: 95617 - DNA, 20 bp, Artificial Sequence
  MKO10095617_B_Krtap4-7
  gRNA
tgggctggcagcacgcagac

SEQ ID NO: 95618 - DNA, 20 bp, Artificial Sequence
  MKO10095618_B_Krtap4-8
  gRNA
gcagcagctagaaatgcaac

SEQ ID NO: 95619 - DNA, 20 bp, Artificial Sequence
  MKO10095619_B_Krtap4-8
  gRNA
accatggtcagctcctgttg

SEQ ID NO: 95620 - DNA, 20 bp, Artificial Sequence
  MKO10095620_B_Krtap4-8
  gRNA
gcagctggaaatgcagcagc

SEQ ID NO: 95621 - DNA, 20 bp, Artificial Sequence
  MKO10095621_B_Krtap4-9
  gRNA
gctgccagactacctgctgt

SEQ ID NO: 95622 - DNA, 20 bp, Artificial Sequence
  MKO10095622_B_Krtap4-9
  gRNA
tggtcctacagcaggtagtc

SEQ ID NO: 95623 - DNA, 20 bp, Artificial Sequence
  MKO10095623_B_Krtap4-9
  gRNA
gcaacaagtggtcctgcagc

SEQ ID NO: 95624 - DNA, 20 bp, Artificial Sequence
  MKO10095624_B_Krtap5-1
  gRNA
acacacaggcttgcagcagc

SEQ ID NO: 95625 - DNA, 20 bp, Artificial Sequence
  MKO10095625_B_Krtap5-1
  gRNA
accagaaccatgacctgctg

SEQ ID NO: 95626 - DNA, 20 bp, Artificial Sequence
  MKO10095626_B_Krtap5-1
  gRNA
tcagcagctgtcctgacagc

SEQ ID NO: 95627 - DNA, 20 bp, Artificial Sequence
  MKO10095627_B_Krtap5-2
  gRNA
gaaagtgtcagatcttacac

SEQ ID NO: 95628 - DNA, 20 bp, Artificial Sequence
  MKO10095628_B_Krtap5-2
  gRNA
gcttcccttgcacccaccac

SEQ ID NO: 95629 - DNA, 20 bp, Artificial Sequence
  MKO10095629_B_Krtap5-2
  gRNA
ggtgggtgcaagggaagctg

SEQ ID NO: 95630 - DNA, 20 bp, Artificial Sequence
  MKO10095630_B_Krtap5-3
  gRNA
caaatcatcctatctgtttg

SEQ ID NO: 95631 - DNA, 20 bp, Artificial Sequence
  MKO10095631_B_Krtap5-3
  gRNA
tcctgcccatcacctctaat

SEQ ID NO: 95632 - DNA, 20 bp, Artificial Sequence
  MKO10095632_B_Krtap5-3
  gRNA
gaagaatggatggggctcta

SEQ ID NO: 95633 - DNA, 20 bp, Artificial Sequence
  MKO10095633_B_Krtap5-4
  gRNA
ggaaccacagcctccacagc

SEQ ID NO: 95634 - DNA, 20 bp, Artificial Sequence
  MKO10095634_B_Krtap5-4
  gRNA
gcagcagggtttacagcagc

SEQ ID NO: 95635 - DNA, 20 bp, Artificial Sequence
  MKO10095635_B_Krtap5-4
  gRNA
gcctcctttgcagcccccac

SEQ ID NO: 95636 - DNA, 20 bp, Artificial Sequence
  MKO10095636_B_Krtap5-5
  gRNA
aagggtggctgtggctcctg

SEQ ID NO: 95637 - DNA, 20 bp, Artificial Sequence
  MKO10095637_B_Krtap5-5
  gRNA
accagaaccatgacctgctg

SEQ ID NO: 95638 - DNA, 20 bp, Artificial Sequence
  MKO10095638_B_Krtap5-5
  gRNA
gtaaacctcagatcttgcac

SEQ ID NO: 95639 - DNA, 20 bp, Artificial Sequence
  MKO10095639_B_Krtap6-1
  gRNA
aggagccataaccacagccc

SEQ ID NO: 95640 - DNA, 20 bp, Artificial Sequence
  MKO10095640_B_Krtap6-1
  gRNA
tactatggcggcagaggcta

SEQ ID NO: 95641 - DNA, 20 bp, Artificial Sequence
  MKO10095641_B_Krtap6-1
  gRNA
gtttccgtagtagccacaca

SEQ ID NO: 95642 - DNA, 20 bp, Artificial Sequence
  MKO10095642_B_Krtap6-2
  gRNA
tagatgtaacagccatgttc

SEQ ID NO: 95643 - DNA, 20 bp, Artificial Sequence
  MKO10095643_B_Krtap6-2
  gRNA
tatggctcttactacagatc

SEQ ID NO: 95644 - DNA, 20 bp, Artificial Sequence
  MKO10095644_B_Krtap6-2
  gRNA
gagacgagactgcagatgcc

SEQ ID NO: 95645 - DNA, 20 bp, Artificial Sequence
  MKO10095645_B_Krtap6-5
  gRNA
agcctccatagccatagccc

SEQ ID NO: 95646 - DNA, 20 bp, Artificial Sequence
  MKO10095646_B_Krtap6-5
  gRNA
agcaccatgtgtggctacta

SEQ ID NO: 95647 - DNA, 20 bp, Artificial Sequence
  MKO10095647_B_Krtap6-5
  gRNA
catagccacagcccagtcca

SEQ ID NO: 95648 - DNA, 20 bp, Artificial Sequence
  MKO10095648_B_Krtap7-1
  gRNA
gctacggcagcagcctctac

SEQ ID NO: 95649 - DNA, 20 bp, Artificial Sequence
  MKO10095649_B_Krtap7-1
  gRNA
gttccatagcagggataccc

SEQ ID NO: 95650 - DNA, 20 bp, Artificial Sequence
  MKO10095650_B_Krtap7-1
  gRNA
gcagcagaaatagcgagtca

SEQ ID NO: 95651 - DNA, 20 bp, Artificial Sequence
  MKO10095651_B_Krtap8-1
  gRNA
tagctgccccagtagcatcc

SEQ ID NO: 95652 - DNA, 20 bp, Artificial Sequence
  MKO10095652_B_Krtap8-1
  gRNA
gaagacagagccctcagcgc

SEQ ID NO: 95653 - DNA, 20 bp, Artificial Sequence
  MKO10095653_B_Krtap8-1
  gRNA
ggctatggctacaatggctg

SEQ ID NO: 95654 - DNA, 20 bp, Artificial Sequence
  MKO10095654_B_Krtap9-1
  gRNA
ccaacatgtgtttgtgtgcc

SEQ ID NO: 95655 - DNA, 20 bp, Artificial Sequence
  MKO10095655_B_Krtap9-1
  gRNA
tccagctgttgtgagccctg

SEQ ID NO: 95656 - DNA, 20 bp, Artificial Sequence
  MKO10095656_B_Krtap9-1
  gRNA
aacagctggacccacagcct

SEQ ID NO: 95657 - DNA, 20 bp, Artificial Sequence
  MKO10095657_B_Krtap9-3
  gRNA
ttgccagcccagctgttgtg

SEQ ID NO: 95658 - DNA, 20 bp, Artificial Sequence
  MKO10095658_B_Krtap9-3
  gRNA
tgctgtgctacaagcttctg

SEQ ID NO: 95659 - DNA, 20 bp, Artificial Sequence
  MKO10095659_B_Krtap9-3
  gRNA
tttgggggtggcattggctg

SEQ ID NO: 95660 - DNA, 20 bp, Artificial Sequence
  MKO10095660_B_Krtap9-5
  gRNA
tggaaagttgatcagtagca

SEQ ID NO: 95661 - DNA, 20 bp, Artificial Sequence
  MKO10095661_B_Krtap9-5
  gRNA
tgctccccttgcagtcagct

SEQ ID NO: 95662 - DNA, 20 bp, Artificial Sequence
  MKO10095662_B_Krtap9-5
  gRNA
acagactggtttgcaacaag

SEQ ID NO: 95663 - DNA, 20 bp, Artificial Sequence
  MKO10095663_B_Krtcap2
  gRNA
accgagtttgtgtcaccact

SEQ ID NO: 95664 - DNA, 20 bp, Artificial Sequence
  MKO10095664_B_Krtcap2
  gRNA
cacccaggccttcaataatc

SEQ ID NO: 95665 - DNA, 20 bp, Artificial Sequence
  MKO10095665_B_Krtcap2
  gRNA
cttgcccttgccagtgattt

SEQ ID NO: 95666 - DNA, 20 bp, Artificial Sequence
  MKO10095666_B_Krtcap3
  gRNA
ccctggtccagcggtatgga

SEQ ID NO: 95667 - DNA, 20 bp, Artificial Sequence
  MKO10095667_B_Krtcap3
  gRNA
gcttccgcagagcgtttcag

SEQ ID NO: 95668 - DNA, 20 bp, Artificial Sequence
  MKO10095668_B_Krtcap3
  gRNA
tcaccagtcgtgggcgaaga

SEQ ID NO: 95669 - DNA, 20 bp, Artificial Sequence
  MKO10095669_B_Krtdap
  gRNA
aagaagtcccagttaatgaa

SEQ ID NO: 95670 - DNA, 20 bp, Artificial Sequence
  MKO10095670_B_Krtdap
  gRNA
actgtagcctcttaaagttc

SEQ ID NO: 95671 - DNA, 20 bp, Artificial Sequence
  MKO10095671_B_Krtdap
  gRNA
atgagttcctgaactttaag

SEQ ID NO: 95672 - DNA, 20 bp, Artificial Sequence
  MKO10095672_B_Ksr1
  gRNA
ttagtgtgaccccaagcgac

SEQ ID NO: 95673 - DNA, 20 bp, Artificial Sequence
  MKO10095673_B_Ksr1
  gRNA
ccaggccagtcaccttccga

SEQ ID NO: 95674 - DNA, 20 bp, Artificial Sequence
  MKO10095674_B_Ksr1
  gRNA
ccagcgccgcagcatctcct

SEQ ID NO: 95675 - DNA, 20 bp, Artificial Sequence
  MKO10095675_B_Ksr2
  gRNA
gggcccgtggcccacaaaga

SEQ ID NO: 95676 - DNA, 20 bp, Artificial Sequence
  MKO10095676_B_Ksr2
  gRNA
ccggatcgtggatgtccgaa

SEQ ID NO: 95677 - DNA, 20 bp, Artificial Sequence
  MKO10095677_B_Ksr2
  gRNA
ccaaccaggaagagtgcgcc

SEQ ID NO: 95678 - DNA, 20 bp, Artificial Sequence
  MKO10095678_B_Kti12
  gRNA
atcccagcggttccgggagt

SEQ ID NO: 95679 - DNA, 20 bp, Artificial Sequence
  MKO10095679_B_Kti12
  gRNA
cgtccaccacatacaccgcg

SEQ ID NO: 95680 - DNA, 20 bp, Artificial Sequence
  MKO10095680_B_Kti12
  gRNA
cagaactcccccgttggcta

SEQ ID NO: 95681 - DNA, 20 bp, Artificial Sequence
  MKO10095681_B_Ktn1
  gRNA
gatggcaccttcaaaagagc

SEQ ID NO: 95682 - DNA, 20 bp, Artificial Sequence
  MKO10095682_B_Ktn1
  gRNA
tcgaataaaggagaactgag

SEQ ID NO: 95683 - DNA, 20 bp, Artificial Sequence
  MKO10095683_B_Ktn1
  gRNA
catcaagacactaagcaaga

SEQ ID NO: 95684 - DNA, 20 bp, Artificial Sequence
  MKO10095684_B_Kxd1
  gRNA
ggagcccgtgctctgctccg

SEQ ID NO: 95685 - DNA, 20 bp, Artificial Sequence
  MKO10095685_B_Kxd1
  gRNA
tgtgataggtcctcaaagcc

SEQ ID NO: 95686 - DNA, 20 bp, Artificial Sequence
  MKO10095686_B_Kxd1
  gRNA
gcggccacagaagacccttg

SEQ ID NO: 95687 - DNA, 20 bp, Artificial Sequence
  MKO10095687_B_Kynu
  gRNA
gaaatccttacatgatcaga

SEQ ID NO: 95688 - DNA, 20 bp, Artificial Sequence
  MKO10095688_B_Kynu
  gRNA
tctttaagcctactccaaag

SEQ ID NO: 95689 - DNA, 20 bp, Artificial Sequence
  MKO10095689_B_Kynu
  gRNA
tgatgatgccatctatttcc

SEQ ID NO: 95690 - DNA, 20 bp, Artificial Sequence
  MKO10095690_B_Ky
  gRNA
aatccggaagtggcaagagt

SEQ ID NO: 95691 - DNA, 20 bp, Artificial Sequence
  MKO10095691_B_Ky
  gRNA
ccgtgggcatctttccctcc

SEQ ID NO: 95692 - DNA, 20 bp, Artificial Sequence
  MKO10095692_B_Ky
  gRNA
aagagaacttcttaagcagc

SEQ ID NO: 95693 - DNA, 20 bp, Artificial Sequence
  MKO10095693_B_L1cam
  gRNA
tacagtctccttcggccact

SEQ ID NO: 95694 - DNA, 20 bp, Artificial Sequence
  MKO10095694_B_L1cam
  gRNA
ggagactgttccgtgatgac

SEQ ID NO: 95695 - DNA, 20 bp, Artificial Sequence
  MKO10095695_B_L1cam
  gRNA
cacccagtgcagccccactt

SEQ ID NO: 95696 - DNA, 20 bp, Artificial Sequence
  MKO10095696_B_L1td1
  gRNA
ctgcctgccgacatccagcg

SEQ ID NO: 95697 - DNA, 20 bp, Artificial Sequence
  MKO10095697_B_L1td1
  gRNA
aacttctagggtaaaacgct

SEQ ID NO: 95698 - DNA, 20 bp, Artificial Sequence
  MKO10095698_B_L1td1
  gRNA
cttctacctctttgatgaac

SEQ ID NO: 95699 - DNA, 20 bp, Artificial Sequence
  MKO10095699_B_L2hgdh
  gRNA
ggccttcgactccattctgc

SEQ ID NO: 95700 - DNA, 20 bp, Artificial Sequence
  MKO10095700_B_L2hgdh
  gRNA
tccctacaggcaatgtggca

SEQ ID NO: 95701 - DNA, 20 bp, Artificial Sequence
  MKO10095701_B_L2hgdh
  gRNA
gctattgattgtccatacac

SEQ ID NO: 95702 - DNA, 20 bp, Artificial Sequence
  MKO10095702_B_L3hypdh
  gRNA
atgcacttgccgcatccaca

SEQ ID NO: 95703 - DNA, 20 bp, Artificial Sequence
  MKO10095703_B_L3hypdh
  gRNA
gccttcaaaagcagcgcaac

SEQ ID NO: 95704 - DNA, 20 bp, Artificial Sequence
  MKO10095704_B_L3hypdh
  gRNA
atcggcaaacacgcagatgt

SEQ ID NO: 95705 - DNA, 20 bp, Artificial Sequence
  MKO10095705_B_L3mbtl1
  gRNA
cggggaccaatagcacagtc

SEQ ID NO: 95706 - DNA, 20 bp, Artificial Sequence
  MKO10095706_B_L3mbtl1
  gRNA
ctgacccgcatgccgctacc

SEQ ID NO: 95707 - DNA, 20 bp, Artificial Sequence
  MKO10095707_B_L3mbtl1
  gRNA
ttgcaggaactcgcatctac

SEQ ID NO: 95708 - DNA, 20 bp, Artificial Sequence
  MKO10095708_B_L3mbtl2
  gRNA
gaacaggacaactagcagat

SEQ ID NO: 95709 - DNA, 20 bp, Artificial Sequence
  MKO10095709_B_L3mbtl2
  gRNA
ccgcactgctgttgtaactc

SEQ ID NO: 95710 - DNA, 20 bp, Artificial Sequence
  MKO10095710_B_L3mbtl2
  gRNA
ccttgtaactatgatccttc

SEQ ID NO: 95711 - DNA, 20 bp, Artificial Sequence
  MKO10095711_B_L3mbtl3
  gRNA
cgacttctcccccgagctcc

SEQ ID NO: 95712 - DNA, 20 bp, Artificial Sequence
  MKO10095712_B_L3mbtl3
  gRNA
tggaggcgaagacaacgatg

SEQ ID NO: 95713 - DNA, 20 bp, Artificial Sequence
  MKO10095713_B_L3mbtl3
  gRNA
atggtcccaactgctcaaga

SEQ ID NO: 95714 - DNA, 20 bp, Artificial Sequence
  MKO10095714_B_L3mbtl4
  gRNA
gtgaccacaccttcaaagcg

SEQ ID NO: 95715 - DNA, 20 bp, Artificial Sequence
  MKO10095715_B_L3mbtl4
  gRNA
tcatgcgctctgtagactct

SEQ ID NO: 95716 - DNA, 20 bp, Artificial Sequence
  MKO10095716_B_L3mbtl4
  gRNA
gcaagattgtctcatttagt

SEQ ID NO: 95717 - DNA, 20 bp, Artificial Sequence
  MKO10095717_B_LOC100038947
  gRNA
agctgtccctcagcagacag

SEQ ID NO: 95718 - DNA, 20 bp, Artificial Sequence
  MKO10095718_B_LOC100038947
  gRNA
agctaaaccatcttcaccta

SEQ ID NO: 95719 - DNA, 20 bp, Artificial Sequence
  MKO10095719_B_LOC100038947
  gRNA
gttcagtgaccaccacagta

SEQ ID NO: 95720 - DNA, 20 bp, Artificial Sequence
  MKO10095720_B_LOC100040786
  gRNA
tggattctagcgcctccaag

SEQ ID NO: 95721 - DNA, 20 bp, Artificial Sequence
  MKO10095721_B_LOC100040786
  gRNA
taaaaatagtcctgtaagaa

SEQ ID NO: 95722 - DNA, 20 bp, Artificial Sequence
  MKO10095722_B_LOC100040786
  gRNA
aacaaacccttctctttatt

SEQ ID NO: 95723 - DNA, 20 bp, Artificial Sequence
  MKO10095723_B_LOC100048884
  gRNA
gtcagcaaccatagataatt

SEQ ID NO: 95724 - DNA, 20 bp, Artificial Sequence
  MKO10095724_B_LOC100048884
  gRNA
agactatgataactttctta

SEQ ID NO: 95725 - DNA, 20 bp, Artificial Sequence
  MKO10095725_B_LOC100048884
  gRNA
taccatagagccccatcagc

SEQ ID NO: 95726 - DNA, 20 bp, Artificial Sequence
  MKO10095726_B_LOC100502896
  gRNA
gaaatgacaaagaagccaat

SEQ ID NO: 95727 - DNA, 20 bp, Artificial Sequence
  MKO10095727_B_LOC100502896
  gRNA
aaagtgcatacctagagaga

SEQ ID NO: 95728 - DNA, 20 bp, Artificial Sequence
  MKO10095728_B_LOC100502896
  gRNA
cactcaggtccttggtttga

SEQ ID NO: 95729 - DNA, 20 bp, Artificial Sequence
  MKO10095729_B_LOC100503280
  gRNA
acaaacaaaaaaatcgtagt

SEQ ID NO: 95730 - DNA, 20 bp, Artificial Sequence
  MKO10095730_B_LOC100503280
  gRNA
agtgcctttctcttctgctg

SEQ ID NO: 95731 - DNA, 20 bp, Artificial Sequence
  MKO10095731_B_LOC100503280
  gRNA
tcattcacagtgtactcctg

SEQ ID NO: 95732 - DNA, 20 bp, Artificial Sequence
  MKO10095732_B_LOC100504608
  gRNA
ctcccgtgggaacacggatt

SEQ ID NO: 95733 - DNA, 20 bp, Artificial Sequence
  MKO10095733_B_LOC100504608
  gRNA
gactctcgaaatagtcacac

SEQ ID NO: 95734 - DNA, 20 bp, Artificial Sequence
  MKO10095734_B_LOC100504608
  gRNA
ctcgggtgtgcgccttgtcc

SEQ ID NO: 95735 - DNA, 20 bp, Artificial Sequence
  MKO10095735_B_LOC100861615
  gRNA
gttatcttctatcagttcct

SEQ ID NO: 95736 - DNA, 20 bp, Artificial Sequence
  MKO10095736_B_LOC100861615
  gRNA
ctcaactcaacgaaaacgta

SEQ ID NO: 95737 - DNA, 20 bp, Artificial Sequence
  MKO10095737_B_LOC100861615
  gRNA
tcatcctacctgctgttcct

SEQ ID NO: 95738 - DNA, 20 bp, Artificial Sequence
  MKO10095738_B_LOC100862015
  gRNA
caggtccgtgtgatagcccg

SEQ ID NO: 95739 - DNA, 20 bp, Artificial Sequence
  MKO10095739_B_LOC100862015
  gRNA
aaagtgcatacctagagaga

SEQ ID NO: 95740 - DNA, 20 bp, Artificial Sequence
  MKO10095740_B_LOC100862015
  gRNA
cactcaggtccttggtttga

SEQ ID NO: 95741 - DNA, 20 bp, Artificial Sequence
  MKO10095741_B_LOC101055863
  gRNA
caggtccgtgtgatagcccg

SEQ ID NO: 95742 - DNA, 20 bp, Artificial Sequence
  MKO10095742_B_LOC101055863
  gRNA
aaagtgcatacctagagaga

SEQ ID NO: 95743 - DNA, 20 bp, Artificial Sequence
  MKO10095743_B_LOC101055863
  gRNA
cactcaggtccttggtttga

SEQ ID NO: 95744 - DNA, 20 bp, Artificial Sequence
  MKO10095744_B_LOC102308570
  gRNA
cctctaccacaatagagggc

SEQ ID NO: 95745 - DNA, 20 bp, Artificial Sequence
  MKO10095745_B_LOC102308570
  gRNA
aaatcgtgttctatagatgc

SEQ ID NO: 95746 - DNA, 20 bp, Artificial Sequence
  MKO10095746_B_LOC102308570
  gRNA
gccccgcctgccctctattg

SEQ ID NO: 95747 - DNA, 20 bp, Artificial Sequence
  MKO10095747_B_LOC666331
  gRNA
ccttggtttagatctgccat

SEQ ID NO: 95748 - DNA, 20 bp, Artificial Sequence
  MKO10095748_B_LOC666331
  gRNA
tcgtgctctgagttgagaag

SEQ ID NO: 95749 - DNA, 20 bp, Artificial Sequence
  MKO10095749_B_LOC666331
  gRNA
cacgaacatgaatatttatg

SEQ ID NO: 95750 - DNA, 20 bp, Artificial Sequence
  MKO10095750_B_Lacc1
  gRNA
agatatgccccctgtccgtg

SEQ ID NO: 95751 - DNA, 20 bp, Artificial Sequence
  MKO10095751_B_Lacc1
  gRNA
aaatttctctgcgttaaatc

SEQ ID NO: 95752 - DNA, 20 bp, Artificial Sequence
  MKO10095752_B_Lacc1
  gRNA
cttaacttcggtacacagat

SEQ ID NO: 95753 - DNA, 20 bp, Artificial Sequence
  MKO10095753_B_Lace1
  gRNA
ccaaagggcctctatgttta

SEQ ID NO: 95754 - DNA, 20 bp, Artificial Sequence
  MKO10095754_B_Lace1
  gRNA
ccagcatgaagccgtgaaaa

SEQ ID NO: 95755 - DNA, 20 bp, Artificial Sequence
  MKO10095755_B_Lace1
  gRNA
caacgtctccataaacatag

SEQ ID NO: 95756 - DNA, 20 bp, Artificial Sequence
  MKO10095756_B_Lactb2
  gRNA
agaccgagggagccactctc

SEQ ID NO: 95757 - DNA, 20 bp, Artificial Sequence
  MKO10095757_B_Lactb2
  gRNA
atggctcaccagtgtcaatg

SEQ ID NO: 95758 - DNA, 20 bp, Artificial Sequence
  MKO10095758_B_Lactb2
  gRNA
tgctgtgtcaaactcaacca

SEQ ID NO: 95759 - DNA, 20 bp, Artificial Sequence
  MKO10095759_B_Lactbl1
  gRNA
tgctgatgctgtatcgcctg

SEQ ID NO: 95760 - DNA, 20 bp, Artificial Sequence
  MKO10095760_B_Lactbl1
  gRNA
ccccggtgaagatgtgtccc

SEQ ID NO: 95761 - DNA, 20 bp, Artificial Sequence
  MKO10095761_B_Lactbl1
  gRNA
ctgctctcagcgaccatgac

SEQ ID NO: 95762 - DNA, 20 bp, Artificial Sequence
  MKO10095762_B_Lactb
  gRNA
gcgattctcatgaccgtttc

SEQ ID NO: 95763 - DNA, 20 bp, Artificial Sequence
  MKO10095763_B_Lactb
  gRNA
agaaactccaaccacgatgc

SEQ ID NO: 95764 - DNA, 20 bp, Artificial Sequence
  MKO10095764_B_Lactb
  gRNA
catgctgacaactgtccagg

SEQ ID NO: 95765 - DNA, 20 bp, Artificial Sequence
  MKO10095765_B_Lad1
  gRNA
tgcctcgccggagactgagt

SEQ ID NO: 95766 - DNA, 20 bp, Artificial Sequence
  MKO10095766_B_Lad1
  gRNA
ggcagctcacctgcgggtta

SEQ ID NO: 95767 - DNA, 20 bp, Artificial Sequence
  MKO10095767_B_Lad1
  gRNA
ctcctagccttgcccgacag

SEQ ID NO: 95768 - DNA, 20 bp, Artificial Sequence
  MKO10095768_B_Lag3
  gRNA
gatgaccgccaacgtgacag

SEQ ID NO: 95769 - DNA, 20 bp, Artificial Sequence
  MKO10095769_B_Lag3
  gRNA
cctaactttctacgaagagg

SEQ ID NO: 95770 - DNA, 20 bp, Artificial Sequence
  MKO10095770_B_Lag3
  gRNA
ctgacagtgtacgctgctga

SEQ ID NO: 95771 - DNA, 20 bp, Artificial Sequence
  MKO10095771_B_Lage3
  gRNA
cagactagccgctgttgtcc

SEQ ID NO: 95772 - DNA, 20 bp, Artificial Sequence
  MKO10095772_B_Lage3
  gRNA
ttccctaccagtcctcgatg

SEQ ID NO: 95773 - DNA, 20 bp, Artificial Sequence
  MKO10095773_B_Lage3
  gRNA
gctgtatggtgttcaccact

SEQ ID NO: 95774 - DNA, 20 bp, Artificial Sequence
  MKO10095774_B_Lair1
  gRNA
gcctgaggaagcagaacaga

SEQ ID NO: 95775 - DNA, 20 bp, Artificial Sequence
  MKO10095775_B_Lair1
  gRNA
cccttctgttctgcttcctc

SEQ ID NO: 95776 - DNA, 20 bp, Artificial Sequence
  MKO10095776_B_Lair1
  gRNA
acaacaaaagacagcagcag

SEQ ID NO: 95777 - DNA, 20 bp, Artificial Sequence
  MKO10095777_B_Lalba
  gRNA
agagttattggatgacgagt

SEQ ID NO: 95778 - DNA, 20 bp, Artificial Sequence
  MKO10095778_B_Lalba
  gRNA
gcaacgacaaaatacacacc

SEQ ID NO: 95779 - DNA, 20 bp, Artificial Sequence
  MKO10095779_B_Lalba
  gRNA
gctctgagaagcttgaacag

SEQ ID NO: 95780 - DNA, 20 bp, Artificial Sequence
  MKO10095780_B_Lama1
  gRNA
ctgttcgacacgcccaatgc

SEQ ID NO: 95781 - DNA, 20 bp, Artificial Sequence
  MKO10095781_B_Lama1
  gRNA
cacctcgtattattcaaagc

SEQ ID NO: 95782 - DNA, 20 bp, Artificial Sequence
  MKO10095782_B_Lama1
  gRNA
caccagctttgaataatacg

SEQ ID NO: 95783 - DNA, 20 bp, Artificial Sequence
  MKO10095783_B_Lama2
  gRNA
ggaacgttccctggatgacg

SEQ ID NO: 95784 - DNA, 20 bp, Artificial Sequence
  MKO10095784_B_Lama2
  gRNA
gtgcattcgaagcaagattc

SEQ ID NO: 95785 - DNA, 20 bp, Artificial Sequence
  MKO10095785_B_Lama2
  gRNA
acccgagatgtactgcaagt

SEQ ID NO: 95786 - DNA, 20 bp, Artificial Sequence
  MKO10095786_B_Lama3
  gRNA
gttccgatccatcaattgca

SEQ ID NO: 95787 - DNA, 20 bp, Artificial Sequence
  MKO10095787_B_Lama3
  gRNA
agcaaacatggcaattaccc

SEQ ID NO: 95788 - DNA, 20 bp, Artificial Sequence
  MKO10095788_B_Lama3
  gRNA
ttacgagcaaaatactgcca

SEQ ID NO: 95789 - DNA, 20 bp, Artificial Sequence
  MKO10095789_B_Lama4
  gRNA
acagcgttcacacttgaatc

SEQ ID NO: 95790 - DNA, 20 bp, Artificial Sequence
  MKO10095790_B_Lama4
  gRNA
ctgtttcagagatgtgacgc

SEQ ID NO: 95791 - DNA, 20 bp, Artificial Sequence
  MKO10095791_B_Lama4
  gRNA
ctgacttaccagacagaatc

SEQ ID NO: 95792 - DNA, 20 bp, Artificial Sequence
  MKO10095792_B_Lama5
  gRNA
ttggtgaagtctcgaagtaa

SEQ ID NO: 95793 - DNA, 20 bp, Artificial Sequence
  MKO10095793_B_Lama5
  gRNA
tcggtcacacttatcagccg

SEQ ID NO: 95794 - DNA, 20 bp, Artificial Sequence
  MKO10095794_B_Lama5
  gRNA
ccagcgctccgtgccatcga

SEQ ID NO: 95795 - DNA, 20 bp, Artificial Sequence
  MKO10095795_B_Lamb1
  gRNA
ccgattgccaccagatctta

SEQ ID NO: 95796 - DNA, 20 bp, Artificial Sequence
  MKO10095796_B_Lamb1
  gRNA
cagccgccatgctgatcgag

SEQ ID NO: 95797 - DNA, 20 bp, Artificial Sequence
  MKO10095797_B_Lamb1
  gRNA
agaagaccgctcgatcagca

SEQ ID NO: 95798 - DNA, 20 bp, Artificial Sequence
  MKO10095798_B_Lamb2
  gRNA
gcaccttgaacgtcataatg

SEQ ID NO: 95799 - DNA, 20 bp, Artificial Sequence
  MKO10095799_B_Lamb2
  gRNA
accaacaggtcaccggtggc

SEQ ID NO: 95800 - DNA, 20 bp, Artificial Sequence
  MKO10095800_B_Lamb2
  gRNA
ccacctcattatgacgttca

SEQ ID NO: 95801 - DNA, 20 bp, Artificial Sequence
  MKO10095801_B_Lamb3
  gRNA
atggagggtgtaccagtacc

SEQ ID NO: 95802 - DNA, 20 bp, Artificial Sequence
  MKO10095802_B_Lamb3
  gRNA
acgatgcgacattctccact

SEQ ID NO: 95803 - DNA, 20 bp, Artificial Sequence
  MKO10095803_B_Lamb3
  gRNA
ataacaggcccctcgggagc

SEQ ID NO: 95804 - DNA, 20 bp, Artificial Sequence
  MKO10095804_B_Lamc1
  gRNA
tcgccatctataagcgcact

SEQ ID NO: 95805 - DNA, 20 bp, Artificial Sequence
  MKO10095805_B_Lamc1
  gRNA
ctcaatcgcctgaacacctt

SEQ ID NO: 95806 - DNA, 20 bp, Artificial Sequence
  MKO10095806_B_Lamc1
  gRNA
ttcccgagtgcgcttataga

SEQ ID NO: 95807 - DNA, 20 bp, Artificial Sequence
  MKO10095807_B_Lamc2
  gRNA
ttctgctgcaggtgccgacc

SEQ ID NO: 95808 - DNA, 20 bp, Artificial Sequence
  MKO10095808_B_Lamc2
  gRNA
atccagcatcggtgagcata

SEQ ID NO: 95809 - DNA, 20 bp, Artificial Sequence
  MKO10095809_B_Lamc2
  gRNA
cactgaagtcggcagaggcg

SEQ ID NO: 95810 - DNA, 20 bp, Artificial Sequence
  MKO10095810_B_Lamc3
  gRNA
ctgaggagtgcacgtttgac

SEQ ID NO: 95811 - DNA, 20 bp, Artificial Sequence
  MKO10095811_B_Lamc3
  gRNA
tcggcggtgcctcgggccca

SEQ ID NO: 95812 - DNA, 20 bp, Artificial Sequence
  MKO10095812_B_Lamc3
  gRNA
acgctcgcagtccactcctg

SEQ ID NO: 95813 - DNA, 20 bp, Artificial Sequence
  MKO10095813_B_Lamp1
  gRNA
accacctacgagactgcgaa

SEQ ID NO: 95814 - DNA, 20 bp, Artificial Sequence
  MKO10095814_B_Lamp1
  gRNA
gtatccaagtacaatgttac

SEQ ID NO: 95815 - DNA, 20 bp, Artificial Sequence
  MKO10095815_B_Lamp1
  gRNA
agaatgtgaccgttgtgctc

SEQ ID NO: 95816 - DNA, 20 bp, Artificial Sequence
  MKO10095816_B_Lamp2
  gRNA
gccaaaataatgatacaatt

SEQ ID NO: 95817 - DNA, 20 bp, Artificial Sequence
  MKO10095817_B_Lamp2
  gRNA
ctcctgtcgttcagaaatat

SEQ ID NO: 95818 - DNA, 20 bp, Artificial Sequence
  MKO10095818_B_Lamp2
  gRNA
gatcacgatgtgcctctctc

SEQ ID NO: 95819 - DNA, 20 bp, Artificial Sequence
  MKO10095819_B_Lamp3
  gRNA
cccagcctaacccatgcatc

SEQ ID NO: 95820 - DNA, 20 bp, Artificial Sequence
  MKO10095820_B_Lamp3
  gRNA
cttcgaaatcaaaggcctga

SEQ ID NO: 95821 - DNA, 20 bp, Artificial Sequence
  MKO10095821_B_Lamp3
  gRNA
tgatattcacagatccaccc

SEQ ID NO: 95822 - DNA, 20 bp, Artificial Sequence
  MKO10095822_B_Lamp5
  gRNA
cctccagctccgactcgttg

SEQ ID NO: 95823 - DNA, 20 bp, Artificial Sequence
  MKO10095823_B_Lamp5
  gRNA
aaatgggacgacgtgtctca

SEQ ID NO: 95824 - DNA, 20 bp, Artificial Sequence
  MKO10095824_B_Lamp5
  gRNA
ccactgtggccacaacgagt

SEQ ID NO: 95825 - DNA, 20 bp, Artificial Sequence
  MKO10095825_B_Lamtor1
  gRNA
cacctgctgcaagtcagaga

SEQ ID NO: 95826 - DNA, 20 bp, Artificial Sequence
  MKO10095826_B_Lamtor1
  gRNA
acggtggcagcttcttccaa

SEQ ID NO: 95827 - DNA, 20 bp, Artificial Sequence
  MKO10095827_B_Lamtor1
  gRNA
cttacctgtactgccttgcc

SEQ ID NO: 95828 - DNA, 20 bp, Artificial Sequence
  MKO10095828_B_Lamtor2
  gRNA
cgcaggcatgctgcgtccca

SEQ ID NO: 95829 - DNA, 20 bp, Artificial Sequence
  MKO10095829_B_Lamtor2
  gRNA
tagcacctgcgtcaaagcct

SEQ ID NO: 95830 - DNA, 20 bp, Artificial Sequence
  MKO10095830_B_Lamtor2
  gRNA
cgtaggcttcggaatgctca

SEQ ID NO: 95831 - DNA, 20 bp, Artificial Sequence
  MKO10095831_B_Lamtor3
  gRNA
attgttgtgtcagatagaga

SEQ ID NO: 95832 - DNA, 20 bp, Artificial Sequence
  MKO10095832_B_Lamtor3
  gRNA
aaagtccgagtttgctgcct

SEQ ID NO: 95833 - DNA, 20 bp, Artificial Sequence
  MKO10095833_B_Lamtor3
  gRNA
ccagagcacgccctgagacc

SEQ ID NO: 95834 - DNA, 20 bp, Artificial Sequence
  MKO10095834_B_Lamtor4
  gRNA
tagacttccgcactgaccca

SEQ ID NO: 95835 - DNA, 20 bp, Artificial Sequence
  MKO10095835_B_Lamtor4
  gRNA
ctttggtgaacacacgctgc

SEQ ID NO: 95836 - DNA, 20 bp, Artificial Sequence
  MKO10095836_B_Lamtor4
  gRNA
agagggtgtttgtagtgaag

SEQ ID NO: 95837 - DNA, 20 bp, Artificial Sequence
  MKO10095837_B_Lamtor5
  gRNA
ctccagcgtgctcatccgac

SEQ ID NO: 95838 - DNA, 20 bp, Artificial Sequence
  MKO10095838_B_Lamtor5
  gRNA
gtccttgtgaatctgtgcat

SEQ ID NO: 95839 - DNA, 20 bp, Artificial Sequence
  MKO10095839_B_Lamtor5
  gRNA
atgaagaatccatccattgt

SEQ ID NO: 95840 - DNA, 20 bp, Artificial Sequence
  MKO10095840_B_Lancl1
  gRNA
agagcatttcatttggtacg

SEQ ID NO: 95841 - DNA, 20 bp, Artificial Sequence
  MKO10095841_B_Lancl1
  gRNA
gtcaagcgatgtgagaactc

SEQ ID NO: 95842 - DNA, 20 bp, Artificial Sequence
  MKO10095842_B_Lancl1
  gRNA
cagcccccacgtaatattcc

SEQ ID NO: 95843 - DNA, 20 bp, Artificial Sequence
  MKO10095843_B_Lancl2
  gRNA
cgtccatacagcagttcatc

SEQ ID NO: 95844 - DNA, 20 bp, Artificial Sequence
  MKO10095844_B_Lancl2
  gRNA
tggtgagacagctattaaag

SEQ ID NO: 95845 - DNA, 20 bp, Artificial Sequence
  MKO10095845_B_Lancl2
  gRNA
catctactacatgctaatgc

SEQ ID NO: 95846 - DNA, 20 bp, Artificial Sequence
  MKO10095846_B_Lancl3
  gRNA
aatatatctaccgtgcccaa

SEQ ID NO: 95847 - DNA, 20 bp, Artificial Sequence
  MKO10095847_B_Lancl3
  gRNA
ttccgtagtaagaatacatc

SEQ ID NO: 95848 - DNA, 20 bp, Artificial Sequence
  MKO10095848_B_Lancl3
  gRNA
cacaccagctcccgatctga

SEQ ID NO: 95849 - DNA, 20 bp, Artificial Sequence
  MKO10095849_B_Lao1
  gRNA
agtggcagctaagaccctac

SEQ ID NO: 95850 - DNA, 20 bp, Artificial Sequence
  MKO10095850_B_Lao1
  gRNA
ttatgactcttactccacca

SEQ ID NO: 95851 - DNA, 20 bp, Artificial Sequence
  MKO10095851_B_Lao1
  gRNA
agagcaggatcccccaaaca

SEQ ID NO: 95852 - DNA, 20 bp, Artificial Sequence
  MKO10095852_B_Lap3
  gRNA
tctcccgcacttgtaaattg

SEQ ID NO: 95853 - DNA, 20 bp, Artificial Sequence
  MKO10095853_B_Lap3
  gRNA
aaccttctatggtctgcatc

SEQ ID NO: 95854 - DNA, 20 bp, Artificial Sequence
  MKO10095854_B_Lap3
  gRNA
agcagcttgcgcatctccac

SEQ ID NO: 95855 - DNA, 20 bp, Artificial Sequence
  MKO10095855_B_Laptm4a
  gRNA
atttggatgagtcacctcca

SEQ ID NO: 95856 - DNA, 20 bp, Artificial Sequence
  MKO10095856_B_Laptm4a
  gRNA
gtttataatcagttcaatgc

SEQ ID NO: 95857 - DNA, 20 bp, Artificial Sequence
  MKO10095857_B_Laptm4a
  gRNA
tcatctttgtatgggaaatc

SEQ ID NO: 95858 - DNA, 20 bp, Artificial Sequence
  MKO10095858_B_Laptm4b
  gRNA
tctgcagatcatcaatgctg

SEQ ID NO: 95859 - DNA, 20 bp, Artificial Sequence
  MKO10095859_B_Laptm4b
  gRNA
gcctgaaaagtgatactgat

SEQ ID NO: 95860 - DNA, 20 bp, Artificial Sequence
  MKO10095860_B_Laptm4b
  gRNA
catgatcctgatatgtgcca

SEQ ID NO: 95861 - DNA, 20 bp, Artificial Sequence
  MKO10095861_B_Laptm5
  gRNA
tcttcaagatgccgtacctc

SEQ ID NO: 95862 - DNA, 20 bp, Artificial Sequence
  MKO10095862_B_Laptm5
  gRNA
cagcgtacttgaagcttgcc

SEQ ID NO: 95863 - DNA, 20 bp, Artificial Sequence
  MKO10095863_B_Laptm5
  gRNA
gtaggtgggcacttccatgt

SEQ ID NO: 95864 - DNA, 20 bp, Artificial Sequence
  MKO10095864_B_Large
  gRNA
agtgcgtgttcgagaagttg

SEQ ID NO: 95865 - DNA, 20 bp, Artificial Sequence
  MKO10095865_B_Large
  gRNA
attgtatccggcacagacga

SEQ ID NO: 95866 - DNA, 20 bp, Artificial Sequence
  MKO10095866_B_Large
  gRNA
ctgtctagtctgaagtgtcc

SEQ ID NO: 95867 - DNA, 20 bp, Artificial Sequence
  MKO10095867_B_Larp1b
  gRNA
atcatagtaatacatcatgc

SEQ ID NO: 95868 - DNA, 20 bp, Artificial Sequence
  MKO10095868_B_Larp1b
  gRNA
tctcagagtgttatcaacca

SEQ ID NO: 95869 - DNA, 20 bp, Artificial Sequence
  MKO10095869_B_Larp1b
  gRNA
tcctactgagaacatcagcg

SEQ ID NO: 95870 - DNA, 20 bp, Artificial Sequence
  MKO10095870_B_Larp1
  gRNA
acgggaggccaatttctctc

SEQ ID NO: 95871 - DNA, 20 bp, Artificial Sequence
  MKO10095871_B_Larp1
  gRNA
tcttcttctgcccgcctcgc

SEQ ID NO: 95872 - DNA, 20 bp, Artificial Sequence
  MKO10095872_B_Larp1
  gRNA
cttaccttgctgcccttacg

SEQ ID NO: 95873 - DNA, 20 bp, Artificial Sequence
  MKO10095873_B_Larp4b
  gRNA
ctgttggtgtgaatgctgcg

SEQ ID NO: 95874 - DNA, 20 bp, Artificial Sequence
  MKO10095874_B_Larp4b
  gRNA
cgcaaaccacttctcaaaca

SEQ ID NO: 95875 - DNA, 20 bp, Artificial Sequence
  MKO10095875_B_Larp4b
  gRNA
tgaattacctgagtcaaagc

SEQ ID NO: 95876 - DNA, 20 bp, Artificial Sequence
  MKO10095876_B_Larp4
  gRNA
gtttagcaggtgacatctaa

SEQ ID NO: 95877 - DNA, 20 bp, Artificial Sequence
  MKO10095877_B_Larp4
  gRNA
tttcagagaaaatttatcaa

SEQ ID NO: 95878 - DNA, 20 bp, Artificial Sequence
  MKO10095878_B_Larp4
  gRNA
ctcagggtgagatccagatg

SEQ ID NO: 95879 - DNA, 20 bp, Artificial Sequence
  MKO10095879_B_Larp6
  gRNA
gggtggtcctcctaaccttc

SEQ ID NO: 95880 - DNA, 20 bp, Artificial Sequence
  MKO10095880_B_Larp6
  gRNA
ggcgacacggatctgcaccg

SEQ ID NO: 95881 - DNA, 20 bp, Artificial Sequence
  MKO10095881_B_Larp6
  gRNA
tacagtagtgccacgacaag

SEQ ID NO: 95882 - DNA, 20 bp, Artificial Sequence
  MKO10095882_B_Larp7
  gRNA
tgagagaccaaaggacgagg

SEQ ID NO: 95883 - DNA, 20 bp, Artificial Sequence
  MKO10095883_B_Larp7
  gRNA
agatgtggacatttctctcc

SEQ ID NO: 95884 - DNA, 20 bp, Artificial Sequence
  MKO10095884_B_Larp7
  gRNA
ccaaaaatgttactcatagc

SEQ ID NO: 95885 - DNA, 20 bp, Artificial Sequence
  MKO10095885_B_Lars2
  gRNA
ccctcagcgacaccattgca

SEQ ID NO: 95886 - DNA, 20 bp, Artificial Sequence
  MKO10095886_B_Lars2
  gRNA
gcctcggcctgtgcttcagc

SEQ ID NO: 95887 - DNA, 20 bp, Artificial Sequence
  MKO10095887_B_Lars2
  gRNA
atgtcaggttatcaacccca

SEQ ID NO: 95888 - DNA, 20 bp, Artificial Sequence
  MKO10095888_B_Lars
  gRNA
tgctaaagtagacttcttga

SEQ ID NO: 95889 - DNA, 20 bp, Artificial Sequence
  MKO10095889_B_Lars
  gRNA
accagtacagtgcaacccaa

SEQ ID NO: 95890 - DNA, 20 bp, Artificial Sequence
  MKO10095890_B_Lars
  gRNA
aaaacgtgtgtcccaaatga

SEQ ID NO: 95891 - DNA, 20 bp, Artificial Sequence
  MKO10095891_B_Las1l
  gRNA
gttaggcaacgaactgcccc

SEQ ID NO: 95892 - DNA, 20 bp, Artificial Sequence
  MKO10095892_B_Las1l
  gRNA
gatgaacttagactgctcta

SEQ ID NO: 95893 - DNA, 20 bp, Artificial Sequence
  MKO10095893_B_Las1l
  gRNA
tatctcttcaagtacatcat

SEQ ID NO: 95894 - DNA, 20 bp, Artificial Sequence
  MKO10095894_B_Lasp1
  gRNA
aaaactcacgcattgcagta

SEQ ID NO: 95895 - DNA, 20 bp, Artificial Sequence
  MKO10095895_B_Lasp1
  gRNA
catatcccgaccagtgcccc

SEQ ID NO: 95896 - DNA, 20 bp, Artificial Sequence
  MKO10095896_B_Lasp1
  gRNA
agggtctcacattgctgatc

SEQ ID NO: 95897 - DNA, 20 bp, Artificial Sequence
  MKO10095897_B_Lat2
  gRNA
ctccaaacaagtcatttgaa

SEQ ID NO: 95898 - DNA, 20 bp, Artificial Sequence
  MKO10095898_B_Lat2
  gRNA
gctgtgtccatctggggtcc

SEQ ID NO: 95899 - DNA, 20 bp, Artificial Sequence
  MKO10095899_B_Lat2
  gRNA
aaatgcacagagctcagctg

SEQ ID NO: 95900 - DNA, 20 bp, Artificial Sequence
  MKO10095900_B_Lats1
  gRNA
ggtggtggaccttgatagct

SEQ ID NO: 95901 - DNA, 20 bp, Artificial Sequence
  MKO10095901_B_Lats1
  gRNA
gcgatgtctagcccattctc

SEQ ID NO: 95902 - DNA, 20 bp, Artificial Sequence
  MKO10095902_B_Lats1
  gRNA
cctgaagtgctactgcgaac

SEQ ID NO: 95903 - DNA, 20 bp, Artificial Sequence
  MKO10095903_B_Lats2
  gRNA
atgagagccaccccgaagtt

SEQ ID NO: 95904 - DNA, 20 bp, Artificial Sequence
  MKO10095904_B_Lats2
  gRNA
tcgcacaatctgctcattcc

SEQ ID NO: 95905 - DNA, 20 bp, Artificial Sequence
  MKO10095905_B_Lats2
  gRNA
gacggctggctccgtgcttc

SEQ ID NO: 95906 - DNA, 20 bp, Artificial Sequence
  MKO10095906_B_Lat
  gRNA
ctctgtggaagtgctgtcat

SEQ ID NO: 95907 - DNA, 20 bp, Artificial Sequence
  MKO10095907_B_Lat
  gRNA
tggctgcctcaggggtggga

SEQ ID NO: 95908 - DNA, 20 bp, Artificial Sequence
  MKO10095908_B_Lat
  gRNA
aggagatccccacagcccct

SEQ ID NO: 95909 - DNA, 20 bp, Artificial Sequence
  MKO10095909_B_Lax1
  gRNA
gtcaggagcacgacaaagcc

SEQ ID NO: 95910 - DNA, 20 bp, Artificial Sequence
  MKO10095910_B_Lax1
  gRNA
tacaggcagctatgatgacc

SEQ ID NO: 95911 - DNA, 20 bp, Artificial Sequence
  MKO10095911_B_Lax1
  gRNA
gcagggagacatcagttgag

SEQ ID NO: 95912 - DNA, 20 bp, Artificial Sequence
  MKO10095912_B_Layn
  gRNA
tcctctggggtccaagtccg

SEQ ID NO: 95913 - DNA, 20 bp, Artificial Sequence
  MKO10095913_B_Layn
  gRNA
ctagggcagctggtctgccg

SEQ ID NO: 95914 - DNA, 20 bp, Artificial Sequence
  MKO10095914_B_Layn
  gRNA
cttacctccaggccaaatag

SEQ ID NO: 95915 - DNA, 20 bp, Artificial Sequence
  MKO10095915_B_Lbh
  gRNA
tgaccgttgctgcaagctga

SEQ ID NO: 95916 - DNA, 20 bp, Artificial Sequence
  MKO10095916_B_Lbh
  gRNA
aggatactcaccagtgaatg

SEQ ID NO: 95917 - DNA, 20 bp, Artificial Sequence
  MKO10095917_B_Lbh
  gRNA
ctgtatatttccccattcac

SEQ ID NO: 95918 - DNA, 20 bp, Artificial Sequence
  MKO10095918_B_Lbp
  gRNA
cagcagccgcatttgtgatt

SEQ ID NO: 95919 - DNA, 20 bp, Artificial Sequence
  MKO10095919_B_Lbp
  gRNA
catttcagtggacctcctcc

SEQ ID NO: 95920 - DNA, 20 bp, Artificial Sequence
  MKO10095920_B_Lbp
  gRNA
gtcgaagctccagaaagtac

SEQ ID NO: 95921 - DNA, 20 bp, Artificial Sequence
  MKO10095921_B_Lbr
  gRNA
aggtaaacgccgcacaccct

SEQ ID NO: 95922 - DNA, 20 bp, Artificial Sequence
  MKO10095922_B_Lbr
  gRNA
tacgccgtataaagacaagc

SEQ ID NO: 95923 - DNA, 20 bp, Artificial Sequence
  MKO10095923_B_Lbr
  gRNA
tgtgcggcgtttacctcctc

SEQ ID NO: 95924 - DNA, 20 bp, Artificial Sequence
  MKO10095924_B_Lbx1
  gRNA
ggccgcggacaagcacgcgc

SEQ ID NO: 95925 - DNA, 20 bp, Artificial Sequence
  MKO10095925_B_Lbx1
  gRNA
gcagatggacatcgtggcgc

SEQ ID NO: 95926 - DNA, 20 bp, Artificial Sequence
  MKO10095926_B_Lbx1
  gRNA
cacgatgtccatctgcccgc

SEQ ID NO: 95927 - DNA, 20 bp, Artificial Sequence
  MKO10095927_B_Lbx2
  gRNA
tttagtatcgcagacatcct

SEQ ID NO: 95928 - DNA, 20 bp, Artificial Sequence
  MKO10095928_B_Lbx2
  gRNA
cgacggacttgctgcgcgac

SEQ ID NO: 95929 - DNA, 20 bp, Artificial Sequence
  MKO10095929_B_Lbx2
  gRNA
tccggagacgccgcaagtct

SEQ ID NO: 95930 - DNA, 20 bp, Artificial Sequence
  MKO10095930_B_Lca5l
  gRNA
gagaaaaggaagtacaacgc

SEQ ID NO: 95931 - DNA, 20 bp, Artificial Sequence
  MKO10095931_B_Lca5l
  gRNA
gacagctggccaaagaaaat

SEQ ID NO: 95932 - DNA, 20 bp, Artificial Sequence
  MKO10095932_B_Lca5l
  gRNA
tcaggagaaggaccgtgagc

SEQ ID NO: 95933 - DNA, 20 bp, Artificial Sequence
  MKO10095933_B_Lca5
  gRNA
acaggagctatcgaagaacc

SEQ ID NO: 95934 - DNA, 20 bp, Artificial Sequence
  MKO10095934_B_Lca5
  gRNA
tttcagcgagcagctgccgc

SEQ ID NO: 95935 - DNA, 20 bp, Artificial Sequence
  MKO10095935_B_Lca5
  gRNA
tcagacgaataatgagagta

SEQ ID NO: 95936 - DNA, 20 bp, Artificial Sequence
  MKO10095936_B_Lcat
  gRNA
gaggagatgtatgccgctta

SEQ ID NO: 95937 - DNA, 20 bp, Artificial Sequence
  MKO10095937_B_Lcat
  gRNA
tgcgggccgcaccctatgac

SEQ ID NO: 95938 - DNA, 20 bp, Artificial Sequence
  MKO10095938_B_Lcat
  gRNA
tggttaacaacggatatgtg

SEQ ID NO: 95939 - DNA, 20 bp, Artificial Sequence
  MKO10095939_B_Lce1a1
  gRNA
cccagaacccagactacagc

SEQ ID NO: 95940 - DNA, 20 bp, Artificial Sequence
  MKO10095940_B_Lce1a1
  gRNA
gacacagggggacacttggg

SEQ ID NO: 95941 - DNA, 20 bp, Artificial Sequence
  MKO10095941_B_Lce1a1
  gRNA
agcagcagcctccagactgc

SEQ ID NO: 95942 - DNA, 20 bp, Artificial Sequence
  MKO10095942_B_Lce1a2
  gRNA
cacagcaacccccagaaccc

SEQ ID NO: 95943 - DNA, 20 bp, Artificial Sequence
  MKO10095943_B_Lce1a2
  gRNA
ggttgctgtggctccagctc

SEQ ID NO: 95944 - DNA, 20 bp, Artificial Sequence
  MKO10095944_B_Lce1a2
  gRNA
tgtgtcttcctgctgtagcc

SEQ ID NO: 95945 - DNA, 20 bp, Artificial Sequence
  MKO10095945_B_Lce1b
  gRNA
gggtgcacttgggagggggc

SEQ ID NO: 95946 - DNA, 20 bp, Artificial Sequence
  MKO10095946_B_Lce1b
  gRNA
ctgctgctggttctgctggc

SEQ ID NO: 95947 - DNA, 20 bp, Artificial Sequence
  MKO10095947_B_Lce1b
  gRNA
ggttgttgtggctccagctc

SEQ ID NO: 95948 - DNA, 20 bp, Artificial Sequence
  MKO10095948_B_Lce1c
  gRNA
ctgctgctggctctgctggc

SEQ ID NO: 95949 - DNA, 20 bp, Artificial Sequence
  MKO10095949_B_Lce1c
  gRNA
agcatccagagctgtgacga

SEQ ID NO: 95950 - DNA, 20 bp, Artificial Sequence
  MKO10095950_B_Lce1c
  gRNA
ggctgctgtggctccagctc

SEQ ID NO: 95951 - DNA, 20 bp, Artificial Sequence
  MKO10095951_B_Lce1d
  gRNA
gggtgcacttgggaggaggc

SEQ ID NO: 95952 - DNA, 20 bp, Artificial Sequence
  MKO10095952_B_Lce1d
  gRNA
ctgctgttggctttgctggc

SEQ ID NO: 95953 - DNA, 20 bp, Artificial Sequence
  MKO10095953_B_Lce1d
  gRNA
ggctgctgtggctccagctc

SEQ ID NO: 95954 - DNA, 20 bp, Artificial Sequence
  MKO10095954_B_Lce1e
  gRNA
agcagcagtccccagactgc

SEQ ID NO: 95955 - DNA, 20 bp, Artificial Sequence
  MKO10095955_B_Lce1e
  gRNA
ctgctgctggctctgctgac

SEQ ID NO: 95956 - DNA, 20 bp, Artificial Sequence
  MKO10095956_B_Lce1e
  gRNA
ggctgctgtggctccagctc

SEQ ID NO: 95957 - DNA, 20 bp, Artificial Sequence
  MKO10095957_B_Lce1f
  gRNA
aacatccagagctgtgacga

SEQ ID NO: 95958 - DNA, 20 bp, Artificial Sequence
  MKO10095958_B_Lce1f
  gRNA
tgtgtcttcctgctgtagcc

SEQ ID NO: 95959 - DNA, 20 bp, Artificial Sequence
  MKO10095959_B_Lce1f
  gRNA
gagggggctggcactgctgc

SEQ ID NO: 95960 - DNA, 20 bp, Artificial Sequence
  MKO10095960_B_Lce1g
  gRNA
agcagcagtccccagactgc

SEQ ID NO: 95961 - DNA, 20 bp, Artificial Sequence
  MKO10095961_B_Lce1g
  gRNA
caggggcttggcactgctgc

SEQ ID NO: 95962 - DNA, 20 bp, Artificial Sequence
  MKO10095962_B_Lce1g
  gRNA
ggctgttgtggctccagctc

SEQ ID NO: 95963 - DNA, 20 bp, Artificial Sequence
  MKO10095963_B_Lce1h
  gRNA
tgtggcagcagtggcagcag

SEQ ID NO: 95964 - DNA, 20 bp, Artificial Sequence
  MKO10095964_B_Lce1h
  gRNA
tgtgtcttcctgctgtagct

SEQ ID NO: 95965 - DNA, 20 bp, Artificial Sequence
  MKO10095965_B_Lce1h
  gRNA
agcagcagcccccagactgc

SEQ ID NO: 95966 - DNA, 20 bp, Artificial Sequence
  MKO10095966_B_Lce1i
  gRNA
agcagcagcccccagactgc

SEQ ID NO: 95967 - DNA, 20 bp, Artificial Sequence
  MKO10095967_B_Lce1i
  gRNA
tgtggcagcagtggtggcag

SEQ ID NO: 95968 - DNA, 20 bp, Artificial Sequence
  MKO10095968_B_Lce1i
  gRNA
tgtggcagtagccagcagtc

SEQ ID NO: 95969 - DNA, 20 bp, Artificial Sequence
  MKO10095969_B_Lce1j
  gRNA
tgtgtcttcctgctgtagcc

SEQ ID NO: 95970 - DNA, 20 bp, Artificial Sequence
  MKO10095970_B_Lce1j
  gRNA
agcagcagcccccagactgc

SEQ ID NO: 95971 - DNA, 20 bp, Artificial Sequence
  MKO10095971_B_Lce1j
  gRNA
caggggcttggcactgctgc

SEQ ID NO: 95972 - DNA, 20 bp, Artificial Sequence
  MKO10095972_B_Lce1k
  gRNA
tgcagcaacccccagaaccc

SEQ ID NO: 95973 - DNA, 20 bp, Artificial Sequence
  MKO10095973_B_Lce1k
  gRNA
tgacgacggagagatctgcg

SEQ ID NO: 95974 - DNA, 20 bp, Artificial Sequence
  MKO10095974_B_Lce1k
  gRNA
gctgctgcctgagtcaccac

SEQ ID NO: 95975 - DNA, 20 bp, Artificial Sequence
  MKO10095975_B_Lce1l
  gRNA
gcacttgggagggcacttag

SEQ ID NO: 95976 - DNA, 20 bp, Artificial Sequence
  MKO10095976_B_Lce1l
  gRNA
agcatccagagctgtgtcga

SEQ ID NO: 95977 - DNA, 20 bp, Artificial Sequence
  MKO10095977_B_Lce1l
  gRNA
cgtcgccatcgacacagctc

SEQ ID NO: 95978 - DNA, 20 bp, Artificial Sequence
  MKO10095978_B_Lce1m
  gRNA
ggagagagaatcggggcttg

SEQ ID NO: 95979 - DNA, 20 bp, Artificial Sequence
  MKO10095979_B_Lce1m
  gRNA
cgtcgccgacgtcacagctc

SEQ ID NO: 95980 - DNA, 20 bp, Artificial Sequence
  MKO10095980_B_Lce1m
  gRNA
agcaacagccatcagcagtc

SEQ ID NO: 95981 - DNA, 20 bp, Artificial Sequence
  MKO10095981_B_Lce3a
  gRNA
ctgcttctgactctgctggc

SEQ ID NO: 95982 - DNA, 20 bp, Artificial Sequence
  MKO10095982_B_Lce3a
  gRNA
agcagcagcccccagagctg

SEQ ID NO: 95983 - DNA, 20 bp, Artificial Sequence
  MKO10095983_B_Lce3a
  gRNA
ctgcagtgtccccagctctg

SEQ ID NO: 95984 - DNA, 20 bp, Artificial Sequence
  MKO10095984_B_Lce3b
  gRNA
acactgtgctgtgctcttcc

SEQ ID NO: 95985 - DNA, 20 bp, Artificial Sequence
  MKO10095985_B_Lce3b
  gRNA
cagcagcctccctcagatct

SEQ ID NO: 95986 - DNA, 20 bp, Artificial Sequence
  MKO10095986_B_Lce3b
  gRNA
gaggaggttggcactgcttc

SEQ ID NO: 95987 - DNA, 20 bp, Artificial Sequence
  MKO10095987_B_Lce3c
  gRNA
tcctgctgtgctacaagctc

SEQ ID NO: 95988 - DNA, 20 bp, Artificial Sequence
  MKO10095988_B_Lce3c
  gRNA
ctgcttctggctctgctggc

SEQ ID NO: 95989 - DNA, 20 bp, Artificial Sequence
  MKO10095989_B_Lce3c
  gRNA
cagactgctgaccactgcca

SEQ ID NO: 95990 - DNA, 20 bp, Artificial Sequence
  MKO10095990_B_Lce3d
  gRNA
cagactgctgaccactgcca

SEQ ID NO: 95991 - DNA, 20 bp, Artificial Sequence
  MKO10095991_B_Lce3d
  gRNA
ctgcagtgtccccagctctg

SEQ ID NO: 95992 - DNA, 20 bp, Artificial Sequence
  MKO10095992_B_Lce3d
  gRNA
agctcctgcgcctgcatctg

SEQ ID NO: 95993 - DNA, 20 bp, Artificial Sequence
  MKO10095993_B_Lce3e
  gRNA
cagactgctgaccactgcca

SEQ ID NO: 95994 - DNA, 20 bp, Artificial Sequence
  MKO10095994_B_Lce3e
  gRNA
ctgcagtctccccagctctg

SEQ ID NO: 95995 - DNA, 20 bp, Artificial Sequence
  MKO10095995_B_Lce3e
  gRNA
agctcctgcgcctgcatctg

SEQ ID NO: 95996 - DNA, 20 bp, Artificial Sequence
  MKO10095996_B_Lce3f
  gRNA
cagactgctgaccactgcca

SEQ ID NO: 95997 - DNA, 20 bp, Artificial Sequence
  MKO10095997_B_Lce3f
  gRNA
ctgcagtctccccagctctg

SEQ ID NO: 95998 - DNA, 20 bp, Artificial Sequence
  MKO10095998_B_Lce3f
  gRNA
agctcctgcgcctgcatctg

SEQ ID NO: 95999 - DNA, 20 bp, Artificial Sequence
  MKO10095999_B_Lce6a
  gRNA
cccatatattcacctcctaa

SEQ ID NO: 96000 - DNA, 20 bp, Artificial Sequence
  MKO10096000_B_Lce6a
  gRNA
ccagaacactgtcagccata

SEQ ID NO: 96001 - DNA, 20 bp, Artificial Sequence
  MKO10096001_B_Lce6a
  gRNA
gctgttcttcctactcaaaa

SEQ ID NO: 96002 - DNA, 20 bp, Artificial Sequence
  MKO10096002_B_Lck
  gRNA
gatgaagtcaccttgcagcg

SEQ ID NO: 96003 - DNA, 20 bp, Artificial Sequence
  MKO10096003_B_Lck
  gRNA
agccttcttggccagtcgtc

SEQ ID NO: 96004 - DNA, 20 bp, Artificial Sequence
  MKO10096004_B_Lck
  gRNA
ctaccccgcagctgcccatc

SEQ ID NO: 96005 - DNA, 20 bp, Artificial Sequence
  MKO10096005_B_Lclat1
  gRNA
taatgaggtacagctacctc

SEQ ID NO: 96006 - DNA, 20 bp, Artificial Sequence
  MKO10096006_B_Lclat1
  gRNA
gagagtcagctggataccgc

SEQ ID NO: 96007 - DNA, 20 bp, Artificial Sequence
  MKO10096007_B_Lclat1
  gRNA
cctgtgaggtcagttccttc

SEQ ID NO: 96008 - DNA, 20 bp, Artificial Sequence
  MKO10096008_B_Lcmt1
  gRNA
ctgggatggataccaccttc

SEQ ID NO: 96009 - DNA, 20 bp, Artificial Sequence
  MKO10096009_B_Lcmt1
  gRNA
cccagaggacacgcttcaaa

SEQ ID NO: 96010 - DNA, 20 bp, Artificial Sequence
  MKO10096010_B_Lcmt1
  gRNA
gctgactgacaccatgaact

SEQ ID NO: 96011 - DNA, 20 bp, Artificial Sequence
  MKO10096011_B_Lcmt2
  gRNA
gcgcgcgcacgtaatagccg

SEQ ID NO: 96012 - DNA, 20 bp, Artificial Sequence
  MKO10096012_B_Lcmt2
  gRNA
cgtccaggccggcgccatcc

SEQ ID NO: 96013 - DNA, 20 bp, Artificial Sequence
  MKO10096013_B_Lcmt2
  gRNA
atacgtgcgcgacccctttg

SEQ ID NO: 96014 - DNA, 20 bp, Artificial Sequence
  MKO10096014_B_Lcn10
  gRNA
cctgagtctgcgagaatttc

SEQ ID NO: 96015 - DNA, 20 bp, Artificial Sequence
  MKO10096015_B_Lcn10
  gRNA
tcacgggtattcctgaacac

SEQ ID NO: 96016 - DNA, 20 bp, Artificial Sequence
  MKO10096016_B_Lcn10
  gRNA
ggcctcggggctgccagtcc

SEQ ID NO: 96017 - DNA, 20 bp, Artificial Sequence
  MKO10096017_B_Lcn11
  gRNA
accgtggaactcaattacaa

SEQ ID NO: 96018 - DNA, 20 bp, Artificial Sequence
  MKO10096018_B_Lcn11
  gRNA
ttcccatccgagctcatctg

SEQ ID NO: 96019 - DNA, 20 bp, Artificial Sequence
  MKO10096019_B_Lcn11
  gRNA
aagtcagagagtttctgcct

SEQ ID NO: 96020 - DNA, 20 bp, Artificial Sequence
  MKO10096020_B_Lcn12
  gRNA
ggctgacccttgtgatgttc

SEQ ID NO: 96021 - DNA, 20 bp, Artificial Sequence
  MKO10096021_B_Lcn12
  gRNA
cactcaccgagtcatggagt

SEQ ID NO: 96022 - DNA, 20 bp, Artificial Sequence
  MKO10096022_B_Lcn12
  gRNA
aattgcccaggcttggttgc

SEQ ID NO: 96023 - DNA, 20 bp, Artificial Sequence
  MKO10096023_B_Lcn2
  gRNA
atttcttgcagttccggggc

SEQ ID NO: 96024 - DNA, 20 bp, Artificial Sequence
  MKO10096024_B_Lcn2
  gRNA
cacccgctttgccaagtctc

SEQ ID NO: 96025 - DNA, 20 bp, Artificial Sequence
  MKO10096025_B_Lcn2
  gRNA
gtgaaacgttccttcagttc

SEQ ID NO: 96026 - DNA, 20 bp, Artificial Sequence
  MKO10096026_B_Lcn3
  gRNA
gttcagcaccaagattaaca

SEQ ID NO: 96027 - DNA, 20 bp, Artificial Sequence
  MKO10096027_B_Lcn3
  gRNA
agacgacatcccaataaaca

SEQ ID NO: 96028 - DNA, 20 bp, Artificial Sequence
  MKO10096028_B_Lcn3
  gRNA
ttccacaggtagggaccccc

SEQ ID NO: 96029 - DNA, 20 bp, Artificial Sequence
  MKO10096029_B_Lcn4
  gRNA
ggataccttggaagtattta

SEQ ID NO: 96030 - DNA, 20 bp, Artificial Sequence
  MKO10096030_B_Lcn4
  gRNA
tttcacagtatatgatgtag

SEQ ID NO: 96031 - DNA, 20 bp, Artificial Sequence
  MKO10096031_B_Lcn4
  gRNA
atcctcttacccctctgttc

SEQ ID NO: 96032 - DNA, 20 bp, Artificial Sequence
  MKO10096032_B_Lcn5
  gRNA
agtatacgtcatgtagtctg

SEQ ID NO: 96033 - DNA, 20 bp, Artificial Sequence
  MKO10096033_B_Lcn5
  gRNA
tacaaggtcaccagaatatc

SEQ ID NO: 96034 - DNA, 20 bp, Artificial Sequence
  MKO10096034_B_Lcn5
  gRNA
tgtgattgatatcacctctc

SEQ ID NO: 96035 - DNA, 20 bp, Artificial Sequence
  MKO10096035_B_Lcn6
  gRNA
ccatttggtgaatagctgca

SEQ ID NO: 96036 - DNA, 20 bp, Artificial Sequence
  MKO10096036_B_Lcn6
  gRNA
gggcttcttgtctcaacagc

SEQ ID NO: 96037 - DNA, 20 bp, Artificial Sequence
  MKO10096037_B_Lcn6
  gRNA
tgctgaagcaagagtcccga

SEQ ID NO: 96038 - DNA, 20 bp, Artificial Sequence
  MKO10096038_B_Lcn8
  gRNA
taacagggagatccacgtgc

SEQ ID NO: 96039 - DNA, 20 bp, Artificial Sequence
  MKO10096039_B_Lcn8
  gRNA
agtctcttacctgttgtaca

SEQ ID NO: 96040 - DNA, 20 bp, Artificial Sequence
  MKO10096040_B_Lcn8
  gRNA
ctggctcatcctcgttctca

SEQ ID NO: 96041 - DNA, 20 bp, Artificial Sequence
  MKO10096041_B_Lcn9
  gRNA
atcatcgacatgacaaaaaa

SEQ ID NO: 96042 - DNA, 20 bp, Artificial Sequence
  MKO10096042_B_Lcn9
  gRNA
acccaagtgctggcactcta

SEQ ID NO: 96043 - DNA, 20 bp, Artificial Sequence
  MKO10096043_B_Lcn9
  gRNA
taccatagagtgccagcact

SEQ ID NO: 96044 - DNA, 20 bp, Artificial Sequence
  MKO10096044_B_Lcorl
  gRNA
tgactcttcagactttatgc

SEQ ID NO: 96045 - DNA, 20 bp, Artificial Sequence
  MKO10096045_B_Lcorl
  gRNA
taacattcccttagttgctc

SEQ ID NO: 96046 - DNA, 20 bp, Artificial Sequence
  MKO10096046_B_Lcorl
  gRNA
tccttcttctgaaaatgcag

SEQ ID NO: 96047 - DNA, 20 bp, Artificial Sequence
  MKO10096047_B_Lcor
  gRNA
ttacccgttcccttgagtac

SEQ ID NO: 96048 - DNA, 20 bp, Artificial Sequence
  MKO10096048_B_Lcor
  gRNA
cgtgctcagcaaactgctca

SEQ ID NO: 96049 - DNA, 20 bp, Artificial Sequence
  MKO10096049_B_Lcor
  gRNA
tgctccagtactcaagggaa

SEQ ID NO: 96050 - DNA, 20 bp, Artificial Sequence
  MKO10096050_B_Lcp1
  gRNA
gtcacagataccgatggcaa

SEQ ID NO: 96051 - DNA, 20 bp, Artificial Sequence
  MKO10096051_B_Lcp1
  gRNA
accaacgctggactgctcag

SEQ ID NO: 96052 - DNA, 20 bp, Artificial Sequence
  MKO10096052_B_Lcp1
  gRNA
agacccacctgaatggtgaa

SEQ ID NO: 96053 - DNA, 20 bp, Artificial Sequence
  MKO10096053_B_Lcp2
  gRNA
tctctgtacagctgaactac

SEQ ID NO: 96054 - DNA, 20 bp, Artificial Sequence
  MKO10096054_B_Lcp2
  gRNA
tttgcagaccccagattcca

SEQ ID NO: 96055 - DNA, 20 bp, Artificial Sequence
  MKO10096055_B_Lcp2
  gRNA
ttcagaagttccctaagctg

SEQ ID NO: 96056 - DNA, 20 bp, Artificial Sequence
  MKO10096056_B_Lctl
  gRNA
ggcagaactgcccacgcccc

SEQ ID NO: 96057 - DNA, 20 bp, Artificial Sequence
  MKO10096057_B_Lctl
  gRNA
aactttatagtagctgtcac

SEQ ID NO: 96058 - DNA, 20 bp, Artificial Sequence
  MKO10096058_B_Lctl
  gRNA
tgacttgtagttccttcagc

SEQ ID NO: 96059 - DNA, 20 bp, Artificial Sequence
  MKO10096059_B_Lct
  gRNA
aaagaccaagtccagactgt

SEQ ID NO: 96060 - DNA, 20 bp, Artificial Sequence
  MKO10096060_B_Lct
  gRNA
tgacatcaaacccaacagtc

SEQ ID NO: 96061 - DNA, 20 bp, Artificial Sequence
  MKO10096061_B_Lct
  gRNA
tctgccagacccatcctcag

SEQ ID NO: 96062 - DNA, 20 bp, Artificial Sequence
  MKO10096062_B_Ldb1
  gRNA
ccccacatcccgatccagca

SEQ ID NO: 96063 - DNA, 20 bp, Artificial Sequence
  MKO10096063_B_Ldb1
  gRNA
cccaggaggcacacaccata

SEQ ID NO: 96064 - DNA, 20 bp, Artificial Sequence
  MKO10096064_B_Ldb1
  gRNA
ttcaggagtgtgacaatctc

SEQ ID NO: 96065 - DNA, 20 bp, Artificial Sequence
  MKO10096065_B_Ldb2
  gRNA
acttcaccctcaactacctc

SEQ ID NO: 96066 - DNA, 20 bp, Artificial Sequence
  MKO10096066_B_Ldb2
  gRNA
actttaccattagacagtac

SEQ ID NO: 96067 - DNA, 20 bp, Artificial Sequence
  MKO10096067_B_Ldb2
  gRNA
acctcatgagaataaaaacg

SEQ ID NO: 96068 - DNA, 20 bp, Artificial Sequence
  MKO10096068_B_Ldb3
  gRNA
cacttacccgggagatagtg

SEQ ID NO: 96069 - DNA, 20 bp, Artificial Sequence
  MKO10096069_B_Ldb3
  gRNA
gccagtgatcccccaccaga

SEQ ID NO: 96070 - DNA, 20 bp, Artificial Sequence
  MKO10096070_B_Ldb3
  gRNA
gtctgtgttgacgccatcaa

SEQ ID NO: 96071 - DNA, 20 bp, Artificial Sequence
  MKO10096071_B_Ldhal6b
  gRNA
gccggcattaaaggtattct

SEQ ID NO: 96072 - DNA, 20 bp, Artificial Sequence
  MKO10096072_B_Ldhal6b
  gRNA
cgtttcgctggactaaattc

SEQ ID NO: 96073 - DNA, 20 bp, Artificial Sequence
  MKO10096073_B_Ldhal6b
  gRNA
gcgtctgtactgcctagcaa

SEQ ID NO: 96074 - DNA, 20 bp, Artificial Sequence
  MKO10096074_B_Ldha
  gRNA
cgcgggggcccgtcagcaag

SEQ ID NO: 96075 - DNA, 20 bp, Artificial Sequence
  MKO10096075_B_Ldha
  gRNA
taccttcattaagatactga

SEQ ID NO: 96076 - DNA, 20 bp, Artificial Sequence
  MKO10096076_B_Ldha
  gRNA
ccaaaaattgtctccagcaa

SEQ ID NO: 96077 - DNA, 20 bp, Artificial Sequence
  MKO10096077_B_Ldhb
  gRNA
gggctgtacttgacgatctg

SEQ ID NO: 96078 - DNA, 20 bp, Artificial Sequence
  MKO10096078_B_Ldhb
  gRNA
aggtagcccgctcagtttcc

SEQ ID NO: 96079 - DNA, 20 bp, Artificial Sequence
  MKO10096079_B_Ldhb
  gRNA
tctggctgatgaacttgccc

SEQ ID NO: 96080 - DNA, 20 bp, Artificial Sequence
  MKO10096080_B_Ldhc
  gRNA
gtcaaccctacaagctgcca

SEQ ID NO: 96081 - DNA, 20 bp, Artificial Sequence
  MKO10096081_B_Ldhc
  gRNA
tacagccacttccgatcaca

SEQ ID NO: 96082 - DNA, 20 bp, Artificial Sequence
  MKO10096082_B_Ldhc
  gRNA
agcactccaaaaatcgtctt

SEQ ID NO: 96083 - DNA, 20 bp, Artificial Sequence
  MKO10096083_B_Ldhd
  gRNA
cccatcatcccatttggcac

SEQ ID NO: 96084 - DNA, 20 bp, Artificial Sequence
  MKO10096084_B_Ldhd
  gRNA
gcctgtgccaaatgggatga

SEQ ID NO: 96085 - DNA, 20 bp, Artificial Sequence
  MKO10096085_B_Ldhd
  gRNA
aatacccacctgcgtgacag

SEQ ID NO: 96086 - DNA, 20 bp, Artificial Sequence
  MKO10096086_B_Ldlrad1
  gRNA
ggacatccaccccgcacacc

SEQ ID NO: 96087 - DNA, 20 bp, Artificial Sequence
  MKO10096087_B_Ldlrad1
  gRNA
gtgactacgtgcccgccctg

SEQ ID NO: 96088 - DNA, 20 bp, Artificial Sequence
  MKO10096088_B_Ldlrad1
  gRNA
agtactgcagctgtgtcccg

SEQ ID NO: 96089 - DNA, 20 bp, Artificial Sequence
  MKO10096089_B_Ldlrad2
  gRNA
caaggcgctgactcttcttg

SEQ ID NO: 96090 - DNA, 20 bp, Artificial Sequence
  MKO10096090_B_Ldlrad2
  gRNA
gactggaacatggacaactg

SEQ ID NO: 96091 - DNA, 20 bp, Artificial Sequence
  MKO10096091_B_Ldlrad2
  gRNA
cgatcactgacctccacagc

SEQ ID NO: 96092 - DNA, 20 bp, Artificial Sequence
  MKO10096092_B_Ldlrad3
  gRNA
cctgcagtggtagcgagccg

SEQ ID NO: 96093 - DNA, 20 bp, Artificial Sequence
  MKO10096093_B_Ldlrad3
  gRNA
tgaagctcttgtcgatgcac

SEQ ID NO: 96094 - DNA, 20 bp, Artificial Sequence
  MKO10096094_B_Ldlrad3
  gRNA
accaacgagtgcaacatccc

SEQ ID NO: 96095 - DNA, 20 bp, Artificial Sequence
  MKO10096095_B_Ldlrad4
  gRNA
aactcaaccgagagtccgtg

SEQ ID NO: 96096 - DNA, 20 bp, Artificial Sequence
  MKO10096096_B_Ldlrad4
  gRNA
tgtccccacagtcgttctgt

SEQ ID NO: 96097 - DNA, 20 bp, Artificial Sequence
  MKO10096097_B_Ldlrad4
  gRNA
cgctgcacggagctatcaga

SEQ ID NO: 96098 - DNA, 20 bp, Artificial Sequence
  MKO10096098_B_Ldlrap1
  gRNA
tcgagaacgtgtccatttac

SEQ ID NO: 96099 - DNA, 20 bp, Artificial Sequence
  MKO10096099_B_Ldlrap1
  gRNA
agaggaaggcgtggcactcg

SEQ ID NO: 96100 - DNA, 20 bp, Artificial Sequence
  MKO10096100_B_Ldlrap1
  gRNA
tgcagacaagatgcacgaca

SEQ ID NO: 96101 - DNA, 20 bp, Artificial Sequence
  MKO10096101_B_Ldlr
  gRNA
atcggagccatccgggcact

SEQ ID NO: 96102 - DNA, 20 bp, Artificial Sequence
  MKO10096102_B_Ldlr
  gRNA
cgtcacagacccagctgcga

SEQ ID NO: 96103 - DNA, 20 bp, Artificial Sequence
  MKO10096103_B_Ldlr
  gRNA
aaaatgcatcgctagcaagt

SEQ ID NO: 96104 - DNA, 20 bp, Artificial Sequence
  MKO10096104_B_Ldoc1l
  gRNA
ctcgcgcctcagcgcggagt

SEQ ID NO: 96105 - DNA, 20 bp, Artificial Sequence
  MKO10096105_B_Ldoc1l
  gRNA
ccgcgtccaatagggctgtg

SEQ ID NO: 96106 - DNA, 20 bp, Artificial Sequence
  MKO10096106_B_Ldoc1l
  gRNA
ggtgcgcagcagagttagtt

SEQ ID NO: 96107 - DNA, 20 bp, Artificial Sequence
  MKO10096107_B_Ldoc1
  gRNA
tagctatttgactcgatgta

SEQ ID NO: 96108 - DNA, 20 bp, Artificial Sequence
  MKO10096108_B_Ldoc1
  gRNA
gtcgcttctgcacgcgcttc

SEQ ID NO: 96109 - DNA, 20 bp, Artificial Sequence
  MKO10096109_B_Ldoc1
  gRNA
gtcttacatgcttgcgaatg

SEQ ID NO: 96110 - DNA, 20 bp, Artificial Sequence
  MKO10096110_B_Leap2
  gRNA
tccaaaatggggtcattctc

SEQ ID NO: 96111 - DNA, 20 bp, Artificial Sequence
  MKO10096111_B_Leap2
  gRNA
ttacctgacccagcagcagc

SEQ ID NO: 96112 - DNA, 20 bp, Artificial Sequence
  MKO10096112_B_Leap2
  gRNA
cctgacttgcctgctgctgc

SEQ ID NO: 96113 - DNA, 20 bp, Artificial Sequence
  MKO10096113_B_Lect1
  gRNA
accgtcaccgtgaagccctc

SEQ ID NO: 96114 - DNA, 20 bp, Artificial Sequence
  MKO10096114_B_Lect1
  gRNA
cattacagtatgagtatcaa

SEQ ID NO: 96115 - DNA, 20 bp, Artificial Sequence
  MKO10096115_B_Lect1
  gRNA
ctttaaaatgggaagcggag

SEQ ID NO: 96116 - DNA, 20 bp, Artificial Sequence
  MKO10096116_B_Lect2
  gRNA
gtggacgtcctgtgctcgga

SEQ ID NO: 96117 - DNA, 20 bp, Artificial Sequence
  MKO10096117_B_Lect2
  gRNA
tgcccgggtaaactttctgc

SEQ ID NO: 96118 - DNA, 20 bp, Artificial Sequence
  MKO10096118_B_Lect2
  gRNA
ccacagatccatccgagcac

SEQ ID NO: 96119 - DNA, 20 bp, Artificial Sequence
  MKO10096119_B_Lef1
  gRNA
aggagggtcccttgttgtac

SEQ ID NO: 96120 - DNA, 20 bp, Artificial Sequence
  MKO10096120_B_Lef1
  gRNA
agcgacccgtacatgtcaaa

SEQ ID NO: 96121 - DNA, 20 bp, Artificial Sequence
  MKO10096121_B_Lef1
  gRNA
ggacagatcaccccacccat

SEQ ID NO: 96122 - DNA, 20 bp, Artificial Sequence
  MKO10096122_B_Lefty1
  gRNA
gctcgatcaaccgccagtcc

SEQ ID NO: 96123 - DNA, 20 bp, Artificial Sequence
  MKO10096123_B_Lefty1
  gRNA
gcccatgattgtcagcgtga

SEQ ID NO: 96124 - DNA, 20 bp, Artificial Sequence
  MKO10096124_B_Lefty1
  gRNA
atgcttacccatagtccttg

SEQ ID NO: 96125 - DNA, 20 bp, Artificial Sequence
  MKO10096125_B_Lefty2
  gRNA
ccccagaaatggccacccga

SEQ ID NO: 96126 - DNA, 20 bp, Artificial Sequence
  MKO10096126_B_Lefty2
  gRNA
gcactgccctcatcgactct

SEQ ID NO: 96127 - DNA, 20 bp, Artificial Sequence
  MKO10096127_B_Lefty2
  gRNA
cagcctacccgtagtccttg

SEQ ID NO: 96128 - DNA, 20 bp, Artificial Sequence
  MKO10096128_B_Lekr1
  gRNA
aaagctgcagtctcttagcc

SEQ ID NO: 96129 - DNA, 20 bp, Artificial Sequence
  MKO10096129_B_Lekr1
  gRNA
aagtgacagcgagtccaaga

SEQ ID NO: 96130 - DNA, 20 bp, Artificial Sequence
  MKO10096130_B_Lekr1
  gRNA
cttgaaactaaataagagac

SEQ ID NO: 96131 - DNA, 20 bp, Artificial Sequence
  MKO10096131_B_Lelp1
  gRNA
tagcagcttgtttagacagc

SEQ ID NO: 96132 - DNA, 20 bp, Artificial Sequence
  MKO10096132_B_Lelp1
  gRNA
aacactgcgactgacacacc

SEQ ID NO: 96133 - DNA, 20 bp, Artificial Sequence
  MKO10096133_B_Lelp1
  gRNA
aagtctagtgactctaagaa

SEQ ID NO: 96134 - DNA, 20 bp, Artificial Sequence
  MKO10096134_B_Lemd1
  gRNA
tcgctgtcctcagagccgtg

SEQ ID NO: 96135 - DNA, 20 bp, Artificial Sequence
  MKO10096135_B_Lemd1
  gRNA
cacaagcatcttatgaagct

SEQ ID NO: 96136 - DNA, 20 bp, Artificial Sequence
  MKO10096136_B_Lemd1
  gRNA
ctgcaccagcttcttctcgt

SEQ ID NO: 96137 - DNA, 20 bp, Artificial Sequence
  MKO10096137_B_Lemd2
  gRNA
gttcgtgcagcagctccaac

SEQ ID NO: 96138 - DNA, 20 bp, Artificial Sequence
  MKO10096138_B_Lemd2
  gRNA
gagcaagtgcatcccagtcc

SEQ ID NO: 96139 - DNA, 20 bp, Artificial Sequence
  MKO10096139_B_Lemd2
  gRNA
cgtctcagtgaaattgttgc

SEQ ID NO: 96140 - DNA, 20 bp, Artificial Sequence
  MKO10096140_B_Lemd3
  gRNA
ttaaatacatcttcatactc

SEQ ID NO: 96141 - DNA, 20 bp, Artificial Sequence
  MKO10096141_B_Lemd3
  gRNA
ttaaatatgcagctgcttct

SEQ ID NO: 96142 - DNA, 20 bp, Artificial Sequence
  MKO10096142_B_Lemd3
  gRNA
taaaataatacctgcaatct

SEQ ID NO: 96143 - DNA, 20 bp, Artificial Sequence
  MKO10096143_B_Lenep
  gRNA
tctctcagagatgcccttcg

SEQ ID NO: 96144 - DNA, 20 bp, Artificial Sequence
  MKO10096144_B_Lenep
  gRNA
ccaggtgcctgtcattaaaa

SEQ ID NO: 96145 - DNA, 20 bp, Artificial Sequence
  MKO10096145_B_Lenep
  gRNA
cctacatccttctttgttgc

SEQ ID NO: 96146 - DNA, 20 bp, Artificial Sequence
  MKO10096146_B_Leng1
  gRNA
cggacgtgccagctcttctt

SEQ ID NO: 96147 - DNA, 20 bp, Artificial Sequence
  MKO10096147_B_Leng1
  gRNA
cccgctgaagacgctcagca

SEQ ID NO: 96148 - DNA, 20 bp, Artificial Sequence
  MKO10096148_B_Leng1
  gRNA
agccgagagagctcgagcag

SEQ ID NO: 96149 - DNA, 20 bp, Artificial Sequence
  MKO10096149_B_Leng8
  gRNA
tggcgggccttctcccactc

SEQ ID NO: 96150 - DNA, 20 bp, Artificial Sequence
  MKO10096150_B_Leng8
  gRNA
atggggtagtagtagctata

SEQ ID NO: 96151 - DNA, 20 bp, Artificial Sequence
  MKO10096151_B_Leng8
  gRNA
ctatgcacgagaacccagag

SEQ ID NO: 96152 - DNA, 20 bp, Artificial Sequence
  MKO10096152_B_Leng9
  gRNA
gcctccggttgcgtaaccac

SEQ ID NO: 96153 - DNA, 20 bp, Artificial Sequence
  MKO10096153_B_Leng9
  gRNA
tgcggcactgccaacacgcc

SEQ ID NO: 96154 - DNA, 20 bp, Artificial Sequence
  MKO10096154_B_Leng9
  gRNA
aacaggtcttgattcgggcc

SEQ ID NO: 96155 - DNA, 20 bp, Artificial Sequence
  MKO10096155_B_Leo1
  gRNA
ctgtctgcttcggaatccga

SEQ ID NO: 96156 - DNA, 20 bp, Artificial Sequence
  MKO10096156_B_Leo1
  gRNA
ccccaaagtaaacacggact

SEQ ID NO: 96157 - DNA, 20 bp, Artificial Sequence
  MKO10096157_B_Leo1
  gRNA
gcccaagtccgtgtttactt

SEQ ID NO: 96158 - DNA, 20 bp, Artificial Sequence
  MKO10096158_B_Lepre1
  gRNA
gcaggtcttactgttgtagt

SEQ ID NO: 96159 - DNA, 20 bp, Artificial Sequence
  MKO10096159_B_Lepre1
  gRNA
cctttcagatcattacgtcc

SEQ ID NO: 96160 - DNA, 20 bp, Artificial Sequence
  MKO10096160_B_Lepre1
  gRNA
gactattaccaaaccatgtc

SEQ ID NO: 96161 - DNA, 20 bp, Artificial Sequence
  MKO10096161_B_Leprel1
  gRNA
tctcacctcccgggcctcaa

SEQ ID NO: 96162 - DNA, 20 bp, Artificial Sequence
  MKO10096162_B_Leprel1
  gRNA
tcgtctacagctcaaccagc

SEQ ID NO: 96163 - DNA, 20 bp, Artificial Sequence
  MKO10096163_B_Leprel1
  gRNA
agtgccgtgctctatgtgag

SEQ ID NO: 96164 - DNA, 20 bp, Artificial Sequence
  MKO10096164_B_Leprel2
  gRNA
cctcgtgcagccgtctcagc

SEQ ID NO: 96165 - DNA, 20 bp, Artificial Sequence
  MKO10096165_B_Leprel2
  gRNA
gggttacctctcgtggtccc

SEQ ID NO: 96166 - DNA, 20 bp, Artificial Sequence
  MKO10096166_B_Leprel2
  gRNA
gaaccagtaccaaactcagt

SEQ ID NO: 96167 - DNA, 20 bp, Artificial Sequence
  MKO10096167_B_Leprel4
  gRNA
aagacgaggactttcaaccc

SEQ ID NO: 96168 - DNA, 20 bp, Artificial Sequence
  MKO10096168_B_Leprel4
  gRNA
agatgagtccctcaccgacc

SEQ ID NO: 96169 - DNA, 20 bp, Artificial Sequence
  MKO10096169_B_Leprel4
  gRNA
ccacgagcaggtagacttca

SEQ ID NO: 96170 - DNA, 20 bp, Artificial Sequence
  MKO10096170_B_Leprotl1
  gRNA
ctccttacacgcgttgctca

SEQ ID NO: 96171 - DNA, 20 bp, Artificial Sequence
  MKO10096171_B_Leprotl1
  gRNA
cagcccgatcgctcctccaa

SEQ ID NO: 96172 - DNA, 20 bp, Artificial Sequence
  MKO10096172_B_Leprotl1
  gRNA
cgtcgttgcttccaaagacc

SEQ ID NO: 96173 - DNA, 20 bp, Artificial Sequence
  MKO10096173_B_Leprot
  gRNA
acgcgaccagcagtgcctgt

SEQ ID NO: 96174 - DNA, 20 bp, Artificial Sequence
  MKO10096174_B_Leprot
  gRNA
catctcctcttccaaagacg

SEQ ID NO: 96175 - DNA, 20 bp, Artificial Sequence
  MKO10096175_B_Leprot
  gRNA
ttcttcctcgtctttggaag

SEQ ID NO: 96176 - DNA, 20 bp, Artificial Sequence
  MKO10096176_B_Lepr
  gRNA
cagaagagcgtagttgagtt

SEQ ID NO: 96177 - DNA, 20 bp, Artificial Sequence
  MKO10096177_B_Lepr
  gRNA
cttcaagaattatgactcta

SEQ ID NO: 96178 - DNA, 20 bp, Artificial Sequence
  MKO10096178_B_Lepr
  gRNA
cttagagtcataattcttga

SEQ ID NO: 96179 - DNA, 20 bp, Artificial Sequence
  MKO10096179_B_Lep
  gRNA
tgcttgaacataagacagat

SEQ ID NO: 96180 - DNA, 20 bp, Artificial Sequence
  MKO10096180_B_Lep
  gRNA
gctgcagatagccaatgacc

SEQ ID NO: 96181 - DNA, 20 bp, Artificial Sequence
  MKO10096181_B_Lep
  gRNA
gttgatagactgccagagtc

SEQ ID NO: 96182 - DNA, 20 bp, Artificial Sequence
  MKO10096182_B_Letm1
  gRNA
ggaagaggtccgcacaaatc

SEQ ID NO: 96183 - DNA, 20 bp, Artificial Sequence
  MKO10096183_B_Letm1
  gRNA
gttcgtggtggtgcccttca

SEQ ID NO: 96184 - DNA, 20 bp, Artificial Sequence
  MKO10096184_B_Letm1
  gRNA
gagcttgtctcagctgtacc

SEQ ID NO: 96185 - DNA, 20 bp, Artificial Sequence
  MKO10096185_B_Letm2
  gRNA
tacccttcgcctctctcgtc

SEQ ID NO: 96186 - DNA, 20 bp, Artificial Sequence
  MKO10096186_B_Letm2
  gRNA
aggtcacaagccctccacga

SEQ ID NO: 96187 - DNA, 20 bp, Artificial Sequence
  MKO10096187_B_Letm2
  gRNA
atgcatctcccagcttcgct

SEQ ID NO: 96188 - DNA, 20 bp, Artificial Sequence
  MKO10096188_B_Letmd1
  gRNA
gacacttggtgatatctcgt

SEQ ID NO: 96189 - DNA, 20 bp, Artificial Sequence
  MKO10096189_B_Letmd1
  gRNA
atcaccaagtgtctcttcgt

SEQ ID NO: 96190 - DNA, 20 bp, Artificial Sequence
  MKO10096190_B_Letmd1
  gRNA
agtttcatcaactctcttac

SEQ ID NO: 96191 - DNA, 20 bp, Artificial Sequence
  MKO10096191_B_Lfng
  gRNA
gctggcttctgcatcagccg

SEQ ID NO: 96192 - DNA, 20 bp, Artificial Sequence
  MKO10096192_B_Lfng
  gRNA
agcctggcggctgtgggccg

SEQ ID NO: 96193 - DNA, 20 bp, Artificial Sequence
  MKO10096193_B_Lfng
  gRNA
tggccctaaagatgggccca

SEQ ID NO: 96194 - DNA, 20 bp, Artificial Sequence
  MKO10096194_B_Lgals12
  gRNA
cttgttcaggtgattcctta

SEQ ID NO: 96195 - DNA, 20 bp, Artificial Sequence
  MKO10096195_B_Lgals12
  gRNA
gactctggcaaaaagagatc

SEQ ID NO: 96196 - DNA, 20 bp, Artificial Sequence
  MKO10096196_B_Lgals12
  gRNA
gatggtcacgctgcagggtg

SEQ ID NO: 96197 - DNA, 20 bp, Artificial Sequence
  MKO10096197_B_Lgals1
  gRNA
aatcctcgcttcaatgccca

SEQ ID NO: 96198 - DNA, 20 bp, Artificial Sequence
  MKO10096198_B_Lgals1
  gRNA
atgtctcaaagttcggggag

SEQ ID NO: 96199 - DNA, 20 bp, Artificial Sequence
  MKO10096199_B_Lgals1
  gRNA
tgaagcgaggattgaagtgt

SEQ ID NO: 96200 - DNA, 20 bp, Artificial Sequence
  MKO10096200_B_Lgals2
  gRNA
ctcgttgctcttgtccccag

SEQ ID NO: 96201 - DNA, 20 bp, Artificial Sequence
  MKO10096201_B_Lgals2
  gRNA
ccaactgcactacttgagca

SEQ ID NO: 96202 - DNA, 20 bp, Artificial Sequence
  MKO10096202_B_Lgals2
  gRNA
gttgctccaggagaaatttg

SEQ ID NO: 96203 - DNA, 20 bp, Artificial Sequence
  MKO10096203_B_Lgals3bp
  gRNA
tggcccgtgcgtacgcataa

SEQ ID NO: 96204 - DNA, 20 bp, Artificial Sequence
  MKO10096204_B_Lgals3bp
  gRNA
gagccgctgtgggcacgaga

SEQ ID NO: 96205 - DNA, 20 bp, Artificial Sequence
  MKO10096205_B_Lgals3bp
  gRNA
gcaggcgtggtctgctccaa

SEQ ID NO: 96206 - DNA, 20 bp, Artificial Sequence
  MKO10096206_B_Lgals3
  gRNA
tagcttaacgatgccttagc

SEQ ID NO: 96207 - DNA, 20 bp, Artificial Sequence
  MKO10096207_B_Lgals3
  gRNA
ggtgcatgggggaaccagcc

SEQ ID NO: 96208 - DNA, 20 bp, Artificial Sequence
  MKO10096208_B_Lgals3
  gRNA
cagtgaaacccaacgcaaac

SEQ ID NO: 96209 - DNA, 20 bp, Artificial Sequence
  MKO10096209_B_Lgals4
  gRNA
accggatatggggctgcagc

SEQ ID NO: 96210 - DNA, 20 bp, Artificial Sequence
  MKO10096210_B_Lgals4
  gRNA
ccttctatgaatacgggcac

SEQ ID NO: 96211 - DNA, 20 bp, Artificial Sequence
  MKO10096211_B_Lgals4
  gRNA
gggatgtccgtttacatcca

SEQ ID NO: 96212 - DNA, 20 bp, Artificial Sequence
  MKO10096212_B_Lgals6
  gRNA
gccccacagcgaagttcacg

SEQ ID NO: 96213 - DNA, 20 bp, Artificial Sequence
  MKO10096213_B_Lgals6
  gRNA
ccggtgcccgtattcataga

SEQ ID NO: 96214 - DNA, 20 bp, Artificial Sequence
  MKO10096214_B_Lgals6
  gRNA
gggatgtccgtttacatcca

SEQ ID NO: 96215 - DNA, 20 bp, Artificial Sequence
  MKO10096215_B_Lgals7
  gRNA
gcggcatccggtggtggaag

SEQ ID NO: 96216 - DNA, 20 bp, Artificial Sequence
  MKO10096216_B_Lgals7
  gRNA
ggcactgtcatgagaattcg

SEQ ID NO: 96217 - DNA, 20 bp, Artificial Sequence
  MKO10096217_B_Lgals7
  gRNA
tgggatatcacctgccagcc

SEQ ID NO: 96218 - DNA, 20 bp, Artificial Sequence
  MKO10096218_B_Lgals8
  gRNA
actttaaccctcggttcaaa

SEQ ID NO: 96219 - DNA, 20 bp, Artificial Sequence
  MKO10096219_B_Lgals8
  gRNA
ccttagataatcccctatgt

SEQ ID NO: 96220 - DNA, 20 bp, Artificial Sequence
  MKO10096220_B_Lgals8
  gRNA
cggattacaatcagagagcc

SEQ ID NO: 96221 - DNA, 20 bp, Artificial Sequence
  MKO10096221_B_Lgals9
  gRNA
gctcaaagggcatccccttc

SEQ ID NO: 96222 - DNA, 20 bp, Artificial Sequence
  MKO10096222_B_Lgals9
  gRNA
gtttgcaacacgaagcagaa

SEQ ID NO: 96223 - DNA, 20 bp, Artificial Sequence
  MKO10096223_B_Lgals9
  gRNA
ctgcagatcatcccctttac

SEQ ID NO: 96224 - DNA, 20 bp, Artificial Sequence
  MKO10096224_B_Lgalsl
  gRNA
cagtcgtgggaagtacacgt

SEQ ID NO: 96225 - DNA, 20 bp, Artificial Sequence
  MKO10096225_B_Lgalsl
  gRNA
tccacaaacactctgaaacg

SEQ ID NO: 96226 - DNA, 20 bp, Artificial Sequence
  MKO10096226_B_Lgalsl
  gRNA
tcaaagctgtgttcacagac

SEQ ID NO: 96227 - DNA, 20 bp, Artificial Sequence
  MKO10096227_B_Lgi1
  gRNA
gaatcaaagacttgagtccc

SEQ ID NO: 96228 - DNA, 20 bp, Artificial Sequence
  MKO10096228_B_Lgi1
  gRNA
ttcagatcctttgtgagatc

SEQ ID NO: 96229 - DNA, 20 bp, Artificial Sequence
  MKO10096229_B_Lgi1
  gRNA
atcatcactgatcacatcaa

SEQ ID NO: 96230 - DNA, 20 bp, Artificial Sequence
  MKO10096230_B_Lgi2
  gRNA
gcccgtaggagcctagtaaa

SEQ ID NO: 96231 - DNA, 20 bp, Artificial Sequence
  MKO10096231_B_Lgi2
  gRNA
ataagacttacaggtgagtc

SEQ ID NO: 96232 - DNA, 20 bp, Artificial Sequence
  MKO10096232_B_Lgi2
  gRNA
ccgaaaggcatttcttgaaa

SEQ ID NO: 96233 - DNA, 20 bp, Artificial Sequence
  MKO10096233_B_Lgi3
  gRNA
ccatacaagaactgcaacaa

SEQ ID NO: 96234 - DNA, 20 bp, Artificial Sequence
  MKO10096234_B_Lgi3
  gRNA
ctctccaagtttaccttcag

SEQ ID NO: 96235 - DNA, 20 bp, Artificial Sequence
  MKO10096235_B_Lgi3
  gRNA
cagtcctctgaaggtaaact

SEQ ID NO: 96236 - DNA, 20 bp, Artificial Sequence
  MKO10096236_B_Lgi4
  gRNA
cctggccaacaaccacctcg

SEQ ID NO: 96237 - DNA, 20 bp, Artificial Sequence
  MKO10096237_B_Lgi4
  gRNA
gctatactcacaggtactgc

SEQ ID NO: 96238 - DNA, 20 bp, Artificial Sequence
  MKO10096238_B_Lgi4
  gRNA
ggaatctgggtagagcctcg

SEQ ID NO: 96239 - DNA, 20 bp, Artificial Sequence
  MKO10096239_B_Lgmn
  gRNA
aatttcctcgccgtgctgag

SEQ ID NO: 96240 - DNA, 20 bp, Artificial Sequence
  MKO10096240_B_Lgmn
  gRNA
acgcctaccagatcatccac

SEQ ID NO: 96241 - DNA, 20 bp, Artificial Sequence
  MKO10096241_B_Lgmn
  gRNA
cctctccggtgtagtccttc

SEQ ID NO: 96242 - DNA, 20 bp, Artificial Sequence
  MKO10096242_B_Lgr4
  gRNA
attcaccaacctttcaagct

SEQ ID NO: 96243 - DNA, 20 bp, Artificial Sequence
  MKO10096243_B_Lgr4
  gRNA
atccacccaaaagccttgtc

SEQ ID NO: 96244 - DNA, 20 bp, Artificial Sequence
  MKO10096244_B_Lgr4
  gRNA
gagttctttcaacccagaca

SEQ ID NO: 96245 - DNA, 20 bp, Artificial Sequence
  MKO10096245_B_Lgr5
  gRNA
ggaccccacagacgtcttgc

SEQ ID NO: 96246 - DNA, 20 bp, Artificial Sequence
  MKO10096246_B_Lgr5
  gRNA
aaattctgtagcgcttcctc

SEQ ID NO: 96247 - DNA, 20 bp, Artificial Sequence
  MKO10096247_B_Lgr5
  gRNA
gtggtacttacaactcttct

SEQ ID NO: 96248 - DNA, 20 bp, Artificial Sequence
  MKO10096248_B_Lgr6
  gRNA
gagagctctgacggggatct

SEQ ID NO: 96249 - DNA, 20 bp, Artificial Sequence
  MKO10096249_B_Lgr6
  gRNA
ccgtgaggttgttcatactg

SEQ ID NO: 96250 - DNA, 20 bp, Artificial Sequence
  MKO10096250_B_Lgr6
  gRNA
cttccaccacctgcgcttcc

SEQ ID NO: 96251 - DNA, 20 bp, Artificial Sequence
  MKO10096251_B_Lgsn
  gRNA
gctgaattcagcccgaatac

SEQ ID NO: 96252 - DNA, 20 bp, Artificial Sequence
  MKO10096252_B_Lgsn
  gRNA
ttgcttcaaatcgtacaaac

SEQ ID NO: 96253 - DNA, 20 bp, Artificial Sequence
  MKO10096253_B_Lgsn
  gRNA
taaaactctgagcattgtac

SEQ ID NO: 96254 - DNA, 20 bp, Artificial Sequence
  MKO10096254_B_Lhb
  gRNA
gcccccttcggccactgtgc

SEQ ID NO: 96255 - DNA, 20 bp, Artificial Sequence
  MKO10096255_B_Lhb
  gRNA
atcaagaatggagaggctcc

SEQ ID NO: 96256 - DNA, 20 bp, Artificial Sequence
  MKO10096256_B_Lhb
  gRNA
gcaaagcagccggcagtact

SEQ ID NO: 96257 - DNA, 20 bp, Artificial Sequence
  MKO10096257_B_Lhcgr
  gRNA
cttacatttcagacagattg

SEQ ID NO: 96258 - DNA, 20 bp, Artificial Sequence
  MKO10096258_B_Lhcgr
  gRNA
aatctctcagagtgattccc

SEQ ID NO: 96259 - DNA, 20 bp, Artificial Sequence
  MKO10096259_B_Lhcgr
  gRNA
gattactttgacagggagat

SEQ ID NO: 96260 - DNA, 20 bp, Artificial Sequence
  MKO10096260_B_Lhfpl1
  gRNA
gtgcattatatcctttagga

SEQ ID NO: 96261 - DNA, 20 bp, Artificial Sequence
  MKO10096261_B_Lhfpl1
  gRNA
cagccatgttgatctgcacc

SEQ ID NO: 96262 - DNA, 20 bp, Artificial Sequence
  MKO10096262_B_Lhfpl1
  gRNA
ttcacaggaacctgtagact

SEQ ID NO: 96263 - DNA, 20 bp, Artificial Sequence
  MKO10096263_B_Lhfpl2
  gRNA
cgcataccgtccacagtcta

SEQ ID NO: 96264 - DNA, 20 bp, Artificial Sequence
  MKO10096264_B_Lhfpl2
  gRNA
gatcttcattctctgcgtag

SEQ ID NO: 96265 - DNA, 20 bp, Artificial Sequence
  MKO10096265_B_Lhfpl2
  gRNA
tcacctgccgctcgatgctc

SEQ ID NO: 96266 - DNA, 20 bp, Artificial Sequence
  MKO10096266_B_Lhfpl3
  gRNA
agcccgaaatagccggcttg

SEQ ID NO: 96267 - DNA, 20 bp, Artificial Sequence
  MKO10096267_B_Lhfpl3
  gRNA
gcttgggaacctacgatgtc

SEQ ID NO: 96268 - DNA, 20 bp, Artificial Sequence
  MKO10096268_B_Lhfpl3
  gRNA
tcgtttctagcgtttgtgct

SEQ ID NO: 96269 - DNA, 20 bp, Artificial Sequence
  MKO10096269_B_Lhfpl4
  gRNA
gggcaccatgctgccctcgc

SEQ ID NO: 96270 - DNA, 20 bp, Artificial Sequence
  MKO10096270_B_Lhfpl4
  gRNA
agttccgcatgtagtgctca

SEQ ID NO: 96271 - DNA, 20 bp, Artificial Sequence
  MKO10096271_B_Lhfpl4
  gRNA
caggaggtgatgtgtctggc

SEQ ID NO: 96272 - DNA, 20 bp, Artificial Sequence
  MKO10096272_B_Lhfpl5
  gRNA
acacatacgccgcacctcac

SEQ ID NO: 96273 - DNA, 20 bp, Artificial Sequence
  MKO10096273_B_Lhfpl5
  gRNA
ctagccacgggcctaatgat

SEQ ID NO: 96274 - DNA, 20 bp, Artificial Sequence
  MKO10096274_B_Lhfpl5
  gRNA
agtgaggtgcggcgtatgtg

SEQ ID NO: 96275 - DNA, 20 bp, Artificial Sequence
  MKO10096275_B_Lhfp
  gRNA
tccttaggcaagtgtgagat

SEQ ID NO: 96276 - DNA, 20 bp, Artificial Sequence
  MKO10096276_B_Lhfp
  gRNA
cagacttgtggctacatctc

SEQ ID NO: 96277 - DNA, 20 bp, Artificial Sequence
  MKO10096277_B_Lhfp
  gRNA
agatgtagccacaagtctgc

SEQ ID NO: 96278 - DNA, 20 bp, Artificial Sequence
  MKO10096278_B_Lhpp
  gRNA
ggcctcgctccttcaggatc

SEQ ID NO: 96279 - DNA, 20 bp, Artificial Sequence
  MKO10096279_B_Lhpp
  gRNA
aacagtccccgctgaaagtg

SEQ ID NO: 96280 - DNA, 20 bp, Artificial Sequence
  MKO10096280_B_Lhpp
  gRNA
cgatgtcatcaaattctgag

SEQ ID NO: 96281 - DNA, 20 bp, Artificial Sequence
  MKO10096281_B_Lhx1
  gRNA
agacaaatggttcccgtagc

SEQ ID NO: 96282 - DNA, 20 bp, Artificial Sequence
  MKO10096282_B_Lhx1
  gRNA
acgccatatccgtgagcaac

SEQ ID NO: 96283 - DNA, 20 bp, Artificial Sequence
  MKO10096283_B_Lhx1
  gRNA
gcggccgctggtggaccgcc

SEQ ID NO: 96284 - DNA, 20 bp, Artificial Sequence
  MKO10096284_B_Lhx2
  gRNA
ggtagggctggtcacgatcc

SEQ ID NO: 96285 - DNA, 20 bp, Artificial Sequence
  MKO10096285_B_Lhx2
  gRNA
ggcgagtcattagaaaaggt

SEQ ID NO: 96286 - DNA, 20 bp, Artificial Sequence
  MKO10096286_B_Lhx2
  gRNA
cgagaacgatgctgaacacc

SEQ ID NO: 96287 - DNA, 20 bp, Artificial Sequence
  MKO10096287_B_Lhx3
  gRNA
ctacaacacttcgcccaagc

SEQ ID NO: 96288 - DNA, 20 bp, Artificial Sequence
  MKO10096288_B_Lhx3
  gRNA
cctgcattgcttcgcctgcg

SEQ ID NO: 96289 - DNA, 20 bp, Artificial Sequence
  MKO10096289_B_Lhx3
  gRNA
cggcttgggcgaagtgttgt

SEQ ID NO: 96290 - DNA, 20 bp, Artificial Sequence
  MKO10096290_B_Lhx4
  gRNA
tttcgctacagatgactcgg

SEQ ID NO: 96291 - DNA, 20 bp, Artificial Sequence
  MKO10096291_B_Lhx4
  gRNA
agttctacaagagtgtcaag

SEQ ID NO: 96292 - DNA, 20 bp, Artificial Sequence
  MKO10096292_B_Lhx4
  gRNA
ccttcaggatgaacttatcc

SEQ ID NO: 96293 - DNA, 20 bp, Artificial Sequence
  MKO10096293_B_Lhx5
  gRNA
cgctttggcacaaagtgcgc

SEQ ID NO: 96294 - DNA, 20 bp, Artificial Sequence
  MKO10096294_B_Lhx5
  gRNA
aggtatctctccgagcgacc

SEQ ID NO: 96295 - DNA, 20 bp, Artificial Sequence
  MKO10096295_B_Lhx5
  gRNA
ccaaagtgactactacgctc

SEQ ID NO: 96296 - DNA, 20 bp, Artificial Sequence
  MKO10096296_B_Lhx6
  gRNA
ccgtgtgtcgcacatcgctg

SEQ ID NO: 96297 - DNA, 20 bp, Artificial Sequence
  MKO10096297_B_Lhx6
  gRNA
cctcagcgatgtgcgacaca

SEQ ID NO: 96298 - DNA, 20 bp, Artificial Sequence
  MKO10096298_B_Lhx6
  gRNA
gtcgctttgcagccggaccc

SEQ ID NO: 96299 - DNA, 20 bp, Artificial Sequence
  MKO10096299_B_Lhx8
  gRNA
gcagtgccccgggctcatgt

SEQ ID NO: 96300 - DNA, 20 bp, Artificial Sequence
  MKO10096300_B_Lhx8
  gRNA
gtcgtcctcgccccagtcca

SEQ ID NO: 96301 - DNA, 20 bp, Artificial Sequence
  MKO10096301_B_Lhx8
  gRNA
tcgggctccgtgtgcccgcc

SEQ ID NO: 96302 - DNA, 20 bp, Artificial Sequence
  MKO10096302_B_Lhx9
  gRNA
ggagatcttgcccccgcagc

SEQ ID NO: 96303 - DNA, 20 bp, Artificial Sequence
  MKO10096303_B_Lhx9
  gRNA
ctccgacaggtactatctgc

SEQ ID NO: 96304 - DNA, 20 bp, Artificial Sequence
  MKO10096304_B_Lhx9
  gRNA
tgtggcctccggagattccg

SEQ ID NO: 96305 - DNA, 20 bp, Artificial Sequence
  MKO10096305_B_Lias
  gRNA
ggaaacttaaagcgccagaa

SEQ ID NO: 96306 - DNA, 20 bp, Artificial Sequence
  MKO10096306_B_Lias
  gRNA
ccttaccatgatcgtggctg

SEQ ID NO: 96307 - DNA, 20 bp, Artificial Sequence
  MKO10096307_B_Lias
  gRNA
ctaggctaagactacctcca

SEQ ID NO: 96308 - DNA, 20 bp, Artificial Sequence
  MKO10096308_B_Lifr
  gRNA
gtcgttccacttcagtagta

SEQ ID NO: 96309 - DNA, 20 bp, Artificial Sequence
  MKO10096309_B_Lifr
  gRNA
ttgcatgcatcgtcagatgc

SEQ ID NO: 96310 - DNA, 20 bp, Artificial Sequence
  MKO10096310_B_Lifr
  gRNA
caaccaacaacatgcgagtg

SEQ ID NO: 96311 - DNA, 20 bp, Artificial Sequence
  MKO10096311_B_Lif
  gRNA
gtgccagttgattcttgatc

SEQ ID NO: 96312 - DNA, 20 bp, Artificial Sequence
  MKO10096312_B_Lif
  gRNA
ccagcccataatgaaggtct

SEQ ID NO: 96313 - DNA, 20 bp, Artificial Sequence
  MKO10096313_B_Lif
  gRNA
atgctactatagacgtcatg

SEQ ID NO: 96314 - DNA, 20 bp, Artificial Sequence
  MKO10096314_B_Lig1
  gRNA
actggaacctacctggactt

SEQ ID NO: 96315 - DNA, 20 bp, Artificial Sequence
  MKO10096315_B_Lig1
  gRNA
tcccttacatactttggagg

SEQ ID NO: 96316 - DNA, 20 bp, Artificial Sequence
  MKO10096316_B_Lig1
  gRNA
cataatacttctctgcatgt

SEQ ID NO: 96317 - DNA, 20 bp, Artificial Sequence
  MKO10096317_B_Lig3
  gRNA
cttgcagacagactcgttcc

SEQ ID NO: 96318 - DNA, 20 bp, Artificial Sequence
  MKO10096318_B_Lig3
  gRNA
ccaccatggcgcacagcttc

SEQ ID NO: 96319 - DNA, 20 bp, Artificial Sequence
  MKO10096319_B_Lig3
  gRNA
taaacactcttgatgacacc

SEQ ID NO: 96320 - DNA, 20 bp, Artificial Sequence
  MKO10096320_B_Lig4
  gRNA
attagtccactgacgtactc

SEQ ID NO: 96321 - DNA, 20 bp, Artificial Sequence
  MKO10096321_B_Lig4
  gRNA
tacaactataccgaccagtt

SEQ ID NO: 96322 - DNA, 20 bp, Artificial Sequence
  MKO10096322_B_Lig4
  gRNA
acttagaatgtcgttattcc

SEQ ID NO: 96323 - DNA, 20 bp, Artificial Sequence
  MKO10096323_B_Lilra5
  gRNA
atgtatttccaagagatcgc

SEQ ID NO: 96324 - DNA, 20 bp, Artificial Sequence
  MKO10096324_B_Lilra5
  gRNA
tagaagccgatcagcccctc

SEQ ID NO: 96325 - DNA, 20 bp, Artificial Sequence
  MKO10096325_B_Lilra5
  gRNA
ccagatcgttgttcaattga

SEQ ID NO: 96326 - DNA, 20 bp, Artificial Sequence
  MKO10096326_B_Lilra6
  gRNA
cacacttggaccacagagtc

SEQ ID NO: 96327 - DNA, 20 bp, Artificial Sequence
  MKO10096327_B_Lilra6
  gRNA
gcatgttgtcgtctcacaga

SEQ ID NO: 96328 - DNA, 20 bp, Artificial Sequence
  MKO10096328_B_Lilra6
  gRNA
agctctgcgaagactcacac

SEQ ID NO: 96329 - DNA, 20 bp, Artificial Sequence
  MKO10096329_B_Lilrb4
  gRNA
aatgaatctgccaaatacta

SEQ ID NO: 96330 - DNA, 20 bp, Artificial Sequence
  MKO10096330_B_Lilrb4
  gRNA
ccctcacttaccatcttcag

SEQ ID NO: 96331 - DNA, 20 bp, Artificial Sequence
  MKO10096331_B_Lilrb4
  gRNA
tcctctacacccactgaaga

SEQ ID NO: 96332 - DNA, 20 bp, Artificial Sequence
  MKO10096332_B_Lim2
  gRNA
gacacccatgatgatgcccg

SEQ ID NO: 96333 - DNA, 20 bp, Artificial Sequence
  MKO10096333_B_Lim2
  gRNA
gaaggtggattgctgcgcaa

SEQ ID NO: 96334 - DNA, 20 bp, Artificial Sequence
  MKO10096334_B_Lim2
  gRNA
gactccagtgtaaatagcca

SEQ ID NO: 96335 - DNA, 20 bp, Artificial Sequence
  MKO10096335_B_Lima1
  gRNA
cgaggcctgcagcgtccatc

SEQ ID NO: 96336 - DNA, 20 bp, Artificial Sequence
  MKO10096336_B_Lima1
  gRNA
gcctccttccacccgcattt

SEQ ID NO: 96337 - DNA, 20 bp, Artificial Sequence
  MKO10096337_B_Lima1
  gRNA
acacctactgtgtagctggc

SEQ ID NO: 96338 - DNA, 20 bp, Artificial Sequence
  MKO10096338_B_Limch1
  gRNA
agtcgatgtagccactgtct

SEQ ID NO: 96339 - DNA, 20 bp, Artificial Sequence
  MKO10096339_B_Limch1
  gRNA
cagcggtgctgccgcacagc

SEQ ID NO: 96340 - DNA, 20 bp, Artificial Sequence
  MKO10096340_B_Limch1
  gRNA
gcacgagtatgtttgacatg

SEQ ID NO: 96341 - DNA, 20 bp, Artificial Sequence
  MKO10096341_B_Limd1
  gRNA
tctttgtggacacctgatca

SEQ ID NO: 96342 - DNA, 20 bp, Artificial Sequence
  MKO10096342_B_Limd1
  gRNA
tcctgtgtgaaatgcagcaa

SEQ ID NO: 96343 - DNA, 20 bp, Artificial Sequence
  MKO10096343_B_Limd1
  gRNA
cactcaccatgtccatgatc

SEQ ID NO: 96344 - DNA, 20 bp, Artificial Sequence
  MKO10096344_B_Limd2
  gRNA
gcattgcagcataactgccc

SEQ ID NO: 96345 - DNA, 20 bp, Artificial Sequence
  MKO10096345_B_Limd2
  gRNA
tctgccaccagccgctccat

SEQ ID NO: 96346 - DNA, 20 bp, Artificial Sequence
  MKO10096346_B_Limd2
  gRNA
cctgggcggctccggcagct

SEQ ID NO: 96347 - DNA, 20 bp, Artificial Sequence
  MKO10096347_B_Lime1
  gRNA
gggagaacaagtctgccgct

SEQ ID NO: 96348 - DNA, 20 bp, Artificial Sequence
  MKO10096348_B_Lime1
  gRNA
agactgcatgagctgcaccg

SEQ ID NO: 96349 - DNA, 20 bp, Artificial Sequence
  MKO10096349_B_Lime1
  gRNA
tcggtgcagctcatgcagtc

SEQ ID NO: 96350 - DNA, 20 bp, Artificial Sequence
  MKO10096350_B_Limk1
  gRNA
gtccatccttctcgtagtac

SEQ ID NO: 96351 - DNA, 20 bp, Artificial Sequence
  MKO10096351_B_Limk1
  gRNA
ctatgacggccagtacctcc

SEQ ID NO: 96352 - DNA, 20 bp, Artificial Sequence
  MKO10096352_B_Limk1
  gRNA
actggccgtcatagatcctc

SEQ ID NO: 96353 - DNA, 20 bp, Artificial Sequence
  MKO10096353_B_Limk2
  gRNA
cctcctctactcgcagagta

SEQ ID NO: 96354 - DNA, 20 bp, Artificial Sequence
  MKO10096354_B_Limk2
  gRNA
catgaccatcactttgcctg

SEQ ID NO: 96355 - DNA, 20 bp, Artificial Sequence
  MKO10096355_B_Limk2
  gRNA
gctgagcatgagcgtgtgtc

SEQ ID NO: 96356 - DNA, 20 bp, Artificial Sequence
  MKO10096356_B_Lims1
  gRNA
gggtcgttcttgaagatcag

SEQ ID NO: 96357 - DNA, 20 bp, Artificial Sequence
  MKO10096357_B_Lims1
  gRNA
aggtcacatcggaagcactc

SEQ ID NO: 96358 - DNA, 20 bp, Artificial Sequence
  MKO10096358_B_Lims1
  gRNA
atagggtttgtcaagaatgc

SEQ ID NO: 96359 - DNA, 20 bp, Artificial Sequence
  MKO10096359_B_Lims2
  gRNA
tcaaggccatgaacgccaac

SEQ ID NO: 96360 - DNA, 20 bp, Artificial Sequence
  MKO10096360_B_Lims2
  gRNA
ttaccacagaatccgcagca

SEQ ID NO: 96361 - DNA, 20 bp, Artificial Sequence
  MKO10096361_B_Lims2
  gRNA
aggatgccagttggcgttca

SEQ ID NO: 96362 - DNA, 20 bp, Artificial Sequence
  MKO10096362_B_Lin28a
  gRNA
agctcgaacctgcaaactgc

SEQ ID NO: 96363 - DNA, 20 bp, Artificial Sequence
  MKO10096363_B_Lin28a
  gRNA
gtgtccactgaaggcccagc

SEQ ID NO: 96364 - DNA, 20 bp, Artificial Sequence
  MKO10096364_B_Lin28a
  gRNA
tgggctagaccatcatgcca

SEQ ID NO: 96365 - DNA, 20 bp, Artificial Sequence
  MKO10096365_B_Lin28b
  gRNA
gcacgttgaaccatttacag

SEQ ID NO: 96366 - DNA, 20 bp, Artificial Sequence
  MKO10096366_B_Lin28b
  gRNA
ctgttacccgtattgactca

SEQ ID NO: 96367 - DNA, 20 bp, Artificial Sequence
  MKO10096367_B_Lin28b
  gRNA
acgaaagcgtttgcagcaat

SEQ ID NO: 96368 - DNA, 20 bp, Artificial Sequence
  MKO10096368_B_Lin37
  gRNA
tctaccctcagagatggaga

SEQ ID NO: 96369 - DNA, 20 bp, Artificial Sequence
  MKO10096369_B_Lin37
  gRNA
gattgttccattgctgccac

SEQ ID NO: 96370 - DNA, 20 bp, Artificial Sequence
  MKO10096370_B_Lin37
  gRNA
gaacgcctggatgaagaagc

SEQ ID NO: 96371 - DNA, 20 bp, Artificial Sequence
  MKO10096371_B_Lin52
  gRNA
cacactcatccagccccagc

SEQ ID NO: 96372 - DNA, 20 bp, Artificial Sequence
  MKO10096372_B_Lin52
  gRNA
gatgacattgatatgttgaa

SEQ ID NO: 96373 - DNA, 20 bp, Artificial Sequence
  MKO10096373_B_Lin52
  gRNA
gctgcaaattcagcgacacc

SEQ ID NO: 96374 - DNA, 20 bp, Artificial Sequence
  MKO10096374_B_Lin54
  gRNA
gcatctccacccgtcgtcac

SEQ ID NO: 96375 - DNA, 20 bp, Artificial Sequence
  MKO10096375_B_Lin54
  gRNA
aatggaactgacatccgtac

SEQ ID NO: 96376 - DNA, 20 bp, Artificial Sequence
  MKO10096376_B_Lin54
  gRNA
ggatacaaaccttgctggag

SEQ ID NO: 96377 - DNA, 20 bp, Artificial Sequence
  MKO10096377_B_Lin7a
  gRNA
catgaaacgattactgttaa

SEQ ID NO: 96378 - DNA, 20 bp, Artificial Sequence
  MKO10096378_B_Lin7a
  gRNA
aggctcgtttcgagaagctg

SEQ ID NO: 96379 - DNA, 20 bp, Artificial Sequence
  MKO10096379_B_Lin7a
  gRNA
gaccagctgctatcagtgaa

SEQ ID NO: 96380 - DNA, 20 bp, Artificial Sequence
  MKO10096380_B_Lin7b
  gRNA
ggcgtggctgatcgccatgg

SEQ ID NO: 96381 - DNA, 20 bp, Artificial Sequence
  MKO10096381_B_Lin7b
  gRNA
cagatcgcatcttctcgaag

SEQ ID NO: 96382 - DNA, 20 bp, Artificial Sequence
  MKO10096382_B_Lin7b
  gRNA
tcactggcagcgccgaggtg

SEQ ID NO: 96383 - DNA, 20 bp, Artificial Sequence
  MKO10096383_B_Lin7c
  gRNA
gttctgcaatgctgtaagag

SEQ ID NO: 96384 - DNA, 20 bp, Artificial Sequence
  MKO10096384_B_Lin7c
  gRNA
gagagccaatgcaactgcaa

SEQ ID NO: 96385 - DNA, 20 bp, Artificial Sequence
  MKO10096385_B_Lin7c
  gRNA
cgactaatttaaccttccct

SEQ ID NO: 96386 - DNA, 20 bp, Artificial Sequence
  MKO10096386_B_Lin9
  gRNA
tgcgggccctgctgtagaaa

SEQ ID NO: 96387 - DNA, 20 bp, Artificial Sequence
  MKO10096387_B_Lin9
  gRNA
agggaagtttatctaacaca

SEQ ID NO: 96388 - DNA, 20 bp, Artificial Sequence
  MKO10096388_B_Lin9
  gRNA
acctaaaagaaaccagagag

SEQ ID NO: 96389 - DNA, 20 bp, Artificial Sequence
  MKO10096389_B_Lingo1
  gRNA
tgttgagatgtcgtagccgc

SEQ ID NO: 96390 - DNA, 20 bp, Artificial Sequence
  MKO10096390_B_Lingo1
  gRNA
aatgagcgtcttgatgtcga

SEQ ID NO: 96391 - DNA, 20 bp, Artificial Sequence
  MKO10096391_B_Lingo1
  gRNA
agccctcgattgtaccgatt

SEQ ID NO: 96392 - DNA, 20 bp, Artificial Sequence
  MKO10096392_B_Lingo2
  gRNA
gtggtgataaaacgccttcg

SEQ ID NO: 96393 - DNA, 20 bp, Artificial Sequence
  MKO10096393_B_Lingo2
  gRNA
accgcttcctttacgcaaac

SEQ ID NO: 96394 - DNA, 20 bp, Artificial Sequence
  MKO10096394_B_Lingo2
  gRNA
agtattggcattagtgccgt

SEQ ID NO: 96395 - DNA, 20 bp, Artificial Sequence
  MKO10096395_B_Lingo3
  gRNA
cccggccgaaactcgcatgc

SEQ ID NO: 96396 - DNA, 20 bp, Artificial Sequence
  MKO10096396_B_Lingo3
  gRNA
ggctggcagccgtaaccgag

SEQ ID NO: 96397 - DNA, 20 bp, Artificial Sequence
  MKO10096397_B_Lingo3
  gRNA
ggagcctgccgtcgaagttc

SEQ ID NO: 96398 - DNA, 20 bp, Artificial Sequence
  MKO10096398_B_Lingo4
  gRNA
atgccaccccccagcttctc

SEQ ID NO: 96399 - DNA, 20 bp, Artificial Sequence
  MKO10096399_B_Lingo4
  gRNA
gaatagtgtccagtcgcctg

SEQ ID NO: 96400 - DNA, 20 bp, Artificial Sequence
  MKO10096400_B_Lingo4
  gRNA
tgtcccgcagctgtaccgag

SEQ ID NO: 96401 - DNA, 20 bp, Artificial Sequence
  MKO10096401_B_Lins
  gRNA
gtgaagcagtgcgttgcctc

SEQ ID NO: 96402 - DNA, 20 bp, Artificial Sequence
  MKO10096402_B_Lins
  gRNA
atgctctagatattcttgcc

SEQ ID NO: 96403 - DNA, 20 bp, Artificial Sequence
  MKO10096403_B_Lins
  gRNA
ttcaacctggatgcagactc

SEQ ID NO: 96404 - DNA, 20 bp, Artificial Sequence
  MKO10096404_B_Lipa
  gRNA
ccgtgctgaagatacacaac

SEQ ID NO: 96405 - DNA, 20 bp, Artificial Sequence
  MKO10096405_B_Lipa
  gRNA
tgctggcagattctagtaac

SEQ ID NO: 96406 - DNA, 20 bp, Artificial Sequence
  MKO10096406_B_Lipa
  gRNA
ggcccaagtaccttgagaag

SEQ ID NO: 96407 - DNA, 20 bp, Artificial Sequence
  MKO10096407_B_Lipc
  gRNA
ccaagatgaaaacgatcgcc

SEQ ID NO: 96408 - DNA, 20 bp, Artificial Sequence
  MKO10096408_B_Lipc
  gRNA
gttagtggactggatctccc

SEQ ID NO: 96409 - DNA, 20 bp, Artificial Sequence
  MKO10096409_B_Lipc
  gRNA
tgttcaaaacacccgtattg

SEQ ID NO: 96410 - DNA, 20 bp, Artificial Sequence
  MKO10096410_B_Lipe
  gRNA
gcccgatggagagagtctgc

SEQ ID NO: 96411 - DNA, 20 bp, Artificial Sequence
  MKO10096411_B_Lipe
  gRNA
atctcctatgacctacggga

SEQ ID NO: 96412 - DNA, 20 bp, Artificial Sequence
  MKO10096412_B_Lipe
  gRNA
gcgtttgtagtgctccccga

SEQ ID NO: 96413 - DNA, 20 bp, Artificial Sequence
  MKO10096413_B_Lipf
  gRNA
gcccagaattcaactgagtc

SEQ ID NO: 96414 - DNA, 20 bp, Artificial Sequence
  MKO10096414_B_Lipf
  gRNA
cataccttgagaagaaactt

SEQ ID NO: 96415 - DNA, 20 bp, Artificial Sequence
  MKO10096415_B_Lipf
  gRNA
ttcttacagctttgatgaaa

SEQ ID NO: 96416 - DNA, 20 bp, Artificial Sequence
  MKO10096416_B_Lipg
  gRNA
agagaaagatgctaacgtcg

SEQ ID NO: 96417 - DNA, 20 bp, Artificial Sequence
  MKO10096417_B_Lipg
  gRNA
ggcggtagctggtactccag

SEQ ID NO: 96418 - DNA, 20 bp, Artificial Sequence
  MKO10096418_B_Lipg
  gRNA
ccgtgtacagctgatgagcc

SEQ ID NO: 96419 - DNA, 20 bp, Artificial Sequence
  MKO10096419_B_Liph
  gRNA
agcctgttggccggaaaccg

SEQ ID NO: 96420 - DNA, 20 bp, Artificial Sequence
  MKO10096420_B_Liph
  gRNA
cgagtcgtatgaggggaagc

SEQ ID NO: 96421 - DNA, 20 bp, Artificial Sequence
  MKO10096421_B_Liph
  gRNA
tacatgattggagtaagtct

SEQ ID NO: 96422 - DNA, 20 bp, Artificial Sequence
  MKO10096422_B_Lipi
  gRNA
atttcaggtcttgacccagc

SEQ ID NO: 96423 - DNA, 20 bp, Artificial Sequence
  MKO10096423_B_Lipi
  gRNA
agcttaggggctcatattag

SEQ ID NO: 96424 - DNA, 20 bp, Artificial Sequence
  MKO10096424_B_Lipi
  gRNA
aattgtcaagtgatgcccca

SEQ ID NO: 96425 - DNA, 20 bp, Artificial Sequence
  MKO10096425_B_Lipk
  gRNA
ccccggcagctgggacgaga

SEQ ID NO: 96426 - DNA, 20 bp, Artificial Sequence
  MKO10096426_B_Lipk
  gRNA
attctctacgaatccagagc

SEQ ID NO: 96427 - DNA, 20 bp, Artificial Sequence
  MKO10096427_B_Lipk
  gRNA
gctacatccttggaacttac

SEQ ID NO: 96428 - DNA, 20 bp, Artificial Sequence
  MKO10096428_B_Lipm
  gRNA
ccatgttgcagtaacaccac

SEQ ID NO: 96429 - DNA, 20 bp, Artificial Sequence
  MKO10096429_B_Lipm
  gRNA
ctactcacagggcaccacca

SEQ ID NO: 96430 - DNA, 20 bp, Artificial Sequence
  MKO10096430_B_Lipm
  gRNA
tgaggagtatgaagttgcaa

SEQ ID NO: 96431 - DNA, 20 bp, Artificial Sequence
  MKO10096431_B_Lipn
  gRNA
cattcactcggcactacaat

SEQ ID NO: 96432 - DNA, 20 bp, Artificial Sequence
  MKO10096432_B_Lipn
  gRNA
catctgctagtatgaaccct

SEQ ID NO: 96433 - DNA, 20 bp, Artificial Sequence
  MKO10096433_B_Lipn
  gRNA
acaatgaaatctattatccc

SEQ ID NO: 96434 - DNA, 20 bp, Artificial Sequence
  MKO10096434_B_Lipo1
  gRNA
agagcgagattattaaacac

SEQ ID NO: 96435 - DNA, 20 bp, Artificial Sequence
  MKO10096435_B_Lipo1
  gRNA
ttagcattgttcttcccatg

SEQ ID NO: 96436 - DNA, 20 bp, Artificial Sequence
  MKO10096436_B_Lipo1
  gRNA
caagaagggttccttgagaa

SEQ ID NO: 96437 - DNA, 20 bp, Artificial Sequence
  MKO10096437_B_Lipt1
  gRNA
gcggcgcatcatcaagttga

SEQ ID NO: 96438 - DNA, 20 bp, Artificial Sequence
  MKO10096438_B_Lipt1
  gRNA
tcgctgaagagcccgtactg

SEQ ID NO: 96439 - DNA, 20 bp, Artificial Sequence
  MKO10096439_B_Lipt1
  gRNA
gtttcatgtgccgtatgagc

SEQ ID NO: 96440 - DNA, 20 bp, Artificial Sequence
  MKO10096440_B_Lipt2
  gRNA
actgttcaaccgacctcaca

SEQ ID NO: 96441 - DNA, 20 bp, Artificial Sequence
  MKO10096441_B_Lipt2
  gRNA
acgcggtggcctgacacccg

SEQ ID NO: 96442 - DNA, 20 bp, Artificial Sequence
  MKO10096442_B_Lipt2
  gRNA
ccgcgcgatgtcgctgcctg

SEQ ID NO: 96443 - DNA, 20 bp, Artificial Sequence
  MKO10096443_B_Litaf
  gRNA
caagtcctacaagcgcttgt

SEQ ID NO: 96444 - DNA, 20 bp, Artificial Sequence
  MKO10096444_B_Litaf
  gRNA
ggtcacgatcatcttgctgc

SEQ ID NO: 96445 - DNA, 20 bp, Artificial Sequence
  MKO10096445_B_Litaf
  gRNA
ggtgagggctcccgcattgt

SEQ ID NO: 96446 - DNA, 20 bp, Artificial Sequence
  MKO10096446_B_Lix1l
  gRNA
aagctgacaacccaaatacg

SEQ ID NO: 96447 - DNA, 20 bp, Artificial Sequence
  MKO10096447_B_Lix1l
  gRNA
cagagtgacatagcagacgt

SEQ ID NO: 96448 - DNA, 20 bp, Artificial Sequence
  MKO10096448_B_Lix1l
  gRNA
atggcagccttaaggccatg

SEQ ID NO: 96449 - DNA, 20 bp, Artificial Sequence
  MKO10096449_B_Lix1
  gRNA
atagaccaccagtccctcac

SEQ ID NO: 96450 - DNA, 20 bp, Artificial Sequence
  MKO10096450_B_Lix1
  gRNA
tgactccagcatgtagtgat

SEQ ID NO: 96451 - DNA, 20 bp, Artificial Sequence
  MKO10096451_B_Lix1
  gRNA
caagggcacgttagatgatg

SEQ ID NO: 96452 - DNA, 20 bp, Artificial Sequence
  MKO10096452_B_Llgl1
  gRNA
cgatcctgagctccgcatca

SEQ ID NO: 96453 - DNA, 20 bp, Artificial Sequence
  MKO10096453_B_Llgl1
  gRNA
ccccaatcagcccagcgcct

SEQ ID NO: 96454 - DNA, 20 bp, Artificial Sequence
  MKO10096454_B_Llgl1
  gRNA
ggtgggcgcagccattatga

SEQ ID NO: 96455 - DNA, 20 bp, Artificial Sequence
  MKO10096455_B_Llgl2
  gRNA
tatagccaagggcgctgggc

SEQ ID NO: 96456 - DNA, 20 bp, Artificial Sequence
  MKO10096456_B_Llgl2
  gRNA
ccttccagatatggcgcccc

SEQ ID NO: 96457 - DNA, 20 bp, Artificial Sequence
  MKO10096457_B_Llgl2
  gRNA
acaccccgcccttgaccttc

SEQ ID NO: 96458 - DNA, 20 bp, Artificial Sequence
  MKO10096458_B_Llph
  gRNA
tctttaaggtctaccaggcc

SEQ ID NO: 96459 - DNA, 20 bp, Artificial Sequence
  MKO10096459_B_Llph
  gRNA
gtaagtggaagaggaagatg

SEQ ID NO: 96460 - DNA, 20 bp, Artificial Sequence
  MKO10096460_B_Llph
  gRNA
ttcagtctgttgagctccct

SEQ ID NO: 96461 - DNA, 20 bp, Artificial Sequence
  MKO10096461_B_Lman1l
  gRNA
ccgctccggttcttcatgga

SEQ ID NO: 96462 - DNA, 20 bp, Artificial Sequence
  MKO10096462_B_Lman1l
  gRNA
gccgcacttcctctaagcct

SEQ ID NO: 96463 - DNA, 20 bp, Artificial Sequence
  MKO10096463_B_Lman1l
  gRNA
acccgagctcggaaggggaa

SEQ ID NO: 96464 - DNA, 20 bp, Artificial Sequence
  MKO10096464_B_Lman1
  gRNA
tgtttggatcagctgatacg

SEQ ID NO: 96465 - DNA, 20 bp, Artificial Sequence
  MKO10096465_B_Lman1
  gRNA
attcgaatctgatctgcact

SEQ ID NO: 96466 - DNA, 20 bp, Artificial Sequence
  MKO10096466_B_Lman1
  gRNA
gtatcagctgatccaaacac

SEQ ID NO: 96467 - DNA, 20 bp, Artificial Sequence
  MKO10096467_B_Lman2l
  gRNA
tcttaccacccggttccaca

SEQ ID NO: 96468 - DNA, 20 bp, Artificial Sequence
  MKO10096468_B_Lman2l
  gRNA
caggtgcacttcaagattca

SEQ ID NO: 96469 - DNA, 20 bp, Artificial Sequence
  MKO10096469_B_Lman2l
  gRNA
cttggcaatctggtacacaa

SEQ ID NO: 96470 - DNA, 20 bp, Artificial Sequence
  MKO10096470_B_Lman2
  gRNA
ttcaccatcaccgagatgta

SEQ ID NO: 96471 - DNA, 20 bp, Artificial Sequence
  MKO10096471_B_Lman2
  gRNA
cctcctcacctggtacgagg

SEQ ID NO: 96472 - DNA, 20 bp, Artificial Sequence
  MKO10096472_B_Lman2
  gRNA
ccagtacgtgcgcctgaccc

SEQ ID NO: 96473 - DNA, 20 bp, Artificial Sequence
  MKO10096473_B_Lmbr1l
  gRNA
gtacctgtggtgaactcagc

SEQ ID NO: 96474 - DNA, 20 bp, Artificial Sequence
  MKO10096474_B_Lmbr1l
  gRNA
tgaagcgggtcaggaagata

SEQ ID NO: 96475 - DNA, 20 bp, Artificial Sequence
  MKO10096475_B_Lmbr1l
  gRNA
aaggaagacgagggacagat

SEQ ID NO: 96476 - DNA, 20 bp, Artificial Sequence
  MKO10096476_B_Lmbr1
  gRNA
ataagatacaagagaaaatc

SEQ ID NO: 96477 - DNA, 20 bp, Artificial Sequence
  MKO10096477_B_Lmbr1
  gRNA
ttctgattccagaaagaaaa

SEQ ID NO: 96478 - DNA, 20 bp, Artificial Sequence
  MKO10096478_B_Lmbr1
  gRNA
tgcagatgaacaagaagatg

SEQ ID NO: 96479 - DNA, 20 bp, Artificial Sequence
  MKO10096479_B_Lmbrd1
  gRNA
gtacttctactacgaagaga

SEQ ID NO: 96480 - DNA, 20 bp, Artificial Sequence
  MKO10096480_B_Lmbrd1
  gRNA
tgcgctctgctgcttctcgt

SEQ ID NO: 96481 - DNA, 20 bp, Artificial Sequence
  MKO10096481_B_Lmbrd1
  gRNA
tcgtagtagaagtacacaaa

SEQ ID NO: 96482 - DNA, 20 bp, Artificial Sequence
  MKO10096482_B_Lmbrd2
  gRNA
agacaatatataaccgatgc

SEQ ID NO: 96483 - DNA, 20 bp, Artificial Sequence
  MKO10096483_B_Lmbrd2
  gRNA
ctatcccaatcgtctgaagt

SEQ ID NO: 96484 - DNA, 20 bp, Artificial Sequence
  MKO10096484_B_Lmbrd2
  gRNA
aggaaccaacttcagacgat

SEQ ID NO: 96485 - DNA, 20 bp, Artificial Sequence
  MKO10096485_B_Lmcd1
  gRNA
atccattacctccacgagtg

SEQ ID NO: 96486 - DNA, 20 bp, Artificial Sequence
  MKO10096486_B_Lmcd1
  gRNA
ctctcgatgccgtggacttg

SEQ ID NO: 96487 - DNA, 20 bp, Artificial Sequence
  MKO10096487_B_Lmcd1
  gRNA
gaggggtcctggtcatagat

SEQ ID NO: 96488 - DNA, 20 bp, Artificial Sequence
  MKO10096488_B_Lmf1
  gRNA
ctgcatggacttccactatg

SEQ ID NO: 96489 - DNA, 20 bp, Artificial Sequence
  MKO10096489_B_Lmf1
  gRNA
ggatctttctgagccctctc

SEQ ID NO: 96490 - DNA, 20 bp, Artificial Sequence
  MKO10096490_B_Lmf1
  gRNA
tgattctgaagatcagccag

SEQ ID NO: 96491 - DNA, 20 bp, Artificial Sequence
  MKO10096491_B_Lmf2
  gRNA
ggccgcagtgttcttcgagc

SEQ ID NO: 96492 - DNA, 20 bp, Artificial Sequence
  MKO10096492_B_Lmf2
  gRNA
ggctagcacggtgcccaata

SEQ ID NO: 96493 - DNA, 20 bp, Artificial Sequence
  MKO10096493_B_Lmf2
  gRNA
gactggcttcctagctatac

SEQ ID NO: 96494 - DNA, 20 bp, Artificial Sequence
  MKO10096494_B_Lmln
  gRNA
actcttctaggtcataaata

SEQ ID NO: 96495 - DNA, 20 bp, Artificial Sequence
  MKO10096495_B_Lmln
  gRNA
agacttactcttcaatgctc

SEQ ID NO: 96496 - DNA, 20 bp, Artificial Sequence
  MKO10096496_B_Lmln
  gRNA
ctaagtaagatcctgccagc

SEQ ID NO: 96497 - DNA, 20 bp, Artificial Sequence
  MKO10096497_B_Lmna
  gRNA
tctcagtgagaagcgcacat

SEQ ID NO: 96498 - DNA, 20 bp, Artificial Sequence
  MKO10096498_B_Lmna
  gRNA
cctcgctgtaaatgttcttc

SEQ ID NO: 96499 - DNA, 20 bp, Artificial Sequence
  MKO10096499_B_Lmna
  gRNA
ccctgcagctggataatgcc

SEQ ID NO: 96500 - DNA, 20 bp, Artificial Sequence
  MKO10096500_B_Lmnb1
  gRNA
agaggctctcgatcctcatc

SEQ ID NO: 96501 - DNA, 20 bp, Artificial Sequence
  MKO10096501_B_Lmnb1
  gRNA
catactctcgaagcttgatc

SEQ ID NO: 96502 - DNA, 20 bp, Artificial Sequence
  MKO10096502_B_Lmnb1
  gRNA
tcgctgtcagagccttactg

SEQ ID NO: 96503 - DNA, 20 bp, Artificial Sequence
  MKO10096503_B_Lmnb2
  gRNA
gctccagttctacccggtac

SEQ ID NO: 96504 - DNA, 20 bp, Artificial Sequence
  MKO10096504_B_Lmnb2
  gRNA
ggcagaagatggtcatgctg

SEQ ID NO: 96505 - DNA, 20 bp, Artificial Sequence
  MKO10096505_B_Lmnb2
  gRNA
gaaccgatgccagagcctgc

SEQ ID NO: 96506 - DNA, 20 bp, Artificial Sequence
  MKO10096506_B_Lmo1
  gRNA
agcgcccgagatgatggtgc

SEQ ID NO: 96507 - DNA, 20 bp, Artificial Sequence
  MKO10096507_B_Lmo1
  gRNA
gcccctcctcatagtccacc

SEQ ID NO: 96508 - DNA, 20 bp, Artificial Sequence
  MKO10096508_B_Lmo1
  gRNA
caaggtgatacacattgtct

SEQ ID NO: 96509 - DNA, 20 bp, Artificial Sequence
  MKO10096509_B_Lmo2
  gRNA
acacttactcagacgggtcc

SEQ ID NO: 96510 - DNA, 20 bp, Artificial Sequence
  MKO10096510_B_Lmo2
  gRNA
gtgaacaagacatctacgag

SEQ ID NO: 96511 - DNA, 20 bp, Artificial Sequence
  MKO10096511_B_Lmo2
  gRNA
tccgtcccagcttgtagtag

SEQ ID NO: 96512 - DNA, 20 bp, Artificial Sequence
  MKO10096512_B_Lmo3
  gRNA
gaaagaaggctatgcacccc

SEQ ID NO: 96513 - DNA, 20 bp, Artificial Sequence
  MKO10096513_B_Lmo3
  gRNA
tctttgccagacagactacg

SEQ ID NO: 96514 - DNA, 20 bp, Artificial Sequence
  MKO10096514_B_Lmo3
  gRNA
caaggataatgtgtaccacc

SEQ ID NO: 96515 - DNA, 20 bp, Artificial Sequence
  MKO10096515_B_Lmo4
  gRNA
ctgcaagtgagctcgtcatg

SEQ ID NO: 96516 - DNA, 20 bp, Artificial Sequence
  MKO10096516_B_Lmo4
  gRNA
atgtagtgaaaccgatctcc

SEQ ID NO: 96517 - DNA, 20 bp, Artificial Sequence
  MKO10096517_B_Lmo4
  gRNA
tgagatgatacacgttgcct

SEQ ID NO: 96518 - DNA, 20 bp, Artificial Sequence
  MKO10096518_B_Lmo7
  gRNA
gataagtcctgtagatcccc

SEQ ID NO: 96519 - DNA, 20 bp, Artificial Sequence
  MKO10096519_B_Lmo7
  gRNA
tttcgagcctctctagaaaa

SEQ ID NO: 96520 - DNA, 20 bp, Artificial Sequence
  MKO10096520_B_Lmo7
  gRNA
acaggcaagaagagactgac

SEQ ID NO: 96521 - DNA, 20 bp, Artificial Sequence
  MKO10096521_B_Lmod1
  gRNA
ggacagcaggctatcgatgt

SEQ ID NO: 96522 - DNA, 20 bp, Artificial Sequence
  MKO10096522_B_Lmod1
  gRNA
ggtgcccaagctacttcaat

SEQ ID NO: 96523 - DNA, 20 bp, Artificial Sequence
  MKO10096523_B_Lmod1
  gRNA
cctgtcctattgaagtagct

SEQ ID NO: 96524 - DNA, 20 bp, Artificial Sequence
  MKO10096524_B_Lmod2
  gRNA
cttcagccgagaggcgctga

SEQ ID NO: 96525 - DNA, 20 bp, Artificial Sequence
  MKO10096525_B_Lmod2
  gRNA
atcggtctatctcagagctt

SEQ ID NO: 96526 - DNA, 20 bp, Artificial Sequence
  MKO10096526_B_Lmod2
  gRNA
gcccagcgcgccctacaaaa

SEQ ID NO: 96527 - DNA, 20 bp, Artificial Sequence
  MKO10096527_B_Lmod3
  gRNA
cttcatcgagctcctcacta

SEQ ID NO: 96528 - DNA, 20 bp, Artificial Sequence
  MKO10096528_B_Lmod3
  gRNA
aacgcaggtgcaactgccaa

SEQ ID NO: 96529 - DNA, 20 bp, Artificial Sequence
  MKO10096529_B_Lmod3
  gRNA
tcatcttactccagctcctt

SEQ ID NO: 96530 - DNA, 20 bp, Artificial Sequence
  MKO10096530_B_Lmtk2
  gRNA
ccacagtctcaactacatac

SEQ ID NO: 96531 - DNA, 20 bp, Artificial Sequence
  MKO10096531_B_Lmtk2
  gRNA
atggacggggtgtcttctgc

SEQ ID NO: 96532 - DNA, 20 bp, Artificial Sequence
  MKO10096532_B_Lmtk2
  gRNA
ctccttgtttgtgatcctgt

SEQ ID NO: 96533 - DNA, 20 bp, Artificial Sequence
  MKO10096533_B_Lmtk3
  gRNA
tgatgtctatattctgccgc

SEQ ID NO: 96534 - DNA, 20 bp, Artificial Sequence
  MKO10096534_B_Lmtk3
  gRNA
tggggagtacaccccccctg

SEQ ID NO: 96535 - DNA, 20 bp, Artificial Sequence
  MKO10096535_B_Lmtk3
  gRNA
agatgaacttgcgctgttcc

SEQ ID NO: 96536 - DNA, 20 bp, Artificial Sequence
  MKO10096536_B_Lmx1a
  gRNA
tttaggcaaaagcgatgatg

SEQ ID NO: 96537 - DNA, 20 bp, Artificial Sequence
  MKO10096537_B_Lmx1a
  gRNA
agcaggttaccttggctcgc

SEQ ID NO: 96538 - DNA, 20 bp, Artificial Sequence
  MKO10096538_B_Lmx1a
  gRNA
gacagggctgagtgtccgtg

SEQ ID NO: 96539 - DNA, 20 bp, Artificial Sequence
  MKO10096539_B_Lmx1b
  gRNA
cagcgcccgcatgacgaact

SEQ ID NO: 96540 - DNA, 20 bp, Artificial Sequence
  MKO10096540_B_Lmx1b
  gRNA
atgacgggaaagacccgaga

SEQ ID NO: 96541 - DNA, 20 bp, Artificial Sequence
  MKO10096541_B_Lmx1b
  gRNA
gaggatggttcggggccgtt

SEQ ID NO: 96542 - DNA, 20 bp, Artificial Sequence
  MKO10096542_B_Lnpep
  gRNA
ctcttacccaatttcttaag

SEQ ID NO: 96543 - DNA, 20 bp, Artificial Sequence
  MKO10096543_B_Lnpep
  gRNA
tgcgttatcaaatatgccta

SEQ ID NO: 96544 - DNA, 20 bp, Artificial Sequence
  MKO10096544_B_Lnpep
  gRNA
ctttcattgtaggggagatg

SEQ ID NO: 96545 - DNA, 20 bp, Artificial Sequence
  MKO10096545_B_Lnp
  gRNA
agttctagaaaatatagata

SEQ ID NO: 96546 - DNA, 20 bp, Artificial Sequence
  MKO10096546_B_Lnp
  gRNA
actatttctctctgttctct

SEQ ID NO: 96547 - DNA, 20 bp, Artificial Sequence
  MKO10096547_B_Lnp
  gRNA
agtcttgctgtaaactcatc

SEQ ID NO: 96548 - DNA, 20 bp, Artificial Sequence
  MKO10096548_B_Lnx1
  gRNA
tctcatagtggagcgctcaa

SEQ ID NO: 96549 - DNA, 20 bp, Artificial Sequence
  MKO10096549_B_Lnx1
  gRNA
ccagcgaaagcctctccata

SEQ ID NO: 96550 - DNA, 20 bp, Artificial Sequence
  MKO10096550_B_Lnx1
  gRNA
atcctccaccgaggacacgt

SEQ ID NO: 96551 - DNA, 20 bp, Artificial Sequence
  MKO10096551_B_Lnx2
  gRNA
gccaccctcgcacagccgac

SEQ ID NO: 96552 - DNA, 20 bp, Artificial Sequence
  MKO10096552_B_Lnx2
  gRNA
gctctgtcgagtctcgcttg

SEQ ID NO: 96553 - DNA, 20 bp, Artificial Sequence
  MKO10096553_B_Lnx2
  gRNA
tctaacccgtacatccagtt

SEQ ID NO: 96554 - DNA, 20 bp, Artificial Sequence
  MKO10096554_B_Loh12cr1
  gRNA
caccacgatatcgtccatct

SEQ ID NO: 96555 - DNA, 20 bp, Artificial Sequence
  MKO10096555_B_Loh12cr1
  gRNA
ccgacatctcattcaccttc

SEQ ID NO: 96556 - DNA, 20 bp, Artificial Sequence
  MKO10096556_B_Loh12cr1
  gRNA
ccgtctggtctatgcccatc

SEQ ID NO: 96557 - DNA, 20 bp, Artificial Sequence
  MKO10096557_B_Lonp1
  gRNA
cctcagcaatgagtcggacg

SEQ ID NO: 96558 - DNA, 20 bp, Artificial Sequence
  MKO10096558_B_Lonp1
  gRNA
tcgccttgaaccctctgtac

SEQ ID NO: 96559 - DNA, 20 bp, Artificial Sequence
  MKO10096559_B_Lonp1
  gRNA
caacatagggctgtgcaagt

SEQ ID NO: 96560 - DNA, 20 bp, Artificial Sequence
  MKO10096560_B_Lonp2
  gRNA
gaagactaacctggtaatga

SEQ ID NO: 96561 - DNA, 20 bp, Artificial Sequence
  MKO10096561_B_Lonp2
  gRNA
agaagatagagattgcccac

SEQ ID NO: 96562 - DNA, 20 bp, Artificial Sequence
  MKO10096562_B_Lonp2
  gRNA
atggagatcattcaggttcc

SEQ ID NO: 96563 - DNA, 20 bp, Artificial Sequence
  MKO10096563_B_Lonrf1
  gRNA
cgcctagaaagccggcatcc

SEQ ID NO: 96564 - DNA, 20 bp, Artificial Sequence
  MKO10096564_B_Lonrf1
  gRNA
agaggtttgctcttaatgca

SEQ ID NO: 96565 - DNA, 20 bp, Artificial Sequence
  MKO10096565_B_Lonrf1
  gRNA
cgccggcctgcaggagttta

SEQ ID NO: 96566 - DNA, 20 bp, Artificial Sequence
  MKO10096566_B_Lonrf2
  gRNA
aaccgaagagttgatatccg

SEQ ID NO: 96567 - DNA, 20 bp, Artificial Sequence
  MKO10096567_B_Lonrf2
  gRNA
gattcgtctggccttcacac

SEQ ID NO: 96568 - DNA, 20 bp, Artificial Sequence
  MKO10096568_B_Lonrf2
  gRNA
tttaaaccctgagtgcaact

SEQ ID NO: 96569 - DNA, 20 bp, Artificial Sequence
  MKO10096569_B_Lonrf3
  gRNA
ttgaatgctcactgtgtatg

SEQ ID NO: 96570 - DNA, 20 bp, Artificial Sequence
  MKO10096570_B_Lonrf3
  gRNA
caccctttgagcttcagatc

SEQ ID NO: 96571 - DNA, 20 bp, Artificial Sequence
  MKO10096571_B_Lonrf3
  gRNA
ccttgtttggagactttatt

SEQ ID NO: 96572 - DNA, 20 bp, Artificial Sequence
  MKO10096572_B_Lor
  gRNA
tagaaccgcctccgtagctc

SEQ ID NO: 96573 - DNA, 20 bp, Artificial Sequence
  MKO10096573_B_Lor
  gRNA
acccggtgaccttacttgca

SEQ ID NO: 96574 - DNA, 20 bp, Artificial Sequence
  MKO10096574_B_Lor
  gRNA
ggcaagtactctggtggcgg

SEQ ID NO: 96575 - DNA, 20 bp, Artificial Sequence
  MKO10096575_B_Loxhd1
  gRNA
aggatcgagcatgataacac

SEQ ID NO: 96576 - DNA, 20 bp, Artificial Sequence
  MKO10096576_B_Loxhd1
  gRNA
actggtgacgtgattggtgc

SEQ ID NO: 96577 - DNA, 20 bp, Artificial Sequence
  MKO10096577_B_Loxhd1
  gRNA
tgcaccacgaacatcccctg

SEQ ID NO: 96578 - DNA, 20 bp, Artificial Sequence
  MKO10096578_B_Loxl1
  gRNA
cgacctgcttgatgcatcca

SEQ ID NO: 96579 - DNA, 20 bp, Artificial Sequence
  MKO10096579_B_Loxl1
  gRNA
catcagttatgtcgatccac

SEQ ID NO: 96580 - DNA, 20 bp, Artificial Sequence
  MKO10096580_B_Loxl1
  gRNA
cagcggactttctccccaac

SEQ ID NO: 96581 - DNA, 20 bp, Artificial Sequence
  MKO10096581_B_Loxl2
  gRNA
ttcacagagcctaaatatac

SEQ ID NO: 96582 - DNA, 20 bp, Artificial Sequence
  MKO10096582_B_Loxl2
  gRNA
agcccttacctctggcttgt

SEQ ID NO: 96583 - DNA, 20 bp, Artificial Sequence
  MKO10096583_B_Loxl2
  gRNA
cctgcagaacctttgcctcg

SEQ ID NO: 96584 - DNA, 20 bp, Artificial Sequence
  MKO10096584_B_Loxl3
  gRNA
ccagcataccgcagactacg

SEQ ID NO: 96585 - DNA, 20 bp, Artificial Sequence
  MKO10096585_B_Loxl3
  gRNA
ggaggtgcgactccgacctg

SEQ ID NO: 96586 - DNA, 20 bp, Artificial Sequence
  MKO10096586_B_Loxl3
  gRNA
gtcttacatacctccccttg

SEQ ID NO: 96587 - DNA, 20 bp, Artificial Sequence
  MKO10096587_B_Loxl4
  gRNA
tgtcacccacggcgccagca

SEQ ID NO: 96588 - DNA, 20 bp, Artificial Sequence
  MKO10096588_B_Loxl4
  gRNA
tctcagagtgatatccgtgc

SEQ ID NO: 96589 - DNA, 20 bp, Artificial Sequence
  MKO10096589_B_Loxl4
  gRNA
ggggccaacggacagaccag

SEQ ID NO: 96590 - DNA, 20 bp, Artificial Sequence
  MKO10096590_B_Lox
  gRNA
cagtgcacgcaaagcgcctg

SEQ ID NO: 96591 - DNA, 20 bp, Artificial Sequence
  MKO10096591_B_Lox
  gRNA
gaaatcgtagcagtaccctg

SEQ ID NO: 96592 - DNA, 20 bp, Artificial Sequence
  MKO10096592_B_Lox
  gRNA
acttcttaccaagccgccct

SEQ ID NO: 96593 - DNA, 20 bp, Artificial Sequence
  MKO10096593_B_Lpar1
  gRNA
ttctacctgatgttcaatac

SEQ ID NO: 96594 - DNA, 20 bp, Artificial Sequence
  MKO10096594_B_Lpar1
  gRNA
ccctgtaatttcacagcccc

SEQ ID NO: 96595 - DNA, 20 bp, Artificial Sequence
  MKO10096595_B_Lpar1
  gRNA
acctggggctgtgaaattac

SEQ ID NO: 96596 - DNA, 20 bp, Artificial Sequence
  MKO10096596_B_Lpar2
  gRNA
aggaagcatgatccgcgtgc

SEQ ID NO: 96597 - DNA, 20 bp, Artificial Sequence
  MKO10096597_B_Lpar2
  gRNA
ccgtgtggtcacactcatcg

SEQ ID NO: 96598 - DNA, 20 bp, Artificial Sequence
  MKO10096598_B_Lpar2
  gRNA
tagggcccacgcagccaagt

SEQ ID NO: 96599 - DNA, 20 bp, Artificial Sequence
  MKO10096599_B_Lpar3
  gRNA
acagcagatcatcttccgca

SEQ ID NO: 96600 - DNA, 20 bp, Artificial Sequence
  MKO10096600_B_Lpar3
  gRNA
agaagaacgtccccacgcac

SEQ ID NO: 96601 - DNA, 20 bp, Artificial Sequence
  MKO10096601_B_Lpar3
  gRNA
acgtgcaacacgtgaagcgc

SEQ ID NO: 96602 - DNA, 20 bp, Artificial Sequence
  MKO10096602_B_Lpar4
  gRNA
gcgttcctcaccaacatcta

SEQ ID NO: 96603 - DNA, 20 bp, Artificial Sequence
  MKO10096603_B_Lpar4
  gRNA
cgatcggaagggatagacaa

SEQ ID NO: 96604 - DNA, 20 bp, Artificial Sequence
  MKO10096604_B_Lpar4
  gRNA
gcgaccaccacttgctttga

SEQ ID NO: 96605 - DNA, 20 bp, Artificial Sequence
  MKO10096605_B_Lpar5
  gRNA
cagtattcaggaccgcgatc

SEQ ID NO: 96606 - DNA, 20 bp, Artificial Sequence
  MKO10096606_B_Lpar5
  gRNA
cgtgccctataactccacgc

SEQ ID NO: 96607 - DNA, 20 bp, Artificial Sequence
  MKO10096607_B_Lpar5
  gRNA
gcacggtcttccgtcgccgt

SEQ ID NO: 96608 - DNA, 20 bp, Artificial Sequence
  MKO10096608_B_Lpar6
  gRNA
tacaacgtacatgattaacc

SEQ ID NO: 96609 - DNA, 20 bp, Artificial Sequence
  MKO10096609_B_Lpar6
  gRNA
aatgtatatcgcaacacagt

SEQ ID NO: 96610 - DNA, 20 bp, Artificial Sequence
  MKO10096610_B_Lpar6
  gRNA
tttactttgcaacacggaat

SEQ ID NO: 96611 - DNA, 20 bp, Artificial Sequence
  MKO10096611_B_Lpcat1
  gRNA
gccgccccttcacagctaca

SEQ ID NO: 96612 - DNA, 20 bp, Artificial Sequence
  MKO10096612_B_Lpcat1
  gRNA
ggctgctctggctccttatc

SEQ ID NO: 96613 - DNA, 20 bp, Artificial Sequence
  MKO10096613_B_Lpcat1
  gRNA
gaagccgccagcaaaccaca

SEQ ID NO: 96614 - DNA, 20 bp, Artificial Sequence
  MKO10096614_B_Lpcat2b
  gRNA
ggaccaatatgcttcgtttg

SEQ ID NO: 96615 - DNA, 20 bp, Artificial Sequence
  MKO10096615_B_Lpcat2b
  gRNA
caacacagtccgaatcaaga

SEQ ID NO: 96616 - DNA, 20 bp, Artificial Sequence
  MKO10096616_B_Lpcat2b
  gRNA
tctctgatagtcagcttgcg

SEQ ID NO: 96617 - DNA, 20 bp, Artificial Sequence
  MKO10096617_B_Lpcat2
  gRNA
tcaacacgggataccaaaac

SEQ ID NO: 96618 - DNA, 20 bp, Artificial Sequence
  MKO10096618_B_Lpcat2
  gRNA
gctcccagtccgtgctttac

SEQ ID NO: 96619 - DNA, 20 bp, Artificial Sequence
  MKO10096619_B_Lpcat2
  gRNA
cgattagtacaagtaccttc

SEQ ID NO: 96620 - DNA, 20 bp, Artificial Sequence
  MKO10096620_B_Lpcat3
  gRNA
ctgtgtattgactactacga

SEQ ID NO: 96621 - DNA, 20 bp, Artificial Sequence
  MKO10096621_B_Lpcat3
  gRNA
ccacttgatatcgtagtcac

SEQ ID NO: 96622 - DNA, 20 bp, Artificial Sequence
  MKO10096622_B_Lpcat3
  gRNA
gttcctcatcctgcgactca

SEQ ID NO: 96623 - DNA, 20 bp, Artificial Sequence
  MKO10096623_B_Lpcat4
  gRNA
aggccctttgaccccgaaca

SEQ ID NO: 96624 - DNA, 20 bp, Artificial Sequence
  MKO10096624_B_Lpcat4
  gRNA
cttccttcggatccgtgttc

SEQ ID NO: 96625 - DNA, 20 bp, Artificial Sequence
  MKO10096625_B_Lpcat4
  gRNA
tacttcctccatcctgtaat

SEQ ID NO: 96626 - DNA, 20 bp, Artificial Sequence
  MKO10096626_B_Lpgat1
  gRNA
aagcgcttctggtatatcga

SEQ ID NO: 96627 - DNA, 20 bp, Artificial Sequence
  MKO10096627_B_Lpgat1
  gRNA
agcaccttgaacataattac

SEQ ID NO: 96628 - DNA, 20 bp, Artificial Sequence
  MKO10096628_B_Lpgat1
  gRNA
tggagacttctttataagac

SEQ ID NO: 96629 - DNA, 20 bp, Artificial Sequence
  MKO10096629_B_Lphn1
  gRNA
cacagtcgtactgcacctcc

SEQ ID NO: 96630 - DNA, 20 bp, Artificial Sequence
  MKO10096630_B_Lphn1
  gRNA
agggctaccccatcgagctg

SEQ ID NO: 96631 - DNA, 20 bp, Artificial Sequence
  MKO10096631_B_Lphn1
  gRNA
gtactcacctcgagttccct

SEQ ID NO: 96632 - DNA, 20 bp, Artificial Sequence
  MKO10096632_B_Lphn2
  gRNA
gtctatagaataaccctcac

SEQ ID NO: 96633 - DNA, 20 bp, Artificial Sequence
  MKO10096633_B_Lphn2
  gRNA
tatttgtaagttccgggaca

SEQ ID NO: 96634 - DNA, 20 bp, Artificial Sequence
  MKO10096634_B_Lphn2
  gRNA
gtatttcctgatccatgtcc

SEQ ID NO: 96635 - DNA, 20 bp, Artificial Sequence
  MKO10096635_B_Lphn3
  gRNA
atcatgatgacgtctgtgcc

SEQ ID NO: 96636 - DNA, 20 bp, Artificial Sequence
  MKO10096636_B_Lphn3
  gRNA
tatttatatgttcccggaca

SEQ ID NO: 96637 - DNA, 20 bp, Artificial Sequence
  MKO10096637_B_Lphn3
  gRNA
cacattcatactgcacttca

SEQ ID NO: 96638 - DNA, 20 bp, Artificial Sequence
  MKO10096638_B_Lpin1
  gRNA
gtcagcatcgtatcccagtt

SEQ ID NO: 96639 - DNA, 20 bp, Artificial Sequence
  MKO10096639_B_Lpin1
  gRNA
tcaagagactgacaacgatc

SEQ ID NO: 96640 - DNA, 20 bp, Artificial Sequence
  MKO10096640_B_Lpin1
  gRNA
gggcagctgtagtgggatcc

SEQ ID NO: 96641 - DNA, 20 bp, Artificial Sequence
  MKO10096641_B_Lpin2
  gRNA
gataactaccccttatctga

SEQ ID NO: 96642 - DNA, 20 bp, Artificial Sequence
  MKO10096642_B_Lpin2
  gRNA
gaagtccttaccttgctgcc

SEQ ID NO: 96643 - DNA, 20 bp, Artificial Sequence
  MKO10096643_B_Lpin2
  gRNA
ttcagacgtttctcacacct

SEQ ID NO: 96644 - DNA, 20 bp, Artificial Sequence
  MKO10096644_B_Lpin3
  gRNA
ttctccgccctgtaatgact

SEQ ID NO: 96645 - DNA, 20 bp, Artificial Sequence
  MKO10096645_B_Lpin3
  gRNA
cggcgaggccttctttgtcc

SEQ ID NO: 96646 - DNA, 20 bp, Artificial Sequence
  MKO10096646_B_Lpin3
  gRNA
gagctgagtctcacatgcag

SEQ ID NO: 96647 - DNA, 20 bp, Artificial Sequence
  MKO10096647_B_Lpl
  gRNA
ccagtctactacaatgacat

SEQ ID NO: 96648 - DNA, 20 bp, Artificial Sequence
  MKO10096648_B_Lpl
  gRNA
ccaatgtcattgtagtagac

SEQ ID NO: 96649 - DNA, 20 bp, Artificial Sequence
  MKO10096649_B_Lpl
  gRNA
ctccaaggctgtaccctaag

SEQ ID NO: 96650 - DNA, 20 bp, Artificial Sequence
  MKO10096650_B_Lpo
  gRNA
atgatgtcagtctcggcagt

SEQ ID NO: 96651 - DNA, 20 bp, Artificial Sequence
  MKO10096651_B_Lpo
  gRNA
gcaacataagtagcccttac

SEQ ID NO: 96652 - DNA, 20 bp, Artificial Sequence
  MKO10096652_B_Lpo
  gRNA
acacgcacagccatccggag

SEQ ID NO: 96653 - DNA, 20 bp, Artificial Sequence
  MKO10096653_B_Lpp
  gRNA
acggaggatccgctccatga

SEQ ID NO: 96654 - DNA, 20 bp, Artificial Sequence
  MKO10096654_B_Lpp
  gRNA
atacgcagcttcccgcttcc

SEQ ID NO: 96655 - DNA, 20 bp, Artificial Sequence
  MKO10096655_B_Lpp
  gRNA
ctcaccaaagtaatcgtcag

SEQ ID NO: 96656 - DNA, 20 bp, Artificial Sequence
  MKO10096656_B_Lpxn
  gRNA
gagatgccttgtgatcctgc

SEQ ID NO: 96657 - DNA, 20 bp, Artificial Sequence
  MKO10096657_B_Lpxn
  gRNA
tcctgccagaagccaattgc

SEQ ID NO: 96658 - DNA, 20 bp, Artificial Sequence
  MKO10096658_B_Lpxn
  gRNA
ggcccacctgagtgaaatgc

SEQ ID NO: 96659 - DNA, 20 bp, Artificial Sequence
  MKO10096659_B_Lrat
  gRNA
atcacgaatgattatcttca

SEQ ID NO: 96660 - DNA, 20 bp, Artificial Sequence
  MKO10096660_B_Lrat
  gRNA
gcgacgtgttggaggtgtca

SEQ ID NO: 96661 - DNA, 20 bp, Artificial Sequence
  MKO10096661_B_Lrat
  gRNA
caaggtggctagcatccgtg

SEQ ID NO: 96662 - DNA, 20 bp, Artificial Sequence
  MKO10096662_B_Lrba
  gRNA
ggtaggaggccagtttgatt

SEQ ID NO: 96663 - DNA, 20 bp, Artificial Sequence
  MKO10096663_B_Lrba
  gRNA
aaagttgacagtatgattgc

SEQ ID NO: 96664 - DNA, 20 bp, Artificial Sequence
  MKO10096664_B_Lrba
  gRNA
gacagcagcttcccagcgtg

SEQ ID NO: 96665 - DNA, 20 bp, Artificial Sequence
  MKO10096665_B_Lrch1
  gRNA
atcgcaagcaacaacaagct

SEQ ID NO: 96666 - DNA, 20 bp, Artificial Sequence
  MKO10096666_B_Lrch1
  gRNA
tgttgacccacctaaacttg

SEQ ID NO: 96667 - DNA, 20 bp, Artificial Sequence
  MKO10096667_B_Lrch1
  gRNA
gctgtgccaatttgtatcac

SEQ ID NO: 96668 - DNA, 20 bp, Artificial Sequence
  MKO10096668_B_Lrch2
  gRNA
ggaaggtcaaataagtattt

SEQ ID NO: 96669 - DNA, 20 bp, Artificial Sequence
  MKO10096669_B_Lrch2
  gRNA
aatttctgtaaaacgatttc

SEQ ID NO: 96670 - DNA, 20 bp, Artificial Sequence
  MKO10096670_B_Lrch2
  gRNA
gtatccattcccgaagaaat

SEQ ID NO: 96671 - DNA, 20 bp, Artificial Sequence
  MKO10096671_B_Lrch3
  gRNA
tgatcacctggaggtgccgg

SEQ ID NO: 96672 - DNA, 20 bp, Artificial Sequence
  MKO10096672_B_Lrch3
  gRNA
tccagattaccaatttggga

SEQ ID NO: 96673 - DNA, 20 bp, Artificial Sequence
  MKO10096673_B_Lrch3
  gRNA
catcttctacgcttgcctga

SEQ ID NO: 96674 - DNA, 20 bp, Artificial Sequence
  MKO10096674_B_Lrch4
  gRNA
tgtctgacaagtcgtaactg

SEQ ID NO: 96675 - DNA, 20 bp, Artificial Sequence
  MKO10096675_B_Lrch4
  gRNA
cgtttgaagcacttcccccg

SEQ ID NO: 96676 - DNA, 20 bp, Artificial Sequence
  MKO10096676_B_Lrch4
  gRNA
ttattctcacaagctgccgc

SEQ ID NO: 96677 - DNA, 20 bp, Artificial Sequence
  MKO10096677_B_Lrcol1
  gRNA
gccacagcaactgttgcatc

SEQ ID NO: 96678 - DNA, 20 bp, Artificial Sequence
  MKO10096678_B_Lrcol1
  gRNA
tttgatgagcagaacctgtc

SEQ ID NO: 96679 - DNA, 20 bp, Artificial Sequence
  MKO10096679_B_Lrcol1
  gRNA
tttctgtgggttcaagctgt

SEQ ID NO: 96680 - DNA, 20 bp, Artificial Sequence
  MKO10096680_B_Lrdd
  gRNA
gttcccctgcaggcgcacaa

SEQ ID NO: 96681 - DNA, 20 bp, Artificial Sequence
  MKO10096681_B_Lrdd
  gRNA
cccttgtgcagacatatccc

SEQ ID NO: 96682 - DNA, 20 bp, Artificial Sequence
  MKO10096682_B_Lrdd
  gRNA
acctagacctgagcttcaac

SEQ ID NO: 96683 - DNA, 20 bp, Artificial Sequence
  MKO10096683_B_Lrfn1
  gRNA
cgacggggccaccgctctgc

SEQ ID NO: 96684 - DNA, 20 bp, Artificial Sequence
  MKO10096684_B_Lrfn1
  gRNA
agggctcaggcagaagcaag

SEQ ID NO: 96685 - DNA, 20 bp, Artificial Sequence
  MKO10096685_B_Lrfn1
  gRNA
ctttgtagttctagctgtcc

SEQ ID NO: 96686 - DNA, 20 bp, Artificial Sequence
  MKO10096686_B_Lrfn2
  gRNA
agaccttgtaccgcaccatg

SEQ ID NO: 96687 - DNA, 20 bp, Artificial Sequence
  MKO10096687_B_Lrfn2
  gRNA
tgcccccgatgaccgcttgg

SEQ ID NO: 96688 - DNA, 20 bp, Artificial Sequence
  MKO10096688_B_Lrfn2
  gRNA
gtttcccaccaagcggtcat

SEQ ID NO: 96689 - DNA, 20 bp, Artificial Sequence
  MKO10096689_B_Lrfn3
  gRNA
actgtggcccctaccgaccg

SEQ ID NO: 96690 - DNA, 20 bp, Artificial Sequence
  MKO10096690_B_Lrfn3
  gRNA
agacgactgtgccgagaccc

SEQ ID NO: 96691 - DNA, 20 bp, Artificial Sequence
  MKO10096691_B_Lrfn3
  gRNA
cagggcacgtaggtcggcga

SEQ ID NO: 96692 - DNA, 20 bp, Artificial Sequence
  MKO10096692_B_Lrfn4
  gRNA
cggcggagccactctgtaca

SEQ ID NO: 96693 - DNA, 20 bp, Artificial Sequence
  MKO10096693_B_Lrfn4
  gRNA
agcgggccaccctacggtgc

SEQ ID NO: 96694 - DNA, 20 bp, Artificial Sequence
  MKO10096694_B_Lrfn4
  gRNA
gctggcccggcccgatgacc

SEQ ID NO: 96695 - DNA, 20 bp, Artificial Sequence
  MKO10096695_B_Lrfn5
  gRNA
agcattcgagcctgacttag

SEQ ID NO: 96696 - DNA, 20 bp, Artificial Sequence
  MKO10096696_B_Lrfn5
  gRNA
tgttgcttcccctgccggat

SEQ ID NO: 96697 - DNA, 20 bp, Artificial Sequence
  MKO10096697_B_Lrfn5
  gRNA
atccaatgaatcgcaggttc

SEQ ID NO: 96698 - DNA, 20 bp, Artificial Sequence
  MKO10096698_B_Lrg1
  gRNA
cattcaggaacaggacgcgc

SEQ ID NO: 96699 - DNA, 20 bp, Artificial Sequence
  MKO10096699_B_Lrg1
  gRNA
acagaacgacacgcgctgtg

SEQ ID NO: 96700 - DNA, 20 bp, Artificial Sequence
  MKO10096700_B_Lrg1
  gRNA
aactcagctggttctccgcc

SEQ ID NO: 96701 - DNA, 20 bp, Artificial Sequence
  MKO10096701_B_Lrguk
  gRNA
ataagtataccttgagattt

SEQ ID NO: 96702 - DNA, 20 bp, Artificial Sequence
  MKO10096702_B_Lrguk
  gRNA
ccgaaagattcaacttctgc

SEQ ID NO: 96703 - DNA, 20 bp, Artificial Sequence
  MKO10096703_B_Lrguk
  gRNA
aaattagttgagtgagagta

SEQ ID NO: 96704 - DNA, 20 bp, Artificial Sequence
  MKO10096704_B_Lrif1
  gRNA
cgtcattctgaaaaccgcag

SEQ ID NO: 96705 - DNA, 20 bp, Artificial Sequence
  MKO10096705_B_Lrif1
  gRNA
atgatgccttaatattagta

SEQ ID NO: 96706 - DNA, 20 bp, Artificial Sequence
  MKO10096706_B_Lrif1
  gRNA
aattgagaatgctgatgaca

SEQ ID NO: 96707 - DNA, 20 bp, Artificial Sequence
  MKO10096707_B_Lrig1
  gRNA
cttacagttcccttatacgc

SEQ ID NO: 96708 - DNA, 20 bp, Artificial Sequence
  MKO10096708_B_Lrig1
  gRNA
agcagcgcccagtgatggta

SEQ ID NO: 96709 - DNA, 20 bp, Artificial Sequence
  MKO10096709_B_Lrig1
  gRNA
gctgacagccataccatcac

SEQ ID NO: 96710 - DNA, 20 bp, Artificial Sequence
  MKO10096710_B_Lrig2
  gRNA
tcagggatttgagtcataac

SEQ ID NO: 96711 - DNA, 20 bp, Artificial Sequence
  MKO10096711_B_Lrig2
  gRNA
aggtatttcagtgacattcg

SEQ ID NO: 96712 - DNA, 20 bp, Artificial Sequence
  MKO10096712_B_Lrig2
  gRNA
cttgatttctgatattatat

SEQ ID NO: 96713 - DNA, 20 bp, Artificial Sequence
  MKO10096713_B_Lrig3
  gRNA
atgggactcacacttcttga

SEQ ID NO: 96714 - DNA, 20 bp, Artificial Sequence
  MKO10096714_B_Lrig3
  gRNA
caaaatcctccctgaacagc

SEQ ID NO: 96715 - DNA, 20 bp, Artificial Sequence
  MKO10096715_B_Lrig3
  gRNA
gccaaattgtcaaaataccc

SEQ ID NO: 96716 - DNA, 20 bp, Artificial Sequence
  MKO10096716_B_Lrit1
  gRNA
gtctagcctcgatgaagatc

SEQ ID NO: 96717 - DNA, 20 bp, Artificial Sequence
  MKO10096717_B_Lrit1
  gRNA
gcagctctcgtaggcgtctc

SEQ ID NO: 96718 - DNA, 20 bp, Artificial Sequence
  MKO10096718_B_Lrit1
  gRNA
atgacacattgctccttcgt

SEQ ID NO: 96719 - DNA, 20 bp, Artificial Sequence
  MKO10096719_B_Lrit2
  gRNA
acggcgtatgtgttgattcc

SEQ ID NO: 96720 - DNA, 20 bp, Artificial Sequence
  MKO10096720_B_Lrit2
  gRNA
gccaaaactctcctctgaac

SEQ ID NO: 96721 - DNA, 20 bp, Artificial Sequence
  MKO10096721_B_Lrit2
  gRNA
ttactgtttcttgcaagttc

SEQ ID NO: 96722 - DNA, 20 bp, Artificial Sequence
  MKO10096722_B_Lrit3
  gRNA
caagattccttggaagcgct

SEQ ID NO: 96723 - DNA, 20 bp, Artificial Sequence
  MKO10096723_B_Lrit3
  gRNA
ttagtgaatgcagacgacta

SEQ ID NO: 96724 - DNA, 20 bp, Artificial Sequence
  MKO10096724_B_Lrit3
  gRNA
agtgaacccgagcgcttcca

SEQ ID NO: 96725 - DNA, 20 bp, Artificial Sequence
  MKO10096725_B_Lrmp
  gRNA
agactgtaccagaatgaacg

SEQ ID NO: 96726 - DNA, 20 bp, Artificial Sequence
  MKO10096726_B_Lrmp
  gRNA
tgacgtcacagtgctctccg

SEQ ID NO: 96727 - DNA, 20 bp, Artificial Sequence
  MKO10096727_B_Lrmp
  gRNA
cattgtaccttgcatggcag

SEQ ID NO: 96728 - DNA, 20 bp, Artificial Sequence
  MKO10096728_B_Lrp10
  gRNA
cggatcactttcccacgttc

SEQ ID NO: 96729 - DNA, 20 bp, Artificial Sequence
  MKO10096729_B_Lrp10
  gRNA
gccagaaggggcctcacaca

SEQ ID NO: 96730 - DNA, 20 bp, Artificial Sequence
  MKO10096730_B_Lrp10
  gRNA
tccccctctaggaggtgctc

SEQ ID NO: 96731 - DNA, 20 bp, Artificial Sequence
  MKO10096731_B_Lrp11
  gRNA
gcagggtgacccatcgtcag

SEQ ID NO: 96732 - DNA, 20 bp, Artificial Sequence
  MKO10096732_B_Lrp11
  gRNA
gtggagtggatcctcgtctc

SEQ ID NO: 96733 - DNA, 20 bp, Artificial Sequence
  MKO10096733_B_Lrp11
  gRNA
cctgaggctgtcccgcctga

SEQ ID NO: 96734 - DNA, 20 bp, Artificial Sequence
  MKO10096734_B_Lrp12
  gRNA
cgctgtcatctgagtggaac

SEQ ID NO: 96735 - DNA, 20 bp, Artificial Sequence
  MKO10096735_B_Lrp12
  gRNA
caggggagatcattactata

SEQ ID NO: 96736 - DNA, 20 bp, Artificial Sequence
  MKO10096736_B_Lrp12
  gRNA
gaacaaattcgagcaccgag

SEQ ID NO: 96737 - DNA, 20 bp, Artificial Sequence
  MKO10096737_B_Lrp1b
  gRNA
caattcaactgctgacaact

SEQ ID NO: 96738 - DNA, 20 bp, Artificial Sequence
  MKO10096738_B_Lrp1b
  gRNA
ctccatcgcacagccaactc

SEQ ID NO: 96739 - DNA, 20 bp, Artificial Sequence
  MKO10096739_B_Lrp1b
  gRNA
tatctaaagactcatctgac

SEQ ID NO: 96740 - DNA, 20 bp, Artificial Sequence
  MKO10096740_B_Lrp1
  gRNA
agcggttgtccggttgcagc

SEQ ID NO: 96741 - DNA, 20 bp, Artificial Sequence
  MKO10096741_B_Lrp1
  gRNA
gctgctgttacagtagcacg

SEQ ID NO: 96742 - DNA, 20 bp, Artificial Sequence
  MKO10096742_B_Lrp1
  gRNA
ggtgaaagagattgccccga

SEQ ID NO: 96743 - DNA, 20 bp, Artificial Sequence
  MKO10096743_B_Lrp2bp
  gRNA
tgcgccttcacactagcttt

SEQ ID NO: 96744 - DNA, 20 bp, Artificial Sequence
  MKO10096744_B_Lrp2bp
  gRNA
tggctgcttgctgccgacaa

SEQ ID NO: 96745 - DNA, 20 bp, Artificial Sequence
  MKO10096745_B_Lrp2bp
  gRNA
agtgatgtattatgatgggc

SEQ ID NO: 96746 - DNA, 20 bp, Artificial Sequence
  MKO10096746_B_Lrp2
  gRNA
atggtcacacctgtactcga

SEQ ID NO: 96747 - DNA, 20 bp, Artificial Sequence
  MKO10096747_B_Lrp2
  gRNA
cttctgactcgtgttatagc

SEQ ID NO: 96748 - DNA, 20 bp, Artificial Sequence
  MKO10096748_B_Lrp2
  gRNA
actgcagttagcttcgtcag

SEQ ID NO: 96749 - DNA, 20 bp, Artificial Sequence
  MKO10096749_B_Lrp3
  gRNA
gaacagcacactgaacgtcg

SEQ ID NO: 96750 - DNA, 20 bp, Artificial Sequence
  MKO10096750_B_Lrp3
  gRNA
gtggtgacatgatcactatc

SEQ ID NO: 96751 - DNA, 20 bp, Artificial Sequence
  MKO10096751_B_Lrp3
  gRNA
acagtgaacctctttctcac

SEQ ID NO: 96752 - DNA, 20 bp, Artificial Sequence
  MKO10096752_B_Lrp4
  gRNA
gacaacagtgacgagcaatg

SEQ ID NO: 96753 - DNA, 20 bp, Artificial Sequence
  MKO10096753_B_Lrp4
  gRNA
tcggagccacttcacatgtg

SEQ ID NO: 96754 - DNA, 20 bp, Artificial Sequence
  MKO10096754_B_Lrp4
  gRNA
attgtccccgtcacacaccc

SEQ ID NO: 96755 - DNA, 20 bp, Artificial Sequence
  MKO10096755_B_Lrp5
  gRNA
ccaccgttgtcctcctcgca

SEQ ID NO: 96756 - DNA, 20 bp, Artificial Sequence
  MKO10096756_B_Lrp5
  gRNA
caatgggctgaccatcgacc

SEQ ID NO: 96757 - DNA, 20 bp, Artificial Sequence
  MKO10096757_B_Lrp5
  gRNA
accagtccacacaccatgcg

SEQ ID NO: 96758 - DNA, 20 bp, Artificial Sequence
  MKO10096758_B_Lrp6
  gRNA
ttggtcatggcttgatatac

SEQ ID NO: 96759 - DNA, 20 bp, Artificial Sequence
  MKO10096759_B_Lrp6
  gRNA
tgtgtcctcaaataacgtca

SEQ ID NO: 96760 - DNA, 20 bp, Artificial Sequence
  MKO10096760_B_Lrp6
  gRNA
tatcagtgtgcttgcccaac

SEQ ID NO: 96761 - DNA, 20 bp, Artificial Sequence
  MKO10096761_B_Lrp8
  gRNA
ctctccgtcgcagcgccatg

SEQ ID NO: 96762 - DNA, 20 bp, Artificial Sequence
  MKO10096762_B_Lrp8
  gRNA
cttgcgttcttgccatcaaa

SEQ ID NO: 96763 - DNA, 20 bp, Artificial Sequence
  MKO10096763_B_Lrp8
  gRNA
ccgtcgcacttccaccgctc

SEQ ID NO: 96764 - DNA, 20 bp, Artificial Sequence
  MKO10096764_B_Lrpap1
  gRNA
tggaaggcttggataaggat

SEQ ID NO: 96765 - DNA, 20 bp, Artificial Sequence
  MKO10096765_B_Lrpap1
  gRNA
cgccctcaatgaagacaccc

SEQ ID NO: 96766 - DNA, 20 bp, Artificial Sequence
  MKO10096766_B_Lrpap1
  gRNA
ggaaggtaccgttgaggttg

SEQ ID NO: 96767 - DNA, 20 bp, Artificial Sequence
  MKO10096767_B_Lrpprc
  gRNA
aatgtccccaacattacagt

SEQ ID NO: 96768 - DNA, 20 bp, Artificial Sequence
  MKO10096768_B_Lrpprc
  gRNA
agcagagcttgattgctccc

SEQ ID NO: 96769 - DNA, 20 bp, Artificial Sequence
  MKO10096769_B_Lrpprc
  gRNA
tttgagagcacgtgtagctc

SEQ ID NO: 96770 - DNA, 20 bp, Artificial Sequence
  MKO10096770_B_Lrr1
  gRNA
acagcatacgcatatcaact

SEQ ID NO: 96771 - DNA, 20 bp, Artificial Sequence
  MKO10096771_B_Lrr1
  gRNA
taaccttaatgacaatcagc

SEQ ID NO: 96772 - DNA, 20 bp, Artificial Sequence
  MKO10096772_B_Lrr1
  gRNA
acactctgttgcgcacactg

SEQ ID NO: 96773 - DNA, 20 bp, Artificial Sequence
  MKO10096773_B_Lrrc10b
  gRNA
agcgcgacgaacccattccg

SEQ ID NO: 96774 - DNA, 20 bp, Artificial Sequence
  MKO10096774_B_Lrrc10b
  gRNA
gcgctcagccatgcgctcga

SEQ ID NO: 96775 - DNA, 20 bp, Artificial Sequence
  MKO10096775_B_Lrrc10b
  gRNA
acccgcgggggtccagtgac

SEQ ID NO: 96776 - DNA, 20 bp, Artificial Sequence
  MKO10096776_B_Lrrc10
  gRNA
gctggccgggtagcagacgt

SEQ ID NO: 96777 - DNA, 20 bp, Artificial Sequence
  MKO10096777_B_Lrrc10
  gRNA
cacgtcgatcacctccagaa

SEQ ID NO: 96778 - DNA, 20 bp, Artificial Sequence
  MKO10096778_B_Lrrc10
  gRNA
ggcagttggattcgagccac

SEQ ID NO: 96779 - DNA, 20 bp, Artificial Sequence
  MKO10096779_B_Lrrc14b
  gRNA
aactcaatatggcgaagcct

SEQ ID NO: 96780 - DNA, 20 bp, Artificial Sequence
  MKO10096780_B_Lrrc14b
  gRNA
cggtgaaatcagctacccga

SEQ ID NO: 96781 - DNA, 20 bp, Artificial Sequence
  MKO10096781_B_Lrrc14b
  gRNA
gttcgcagagtgcagcaaaa

SEQ ID NO: 96782 - DNA, 20 bp, Artificial Sequence
  MKO10096782_B_Lrrc14
  gRNA
ttgagtggcaacgacctgtc

SEQ ID NO: 96783 - DNA, 20 bp, Artificial Sequence
  MKO10096783_B_Lrrc14
  gRNA
gaaggacctgacgcgtgctg

SEQ ID NO: 96784 - DNA, 20 bp, Artificial Sequence
  MKO10096784_B_Lrrc14
  gRNA
tgtgttcctcagcacgcgtc

SEQ ID NO: 96785 - DNA, 20 bp, Artificial Sequence
  MKO10096785_B_Lrrc15
  gRNA
ccgggaacaggtacattcgc

SEQ ID NO: 96786 - DNA, 20 bp, Artificial Sequence
  MKO10096786_B_Lrrc15
  gRNA
gtagtcatcatcggtagacc

SEQ ID NO: 96787 - DNA, 20 bp, Artificial Sequence
  MKO10096787_B_Lrrc15
  gRNA
tgggaatgtcttccgatcac

SEQ ID NO: 96788 - DNA, 20 bp, Artificial Sequence
  MKO10096788_B_Lrrc16a
  gRNA
ttcagttatctagagattca

SEQ ID NO: 96789 - DNA, 20 bp, Artificial Sequence
  MKO10096789_B_Lrrc16a
  gRNA
atgaatctctagataactga

SEQ ID NO: 96790 - DNA, 20 bp, Artificial Sequence
  MKO10096790_B_Lrrc16a
  gRNA
ctcacataggcacctgcttg

SEQ ID NO: 96791 - DNA, 20 bp, Artificial Sequence
  MKO10096791_B_Lrrc16b
  gRNA
ttaccttagctggaacttta

SEQ ID NO: 96792 - DNA, 20 bp, Artificial Sequence
  MKO10096792_B_Lrrc16b
  gRNA
agctcacatgccgtgtcacc

SEQ ID NO: 96793 - DNA, 20 bp, Artificial Sequence
  MKO10096793_B_Lrrc16b
  gRNA
attctgactgagtgtgttga

SEQ ID NO: 96794 - DNA, 20 bp, Artificial Sequence
  MKO10096794_B_Lrrc17
  gRNA
tgcattccagaccgttatag

SEQ ID NO: 96795 - DNA, 20 bp, Artificial Sequence
  MKO10096795_B_Lrrc17
  gRNA
ggtagttaactaccccacaa

SEQ ID NO: 96796 - DNA, 20 bp, Artificial Sequence
  MKO10096796_B_Lrrc17
  gRNA
aggtcaagcttcactatgtc

SEQ ID NO: 96797 - DNA, 20 bp, Artificial Sequence
  MKO10096797_B_Lrrc18
  gRNA
actgagccgcaagatacact

SEQ ID NO: 96798 - DNA, 20 bp, Artificial Sequence
  MKO10096798_B_Lrrc18
  gRNA
tgttcgtagactccatcaaa

SEQ ID NO: 96799 - DNA, 20 bp, Artificial Sequence
  MKO10096799_B_Lrrc18
  gRNA
cggtgcggatgttcttgagt

SEQ ID NO: 96800 - DNA, 20 bp, Artificial Sequence
  MKO10096800_B_Lrrc19
  gRNA
aacacgtctaatgtgacatt

SEQ ID NO: 96801 - DNA, 20 bp, Artificial Sequence
  MKO10096801_B_Lrrc19
  gRNA
gtctacttgagttgcacaac

SEQ ID NO: 96802 - DNA, 20 bp, Artificial Sequence
  MKO10096802_B_Lrrc19
  gRNA
tttgacagatggtagtagca

SEQ ID NO: 96803 - DNA, 20 bp, Artificial Sequence
  MKO10096803_B_Lrrc1
  gRNA
cgccttctgtaaagcgctgc

SEQ ID NO: 96804 - DNA, 20 bp, Artificial Sequence
  MKO10096804_B_Lrrc1
  gRNA
cacgttaagttctgtagttc

SEQ ID NO: 96805 - DNA, 20 bp, Artificial Sequence
  MKO10096805_B_Lrrc1
  gRNA
tgcatgaagtttgctatttc

SEQ ID NO: 96806 - DNA, 20 bp, Artificial Sequence
  MKO10096806_B_Lrrc20
  gRNA
attgaccttcctcgcaactc

SEQ ID NO: 96807 - DNA, 20 bp, Artificial Sequence
  MKO10096807_B_Lrrc20
  gRNA
aggccgtggccagagttgcg

SEQ ID NO: 96808 - DNA, 20 bp, Artificial Sequence
  MKO10096808_B_Lrrc20
  gRNA
tcctgtggcagagctacgcc

SEQ ID NO: 96809 - DNA, 20 bp, Artificial Sequence
  MKO10096809_B_Lrrc23
  gRNA
cgctgcagtacctcaacttg

SEQ ID NO: 96810 - DNA, 20 bp, Artificial Sequence
  MKO10096810_B_Lrrc23
  gRNA
taagctgaagaatctctacc

SEQ ID NO: 96811 - DNA, 20 bp, Artificial Sequence
  MKO10096811_B_Lrrc23
  gRNA
tcacccccgtctgggaagcc

SEQ ID NO: 96812 - DNA, 20 bp, Artificial Sequence
  MKO10096812_B_Lrrc24
  gRNA
ctacaagtgctacgcctcac

SEQ ID NO: 96813 - DNA, 20 bp, Artificial Sequence
  MKO10096813_B_Lrrc24
  gRNA
cgcaggcaagtacgaatgcg

SEQ ID NO: 96814 - DNA, 20 bp, Artificial Sequence
  MKO10096814_B_Lrrc24
  gRNA
tggcgctctacggttgcgcg

SEQ ID NO: 96815 - DNA, 20 bp, Artificial Sequence
  MKO10096815_B_Lrrc25
  gRNA
gactccaggttgcaatagac

SEQ ID NO: 96816 - DNA, 20 bp, Artificial Sequence
  MKO10096816_B_Lrrc25
  gRNA
agccggccgaggactgctca

SEQ ID NO: 96817 - DNA, 20 bp, Artificial Sequence
  MKO10096817_B_Lrrc25
  gRNA
accattggagcccttgttgc

SEQ ID NO: 96818 - DNA, 20 bp, Artificial Sequence
  MKO10096818_B_Lrrc26
  gRNA
cgagagcgtagaccaccgcc

SEQ ID NO: 96819 - DNA, 20 bp, Artificial Sequence
  MKO10096819_B_Lrrc26
  gRNA
catgcaagcgcaacacatcg

SEQ ID NO: 96820 - DNA, 20 bp, Artificial Sequence
  MKO10096820_B_Lrrc26
  gRNA
aggaaactaagcgcgcgcag

SEQ ID NO: 96821 - DNA, 20 bp, Artificial Sequence
  MKO10096821_B_Lrrc27
  gRNA
ggaagcaattacacctgcag

SEQ ID NO: 96822 - DNA, 20 bp, Artificial Sequence
  MKO10096822_B_Lrrc27
  gRNA
ccaagcctttctgcacaatc

SEQ ID NO: 96823 - DNA, 20 bp, Artificial Sequence
  MKO10096823_B_Lrrc27
  gRNA
ttgtgagagccaatcccaga

SEQ ID NO: 96824 - DNA, 20 bp, Artificial Sequence
  MKO10096824_B_Lrrc28
  gRNA
gagatcgtttgcccagaaat

SEQ ID NO: 96825 - DNA, 20 bp, Artificial Sequence
  MKO10096825_B_Lrrc28
  gRNA
caactatgttatttgagtga

SEQ ID NO: 96826 - DNA, 20 bp, Artificial Sequence
  MKO10096826_B_Lrrc28
  gRNA
tcagaagcttccaaaccttg

SEQ ID NO: 96827 - DNA, 20 bp, Artificial Sequence
  MKO10096827_B_Lrrc29
  gRNA
ctgcagccacctcagtgacg

SEQ ID NO: 96828 - DNA, 20 bp, Artificial Sequence
  MKO10096828_B_Lrrc29
  gRNA
gagcggtcgggagctggccc

SEQ ID NO: 96829 - DNA, 20 bp, Artificial Sequence
  MKO10096829_B_Lrrc29
  gRNA
cacgtgcactgacttccctc

SEQ ID NO: 96830 - DNA, 20 bp, Artificial Sequence
  MKO10096830_B_Lrrc2
  gRNA
cttgactcgcgcactctgcc

SEQ ID NO: 96831 - DNA, 20 bp, Artificial Sequence
  MKO10096831_B_Lrrc2
  gRNA
ccatttgaagagtattcccc

SEQ ID NO: 96832 - DNA, 20 bp, Artificial Sequence
  MKO10096832_B_Lrrc2
  gRNA
actttgtggccgagtgcagg

SEQ ID NO: 96833 - DNA, 20 bp, Artificial Sequence
  MKO10096833_B_Lrrc30
  gRNA
ggtgacgagacagagcgacc

SEQ ID NO: 96834 - DNA, 20 bp, Artificial Sequence
  MKO10096834_B_Lrrc30
  gRNA
tcagcttccgaagtctggag

SEQ ID NO: 96835 - DNA, 20 bp, Artificial Sequence
  MKO10096835_B_Lrrc30
  gRNA
ccaacgacaaggaccccaag

SEQ ID NO: 96836 - DNA, 20 bp, Artificial Sequence
  MKO10096836_B_Lrrc32
  gRNA
ctgtgtcttaccgtcctaca

SEQ ID NO: 96837 - DNA, 20 bp, Artificial Sequence
  MKO10096837_B_Lrrc32
  gRNA
aggtctaattgctccaccgc

SEQ ID NO: 96838 - DNA, 20 bp, Artificial Sequence
  MKO10096838_B_Lrrc32
  gRNA
gacacagcccgcgtccaagc

SEQ ID NO: 96839 - DNA, 20 bp, Artificial Sequence
  MKO10096839_B_Lrrc34
  gRNA
gcaaacttaccactgataca

SEQ ID NO: 96840 - DNA, 20 bp, Artificial Sequence
  MKO10096840_B_Lrrc34
  gRNA
ggatctgggcgactgtgacc

SEQ ID NO: 96841 - DNA, 20 bp, Artificial Sequence
  MKO10096841_B_Lrrc34
  gRNA
gcaatcaattctccaccttc

SEQ ID NO: 96842 - DNA, 20 bp, Artificial Sequence
  MKO10096842_B_Lrrc36
  gRNA
ccgctctcctctcgctgtca

SEQ ID NO: 96843 - DNA, 20 bp, Artificial Sequence
  MKO10096843_B_Lrrc36
  gRNA
aaaacgtctaatttctgagc

SEQ ID NO: 96844 - DNA, 20 bp, Artificial Sequence
  MKO10096844_B_Lrrc36
  gRNA
tttaatatagacgcaaacaa

SEQ ID NO: 96845 - DNA, 20 bp, Artificial Sequence
  MKO10096845_B_Lrrc38
  gRNA
catccagtgttcactgccca

SEQ ID NO: 96846 - DNA, 20 bp, Artificial Sequence
  MKO10096846_B_Lrrc38
  gRNA
cccgcgatcgcgacagtcca

SEQ ID NO: 96847 - DNA, 20 bp, Artificial Sequence
  MKO10096847_B_Lrrc38
  gRNA
ctagcagcttgcgcacgtcc

SEQ ID NO: 96848 - DNA, 20 bp, Artificial Sequence
  MKO10096848_B_Lrrc39
  gRNA
tataagtgacctcccaccag

SEQ ID NO: 96849 - DNA, 20 bp, Artificial Sequence
  MKO10096849_B_Lrrc39
  gRNA
tcattgtgctagatttatct

SEQ ID NO: 96850 - DNA, 20 bp, Artificial Sequence
  MKO10096850_B_Lrrc39
  gRNA
catgcctgccctcgagtggc

SEQ ID NO: 96851 - DNA, 20 bp, Artificial Sequence
  MKO10096851_B_Lrrc3b
  gRNA
gccaaacatagtgacgagca

SEQ ID NO: 96852 - DNA, 20 bp, Artificial Sequence
  MKO10096852_B_Lrrc3b
  gRNA
attgacgagcatgcattcaa

SEQ ID NO: 96853 - DNA, 20 bp, Artificial Sequence
  MKO10096853_B_Lrrc3b
  gRNA
gccatgctcgtcactatgtt

SEQ ID NO: 96854 - DNA, 20 bp, Artificial Sequence
  MKO10096854_B_Lrrc3
  gRNA
cgacatcggtggtcttccgg

SEQ ID NO: 96855 - DNA, 20 bp, Artificial Sequence
  MKO10096855_B_Lrrc3
  gRNA
tgtgggcaagccgctgatcc

SEQ ID NO: 96856 - DNA, 20 bp, Artificial Sequence
  MKO10096856_B_Lrrc3
  gRNA
gccacggccccagcatggtc

SEQ ID NO: 96857 - DNA, 20 bp, Artificial Sequence
  MKO10096857_B_Lrrc40
  gRNA
atcttcagaaacttaatgtc

SEQ ID NO: 96858 - DNA, 20 bp, Artificial Sequence
  MKO10096858_B_Lrrc40
  gRNA
tctagctctcttatagctga

SEQ ID NO: 96859 - DNA, 20 bp, Artificial Sequence
  MKO10096859_B_Lrrc40
  gRNA
tgagctgacttgcatccccg

SEQ ID NO: 96860 - DNA, 20 bp, Artificial Sequence
  MKO10096860_B_Lrrc41
  gRNA
ctctaatatcttccgcctcc

SEQ ID NO: 96861 - DNA, 20 bp, Artificial Sequence
  MKO10096861_B_Lrrc41
  gRNA
atgctttgaagtattgggcc

SEQ ID NO: 96862 - DNA, 20 bp, Artificial Sequence
  MKO10096862_B_Lrrc41
  gRNA
acctcaacttacctccaaac

SEQ ID NO: 96863 - DNA, 20 bp, Artificial Sequence
  MKO10096863_B_Lrrc42
  gRNA
ggtctagacgggtcagctcc

SEQ ID NO: 96864 - DNA, 20 bp, Artificial Sequence
  MKO10096864_B_Lrrc42
  gRNA
aaccctgagataacagacgc

SEQ ID NO: 96865 - DNA, 20 bp, Artificial Sequence
  MKO10096865_B_Lrrc42
  gRNA
tcactccaaagtgcctttga

SEQ ID NO: 96866 - DNA, 20 bp, Artificial Sequence
  MKO10096866_B_Lrrc43
  gRNA
ttcctcaaaaatgtcgagtc

SEQ ID NO: 96867 - DNA, 20 bp, Artificial Sequence
  MKO10096867_B_Lrrc43
  gRNA
tctctggtgccttactaccg

SEQ ID NO: 96868 - DNA, 20 bp, Artificial Sequence
  MKO10096868_B_Lrrc43
  gRNA
gctaggccacaacaaattgc

SEQ ID NO: 96869 - DNA, 20 bp, Artificial Sequence
  MKO10096869_B_Lrrc45
  gRNA
ttcggaggtccagctgccgc

SEQ ID NO: 96870 - DNA, 20 bp, Artificial Sequence
  MKO10096870_B_Lrrc45
  gRNA
aggcatcttcccacgtgcca

SEQ ID NO: 96871 - DNA, 20 bp, Artificial Sequence
  MKO10096871_B_Lrrc45
  gRNA
gaatagacttgttctgtcga

SEQ ID NO: 96872 - DNA, 20 bp, Artificial Sequence
  MKO10096872_B_Lrrc46
  gRNA
aagtaatcccttccccgtcc

SEQ ID NO: 96873 - DNA, 20 bp, Artificial Sequence
  MKO10096873_B_Lrrc46
  gRNA
ctagcttcagcgtttctatc

SEQ ID NO: 96874 - DNA, 20 bp, Artificial Sequence
  MKO10096874_B_Lrrc46
  gRNA
tgataagggcttcagtaatg

SEQ ID NO: 96875 - DNA, 20 bp, Artificial Sequence
  MKO10096875_B_Lrrc47
  gRNA
ttggcctctttccgtcccaa

SEQ ID NO: 96876 - DNA, 20 bp, Artificial Sequence
  MKO10096876_B_Lrrc47
  gRNA
acgacgacctctgcgagaag

SEQ ID NO: 96877 - DNA, 20 bp, Artificial Sequence
  MKO10096877_B_Lrrc47
  gRNA
ggagaactacccctgtcttg

SEQ ID NO: 96878 - DNA, 20 bp, Artificial Sequence
  MKO10096878_B_Lrrc48
  gRNA
tcctccgcatcgataacctc

SEQ ID NO: 96879 - DNA, 20 bp, Artificial Sequence
  MKO10096879_B_Lrrc48
  gRNA
actgccagaggttatcgatg

SEQ ID NO: 96880 - DNA, 20 bp, Artificial Sequence
  MKO10096880_B_Lrrc48
  gRNA
cagggtatccaggccctcga

SEQ ID NO: 96881 - DNA, 20 bp, Artificial Sequence
  MKO10096881_B_Lrrc49
  gRNA
atgagctcaccagactaatg

SEQ ID NO: 96882 - DNA, 20 bp, Artificial Sequence
  MKO10096882_B_Lrrc49
  gRNA
ggtgaactgtggacttcatc

SEQ ID NO: 96883 - DNA, 20 bp, Artificial Sequence
  MKO10096883_B_Lrrc49
  gRNA
tagactgttacagcatgacc

SEQ ID NO: 96884 - DNA, 20 bp, Artificial Sequence
  MKO10096884_B_Lrrc4b
  gRNA
atggcgcaggcccacatccg

SEQ ID NO: 96885 - DNA, 20 bp, Artificial Sequence
  MKO10096885_B_Lrrc4b
  gRNA
tgcgtcatgagcgtgccgtt

SEQ ID NO: 96886 - DNA, 20 bp, Artificial Sequence
  MKO10096886_B_Lrrc4b
  gRNA
gccgccgtagtgcgccttga

SEQ ID NO: 96887 - DNA, 20 bp, Artificial Sequence
  MKO10096887_B_Lrrc4c
  gRNA
cgtcttactaccataccgaa

SEQ ID NO: 96888 - DNA, 20 bp, Artificial Sequence
  MKO10096888_B_Lrrc4c
  gRNA
agctcgtcaagtttgatgag

SEQ ID NO: 96889 - DNA, 20 bp, Artificial Sequence
  MKO10096889_B_Lrrc4c
  gRNA
tgaggttagggatttcccga

SEQ ID NO: 96890 - DNA, 20 bp, Artificial Sequence
  MKO10096890_B_Lrrc4
  gRNA
caaaagcattccgctcaatc

SEQ ID NO: 96891 - DNA, 20 bp, Artificial Sequence
  MKO10096891_B_Lrrc4
  gRNA
gcttcccgtcgtctacctca

SEQ ID NO: 96892 - DNA, 20 bp, Artificial Sequence
  MKO10096892_B_Lrrc4
  gRNA
ttgagataccgggtgttgga

SEQ ID NO: 96893 - DNA, 20 bp, Artificial Sequence
  MKO10096893_B_Lrrc51
  gRNA
gccaaggacaggtctacgac

SEQ ID NO: 96894 - DNA, 20 bp, Artificial Sequence
  MKO10096894_B_Lrrc51
  gRNA
ctccttcaaaagcgtccaaa

SEQ ID NO: 96895 - DNA, 20 bp, Artificial Sequence
  MKO10096895_B_Lrrc51
  gRNA
ctatatgaacacttccgtgc

SEQ ID NO: 96896 - DNA, 20 bp, Artificial Sequence
  MKO10096896_B_Lrrc52
  gRNA
ttgcacatcatcgaccataa

SEQ ID NO: 96897 - DNA, 20 bp, Artificial Sequence
  MKO10096897_B_Lrrc52
  gRNA
tatcatccccgctcgacgtt

SEQ ID NO: 96898 - DNA, 20 bp, Artificial Sequence
  MKO10096898_B_Lrrc52
  gRNA
gtgaaatgttcagccgcacc

SEQ ID NO: 96899 - DNA, 20 bp, Artificial Sequence
  MKO10096899_B_Lrrc55
  gRNA
ttacctcttcatcgcatttg

SEQ ID NO: 96900 - DNA, 20 bp, Artificial Sequence
  MKO10096900_B_Lrrc55
  gRNA
tgtttcgcaaatccagcacg

SEQ ID NO: 96901 - DNA, 20 bp, Artificial Sequence
  MKO10096901_B_Lrrc55
  gRNA
gtacagctgcaatgcgattg

SEQ ID NO: 96902 - DNA, 20 bp, Artificial Sequence
  MKO10096902_B_Lrrc56
  gRNA
cagagacctgggcacttcgc

SEQ ID NO: 96903 - DNA, 20 bp, Artificial Sequence
  MKO10096903_B_Lrrc56
  gRNA
ggacacccgtaagaacagcc

SEQ ID NO: 96904 - DNA, 20 bp, Artificial Sequence
  MKO10096904_B_Lrrc56
  gRNA
caatgccatccaagtcagtc

SEQ ID NO: 96905 - DNA, 20 bp, Artificial Sequence
  MKO10096905_B_Lrrc57
  gRNA
gtgaactttcctattatcag

SEQ ID NO: 96906 - DNA, 20 bp, Artificial Sequence
  MKO10096906_B_Lrrc57
  gRNA
gaccttgaggcgaggacagc

SEQ ID NO: 96907 - DNA, 20 bp, Artificial Sequence
  MKO10096907_B_Lrrc57
  gRNA
atcctgctgtcctcgcctca

SEQ ID NO: 96908 - DNA, 20 bp, Artificial Sequence
  MKO10096908_B_Lrrc58
  gRNA
gtatgaccctccgactcttc

SEQ ID NO: 96909 - DNA, 20 bp, Artificial Sequence
  MKO10096909_B_Lrrc58
  gRNA
cttctgagtcagattcactc

SEQ ID NO: 96910 - DNA, 20 bp, Artificial Sequence
  MKO10096910_B_Lrrc58
  gRNA
ccattgctgctcaaccaaga

SEQ ID NO: 96911 - DNA, 20 bp, Artificial Sequence
  MKO10096911_B_Lrrc59
  gRNA
aagagtactcagtttattgc

SEQ ID NO: 96912 - DNA, 20 bp, Artificial Sequence
  MKO10096912_B_Lrrc59
  gRNA
cgccggctggaagtggagcg

SEQ ID NO: 96913 - DNA, 20 bp, Artificial Sequence
  MKO10096913_B_Lrrc59
  gRNA
ggatctgaaggacaatcccc

SEQ ID NO: 96914 - DNA, 20 bp, Artificial Sequence
  MKO10096914_B_Lrrc61
  gRNA
tcggcaggcctcctccagaa

SEQ ID NO: 96915 - DNA, 20 bp, Artificial Sequence
  MKO10096915_B_Lrrc61
  gRNA
gtgagctgtaccagttatgc

SEQ ID NO: 96916 - DNA, 20 bp, Artificial Sequence
  MKO10096916_B_Lrrc61
  gRNA
ggaggcctgccgacagttcc

SEQ ID NO: 96917 - DNA, 20 bp, Artificial Sequence
  MKO10096917_B_Lrrc63
  gRNA
ccagatgcccatgtcttacg

SEQ ID NO: 96918 - DNA, 20 bp, Artificial Sequence
  MKO10096918_B_Lrrc63
  gRNA
agccttcccctcgtaagaca

SEQ ID NO: 96919 - DNA, 20 bp, Artificial Sequence
  MKO10096919_B_Lrrc63
  gRNA
tataccaattgaaaagccac

SEQ ID NO: 96920 - DNA, 20 bp, Artificial Sequence
  MKO10096920_B_Lrrc66
  gRNA
agtggcctccgtggcgcttt

SEQ ID NO: 96921 - DNA, 20 bp, Artificial Sequence
  MKO10096921_B_Lrrc66
  gRNA
ttggcttggctgataaccag

SEQ ID NO: 96922 - DNA, 20 bp, Artificial Sequence
  MKO10096922_B_Lrrc66
  gRNA
tgctctagaattgccccacc

SEQ ID NO: 96923 - DNA, 20 bp, Artificial Sequence
  MKO10096923_B_Lrrc69
  gRNA
taagcatgatcaagcgatgt

SEQ ID NO: 96924 - DNA, 20 bp, Artificial Sequence
  MKO10096924_B_Lrrc69
  gRNA
tcagatcgtgtacatccctg

SEQ ID NO: 96925 - DNA, 20 bp, Artificial Sequence
  MKO10096925_B_Lrrc69
  gRNA
acgagtcttcctcaagaaat

SEQ ID NO: 96926 - DNA, 20 bp, Artificial Sequence
  MKO10096926_B_Lrrc6
  gRNA
aagaaatagagcgttctgaa

SEQ ID NO: 96927 - DNA, 20 bp, Artificial Sequence
  MKO10096927_B_Lrrc6
  gRNA
tatcttcaaaataacctcat

SEQ ID NO: 96928 - DNA, 20 bp, Artificial Sequence
  MKO10096928_B_Lrrc6
  gRNA
ttctatttcttgctgatgca

SEQ ID NO: 96929 - DNA, 20 bp, Artificial Sequence
  MKO10096929_B_Lrrc71
  gRNA
actttcccaaagttgtcacc

SEQ ID NO: 96930 - DNA, 20 bp, Artificial Sequence
  MKO10096930_B_Lrrc71
  gRNA
aggcaaaagggcgatgaaag

SEQ ID NO: 96931 - DNA, 20 bp, Artificial Sequence
  MKO10096931_B_Lrrc71
  gRNA
cacaactgacctgagtgtgg

SEQ ID NO: 96932 - DNA, 20 bp, Artificial Sequence
  MKO10096932_B_Lrrc72
  gRNA
ccgatcaagcaactccagtc

SEQ ID NO: 96933 - DNA, 20 bp, Artificial Sequence
  MKO10096933_B_Lrrc72
  gRNA
ggtggaagattatatacaat

SEQ ID NO: 96934 - DNA, 20 bp, Artificial Sequence
  MKO10096934_B_Lrrc72
  gRNA
agttaccaataaagcaaaag

SEQ ID NO: 96935 - DNA, 20 bp, Artificial Sequence
  MKO10096935_B_Lrrc73
  gRNA
gagccgcctcgccattgctg

SEQ ID NO: 96936 - DNA, 20 bp, Artificial Sequence
  MKO10096936_B_Lrrc73
  gRNA
cacccagggggttgtagtcc

SEQ ID NO: 96937 - DNA, 20 bp, Artificial Sequence
  MKO10096937_B_Lrrc73
  gRNA
cttaccactggggcacatcc

SEQ ID NO: 96938 - DNA, 20 bp, Artificial Sequence
  MKO10096938_B_Lrrc7
  gRNA
attcgaggaatgcgtcattc

SEQ ID NO: 96939 - DNA, 20 bp, Artificial Sequence
  MKO10096939_B_Lrrc7
  gRNA
gaactcgacatcagtaaaaa

SEQ ID NO: 96940 - DNA, 20 bp, Artificial Sequence
  MKO10096940_B_Lrrc7
  gRNA
cttagaaatgggattgacac

SEQ ID NO: 96941 - DNA, 20 bp, Artificial Sequence
  MKO10096941_B_Lrrc8a
  gRNA
ccgcatccacgtagttgtac

SEQ ID NO: 96942 - DNA, 20 bp, Artificial Sequence
  MKO10096942_B_Lrrc8a
  gRNA
gagcccgtagcttccgacac

SEQ ID NO: 96943 - DNA, 20 bp, Artificial Sequence
  MKO10096943_B_Lrrc8a
  gRNA
tcgacaccagtacaactacg

SEQ ID NO: 96944 - DNA, 20 bp, Artificial Sequence
  MKO10096944_B_Lrrc8b
  gRNA
tagattgagatgctaccaga

SEQ ID NO: 96945 - DNA, 20 bp, Artificial Sequence
  MKO10096945_B_Lrrc8b
  gRNA
ggtcgtactggtcggccagg

SEQ ID NO: 96946 - DNA, 20 bp, Artificial Sequence
  MKO10096946_B_Lrrc8b
  gRNA
aagcccaacttctagcgtcc

SEQ ID NO: 96947 - DNA, 20 bp, Artificial Sequence
  MKO10096947_B_Lrrc8c
  gRNA
aactgccggaactcggtcac

SEQ ID NO: 96948 - DNA, 20 bp, Artificial Sequence
  MKO10096948_B_Lrrc8c
  gRNA
tcttatagcccgtcatgtcc

SEQ ID NO: 96949 - DNA, 20 bp, Artificial Sequence
  MKO10096949_B_Lrrc8c
  gRNA
gacgggaatcgatgacattc

SEQ ID NO: 96950 - DNA, 20 bp, Artificial Sequence
  MKO10096950_B_Lrrc8d
  gRNA
caagctcgagtctttaccga

SEQ ID NO: 96951 - DNA, 20 bp, Artificial Sequence
  MKO10096951_B_Lrrc8d
  gRNA
tgatgatctcctcgatcgtc

SEQ ID NO: 96952 - DNA, 20 bp, Artificial Sequence
  MKO10096952_B_Lrrc8d
  gRNA
cttgatcggcaatttgaact

SEQ ID NO: 96953 - DNA, 20 bp, Artificial Sequence
  MKO10096953_B_Lrrc8e
  gRNA
ggtattcgggtgcaccctcc

SEQ ID NO: 96954 - DNA, 20 bp, Artificial Sequence
  MKO10096954_B_Lrrc8e
  gRNA
caaaaagttccgagtgcacg

SEQ ID NO: 96955 - DNA, 20 bp, Artificial Sequence
  MKO10096955_B_Lrrc8e
  gRNA
caaccaccttcggtctatcg

SEQ ID NO: 96956 - DNA, 20 bp, Artificial Sequence
  MKO10096956_B_Lrrc9
  gRNA
ccaaatttctacatccttga

SEQ ID NO: 96957 - DNA, 20 bp, Artificial Sequence
  MKO10096957_B_Lrrc9
  gRNA
gaaagtgaaaacctaaatcg

SEQ ID NO: 96958 - DNA, 20 bp, Artificial Sequence
  MKO10096958_B_Lrrc9
  gRNA
ctaaaagacctcaaccttgc

SEQ ID NO: 96959 - DNA, 20 bp, Artificial Sequence
  MKO10096959_B_Lrrcc1
  gRNA
gctacacaccgccgcctcca

SEQ ID NO: 96960 - DNA, 20 bp, Artificial Sequence
  MKO10096960_B_Lrrcc1
  gRNA
atacctggtataaggcagat

SEQ ID NO: 96961 - DNA, 20 bp, Artificial Sequence
  MKO10096961_B_Lrrcc1
  gRNA
ctgcaatttgatcacaagag

SEQ ID NO: 96962 - DNA, 20 bp, Artificial Sequence
  MKO10096962_B_Lrrd1
  gRNA
gtcatatgagacacctcttc

SEQ ID NO: 96963 - DNA, 20 bp, Artificial Sequence
  MKO10096963_B_Lrrd1
  gRNA
atttgtttcagtgatactgt

SEQ ID NO: 96964 - DNA, 20 bp, Artificial Sequence
  MKO10096964_B_Lrrd1
  gRNA
tttgcaacaaaaactaaaca

SEQ ID NO: 96965 - DNA, 20 bp, Artificial Sequence
  MKO10096965_B_Lrrfip1
  gRNA
ctcgtattgccgctgagact

SEQ ID NO: 96966 - DNA, 20 bp, Artificial Sequence
  MKO10096966_B_Lrrfip1
  gRNA
cagacaggctaggcatgtta

SEQ ID NO: 96967 - DNA, 20 bp, Artificial Sequence
  MKO10096967_B_Lrrfip1
  gRNA
agcatccatcagggaaatca

SEQ ID NO: 96968 - DNA, 20 bp, Artificial Sequence
  MKO10096968_B_Lrrfip2
  gRNA
ctggatgagttcccacttag

SEQ ID NO: 96969 - DNA, 20 bp, Artificial Sequence
  MKO10096969_B_Lrrfip2
  gRNA
tttgagtaacatcgccagag

SEQ ID NO: 96970 - DNA, 20 bp, Artificial Sequence
  MKO10096970_B_Lrrfip2
  gRNA
ttctggaaggaaaagaacgc

SEQ ID NO: 96971 - DNA, 20 bp, Artificial Sequence
  MKO10096971_B_Lrriq1
  gRNA
tattactcctgacacaccca

SEQ ID NO: 96972 - DNA, 20 bp, Artificial Sequence
  MKO10096972_B_Lrriq1
  gRNA
agaagaaatcgaagctgaat

SEQ ID NO: 96973 - DNA, 20 bp, Artificial Sequence
  MKO10096973_B_Lrriq1
  gRNA
ctttctctaggttgtaacca

SEQ ID NO: 96974 - DNA, 20 bp, Artificial Sequence
  MKO10096974_B_Lrriq3
  gRNA
cctttatgaatgtgatgtct

SEQ ID NO: 96975 - DNA, 20 bp, Artificial Sequence
  MKO10096975_B_Lrriq3
  gRNA
aagcctgaatgcaacataaa

SEQ ID NO: 96976 - DNA, 20 bp, Artificial Sequence
  MKO10096976_B_Lrriq3
  gRNA
tcatagttaggaaacactta

SEQ ID NO: 96977 - DNA, 20 bp, Artificial Sequence
  MKO10096977_B_Lrriq4
  gRNA
atacatagagaacaaccgac

SEQ ID NO: 96978 - DNA, 20 bp, Artificial Sequence
  MKO10096978_B_Lrriq4
  gRNA
attatatattggacaagacc

SEQ ID NO: 96979 - DNA, 20 bp, Artificial Sequence
  MKO10096979_B_Lrriq4
  gRNA
atccccgatacctgtgtagc

SEQ ID NO: 96980 - DNA, 20 bp, Artificial Sequence
  MKO10096980_B_Lrrk1
  gRNA
gcatccagttcagtagccgc

SEQ ID NO: 96981 - DNA, 20 bp, Artificial Sequence
  MKO10096981_B_Lrrk1
  gRNA
aataggctccgtgccgaagc

SEQ ID NO: 96982 - DNA, 20 bp, Artificial Sequence
  MKO10096982_B_Lrrk1
  gRNA
tgaagagagcgaatcctcac

SEQ ID NO: 96983 - DNA, 20 bp, Artificial Sequence
  MKO10096983_B_Lrrk2
  gRNA
attaagctttgcaatgtccc

SEQ ID NO: 96984 - DNA, 20 bp, Artificial Sequence
  MKO10096984_B_Lrrk2
  gRNA
attggctgaatatctgtgca

SEQ ID NO: 96985 - DNA, 20 bp, Artificial Sequence
  MKO10096985_B_Lrrk2
  gRNA
taaactcaccttgctgatac

SEQ ID NO: 96986 - DNA, 20 bp, Artificial Sequence
  MKO10096986_B_Lrrn1
  gRNA
tgaaagtgatcgatagccgc

SEQ ID NO: 96987 - DNA, 20 bp, Artificial Sequence
  MKO10096987_B_Lrrn1
  gRNA
ggggggtacagctcgttcag

SEQ ID NO: 96988 - DNA, 20 bp, Artificial Sequence
  MKO10096988_B_Lrrn1
  gRNA
aatgtatcgtgcgatatcat

SEQ ID NO: 96989 - DNA, 20 bp, Artificial Sequence
  MKO10096989_B_Lrrn2
  gRNA
actgggcggcgctgaaggtc

SEQ ID NO: 96990 - DNA, 20 bp, Artificial Sequence
  MKO10096990_B_Lrrn2
  gRNA
tggcttcacggtaggacgag

SEQ ID NO: 96991 - DNA, 20 bp, Artificial Sequence
  MKO10096991_B_Lrrn2
  gRNA
cactaaaaccgtcagtgttg

SEQ ID NO: 96992 - DNA, 20 bp, Artificial Sequence
  MKO10096992_B_Lrrn3
  gRNA
acttcaaatcagcaccgact

SEQ ID NO: 96993 - DNA, 20 bp, Artificial Sequence
  MKO10096993_B_Lrrn3
  gRNA
aagcatcagaatctcgagat

SEQ ID NO: 96994 - DNA, 20 bp, Artificial Sequence
  MKO10096994_B_Lrrn3
  gRNA
agagtctttgccgaacctca

SEQ ID NO: 96995 - DNA, 20 bp, Artificial Sequence
  MKO10096995_B_Lrrn4cl
  gRNA
atagtcgcaacggacagcta

SEQ ID NO: 96996 - DNA, 20 bp, Artificial Sequence
  MKO10096996_B_Lrrn4cl
  gRNA
cggcatgataaacttgcgac

SEQ ID NO: 96997 - DNA, 20 bp, Artificial Sequence
  MKO10096997_B_Lrrn4cl
  gRNA
atttctgccttcgtgagcga

SEQ ID NO: 96998 - DNA, 20 bp, Artificial Sequence
  MKO10096998_B_Lrrn4
  gRNA
atctgggaatcaatccgtag

SEQ ID NO: 96999 - DNA, 20 bp, Artificial Sequence
  MKO10096999_B_Lrrn4
  gRNA
tcaagatgactcccaacctg

SEQ ID NO: 97000 - DNA, 20 bp, Artificial Sequence
  MKO10097000_B_Lrrn4
  gRNA
ctccacaatccagctgccgc

SEQ ID NO: 97001 - DNA, 20 bp, Artificial Sequence
  MKO10097001_B_Lrrtm1
  gRNA
tcctcgtactctacgtatcc

SEQ ID NO: 97002 - DNA, 20 bp, Artificial Sequence
  MKO10097002_B_Lrrtm1
  gRNA
cggccagagtgatgctcgta

SEQ ID NO: 97003 - DNA, 20 bp, Artificial Sequence
  MKO10097003_B_Lrrtm1
  gRNA
tcagaaactgcgccgagtta

SEQ ID NO: 97004 - DNA, 20 bp, Artificial Sequence
  MKO10097004_B_Lrrtm2
  gRNA
ctatcccagtacgcctgttc

SEQ ID NO: 97005 - DNA, 20 bp, Artificial Sequence
  MKO10097005_B_Lrrtm2
  gRNA
ctcgaacactgtcaagtcga

SEQ ID NO: 97006 - DNA, 20 bp, Artificial Sequence
  MKO10097006_B_Lrrtm2
  gRNA
ctgtcgtagtctagagtttc

SEQ ID NO: 97007 - DNA, 20 bp, Artificial Sequence
  MKO10097007_B_Lrrtm3
  gRNA
gtcctttgaaacgaatgcac

SEQ ID NO: 97008 - DNA, 20 bp, Artificial Sequence
  MKO10097008_B_Lrrtm3
  gRNA
ttcggatccggttgtatccc

SEQ ID NO: 97009 - DNA, 20 bp, Artificial Sequence
  MKO10097009_B_Lrrtm3
  gRNA
cagatccaagttccgtaaat

SEQ ID NO: 97010 - DNA, 20 bp, Artificial Sequence
  MKO10097010_B_Lrrtm4
  gRNA
tcgtactcatgatccgtacc

SEQ ID NO: 97011 - DNA, 20 bp, Artificial Sequence
  MKO10097011_B_Lrrtm4
  gRNA
gcagtcttgaaaaacccgta

SEQ ID NO: 97012 - DNA, 20 bp, Artificial Sequence
  MKO10097012_B_Lrrtm4
  gRNA
gatcgcaggttgaagagacg

SEQ ID NO: 97013 - DNA, 20 bp, Artificial Sequence
  MKO10097013_B_Lrsam1
  gRNA
gggctgtcagctggttctca

SEQ ID NO: 97014 - DNA, 20 bp, Artificial Sequence
  MKO10097014_B_Lrsam1
  gRNA
gggaggtgaggtggtttgta

SEQ ID NO: 97015 - DNA, 20 bp, Artificial Sequence
  MKO10097015_B_Lrsam1
  gRNA
gtgcaaagttctacagaaaa

SEQ ID NO: 97016 - DNA, 20 bp, Artificial Sequence
  MKO10097016_B_Lrtm1
  gRNA
ccacccatcatcaaactccg

SEQ ID NO: 97017 - DNA, 20 bp, Artificial Sequence
  MKO10097017_B_Lrtm1
  gRNA
acatttaaaacccgcaaatg

SEQ ID NO: 97018 - DNA, 20 bp, Artificial Sequence
  MKO10097018_B_Lrtm1
  gRNA
tgcggagcctgggccatgaa

SEQ ID NO: 97019 - DNA, 20 bp, Artificial Sequence
  MKO10097019_B_Lrtm2
  gRNA
gtgagtgtgcggcgagccat

SEQ ID NO: 97020 - DNA, 20 bp, Artificial Sequence
  MKO10097020_B_Lrtm2
  gRNA
ggtttcaccatgttggcacc

SEQ ID NO: 97021 - DNA, 20 bp, Artificial Sequence
  MKO10097021_B_Lrtm2
  gRNA
gccaccgcctggtgccaaca

SEQ ID NO: 97022 - DNA, 20 bp, Artificial Sequence
  MKO10097022_B_Lrwd1
  gRNA
gtgaactcgatgagcgactc

SEQ ID NO: 97023 - DNA, 20 bp, Artificial Sequence
  MKO10097023_B_Lrwd1
  gRNA
tacagcgaaggatgcgcaga

SEQ ID NO: 97024 - DNA, 20 bp, Artificial Sequence
  MKO10097024_B_Lrwd1
  gRNA
cgctgtaccaacaaccagct

SEQ ID NO: 97025 - DNA, 20 bp, Artificial Sequence
  MKO10097025_B_Lsamp
  gRNA
caagtttacttgatcgtaca

SEQ ID NO: 97026 - DNA, 20 bp, Artificial Sequence
  MKO10097026_B_Lsamp
  gRNA
gacttgtttgacatccgccg

SEQ ID NO: 97027 - DNA, 20 bp, Artificial Sequence
  MKO10097027_B_Lsamp
  gRNA
gttgcttacctagtggtgta

SEQ ID NO: 97028 - DNA, 20 bp, Artificial Sequence
  MKO10097028_B_Lsg1
  gRNA
cagttgcaagaaagtcctcc

SEQ ID NO: 97029 - DNA, 20 bp, Artificial Sequence
  MKO10097029_B_Lsg1
  gRNA
gacagttcttgtgtatacca

SEQ ID NO: 97030 - DNA, 20 bp, Artificial Sequence
  MKO10097030_B_Lsg1
  gRNA
cttgcaactgcagaacttgc

SEQ ID NO: 97031 - DNA, 20 bp, Artificial Sequence
  MKO10097031_B_Lsm10
  gRNA
atgtcacctataccgaccgc

SEQ ID NO: 97032 - DNA, 20 bp, Artificial Sequence
  MKO10097032_B_Lsm10
  gRNA
tgctttcatgaatatccgcc

SEQ ID NO: 97033 - DNA, 20 bp, Artificial Sequence
  MKO10097033_B_Lsm10
  gRNA
atccaccgtgtgcgcaactt

SEQ ID NO: 97034 - DNA, 20 bp, Artificial Sequence
  MKO10097034_B_Lsm11
  gRNA
actgcaccgctgcatccgag

SEQ ID NO: 97035 - DNA, 20 bp, Artificial Sequence
  MKO10097035_B_Lsm11
  gRNA
gtggcttcggtatggggacg

SEQ ID NO: 97036 - DNA, 20 bp, Artificial Sequence
  MKO10097036_B_Lsm11
  gRNA
acctaccgtaaacctgtctt

SEQ ID NO: 97037 - DNA, 20 bp, Artificial Sequence
  MKO10097037_B_Lsm12
  gRNA
tcagcattaaagactgtaaa

SEQ ID NO: 97038 - DNA, 20 bp, Artificial Sequence
  MKO10097038_B_Lsm12
  gRNA
cctagcttgccagcaaagca

SEQ ID NO: 97039 - DNA, 20 bp, Artificial Sequence
  MKO10097039_B_Lsm12
  gRNA
ccagaatgtccctcttccag

SEQ ID NO: 97040 - DNA, 20 bp, Artificial Sequence
  MKO10097040_B_Lsm14a
  gRNA
tggtctgtcttctgtaccga

SEQ ID NO: 97041 - DNA, 20 bp, Artificial Sequence
  MKO10097041_B_Lsm14a
  gRNA
tgctgcccaactaatgtact

SEQ ID NO: 97042 - DNA, 20 bp, Artificial Sequence
  MKO10097042_B_Lsm14a
  gRNA
tttctcaaagggtctaactg

SEQ ID NO: 97043 - DNA, 20 bp, Artificial Sequence
  MKO10097043_B_Lsm14b
  gRNA
aacccctaagtgaggtcctt

SEQ ID NO: 97044 - DNA, 20 bp, Artificial Sequence
  MKO10097044_B_Lsm14b
  gRNA
cagcagtatgccgcttcctt

SEQ ID NO: 97045 - DNA, 20 bp, Artificial Sequence
  MKO10097045_B_Lsm14b
  gRNA
caccttagatgtagtccagc

SEQ ID NO: 97046 - DNA, 20 bp, Artificial Sequence
  MKO10097046_B_Lsm1
  gRNA
ttaagaagcattgatcaatt

SEQ ID NO: 97047 - DNA, 20 bp, Artificial Sequence
  MKO10097047_B_Lsm1
  gRNA
gaattcgctccacagtctga

SEQ ID NO: 97048 - DNA, 20 bp, Artificial Sequence
  MKO10097048_B_Lsm1
  gRNA
gtgttcttccatctcgaagt

SEQ ID NO: 97049 - DNA, 20 bp, Artificial Sequence
  MKO10097049_B_Lsm2
  gRNA
gcccacaagagacttgaaaa

SEQ ID NO: 97050 - DNA, 20 bp, Artificial Sequence
  MKO10097050_B_Lsm2
  gRNA
tggaactcaagaatgacctg

SEQ ID NO: 97051 - DNA, 20 bp, Artificial Sequence
  MKO10097051_B_Lsm2
  gRNA
ctgtggaaccctccactctg

SEQ ID NO: 97052 - DNA, 20 bp, Artificial Sequence
  MKO10097052_B_Lsm3
  gRNA
ctagaacgacgccatctccc

SEQ ID NO: 97053 - DNA, 20 bp, Artificial Sequence
  MKO10097053_B_Lsm3
  gRNA
gtcgcccctccattgagagt

SEQ ID NO: 97054 - DNA, 20 bp, Artificial Sequence
  MKO10097054_B_Lsm3
  gRNA
gacaacgatagagattgatg

SEQ ID NO: 97055 - DNA, 20 bp, Artificial Sequence
  MKO10097055_B_Lsm4
  gRNA
ggccagcgccgcccatgcct

SEQ ID NO: 97056 - DNA, 20 bp, Artificial Sequence
  MKO10097056_B_Lsm4
  gRNA
gacagcgcagaatcacccca

SEQ ID NO: 97057 - DNA, 20 bp, Artificial Sequence
  MKO10097057_B_Lsm4
  gRNA
cgctgtcttcagcagcgaca

SEQ ID NO: 97058 - DNA, 20 bp, Artificial Sequence
  MKO10097058_B_Lsm5
  gRNA
gagcttgtggacaaatgtat

SEQ ID NO: 97059 - DNA, 20 bp, Artificial Sequence
  MKO10097059_B_Lsm5
  gRNA
aagagtgataaagaaattgt

SEQ ID NO: 97060 - DNA, 20 bp, Artificial Sequence
  MKO10097060_B_Lsm5
  gRNA
tttgtaattcttcttccttc

SEQ ID NO: 97061 - DNA, 20 bp, Artificial Sequence
  MKO10097061_B_Lsm6
  gRNA
gaatttaatttcaccacaac

SEQ ID NO: 97062 - DNA, 20 bp, Artificial Sequence
  MKO10097062_B_Lsm6
  gRNA
tgtacataagtacacagaag

SEQ ID NO: 97063 - DNA, 20 bp, Artificial Sequence
  MKO10097063_B_Lsm6
  gRNA
gacttcttaaagcagatcat

SEQ ID NO: 97064 - DNA, 20 bp, Artificial Sequence
  MKO10097064_B_Lsm7
  gRNA
aagttccagggtggccggga

SEQ ID NO: 97065 - DNA, 20 bp, Artificial Sequence
  MKO10097065_B_Lsm7
  gRNA
tgatgaccagtacaagctga

SEQ ID NO: 97066 - DNA, 20 bp, Artificial Sequence
  MKO10097066_B_Lsm7
  gRNA
agtgtcctgctgctgcacga

SEQ ID NO: 97067 - DNA, 20 bp, Artificial Sequence
  MKO10097067_B_Lsm8
  gRNA
cagcagcatgacgtctgctt

SEQ ID NO: 97068 - DNA, 20 bp, Artificial Sequence
  MKO10097068_B_Lsm8
  gRNA
gtggctgttattacttctga

SEQ ID NO: 97069 - DNA, 20 bp, Artificial Sequence
  MKO10097069_B_Lsm8
  gRNA
attaataacagagcagtcat

SEQ ID NO: 97070 - DNA, 20 bp, Artificial Sequence
  MKO10097070_B_Lsmd1
  gRNA
tcgtttctattgaagtccaa

SEQ ID NO: 97071 - DNA, 20 bp, Artificial Sequence
  MKO10097071_B_Lsmd1
  gRNA
attctcctctcgtagtagca

SEQ ID NO: 97072 - DNA, 20 bp, Artificial Sequence
  MKO10097072_B_Lsmd1
  gRNA
cccccgacagactctccctt

SEQ ID NO: 97073 - DNA, 20 bp, Artificial Sequence
  MKO10097073_B_Lsmem1
  gRNA
ccaggctgaccgtcaacacc

SEQ ID NO: 97074 - DNA, 20 bp, Artificial Sequence
  MKO10097074_B_Lsmem1
  gRNA
agttctgttcagagtccagc

SEQ ID NO: 97075 - DNA, 20 bp, Artificial Sequence
  MKO10097075_B_Lsmem1
  gRNA
gttgacggtcagcctggctc

SEQ ID NO: 97076 - DNA, 20 bp, Artificial Sequence
  MKO10097076_B_Lsp1
  gRNA
ttagcatctgatacgtcatc

SEQ ID NO: 97077 - DNA, 20 bp, Artificial Sequence
  MKO10097077_B_Lsp1
  gRNA
gctcccgttgacgctgctca

SEQ ID NO: 97078 - DNA, 20 bp, Artificial Sequence
  MKO10097078_B_Lsp1
  gRNA
cccgatccagaggatgctgt

SEQ ID NO: 97079 - DNA, 20 bp, Artificial Sequence
  MKO10097079_B_Lsr
  gRNA
aggcgccccagcacacgcgc

SEQ ID NO: 97080 - DNA, 20 bp, Artificial Sequence
  MKO10097080_B_Lsr
  gRNA
gacggccgcgatggcgccgg

SEQ ID NO: 97081 - DNA, 20 bp, Artificial Sequence
  MKO10097081_B_Lsr
  gRNA
gtacccatagggaggacgca

SEQ ID NO: 97082 - DNA, 20 bp, Artificial Sequence
  MKO10097082_B_Lss
  gRNA
tcatgggctgtttgcgcttt

SEQ ID NO: 97083 - DNA, 20 bp, Artificial Sequence
  MKO10097083_B_Lss
  gRNA
ttccgagcgcgcacaaggtc

SEQ ID NO: 97084 - DNA, 20 bp, Artificial Sequence
  MKO10097084_B_Lss
  gRNA
atcctgaccttgtgcgcgct

SEQ ID NO: 97085 - DNA, 20 bp, Artificial Sequence
  MKO10097085_B_Lst1
  gRNA
catgtctgtgatatcactac

SEQ ID NO: 97086 - DNA, 20 bp, Artificial Sequence
  MKO10097086_B_Lst1
  gRNA
tgtctgatgacaatgggatc

SEQ ID NO: 97087 - DNA, 20 bp, Artificial Sequence
  MKO10097087_B_Lst1
  gRNA
cactcaagtgggtgtgctcc

SEQ ID NO: 97088 - DNA, 20 bp, Artificial Sequence
  MKO10097088_B_Lta4h
  gRNA
aggttacaaagggtcaccga

SEQ ID NO: 97089 - DNA, 20 bp, Artificial Sequence
  MKO10097089_B_Lta4h
  gRNA
tgcggtgtacgttaatttca

SEQ ID NO: 97090 - DNA, 20 bp, Artificial Sequence
  MKO10097090_B_Lta4h
  gRNA
ccaaatcctctgcgcttcag

SEQ ID NO: 97091 - DNA, 20 bp, Artificial Sequence
  MKO10097091_B_Lta
  gRNA
aaacctgctgctcaccttgt

SEQ ID NO: 97092 - DNA, 20 bp, Artificial Sequence
  MKO10097092_B_Lta
  gRNA
tgcctcacctgggcccctag

SEQ ID NO: 97093 - DNA, 20 bp, Artificial Sequence
  MKO10097093_B_Lta
  gRNA
gttctccacatgacactgct

SEQ ID NO: 97094 - DNA, 20 bp, Artificial Sequence
  MKO10097094_B_Ltb4r1
  gRNA
cccgcgcacgcgtacagcac

SEQ ID NO: 97095 - DNA, 20 bp, Artificial Sequence
  MKO10097095_B_Ltb4r1
  gRNA
ccacgcccgccgaacgcagc

SEQ ID NO: 97096 - DNA, 20 bp, Artificial Sequence
  MKO10097096_B_Ltb4r1
  gRNA
ttccgccgtagtcgccgcac

SEQ ID NO: 97097 - DNA, 20 bp, Artificial Sequence
  MKO10097097_B_Ltb4r2
  gRNA
agccctcgaagagtcgagta

SEQ ID NO: 97098 - DNA, 20 bp, Artificial Sequence
  MKO10097098_B_Ltb4r2
  gRNA
cgcggttgcgaggagcgcgc

SEQ ID NO: 97099 - DNA, 20 bp, Artificial Sequence
  MKO10097099_B_Ltb4r2
  gRNA
tctgtctgctaccgtccgcc

SEQ ID NO: 97100 - DNA, 20 bp, Artificial Sequence
  MKO10097100_B_Ltbp1
  gRNA
acaacttggccgatgcttcc

SEQ ID NO: 97101 - DNA, 20 bp, Artificial Sequence
  MKO10097101_B_Ltbp1
  gRNA
agtacgtagaatggactgtc

SEQ ID NO: 97102 - DNA, 20 bp, Artificial Sequence
  MKO10097102_B_Ltbp1
  gRNA
caccattcatacacggaaga

SEQ ID NO: 97103 - DNA, 20 bp, Artificial Sequence
  MKO10097103_B_Ltbp2
  gRNA
cttccgtggggcgcgctgtg

SEQ ID NO: 97104 - DNA, 20 bp, Artificial Sequence
  MKO10097104_B_Ltbp2
  gRNA
tggtaccagcggctgtattc

SEQ ID NO: 97105 - DNA, 20 bp, Artificial Sequence
  MKO10097105_B_Ltbp2
  gRNA
caccaccaccttgtacagtc

SEQ ID NO: 97106 - DNA, 20 bp, Artificial Sequence
  MKO10097106_B_Ltbp3
  gRNA
gatcacctgcaccgcgtaaa

SEQ ID NO: 97107 - DNA, 20 bp, Artificial Sequence
  MKO10097107_B_Ltbp3
  gRNA
gctgaccataccctggcagt

SEQ ID NO: 97108 - DNA, 20 bp, Artificial Sequence
  MKO10097108_B_Ltbp3
  gRNA
gcacccacctccccacgtac

SEQ ID NO: 97109 - DNA, 20 bp, Artificial Sequence
  MKO10097109_B_Ltbp4
  gRNA
gggcccccgaagaatgcaat

SEQ ID NO: 97110 - DNA, 20 bp, Artificial Sequence
  MKO10097110_B_Ltbp4
  gRNA
ggcccgacacacgttccact

SEQ ID NO: 97111 - DNA, 20 bp, Artificial Sequence
  MKO10097111_B_Ltbp4
  gRNA
cccattaactctctcgaagc

SEQ ID NO: 97112 - DNA, 20 bp, Artificial Sequence
  MKO10097112_B_Ltbr
  gRNA
agccgagtgccgctgtcagc

SEQ ID NO: 97113 - DNA, 20 bp, Artificial Sequence
  MKO10097113_B_Ltbr
  gRNA
cataggcgagtttgtctttg

SEQ ID NO: 97114 - DNA, 20 bp, Artificial Sequence
  MKO10097114_B_Ltbr
  gRNA
acctggtatggggttgacag

SEQ ID NO: 97115 - DNA, 20 bp, Artificial Sequence
  MKO10097115_B_Ltb
  gRNA
acccgacgtccctgatcctg

SEQ ID NO: 97116 - DNA, 20 bp, Artificial Sequence
  MKO10097116_B_Ltb
  gRNA
tgccgcaggatcagggacgt

SEQ ID NO: 97117 - DNA, 20 bp, Artificial Sequence
  MKO10097117_B_Ltb
  gRNA
aggggttcaacagctgccaa

SEQ ID NO: 97118 - DNA, 20 bp, Artificial Sequence
  MKO10097118_B_Ltc4s
  gRNA
gagcgcagtccgtagcgtgc

SEQ ID NO: 97119 - DNA, 20 bp, Artificial Sequence
  MKO10097119_B_Ltc4s
  gRNA
tacggactgcgctcttcaga

SEQ ID NO: 97120 - DNA, 20 bp, Artificial Sequence
  MKO10097120_B_Ltc4s
  gRNA
gtgtcgccgccgctcacctc

SEQ ID NO: 97121 - DNA, 20 bp, Artificial Sequence
  MKO10097121_B_Ltf
  gRNA
tccctgcacacgagctacac

SEQ ID NO: 97122 - DNA, 20 bp, Artificial Sequence
  MKO10097122_B_Ltf
  gRNA
aacctgtgtagctcgtgtgc

SEQ ID NO: 97123 - DNA, 20 bp, Artificial Sequence
  MKO10097123_B_Ltf
  gRNA
cccaggactctgtctagcta

SEQ ID NO: 97124 - DNA, 20 bp, Artificial Sequence
  MKO10097124_B_Ltk
  gRNA
cgagaggctggagacccgcg

SEQ ID NO: 97125 - DNA, 20 bp, Artificial Sequence
  MKO10097125_B_Ltk
  gRNA
ctgccactacagctcccatc

SEQ ID NO: 97126 - DNA, 20 bp, Artificial Sequence
  MKO10097126_B_Ltk
  gRNA
acatcctttgtccaccccag

SEQ ID NO: 97127 - DNA, 20 bp, Artificial Sequence
  MKO10097127_B_Ltn1
  gRNA
tgtagattccgatttccgaa

SEQ ID NO: 97128 - DNA, 20 bp, Artificial Sequence
  MKO10097128_B_Ltn1
  gRNA
gtatggaagaacccctttga

SEQ ID NO: 97129 - DNA, 20 bp, Artificial Sequence
  MKO10097129_B_Ltn1
  gRNA
agagacacagaagccgtcaa

SEQ ID NO: 97130 - DNA, 20 bp, Artificial Sequence
  MKO10097130_B_Ltv1
  gRNA
ggtcttctgtcttgtcgcag

SEQ ID NO: 97131 - DNA, 20 bp, Artificial Sequence
  MKO10097131_B_Ltv1
  gRNA
ctaaaggatctcgctggctc

SEQ ID NO: 97132 - DNA, 20 bp, Artificial Sequence
  MKO10097132_B_Ltv1
  gRNA
tgtgtttgcatccgagtttg

SEQ ID NO: 97133 - DNA, 20 bp, Artificial Sequence
  MKO10097133_B_Luc7l2
  gRNA
agaagagataagtgctgaag

SEQ ID NO: 97134 - DNA, 20 bp, Artificial Sequence
  MKO10097134_B_Luc7l2
  gRNA
aaccacatactgttccagaa

SEQ ID NO: 97135 - DNA, 20 bp, Artificial Sequence
  MKO10097135_B_Luc7l2
  gRNA
tgcccccacgatgtcctttc

SEQ ID NO: 97136 - DNA, 20 bp, Artificial Sequence
  MKO10097136_B_Luc7l3
  gRNA
cttacagagtttacttgccg

SEQ ID NO: 97137 - DNA, 20 bp, Artificial Sequence
  MKO10097137_B_Luc7l3
  gRNA
aattgatgtgcttctacagc

SEQ ID NO: 97138 - DNA, 20 bp, Artificial Sequence
  MKO10097138_B_Luc7l3
  gRNA
ttataggctgctggtccaac

SEQ ID NO: 97139 - DNA, 20 bp, Artificial Sequence
  MKO10097139_B_Luc7l
  gRNA
tctccacagcgcatggattt

SEQ ID NO: 97140 - DNA, 20 bp, Artificial Sequence
  MKO10097140_B_Luc7l
  gRNA
atgcacctaccgtcccagca

SEQ ID NO: 97141 - DNA, 20 bp, Artificial Sequence
  MKO10097141_B_Luc7l
  gRNA
ccgatcacactctgcaatga

SEQ ID NO: 97142 - DNA, 20 bp, Artificial Sequence
  MKO10097142_B_Lum
  gRNA
caagatcaagcatctgcgct

SEQ ID NO: 97143 - DNA, 20 bp, Artificial Sequence
  MKO10097143_B_Lum
  gRNA
aacaacctgaccgagtccgt

SEQ ID NO: 97144 - DNA, 20 bp, Artificial Sequence
  MKO10097144_B_Lum
  gRNA
caagttgaccagcccgtcga

SEQ ID NO: 97145 - DNA, 20 bp, Artificial Sequence
  MKO10097145_B_Lurap1l
  gRNA
gctgttgtagctgccacgta

SEQ ID NO: 97146 - DNA, 20 bp, Artificial Sequence
  MKO10097146_B_Lurap1l
  gRNA
ccccgcgcagcgagcgcgct

SEQ ID NO: 97147 - DNA, 20 bp, Artificial Sequence
  MKO10097147_B_Lurap1l
  gRNA
agtcagagtacctccttacg

SEQ ID NO: 97148 - DNA, 20 bp, Artificial Sequence
  MKO10097148_B_Lurap1
  gRNA
tcttcacatcgatagctcgc

SEQ ID NO: 97149 - DNA, 20 bp, Artificial Sequence
  MKO10097149_B_Lurap1
  gRNA
ccctccacgtctcgcaagtc

SEQ ID NO: 97150 - DNA, 20 bp, Artificial Sequence
  MKO10097150_B_Lurap1
  gRNA
ctgccccgccttgagcgtcc

SEQ ID NO: 97151 - DNA, 20 bp, Artificial Sequence
  MKO10097151_B_Luzp1
  gRNA
agccgctcctcagtccaaac

SEQ ID NO: 97152 - DNA, 20 bp, Artificial Sequence
  MKO10097152_B_Luzp1
  gRNA
gaacagggcgctcgaagagt

SEQ ID NO: 97153 - DNA, 20 bp, Artificial Sequence
  MKO10097153_B_Luzp1
  gRNA
ttataattgctctagaccgc

SEQ ID NO: 97154 - DNA, 20 bp, Artificial Sequence
  MKO10097154_B_Luzp2
  gRNA
tgggatcaaagtgaaccttc

SEQ ID NO: 97155 - DNA, 20 bp, Artificial Sequence
  MKO10097155_B_Luzp2
  gRNA
tctctttaagctgattctgc

SEQ ID NO: 97156 - DNA, 20 bp, Artificial Sequence
  MKO10097156_B_Luzp2
  gRNA
ttacctcattctgtaagtca

SEQ ID NO: 97157 - DNA, 20 bp, Artificial Sequence
  MKO10097157_B_Luzp4
  gRNA
tcacttaccagatgaagtag

SEQ ID NO: 97158 - DNA, 20 bp, Artificial Sequence
  MKO10097158_B_Luzp4
  gRNA
caggacacagacgtgacagt

SEQ ID NO: 97159 - DNA, 20 bp, Artificial Sequence
  MKO10097159_B_Luzp4
  gRNA
tgtttctacctgtcaatttc

SEQ ID NO: 97160 - DNA, 20 bp, Artificial Sequence
  MKO10097160_B_Lxn
  gRNA
ctgccacattacataaccgc

SEQ ID NO: 97161 - DNA, 20 bp, Artificial Sequence
  MKO10097161_B_Lxn
  gRNA
catgtctctgaagagaccgc

SEQ ID NO: 97162 - DNA, 20 bp, Artificial Sequence
  MKO10097162_B_Lxn
  gRNA
gaagtcaacttcacattcga

SEQ ID NO: 97163 - DNA, 20 bp, Artificial Sequence
  MKO10097163_B_Ly6a
  gRNA
tgagtaacacagactccatc

SEQ ID NO: 97164 - DNA, 20 bp, Artificial Sequence
  MKO10097164_B_Ly6a
  gRNA
ctgtttgctgattcttcttg

SEQ ID NO: 97165 - DNA, 20 bp, Artificial Sequence
  MKO10097165_B_Ly6a
  gRNA
cacctctttctgcacacagt

SEQ ID NO: 97166 - DNA, 20 bp, Artificial Sequence
  MKO10097166_B_Ly6c1
  gRNA
cacaagaagaatgagcacac

SEQ ID NO: 97167 - DNA, 20 bp, Artificial Sequence
  MKO10097167_B_Ly6c1
  gRNA
ctgcagtgctacgagtgcta

SEQ ID NO: 97168 - DNA, 20 bp, Artificial Sequence
  MKO10097168_B_Ly6c1
  gRNA
agcaatgcagaatccatcag

SEQ ID NO: 97169 - DNA, 20 bp, Artificial Sequence
  MKO10097169_B_Ly6c2
  gRNA
ctgtttgctgattcttcttg

SEQ ID NO: 97170 - DNA, 20 bp, Artificial Sequence
  MKO10097170_B_Ly6c2
  gRNA
ctgcagtgctacgagtgcta

SEQ ID NO: 97171 - DNA, 20 bp, Artificial Sequence
  MKO10097171_B_Ly6c2
  gRNA
agcaatgcagaatccatcag

SEQ ID NO: 97172 - DNA, 20 bp, Artificial Sequence
  MKO10097172_B_Ly6d
  gRNA
tgccaactgtaagaaccctc

SEQ ID NO: 97173 - DNA, 20 bp, Artificial Sequence
  MKO10097173_B_Ly6d
  gRNA
cagccgctcacctgggctag

SEQ ID NO: 97174 - DNA, 20 bp, Artificial Sequence
  MKO10097174_B_Ly6d
  gRNA
tctgctcgtcctccttgtct

SEQ ID NO: 97175 - DNA, 20 bp, Artificial Sequence
  MKO10097175_B_Ly6e
  gRNA
catgcagggaatgtcaacct

SEQ ID NO: 97176 - DNA, 20 bp, Artificial Sequence
  MKO10097176_B_Ly6e
  gRNA
gcccttctgggcatggagca

SEQ ID NO: 97177 - DNA, 20 bp, Artificial Sequence
  MKO10097177_B_Ly6e
  gRNA
taccttgctccatgcccaga

SEQ ID NO: 97178 - DNA, 20 bp, Artificial Sequence
  MKO10097178_B_Ly6f
  gRNA
tcacgttgacagtagtaccc

SEQ ID NO: 97179 - DNA, 20 bp, Artificial Sequence
  MKO10097179_B_Ly6f
  gRNA
cacaagaaggatgagtacac

SEQ ID NO: 97180 - DNA, 20 bp, Artificial Sequence
  MKO10097180_B_Ly6f
  gRNA
cacctctttctgcacacaat

SEQ ID NO: 97181 - DNA, 20 bp, Artificial Sequence
  MKO10097181_B_Ly6g5b
  gRNA
gaccatggtgggctttgcga

SEQ ID NO: 97182 - DNA, 20 bp, Artificial Sequence
  MKO10097182_B_Ly6g5b
  gRNA
gctgtccacagccccgtacg

SEQ ID NO: 97183 - DNA, 20 bp, Artificial Sequence
  MKO10097183_B_Ly6g5b
  gRNA
cagccttccatcgccgtgta

SEQ ID NO: 97184 - DNA, 20 bp, Artificial Sequence
  MKO10097184_B_Ly6g5c
  gRNA
tgctgtcctcttaacagtgc

SEQ ID NO: 97185 - DNA, 20 bp, Artificial Sequence
  MKO10097185_B_Ly6g5c
  gRNA
ttcatatacccgtgcttccc

SEQ ID NO: 97186 - DNA, 20 bp, Artificial Sequence
  MKO10097186_B_Ly6g5c
  gRNA
aagcacgggtatatgaacaa

SEQ ID NO: 97187 - DNA, 20 bp, Artificial Sequence
  MKO10097187_B_Ly6g6c
  gRNA
ctgacaacaaacgtgtacct

SEQ ID NO: 97188 - DNA, 20 bp, Artificial Sequence
  MKO10097188_B_Ly6g6c
  gRNA
tgtctgccctactctactgc

SEQ ID NO: 97189 - DNA, 20 bp, Artificial Sequence
  MKO10097189_B_Ly6g6c
  gRNA
ctgagacccagcagtagagt

SEQ ID NO: 97190 - DNA, 20 bp, Artificial Sequence
  MKO10097190_B_Ly6g6d
  gRNA
cacttgattgcaatgatgcg

SEQ ID NO: 97191 - DNA, 20 bp, Artificial Sequence
  MKO10097191_B_Ly6g6d
  gRNA
tgagcaggatcccgaccaac

SEQ ID NO: 97192 - DNA, 20 bp, Artificial Sequence
  MKO10097192_B_Ly6g6d
  gRNA
tacccagggcaacccctagc

SEQ ID NO: 97193 - DNA, 20 bp, Artificial Sequence
  MKO10097193_B_Ly6g6e
  gRNA
ggcccgtccagcgccttcct

SEQ ID NO: 97194 - DNA, 20 bp, Artificial Sequence
  MKO10097194_B_Ly6g6e
  gRNA
ctcgtcctctcgacactccc

SEQ ID NO: 97195 - DNA, 20 bp, Artificial Sequence
  MKO10097195_B_Ly6g6e
  gRNA
ccttacccagtgtccccgag

SEQ ID NO: 97196 - DNA, 20 bp, Artificial Sequence
  MKO10097196_B_Ly6g6f
  gRNA
cagaccatctacgtagcctc

SEQ ID NO: 97197 - DNA, 20 bp, Artificial Sequence
  MKO10097197_B_Ly6g6f
  gRNA
cacgtcccagctcgggagag

SEQ ID NO: 97198 - DNA, 20 bp, Artificial Sequence
  MKO10097198_B_Ly6g6f
  gRNA
ggcgtctggactctgtgacc

SEQ ID NO: 97199 - DNA, 20 bp, Artificial Sequence
  MKO10097199_B_Ly6h
  gRNA
gatccgcacgctggcacaaa

SEQ ID NO: 97200 - DNA, 20 bp, Artificial Sequence
  MKO10097200_B_Ly6h
  gRNA
cgccagaccgaggctcttca

SEQ ID NO: 97201 - DNA, 20 bp, Artificial Sequence
  MKO10097201_B_Ly6h
  gRNA
cctgcagccatgaagagcct

SEQ ID NO: 97202 - DNA, 20 bp, Artificial Sequence
  MKO10097202_B_Ly6i
  gRNA
cacaagaaggatcagcacac

SEQ ID NO: 97203 - DNA, 20 bp, Artificial Sequence
  MKO10097203_B_Ly6i
  gRNA
tgagcaacacagaatccatc

SEQ ID NO: 97204 - DNA, 20 bp, Artificial Sequence
  MKO10097204_B_Ly6i
  gRNA
tacctctttctgcacacagt

SEQ ID NO: 97205 - DNA, 20 bp, Artificial Sequence
  MKO10097205_B_Ly6k
  gRNA
taagcccagaactacgagca

SEQ ID NO: 97206 - DNA, 20 bp, Artificial Sequence
  MKO10097206_B_Ly6k
  gRNA
ctacgggggttggacacctt

SEQ ID NO: 97207 - DNA, 20 bp, Artificial Sequence
  MKO10097207_B_Ly6k
  gRNA
tcgaatccgtcccagtgccc

SEQ ID NO: 97208 - DNA, 20 bp, Artificial Sequence
  MKO10097208_B_Ly75
  gRNA
gacatcagatgtattcgtat

SEQ ID NO: 97209 - DNA, 20 bp, Artificial Sequence
  MKO10097209_B_Ly75
  gRNA
aatcagctctattctgcgag

SEQ ID NO: 97210 - DNA, 20 bp, Artificial Sequence
  MKO10097210_B_Ly75
  gRNA
gaattcacaaggtctcccgt

SEQ ID NO: 97211 - DNA, 20 bp, Artificial Sequence
  MKO10097211_B_Ly86
  gRNA
gtcctcctcacaaaggggat

SEQ ID NO: 97212 - DNA, 20 bp, Artificial Sequence
  MKO10097212_B_Ly86
  gRNA
acctgtggaacatcaagtcc

SEQ ID NO: 97213 - DNA, 20 bp, Artificial Sequence
  MKO10097213_B_Ly86
  gRNA
gggagaatatcagctcttgc

SEQ ID NO: 97214 - DNA, 20 bp, Artificial Sequence
  MKO10097214_B_Ly96
  gRNA
agtattccctcgaaagagaa

SEQ ID NO: 97215 - DNA, 20 bp, Artificial Sequence
  MKO10097215_B_Ly96
  gRNA
ctgaaccctgcataagactg

SEQ ID NO: 97216 - DNA, 20 bp, Artificial Sequence
  MKO10097216_B_Ly96
  gRNA
gcatattctaattgacatca

SEQ ID NO: 97217 - DNA, 20 bp, Artificial Sequence
  MKO10097217_B_Ly9
  gRNA
ccgagtggcccgaaattcca

SEQ ID NO: 97218 - DNA, 20 bp, Artificial Sequence
  MKO10097218_B_Ly9
  gRNA
acccatttaaatacatacga

SEQ ID NO: 97219 - DNA, 20 bp, Artificial Sequence
  MKO10097219_B_Ly9
  gRNA
cctctcgggtccagctgtac

SEQ ID NO: 97220 - DNA, 20 bp, Artificial Sequence
  MKO10097220_B_Lyar
  gRNA
cggaagcggccaaagcactc

SEQ ID NO: 97221 - DNA, 20 bp, Artificial Sequence
  MKO10097221_B_Lyar
  gRNA
gaaacccaacgtcagcccca

SEQ ID NO: 97222 - DNA, 20 bp, Artificial Sequence
  MKO10097222_B_Lyar
  gRNA
cttcactgatgcacttcaca

SEQ ID NO: 97223 - DNA, 20 bp, Artificial Sequence
  MKO10097223_B_Lyg1
  gRNA
accgccgaccagcatctgag

SEQ ID NO: 97224 - DNA, 20 bp, Artificial Sequence
  MKO10097224_B_Lyg1
  gRNA
aacttcggccagccgttcag

SEQ ID NO: 97225 - DNA, 20 bp, Artificial Sequence
  MKO10097225_B_Lyg1
  gRNA
gttaactaccgcaataggtc

SEQ ID NO: 97226 - DNA, 20 bp, Artificial Sequence
  MKO10097226_B_Lyg2
  gRNA
catcagattatttatgtcgc

SEQ ID NO: 97227 - DNA, 20 bp, Artificial Sequence
  MKO10097227_B_Lyg2
  gRNA
aagtcaccgtctatgtctgc

SEQ ID NO: 97228 - DNA, 20 bp, Artificial Sequence
  MKO10097228_B_Lyg2
  gRNA
gtcactcctgcagacataga

SEQ ID NO: 97229 - DNA, 20 bp, Artificial Sequence
  MKO10097229_B_Lyl1
  gRNA
caggtttatcactggcacgc

SEQ ID NO: 97230 - DNA, 20 bp, Artificial Sequence
  MKO10097230_B_Lyl1
  gRNA
accccttacagtgtctacat

SEQ ID NO: 97231 - DNA, 20 bp, Artificial Sequence
  MKO10097231_B_Lyl1
  gRNA
ctgcgcttcagccggctgtt

SEQ ID NO: 97232 - DNA, 20 bp, Artificial Sequence
  MKO10097232_B_Lynx1
  gRNA
tgccacgtgtgtgcctacaa

SEQ ID NO: 97233 - DNA, 20 bp, Artificial Sequence
  MKO10097233_B_Lynx1
  gRNA
ccatctgctcacagtgttcc

SEQ ID NO: 97234 - DNA, 20 bp, Artificial Sequence
  MKO10097234_B_Lynx1
  gRNA
tacccacaggcaggcccatc

SEQ ID NO: 97235 - DNA, 20 bp, Artificial Sequence
  MKO10097235_B_Lyn
  gRNA
tgggatgtattaaatcaaaa

SEQ ID NO: 97236 - DNA, 20 bp, Artificial Sequence
  MKO10097236_B_Lyn
  gRNA
aactcactcttcagtttcta

SEQ ID NO: 97237 - DNA, 20 bp, Artificial Sequence
  MKO10097237_B_Lyn
  gRNA
tctattccaggcatggggaa

SEQ ID NO: 97238 - DNA, 20 bp, Artificial Sequence
  MKO10097238_B_Lypd1
  gRNA
gtgttatagggatcatgtac

SEQ ID NO: 97239 - DNA, 20 bp, Artificial Sequence
  MKO10097239_B_Lypd1
  gRNA
tccgggaggatgtgggttct

SEQ ID NO: 97240 - DNA, 20 bp, Artificial Sequence
  MKO10097240_B_Lypd1
  gRNA
acacatgtcttgaacgttca

SEQ ID NO: 97241 - DNA, 20 bp, Artificial Sequence
  MKO10097241_B_Lypd2
  gRNA
atgctcaccaagctccccga

SEQ ID NO: 97242 - DNA, 20 bp, Artificial Sequence
  MKO10097242_B_Lypd2
  gRNA
cgcacaggtgtagcactgta

SEQ ID NO: 97243 - DNA, 20 bp, Artificial Sequence
  MKO10097243_B_Lypd2
  gRNA
cctcgaccatgcaggggacc

SEQ ID NO: 97244 - DNA, 20 bp, Artificial Sequence
  MKO10097244_B_Lypd3
  gRNA
ccgccacagagaattgcccg

SEQ ID NO: 97245 - DNA, 20 bp, Artificial Sequence
  MKO10097245_B_Lypd3
  gRNA
tctcgtcctggacgcagcct

SEQ ID NO: 97246 - DNA, 20 bp, Artificial Sequence
  MKO10097246_B_Lypd3
  gRNA
ctcggtacagacgtccaccc

SEQ ID NO: 97247 - DNA, 20 bp, Artificial Sequence
  MKO10097247_B_Lypd4
  gRNA
tcgtgcttgcccacgcagct

SEQ ID NO: 97248 - DNA, 20 bp, Artificial Sequence
  MKO10097248_B_Lypd4
  gRNA
caatgtcctagataagtccg

SEQ ID NO: 97249 - DNA, 20 bp, Artificial Sequence
  MKO10097249_B_Lypd4
  gRNA
acacggaaccatgatactgc

SEQ ID NO: 97250 - DNA, 20 bp, Artificial Sequence
  MKO10097250_B_Lypd5
  gRNA
ccactactggccatcgctct

SEQ ID NO: 97251 - DNA, 20 bp, Artificial Sequence
  MKO10097251_B_Lypd5
  gRNA
agtagtcagtggcgcaacca

SEQ ID NO: 97252 - DNA, 20 bp, Artificial Sequence
  MKO10097252_B_Lypd5
  gRNA
ctctgaggtggtcttgtcgc

SEQ ID NO: 97253 - DNA, 20 bp, Artificial Sequence
  MKO10097253_B_Lypd6b
  gRNA
tgatggacgtacttcttccg

SEQ ID NO: 97254 - DNA, 20 bp, Artificial Sequence
  MKO10097254_B_Lypd6b
  gRNA
ataattataactgcaatcga

SEQ ID NO: 97255 - DNA, 20 bp, Artificial Sequence
  MKO10097255_B_Lypd6b
  gRNA
agaagacaagtggtgtccgc

SEQ ID NO: 97256 - DNA, 20 bp, Artificial Sequence
  MKO10097256_B_Lypd6
  gRNA
caccaaacgctgtgtcccgc

SEQ ID NO: 97257 - DNA, 20 bp, Artificial Sequence
  MKO10097257_B_Lypd6
  gRNA
tgcccattcgtctggtttat

SEQ ID NO: 97258 - DNA, 20 bp, Artificial Sequence
  MKO10097258_B_Lypd6
  gRNA
cagtgatcgtgtcctgcttg

SEQ ID NO: 97259 - DNA, 20 bp, Artificial Sequence
  MKO10097259_B_Lypd8
  gRNA
ctcacctctgttacccgacc

SEQ ID NO: 97260 - DNA, 20 bp, Artificial Sequence
  MKO10097260_B_Lypd8
  gRNA
aaaccccaaaagtgttacga

SEQ ID NO: 97261 - DNA, 20 bp, Artificial Sequence
  MKO10097261_B_Lypd8
  gRNA
ggactgctcattgcattcag

SEQ ID NO: 97262 - DNA, 20 bp, Artificial Sequence
  MKO10097262_B_Lypla1
  gRNA
gtggacagatgtatttgatg

SEQ ID NO: 97263 - DNA, 20 bp, Artificial Sequence
  MKO10097263_B_Lypla1
  gRNA
gattcccaggaagatgaatc

SEQ ID NO: 97264 - DNA, 20 bp, Artificial Sequence
  MKO10097264_B_Lypla1
  gRNA
agtcacattaaatatgaata

SEQ ID NO: 97265 - DNA, 20 bp, Artificial Sequence
  MKO10097265_B_Lypla2
  gRNA
ttgatgccagcttcatcctc

SEQ ID NO: 97266 - DNA, 20 bp, Artificial Sequence
  MKO10097266_B_Lypla2
  gRNA
gctgagtccggatgccccag

SEQ ID NO: 97267 - DNA, 20 bp, Artificial Sequence
  MKO10097267_B_Lypla2
  gRNA
tgtgacactcaacatgaaga

SEQ ID NO: 97268 - DNA, 20 bp, Artificial Sequence
  MKO10097268_B_Lyplal1
  gRNA
tgtgctggaatgttaagtct

SEQ ID NO: 97269 - DNA, 20 bp, Artificial Sequence
  MKO10097269_B_Lyplal1
  gRNA
cctcccttcagaggagtata

SEQ ID NO: 97270 - DNA, 20 bp, Artificial Sequence
  MKO10097270_B_Lyplal1
  gRNA
taaagcatctgttgtttacc

SEQ ID NO: 97271 - DNA, 20 bp, Artificial Sequence
  MKO10097271_B_Lyrm1
  gRNA
aatgcagtccaatctcaatc

SEQ ID NO: 97272 - DNA, 20 bp, Artificial Sequence
  MKO10097272_B_Lyrm1
  gRNA
gtgcaagcctgaaaatgctt

SEQ ID NO: 97273 - DNA, 20 bp, Artificial Sequence
  MKO10097273_B_Lyrm1
  gRNA
cggaaatggcaggcagcatc

SEQ ID NO: 97274 - DNA, 20 bp, Artificial Sequence
  MKO10097274_B_Lyrm2
  gRNA
cgcagccctgacgctgaagc

SEQ ID NO: 97275 - DNA, 20 bp, Artificial Sequence
  MKO10097275_B_Lyrm2
  gRNA
ttctgaccgaaaataccttc

SEQ ID NO: 97276 - DNA, 20 bp, Artificial Sequence
  MKO10097276_B_Lyrm2
  gRNA
ttccagttacgagttggcta

SEQ ID NO: 97277 - DNA, 20 bp, Artificial Sequence
  MKO10097277_B_Lyrm4
  gRNA
cctgtctgcggattatttca

SEQ ID NO: 97278 - DNA, 20 bp, Artificial Sequence
  MKO10097278_B_Lyrm4
  gRNA
gcttgtcagttgagtatagt

SEQ ID NO: 97279 - DNA, 20 bp, Artificial Sequence
  MKO10097279_B_Lyrm4
  gRNA
gtgctggcttcctatgtcct

SEQ ID NO: 97280 - DNA, 20 bp, Artificial Sequence
  MKO10097280_B_Lyrm5
  gRNA
ttaaaatagtctgctccttt

SEQ ID NO: 97281 - DNA, 20 bp, Artificial Sequence
  MKO10097281_B_Lyrm5
  gRNA
atttgtaatgaaggagctag

SEQ ID NO: 97282 - DNA, 20 bp, Artificial Sequence
  MKO10097282_B_Lyrm5
  gRNA
tcatagctctgtatttccta

SEQ ID NO: 97283 - DNA, 20 bp, Artificial Sequence
  MKO10097283_B_Lyrm7
  gRNA
agctctttaaaacactgcac

SEQ ID NO: 97284 - DNA, 20 bp, Artificial Sequence
  MKO10097284_B_Lyrm7
  gRNA
ttctgtgagaagatctttcc

SEQ ID NO: 97285 - DNA, 20 bp, Artificial Sequence
  MKO10097285_B_Lyrm7
  gRNA
ttcttcatttatctttactc

SEQ ID NO: 97286 - DNA, 20 bp, Artificial Sequence
  MKO10097286_B_Lyrm9
  gRNA
tactttgttcatgatccagt

SEQ ID NO: 97287 - DNA, 20 bp, Artificial Sequence
  MKO10097287_B_Lyrm9
  gRNA
tcgcacatggcccctctgcc

SEQ ID NO: 97288 - DNA, 20 bp, Artificial Sequence
  MKO10097288_B_Lyrm9
  gRNA
cagcatgcttgtagtgctcc

SEQ ID NO: 97289 - DNA, 20 bp, Artificial Sequence
  MKO10097289_B_Lysmd1
  gRNA
tctcccctttcctcagcttc

SEQ ID NO: 97290 - DNA, 20 bp, Artificial Sequence
  MKO10097290_B_Lysmd1
  gRNA
gagcccagagacttgtttaa

SEQ ID NO: 97291 - DNA, 20 bp, Artificial Sequence
  MKO10097291_B_Lysmd1
  gRNA
gtttgaagatttcatcttcc

SEQ ID NO: 97292 - DNA, 20 bp, Artificial Sequence
  MKO10097292_B_Lysmd2
  gRNA
ctgtcgacagtttcactttc

SEQ ID NO: 97293 - DNA, 20 bp, Artificial Sequence
  MKO10097293_B_Lysmd2
  gRNA
tcactaactatgataaagag

SEQ ID NO: 97294 - DNA, 20 bp, Artificial Sequence
  MKO10097294_B_Lysmd2
  gRNA
cgcgctcaagtacggagtca

SEQ ID NO: 97295 - DNA, 20 bp, Artificial Sequence
  MKO10097295_B_Lysmd3
  gRNA
atgctgaagtctacgaactt

SEQ ID NO: 97296 - DNA, 20 bp, Artificial Sequence
  MKO10097296_B_Lysmd3
  gRNA
tcggacctgttgtgctgtta

SEQ ID NO: 97297 - DNA, 20 bp, Artificial Sequence
  MKO10097297_B_Lysmd3
  gRNA
gctagaacgtcatggcgggg

SEQ ID NO: 97298 - DNA, 20 bp, Artificial Sequence
  MKO10097298_B_Lysmd4
  gRNA
cattgttgaacatgtaaacg

SEQ ID NO: 97299 - DNA, 20 bp, Artificial Sequence
  MKO10097299_B_Lysmd4
  gRNA
aatgcgcttaggcccctgcc

SEQ ID NO: 97300 - DNA, 20 bp, Artificial Sequence
  MKO10097300_B_Lysmd4
  gRNA
ccgactgtgggattcagtgg

SEQ ID NO: 97301 - DNA, 20 bp, Artificial Sequence
  MKO10097301_B_Lyst
  gRNA
catgtagatccaacgacaca

SEQ ID NO: 97302 - DNA, 20 bp, Artificial Sequence
  MKO10097302_B_Lyst
  gRNA
tgccctgcttcgagtagccc

SEQ ID NO: 97303 - DNA, 20 bp, Artificial Sequence
  MKO10097303_B_Lyst
  gRNA
cattcagcagatttgggccc

SEQ ID NO: 97304 - DNA, 20 bp, Artificial Sequence
  MKO10097304_B_Lyve1
  gRNA
ctgactcaccggatgagttg

SEQ ID NO: 97305 - DNA, 20 bp, Artificial Sequence
  MKO10097305_B_Lyve1
  gRNA
ctttggtgctgccgctgtgc

SEQ ID NO: 97306 - DNA, 20 bp, Artificial Sequence
  MKO10097306_B_Lyve1
  gRNA
gaatttcacagaagccaacg

SEQ ID NO: 97307 - DNA, 20 bp, Artificial Sequence
  MKO10097307_B_Lyz1
  gRNA
ctgtctttcagctctgctgc

SEQ ID NO: 97308 - DNA, 20 bp, Artificial Sequence
  MKO10097308_B_Lyz1
  gRNA
cgagctacaaactacaaccg

SEQ ID NO: 97309 - DNA, 20 bp, Artificial Sequence
  MKO10097309_B_Lyz1
  gRNA
cctaccatgctcgaatgcct

SEQ ID NO: 97310 - DNA, 20 bp, Artificial Sequence
  MKO10097310_B_Lyz2
  gRNA
atatcccatagtcagtgctt

SEQ ID NO: 97311 - DNA, 20 bp, Artificial Sequence
  MKO10097311_B_Lyz2
  gRNA
ttgtctttcagctctgctgc

SEQ ID NO: 97312 - DNA, 20 bp, Artificial Sequence
  MKO10097312_B_Lyz2
  gRNA
cctaccatgctcgaatgcct

SEQ ID NO: 97313 - DNA, 20 bp, Artificial Sequence
  MKO10097313_B_Lyzl1
  gRNA
tctcggctgtagtgttgtag

SEQ ID NO: 97314 - DNA, 20 bp, Artificial Sequence
  MKO10097314_B_Lyzl1
  gRNA
agaacaaagacatgtcagag

SEQ ID NO: 97315 - DNA, 20 bp, Artificial Sequence
  MKO10097315_B_Lyzl1
  gRNA
cacagagaatggcatctgtg

SEQ ID NO: 97316 - DNA, 20 bp, Artificial Sequence
  MKO10097316_B_Lyzl4
  gRNA
cattgtcacgaatctgaaag

SEQ ID NO: 97317 - DNA, 20 bp, Artificial Sequence
  MKO10097317_B_Lyzl4
  gRNA
tgtgccaagaaaatcgtgaa

SEQ ID NO: 97318 - DNA, 20 bp, Artificial Sequence
  MKO10097318_B_Lyzl4
  gRNA
ctgccagctgtctgacgttc

SEQ ID NO: 97319 - DNA, 20 bp, Artificial Sequence
  MKO10097319_B_Lyzl6
  gRNA
cccgtcatccagtaggagag

SEQ ID NO: 97320 - DNA, 20 bp, Artificial Sequence
  MKO10097320_B_Lyzl6
  gRNA
gtcctcttcatacagaatct

SEQ ID NO: 97321 - DNA, 20 bp, Artificial Sequence
  MKO10097321_B_Lyzl6
  gRNA
tgtgcaaaaaagattgtgtc

SEQ ID NO: 97322 - DNA, 20 bp, Artificial Sequence
  MKO10097322_B_Lzic
  gRNA
tcgctgaagaagattatgtc

SEQ ID NO: 97323 - DNA, 20 bp, Artificial Sequence
  MKO10097323_B_Lzic
  gRNA
actttggtagatgaactcag

SEQ ID NO: 97324 - DNA, 20 bp, Artificial Sequence
  MKO10097324_B_Lzic
  gRNA
gctgagcacagcacttgcat

SEQ ID NO: 97325 - DNA, 20 bp, Artificial Sequence
  MKO10097325_B_Lztfl1
  gRNA
atttgtatcttcaagtaaaa

SEQ ID NO: 97326 - DNA, 20 bp, Artificial Sequence
  MKO10097326_B_Lztfl1
  gRNA
aacggtagattcctgctttc

SEQ ID NO: 97327 - DNA, 20 bp, Artificial Sequence
  MKO10097327_B_Lztfl1
  gRNA
ggagactttcaccattgatg

SEQ ID NO: 97328 - DNA, 20 bp, Artificial Sequence
  MKO10097328_B_Lztr1
  gRNA
gcgcagcaagcacacagtcg

SEQ ID NO: 97329 - DNA, 20 bp, Artificial Sequence
  MKO10097329_B_Lztr1
  gRNA
tgtcttccagggggctatac

SEQ ID NO: 97330 - DNA, 20 bp, Artificial Sequence
  MKO10097330_B_Lztr1
  gRNA
ccgttaccaccactctgctg

SEQ ID NO: 97331 - DNA, 20 bp, Artificial Sequence
  MKO10097331_B_Lzts1
  gRNA
gagagtgccctgcgcaccaa

SEQ ID NO: 97332 - DNA, 20 bp, Artificial Sequence
  MKO10097332_B_Lzts1
  gRNA
gggctgtgtagtctgggcga

SEQ ID NO: 97333 - DNA, 20 bp, Artificial Sequence
  MKO10097333_B_Lzts1
  gRNA
agtatcgattgagcttcttg

SEQ ID NO: 97334 - DNA, 20 bp, Artificial Sequence
  MKO10097334_B_Lzts2
  gRNA
tccttggggggtcgtgtagc

SEQ ID NO: 97335 - DNA, 20 bp, Artificial Sequence
  MKO10097335_B_Lzts2
  gRNA
ccgctgctcccgttcaaaag

SEQ ID NO: 97336 - DNA, 20 bp, Artificial Sequence
  MKO10097336_B_Lzts2
  gRNA
gctgctaccgggtggctacg

SEQ ID NO: 97337 - DNA, 20 bp, Artificial Sequence
  MKO10097337_B_Lzts3
  gRNA
tagggcctcgctccgggaga

SEQ ID NO: 97338 - DNA, 20 bp, Artificial Sequence
  MKO10097338_B_Lzts3
  gRNA
acttgtccagtccgcctttg

SEQ ID NO: 97339 - DNA, 20 bp, Artificial Sequence
  MKO10097339_B_Lzts3
  gRNA
cccagatccccgcctgacta

SEQ ID NO: 97340 - DNA, 20 bp, Artificial Sequence
  MKO10097340_B_M1ap
  gRNA
cattcgaagctccgagatgc

SEQ ID NO: 97341 - DNA, 20 bp, Artificial Sequence
  MKO10097341_B_M1ap
  gRNA
atggtgagtctgaacgctcc

SEQ ID NO: 97342 - DNA, 20 bp, Artificial Sequence
  MKO10097342_B_M1ap
  gRNA
acctcacgccttactacccc

SEQ ID NO: 97343 - DNA, 20 bp, Artificial Sequence
  MKO10097343_B_M6pr
  gRNA
agacctctggtgaacaggcc

SEQ ID NO: 97344 - DNA, 20 bp, Artificial Sequence
  MKO10097344_B_M6pr
  gRNA
aacgagactcacatcttcaa

SEQ ID NO: 97345 - DNA, 20 bp, Artificial Sequence
  MKO10097345_B_M6pr
  gRNA
cctgtctagatttgcatcat

SEQ ID NO: 97346 - DNA, 20 bp, Artificial Sequence
  MKO10097346_B_Maats1
  gRNA
accgctataagttctttgac

SEQ ID NO: 97347 - DNA, 20 bp, Artificial Sequence
  MKO10097347_B_Maats1
  gRNA
gatgaagatccggatgtttc

SEQ ID NO: 97348 - DNA, 20 bp, Artificial Sequence
  MKO10097348_B_Maats1
  gRNA
caccctgattcgaagcagac

SEQ ID NO: 97349 - DNA, 20 bp, Artificial Sequence
  MKO10097349_B_Mab21l1
  gRNA
aaccctgcgtgatcgccacc

SEQ ID NO: 97350 - DNA, 20 bp, Artificial Sequence
  MKO10097350_B_Mab21l1
  gRNA
acgaatcttgcctgggcgat

SEQ ID NO: 97351 - DNA, 20 bp, Artificial Sequence
  MKO10097351_B_Mab21l1
  gRNA
actccaggtggcgatcacgc

SEQ ID NO: 97352 - DNA, 20 bp, Artificial Sequence
  MKO10097352_B_Mab21l2
  gRNA
gatgatcgccgacactagtg

SEQ ID NO: 97353 - DNA, 20 bp, Artificial Sequence
  MKO10097353_B_Mab21l2
  gRNA
gccgtgctcaaactaagcga

SEQ ID NO: 97354 - DNA, 20 bp, Artificial Sequence
  MKO10097354_B_Mab21l2
  gRNA
tcgtcccagtccgtttccct

SEQ ID NO: 97355 - DNA, 20 bp, Artificial Sequence
  MKO10097355_B_Mab21l3
  gRNA
agtaccgccagcgctgcctc

SEQ ID NO: 97356 - DNA, 20 bp, Artificial Sequence
  MKO10097356_B_Mab21l3
  gRNA
aaccacagaaatcagccgcc

SEQ ID NO: 97357 - DNA, 20 bp, Artificial Sequence
  MKO10097357_B_Mab21l3
  gRNA
tggcccagtccgcctatcac

SEQ ID NO: 97358 - DNA, 20 bp, Artificial Sequence
  MKO10097358_B_Macc1
  gRNA
ctacttcgaccaatttctcg

SEQ ID NO: 97359 - DNA, 20 bp, Artificial Sequence
  MKO10097359_B_Macc1
  gRNA
attggtcgaagtagatctga

SEQ ID NO: 97360 - DNA, 20 bp, Artificial Sequence
  MKO10097360_B_Macc1
  gRNA
acaagatcttcaatcagctt

SEQ ID NO: 97361 - DNA, 20 bp, Artificial Sequence
  MKO10097361_B_Macf1
  gRNA
gcagaatgtgcagatcgccc

SEQ ID NO: 97362 - DNA, 20 bp, Artificial Sequence
  MKO10097362_B_Macf1
  gRNA
agagatcattgatgtgcttg

SEQ ID NO: 97363 - DNA, 20 bp, Artificial Sequence
  MKO10097363_B_Macf1
  gRNA
ttcttacctgccgctgcttt

SEQ ID NO: 97364 - DNA, 20 bp, Artificial Sequence
  MKO10097364_B_Macrod1
  gRNA
tcactcaccagcgttgacaa

SEQ ID NO: 97365 - DNA, 20 bp, Artificial Sequence
  MKO10097365_B_Macrod1
  gRNA
agctgaagaagatccccacg

SEQ ID NO: 97366 - DNA, 20 bp, Artificial Sequence
  MKO10097366_B_Macrod1
  gRNA
tgcccctgcagcctttctga

SEQ ID NO: 97367 - DNA, 20 bp, Artificial Sequence
  MKO10097367_B_Macrod2
  gRNA
cgagagagtgaacttcctga

SEQ ID NO: 97368 - DNA, 20 bp, Artificial Sequence
  MKO10097368_B_Macrod2
  gRNA
gagtctttcttgattcaaaa

SEQ ID NO: 97369 - DNA, 20 bp, Artificial Sequence
  MKO10097369_B_Macrod2
  gRNA
gaagaaaagcttgagtgaaa

SEQ ID NO: 97370 - DNA, 20 bp, Artificial Sequence
  MKO10097370_B_Mad1l1
  gRNA
gccgcttgacctgtaccttc

SEQ ID NO: 97371 - DNA, 20 bp, Artificial Sequence
  MKO10097371_B_Mad1l1
  gRNA
gagccacaagagagcccgag

SEQ ID NO: 97372 - DNA, 20 bp, Artificial Sequence
  MKO10097372_B_Mad1l1
  gRNA
ctcagctctctcatcttgac

SEQ ID NO: 97373 - DNA, 20 bp, Artificial Sequence
  MKO10097373_B_Mad2l1bp
  gRNA
ggctccattcggtgtggacc

SEQ ID NO: 97374 - DNA, 20 bp, Artificial Sequence
  MKO10097374_B_Mad2l1bp
  gRNA
cttgggcaaaagggctccgc

SEQ ID NO: 97375 - DNA, 20 bp, Artificial Sequence
  MKO10097375_B_Mad2l1bp
  gRNA
ttcggacatatcctcctcac

SEQ ID NO: 97376 - DNA, 20 bp, Artificial Sequence
  MKO10097376_B_Mad2l1
  gRNA
caagtgctcagttcagaaac

SEQ ID NO: 97377 - DNA, 20 bp, Artificial Sequence
  MKO10097377_B_Mad2l1
  gRNA
attgagatactttatgagct

SEQ ID NO: 97378 - DNA, 20 bp, Artificial Sequence
  MKO10097378_B_Mad2l1
  gRNA
atatttctgcactctagtaa

SEQ ID NO: 97379 - DNA, 20 bp, Artificial Sequence
  MKO10097379_B_Mad2l2
  gRNA
cacctggagggttgtgatcc

SEQ ID NO: 97380 - DNA, 20 bp, Artificial Sequence
  MKO10097380_B_Mad2l2
  gRNA
catcacacacactaatctta

SEQ ID NO: 97381 - DNA, 20 bp, Artificial Sequence
  MKO10097381_B_Mad2l2
  gRNA
tgacgcagtggagtgtgtcc

SEQ ID NO: 97382 - DNA, 20 bp, Artificial Sequence
  MKO10097382_B_Madcam1
  gRNA
accgccagcgttgtgtcatt

SEQ ID NO: 97383 - DNA, 20 bp, Artificial Sequence
  MKO10097383_B_Madcam1
  gRNA
ctggaagcttcgactcccgc

SEQ ID NO: 97384 - DNA, 20 bp, Artificial Sequence
  MKO10097384_B_Madcam1
  gRNA
ctggccggtagcatttccac

SEQ ID NO: 97385 - DNA, 20 bp, Artificial Sequence
  MKO10097385_B_Madd
  gRNA
acgagatagtcaagtaaccg

SEQ ID NO: 97386 - DNA, 20 bp, Artificial Sequence
  MKO10097386_B_Madd
  gRNA
cgtggcaatgatctaccccc

SEQ ID NO: 97387 - DNA, 20 bp, Artificial Sequence
  MKO10097387_B_Madd
  gRNA
acgtagcaaccgatagatcc

SEQ ID NO: 97388 - DNA, 20 bp, Artificial Sequence
  MKO10097388_B_Maea
  gRNA
ggacttgttatcatggcacc

SEQ ID NO: 97389 - DNA, 20 bp, Artificial Sequence
  MKO10097389_B_Maea
  gRNA
tctgtggtcagcctattgga

SEQ ID NO: 97390 - DNA, 20 bp, Artificial Sequence
  MKO10097390_B_Maea
  gRNA
agagactagccacgtcacca

SEQ ID NO: 97391 - DNA, 20 bp, Artificial Sequence
  MKO10097391_B_Mael
  gRNA
ctgtgttaaatactccctcc

SEQ ID NO: 97392 - DNA, 20 bp, Artificial Sequence
  MKO10097392_B_Mael
  gRNA
tctccccaagctcttgaggg

SEQ ID NO: 97393 - DNA, 20 bp, Artificial Sequence
  MKO10097393_B_Mael
  gRNA
aacttgtatctacaccactg

SEQ ID NO: 97394 - DNA, 20 bp, Artificial Sequence
  MKO10097394_B_Maf1
  gRNA
atccttacccagcggaggct

SEQ ID NO: 97395 - DNA, 20 bp, Artificial Sequence
  MKO10097395_B_Maf1
  gRNA
tgaaagctactcgtgtaaga

SEQ ID NO: 97396 - DNA, 20 bp, Artificial Sequence
  MKO10097396_B_Maf1
  gRNA
agctgttcgtgaagacttca

SEQ ID NO: 97397 - DNA, 20 bp, Artificial Sequence
  MKO10097397_B_Mafa
  gRNA
aatacgagaagttggcgggc

SEQ ID NO: 97398 - DNA, 20 bp, Artificial Sequence
  MKO10097398_B_Mafa
  gRNA
gggcagtgtggtgtgcgccg

SEQ ID NO: 97399 - DNA, 20 bp, Artificial Sequence
  MKO10097399_B_Mafa
  gRNA
ggttgagcgcctcggggttc

SEQ ID NO: 97400 - DNA, 20 bp, Artificial Sequence
  MKO10097400_B_Mafb
  gRNA
cgtctctctcgcgggccagc

SEQ ID NO: 97401 - DNA, 20 bp, Artificial Sequence
  MKO10097401_B_Mafb
  gRNA
tgaaccgaagacccatctcg

SEQ ID NO: 97402 - DNA, 20 bp, Artificial Sequence
  MKO10097402_B_Mafb
  gRNA
gagcgcctccaccgcgtcct

SEQ ID NO: 97403 - DNA, 20 bp, Artificial Sequence
  MKO10097403_B_Maff
  gRNA
cttatctagcaaagccctga

SEQ ID NO: 97404 - DNA, 20 bp, Artificial Sequence
  MKO10097404_B_Maff
  gRNA
cggcaagtgtgaagcgctgc

SEQ ID NO: 97405 - DNA, 20 bp, Artificial Sequence
  MKO10097405_B_Maff
  gRNA
gctggcgggcgccaccagtg

SEQ ID NO: 97406 - DNA, 20 bp, Artificial Sequence
  MKO10097406_B_Mafg
  gRNA
taaggccttgtttcctttat

SEQ ID NO: 97407 - DNA, 20 bp, Artificial Sequence
  MKO10097407_B_Mafg
  gRNA
cagctcctcgtcggtcaagc

SEQ ID NO: 97408 - DNA, 20 bp, Artificial Sequence
  MKO10097408_B_Mafg
  gRNA
cggccagctgccgcgtcaag

SEQ ID NO: 97409 - DNA, 20 bp, Artificial Sequence
  MKO10097409_B_Mafk
  gRNA
ccttaccttcaatgccttgt

SEQ ID NO: 97410 - DNA, 20 bp, Artificial Sequence
  MKO10097410_B_Mafk
  gRNA
tgttcttagcgatgatgagc

SEQ ID NO: 97411 - DNA, 20 bp, Artificial Sequence
  MKO10097411_B_Mafk
  gRNA
agctcatcatcgctaagaac

SEQ ID NO: 97412 - DNA, 20 bp, Artificial Sequence
  MKO10097412_B_Maf
  gRNA
ggcgcgtctgcctctgcgag

SEQ ID NO: 97413 - DNA, 20 bp, Artificial Sequence
  MKO10097413_B_Maf
  gRNA
caccaccaccatccgacggc

SEQ ID NO: 97414 - DNA, 20 bp, Artificial Sequence
  MKO10097414_B_Maf
  gRNA
cgccggccgtcggatggtgg

SEQ ID NO: 97415 - DNA, 20 bp, Artificial Sequence
  MKO10097415_B_Magea10
  gRNA
tcaagtcctcatagtcctcc

SEQ ID NO: 97416 - DNA, 20 bp, Artificial Sequence
  MKO10097416_B_Magea10
  gRNA
ccagctcctggaggactatg

SEQ ID NO: 97417 - DNA, 20 bp, Artificial Sequence
  MKO10097417_B_Magea10
  gRNA
ttatcatcatgcctagaccc

SEQ ID NO: 97418 - DNA, 20 bp, Artificial Sequence
  MKO10097418_B_Magea1
  gRNA
caatacactagaatgtgagc

SEQ ID NO: 97419 - DNA, 20 bp, Artificial Sequence
  MKO10097419_B_Magea1
  gRNA
cagcctccaagagagtgctc

SEQ ID NO: 97420 - DNA, 20 bp, Artificial Sequence
  MKO10097420_B_Magea1
  gRNA
cactaccaaagcagaaatgt

SEQ ID NO: 97421 - DNA, 20 bp, Artificial Sequence
  MKO10097421_B_Magea2
  gRNA
tacctgtcttgggcataccc

SEQ ID NO: 97422 - DNA, 20 bp, Artificial Sequence
  MKO10097422_B_Magea2
  gRNA
aagtattggtagagagtatg

SEQ ID NO: 97423 - DNA, 20 bp, Artificial Sequence
  MKO10097423_B_Magea2
  gRNA
atcagtcatcatgccatcat

SEQ ID NO: 97424 - DNA, 20 bp, Artificial Sequence
  MKO10097424_B_Magea3
  gRNA
gcattgtgcaacaaatgaag

SEQ ID NO: 97425 - DNA, 20 bp, Artificial Sequence
  MKO10097425_B_Magea3
  gRNA
ctttacaagatgagatagac

SEQ ID NO: 97426 - DNA, 20 bp, Artificial Sequence
  MKO10097426_B_Magea3
  gRNA
atagctagggggatcactat

SEQ ID NO: 97427 - DNA, 20 bp, Artificial Sequence
  MKO10097427_B_Magea4
  gRNA
agagctgtagaactatctgc

SEQ ID NO: 97428 - DNA, 20 bp, Artificial Sequence
  MKO10097428_B_Magea4
  gRNA
actactgtacaccttctttg

SEQ ID NO: 97429 - DNA, 20 bp, Artificial Sequence
  MKO10097429_B_Magea4
  gRNA
agcttccaccaaccaagtag

SEQ ID NO: 97430 - DNA, 20 bp, Artificial Sequence
  MKO10097430_B_Magea5
  gRNA
actcccatacactttatttg

SEQ ID NO: 97431 - DNA, 20 bp, Artificial Sequence
  MKO10097431_B_Magea5
  gRNA
caacctccaagagagtgctc

SEQ ID NO: 97432 - DNA, 20 bp, Artificial Sequence
  MKO10097432_B_Magea5
  gRNA
cactacactagaatgtgagc

SEQ ID NO: 97433 - DNA, 20 bp, Artificial Sequence
  MKO10097433_B_Magea6
  gRNA
aatagtgatcctcctatcta

SEQ ID NO: 97434 - DNA, 20 bp, Artificial Sequence
  MKO10097434_B_Magea6
  gRNA
atgtcagtgaggaggttatc

SEQ ID NO: 97435 - DNA, 20 bp, Artificial Sequence
  MKO10097435_B_Magea6
  gRNA
acctggggttagaagggaaa

SEQ ID NO: 97436 - DNA, 20 bp, Artificial Sequence
  MKO10097436_B_Magea8
  gRNA
ctcctcctgtgatgtcacca

SEQ ID NO: 97437 - DNA, 20 bp, Artificial Sequence
  MKO10097437_B_Magea8
  gRNA
cattgcaagatgagatagac

SEQ ID NO: 97438 - DNA, 20 bp, Artificial Sequence
  MKO10097438_B_Magea8
  gRNA
tcctaccaaagcagaaatgt

SEQ ID NO: 97439 - DNA, 20 bp, Artificial Sequence
  MKO10097439_B_Mageb16
  gRNA
ttacatgctgtacaagtatc

SEQ ID NO: 97440 - DNA, 20 bp, Artificial Sequence
  MKO10097440_B_Mageb16
  gRNA
atcattgcgcatcccatcat

SEQ ID NO: 97441 - DNA, 20 bp, Artificial Sequence
  MKO10097441_B_Mageb16
  gRNA
aatgacactcattgtcagag

SEQ ID NO: 97442 - DNA, 20 bp, Artificial Sequence
  MKO10097442_B_Mageb18
  gRNA
tggaccccacgtgaattcaa

SEQ ID NO: 97443 - DNA, 20 bp, Artificial Sequence
  MKO10097443_B_Mageb18
  gRNA
gcaccagtaaaactactttg

SEQ ID NO: 97444 - DNA, 20 bp, Artificial Sequence
  MKO10097444_B_Mageb18
  gRNA
cacaccgtggctcttgaata

SEQ ID NO: 97445 - DNA, 20 bp, Artificial Sequence
  MKO10097445_B_Mageb1
  gRNA
ttgccagacctcttgctcag

SEQ ID NO: 97446 - DNA, 20 bp, Artificial Sequence
  MKO10097446_B_Mageb1
  gRNA
cctgatacaaaaagttcaga

SEQ ID NO: 97447 - DNA, 20 bp, Artificial Sequence
  MKO10097447_B_Mageb1
  gRNA
ccttcatgaagatcacacct

SEQ ID NO: 97448 - DNA, 20 bp, Artificial Sequence
  MKO10097448_B_Mageb2
  gRNA
agatgaaagaagcagttaca

SEQ ID NO: 97449 - DNA, 20 bp, Artificial Sequence
  MKO10097449_B_Mageb2
  gRNA
caaaacgacagcagtcacgc

SEQ ID NO: 97450 - DNA, 20 bp, Artificial Sequence
  MKO10097450_B_Mageb2
  gRNA
ttgccagacctcttgctcag

SEQ ID NO: 97451 - DNA, 20 bp, Artificial Sequence
  MKO10097451_B_Mageb3
  gRNA
caagaccaaagaccaattct

SEQ ID NO: 97452 - DNA, 20 bp, Artificial Sequence
  MKO10097452_B_Mageb3
  gRNA
tgactttagctaaaactttc

SEQ ID NO: 97453 - DNA, 20 bp, Artificial Sequence
  MKO10097453_B_Mageb3
  gRNA
gacccagcactcaggtcaac

SEQ ID NO: 97454 - DNA, 20 bp, Artificial Sequence
  MKO10097454_B_Mageb4
  gRNA
cacagaatgatcttctaaca

SEQ ID NO: 97455 - DNA, 20 bp, Artificial Sequence
  MKO10097455_B_Mageb4
  gRNA
tgagtctaaagtcacacttg

SEQ ID NO: 97456 - DNA, 20 bp, Artificial Sequence
  MKO10097456_B_Mageb4
  gRNA
tggctcctctcacaaataca

SEQ ID NO: 97457 - DNA, 20 bp, Artificial Sequence
  MKO10097457_B_Mageb5
  gRNA
ggcaggggtttaccaaaaac

SEQ ID NO: 97458 - DNA, 20 bp, Artificial Sequence
  MKO10097458_B_Mageb5
  gRNA
taaataaaatgcttcctccc

SEQ ID NO: 97459 - DNA, 20 bp, Artificial Sequence
  MKO10097459_B_Mageb5
  gRNA
cgttcataaaaatcatagcc

SEQ ID NO: 97460 - DNA, 20 bp, Artificial Sequence
  MKO10097460_B_Maged1
  gRNA
catgcgcgctcaatgatttc

SEQ ID NO: 97461 - DNA, 20 bp, Artificial Sequence
  MKO10097461_B_Maged1
  gRNA
ctctcaggcacgtaatgcca

SEQ ID NO: 97462 - DNA, 20 bp, Artificial Sequence
  MKO10097462_B_Maged1
  gRNA
actggtcctttccctccgac

SEQ ID NO: 97463 - DNA, 20 bp, Artificial Sequence
  MKO10097463_B_Maged2
  gRNA
cagctgtggtaccgatccaa

SEQ ID NO: 97464 - DNA, 20 bp, Artificial Sequence
  MKO10097464_B_Maged2
  gRNA
gactctacctgagcgtctga

SEQ ID NO: 97465 - DNA, 20 bp, Artificial Sequence
  MKO10097465_B_Maged2
  gRNA
cctgaaatcattgaacgagc

SEQ ID NO: 97466 - DNA, 20 bp, Artificial Sequence
  MKO10097466_B_Magee1
  gRNA
agggctattcgggccctccg

SEQ ID NO: 97467 - DNA, 20 bp, Artificial Sequence
  MKO10097467_B_Magee1
  gRNA
tggtttctgcgcgggatcgt

SEQ ID NO: 97468 - DNA, 20 bp, Artificial Sequence
  MKO10097468_B_Magee1
  gRNA
actctcgaccgatgtaatac

SEQ ID NO: 97469 - DNA, 20 bp, Artificial Sequence
  MKO10097469_B_Magee2
  gRNA
cgccgattacagcaacagcc

SEQ ID NO: 97470 - DNA, 20 bp, Artificial Sequence
  MKO10097470_B_Magee2
  gRNA
ccctgagcgcccccaaacgt

SEQ ID NO: 97471 - DNA, 20 bp, Artificial Sequence
  MKO10097471_B_Magee2
  gRNA
ggtctctgctagccgttcag

SEQ ID NO: 97472 - DNA, 20 bp, Artificial Sequence
  MKO10097472_B_Mageh1
  gRNA
ggggctacagaagccgccat

SEQ ID NO: 97473 - DNA, 20 bp, Artificial Sequence
  MKO10097473_B_Mageh1
  gRNA
tcgcaacaatcgcaagagcc

SEQ ID NO: 97474 - DNA, 20 bp, Artificial Sequence
  MKO10097474_B_Mageh1
  gRNA
ctagattccacgtgtgctcg

SEQ ID NO: 97475 - DNA, 20 bp, Artificial Sequence
  MKO10097475_B_Magel2
  gRNA
gggctccactcgatcacgta

SEQ ID NO: 97476 - DNA, 20 bp, Artificial Sequence
  MKO10097476_B_Magel2
  gRNA
tgcagtccatagccgcccta

SEQ ID NO: 97477 - DNA, 20 bp, Artificial Sequence
  MKO10097477_B_Magel2
  gRNA
tgcaccttcgattactccga

SEQ ID NO: 97478 - DNA, 20 bp, Artificial Sequence
  MKO10097478_B_Magi1
  gRNA
catagtccacccggagaatg

SEQ ID NO: 97479 - DNA, 20 bp, Artificial Sequence
  MKO10097479_B_Magi1
  gRNA
tgctgtttgttcaggcaccg

SEQ ID NO: 97480 - DNA, 20 bp, Artificial Sequence
  MKO10097480_B_Magi1
  gRNA
gaaatgaacagtagctttac

SEQ ID NO: 97481 - DNA, 20 bp, Artificial Sequence
  MKO10097481_B_Magi2
  gRNA
ttggctttgtatcgtccatc

SEQ ID NO: 97482 - DNA, 20 bp, Artificial Sequence
  MKO10097482_B_Magi2
  gRNA
ctcttcgggctggctgtaca

SEQ ID NO: 97483 - DNA, 20 bp, Artificial Sequence
  MKO10097483_B_Magi2
  gRNA
cttcataggtcccgctttct

SEQ ID NO: 97484 - DNA, 20 bp, Artificial Sequence
  MKO10097484_B_Magi3
  gRNA
ccagcccgatccagttgatc

SEQ ID NO: 97485 - DNA, 20 bp, Artificial Sequence
  MKO10097485_B_Magi3
  gRNA
agcggagcattgttagaaag

SEQ ID NO: 97486 - DNA, 20 bp, Artificial Sequence
  MKO10097486_B_Magi3
  gRNA
tctctccttaggcactacaa

SEQ ID NO: 97487 - DNA, 20 bp, Artificial Sequence
  MKO10097487_B_Magix
  gRNA
aaacgaccacatcgctgtgc

SEQ ID NO: 97488 - DNA, 20 bp, Artificial Sequence
  MKO10097488_B_Magix
  gRNA
gacctcgtgctctatatcaa

SEQ ID NO: 97489 - DNA, 20 bp, Artificial Sequence
  MKO10097489_B_Magix
  gRNA
gatgggccagcacagcgatg

SEQ ID NO: 97490 - DNA, 20 bp, Artificial Sequence
  MKO10097490_B_Magohb
  gRNA
gttcttccattacactcttg

SEQ ID NO: 97491 - DNA, 20 bp, Artificial Sequence
  MKO10097491_B_Magohb
  gRNA
ccaaatagtaaaatacacga

SEQ ID NO: 97492 - DNA, 20 bp, Artificial Sequence
  MKO10097492_B_Magohb
  gRNA
tgacgtgatgatcagaaaag

SEQ ID NO: 97493 - DNA, 20 bp, Artificial Sequence
  MKO10097493_B_Magoh
  gRNA
taggagcttgaaattgtcat

SEQ ID NO: 97494 - DNA, 20 bp, Artificial Sequence
  MKO10097494_B_Magoh
  gRNA
tggactggttgacatcaata

SEQ ID NO: 97495 - DNA, 20 bp, Artificial Sequence
  MKO10097495_B_Magoh
  gRNA
acaaaaatgacgtcatgatc

SEQ ID NO: 97496 - DNA, 20 bp, Artificial Sequence
  MKO10097496_B_Magt1
  gRNA
gtatctgcgaagaagcaata

SEQ ID NO: 97497 - DNA, 20 bp, Artificial Sequence
  MKO10097497_B_Magt1
  gRNA
ttcatcaactttcctccgaa

SEQ ID NO: 97498 - DNA, 20 bp, Artificial Sequence
  MKO10097498_B_Magt1
  gRNA
acgacaactgagtaatttct

SEQ ID NO: 97499 - DNA, 20 bp, Artificial Sequence
  MKO10097499_B_Mag
  gRNA
caacaccaccttgcagttcg

SEQ ID NO: 97500 - DNA, 20 bp, Artificial Sequence
  MKO10097500_B_Mag
  gRNA
ctgactctcatagatgaccg

SEQ ID NO: 97501 - DNA, 20 bp, Artificial Sequence
  MKO10097501_B_Mag
  gRNA
gcatagacgccgtcctctcc

SEQ ID NO: 97502 - DNA, 20 bp, Artificial Sequence
  MKO10097502_B_Mak16
  gRNA
gcatcctagaaccaagactc

SEQ ID NO: 97503 - DNA, 20 bp, Artificial Sequence
  MKO10097503_B_Mak16
  gRNA
caggtaatctggaatacact

SEQ ID NO: 97504 - DNA, 20 bp, Artificial Sequence
  MKO10097504_B_Mak16
  gRNA
tacatttgtgtctgataaag

SEQ ID NO: 97505 - DNA, 20 bp, Artificial Sequence
  MKO10097505_B_Mak
  gRNA
tgtctttcattagctgatag

SEQ ID NO: 97506 - DNA, 20 bp, Artificial Sequence
  MKO10097506_B_Mak
  gRNA
tctatcagctaatgaaagac

SEQ ID NO: 97507 - DNA, 20 bp, Artificial Sequence
  MKO10097507_B_Mak
  gRNA
tcagcaatcttcaccagctc

SEQ ID NO: 97508 - DNA, 20 bp, Artificial Sequence
  MKO10097508_B_Mal2
  gRNA
cggccacgttgatgttatac

SEQ ID NO: 97509 - DNA, 20 bp, Artificial Sequence
  MKO10097509_B_Mal2
  gRNA
ttcatgacaacagcttgtta

SEQ ID NO: 97510 - DNA, 20 bp, Artificial Sequence
  MKO10097510_B_Mal2
  gRNA
aggtgcttggaggacttgtc

SEQ ID NO: 97511 - DNA, 20 bp, Artificial Sequence
  MKO10097511_B_Mall
  gRNA
aatagatgctgaaagcgtgc

SEQ ID NO: 97512 - DNA, 20 bp, Artificial Sequence
  MKO10097512_B_Mall
  gRNA
tcttccaggtgttcgggttc

SEQ ID NO: 97513 - DNA, 20 bp, Artificial Sequence
  MKO10097513_B_Mall
  gRNA
ctacatcaatgttgcagcct

SEQ ID NO: 97514 - DNA, 20 bp, Artificial Sequence
  MKO10097514_B_Malsu1
  gRNA
cacccgacacttacacgcta

SEQ ID NO: 97515 - DNA, 20 bp, Artificial Sequence
  MKO10097515_B_Malsu1
  gRNA
cagcatatcgatgtcaaact

SEQ ID NO: 97516 - DNA, 20 bp, Artificial Sequence
  MKO10097516_B_Malsu1
  gRNA
ttcccctcgatcttgacata

SEQ ID NO: 97517 - DNA, 20 bp, Artificial Sequence
  MKO10097517_B_Malt1
  gRNA
aagtggaactgttgttaacc

SEQ ID NO: 97518 - DNA, 20 bp, Artificial Sequence
  MKO10097518_B_Malt1
  gRNA
agaactgagcgacttcctac

SEQ ID NO: 97519 - DNA, 20 bp, Artificial Sequence
  MKO10097519_B_Malt1
  gRNA
agtttgtaaaactgtgctgc

SEQ ID NO: 97520 - DNA, 20 bp, Artificial Sequence
  MKO10097520_B_Mal
  gRNA
cgcaggcatggctccggcag

SEQ ID NO: 97521 - DNA, 20 bp, Artificial Sequence
  MKO10097521_B_Mal
  gRNA
gccaccatctcaatgtttga

SEQ ID NO: 97522 - DNA, 20 bp, Artificial Sequence
  MKO10097522_B_Mal
  gRNA
ctgccacccgaagccgctgc

SEQ ID NO: 97523 - DNA, 20 bp, Artificial Sequence
  MKO10097523_B_Mamdc2
  gRNA
agagcttcgatcgcttgctt

SEQ ID NO: 97524 - DNA, 20 bp, Artificial Sequence
  MKO10097524_B_Mamdc2
  gRNA
gctggaatcccaatgtgaac

SEQ ID NO: 97525 - DNA, 20 bp, Artificial Sequence
  MKO10097525_B_Mamdc2
  gRNA
tcactcaccaatacagtagc

SEQ ID NO: 97526 - DNA, 20 bp, Artificial Sequence
  MKO10097526_B_Mamdc4
  gRNA
gcgttctcctgtcatgcgtg

SEQ ID NO: 97527 - DNA, 20 bp, Artificial Sequence
  MKO10097527_B_Mamdc4
  gRNA
ttgcctagcgactgtgcagc

SEQ ID NO: 97528 - DNA, 20 bp, Artificial Sequence
  MKO10097528_B_Mamdc4
  gRNA
ctgccagctgcacagtcgct

SEQ ID NO: 97529 - DNA, 20 bp, Artificial Sequence
  MKO10097529_B_Maml1
  gRNA
ggaggcgttctggcccacgt

SEQ ID NO: 97530 - DNA, 20 bp, Artificial Sequence
  MKO10097530_B_Maml1
  gRNA
gtgaactgtccaacctgttg

SEQ ID NO: 97531 - DNA, 20 bp, Artificial Sequence
  MKO10097531_B_Maml1
  gRNA
agtaggctgggttcccacac

SEQ ID NO: 97532 - DNA, 20 bp, Artificial Sequence
  MKO10097532_B_Maml2
  gRNA
gggtgcccgtatttcttctt

SEQ ID NO: 97533 - DNA, 20 bp, Artificial Sequence
  MKO10097533_B_Maml2
  gRNA
ccatcatctgctgattcaac

SEQ ID NO: 97534 - DNA, 20 bp, Artificial Sequence
  MKO10097534_B_Maml2
  gRNA
cctgttgaatcagcagatga

SEQ ID NO: 97535 - DNA, 20 bp, Artificial Sequence
  MKO10097535_B_Maml3
  gRNA
cttggctgaccggcttgcaa

SEQ ID NO: 97536 - DNA, 20 bp, Artificial Sequence
  MKO10097536_B_Maml3
  gRNA
gaccatgctgcccgaccccg

SEQ ID NO: 97537 - DNA, 20 bp, Artificial Sequence
  MKO10097537_B_Maml3
  gRNA
cagcaggtcaaccagtttca

SEQ ID NO: 97538 - DNA, 20 bp, Artificial Sequence
  MKO10097538_B_Mamld1
  gRNA
atgtcatccagtagcttatc

SEQ ID NO: 97539 - DNA, 20 bp, Artificial Sequence
  MKO10097539_B_Mamld1
  gRNA
caggtcaaacaatggatgac

SEQ ID NO: 97540 - DNA, 20 bp, Artificial Sequence
  MKO10097540_B_Mamld1
  gRNA
tgtttaggggtcattgccat

SEQ ID NO: 97541 - DNA, 20 bp, Artificial Sequence
  MKO10097541_B_Mamstr
  gRNA
ggctcaggggacaagacgcc

SEQ ID NO: 97542 - DNA, 20 bp, Artificial Sequence
  MKO10097542_B_Mamstr
  gRNA
tgcagtcttgattccgtctg

SEQ ID NO: 97543 - DNA, 20 bp, Artificial Sequence
  MKO10097543_B_Mamstr
  gRNA
accttctttggagccctcca

SEQ ID NO: 97544 - DNA, 20 bp, Artificial Sequence
  MKO10097544_B_Man1a2
  gRNA
taccttaccgaatatgttag

SEQ ID NO: 97545 - DNA, 20 bp, Artificial Sequence
  MKO10097545_B_Man1a2
  gRNA
atgaactaaggcctattgca

SEQ ID NO: 97546 - DNA, 20 bp, Artificial Sequence
  MKO10097546_B_Man1a2
  gRNA
gaagttaacattcgctttat

SEQ ID NO: 97547 - DNA, 20 bp, Artificial Sequence
  MKO10097547_B_Man1a
  gRNA
aatttcaagaagctaaatcg

SEQ ID NO: 97548 - DNA, 20 bp, Artificial Sequence
  MKO10097548_B_Man1a
  gRNA
ctgtcagcctactatttgtc

SEQ ID NO: 97549 - DNA, 20 bp, Artificial Sequence
  MKO10097549_B_Man1a
  gRNA
cctgcatttcatactccctc

SEQ ID NO: 97550 - DNA, 20 bp, Artificial Sequence
  MKO10097550_B_Man1b1
  gRNA
tgtcttaccagcgcctcaga

SEQ ID NO: 97551 - DNA, 20 bp, Artificial Sequence
  MKO10097551_B_Man1b1
  gRNA
attcctgtactctcttcata

SEQ ID NO: 97552 - DNA, 20 bp, Artificial Sequence
  MKO10097552_B_Man1b1
  gRNA
tgccaaaaccagaggtttga

SEQ ID NO: 97553 - DNA, 20 bp, Artificial Sequence
  MKO10097553_B_Man1c1
  gRNA
tttgaagttgaccacgccct

SEQ ID NO: 97554 - DNA, 20 bp, Artificial Sequence
  MKO10097554_B_Man1c1
  gRNA
tctgactcaccacgttcagg

SEQ ID NO: 97555 - DNA, 20 bp, Artificial Sequence
  MKO10097555_B_Man1c1
  gRNA
ccctcaggtgttccgagtga

SEQ ID NO: 97556 - DNA, 20 bp, Artificial Sequence
  MKO10097556_B_Man2a1
  gRNA
ctccctagtttactacagaa

SEQ ID NO: 97557 - DNA, 20 bp, Artificial Sequence
  MKO10097557_B_Man2a1
  gRNA
tattatagatattccgaaga

SEQ ID NO: 97558 - DNA, 20 bp, Artificial Sequence
  MKO10097558_B_Man2a1
  gRNA
tgcttccaaactccaccatc

SEQ ID NO: 97559 - DNA, 20 bp, Artificial Sequence
  MKO10097559_B_Man2a2
  gRNA
ctgccctaccataccgccaa

SEQ ID NO: 97560 - DNA, 20 bp, Artificial Sequence
  MKO10097560_B_Man2a2
  gRNA
cctcactcccacaacgatcc

SEQ ID NO: 97561 - DNA, 20 bp, Artificial Sequence
  MKO10097561_B_Man2a2
  gRNA
aagtctccttcttcgccaag

SEQ ID NO: 97562 - DNA, 20 bp, Artificial Sequence
  MKO10097562_B_Man2b1
  gRNA
cacccgtcgcttcatctatg

SEQ ID NO: 97563 - DNA, 20 bp, Artificial Sequence
  MKO10097563_B_Man2b1
  gRNA
cttgatagtcaatgcgccca

SEQ ID NO: 97564 - DNA, 20 bp, Artificial Sequence
  MKO10097564_B_Man2b1
  gRNA
actcactgccgtaatagtat

SEQ ID NO: 97565 - DNA, 20 bp, Artificial Sequence
  MKO10097565_B_Man2b2
  gRNA
gtcgttgctgatgcaccgaa

SEQ ID NO: 97566 - DNA, 20 bp, Artificial Sequence
  MKO10097566_B_Man2b2
  gRNA
ggaaatcttcactcacgtca

SEQ ID NO: 97567 - DNA, 20 bp, Artificial Sequence
  MKO10097567_B_Man2b2
  gRNA
cgcctggagtttgttctcgg

SEQ ID NO: 97568 - DNA, 20 bp, Artificial Sequence
  MKO10097568_B_Man2c1
  gRNA
ccagcttcctgacgcccgag

SEQ ID NO: 97569 - DNA, 20 bp, Artificial Sequence
  MKO10097569_B_Man2c1
  gRNA
gttccccatcacgccagaca

SEQ ID NO: 97570 - DNA, 20 bp, Artificial Sequence
  MKO10097570_B_Man2c1
  gRNA
tgcgagcatcagaccctcgg

SEQ ID NO: 97571 - DNA, 20 bp, Artificial Sequence
  MKO10097571_B_Manbal
  gRNA
cctcttgttggtggaagcga

SEQ ID NO: 97572 - DNA, 20 bp, Artificial Sequence
  MKO10097572_B_Manbal
  gRNA
gaatgggtacgatgatggcc

SEQ ID NO: 97573 - DNA, 20 bp, Artificial Sequence
  MKO10097573_B_Manbal
  gRNA
aggtgagaagcccaggtcgg

SEQ ID NO: 97574 - DNA, 20 bp, Artificial Sequence
  MKO10097574_B_Manba
  gRNA
ctgttcaacaatgtcaccat

SEQ ID NO: 97575 - DNA, 20 bp, Artificial Sequence
  MKO10097575_B_Manba
  gRNA
atccagatgagcaatgttat

SEQ ID NO: 97576 - DNA, 20 bp, Artificial Sequence
  MKO10097576_B_Manba
  gRNA
ttaaaatcccctttaatctc

SEQ ID NO: 97577 - DNA, 20 bp, Artificial Sequence
  MKO10097577_B_Maneal
  gRNA
gtggcggccacgcgggtaac

SEQ ID NO: 97578 - DNA, 20 bp, Artificial Sequence
  MKO10097578_B_Maneal
  gRNA
gatgtcatcccggcccttgt

SEQ ID NO: 97579 - DNA, 20 bp, Artificial Sequence
  MKO10097579_B_Maneal
  gRNA
tgatgtacttgatgttgtcg

SEQ ID NO: 97580 - DNA, 20 bp, Artificial Sequence
  MKO10097580_B_Manea
  gRNA
tagatacaagcatccgacca

SEQ ID NO: 97581 - DNA, 20 bp, Artificial Sequence
  MKO10097581_B_Manea
  gRNA
cctgattcaagggatgacaa

SEQ ID NO: 97582 - DNA, 20 bp, Artificial Sequence
  MKO10097582_B_Manea
  gRNA
tgatcatctcgattgctata

SEQ ID NO: 97583 - DNA, 20 bp, Artificial Sequence
  MKO10097583_B_Manf
  gRNA
ttgctgcagtgctactacat

SEQ ID NO: 97584 - DNA, 20 bp, Artificial Sequence
  MKO10097584_B_Manf
  gRNA
cgacacctcattgatgatct

SEQ ID NO: 97585 - DNA, 20 bp, Artificial Sequence
  MKO10097585_B_Manf
  gRNA
tgagcgtgctgcctgacagc

SEQ ID NO: 97586 - DNA, 20 bp, Artificial Sequence
  MKO10097586_B_Mansc1
  gRNA
atccaatcgtcgctttcaaa

SEQ ID NO: 97587 - DNA, 20 bp, Artificial Sequence
  MKO10097587_B_Mansc1
  gRNA
atttgatgatctttgacacc

SEQ ID NO: 97588 - DNA, 20 bp, Artificial Sequence
  MKO10097588_B_Mansc1
  gRNA
cctcgctgggacagaaaaac

SEQ ID NO: 97589 - DNA, 20 bp, Artificial Sequence
  MKO10097589_B_Mansc4
  gRNA
cgctctcaccatccttccgg

SEQ ID NO: 97590 - DNA, 20 bp, Artificial Sequence
  MKO10097590_B_Mansc4
  gRNA
gaaggcagttgacattgtcg

SEQ ID NO: 97591 - DNA, 20 bp, Artificial Sequence
  MKO10097591_B_Mansc4
  gRNA
atactgtataacataacagc

SEQ ID NO: 97592 - DNA, 20 bp, Artificial Sequence
  MKO10097592_B_Maoa
  gRNA
gggaaaacttacccattccg

SEQ ID NO: 97593 - DNA, 20 bp, Artificial Sequence
  MKO10097593_B_Maoa
  gRNA
agatccctgttgatgcacca

SEQ ID NO: 97594 - DNA, 20 bp, Artificial Sequence
  MKO10097594_B_Maoa
  gRNA
ctggaagcccgggatagagt

SEQ ID NO: 97595 - DNA, 20 bp, Artificial Sequence
  MKO10097595_B_Maob
  gRNA
acctagataataacaacctc

SEQ ID NO: 97596 - DNA, 20 bp, Artificial Sequence
  MKO10097596_B_Maob
  gRNA
gaggcaggacttacacaatt

SEQ ID NO: 97597 - DNA, 20 bp, Artificial Sequence
  MKO10097597_B_Maob
  gRNA
aattgctagataagatctgc

SEQ ID NO: 97598 - DNA, 20 bp, Artificial Sequence
  MKO10097598_B_Map10
  gRNA
gccgctgctcgtcttcccgc

SEQ ID NO: 97599 - DNA, 20 bp, Artificial Sequence
  MKO10097599_B_Map10
  gRNA
gccggcgggaagacgagcag

SEQ ID NO: 97600 - DNA, 20 bp, Artificial Sequence
  MKO10097600_B_Map10
  gRNA
catcagcttcgggcgcggca

SEQ ID NO: 97601 - DNA, 20 bp, Artificial Sequence
  MKO10097601_B_Map1a
  gRNA
agtcacctccgtatcatgag

SEQ ID NO: 97602 - DNA, 20 bp, Artificial Sequence
  MKO10097602_B_Map1a
  gRNA
cctgaaggttctccccccat

SEQ ID NO: 97603 - DNA, 20 bp, Artificial Sequence
  MKO10097603_B_Map1a
  gRNA
acagcagcaactgaacgtcc

SEQ ID NO: 97604 - DNA, 20 bp, Artificial Sequence
  MKO10097604_B_Map1b
  gRNA
tcaggtttgtgtcccacgat

SEQ ID NO: 97605 - DNA, 20 bp, Artificial Sequence
  MKO10097605_B_Map1b
  gRNA
cctccacagggatccgatcg

SEQ ID NO: 97606 - DNA, 20 bp, Artificial Sequence
  MKO10097606_B_Map1b
  gRNA
ctgtttctaagacgtcactt

SEQ ID NO: 97607 - DNA, 20 bp, Artificial Sequence
  MKO10097607_B_Map1lc3a
  gRNA
ggtgatcatcgagcgctaca

SEQ ID NO: 97608 - DNA, 20 bp, Artificial Sequence
  MKO10097608_B_Map1lc3a
  gRNA
gagactcaccgggatcttac

SEQ ID NO: 97609 - DNA, 20 bp, Artificial Sequence
  MKO10097609_B_Map1lc3a
  gRNA
ccatgttaacatgagcgagt

SEQ ID NO: 97610 - DNA, 20 bp, Artificial Sequence
  MKO10097610_B_Map1lc3b
  gRNA
aaagctccggcgctgcttga

SEQ ID NO: 97611 - DNA, 20 bp, Artificial Sequence
  MKO10097611_B_Map1lc3b
  gRNA
agaagaccttcaagcagcgc

SEQ ID NO: 97612 - DNA, 20 bp, Artificial Sequence
  MKO10097612_B_Map1lc3b
  gRNA
tgagctcgctcatgttcacg

SEQ ID NO: 97613 - DNA, 20 bp, Artificial Sequence
  MKO10097613_B_Map1s
  gRNA
tgcctgcaggtgttcgctcc

SEQ ID NO: 97614 - DNA, 20 bp, Artificial Sequence
  MKO10097614_B_Map1s
  gRNA
cagcggagcctgcaccaccg

SEQ ID NO: 97615 - DNA, 20 bp, Artificial Sequence
  MKO10097615_B_Map1s
  gRNA
cggggtccatcaggaggttc

SEQ ID NO: 97616 - DNA, 20 bp, Artificial Sequence
  MKO10097616_B_Map2k1
  gRNA
caacggtggagtggtcttca

SEQ ID NO: 97617 - DNA, 20 bp, Artificial Sequence
  MKO10097617_B_Map2k1
  gRNA
tcggggcaggaccaacctgg

SEQ ID NO: 97618 - DNA, 20 bp, Artificial Sequence
  MKO10097618_B_Map2k1
  gRNA
taaaaggcctgacctatctt

SEQ ID NO: 97619 - DNA, 20 bp, Artificial Sequence
  MKO10097619_B_Map2k2
  gRNA
tggtcaccaaggcccggcat

SEQ ID NO: 97620 - DNA, 20 bp, Artificial Sequence
  MKO10097620_B_Map2k2
  gRNA
gcttacctctgtgcatgatc

SEQ ID NO: 97621 - DNA, 20 bp, Artificial Sequence
  MKO10097621_B_Map2k2
  gRNA
gcttctctcggaggtaggcc

SEQ ID NO: 97622 - DNA, 20 bp, Artificial Sequence
  MKO10097622_B_Map2k3
  gRNA
tgctcagagtggtaccatca

SEQ ID NO: 97623 - DNA, 20 bp, Artificial Sequence
  MKO10097623_B_Map2k3
  gRNA
gcctcttaagaacttcgaag

SEQ ID NO: 97624 - DNA, 20 bp, Artificial Sequence
  MKO10097624_B_Map2k3
  gRNA
ccgtgcgcatgttgatgtct

SEQ ID NO: 97625 - DNA, 20 bp, Artificial Sequence
  MKO10097625_B_Map2k4
  gRNA
tgtgttagatgacgttattc

SEQ ID NO: 97626 - DNA, 20 bp, Artificial Sequence
  MKO10097626_B_Map2k4
  gRNA
ccagagaattcggtcaactg

SEQ ID NO: 97627 - DNA, 20 bp, Artificial Sequence
  MKO10097627_B_Map2k4
  gRNA
actgccattatctgcccact

SEQ ID NO: 97628 - DNA, 20 bp, Artificial Sequence
  MKO10097628_B_Map2k5
  gRNA
ccgctgcagatatttccaag

SEQ ID NO: 97629 - DNA, 20 bp, Artificial Sequence
  MKO10097629_B_Map2k5
  gRNA
tgtttaggatgtgataggcc

SEQ ID NO: 97630 - DNA, 20 bp, Artificial Sequence
  MKO10097630_B_Map2k5
  gRNA
cctcttggaaatatctgcag

SEQ ID NO: 97631 - DNA, 20 bp, Artificial Sequence
  MKO10097631_B_Map2k6
  gRNA
acgggccacagttaatagcc

SEQ ID NO: 97632 - DNA, 20 bp, Artificial Sequence
  MKO10097632_B_Map2k6
  gRNA
agctgggacgaggtgcgtac

SEQ ID NO: 97633 - DNA, 20 bp, Artificial Sequence
  MKO10097633_B_Map2k6
  gRNA
gcctcgggatttagactcca

SEQ ID NO: 97634 - DNA, 20 bp, Artificial Sequence
  MKO10097634_B_Map2k7
  gRNA
gaagatggcggcgtcctccc

SEQ ID NO: 97635 - DNA, 20 bp, Artificial Sequence
  MKO10097635_B_Map2k7
  gRNA
agaaccgtgaggcccgcagg

SEQ ID NO: 97636 - DNA, 20 bp, Artificial Sequence
  MKO10097636_B_Map2k7
  gRNA
tcaggcagaaatcaatgact

SEQ ID NO: 97637 - DNA, 20 bp, Artificial Sequence
  MKO10097637_B_Map2
  gRNA
gtttgttctgaggctggcga

SEQ ID NO: 97638 - DNA, 20 bp, Artificial Sequence
  MKO10097638_B_Map2
  gRNA
gaagctgtagcagtcctgaa

SEQ ID NO: 97639 - DNA, 20 bp, Artificial Sequence
  MKO10097639_B_Map2
  gRNA
aacagcagcaagtggtgact

SEQ ID NO: 97640 - DNA, 20 bp, Artificial Sequence
  MKO10097640_B_Map3k10
  gRNA
ggagctattgcgggctgcac

SEQ ID NO: 97641 - DNA, 20 bp, Artificial Sequence
  MKO10097641_B_Map3k10
  gRNA
gaaccacaacctcgctgaca

SEQ ID NO: 97642 - DNA, 20 bp, Artificial Sequence
  MKO10097642_B_Map3k10
  gRNA
gcccagggtccgaaaacgca

SEQ ID NO: 97643 - DNA, 20 bp, Artificial Sequence
  MKO10097643_B_Map3k11
  gRNA
ttccatgtcgtcaccctcga

SEQ ID NO: 97644 - DNA, 20 bp, Artificial Sequence
  MKO10097644_B_Map3k11
  gRNA
cggcaagacagtcgatgcca

SEQ ID NO: 97645 - DNA, 20 bp, Artificial Sequence
  MKO10097645_B_Map3k11
  gRNA
aggtgcccgcagcactcatc

SEQ ID NO: 97646 - DNA, 20 bp, Artificial Sequence
  MKO10097646_B_Map3k12
  gRNA
cctcaaaggggacttcccaa

SEQ ID NO: 97647 - DNA, 20 bp, Artificial Sequence
  MKO10097647_B_Map3k12
  gRNA
cctttgggaagtcccctttg

SEQ ID NO: 97648 - DNA, 20 bp, Artificial Sequence
  MKO10097648_B_Map3k12
  gRNA
tgaggaatctacatctttgt

SEQ ID NO: 97649 - DNA, 20 bp, Artificial Sequence
  MKO10097649_B_Map3k13
  gRNA
tttgaatccatccgggcaag

SEQ ID NO: 97650 - DNA, 20 bp, Artificial Sequence
  MKO10097650_B_Map3k13
  gRNA
ctctggtgccatccacgcga

SEQ ID NO: 97651 - DNA, 20 bp, Artificial Sequence
  MKO10097651_B_Map3k13
  gRNA
gctgccgacaccccaaatga

SEQ ID NO: 97652 - DNA, 20 bp, Artificial Sequence
  MKO10097652_B_Map3k14
  gRNA
tctcgatactcataatccac

SEQ ID NO: 97653 - DNA, 20 bp, Artificial Sequence
  MKO10097653_B_Map3k14
  gRNA
gatgaaaatgcgctctgaga

SEQ ID NO: 97654 - DNA, 20 bp, Artificial Sequence
  MKO10097654_B_Map3k14
  gRNA
gagctgtaccatcccagtac

SEQ ID NO: 97655 - DNA, 20 bp, Artificial Sequence
  MKO10097655_B_Map3k15
  gRNA
ctttcgccagttcatcacct

SEQ ID NO: 97656 - DNA, 20 bp, Artificial Sequence
  MKO10097656_B_Map3k15
  gRNA
tagccatgtcaaaactctct

SEQ ID NO: 97657 - DNA, 20 bp, Artificial Sequence
  MKO10097657_B_Map3k15
  gRNA
gatatcactcatgtccacaa

SEQ ID NO: 97658 - DNA, 20 bp, Artificial Sequence
  MKO10097658_B_Map3k19
  gRNA
gattattgtgacgtttccac

SEQ ID NO: 97659 - DNA, 20 bp, Artificial Sequence
  MKO10097659_B_Map3k19
  gRNA
ccttccctagccaatatgaa

SEQ ID NO: 97660 - DNA, 20 bp, Artificial Sequence
  MKO10097660_B_Map3k19
  gRNA
actgcttgacatctgtcatg

SEQ ID NO: 97661 - DNA, 20 bp, Artificial Sequence
  MKO10097661_B_Map3k1
  gRNA
tgcccgcctggaagcacgag

SEQ ID NO: 97662 - DNA, 20 bp, Artificial Sequence
  MKO10097662_B_Map3k1
  gRNA
ctctcatcactttgttcacg

SEQ ID NO: 97663 - DNA, 20 bp, Artificial Sequence
  MKO10097663_B_Map3k1
  gRNA
aatgatccgggagaagctca

SEQ ID NO: 97664 - DNA, 20 bp, Artificial Sequence
  MKO10097664_B_Map3k2
  gRNA
cgagtcaaatttgaacatag

SEQ ID NO: 97665 - DNA, 20 bp, Artificial Sequence
  MKO10097665_B_Map3k2
  gRNA
ctgtccttcataaggccagt

SEQ ID NO: 97666 - DNA, 20 bp, Artificial Sequence
  MKO10097666_B_Map3k2
  gRNA
gttaactacccaagatgact

SEQ ID NO: 97667 - DNA, 20 bp, Artificial Sequence
  MKO10097667_B_Map3k3
  gRNA
atacgaagatgtggagcaca

SEQ ID NO: 97668 - DNA, 20 bp, Artificial Sequence
  MKO10097668_B_Map3k3
  gRNA
agaatcaagtttgaacacaa

SEQ ID NO: 97669 - DNA, 20 bp, Artificial Sequence
  MKO10097669_B_Map3k3
  gRNA
gctcaagtatgaaaagcctt

SEQ ID NO: 97670 - DNA, 20 bp, Artificial Sequence
  MKO10097670_B_Map3k4
  gRNA
gacaggcgtttcatctgtcg

SEQ ID NO: 97671 - DNA, 20 bp, Artificial Sequence
  MKO10097671_B_Map3k4
  gRNA
actcgtggatcacgttcagc

SEQ ID NO: 97672 - DNA, 20 bp, Artificial Sequence
  MKO10097672_B_Map3k4
  gRNA
gctagtgcgagagtgtaaag

SEQ ID NO: 97673 - DNA, 20 bp, Artificial Sequence
  MKO10097673_B_Map3k5
  gRNA
tttcctgatatcgctgagta

SEQ ID NO: 97674 - DNA, 20 bp, Artificial Sequence
  MKO10097674_B_Map3k5
  gRNA
aatccatactcagcgatatc

SEQ ID NO: 97675 - DNA, 20 bp, Artificial Sequence
  MKO10097675_B_Map3k5
  gRNA
cgggggttaccttcagggac

SEQ ID NO: 97676 - DNA, 20 bp, Artificial Sequence
  MKO10097676_B_Map3k6
  gRNA
tgaagctctcacgcacgccg

SEQ ID NO: 97677 - DNA, 20 bp, Artificial Sequence
  MKO10097677_B_Map3k6
  gRNA
gggccggcttgtccgtctgt

SEQ ID NO: 97678 - DNA, 20 bp, Artificial Sequence
  MKO10097678_B_Map3k6
  gRNA
gtccacagatgtagtggtgc

SEQ ID NO: 97679 - DNA, 20 bp, Artificial Sequence
  MKO10097679_B_Map3k7cl
  gRNA
tttagcctcaatgatgcccc

SEQ ID NO: 97680 - DNA, 20 bp, Artificial Sequence
  MKO10097680_B_Map3k7cl
  gRNA
gtctcagtgtgtagagcaac

SEQ ID NO: 97681 - DNA, 20 bp, Artificial Sequence
  MKO10097681_B_Map3k7cl
  gRNA
ggagaaccggacgctgaaga

SEQ ID NO: 97682 - DNA, 20 bp, Artificial Sequence
  MKO10097682_B_Map3k7
  gRNA
gagtagtttgcaaagctaag

SEQ ID NO: 97683 - DNA, 20 bp, Artificial Sequence
  MKO10097683_B_Map3k7
  gRNA
ttaactcaggttgtcggaag

SEQ ID NO: 97684 - DNA, 20 bp, Artificial Sequence
  MKO10097684_B_Map3k7
  gRNA
gaggggggctcattgtataa

SEQ ID NO: 97685 - DNA, 20 bp, Artificial Sequence
  MKO10097685_B_Map3k8
  gRNA
ctctggtttcgttcctcggg

SEQ ID NO: 97686 - DNA, 20 bp, Artificial Sequence
  MKO10097686_B_Map3k8
  gRNA
gcctggatttccacatccga

SEQ ID NO: 97687 - DNA, 20 bp, Artificial Sequence
  MKO10097687_B_Map3k8
  gRNA
ttgtggaatggccccgacat

SEQ ID NO: 97688 - DNA, 20 bp, Artificial Sequence
  MKO10097688_B_Map3k9
  gRNA
cccatctttcacgagtatcc

SEQ ID NO: 97689 - DNA, 20 bp, Artificial Sequence
  MKO10097689_B_Map3k9
  gRNA
agctcgtcacgaccctgatg

SEQ ID NO: 97690 - DNA, 20 bp, Artificial Sequence
  MKO10097690_B_Map3k9
  gRNA
ccggaccaccaagatgagtg

SEQ ID NO: 97691 - DNA, 20 bp, Artificial Sequence
  MKO10097691_B_Map4k1
  gRNA
tctaaccttggtagatgtcc

SEQ ID NO: 97692 - DNA, 20 bp, Artificial Sequence
  MKO10097692_B_Map4k1
  gRNA
tccagatcagctatgtgtgc

SEQ ID NO: 97693 - DNA, 20 bp, Artificial Sequence
  MKO10097693_B_Map4k1
  gRNA
ttctcacctgaagcacttcc

SEQ ID NO: 97694 - DNA, 20 bp, Artificial Sequence
  MKO10097694_B_Map4k2
  gRNA
atgccgccaccccaatgtcg

SEQ ID NO: 97695 - DNA, 20 bp, Artificial Sequence
  MKO10097695_B_Map4k2
  gRNA
ggcagattgcctatgtttgc

SEQ ID NO: 97696 - DNA, 20 bp, Artificial Sequence
  MKO10097696_B_Map4k2
  gRNA
cctgaggtagctgccgatgt

SEQ ID NO: 97697 - DNA, 20 bp, Artificial Sequence
  MKO10097697_B_Map4k3
  gRNA
tgttagcagagaaactctac

SEQ ID NO: 97698 - DNA, 20 bp, Artificial Sequence
  MKO10097698_B_Map4k3
  gRNA
ccaaaataagcaacaatgtt

SEQ ID NO: 97699 - DNA, 20 bp, Artificial Sequence
  MKO10097699_B_Map4k3
  gRNA
ccaaacattgttgcttattt

SEQ ID NO: 97700 - DNA, 20 bp, Artificial Sequence
  MKO10097700_B_Map4k4
  gRNA
aatgaaagcaccatagtacg

SEQ ID NO: 97701 - DNA, 20 bp, Artificial Sequence
  MKO10097701_B_Map4k4
  gRNA
ccttaccctgaggatttccc

SEQ ID NO: 97702 - DNA, 20 bp, Artificial Sequence
  MKO10097702_B_Map4k4
  gRNA
gaccttgtgaagaacaccaa

SEQ ID NO: 97703 - DNA, 20 bp, Artificial Sequence
  MKO10097703_B_Map4k5
  gRNA
tcacttcaagatatctatca

SEQ ID NO: 97704 - DNA, 20 bp, Artificial Sequence
  MKO10097704_B_Map4k5
  gRNA
taggccagaaatgtacatac

SEQ ID NO: 97705 - DNA, 20 bp, Artificial Sequence
  MKO10097705_B_Map4k5
  gRNA
taaggtctctctgcagacgt

SEQ ID NO: 97706 - DNA, 20 bp, Artificial Sequence
  MKO10097706_B_Map4
  gRNA
ttctggctgctctgataatc

SEQ ID NO: 97707 - DNA, 20 bp, Artificial Sequence
  MKO10097707_B_Map4
  gRNA
gcaagtgttagatactgacc

SEQ ID NO: 97708 - DNA, 20 bp, Artificial Sequence
  MKO10097708_B_Map4
  gRNA
atggaggggaataacactgc

SEQ ID NO: 97709 - DNA, 20 bp, Artificial Sequence
  MKO10097709_B_Map6d1
  gRNA
gcttcactccagtccaagct

SEQ ID NO: 97710 - DNA, 20 bp, Artificial Sequence
  MKO10097710_B_Map6d1
  gRNA
ggtgtgaatttcctcacctc

SEQ ID NO: 97711 - DNA, 20 bp, Artificial Sequence
  MKO10097711_B_Map6d1
  gRNA
ggtcacacattgagagtctg

SEQ ID NO: 97712 - DNA, 20 bp, Artificial Sequence
  MKO10097712_B_Map6
  gRNA
accttcgggcattccttgaa

SEQ ID NO: 97713 - DNA, 20 bp, Artificial Sequence
  MKO10097713_B_Map6
  gRNA
tgggggtttatggctcgttg

SEQ ID NO: 97714 - DNA, 20 bp, Artificial Sequence
  MKO10097714_B_Map6
  gRNA
tgctaccaaacccgacgaca

SEQ ID NO: 97715 - DNA, 20 bp, Artificial Sequence
  MKO10097715_B_Map7d1
  gRNA
tcccaccttagcggccaaga

SEQ ID NO: 97716 - DNA, 20 bp, Artificial Sequence
  MKO10097716_B_Map7d1
  gRNA
ccaagagccaagaccgtctc

SEQ ID NO: 97717 - DNA, 20 bp, Artificial Sequence
  MKO10097717_B_Map7d1
  gRNA
accaaggctgacatcggtgt

SEQ ID NO: 97718 - DNA, 20 bp, Artificial Sequence
  MKO10097718_B_Map7d2
  gRNA
ccctcttctgatcctcccgt

SEQ ID NO: 97719 - DNA, 20 bp, Artificial Sequence
  MKO10097719_B_Map7d2
  gRNA
gtgctggttgctaaagttag

SEQ ID NO: 97720 - DNA, 20 bp, Artificial Sequence
  MKO10097720_B_Map7d2
  gRNA
aacttgaggagcagcgccaa

SEQ ID NO: 97721 - DNA, 20 bp, Artificial Sequence
  MKO10097721_B_Map7
  gRNA
aagctgcacgagaaaccgtc

SEQ ID NO: 97722 - DNA, 20 bp, Artificial Sequence
  MKO10097722_B_Map7
  gRNA
tccgctcctccttcagccgt

SEQ ID NO: 97723 - DNA, 20 bp, Artificial Sequence
  MKO10097723_B_Map7
  gRNA
gccatgaagctgttgtccga

SEQ ID NO: 97724 - DNA, 20 bp, Artificial Sequence
  MKO10097724_B_Map9
  gRNA
gtattcggaacttctctgcc

SEQ ID NO: 97725 - DNA, 20 bp, Artificial Sequence
  MKO10097725_B_Map9
  gRNA
gccttcgctgcccggagtgc

SEQ ID NO: 97726 - DNA, 20 bp, Artificial Sequence
  MKO10097726_B_Map9
  gRNA
gactttgacagtgacgagat

SEQ ID NO: 97727 - DNA, 20 bp, Artificial Sequence
  MKO10097727_B_Mapk10
  gRNA
ctactgcagtgaaccaacct

SEQ ID NO: 97728 - DNA, 20 bp, Artificial Sequence
  MKO10097728_B_Mapk10
  gRNA
tatggttcacacacttcatg

SEQ ID NO: 97729 - DNA, 20 bp, Artificial Sequence
  MKO10097729_B_Mapk10
  gRNA
cactgcagtagtataagaaa

SEQ ID NO: 97730 - DNA, 20 bp, Artificial Sequence
  MKO10097730_B_Mapk11
  gRNA
cgcccatcagggtcgtcacg

SEQ ID NO: 97731 - DNA, 20 bp, Artificial Sequence
  MKO10097731_B_Mapk11
  gRNA
cacgccggccacatccatcg

SEQ ID NO: 97732 - DNA, 20 bp, Artificial Sequence
  MKO10097732_B_Mapk11
  gRNA
attgaacatgctcatcgctc

SEQ ID NO: 97733 - DNA, 20 bp, Artificial Sequence
  MKO10097733_B_Mapk12
  gRNA
ctacctggtgatgccattca

SEQ ID NO: 97734 - DNA, 20 bp, Artificial Sequence
  MKO10097734_B_Mapk12
  gRNA
tctcgtggcgcatgtgtttg

SEQ ID NO: 97735 - DNA, 20 bp, Artificial Sequence
  MKO10097735_B_Mapk12
  gRNA
gttcacacctgatgagtctc

SEQ ID NO: 97736 - DNA, 20 bp, Artificial Sequence
  MKO10097736_B_Mapk13
  gRNA
acaaatcatggaagctccga

SEQ ID NO: 97737 - DNA, 20 bp, Artificial Sequence
  MKO10097737_B_Mapk13
  gRNA
gatggaattcagcgaggata

SEQ ID NO: 97738 - DNA, 20 bp, Artificial Sequence
  MKO10097738_B_Mapk13
  gRNA
caccctgtggacgatgccag

SEQ ID NO: 97739 - DNA, 20 bp, Artificial Sequence
  MKO10097739_B_Mapk14
  gRNA
gaattcctccagtgaccttg

SEQ ID NO: 97740 - DNA, 20 bp, Artificial Sequence
  MKO10097740_B_Mapk14
  gRNA
cccccatgagatgggtcacc

SEQ ID NO: 97741 - DNA, 20 bp, Artificial Sequence
  MKO10097741_B_Mapk14
  gRNA
ctcatctaccagatcctccg

SEQ ID NO: 97742 - DNA, 20 bp, Artificial Sequence
  MKO10097742_B_Mapk15
  gRNA
ccgtgagattatgcttctca

SEQ ID NO: 97743 - DNA, 20 bp, Artificial Sequence
  MKO10097743_B_Mapk15
  gRNA
atatccctgtcattcttcgc

SEQ ID NO: 97744 - DNA, 20 bp, Artificial Sequence
  MKO10097744_B_Mapk15
  gRNA
ccattacctgagcatctatc

SEQ ID NO: 97745 - DNA, 20 bp, Artificial Sequence
  MKO10097745_B_Mapk1ip1l
  gRNA
acacttacgtgggggccacc

SEQ ID NO: 97746 - DNA, 20 bp, Artificial Sequence
  MKO10097746_B_Mapk1ip1l
  gRNA
ggagcacttgggttactcca

SEQ ID NO: 97747 - DNA, 20 bp, Artificial Sequence
  MKO10097747_B_Mapk1ip1l
  gRNA
ggtcctgggggtggtccggt

SEQ ID NO: 97748 - DNA, 20 bp, Artificial Sequence
  MKO10097748_B_Mapk1ip1
  gRNA
ccatcgtgtccccaacccag

SEQ ID NO: 97749 - DNA, 20 bp, Artificial Sequence
  MKO10097749_B_Mapk1ip1
  gRNA
gatcctggtagtagtctagc

SEQ ID NO: 97750 - DNA, 20 bp, Artificial Sequence
  MKO10097750_B_Mapk1ip1
  gRNA
ggccagggactcgtacagca

SEQ ID NO: 97751 - DNA, 20 bp, Artificial Sequence
  MKO10097751_B_Mapk1
  gRNA
tgttggatagcatctctgcc

SEQ ID NO: 97752 - DNA, 20 bp, Artificial Sequence
  MKO10097752_B_Mapk1
  gRNA
gaacaccacttgtgatctca

SEQ ID NO: 97753 - DNA, 20 bp, Artificial Sequence
  MKO10097753_B_Mapk1
  gRNA
aaccctgtgtgatcatgatc

SEQ ID NO: 97754 - DNA, 20 bp, Artificial Sequence
  MKO10097754_B_Mapk3
  gRNA
cgtgctcagggtcagcaatc

SEQ ID NO: 97755 - DNA, 20 bp, Artificial Sequence
  MKO10097755_B_Mapk3
  gRNA
gaccctgagcacgaccacac

SEQ ID NO: 97756 - DNA, 20 bp, Artificial Sequence
  MKO10097756_B_Mapk3
  gRNA
tggctgagatgctctccaac

SEQ ID NO: 97757 - DNA, 20 bp, Artificial Sequence
  MKO10097757_B_Mapk4
  gRNA
acaacaccctttccgcattg

SEQ ID NO: 97758 - DNA, 20 bp, Artificial Sequence
  MKO10097758_B_Mapk4
  gRNA
gccagctgcccacatatcga

SEQ ID NO: 97759 - DNA, 20 bp, Artificial Sequence
  MKO10097759_B_Mapk4
  gRNA
acacaaaagccatcgatatg

SEQ ID NO: 97760 - DNA, 20 bp, Artificial Sequence
  MKO10097760_B_Mapk6
  gRNA
cttgagatgggctcatccgt

SEQ ID NO: 97761 - DNA, 20 bp, Artificial Sequence
  MKO10097761_B_Mapk6
  gRNA
ataccttctcggctgatccc

SEQ ID NO: 97762 - DNA, 20 bp, Artificial Sequence
  MKO10097762_B_Mapk6
  gRNA
cgatcctcctcgtgcacaac

SEQ ID NO: 97763 - DNA, 20 bp, Artificial Sequence
  MKO10097763_B_Mapk7
  gRNA
ttccctgcacgagtatacgc

SEQ ID NO: 97764 - DNA, 20 bp, Artificial Sequence
  MKO10097764_B_Mapk7
  gRNA
cagcccactagtactcctac

SEQ ID NO: 97765 - DNA, 20 bp, Artificial Sequence
  MKO10097765_B_Mapk7
  gRNA
cagctccctgagggtccgtt

SEQ ID NO: 97766 - DNA, 20 bp, Artificial Sequence
  MKO10097766_B_Mapk8ip1
  gRNA
atcctggttggactccgctt

SEQ ID NO: 97767 - DNA, 20 bp, Artificial Sequence
  MKO10097767_B_Mapk8ip1
  gRNA
actcgtcagtgatctccgaa

SEQ ID NO: 97768 - DNA, 20 bp, Artificial Sequence
  MKO10097768_B_Mapk8ip1
  gRNA
cagcccttacccggagagac

SEQ ID NO: 97769 - DNA, 20 bp, Artificial Sequence
  MKO10097769_B_Mapk8ip2
  gRNA
cctgggccttagctacgact

SEQ ID NO: 97770 - DNA, 20 bp, Artificial Sequence
  MKO10097770_B_Mapk8ip2
  gRNA
tgtgctgcgttcgccagccc

SEQ ID NO: 97771 - DNA, 20 bp, Artificial Sequence
  MKO10097771_B_Mapk8ip2
  gRNA
tgagatgatcgacgacaacg

SEQ ID NO: 97772 - DNA, 20 bp, Artificial Sequence
  MKO10097772_B_Mapk8ip3
  gRNA
ccacctacctccgcccgggc

SEQ ID NO: 97773 - DNA, 20 bp, Artificial Sequence
  MKO10097773_B_Mapk8ip3
  gRNA
acagatgatccagacctatg

SEQ ID NO: 97774 - DNA, 20 bp, Artificial Sequence
  MKO10097774_B_Mapk8ip3
  gRNA
gaaactcataatgttctacc

SEQ ID NO: 97775 - DNA, 20 bp, Artificial Sequence
  MKO10097775_B_Mapk8
  gRNA
ctaactccatctgaatcact

SEQ ID NO: 97776 - DNA, 20 bp, Artificial Sequence
  MKO10097776_B_Mapk8
  gRNA
atcaagcaccttcactctgc

SEQ ID NO: 97777 - DNA, 20 bp, Artificial Sequence
  MKO10097777_B_Mapk8
  gRNA
gcatgggtctgattctgaaa

SEQ ID NO: 97778 - DNA, 20 bp, Artificial Sequence
  MKO10097778_B_Mapk9
  gRNA
aggctctctttgcgtgcgtt

SEQ ID NO: 97779 - DNA, 20 bp, Artificial Sequence
  MKO10097779_B_Mapk9
  gRNA
aatggatgctaacttatgtc

SEQ ID NO: 97780 - DNA, 20 bp, Artificial Sequence
  MKO10097780_B_Mapk9
  gRNA
tatgattgacacactttaag

SEQ ID NO: 97781 - DNA, 20 bp, Artificial Sequence
  MKO10097781_B_Mapkap1
  gRNA
gccaacagatgagcccgatg

SEQ ID NO: 97782 - DNA, 20 bp, Artificial Sequence
  MKO10097782_B_Mapkap1
  gRNA
ctccaggcgtacagacaata

SEQ ID NO: 97783 - DNA, 20 bp, Artificial Sequence
  MKO10097783_B_Mapkap1
  gRNA
aatgagcccattcataagtt

SEQ ID NO: 97784 - DNA, 20 bp, Artificial Sequence
  MKO10097784_B_Mapkapk2
  gRNA
cccacacattgtgcacatcg

SEQ ID NO: 97785 - DNA, 20 bp, Artificial Sequence
  MKO10097785_B_Mapkapk2
  gRNA
agagctctttagtcgaatcc

SEQ ID NO: 97786 - DNA, 20 bp, Artificial Sequence
  MKO10097786_B_Mapkapk2
  gRNA
actcgatcaacattgctcac

SEQ ID NO: 97787 - DNA, 20 bp, Artificial Sequence
  MKO10097787_B_Mapkapk3
  gRNA
gtacttaaactcaccgattt

SEQ ID NO: 97788 - DNA, 20 bp, Artificial Sequence
  MKO10097788_B_Mapkapk3
  gRNA
ctgctacactccctattatg

SEQ ID NO: 97789 - DNA, 20 bp, Artificial Sequence
  MKO10097789_B_Mapkapk3
  gRNA
cattgcccaccgagatgtca

SEQ ID NO: 97790 - DNA, 20 bp, Artificial Sequence
  MKO10097790_B_Mapkapk5
  gRNA
cagtgcaaaccgttcttgag

SEQ ID NO: 97791 - DNA, 20 bp, Artificial Sequence
  MKO10097791_B_Mapkapk5
  gRNA
tccctcatgagtccagcccc

SEQ ID NO: 97792 - DNA, 20 bp, Artificial Sequence
  MKO10097792_B_Mapkapk5
  gRNA
gtgtggcacacatcatgtgc

SEQ ID NO: 97793 - DNA, 20 bp, Artificial Sequence
  MKO10097793_B_Mapkbp1
  gRNA
cttaacttaccctgctgggt

SEQ ID NO: 97794 - DNA, 20 bp, Artificial Sequence
  MKO10097794_B_Mapkbp1
  gRNA
gtgaccaagtacttgccatc

SEQ ID NO: 97795 - DNA, 20 bp, Artificial Sequence
  MKO10097795_B_Mapkbp1
  gRNA
tggtcgtcctcttcaatccc

SEQ ID NO: 97796 - DNA, 20 bp, Artificial Sequence
  MKO10097796_B_Mapre1
  gRNA
aaaacgaccctgtactgcag

SEQ ID NO: 97797 - DNA, 20 bp, Artificial Sequence
  MKO10097797_B_Mapre1
  gRNA
gttctgtttacctgcagtac

SEQ ID NO: 97798 - DNA, 20 bp, Artificial Sequence
  MKO10097798_B_Mapre1
  gRNA
ggctgcatattgtcagttta

SEQ ID NO: 97799 - DNA, 20 bp, Artificial Sequence
  MKO10097799_B_Mapre2
  gRNA
ctcgcccctcgtctgccaaa

SEQ ID NO: 97800 - DNA, 20 bp, Artificial Sequence
  MKO10097800_B_Mapre2
  gRNA
gtattctacctcgataaccc

SEQ ID NO: 97801 - DNA, 20 bp, Artificial Sequence
  MKO10097801_B_Mapre2
  gRNA
actcatgctccaactttgct

SEQ ID NO: 97802 - DNA, 20 bp, Artificial Sequence
  MKO10097802_B_Mapre3
  gRNA
gacttgaagctgaccgtaga

SEQ ID NO: 97803 - DNA, 20 bp, Artificial Sequence
  MKO10097803_B_Mapre3
  gRNA
taggaggtggtgctacgtcc

SEQ ID NO: 97804 - DNA, 20 bp, Artificial Sequence
  MKO10097804_B_Mapre3
  gRNA
ttctttgacgcaaactatga

SEQ ID NO: 97805 - DNA, 20 bp, Artificial Sequence
  MKO10097805_B_Mapt
  gRNA
ggcgaagatcgccacacctc

SEQ ID NO: 97806 - DNA, 20 bp, Artificial Sequence
  MKO10097806_B_Mapt
  gRNA
ctcggaccagccgaagaagc

SEQ ID NO: 97807 - DNA, 20 bp, Artificial Sequence
  MKO10097807_B_Mapt
  gRNA
gacatggaccatggcttaaa

SEQ ID NO: 97808 - DNA, 20 bp, Artificial Sequence
  MKO10097808_B_Marcksl1
  gRNA
gacttaacccccaagggtga

SEQ ID NO: 97809 - DNA, 20 bp, Artificial Sequence
  MKO10097809_B_Marcksl1
  gRNA
ccggggcgacgtgaccgccg

SEQ ID NO: 97810 - DNA, 20 bp, Artificial Sequence
  MKO10097810_B_Marcksl1
  gRNA
cccggggagccttagagctc

SEQ ID NO: 97811 - DNA, 20 bp, Artificial Sequence
  MKO10097811_B_Marcks
  gRNA
gaagccaccgccgagaggcc

SEQ ID NO: 97812 - DNA, 20 bp, Artificial Sequence
  MKO10097812_B_Marcks
  gRNA
tctggagcttactcggccgt

SEQ ID NO: 97813 - DNA, 20 bp, Artificial Sequence
  MKO10097813_B_Marcks
  gRNA
ggcggaggacgcatcgcccg

SEQ ID NO: 97814 - DNA, 20 bp, Artificial Sequence
  MKO10097814_B_Marco
  gRNA
gtgcagtacctgccgtgagc

SEQ ID NO: 97815 - DNA, 20 bp, Artificial Sequence
  MKO10097815_B_Marco
  gRNA
catccacctgatcctgctca

SEQ ID NO: 97816 - DNA, 20 bp, Artificial Sequence
  MKO10097816_B_Marco
  gRNA
ttatcctccaggtccaaaag

SEQ ID NO: 97817 - DNA, 20 bp, Artificial Sequence
  MKO10097817_B_Marf1
  gRNA
aactccgtcagagcctgcga

SEQ ID NO: 97818 - DNA, 20 bp, Artificial Sequence
  MKO10097818_B_Marf1
  gRNA
tgtccagtgactgcaacttc

SEQ ID NO: 97819 - DNA, 20 bp, Artificial Sequence
  MKO10097819_B_Marf1
  gRNA
gttccacagccattacacac

SEQ ID NO: 97820 - DNA, 20 bp, Artificial Sequence
  MKO10097820_B_Mark1
  gRNA
aaaccctaccagtctacaga

SEQ ID NO: 97821 - DNA, 20 bp, Artificial Sequence
  MKO10097821_B_Mark1
  gRNA
atactgaaccatcctaacat

SEQ ID NO: 97822 - DNA, 20 bp, Artificial Sequence
  MKO10097822_B_Mark1
  gRNA
aacagagaagacactctatt

SEQ ID NO: 97823 - DNA, 20 bp, Artificial Sequence
  MKO10097823_B_Mark2
  gRNA
cactggcatactccatgaca

SEQ ID NO: 97824 - DNA, 20 bp, Artificial Sequence
  MKO10097824_B_Mark2
  gRNA
ccgagaagtaagaataatga

SEQ ID NO: 97825 - DNA, 20 bp, Artificial Sequence
  MKO10097825_B_Mark2
  gRNA
gggactcactttctgtaggc

SEQ ID NO: 97826 - DNA, 20 bp, Artificial Sequence
  MKO10097826_B_Mark3
  gRNA
gtgtctcgttcattcaccgt

SEQ ID NO: 97827 - DNA, 20 bp, Artificial Sequence
  MKO10097827_B_Mark3
  gRNA
gaatccaacaagtctacaaa

SEQ ID NO: 97828 - DNA, 20 bp, Artificial Sequence
  MKO10097828_B_Mark3
  gRNA
acacatcctcacaggccgag

SEQ ID NO: 97829 - DNA, 20 bp, Artificial Sequence
  MKO10097829_B_Mark4
  gRNA
cgctagcgtattccatcacc

SEQ ID NO: 97830 - DNA, 20 bp, Artificial Sequence
  MKO10097830_B_Mark4
  gRNA
cagagaagtccgaattatga

SEQ ID NO: 97831 - DNA, 20 bp, Artificial Sequence
  MKO10097831_B_Mark4
  gRNA
gaaccccagtagcttgcaga

SEQ ID NO: 97832 - DNA, 20 bp, Artificial Sequence
  MKO10097832_B_Mars2
  gRNA
agaaatgctgcaccgctact

SEQ ID NO: 97833 - DNA, 20 bp, Artificial Sequence
  MKO10097833_B_Mars2
  gRNA
actcgatcgcacagctcgat

SEQ ID NO: 97834 - DNA, 20 bp, Artificial Sequence
  MKO10097834_B_Mars2
  gRNA
ccgacttgtccgtttctcga

SEQ ID NO: 97835 - DNA, 20 bp, Artificial Sequence
  MKO10097835_B_Mars
  gRNA
taaggtccctgtcttgcagc

SEQ ID NO: 97836 - DNA, 20 bp, Artificial Sequence
  MKO10097836_B_Mars
  gRNA
cttgaaccactagacagtgt

SEQ ID NO: 97837 - DNA, 20 bp, Artificial Sequence
  MKO10097837_B_Mars
  gRNA
tgctgccctacactgtctag

SEQ ID NO: 97838 - DNA, 20 bp, Artificial Sequence
  MKO10097838_B_Marveld1
  gRNA
cgcgcaggaaagcccgctgc

SEQ ID NO: 97839 - DNA, 20 bp, Artificial Sequence
  MKO10097839_B_Marveld1
  gRNA
agccgtagagtgccgagagt

SEQ ID NO: 97840 - DNA, 20 bp, Artificial Sequence
  MKO10097840_B_Marveld1
  gRNA
gctttcctgcgcggcccgct

SEQ ID NO: 97841 - DNA, 20 bp, Artificial Sequence
  MKO10097841_B_Marveld2
  gRNA
tcacgataggcttcggaatg

SEQ ID NO: 97842 - DNA, 20 bp, Artificial Sequence
  MKO10097842_B_Marveld2
  gRNA
acatcattctgaaaaccgcc

SEQ ID NO: 97843 - DNA, 20 bp, Artificial Sequence
  MKO10097843_B_Marveld2
  gRNA
caagaattcatgaagagttt

SEQ ID NO: 97844 - DNA, 20 bp, Artificial Sequence
  MKO10097844_B_Marveld3
  gRNA
tgatgcgcaacgccgcatac

SEQ ID NO: 97845 - DNA, 20 bp, Artificial Sequence
  MKO10097845_B_Marveld3
  gRNA
accgagaccaccacgtcgag

SEQ ID NO: 97846 - DNA, 20 bp, Artificial Sequence
  MKO10097846_B_Marveld3
  gRNA
gatgcccgtgtagccccccg

SEQ ID NO: 97847 - DNA, 20 bp, Artificial Sequence
  MKO10097847_B_Mas1
  gRNA
caagggatgtcatatttgac

SEQ ID NO: 97848 - DNA, 20 bp, Artificial Sequence
  MKO10097848_B_Mas1
  gRNA
cattcgtctgtgcccttctg

SEQ ID NO: 97849 - DNA, 20 bp, Artificial Sequence
  MKO10097849_B_Mas1
  gRNA
gtgggtaatgtagaccgtga

SEQ ID NO: 97850 - DNA, 20 bp, Artificial Sequence
  MKO10097850_B_Masp1
  gRNA
agcttgattcgaaacccctc

SEQ ID NO: 97851 - DNA, 20 bp, Artificial Sequence
  MKO10097851_B_Masp1
  gRNA
gataagggttggggtaatcg

SEQ ID NO: 97852 - DNA, 20 bp, Artificial Sequence
  MKO10097852_B_Masp1
  gRNA
tactactgctcctgccgctt

SEQ ID NO: 97853 - DNA, 20 bp, Artificial Sequence
  MKO10097853_B_Masp2
  gRNA
ctgaccatcaagatcgatcc

SEQ ID NO: 97854 - DNA, 20 bp, Artificial Sequence
  MKO10097854_B_Masp2
  gRNA
ccctgtgaacggcttctcat

SEQ ID NO: 97855 - DNA, 20 bp, Artificial Sequence
  MKO10097855_B_Masp2
  gRNA
gagtagaaggtgtcattgcc

SEQ ID NO: 97856 - DNA, 20 bp, Artificial Sequence
  MKO10097856_B_Mast1
  gRNA
ggagcgaagcaagcgaccat

SEQ ID NO: 97857 - DNA, 20 bp, Artificial Sequence
  MKO10097857_B_Mast1
  gRNA
gcagttgccgtaccagcaac

SEQ ID NO: 97858 - DNA, 20 bp, Artificial Sequence
  MKO10097858_B_Mast1
  gRNA
gagtggggtcgcggtagagt

SEQ ID NO: 97859 - DNA, 20 bp, Artificial Sequence
  MKO10097859_B_Mast2
  gRNA
cacttaccaagccagccgta

SEQ ID NO: 97860 - DNA, 20 bp, Artificial Sequence
  MKO10097860_B_Mast2
  gRNA
cgaatgagaaaccaatccct

SEQ ID NO: 97861 - DNA, 20 bp, Artificial Sequence
  MKO10097861_B_Mast2
  gRNA
actccagcgacaacttagtc

SEQ ID NO: 97862 - DNA, 20 bp, Artificial Sequence
  MKO10097862_B_Mast3
  gRNA
caaccgtaagagcttggtcg

SEQ ID NO: 97863 - DNA, 20 bp, Artificial Sequence
  MKO10097863_B_Mast3
  gRNA
cagtaccgatacagtggagc

SEQ ID NO: 97864 - DNA, 20 bp, Artificial Sequence
  MKO10097864_B_Mast3
  gRNA
agtgttggtcccatagcccg

SEQ ID NO: 97865 - DNA, 20 bp, Artificial Sequence
  MKO10097865_B_Mast4
  gRNA
gggttgctgcatttccgaaa

SEQ ID NO: 97866 - DNA, 20 bp, Artificial Sequence
  MKO10097866_B_Mast4
  gRNA
gagctgagcctcccccgaag

SEQ ID NO: 97867 - DNA, 20 bp, Artificial Sequence
  MKO10097867_B_Mast4
  gRNA
acagttgccgaacaagcaac

SEQ ID NO: 97868 - DNA, 20 bp, Artificial Sequence
  MKO10097868_B_Mastl
  gRNA
caataaaaatatgactcatc

SEQ ID NO: 97869 - DNA, 20 bp, Artificial Sequence
  MKO10097869_B_Mastl
  gRNA
caagattattcaagaactcc

SEQ ID NO: 97870 - DNA, 20 bp, Artificial Sequence
  MKO10097870_B_Mastl
  gRNA
caatatgcttatttccaatg

SEQ ID NO: 97871 - DNA, 20 bp, Artificial Sequence
  MKO10097871_B_Mat1a
  gRNA
catggttgattaccagcggg

SEQ ID NO: 97872 - DNA, 20 bp, Artificial Sequence
  MKO10097872_B_Mat1a
  gRNA
cacccgctggtaatcaacca

SEQ ID NO: 97873 - DNA, 20 bp, Artificial Sequence
  MKO10097873_B_Mat1a
  gRNA
caagacttgcaatgtgctag

SEQ ID NO: 97874 - DNA, 20 bp, Artificial Sequence
  MKO10097874_B_Mat2a
  gRNA
acaagaccctgatgctaaag

SEQ ID NO: 97875 - DNA, 20 bp, Artificial Sequence
  MKO10097875_B_Mat2a
  gRNA
ttagaaactgttgctaaaac

SEQ ID NO: 97876 - DNA, 20 bp, Artificial Sequence
  MKO10097876_B_Mat2a
  gRNA
ctacaagacttgtaatgtgt

SEQ ID NO: 97877 - DNA, 20 bp, Artificial Sequence
  MKO10097877_B_Mat2b
  gRNA
tcaacttccccatacagaac

SEQ ID NO: 97878 - DNA, 20 bp, Artificial Sequence
  MKO10097878_B_Mat2b
  gRNA
gaacagcttcagaatccaac

SEQ ID NO: 97879 - DNA, 20 bp, Artificial Sequence
  MKO10097879_B_Mat2b
  gRNA
tcttacctaaattattctcc

SEQ ID NO: 97880 - DNA, 20 bp, Artificial Sequence
  MKO10097880_B_Matk
  gRNA
tgccaagctccgaacaatct

SEQ ID NO: 97881 - DNA, 20 bp, Artificial Sequence
  MKO10097881_B_Matk
  gRNA
caggtgagccctagattgtt

SEQ ID NO: 97882 - DNA, 20 bp, Artificial Sequence
  MKO10097882_B_Matk
  gRNA
ctcccgctgtcgcagagcag

SEQ ID NO: 97883 - DNA, 20 bp, Artificial Sequence
  MKO10097883_B_Matn1
  gRNA
acacgttagatgtgtcggac

SEQ ID NO: 97884 - DNA, 20 bp, Artificial Sequence
  MKO10097884_B_Matn1
  gRNA
acacgtcccgcacgctgtcc

SEQ ID NO: 97885 - DNA, 20 bp, Artificial Sequence
  MKO10097885_B_Matn1
  gRNA
tctgcaattcgccatcacca

SEQ ID NO: 97886 - DNA, 20 bp, Artificial Sequence
  MKO10097886_B_Matn2
  gRNA
gaggacgggaagcgatgtac

SEQ ID NO: 97887 - DNA, 20 bp, Artificial Sequence
  MKO10097887_B_Matn2
  gRNA
agacctactcgggtaacatc

SEQ ID NO: 97888 - DNA, 20 bp, Artificial Sequence
  MKO10097888_B_Matn2
  gRNA
tgtacatcgcttcccgtcct

SEQ ID NO: 97889 - DNA, 20 bp, Artificial Sequence
  MKO10097889_B_Matn3
  gRNA
gctgatgggaaaacgtgttc

SEQ ID NO: 97890 - DNA, 20 bp, Artificial Sequence
  MKO10097890_B_Matn3
  gRNA
tcttaccactgcgagtgcta

SEQ ID NO: 97891 - DNA, 20 bp, Artificial Sequence
  MKO10097891_B_Matn3
  gRNA
cagcacgtgtgtgtcagcga

SEQ ID NO: 97892 - DNA, 20 bp, Artificial Sequence
  MKO10097892_B_Matn4
  gRNA
gccacgacctgctacctgat

SEQ ID NO: 97893 - DNA, 20 bp, Artificial Sequence
  MKO10097893_B_Matn4
  gRNA
gccttggatctctgcgctga

SEQ ID NO: 97894 - DNA, 20 bp, Artificial Sequence
  MKO10097894_B_Matn4
  gRNA
ttctactgcgcctgcaactc

SEQ ID NO: 97895 - DNA, 20 bp, Artificial Sequence
  MKO10097895_B_Matr3
  gRNA
gtgtgtccagtatcattgtc

SEQ ID NO: 97896 - DNA, 20 bp, Artificial Sequence
  MKO10097896_B_Matr3
  gRNA
cctacatttcaagaagaagc

SEQ ID NO: 97897 - DNA, 20 bp, Artificial Sequence
  MKO10097897_B_Matr3
  gRNA
ctgtacacaggtgctggtaa

SEQ ID NO: 97898 - DNA, 20 bp, Artificial Sequence
  MKO10097898_B_Mau2
  gRNA
gtcagagctgtattgtcaag

SEQ ID NO: 97899 - DNA, 20 bp, Artificial Sequence
  MKO10097899_B_Mau2
  gRNA
gacaatacagctctgacaac

SEQ ID NO: 97900 - DNA, 20 bp, Artificial Sequence
  MKO10097900_B_Mau2
  gRNA
ttacagcgagctggaagagc

SEQ ID NO: 97901 - DNA, 20 bp, Artificial Sequence
  MKO10097901_B_Mavs
  gRNA
cctacaggcagatcgggaac

SEQ ID NO: 97902 - DNA, 20 bp, Artificial Sequence
  MKO10097902_B_Mavs
  gRNA
tttgtcctcagggcagtacg

SEQ ID NO: 97903 - DNA, 20 bp, Artificial Sequence
  MKO10097903_B_Mavs
  gRNA
agtagacgtcatcgcagcag

SEQ ID NO: 97904 - DNA, 20 bp, Artificial Sequence
  MKO10097904_B_Max
  gRNA
gaagagcattctgccgcttg

SEQ ID NO: 97905 - DNA, 20 bp, Artificial Sequence
  MKO10097905_B_Max
  gRNA
cactctcctaggctgacaag

SEQ ID NO: 97906 - DNA, 20 bp, Artificial Sequence
  MKO10097906_B_Max
  gRNA
agtatatccagtatatgcga

SEQ ID NO: 97907 - DNA, 20 bp, Artificial Sequence
  MKO10097907_B_Maz
  gRNA
agcgcacacagtccgacacg

SEQ ID NO: 97908 - DNA, 20 bp, Artificial Sequence
  MKO10097908_B_Maz
  gRNA
tctccctataggtactggtg

SEQ ID NO: 97909 - DNA, 20 bp, Artificial Sequence
  MKO10097909_B_Maz
  gRNA
gacaagtgcactcaacagag

SEQ ID NO: 97910 - DNA, 20 bp, Artificial Sequence
  MKO10097910_B_Mb21d1
  gRNA
atattcttgtagctcaatcc

SEQ ID NO: 97911 - DNA, 20 bp, Artificial Sequence
  MKO10097911_B_Mb21d1
  gRNA
ccgctgagtcatttcttaga

SEQ ID NO: 97912 - DNA, 20 bp, Artificial Sequence
  MKO10097912_B_Mb21d1
  gRNA
aggacccgcaggacagtcag

SEQ ID NO: 97913 - DNA, 20 bp, Artificial Sequence
  MKO10097913_B_Mb21d2
  gRNA
atacgacgaccagagagcgc

SEQ ID NO: 97914 - DNA, 20 bp, Artificial Sequence
  MKO10097914_B_Mb21d2
  gRNA
ttaaccccgatgacgtcacg

SEQ ID NO: 97915 - DNA, 20 bp, Artificial Sequence
  MKO10097915_B_Mb21d2
  gRNA
acggtcatgcagcttaaggg

SEQ ID NO: 97916 - DNA, 20 bp, Artificial Sequence
  MKO10097916_B_Mbd1
  gRNA
ccttaaacattctctgttcg

SEQ ID NO: 97917 - DNA, 20 bp, Artificial Sequence
  MKO10097917_B_Mbd1
  gRNA
gactccacagggggaatata

SEQ ID NO: 97918 - DNA, 20 bp, Artificial Sequence
  MKO10097918_B_Mbd1
  gRNA
tttcatgggatggtgtcaaa

SEQ ID NO: 97919 - DNA, 20 bp, Artificial Sequence
  MKO10097919_B_Mbd2
  gRNA
tggttcgtgaatttggttac

SEQ ID NO: 97920 - DNA, 20 bp, Artificial Sequence
  MKO10097920_B_Mbd2
  gRNA
tgaccccctcaatcagaaca

SEQ ID NO: 97921 - DNA, 20 bp, Artificial Sequence
  MKO10097921_B_Mbd2
  gRNA
gttcagaagtaaacctcagc

SEQ ID NO: 97922 - DNA, 20 bp, Artificial Sequence
  MKO10097922_B_Mbd3l1
  gRNA
ccttgagtcatcttcacatt

SEQ ID NO: 97923 - DNA, 20 bp, Artificial Sequence
  MKO10097923_B_Mbd3l1
  gRNA
tgaacaggatattattaacc

SEQ ID NO: 97924 - DNA, 20 bp, Artificial Sequence
  MKO10097924_B_Mbd3l1
  gRNA
taagtacttcaatccccttg

SEQ ID NO: 97925 - DNA, 20 bp, Artificial Sequence
  MKO10097925_B_Mbd3l2
  gRNA
gtttcttgaagtctcctcca

SEQ ID NO: 97926 - DNA, 20 bp, Artificial Sequence
  MKO10097926_B_Mbd3l2
  gRNA
tggctttgcaaagatgcaac

SEQ ID NO: 97927 - DNA, 20 bp, Artificial Sequence
  MKO10097927_B_Mbd3l2
  gRNA
taagcttcaattgacatgac

SEQ ID NO: 97928 - DNA, 20 bp, Artificial Sequence
  MKO10097928_B_Mbd3
  gRNA
ggtgtgtagagcactcgcaa

SEQ ID NO: 97929 - DNA, 20 bp, Artificial Sequence
  MKO10097929_B_Mbd3
  gRNA
gggggctcacctgcctcggc

SEQ ID NO: 97930 - DNA, 20 bp, Artificial Sequence
  MKO10097930_B_Mbd3
  gRNA
tattccacaggagtgggccc

SEQ ID NO: 97931 - DNA, 20 bp, Artificial Sequence
  MKO10097931_B_Mbd4
  gRNA
ccgggattgatgctcccttt

SEQ ID NO: 97932 - DNA, 20 bp, Artificial Sequence
  MKO10097932_B_Mbd4
  gRNA
tgagaaatatagtcgcgatg

SEQ ID NO: 97933 - DNA, 20 bp, Artificial Sequence
  MKO10097933_B_Mbd4
  gRNA
gttgtgaagcaaaggttatc

SEQ ID NO: 97934 - DNA, 20 bp, Artificial Sequence
  MKO10097934_B_Mbd5
  gRNA
ggacagaaatctccatttcg

SEQ ID NO: 97935 - DNA, 20 bp, Artificial Sequence
  MKO10097935_B_Mbd5
  gRNA
tgcatgttccgtcagtgagc

SEQ ID NO: 97936 - DNA, 20 bp, Artificial Sequence
  MKO10097936_B_Mbd5
  gRNA
gagaactgcagaagatgtta

SEQ ID NO: 97937 - DNA, 20 bp, Artificial Sequence
  MKO10097937_B_Mbd6
  gRNA
acctgggggggtgtccccga

SEQ ID NO: 97938 - DNA, 20 bp, Artificial Sequence
  MKO10097938_B_Mbd6
  gRNA
gtgcttcaaagcccgtctga

SEQ ID NO: 97939 - DNA, 20 bp, Artificial Sequence
  MKO10097939_B_Mbd6
  gRNA
cgtagctacctcctcagcga

SEQ ID NO: 97940 - DNA, 20 bp, Artificial Sequence
  MKO10097940_B_Mbip
  gRNA
gccttgatctgaactacttc

SEQ ID NO: 97941 - DNA, 20 bp, Artificial Sequence
  MKO10097941_B_Mbip
  gRNA
aatgttattgattgtaatca

SEQ ID NO: 97942 - DNA, 20 bp, Artificial Sequence
  MKO10097942_B_Mbip
  gRNA
gctgtctttactccttatcc

SEQ ID NO: 97943 - DNA, 20 bp, Artificial Sequence
  MKO10097943_B_Mbl1
  gRNA
acaggtttgtgaccctgatg

SEQ ID NO: 97944 - DNA, 20 bp, Artificial Sequence
  MKO10097944_B_Mbl1
  gRNA
atcagggtcacaaacctgtg

SEQ ID NO: 97945 - DNA, 20 bp, Artificial Sequence
  MKO10097945_B_Mbl1
  gRNA
tccaggaccaaaaggccaaa

SEQ ID NO: 97946 - DNA, 20 bp, Artificial Sequence
  MKO10097946_B_Mbl2
  gRNA
ggccaaagatattgcctact

SEQ ID NO: 97947 - DNA, 20 bp, Artificial Sequence
  MKO10097947_B_Mbl2
  gRNA
aaaggagcagtgggaccgaa

SEQ ID NO: 97948 - DNA, 20 bp, Artificial Sequence
  MKO10097948_B_Mbl2
  gRNA
tacaggacccccagggaatc

SEQ ID NO: 97949 - DNA, 20 bp, Artificial Sequence
  MKO10097949_B_Mblac1
  gRNA
agtcttagagccgccgtctg

SEQ ID NO: 97950 - DNA, 20 bp, Artificial Sequence
  MKO10097950_B_Mblac1
  gRNA
tgaaacgcagcccttgatac

SEQ ID NO: 97951 - DNA, 20 bp, Artificial Sequence
  MKO10097951_B_Mblac1
  gRNA
accgcgtcgcccgctccctg

SEQ ID NO: 97952 - DNA, 20 bp, Artificial Sequence
  MKO10097952_B_Mblac2
  gRNA
ccaaaggtattgaagtgccc

SEQ ID NO: 97953 - DNA, 20 bp, Artificial Sequence
  MKO10097953_B_Mblac2
  gRNA
tgtgcaccgcgccgaggccg

SEQ ID NO: 97954 - DNA, 20 bp, Artificial Sequence
  MKO10097954_B_Mblac2
  gRNA
cggtctctatcagttcgacc

SEQ ID NO: 97955 - DNA, 20 bp, Artificial Sequence
  MKO10097955_B_Mbnl1
  gRNA
ggcaccgggcatcatggcat

SEQ ID NO: 97956 - DNA, 20 bp, Artificial Sequence
  MKO10097956_B_Mbnl1
  gRNA
gtgctcaccacgggctgcaa

SEQ ID NO: 97957 - DNA, 20 bp, Artificial Sequence
  MKO10097957_B_Mbnl1
  gRNA
gatgcactggtggctaagct

SEQ ID NO: 97958 - DNA, 20 bp, Artificial Sequence
  MKO10097958_B_Mbnl2
  gRNA
agttgggttagtcccaacag

SEQ ID NO: 97959 - DNA, 20 bp, Artificial Sequence
  MKO10097959_B_Mbnl2
  gRNA
aatagccgcatttgtcccta

SEQ ID NO: 97960 - DNA, 20 bp, Artificial Sequence
  MKO10097960_B_Mbnl2
  gRNA
agcaaacttgcattcttcgt

SEQ ID NO: 97961 - DNA, 20 bp, Artificial Sequence
  MKO10097961_B_Mbnl3
  gRNA
gtttgccgtgaatttcagcg

SEQ ID NO: 97962 - DNA, 20 bp, Artificial Sequence
  MKO10097962_B_Mbnl3
  gRNA
tctagctgcgactttaagtg

SEQ ID NO: 97963 - DNA, 20 bp, Artificial Sequence
  MKO10097963_B_Mbnl3
  gRNA
aagtcgcagctagaagttaa

SEQ ID NO: 97964 - DNA, 20 bp, Artificial Sequence
  MKO10097964_B_Mboat1
  gRNA
gtagcccatggctacaaaaa

SEQ ID NO: 97965 - DNA, 20 bp, Artificial Sequence
  MKO10097965_B_Mboat1
  gRNA
tgctgtacatctctttgtgc

SEQ ID NO: 97966 - DNA, 20 bp, Artificial Sequence
  MKO10097966_B_Mboat1
  gRNA
agatgtaaatgcggctgatg

SEQ ID NO: 97967 - DNA, 20 bp, Artificial Sequence
  MKO10097967_B_Mboat2
  gRNA
ttctgcgtaatgatcatcat

SEQ ID NO: 97968 - DNA, 20 bp, Artificial Sequence
  MKO10097968_B_Mboat2
  gRNA
acacgtagttgctacccttt

SEQ ID NO: 97969 - DNA, 20 bp, Artificial Sequence
  MKO10097969_B_Mboat2
  gRNA
tacgcagaagatcactagtt

SEQ ID NO: 97970 - DNA, 20 bp, Artificial Sequence
  MKO10097970_B_Mboat4
  gRNA
ggcctttacctcacgggtgg

SEQ ID NO: 97971 - DNA, 20 bp, Artificial Sequence
  MKO10097971_B_Mboat4
  gRNA
tccagcctacctggcccggg

SEQ ID NO: 97972 - DNA, 20 bp, Artificial Sequence
  MKO10097972_B_Mboat4
  gRNA
gccccttgataaaatgataa

SEQ ID NO: 97973 - DNA, 20 bp, Artificial Sequence
  MKO10097973_B_Mboat7
  gRNA
acagcattggtgaagggcgt

SEQ ID NO: 97974 - DNA, 20 bp, Artificial Sequence
  MKO10097974_B_Mboat7
  gRNA
tcaggcaggaggcccagcgt

SEQ ID NO: 97975 - DNA, 20 bp, Artificial Sequence
  MKO10097975_B_Mboat7
  gRNA
aggtgaataaggtgagcccc

SEQ ID NO: 97976 - DNA, 20 bp, Artificial Sequence
  MKO10097976_B_Mbp
  gRNA
cacacgagaactacccatta

SEQ ID NO: 97977 - DNA, 20 bp, Artificial Sequence
  MKO10097977_B_Mbp
  gRNA
ctgccccagaagtcgcagca

SEQ ID NO: 97978 - DNA, 20 bp, Artificial Sequence
  MKO10097978_B_Mbp
  gRNA
ggaggaagagacagccgctc

SEQ ID NO: 97979 - DNA, 20 bp, Artificial Sequence
  MKO10097979_B_Mbtd1
  gRNA
ttactcgtcaaactctaaga

SEQ ID NO: 97980 - DNA, 20 bp, Artificial Sequence
  MKO10097980_B_Mbtd1
  gRNA
ttccgagatatcaccccagc

SEQ ID NO: 97981 - DNA, 20 bp, Artificial Sequence
  MKO10097981_B_Mbtd1
  gRNA
cagcttcatagcagctccag

SEQ ID NO: 97982 - DNA, 20 bp, Artificial Sequence
  MKO10097982_B_Mbtps1
  gRNA
gaacgaaagactttccgctg

SEQ ID NO: 97983 - DNA, 20 bp, Artificial Sequence
  MKO10097983_B_Mbtps1
  gRNA
gaaccaactggaccaatgag

SEQ ID NO: 97984 - DNA, 20 bp, Artificial Sequence
  MKO10097984_B_Mbtps1
  gRNA
tccttggcactccctcatgc

SEQ ID NO: 97985 - DNA, 20 bp, Artificial Sequence
  MKO10097985_B_Mbtps2
  gRNA
agggaacaagttcgatttaa

SEQ ID NO: 97986 - DNA, 20 bp, Artificial Sequence
  MKO10097986_B_Mbtps2
  gRNA
ctggtgatataagttgcaaa

SEQ ID NO: 97987 - DNA, 20 bp, Artificial Sequence
  MKO10097987_B_Mbtps2
  gRNA
gtttgccatcttatatgaaa

SEQ ID NO: 97988 - DNA, 20 bp, Artificial Sequence
  MKO10097988_B_Mb
  gRNA
tgtcattccggaagagctcc

SEQ ID NO: 97989 - DNA, 20 bp, Artificial Sequence
  MKO10097989_B_Mb
  gRNA
cgatgaggacttcctgtcca

SEQ ID NO: 97990 - DNA, 20 bp, Artificial Sequence
  MKO10097990_B_Mb
  gRNA
aaggtggaggccgaccttgc

SEQ ID NO: 97991 - DNA, 20 bp, Artificial Sequence
  MKO10097991_B_Mc1r
  gRNA
cacagatgagcacgtcaatg

SEQ ID NO: 97992 - DNA, 20 bp, Artificial Sequence
  MKO10097992_B_Mc1r
  gRNA
tgccacccttactatccttc

SEQ ID NO: 97993 - DNA, 20 bp, Artificial Sequence
  MKO10097993_B_Mc1r
  gRNA
aatcgccatgagtgccagca

SEQ ID NO: 97994 - DNA, 20 bp, Artificial Sequence
  MKO10097994_B_Mc2r
  gRNA
ggcgcatggtcacaatgcta

SEQ ID NO: 97995 - DNA, 20 bp, Artificial Sequence
  MKO10097995_B_Mc2r
  gRNA
tgatcaacatgccattgacc

SEQ ID NO: 97996 - DNA, 20 bp, Artificial Sequence
  MKO10097996_B_Mc2r
  gRNA
agcgggcaagtaagaacatg

SEQ ID NO: 97997 - DNA, 20 bp, Artificial Sequence
  MKO10097997_B_Mc3r
  gRNA
gatggtgacgtacctgtcga

SEQ ID NO: 97998 - DNA, 20 bp, Artificial Sequence
  MKO10097998_B_Mc3r
  gRNA
gttgatcacggcgatcatga

SEQ ID NO: 97999 - DNA, 20 bp, Artificial Sequence
  MKO10097999_B_Mc3r
  gRNA
tgaacgtgttgcgcagctcc

SEQ ID NO: 98000 - DNA, 20 bp, Artificial Sequence
  MKO10098000_B_Mc4r
  gRNA
tgctcatagcatcctccgtc

SEQ ID NO: 98001 - DNA, 20 bp, Artificial Sequence
  MKO10098001_B_Mc4r
  gRNA
taatgtgaagcctcgccatc

SEQ ID NO: 98002 - DNA, 20 bp, Artificial Sequence
  MKO10098002_B_Mc4r
  gRNA
atgctggtgagcgtttcgaa

SEQ ID NO: 98003 - DNA, 20 bp, Artificial Sequence
  MKO10098003_B_Mc5r
  gRNA
gaatcatgcttacctttgcg

SEQ ID NO: 98004 - DNA, 20 bp, Artificial Sequence
  MKO10098004_B_Mc5r
  gRNA
accaccacatcatgaccgcg

SEQ ID NO: 98005 - DNA, 20 bp, Artificial Sequence
  MKO10098005_B_Mc5r
  gRNA
gggtgatcatcgcctgcatc

SEQ ID NO: 98006 - DNA, 20 bp, Artificial Sequence
  MKO10098006_B_Mcam
  gRNA
gccagtacccacgcccgacc

SEQ ID NO: 98007 - DNA, 20 bp, Artificial Sequence
  MKO10098007_B_Mcam
  gRNA
aactattcaagccaatgtcg

SEQ ID NO: 98008 - DNA, 20 bp, Artificial Sequence
  MKO10098008_B_Mcam
  gRNA
tccttaggttgctacctgtg

SEQ ID NO: 98009 - DNA, 20 bp, Artificial Sequence
  MKO10098009_B_Mcat
  gRNA
gccgtccattccaatgtcag

SEQ ID NO: 98010 - DNA, 20 bp, Artificial Sequence
  MKO10098010_B_Mcat
  gRNA
gcatccgaagccgttcccag

SEQ ID NO: 98011 - DNA, 20 bp, Artificial Sequence
  MKO10098011_B_Mcat
  gRNA
catcgacaactgtgttgctg

SEQ ID NO: 98012 - DNA, 20 bp, Artificial Sequence
  MKO10098012_B_Mccc1
  gRNA
acgtaccatatctacatgca

SEQ ID NO: 98013 - DNA, 20 bp, Artificial Sequence
  MKO10098013_B_Mccc1
  gRNA
tggggttgttccatacttca

SEQ ID NO: 98014 - DNA, 20 bp, Artificial Sequence
  MKO10098014_B_Mccc1
  gRNA
gtcggtggctgtgtacagtg

SEQ ID NO: 98015 - DNA, 20 bp, Artificial Sequence
  MKO10098015_B_Mccc2
  gRNA
ctctggatgtgtgccgcgcc

SEQ ID NO: 98016 - DNA, 20 bp, Artificial Sequence
  MKO10098016_B_Mccc2
  gRNA
aacgatgccaccgtcaaagg

SEQ ID NO: 98017 - DNA, 20 bp, Artificial Sequence
  MKO10098017_B_Mccc2
  gRNA
ccgactcccatgcatctatc

SEQ ID NO: 98018 - DNA, 20 bp, Artificial Sequence
  MKO10098018_B_Mcc
  gRNA
ggccaagtcgcagtgctcgc

SEQ ID NO: 98019 - DNA, 20 bp, Artificial Sequence
  MKO10098019_B_Mcc
  gRNA
ccctgagaaccagtctacta

SEQ ID NO: 98020 - DNA, 20 bp, Artificial Sequence
  MKO10098020_B_Mcc
  gRNA
cattaacctcttgttgactc

SEQ ID NO: 98021 - DNA, 20 bp, Artificial Sequence
  MKO10098021_B_Mcee
  gRNA
ggacatgaggcgtgtagtga

SEQ ID NO: 98022 - DNA, 20 bp, Artificial Sequence
  MKO10098022_B_Mcee
  gRNA
gatccgtagtctgagtgatg

SEQ ID NO: 98023 - DNA, 20 bp, Artificial Sequence
  MKO10098023_B_Mcee
  gRNA
tttcccatgtgctcctattt

SEQ ID NO: 98024 - DNA, 20 bp, Artificial Sequence
  MKO10098024_B_Mcf2l
  gRNA
tcatcttggtcatagaccga

SEQ ID NO: 98025 - DNA, 20 bp, Artificial Sequence
  MKO10098025_B_Mcf2l
  gRNA
aagcgctttgcttacctgtc

SEQ ID NO: 98026 - DNA, 20 bp, Artificial Sequence
  MKO10098026_B_Mcf2l
  gRNA
cttgtccgggatctcgctga

SEQ ID NO: 98027 - DNA, 20 bp, Artificial Sequence
  MKO10098027_B_Mcf2
  gRNA
aggactaagtgtaagctccc

SEQ ID NO: 98028 - DNA, 20 bp, Artificial Sequence
  MKO10098028_B_Mcf2
  gRNA
cttcaacaggtgataccttt

SEQ ID NO: 98029 - DNA, 20 bp, Artificial Sequence
  MKO10098029_B_Mcf2
  gRNA
ttatgtgctgagtacattca

SEQ ID NO: 98030 - DNA, 20 bp, Artificial Sequence
  MKO10098030_B_Mcfd2
  gRNA
gagctcgtcagcatcataga

SEQ ID NO: 98031 - DNA, 20 bp, Artificial Sequence
  MKO10098031_B_Mcfd2
  gRNA
aggtgtcatcgaccagccag

SEQ ID NO: 98032 - DNA, 20 bp, Artificial Sequence
  MKO10098032_B_Mcfd2
  gRNA
catgatggacatcagccccg

SEQ ID NO: 98033 - DNA, 20 bp, Artificial Sequence
  MKO10098033_B_Mchr1
  gRNA
atcggagatgttgctggcat

SEQ ID NO: 98034 - DNA, 20 bp, Artificial Sequence
  MKO10098034_B_Mchr1
  gRNA
tgagacctttcgaaaacgct

SEQ ID NO: 98035 - DNA, 20 bp, Artificial Sequence
  MKO10098035_B_Mchr1
  gRNA
tcaccctctttgtccgaagc

SEQ ID NO: 98036 - DNA, 20 bp, Artificial Sequence
  MKO10098036_B_Mcidas
  gRNA
cagcccggtggcggtgtacg

SEQ ID NO: 98037 - DNA, 20 bp, Artificial Sequence
  MKO10098037_B_Mcidas
  gRNA
gtcctgcctctccccatcgc

SEQ ID NO: 98038 - DNA, 20 bp, Artificial Sequence
  MKO10098038_B_Mcidas
  gRNA
ccttgtgatgtttcgtcttt

SEQ ID NO: 98039 - DNA, 20 bp, Artificial Sequence
  MKO10098039_B_Mcl1
  gRNA
tcaaagatggcgtaacaaac

SEQ ID NO: 98040 - DNA, 20 bp, Artificial Sequence
  MKO10098040_B_Mcl1
  gRNA
cggcatcagaaatgtgctgc

SEQ ID NO: 98041 - DNA, 20 bp, Artificial Sequence
  MKO10098041_B_Mcl1
  gRNA
tttgcgggtgttgctggagt

SEQ ID NO: 98042 - DNA, 20 bp, Artificial Sequence
  MKO10098042_B_Mcm10
  gRNA
cggaagccaaagactcctgc

SEQ ID NO: 98043 - DNA, 20 bp, Artificial Sequence
  MKO10098043_B_Mcm10
  gRNA
ggccggtccccagaattccc

SEQ ID NO: 98044 - DNA, 20 bp, Artificial Sequence
  MKO10098044_B_Mcm10
  gRNA
gaacgtttggccactctctt

SEQ ID NO: 98045 - DNA, 20 bp, Artificial Sequence
  MKO10098045_B_Mcm2
  gRNA
cactgatccggcgccgctga

SEQ ID NO: 98046 - DNA, 20 bp, Artificial Sequence
  MKO10098046_B_Mcm2
  gRNA
atgcgccgggggctgctcta

SEQ ID NO: 98047 - DNA, 20 bp, Artificial Sequence
  MKO10098047_B_Mcm2
  gRNA
ggtcagggcgtcagcacgtc

SEQ ID NO: 98048 - DNA, 20 bp, Artificial Sequence
  MKO10098048_B_Mcm3ap
  gRNA
ctctcagcaagcccatcgtg

SEQ ID NO: 98049 - DNA, 20 bp, Artificial Sequence
  MKO10098049_B_Mcm3ap
  gRNA
accagagagaccgcatcatg

SEQ ID NO: 98050 - DNA, 20 bp, Artificial Sequence
  MKO10098050_B_Mcm3ap
  gRNA
gccggctgcaggcctcacga

SEQ ID NO: 98051 - DNA, 20 bp, Artificial Sequence
  MKO10098051_B_Mcm3
  gRNA
cacctacgccaagcagtatg

SEQ ID NO: 98052 - DNA, 20 bp, Artificial Sequence
  MKO10098052_B_Mcm3
  gRNA
cctttacctgaaggtccccg

SEQ ID NO: 98053 - DNA, 20 bp, Artificial Sequence
  MKO10098053_B_Mcm3
  gRNA
gaagaagggctgctacacct

SEQ ID NO: 98054 - DNA, 20 bp, Artificial Sequence
  MKO10098054_B_Mcm4
  gRNA
actcccagctcgcgagtgga

SEQ ID NO: 98055 - DNA, 20 bp, Artificial Sequence
  MKO10098055_B_Mcm4
  gRNA
ccaagttgttgcatgtacaa

SEQ ID NO: 98056 - DNA, 20 bp, Artificial Sequence
  MKO10098056_B_Mcm4
  gRNA
gtaccaagtgaacagtctct

SEQ ID NO: 98057 - DNA, 20 bp, Artificial Sequence
  MKO10098057_B_Mcm5
  gRNA
gcgcatggcgatattggtga

SEQ ID NO: 98058 - DNA, 20 bp, Artificial Sequence
  MKO10098058_B_Mcm5
  gRNA
agccagttcctcgtcaaaac

SEQ ID NO: 98059 - DNA, 20 bp, Artificial Sequence
  MKO10098059_B_Mcm5
  gRNA
cctcgatccagtattcaccc

SEQ ID NO: 98060 - DNA, 20 bp, Artificial Sequence
  MKO10098060_B_Mcm6
  gRNA
ttccccggggaagtattccc

SEQ ID NO: 98061 - DNA, 20 bp, Artificial Sequence
  MKO10098061_B_Mcm6
  gRNA
gacctttgtcaaagaccgaa

SEQ ID NO: 98062 - DNA, 20 bp, Artificial Sequence
  MKO10098062_B_Mcm6
  gRNA
aactccggggaatacttccc

SEQ ID NO: 98063 - DNA, 20 bp, Artificial Sequence
  MKO10098063_B_Mcm7
  gRNA
acatacacttgtgatcagtg

SEQ ID NO: 98064 - DNA, 20 bp, Artificial Sequence
  MKO10098064_B_Mcm7
  gRNA
cattctcgtaataaaactct

SEQ ID NO: 98065 - DNA, 20 bp, Artificial Sequence
  MKO10098065_B_Mcm7
  gRNA
gttcaagtatgggacccagt

SEQ ID NO: 98066 - DNA, 20 bp, Artificial Sequence
  MKO10098066_B_Mcm8
  gRNA
tatggggctggcaatacatc

SEQ ID NO: 98067 - DNA, 20 bp, Artificial Sequence
  MKO10098067_B_Mcm8
  gRNA
gaggctttatgttgctgacc

SEQ ID NO: 98068 - DNA, 20 bp, Artificial Sequence
  MKO10098068_B_Mcm8
  gRNA
tgcttgaatcttctcaataa

SEQ ID NO: 98069 - DNA, 20 bp, Artificial Sequence
  MKO10098069_B_Mcm9
  gRNA
cgcccgcctgcgtccgcacc

SEQ ID NO: 98070 - DNA, 20 bp, Artificial Sequence
  MKO10098070_B_Mcm9
  gRNA
agaataactttcatagaccg

SEQ ID NO: 98071 - DNA, 20 bp, Artificial Sequence
  MKO10098071_B_Mcm9
  gRNA
atggataacccctccgtctc

SEQ ID NO: 98072 - DNA, 20 bp, Artificial Sequence
  MKO10098072_B_Mcmbp
  gRNA
tttgacccacgaagactccc

SEQ ID NO: 98073 - DNA, 20 bp, Artificial Sequence
  MKO10098073_B_Mcmbp
  gRNA
ttctactgtgtccccgtgcc

SEQ ID NO: 98074 - DNA, 20 bp, Artificial Sequence
  MKO10098074_B_Mcmbp
  gRNA
gaaggttattgaatacttca

SEQ ID NO: 98075 - DNA, 20 bp, Artificial Sequence
  MKO10098075_B_Mcmdc2
  gRNA
actataaccaagtacactca

SEQ ID NO: 98076 - DNA, 20 bp, Artificial Sequence
  MKO10098076_B_Mcmdc2
  gRNA
ccttgcaccttgagtgtact

SEQ ID NO: 98077 - DNA, 20 bp, Artificial Sequence
  MKO10098077_B_Mcmdc2
  gRNA
gttgcagattctgtagctcc

SEQ ID NO: 98078 - DNA, 20 bp, Artificial Sequence
  MKO10098078_B_Mcoln1
  gRNA
cctgtccgcagactgtatcc

SEQ ID NO: 98079 - DNA, 20 bp, Artificial Sequence
  MKO10098079_B_Mcoln1
  gRNA
cacctttgcagcctacacac

SEQ ID NO: 98080 - DNA, 20 bp, Artificial Sequence
  MKO10098080_B_Mcoln1
  gRNA
acccatcagagtaacccagc

SEQ ID NO: 98081 - DNA, 20 bp, Artificial Sequence
  MKO10098081_B_Mcoln2
  gRNA
tgtaagcagcactacaagac

SEQ ID NO: 98082 - DNA, 20 bp, Artificial Sequence
  MKO10098082_B_Mcoln2
  gRNA
tgctctagactgcattcacc

SEQ ID NO: 98083 - DNA, 20 bp, Artificial Sequence
  MKO10098083_B_Mcoln2
  gRNA
cagctgtagcatatacactc

SEQ ID NO: 98084 - DNA, 20 bp, Artificial Sequence
  MKO10098084_B_Mcoln3
  gRNA
caatcacgcttatgagaaca

SEQ ID NO: 98085 - DNA, 20 bp, Artificial Sequence
  MKO10098085_B_Mcoln3
  gRNA
ttcgatccatgtagcccttt

SEQ ID NO: 98086 - DNA, 20 bp, Artificial Sequence
  MKO10098086_B_Mcoln3
  gRNA
gggtcactgcaaagatgatc

SEQ ID NO: 98087 - DNA, 20 bp, Artificial Sequence
  MKO10098087_B_Mcph1
  gRNA
ttgtggcctatgttgaagta

SEQ ID NO: 98088 - DNA, 20 bp, Artificial Sequence
  MKO10098088_B_Mcph1
  gRNA
ttctacagatgcaggatggc

SEQ ID NO: 98089 - DNA, 20 bp, Artificial Sequence
  MKO10098089_B_Mcph1
  gRNA
tgcaaagcaacttgaggata

SEQ ID NO: 98090 - DNA, 20 bp, Artificial Sequence
  MKO10098090_B_Mcpt1
  gRNA
tgtccgtgatgatcttcaga

SEQ ID NO: 98091 - DNA, 20 bp, Artificial Sequence
  MKO10098091_B_Mcpt1
  gRNA
cccatggtattgtatcttat

SEQ ID NO: 98092 - DNA, 20 bp, Artificial Sequence
  MKO10098092_B_Mcpt1
  gRNA
ccccataagatacaatacca

SEQ ID NO: 98093 - DNA, 20 bp, Artificial Sequence
  MKO10098093_B_Mcpt2
  gRNA
gccacactatcacacactag

SEQ ID NO: 98094 - DNA, 20 bp, Artificial Sequence
  MKO10098094_B_Mcpt2
  gRNA
cccaaagtttcagtaccttt

SEQ ID NO: 98095 - DNA, 20 bp, Artificial Sequence
  MKO10098095_B_Mcpt2
  gRNA
gaatctcctattacctgccc

SEQ ID NO: 98096 - DNA, 20 bp, Artificial Sequence
  MKO10098096_B_Mcpt4
  gRNA
ggtattgtatcttatggacg

SEQ ID NO: 98097 - DNA, 20 bp, Artificial Sequence
  MKO10098097_B_Mcpt4
  gRNA
agctgtgaaccctctctcag

SEQ ID NO: 98098 - DNA, 20 bp, Artificial Sequence
  MKO10098098_B_Mcpt4
  gRNA
ttggaatagaagttgtactt

SEQ ID NO: 98099 - DNA, 20 bp, Artificial Sequence
  MKO10098099_B_Mcpt8
  gRNA
ttacgatgtctcttgccacc

SEQ ID NO: 98100 - DNA, 20 bp, Artificial Sequence
  MKO10098100_B_Mcpt8
  gRNA
gtcagttgtcgcttgtgtac

SEQ ID NO: 98101 - DNA, 20 bp, Artificial Sequence
  MKO10098101_B_Mcpt8
  gRNA
tcattgtcaaagctctcgtg

SEQ ID NO: 98102 - DNA, 20 bp, Artificial Sequence
  MKO10098102_B_Mcpt9
  gRNA
ttggcaaagtcagaggggcc

SEQ ID NO: 98103 - DNA, 20 bp, Artificial Sequence
  MKO10098103_B_Mcpt9
  gRNA
agaagaatgactgtcaccct

SEQ ID NO: 98104 - DNA, 20 bp, Artificial Sequence
  MKO10098104_B_Mcpt9
  gRNA
ttctcacattatgagctcca

SEQ ID NO: 98105 - DNA, 20 bp, Artificial Sequence
  MKO10098105_B_Mcrs1
  gRNA
tcagctgccgcttcaccctt

SEQ ID NO: 98106 - DNA, 20 bp, Artificial Sequence
  MKO10098106_B_Mcrs1
  gRNA
cctgcagcacagcattgatg

SEQ ID NO: 98107 - DNA, 20 bp, Artificial Sequence
  MKO10098107_B_Mcrs1
  gRNA
gatagtgcccagggcctggg

SEQ ID NO: 98108 - DNA, 20 bp, Artificial Sequence
  MKO10098108_B_Mctp1
  gRNA
cattatcctgaccatgacct

SEQ ID NO: 98109 - DNA, 20 bp, Artificial Sequence
  MKO10098109_B_Mctp1
  gRNA
gagttggaaaagatccagta

SEQ ID NO: 98110 - DNA, 20 bp, Artificial Sequence
  MKO10098110_B_Mctp1
  gRNA
atttacagacaatgctaatg

SEQ ID NO: 98111 - DNA, 20 bp, Artificial Sequence
  MKO10098111_B_Mctp2
  gRNA
acaactatctcatcccaaat

SEQ ID NO: 98112 - DNA, 20 bp, Artificial Sequence
  MKO10098112_B_Mctp2
  gRNA
tcagagatcttgaacttaac

SEQ ID NO: 98113 - DNA, 20 bp, Artificial Sequence
  MKO10098113_B_Mctp2
  gRNA
cttaaccaagtctgatttca

SEQ ID NO: 98114 - DNA, 20 bp, Artificial Sequence
  MKO10098114_B_Mcts1
  gRNA
cctttatcaacctgctgatg

SEQ ID NO: 98115 - DNA, 20 bp, Artificial Sequence
  MKO10098115_B_Mcts1
  gRNA
ttatgaagtaatcttaaagt

SEQ ID NO: 98116 - DNA, 20 bp, Artificial Sequence
  MKO10098116_B_Mcts1
  gRNA
aaaacaacatgctttatgtg

SEQ ID NO: 98117 - DNA, 20 bp, Artificial Sequence
  MKO10098117_B_Mcts2
  gRNA
ctctgccatgaccgccacga

SEQ ID NO: 98118 - DNA, 20 bp, Artificial Sequence
  MKO10098118_B_Mcts2
  gRNA
actgaaaacttccgttatta

SEQ ID NO: 98119 - DNA, 20 bp, Artificial Sequence
  MKO10098119_B_Mcts2
  gRNA
ttgtgaagtagtcttagcgt

SEQ ID NO: 98120 - DNA, 20 bp, Artificial Sequence
  MKO10098120_B_Mcur1
  gRNA
gtctgctaagtgccatcagc

SEQ ID NO: 98121 - DNA, 20 bp, Artificial Sequence
  MKO10098121_B_Mcur1
  gRNA
ccatcacttgttgctttaac

SEQ ID NO: 98122 - DNA, 20 bp, Artificial Sequence
  MKO10098122_B_Mcur1
  gRNA
agaaatcattgtgtctgcac

SEQ ID NO: 98123 - DNA, 20 bp, Artificial Sequence
  MKO10098123_B_Mcu
  gRNA
atgacttaacataccacgta

SEQ ID NO: 98124 - DNA, 20 bp, Artificial Sequence
  MKO10098124_B_Mcu
  gRNA
cgttcgagtcgctgcctcca

SEQ ID NO: 98125 - DNA, 20 bp, Artificial Sequence
  MKO10098125_B_Mcu
  gRNA
tcagcgtcgctgcatcttca

SEQ ID NO: 98126 - DNA, 20 bp, Artificial Sequence
  MKO10098126_B_Mdc1
  gRNA
tccctgccagtaccatcgcc

SEQ ID NO: 98127 - DNA, 20 bp, Artificial Sequence
  MKO10098127_B_Mdc1
  gRNA
ggtgtgtggcgaatggacaa

SEQ ID NO: 98128 - DNA, 20 bp, Artificial Sequence
  MKO10098128_B_Mdc1
  gRNA
ttcgccacacaccttccaga

SEQ ID NO: 98129 - DNA, 20 bp, Artificial Sequence
  MKO10098129_B_Mdfic
  gRNA
gtcccactcaccttcgggtg

SEQ ID NO: 98130 - DNA, 20 bp, Artificial Sequence
  MKO10098130_B_Mdfic
  gRNA
cggagccaaacatgtgtccg

SEQ ID NO: 98131 - DNA, 20 bp, Artificial Sequence
  MKO10098131_B_Mdfic
  gRNA
acagtctgacgattcacaac

SEQ ID NO: 98132 - DNA, 20 bp, Artificial Sequence
  MKO10098132_B_Mdfi
  gRNA
atggatgcgtctgcaacttc

SEQ ID NO: 98133 - DNA, 20 bp, Artificial Sequence
  MKO10098133_B_Mdfi
  gRNA
aagatccactcaccctgtag

SEQ ID NO: 98134 - DNA, 20 bp, Artificial Sequence
  MKO10098134_B_Mdfi
  gRNA
gcatatctccaagcagtctg

SEQ ID NO: 98135 - DNA, 20 bp, Artificial Sequence
  MKO10098135_B_Mdga1
  gRNA
gatgccgcacacattgcgca

SEQ ID NO: 98136 - DNA, 20 bp, Artificial Sequence
  MKO10098136_B_Mdga1
  gRNA
ggcgcctgtacccgtggtgt

SEQ ID NO: 98137 - DNA, 20 bp, Artificial Sequence
  MKO10098137_B_Mdga1
  gRNA
gtctgatgcaccgttagcac

SEQ ID NO: 98138 - DNA, 20 bp, Artificial Sequence
  MKO10098138_B_Mdga2
  gRNA
agcaataaagtcgatccgag

SEQ ID NO: 98139 - DNA, 20 bp, Artificial Sequence
  MKO10098139_B_Mdga2
  gRNA
acccccctgtgcgctatagc

SEQ ID NO: 98140 - DNA, 20 bp, Artificial Sequence
  MKO10098140_B_Mdga2
  gRNA
ccgaaagggtctataccatc

SEQ ID NO: 98141 - DNA, 20 bp, Artificial Sequence
  MKO10098141_B_Mdh1b
  gRNA
tcacgcaacatcctgacaag

SEQ ID NO: 98142 - DNA, 20 bp, Artificial Sequence
  MKO10098142_B_Mdh1b
  gRNA
agagagttgctggatcgtgg

SEQ ID NO: 98143 - DNA, 20 bp, Artificial Sequence
  MKO10098143_B_Mdh1b
  gRNA
tgtcacttccaacatgacga

SEQ ID NO: 98144 - DNA, 20 bp, Artificial Sequence
  MKO10098144_B_Mdh1
  gRNA
cacccccatgatgggtgttc

SEQ ID NO: 98145 - DNA, 20 bp, Artificial Sequence
  MKO10098145_B_Mdh1
  gRNA
cacagtcttgcagttccatc

SEQ ID NO: 98146 - DNA, 20 bp, Artificial Sequence
  MKO10098146_B_Mdh1
  gRNA
gtccatagatgtcattgcaa

SEQ ID NO: 98147 - DNA, 20 bp, Artificial Sequence
  MKO10098147_B_Mdh2
  gRNA
cgtcagagcgaacacgtttg

SEQ ID NO: 98148 - DNA, 20 bp, Artificial Sequence
  MKO10098148_B_Mdh2
  gRNA
cagttgccagattgcctcaa

SEQ ID NO: 98149 - DNA, 20 bp, Artificial Sequence
  MKO10098149_B_Mdh2
  gRNA
gatcatcccaggaatgacac

SEQ ID NO: 98150 - DNA, 20 bp, Artificial Sequence
  MKO10098150_B_Mdk
  gRNA
acccctaggatgcagcaccg

SEQ ID NO: 98151 - DNA, 20 bp, Artificial Sequence
  MKO10098151_B_Mdk
  gRNA
gacccagcgcgtccattgca

SEQ ID NO: 98152 - DNA, 20 bp, Artificial Sequence
  MKO10098152_B_Mdk
  gRNA
aggtgcagggcttagtcacg

SEQ ID NO: 98153 - DNA, 20 bp, Artificial Sequence
  MKO10098153_B_Mdm1
  gRNA
aagccatgcgccagttagcg

SEQ ID NO: 98154 - DNA, 20 bp, Artificial Sequence
  MKO10098154_B_Mdm1
  gRNA
tgggtgggtaccttctttac

SEQ ID NO: 98155 - DNA, 20 bp, Artificial Sequence
  MKO10098155_B_Mdm1
  gRNA
ctcatgggcaggacttagat

SEQ ID NO: 98156 - DNA, 20 bp, Artificial Sequence
  MKO10098156_B_Mdm2
  gRNA
tattgttcaaatgatctcct

SEQ ID NO: 98157 - DNA, 20 bp, Artificial Sequence
  MKO10098157_B_Mdm2
  gRNA
ttcagatcactcccaccttc

SEQ ID NO: 98158 - DNA, 20 bp, Artificial Sequence
  MKO10098158_B_Mdm2
  gRNA
gagagcagacgtcagcctga

SEQ ID NO: 98159 - DNA, 20 bp, Artificial Sequence
  MKO10098159_B_Mdm4
  gRNA
accttcagtcggtcttgact

SEQ ID NO: 98160 - DNA, 20 bp, Artificial Sequence
  MKO10098160_B_Mdm4
  gRNA
gaagcagctctatgatcaac

SEQ ID NO: 98161 - DNA, 20 bp, Artificial Sequence
  MKO10098161_B_Mdm4
  gRNA
tttcttagcatgtcatagag

SEQ ID NO: 98162 - DNA, 20 bp, Artificial Sequence
  MKO10098162_B_Mdn1
  gRNA
gctactcacggaagaacgtc

SEQ ID NO: 98163 - DNA, 20 bp, Artificial Sequence
  MKO10098163_B_Mdn1
  gRNA
tacagctaactgtctcgctt

SEQ ID NO: 98164 - DNA, 20 bp, Artificial Sequence
  MKO10098164_B_Mdn1
  gRNA
aacacaagttatccttctta

SEQ ID NO: 98165 - DNA, 20 bp, Artificial Sequence
  MKO10098165_B_Mdp1
  gRNA
ccgggtacaattggatgttc

SEQ ID NO: 98166 - DNA, 20 bp, Artificial Sequence
  MKO10098166_B_Mdp1
  gRNA
attcagcgggaaatctaccc

SEQ ID NO: 98167 - DNA, 20 bp, Artificial Sequence
  MKO10098167_B_Mdp1
  gRNA
atcatagacgttggcagact

SEQ ID NO: 98168 - DNA, 20 bp, Artificial Sequence
  MKO10098168_B_Me1
  gRNA
ctggccctgtacacggcatg

SEQ ID NO: 98169 - DNA, 20 bp, Artificial Sequence
  MKO10098169_B_Me1
  gRNA
ccacaggtatctcctgttaa

SEQ ID NO: 98170 - DNA, 20 bp, Artificial Sequence
  MKO10098170_B_Me1
  gRNA
gagctcctggctgatgatgc

SEQ ID NO: 98171 - DNA, 20 bp, Artificial Sequence
  MKO10098171_B_Me2
  gRNA
ttagatcaattgtggataac

SEQ ID NO: 98172 - DNA, 20 bp, Artificial Sequence
  MKO10098172_B_Me2
  gRNA
actgttggcgtgtacacaat

SEQ ID NO: 98173 - DNA, 20 bp, Artificial Sequence
  MKO10098173_B_Me2
  gRNA
ttacaagagcgacaaatgct

SEQ ID NO: 98174 - DNA, 20 bp, Artificial Sequence
  MKO10098174_B_Me3
  gRNA
cagcctctcttcaagtgtaa

SEQ ID NO: 98175 - DNA, 20 bp, Artificial Sequence
  MKO10098175_B_Me3
  gRNA
tgttggtgccaacatctagc

SEQ ID NO: 98176 - DNA, 20 bp, Artificial Sequence
  MKO10098176_B_Me3
  gRNA
tgcccatgccgtagcagccc

SEQ ID NO: 98177 - DNA, 20 bp, Artificial Sequence
  MKO10098177_B_Mea1
  gRNA
ggagtaagcctgcctgcacc

SEQ ID NO: 98178 - DNA, 20 bp, Artificial Sequence
  MKO10098178_B_Mea1
  gRNA
agagctgtggctgctcaatg

SEQ ID NO: 98179 - DNA, 20 bp, Artificial Sequence
  MKO10098179_B_Mea1
  gRNA
ggtctggcagatgaagcccc

SEQ ID NO: 98180 - DNA, 20 bp, Artificial Sequence
  MKO10098180_B_Meaf6
  gRNA
ggaagttcaaggaggccgaa

SEQ ID NO: 98181 - DNA, 20 bp, Artificial Sequence
  MKO10098181_B_Meaf6
  gRNA
atattatccgtggctgggat

SEQ ID NO: 98182 - DNA, 20 bp, Artificial Sequence
  MKO10098182_B_Meaf6
  gRNA
ctggaagacactcagatgta

SEQ ID NO: 98183 - DNA, 20 bp, Artificial Sequence
  MKO10098183_B_Mecom
  gRNA
ggtcacattccttacagtcc

SEQ ID NO: 98184 - DNA, 20 bp, Artificial Sequence
  MKO10098184_B_Mecom
  gRNA
ctgtttgaggcctgacgaag

SEQ ID NO: 98185 - DNA, 20 bp, Artificial Sequence
  MKO10098185_B_Mecom
  gRNA
ctcagtcaactttgtcccac

SEQ ID NO: 98186 - DNA, 20 bp, Artificial Sequence
  MKO10098186_B_Mecp2
  gRNA
gacggtcagcatcgaggtca

SEQ ID NO: 98187 - DNA, 20 bp, Artificial Sequence
  MKO10098187_B_Mecp2
  gRNA
aacaggattccatggtagct

SEQ ID NO: 98188 - DNA, 20 bp, Artificial Sequence
  MKO10098188_B_Mecp2
  gRNA
ccctaacatcccagctacca

SEQ ID NO: 98189 - DNA, 20 bp, Artificial Sequence
  MKO10098189_B_Mecr
  gRNA
agggaacgaaggcgttgggc

SEQ ID NO: 98190 - DNA, 20 bp, Artificial Sequence
  MKO10098190_B_Mecr
  gRNA
aggcgatctgaatgactgct

SEQ ID NO: 98191 - DNA, 20 bp, Artificial Sequence
  MKO10098191_B_Mecr
  gRNA
aaggatctgacgtccacgtg

SEQ ID NO: 98192 - DNA, 20 bp, Artificial Sequence
  MKO10098192_B_Med10
  gRNA
gctctacaccaaagaatgcc

SEQ ID NO: 98193 - DNA, 20 bp, Artificial Sequence
  MKO10098193_B_Med10
  gRNA
agctaaaaacgagcaagtca

SEQ ID NO: 98194 - DNA, 20 bp, Artificial Sequence
  MKO10098194_B_Med10
  gRNA
tcccagaaactttattgtta

SEQ ID NO: 98195 - DNA, 20 bp, Artificial Sequence
  MKO10098195_B_Med11
  gRNA
tcgccacatcactaatcttg

SEQ ID NO: 98196 - DNA, 20 bp, Artificial Sequence
  MKO10098196_B_Med11
  gRNA
ccaaggaaaagactaacgag

SEQ ID NO: 98197 - DNA, 20 bp, Artificial Sequence
  MKO10098197_B_Med11
  gRNA
ccgcctcaagattagtgatg

SEQ ID NO: 98198 - DNA, 20 bp, Artificial Sequence
  MKO10098198_B_Med12l
  gRNA
agctaagtattctgtgccaa

SEQ ID NO: 98199 - DNA, 20 bp, Artificial Sequence
  MKO10098199_B_Med12l
  gRNA
gttgtactcccactgcttca

SEQ ID NO: 98200 - DNA, 20 bp, Artificial Sequence
  MKO10098200_B_Med12l
  gRNA
gccatgttcgtctccagtga

SEQ ID NO: 98201 - DNA, 20 bp, Artificial Sequence
  MKO10098201_B_Med12
  gRNA
catcacaggcaccgtgtatt

SEQ ID NO: 98202 - DNA, 20 bp, Artificial Sequence
  MKO10098202_B_Med12
  gRNA
cgtcaacttcaatcctgcca

SEQ ID NO: 98203 - DNA, 20 bp, Artificial Sequence
  MKO10098203_B_Med12
  gRNA
gaagtccctaatgaaccaga

SEQ ID NO: 98204 - DNA, 20 bp, Artificial Sequence
  MKO10098204_B_Med13l
  gRNA
tcctcgttgatcaaatagat

SEQ ID NO: 98205 - DNA, 20 bp, Artificial Sequence
  MKO10098205_B_Med13l
  gRNA
gtttgtgcggccctatgaca

SEQ ID NO: 98206 - DNA, 20 bp, Artificial Sequence
  MKO10098206_B_Med13l
  gRNA
catgatgtattactcccact

SEQ ID NO: 98207 - DNA, 20 bp, Artificial Sequence
  MKO10098207_B_Med13
  gRNA
aaatggcactctcacgggac

SEQ ID NO: 98208 - DNA, 20 bp, Artificial Sequence
  MKO10098208_B_Med13
  gRNA
ttccgcccctattctgtttc

SEQ ID NO: 98209 - DNA, 20 bp, Artificial Sequence
  MKO10098209_B_Med13
  gRNA
tgccaattcgtacaaagttt

SEQ ID NO: 98210 - DNA, 20 bp, Artificial Sequence
  MKO10098210_B_Med14
  gRNA
actgtaagatttgctagctg

SEQ ID NO: 98211 - DNA, 20 bp, Artificial Sequence
  MKO10098211_B_Med14
  gRNA
gaccagggcatctctagcta

SEQ ID NO: 98212 - DNA, 20 bp, Artificial Sequence
  MKO10098212_B_Med14
  gRNA
ttaatcagattcttagacat

SEQ ID NO: 98213 - DNA, 20 bp, Artificial Sequence
  MKO10098213_B_Med15
  gRNA
ttacccgggtcttggccttc

SEQ ID NO: 98214 - DNA, 20 bp, Artificial Sequence
  MKO10098214_B_Med15
  gRNA
tatccttgctagatttactg

SEQ ID NO: 98215 - DNA, 20 bp, Artificial Sequence
  MKO10098215_B_Med15
  gRNA
ggatgagtatctttcccttg

SEQ ID NO: 98216 - DNA, 20 bp, Artificial Sequence
  MKO10098216_B_Med16
  gRNA
ctttacaccgttgtgcagcc

SEQ ID NO: 98217 - DNA, 20 bp, Artificial Sequence
  MKO10098217_B_Med16
  gRNA
caccctggtcatcattgcgt

SEQ ID NO: 98218 - DNA, 20 bp, Artificial Sequence
  MKO10098218_B_Med16
  gRNA
cgatggggtccccctccacc

SEQ ID NO: 98219 - DNA, 20 bp, Artificial Sequence
  MKO10098219_B_Med17
  gRNA
gtgccaagatcaccaatgtc

SEQ ID NO: 98220 - DNA, 20 bp, Artificial Sequence
  MKO10098220_B_Med17
  gRNA
tccaagaagaagtccctcgc

SEQ ID NO: 98221 - DNA, 20 bp, Artificial Sequence
  MKO10098221_B_Med17
  gRNA
tgacatacctggcttggatt

SEQ ID NO: 98222 - DNA, 20 bp, Artificial Sequence
  MKO10098222_B_Med18
  gRNA
catgatggagtacctcctgc

SEQ ID NO: 98223 - DNA, 20 bp, Artificial Sequence
  MKO10098223_B_Med18
  gRNA
ggaagaccatctcgtgatca

SEQ ID NO: 98224 - DNA, 20 bp, Artificial Sequence
  MKO10098224_B_Med18
  gRNA
atacctgggacagcccgaaa

SEQ ID NO: 98225 - DNA, 20 bp, Artificial Sequence
  MKO10098225_B_Med19
  gRNA
tttaatcacacactacaacc

SEQ ID NO: 98226 - DNA, 20 bp, Artificial Sequence
  MKO10098226_B_Med19
  gRNA
gcacaaacagagccgcaccc

SEQ ID NO: 98227 - DNA, 20 bp, Artificial Sequence
  MKO10098227_B_Med19
  gRNA
cttgagagctgcccatacct

SEQ ID NO: 98228 - DNA, 20 bp, Artificial Sequence
  MKO10098228_B_Med1
  gRNA
tacttgacgcacaagcttaa

SEQ ID NO: 98229 - DNA, 20 bp, Artificial Sequence
  MKO10098229_B_Med1
  gRNA
gatgtaacactcagtgccac

SEQ ID NO: 98230 - DNA, 20 bp, Artificial Sequence
  MKO10098230_B_Med1
  gRNA
ataccacaggattctcccca

SEQ ID NO: 98231 - DNA, 20 bp, Artificial Sequence
  MKO10098231_B_Med20
  gRNA
cactaacggatcccagccac

SEQ ID NO: 98232 - DNA, 20 bp, Artificial Sequence
  MKO10098232_B_Med20
  gRNA
ggctccctagaaaactctgt

SEQ ID NO: 98233 - DNA, 20 bp, Artificial Sequence
  MKO10098233_B_Med20
  gRNA
agactcttgccctcagccac

SEQ ID NO: 98234 - DNA, 20 bp, Artificial Sequence
  MKO10098234_B_Med21
  gRNA
agcagctgtagactcttcac

SEQ ID NO: 98235 - DNA, 20 bp, Artificial Sequence
  MKO10098235_B_Med21
  gRNA
agagtctacagctgctttac

SEQ ID NO: 98236 - DNA, 20 bp, Artificial Sequence
  MKO10098236_B_Med21
  gRNA
acactgctgtaatacaccaa

SEQ ID NO: 98237 - DNA, 20 bp, Artificial Sequence
  MKO10098237_B_Med22
  gRNA
tcgggctactcagggcgaac

SEQ ID NO: 98238 - DNA, 20 bp, Artificial Sequence
  MKO10098238_B_Med22
  gRNA
cttggcggtcttgatgatct

SEQ ID NO: 98239 - DNA, 20 bp, Artificial Sequence
  MKO10098239_B_Med22
  gRNA
ctcgacgcagattctgctga

SEQ ID NO: 98240 - DNA, 20 bp, Artificial Sequence
  MKO10098240_B_Med23
  gRNA
aaagtccactccaaaactgc

SEQ ID NO: 98241 - DNA, 20 bp, Artificial Sequence
  MKO10098241_B_Med23
  gRNA
cctctatgactgcttagcaa

SEQ ID NO: 98242 - DNA, 20 bp, Artificial Sequence
  MKO10098242_B_Med23
  gRNA
ctctgcagttgcgtctccat

SEQ ID NO: 98243 - DNA, 20 bp, Artificial Sequence
  MKO10098243_B_Med24
  gRNA
tgtgctcaccgccatcagta

SEQ ID NO: 98244 - DNA, 20 bp, Artificial Sequence
  MKO10098244_B_Med24
  gRNA
catacaggcctcctctagtt

SEQ ID NO: 98245 - DNA, 20 bp, Artificial Sequence
  MKO10098245_B_Med24
  gRNA
gaagtacgccattagttccc

SEQ ID NO: 98246 - DNA, 20 bp, Artificial Sequence
  MKO10098246_B_Med25
  gRNA
aggctgcactaccgagagcc

SEQ ID NO: 98247 - DNA, 20 bp, Artificial Sequence
  MKO10098247_B_Med25
  gRNA
acgggggtgagttgcagatg

SEQ ID NO: 98248 - DNA, 20 bp, Artificial Sequence
  MKO10098248_B_Med25
  gRNA
ccacggtgttgaacaccaca

SEQ ID NO: 98249 - DNA, 20 bp, Artificial Sequence
  MKO10098249_B_Med26
  gRNA
tacgttgctctgggagtcga

SEQ ID NO: 98250 - DNA, 20 bp, Artificial Sequence
  MKO10098250_B_Med26
  gRNA
ccaggcaatgacagcggctc

SEQ ID NO: 98251 - DNA, 20 bp, Artificial Sequence
  MKO10098251_B_Med26
  gRNA
gatggggtatctctccagac

SEQ ID NO: 98252 - DNA, 20 bp, Artificial Sequence
  MKO10098252_B_Med27
  gRNA
ctgatttgcagagcgcttca

SEQ ID NO: 98253 - DNA, 20 bp, Artificial Sequence
  MKO10098253_B_Med27
  gRNA
aaccaccctcttcataacag

SEQ ID NO: 98254 - DNA, 20 bp, Artificial Sequence
  MKO10098254_B_Med27
  gRNA
tctcagacggcttgcctacc

SEQ ID NO: 98255 - DNA, 20 bp, Artificial Sequence
  MKO10098255_B_Med28
  gRNA
cgagttggagtcatccttcg

SEQ ID NO: 98256 - DNA, 20 bp, Artificial Sequence
  MKO10098256_B_Med28
  gRNA
tgtaggatgtctcggaacta

SEQ ID NO: 98257 - DNA, 20 bp, Artificial Sequence
  MKO10098257_B_Med28
  gRNA
ttgcaatgtccaaaaacttc

SEQ ID NO: 98258 - DNA, 20 bp, Artificial Sequence
  MKO10098258_B_Med29
  gRNA
gcagcgctttgacaagtgtt

SEQ ID NO: 98259 - DNA, 20 bp, Artificial Sequence
  MKO10098259_B_Med29
  gRNA
ttaaaactagactttgatga

SEQ ID NO: 98260 - DNA, 20 bp, Artificial Sequence
  MKO10098260_B_Med29
  gRNA
tagtgttctgaatcagattc

SEQ ID NO: 98261 - DNA, 20 bp, Artificial Sequence
  MKO10098261_B_Med30
  gRNA
agaccggctaacaaagctgc

SEQ ID NO: 98262 - DNA, 20 bp, Artificial Sequence
  MKO10098262_B_Med30
  gRNA
atcaattacggaatctcatc

SEQ ID NO: 98263 - DNA, 20 bp, Artificial Sequence
  MKO10098263_B_Med30
  gRNA
gatggaccccattcctgttg

SEQ ID NO: 98264 - DNA, 20 bp, Artificial Sequence
  MKO10098264_B_Med31
  gRNA
cgtacctgtctccatagcga

SEQ ID NO: 98265 - DNA, 20 bp, Artificial Sequence
  MKO10098265_B_Med31
  gRNA
aacttacaattaaggtagtt

SEQ ID NO: 98266 - DNA, 20 bp, Artificial Sequence
  MKO10098266_B_Med31
  gRNA
ctttcagttcttgcccaaag

SEQ ID NO: 98267 - DNA, 20 bp, Artificial Sequence
  MKO10098267_B_Med4
  gRNA
tctctaaagcctgcatttcg

SEQ ID NO: 98268 - DNA, 20 bp, Artificial Sequence
  MKO10098268_B_Med4
  gRNA
ttacctggaacccaagtcag

SEQ ID NO: 98269 - DNA, 20 bp, Artificial Sequence
  MKO10098269_B_Med4
  gRNA
aaatcagaagctattacagc

SEQ ID NO: 98270 - DNA, 20 bp, Artificial Sequence
  MKO10098270_B_Med6
  gRNA
gcccctttcagtcagatggt

SEQ ID NO: 98271 - DNA, 20 bp, Artificial Sequence
  MKO10098271_B_Med6
  gRNA
tcttgttacctgaacaaatc

SEQ ID NO: 98272 - DNA, 20 bp, Artificial Sequence
  MKO10098272_B_Med6
  gRNA
atttccacccagatttgttc

SEQ ID NO: 98273 - DNA, 20 bp, Artificial Sequence
  MKO10098273_B_Med7
  gRNA
gatttgccccattcagaagc

SEQ ID NO: 98274 - DNA, 20 bp, Artificial Sequence
  MKO10098274_B_Med7
  gRNA
agcgccttgaaacagctgag

SEQ ID NO: 98275 - DNA, 20 bp, Artificial Sequence
  MKO10098275_B_Med7
  gRNA
ttcttatgatcaaattgcat

SEQ ID NO: 98276 - DNA, 20 bp, Artificial Sequence
  MKO10098276_B_Med8
  gRNA
gcaatccttaccaggtcagc

SEQ ID NO: 98277 - DNA, 20 bp, Artificial Sequence
  MKO10098277_B_Med8
  gRNA
agttggaaaacgagtatgac

SEQ ID NO: 98278 - DNA, 20 bp, Artificial Sequence
  MKO10098278_B_Med8
  gRNA
atattacagcgtcaaactga

SEQ ID NO: 98279 - DNA, 20 bp, Artificial Sequence
  MKO10098279_B_Med9
  gRNA
gctcacgtggatgccgggca

SEQ ID NO: 98280 - DNA, 20 bp, Artificial Sequence
  MKO10098280_B_Med9
  gRNA
gggagcgcagcgaccggcag

SEQ ID NO: 98281 - DNA, 20 bp, Artificial Sequence
  MKO10098281_B_Med9
  gRNA
cttctgcagcagctcgttct

SEQ ID NO: 98282 - DNA, 20 bp, Artificial Sequence
  MKO10098282_B_Medag
  gRNA
tgtgttcacaagaaacgcat

SEQ ID NO: 98283 - DNA, 20 bp, Artificial Sequence
  MKO10098283_B_Medag
  gRNA
aacgatactgagcaaaccta

SEQ ID NO: 98284 - DNA, 20 bp, Artificial Sequence
  MKO10098284_B_Medag
  gRNA
ttcagaccaatcagataagt

SEQ ID NO: 98285 - DNA, 20 bp, Artificial Sequence
  MKO10098285_B_Mef2a
  gRNA
ctgaatctgtcctccgagag

SEQ ID NO: 98286 - DNA, 20 bp, Artificial Sequence
  MKO10098286_B_Mef2a
  gRNA
gagttcgtcctgctttcatg

SEQ ID NO: 98287 - DNA, 20 bp, Artificial Sequence
  MKO10098287_B_Mef2a
  gRNA
ataacgagcctcatgaaagc

SEQ ID NO: 98288 - DNA, 20 bp, Artificial Sequence
  MKO10098288_B_Mef2b
  gRNA
tcacccgggggtcgaaagtg

SEQ ID NO: 98289 - DNA, 20 bp, Artificial Sequence
  MKO10098289_B_Mef2b
  gRNA
agtcctcttacatagatccg

SEQ ID NO: 98290 - DNA, 20 bp, Artificial Sequence
  MKO10098290_B_Mef2b
  gRNA
tctcacgaattctagaccaa

SEQ ID NO: 98291 - DNA, 20 bp, Artificial Sequence
  MKO10098291_B_Mef2c
  gRNA
agtgtccagccataacagtt

SEQ ID NO: 98292 - DNA, 20 bp, Artificial Sequence
  MKO10098292_B_Mef2c
  gRNA
tgctgtacaccaaactgtta

SEQ ID NO: 98293 - DNA, 20 bp, Artificial Sequence
  MKO10098293_B_Mef2c
  gRNA
ggagatctgacatccggtgc

SEQ ID NO: 98294 - DNA, 20 bp, Artificial Sequence
  MKO10098294_B_Mef2d
  gRNA
caagtaccggcgggccagtg

SEQ ID NO: 98295 - DNA, 20 bp, Artificial Sequence
  MKO10098295_B_Mef2d
  gRNA
cctggtgacatcatccctta

SEQ ID NO: 98296 - DNA, 20 bp, Artificial Sequence
  MKO10098296_B_Mef2d
  gRNA
cagcaatccaagtagctctc

SEQ ID NO: 98297 - DNA, 20 bp, Artificial Sequence
  MKO10098297_B_Mefv
  gRNA
ctccccaatcaacgatgttt

SEQ ID NO: 98298 - DNA, 20 bp, Artificial Sequence
  MKO10098298_B_Mefv
  gRNA
caagaaaacagacgatttcc

SEQ ID NO: 98299 - DNA, 20 bp, Artificial Sequence
  MKO10098299_B_Mefv
  gRNA
tgtttagcagatgatcacca

SEQ ID NO: 98300 - DNA, 20 bp, Artificial Sequence
  MKO10098300_B_Megf10
  gRNA
cagctactcggtgactgtgc

SEQ ID NO: 98301 - DNA, 20 bp, Artificial Sequence
  MKO10098301_B_Megf10
  gRNA
acttacggacacacatgtct

SEQ ID NO: 98302 - DNA, 20 bp, Artificial Sequence
  MKO10098302_B_Megf10
  gRNA
ttggagcaatgcagcgacca

SEQ ID NO: 98303 - DNA, 20 bp, Artificial Sequence
  MKO10098303_B_Megf11
  gRNA
tgtgaggaactctgcgctcc

SEQ ID NO: 98304 - DNA, 20 bp, Artificial Sequence
  MKO10098304_B_Megf11
  gRNA
gatgtgcagacatcctcaac

SEQ ID NO: 98305 - DNA, 20 bp, Artificial Sequence
  MKO10098305_B_Megf11
  gRNA
ggccccgatggcgccgtctg

SEQ ID NO: 98306 - DNA, 20 bp, Artificial Sequence
  MKO10098306_B_Megf6
  gRNA
cgggccctcacagcccccgt

SEQ ID NO: 98307 - DNA, 20 bp, Artificial Sequence
  MKO10098307_B_Megf6
  gRNA
gatgaatgtcgatcacacaa

SEQ ID NO: 98308 - DNA, 20 bp, Artificial Sequence
  MKO10098308_B_Megf6
  gRNA
ctgtgtactatatgagctac

SEQ ID NO: 98309 - DNA, 20 bp, Artificial Sequence
  MKO10098309_B_Megf8
  gRNA
ataacttctccacgaacacc

SEQ ID NO: 98310 - DNA, 20 bp, Artificial Sequence
  MKO10098310_B_Megf8
  gRNA
tgtagttggcatcgctgaag

SEQ ID NO: 98311 - DNA, 20 bp, Artificial Sequence
  MKO10098311_B_Megf8
  gRNA
ggaccatgccgctgtgaacc

SEQ ID NO: 98312 - DNA, 20 bp, Artificial Sequence
  MKO10098312_B_Megf9
  gRNA
cggtgacacccactttgcat

SEQ ID NO: 98313 - DNA, 20 bp, Artificial Sequence
  MKO10098313_B_Megf9
  gRNA
tggtgcgagaaatgcctaga

SEQ ID NO: 98314 - DNA, 20 bp, Artificial Sequence
  MKO10098314_B_Megf9
  gRNA
gaacatcacaactatcagac

SEQ ID NO: 98315 - DNA, 20 bp, Artificial Sequence
  MKO10098315_B_Mei1
  gRNA
acaagctcgtccgccaaacc

SEQ ID NO: 98316 - DNA, 20 bp, Artificial Sequence
  MKO10098316_B_Mei1
  gRNA
cacctccttggtcgctcagc

SEQ ID NO: 98317 - DNA, 20 bp, Artificial Sequence
  MKO10098317_B_Mei1
  gRNA
atggcagacctctgtattga

SEQ ID NO: 98318 - DNA, 20 bp, Artificial Sequence
  MKO10098318_B_Mei4
  gRNA
tgacctgggagccatcgatc

SEQ ID NO: 98319 - DNA, 20 bp, Artificial Sequence
  MKO10098319_B_Mei4
  gRNA
gagagacataacgctgtacc

SEQ ID NO: 98320 - DNA, 20 bp, Artificial Sequence
  MKO10098320_B_Mei4
  gRNA
cataagtagaacgcaaataa

SEQ ID NO: 98321 - DNA, 20 bp, Artificial Sequence
  MKO10098321_B_Meig1
  gRNA
caataagtcgtgccaagaaa

SEQ ID NO: 98322 - DNA, 20 bp, Artificial Sequence
  MKO10098322_B_Meig1
  gRNA
agacgtaaaccttcactttg

SEQ ID NO: 98323 - DNA, 20 bp, Artificial Sequence
  MKO10098323_B_Meig1
  gRNA
ggtacgtgaagaaacttcag

SEQ ID NO: 98324 - DNA, 20 bp, Artificial Sequence
  MKO10098324_B_Meiob
  gRNA
aaaataatcggaatagttat

SEQ ID NO: 98325 - DNA, 20 bp, Artificial Sequence
  MKO10098325_B_Meiob
  gRNA
gctcgctgtccgagagcttc

SEQ ID NO: 98326 - DNA, 20 bp, Artificial Sequence
  MKO10098326_B_Meiob
  gRNA
actttgtgaatgtatcctcc

SEQ ID NO: 98327 - DNA, 20 bp, Artificial Sequence
  MKO10098327_B_Meis1
  gRNA
gggtactgatgcgagtgcag

SEQ ID NO: 98328 - DNA, 20 bp, Artificial Sequence
  MKO10098328_B_Meis1
  gRNA
cttaccaagttatccagttc

SEQ ID NO: 98329 - DNA, 20 bp, Artificial Sequence
  MKO10098329_B_Meis1
  gRNA
attctcttctaatccagaac

SEQ ID NO: 98330 - DNA, 20 bp, Artificial Sequence
  MKO10098330_B_Meis2
  gRNA
agaggaacagacgtctccgc

SEQ ID NO: 98331 - DNA, 20 bp, Artificial Sequence
  MKO10098331_B_Meis2
  gRNA
cttaccaaattatccagctc

SEQ ID NO: 98332 - DNA, 20 bp, Artificial Sequence
  MKO10098332_B_Meis2
  gRNA
tacaagcaattcaagtacta

SEQ ID NO: 98333 - DNA, 20 bp, Artificial Sequence
  MKO10098333_B_Meis3
  gRNA
accggagtacctggatggcc

SEQ ID NO: 98334 - DNA, 20 bp, Artificial Sequence
  MKO10098334_B_Meis3
  gRNA
gctgggctgggttcaccccc

SEQ ID NO: 98335 - DNA, 20 bp, Artificial Sequence
  MKO10098335_B_Meis3
  gRNA
ccttcagtacctagagcccc

SEQ ID NO: 98336 - DNA, 20 bp, Artificial Sequence
  MKO10098336_B_Melk
  gRNA
gtactcaggtggctttgcaa

SEQ ID NO: 98337 - DNA, 20 bp, Artificial Sequence
  MKO10098337_B_Melk
  gRNA
tagctaccatctctccagtg

SEQ ID NO: 98338 - DNA, 20 bp, Artificial Sequence
  MKO10098338_B_Melk
  gRNA
atgtcagctctaccatgtgc

SEQ ID NO: 98339 - DNA, 20 bp, Artificial Sequence
  MKO10098339_B_Memo1
  gRNA
taaaacttacggtgcaataa

SEQ ID NO: 98340 - DNA, 20 bp, Artificial Sequence
  MKO10098340_B_Memo1
  gRNA
catgcgggatacacatactg

SEQ ID NO: 98341 - DNA, 20 bp, Artificial Sequence
  MKO10098341_B_Memo1
  gRNA
tcaatacgaagatcatacag

SEQ ID NO: 98342 - DNA, 20 bp, Artificial Sequence
  MKO10098342_B_Men1
  gRNA
agcgcatgtacgaccccttc

SEQ ID NO: 98343 - DNA, 20 bp, Artificial Sequence
  MKO10098343_B_Men1
  gRNA
cacgcccgagctgtccagtt

SEQ ID NO: 98344 - DNA, 20 bp, Artificial Sequence
  MKO10098344_B_Men1
  gRNA
gctgtatgacctcggacatc

SEQ ID NO: 98345 - DNA, 20 bp, Artificial Sequence
  MKO10098345_B_Meox1
  gRNA
cccaccacaactacctgacc

SEQ ID NO: 98346 - DNA, 20 bp, Artificial Sequence
  MKO10098346_B_Meox1
  gRNA
ggagcatctcactctgaact

SEQ ID NO: 98347 - DNA, 20 bp, Artificial Sequence
  MKO10098347_B_Meox1
  gRNA
tcctctttcaggtcaaagtc

SEQ ID NO: 98348 - DNA, 20 bp, Artificial Sequence
  MKO10098348_B_Meox2
  gRNA
acgttacctgtctttcagtg

SEQ ID NO: 98349 - DNA, 20 bp, Artificial Sequence
  MKO10098349_B_Meox2
  gRNA
cgggtcaaagggggacagca

SEQ ID NO: 98350 - DNA, 20 bp, Artificial Sequence
  MKO10098350_B_Meox2
  gRNA
ctagtgagtcccctgtctgc

SEQ ID NO: 98351 - DNA, 20 bp, Artificial Sequence
  MKO10098351_B_Mep1a
  gRNA
gcagatcacgatacagatgt

SEQ ID NO: 98352 - DNA, 20 bp, Artificial Sequence
  MKO10098352_B_Mep1a
  gRNA
gcaggcctgaacctctttca

SEQ ID NO: 98353 - DNA, 20 bp, Artificial Sequence
  MKO10098353_B_Mep1a
  gRNA
ggggagcttccatctgcttg

SEQ ID NO: 98354 - DNA, 20 bp, Artificial Sequence
  MKO10098354_B_Mep1b
  gRNA
tcttctcttaggtttgggtc

SEQ ID NO: 98355 - DNA, 20 bp, Artificial Sequence
  MKO10098355_B_Mep1b
  gRNA
aatgggaagaattccatcat

SEQ ID NO: 98356 - DNA, 20 bp, Artificial Sequence
  MKO10098356_B_Mep1b
  gRNA
ggttaatatcaaatatgtct

SEQ ID NO: 98357 - DNA, 20 bp, Artificial Sequence
  MKO10098357_B_Mepce
  gRNA
ccagaatacccccagggcgc

SEQ ID NO: 98358 - DNA, 20 bp, Artificial Sequence
  MKO10098358_B_Mepce
  gRNA
acaccgaataacacctccag

SEQ ID NO: 98359 - DNA, 20 bp, Artificial Sequence
  MKO10098359_B_Mepce
  gRNA
ttacctctggaggtgttatt

SEQ ID NO: 98360 - DNA, 20 bp, Artificial Sequence
  MKO10098360_B_Mepe
  gRNA
tgctcctcttcagtatgacc

SEQ ID NO: 98361 - DNA, 20 bp, Artificial Sequence
  MKO10098361_B_Mepe
  gRNA
aataatcttacaccgaataa

SEQ ID NO: 98362 - DNA, 20 bp, Artificial Sequence
  MKO10098362_B_Mepe
  gRNA
agtgagtgctccgtcgggtc

SEQ ID NO: 98363 - DNA, 20 bp, Artificial Sequence
  MKO10098363_B_Mertk
  gRNA
gattaaacgcaacaggaggt

SEQ ID NO: 98364 - DNA, 20 bp, Artificial Sequence
  MKO10098364_B_Mertk
  gRNA
cgacagtactatgtgtccaa

SEQ ID NO: 98365 - DNA, 20 bp, Artificial Sequence
  MKO10098365_B_Mertk
  gRNA
attgtctgagcgctgcacac

SEQ ID NO: 98366 - DNA, 20 bp, Artificial Sequence
  MKO10098366_B_Mesdc1
  gRNA
gcgatggctagcggcagcgc

SEQ ID NO: 98367 - DNA, 20 bp, Artificial Sequence
  MKO10098367_B_Mesdc1
  gRNA
tgaagagcgcgcaacgactg

SEQ ID NO: 98368 - DNA, 20 bp, Artificial Sequence
  MKO10098368_B_Mesdc1
  gRNA
ctcctgggagcgccgtcggc

SEQ ID NO: 98369 - DNA, 20 bp, Artificial Sequence
  MKO10098369_B_Mesdc2
  gRNA
cgattacaacgatgccgaca

SEQ ID NO: 98370 - DNA, 20 bp, Artificial Sequence
  MKO10098370_B_Mesdc2
  gRNA
tctagctttgagaagtcgat

SEQ ID NO: 98371 - DNA, 20 bp, Artificial Sequence
  MKO10098371_B_Mesdc2
  gRNA
tctctggctaggttcatcgt

SEQ ID NO: 98372 - DNA, 20 bp, Artificial Sequence
  MKO10098372_B_Mesp1
  gRNA
ccactcctgcggcggcgtcc

SEQ ID NO: 98373 - DNA, 20 bp, Artificial Sequence
  MKO10098373_B_Mesp1
  gRNA
acaccgcgtgccgctgtcgc

SEQ ID NO: 98374 - DNA, 20 bp, Artificial Sequence
  MKO10098374_B_Mesp1
  gRNA
ggcaccgtcccacgggtccg

SEQ ID NO: 98375 - DNA, 20 bp, Artificial Sequence
  MKO10098375_B_Mesp2
  gRNA
ctgctggggccacgatgcag

SEQ ID NO: 98376 - DNA, 20 bp, Artificial Sequence
  MKO10098376_B_Mesp2
  gRNA
cgaacgcgcccagcgcccgc

SEQ ID NO: 98377 - DNA, 20 bp, Artificial Sequence
  MKO10098377_B_Mesp2
  gRNA
acgccgcgtccgcactccgt

SEQ ID NO: 98378 - DNA, 20 bp, Artificial Sequence
  MKO10098378_B_Mest
  gRNA
cagaagggactctacgatgc

SEQ ID NO: 98379 - DNA, 20 bp, Artificial Sequence
  MKO10098379_B_Mest
  gRNA
caccttggtagaagatgcgt

SEQ ID NO: 98380 - DNA, 20 bp, Artificial Sequence
  MKO10098380_B_Mest
  gRNA
cctcctagattctgtcggtg

SEQ ID NO: 98381 - DNA, 20 bp, Artificial Sequence
  MKO10098381_B_Metap1d
  gRNA
agatagatgcgcttgttcat

SEQ ID NO: 98382 - DNA, 20 bp, Artificial Sequence
  MKO10098382_B_Metap1d
  gRNA
atgcctgtcgtcacgtagtc

SEQ ID NO: 98383 - DNA, 20 bp, Artificial Sequence
  MKO10098383_B_Metap1d
  gRNA
tgtgcgggagagacggcagc

SEQ ID NO: 98384 - DNA, 20 bp, Artificial Sequence
  MKO10098384_B_Metap1
  gRNA
aagggatggtcagcatagtc

SEQ ID NO: 98385 - DNA, 20 bp, Artificial Sequence
  MKO10098385_B_Metap1
  gRNA
ctctgaatgtaactgggcac

SEQ ID NO: 98386 - DNA, 20 bp, Artificial Sequence
  MKO10098386_B_Metap1
  gRNA
tgagagtaacttaatctgag

SEQ ID NO: 98387 - DNA, 20 bp, Artificial Sequence
  MKO10098387_B_Metap2
  gRNA
gtattcacactcttgtcctt

SEQ ID NO: 98388 - DNA, 20 bp, Artificial Sequence
  MKO10098388_B_Metap2
  gRNA
caagaacttgataaagaatc

SEQ ID NO: 98389 - DNA, 20 bp, Artificial Sequence
  MKO10098389_B_Metap2
  gRNA
tctccttctcctccagtgct

SEQ ID NO: 98390 - DNA, 20 bp, Artificial Sequence
  MKO10098390_B_Metrnl
  gRNA
cggccggagcatgcggggtg

SEQ ID NO: 98391 - DNA, 20 bp, Artificial Sequence
  MKO10098391_B_Metrnl
  gRNA
actccagcgacctgtgcagc

SEQ ID NO: 98392 - DNA, 20 bp, Artificial Sequence
  MKO10098392_B_Metrnl
  gRNA
tcggccttgcagtgacactg

SEQ ID NO: 98393 - DNA, 20 bp, Artificial Sequence
  MKO10098393_B_Metrn
  gRNA
attcgtaccttgctgcgctg

SEQ ID NO: 98394 - DNA, 20 bp, Artificial Sequence
  MKO10098394_B_Metrn
  gRNA
gtactgagggcgctatcgag

SEQ ID NO: 98395 - DNA, 20 bp, Artificial Sequence
  MKO10098395_B_Metrn
  gRNA
cttctttgcgcgctctgttg

SEQ ID NO: 98396 - DNA, 20 bp, Artificial Sequence
  MKO10098396_B_Mettl10
  gRNA
agtatgtgatgtctctctcc

SEQ ID NO: 98397 - DNA, 20 bp, Artificial Sequence
  MKO10098397_B_Mettl10
  gRNA
catggtttctctaatataac

SEQ ID NO: 98398 - DNA, 20 bp, Artificial Sequence
  MKO10098398_B_Mettl10
  gRNA
ttgctagatgcattcagtga

SEQ ID NO: 98399 - DNA, 20 bp, Artificial Sequence
  MKO10098399_B_Mettl11b
  gRNA
tgacatcatatctccctaag

SEQ ID NO: 98400 - DNA, 20 bp, Artificial Sequence
  MKO10098400_B_Mettl11b
  gRNA
acatccttcgaagccttatt

SEQ ID NO: 98401 - DNA, 20 bp, Artificial Sequence
  MKO10098401_B_Mettl11b
  gRNA
tgcagggtacctgactgata

SEQ ID NO: 98402 - DNA, 20 bp, Artificial Sequence
  MKO10098402_B_Mettl13
  gRNA
cccagggtcgcgagaccgag

SEQ ID NO: 98403 - DNA, 20 bp, Artificial Sequence
  MKO10098403_B_Mettl13
  gRNA
tttccatgccagcataccgc

SEQ ID NO: 98404 - DNA, 20 bp, Artificial Sequence
  MKO10098404_B_Mettl13
  gRNA
ctcttatcgatggactgccc

SEQ ID NO: 98405 - DNA, 20 bp, Artificial Sequence
  MKO10098405_B_Mettl14
  gRNA
catctgctccaaactcaaaa

SEQ ID NO: 98406 - DNA, 20 bp, Artificial Sequence
  MKO10098406_B_Mettl14
  gRNA
acatccctgatgaaattctg

SEQ ID NO: 98407 - DNA, 20 bp, Artificial Sequence
  MKO10098407_B_Mettl14
  gRNA
ctagttgggagctgagagtg

SEQ ID NO: 98408 - DNA, 20 bp, Artificial Sequence
  MKO10098408_B_Mettl15
  gRNA
cattgttcacaaagatgcga

SEQ ID NO: 98409 - DNA, 20 bp, Artificial Sequence
  MKO10098409_B_Mettl15
  gRNA
aagtgtacctgcaacaatgc

SEQ ID NO: 98410 - DNA, 20 bp, Artificial Sequence
  MKO10098410_B_Mettl15
  gRNA
tgtatgtcctcctgaaccaa

SEQ ID NO: 98411 - DNA, 20 bp, Artificial Sequence
  MKO10098411_B_Mettl16
  gRNA
gtggaggtcttcgagaattc

SEQ ID NO: 98412 - DNA, 20 bp, Artificial Sequence
  MKO10098412_B_Mettl16
  gRNA
cataatctctgtgatgcccc

SEQ ID NO: 98413 - DNA, 20 bp, Artificial Sequence
  MKO10098413_B_Mettl16
  gRNA
atttaaggttgctccaagta

SEQ ID NO: 98414 - DNA, 20 bp, Artificial Sequence
  MKO10098414_B_Mettl17
  gRNA
agcaaaaccaccgtccaatc

SEQ ID NO: 98415 - DNA, 20 bp, Artificial Sequence
  MKO10098415_B_Mettl17
  gRNA
ccgacatttacctgtagagc

SEQ ID NO: 98416 - DNA, 20 bp, Artificial Sequence
  MKO10098416_B_Mettl17
  gRNA
gcccgtctttgcaactcctc

SEQ ID NO: 98417 - DNA, 20 bp, Artificial Sequence
  MKO10098417_B_Mettl18
  gRNA
catttccaagagtgatcccg

SEQ ID NO: 98418 - DNA, 20 bp, Artificial Sequence
  MKO10098418_B_Mettl18
  gRNA
taggagtggccgggtgcttc

SEQ ID NO: 98419 - DNA, 20 bp, Artificial Sequence
  MKO10098419_B_Mettl18
  gRNA
tgtaaatgtcgcttgttctc

SEQ ID NO: 98420 - DNA, 20 bp, Artificial Sequence
  MKO10098420_B_Mettl1
  gRNA
cgtcggtgacggtgtacacc

SEQ ID NO: 98421 - DNA, 20 bp, Artificial Sequence
  MKO10098421_B_Mettl1
  gRNA
aatcatcagccctacgcttc

SEQ ID NO: 98422 - DNA, 20 bp, Artificial Sequence
  MKO10098422_B_Mettl1
  gRNA
ccttcctaatttcttccgca

SEQ ID NO: 98423 - DNA, 20 bp, Artificial Sequence
  MKO10098423_B_Mettl20
  gRNA
ctttgatgctccactcatct

SEQ ID NO: 98424 - DNA, 20 bp, Artificial Sequence
  MKO10098424_B_Mettl20
  gRNA
gataaccctgctgttgttag

SEQ ID NO: 98425 - DNA, 20 bp, Artificial Sequence
  MKO10098425_B_Mettl20
  gRNA
actgaccacaagtgctgtat

SEQ ID NO: 98426 - DNA, 20 bp, Artificial Sequence
  MKO10098426_B_Mettl21a
  gRNA
ccacaccatccagatccgtc

SEQ ID NO: 98427 - DNA, 20 bp, Artificial Sequence
  MKO10098427_B_Mettl21a
  gRNA
tgtcgtcctttccatgtatc

SEQ ID NO: 98428 - DNA, 20 bp, Artificial Sequence
  MKO10098428_B_Mettl21a
  gRNA
agcacccatctccagataca

SEQ ID NO: 98429 - DNA, 20 bp, Artificial Sequence
  MKO10098429_B_Mettl21c
  gRNA
agtctgtaggaacaaatttc

SEQ ID NO: 98430 - DNA, 20 bp, Artificial Sequence
  MKO10098430_B_Mettl21c
  gRNA
tggtagcgagcagcttgtcc

SEQ ID NO: 98431 - DNA, 20 bp, Artificial Sequence
  MKO10098431_B_Mettl21c
  gRNA
atatttagaagaccatacag

SEQ ID NO: 98432 - DNA, 20 bp, Artificial Sequence
  MKO10098432_B_Mettl21e
  gRNA
catgagattcagattactga

SEQ ID NO: 98433 - DNA, 20 bp, Artificial Sequence
  MKO10098433_B_Mettl21e
  gRNA
accaagtaagcttgccacaa

SEQ ID NO: 98434 - DNA, 20 bp, Artificial Sequence
  MKO10098434_B_Mettl21e
  gRNA
acatgccaagcaatataaca

SEQ ID NO: 98435 - DNA, 20 bp, Artificial Sequence
  MKO10098435_B_Mettl22
  gRNA
gttgagtgttcccctggacg

SEQ ID NO: 98436 - DNA, 20 bp, Artificial Sequence
  MKO10098436_B_Mettl22
  gRNA
tgttgagggcaacgtttcgt

SEQ ID NO: 98437 - DNA, 20 bp, Artificial Sequence
  MKO10098437_B_Mettl22
  gRNA
atcctttccagagcacacca

SEQ ID NO: 98438 - DNA, 20 bp, Artificial Sequence
  MKO10098438_B_Mettl23
  gRNA
tcgaagttgtaggactgaca

SEQ ID NO: 98439 - DNA, 20 bp, Artificial Sequence
  MKO10098439_B_Mettl23
  gRNA
gaaatgtgtgcatattcctc

SEQ ID NO: 98440 - DNA, 20 bp, Artificial Sequence
  MKO10098440_B_Mettl23
  gRNA
ttgggccaggactacagcac

SEQ ID NO: 98441 - DNA, 20 bp, Artificial Sequence
  MKO10098441_B_Mettl24
  gRNA
gttacagatcgacgttctca

SEQ ID NO: 98442 - DNA, 20 bp, Artificial Sequence
  MKO10098442_B_Mettl24
  gRNA
acagattgcatgcgatcaca

SEQ ID NO: 98443 - DNA, 20 bp, Artificial Sequence
  MKO10098443_B_Mettl24
  gRNA
gtccttcacagggttcccga

SEQ ID NO: 98444 - DNA, 20 bp, Artificial Sequence
  MKO10098444_B_Mettl25
  gRNA
agtacttactatctttatgc

SEQ ID NO: 98445 - DNA, 20 bp, Artificial Sequence
  MKO10098445_B_Mettl25
  gRNA
gcactattctgtgcaaaact

SEQ ID NO: 98446 - DNA, 20 bp, Artificial Sequence
  MKO10098446_B_Mettl25
  gRNA
cagaatagtgctttgcagtt

SEQ ID NO: 98447 - DNA, 20 bp, Artificial Sequence
  MKO10098447_B_Mettl2
  gRNA
gtacacccgtcaggtgactg

SEQ ID NO: 98448 - DNA, 20 bp, Artificial Sequence
  MKO10098448_B_Mettl2
  gRNA
cttgagcagttcaatagccg

SEQ ID NO: 98449 - DNA, 20 bp, Artificial Sequence
  MKO10098449_B_Mettl2
  gRNA
agtcacaacagtaaacgaag

SEQ ID NO: 98450 - DNA, 20 bp, Artificial Sequence
  MKO10098450_B_Mettl3
  gRNA
gttggggacagtgccgcttc

SEQ ID NO: 98451 - DNA, 20 bp, Artificial Sequence
  MKO10098451_B_Mettl3
  gRNA
gcagaaacggcgtgcagaac

SEQ ID NO: 98452 - DNA, 20 bp, Artificial Sequence
  MKO10098452_B_Mettl3
  gRNA
taggcacgggactatcacta

SEQ ID NO: 98453 - DNA, 20 bp, Artificial Sequence
  MKO10098453_B_Mettl4
  gRNA
tcttcgaagttaatccaaga

SEQ ID NO: 98454 - DNA, 20 bp, Artificial Sequence
  MKO10098454_B_Mettl4
  gRNA
caattgtgattgatccacca

SEQ ID NO: 98455 - DNA, 20 bp, Artificial Sequence
  MKO10098455_B_Mettl4
  gRNA
agatgcattgctttcaatca

SEQ ID NO: 98456 - DNA, 20 bp, Artificial Sequence
  MKO10098456_B_Mettl5
  gRNA
ctttacacaagtcctcaact

SEQ ID NO: 98457 - DNA, 20 bp, Artificial Sequence
  MKO10098457_B_Mettl5
  gRNA
gtcaagatagaaattattgc

SEQ ID NO: 98458 - DNA, 20 bp, Artificial Sequence
  MKO10098458_B_Mettl5
  gRNA
aattactgtatcaaataact

SEQ ID NO: 98459 - DNA, 20 bp, Artificial Sequence
  MKO10098459_B_Mettl6
  gRNA
ttcacgtagtcaactgccct

SEQ ID NO: 98460 - DNA, 20 bp, Artificial Sequence
  MKO10098460_B_Mettl6
  gRNA
ctgggtccttcggaggcttc

SEQ ID NO: 98461 - DNA, 20 bp, Artificial Sequence
  MKO10098461_B_Mettl6
  gRNA
catccacaaagagctgcgcc

SEQ ID NO: 98462 - DNA, 20 bp, Artificial Sequence
  MKO10098462_B_Mettl7a1
  gRNA
catctgctcattgtacatca

SEQ ID NO: 98463 - DNA, 20 bp, Artificial Sequence
  MKO10098463_B_Mettl7a1
  gRNA
gaacaagaacttctcgaagt

SEQ ID NO: 98464 - DNA, 20 bp, Artificial Sequence
  MKO10098464_B_Mettl7a1
  gRNA
ccctctcctggacattggtg

SEQ ID NO: 98465 - DNA, 20 bp, Artificial Sequence
  MKO10098465_B_Mettl7a2Higd1c
  gRNA
gccagctgtcccgactcctc

SEQ ID NO: 98466 - DNA, 20 bp, Artificial Sequence
  MKO10098466_B_Mettl7a2Higd1c
  gRNA
tgttctctactctatgtata

SEQ ID NO: 98467 - DNA, 20 bp, Artificial Sequence
  MKO10098467_B_Mettl7a2Higd1c
  gRNA
ccaggagaagattctgcgcg

SEQ ID NO: 98468 - DNA, 20 bp, Artificial Sequence
  MKO10098468_B_Mettl7a2
  gRNA
cgcaccaaggtcaaggggag

SEQ ID NO: 98469 - DNA, 20 bp, Artificial Sequence
  MKO10098469_B_Mettl7a2
  gRNA
ctcggggaagctaactctgc

SEQ ID NO: 98470 - DNA, 20 bp, Artificial Sequence
  MKO10098470_B_Mettl7a2
  gRNA
cctcgcgcagaatcttctcc

SEQ ID NO: 98471 - DNA, 20 bp, Artificial Sequence
  MKO10098471_B_Mettl7a3
  gRNA
cgcaccaaggtcaaggggag

SEQ ID NO: 98472 - DNA, 20 bp, Artificial Sequence
  MKO10098472_B_Mettl7a3
  gRNA
atatttctgctgaacattct

SEQ ID NO: 98473 - DNA, 20 bp, Artificial Sequence
  MKO10098473_B_Mettl7a3
  gRNA
tagaatgttcagcagaaata

SEQ ID NO: 98474 - DNA, 20 bp, Artificial Sequence
  MKO10098474_B_Mettl7b
  gRNA
gctctaaaactcgctgccac

SEQ ID NO: 98475 - DNA, 20 bp, Artificial Sequence
  MKO10098475_B_Mettl7b
  gRNA
aacctacttcccttacttca

SEQ ID NO: 98476 - DNA, 20 bp, Artificial Sequence
  MKO10098476_B_Mettl7b
  gRNA
ccaatatgagcgcttcattg

SEQ ID NO: 98477 - DNA, 20 bp, Artificial Sequence
  MKO10098477_B_Mettl8
  gRNA
aaactcactgcaaggtgttc

SEQ ID NO: 98478 - DNA, 20 bp, Artificial Sequence
  MKO10098478_B_Mettl8
  gRNA
ttaatagggatcacatgcag

SEQ ID NO: 98479 - DNA, 20 bp, Artificial Sequence
  MKO10098479_B_Mettl8
  gRNA
aaagtcgcagcagtagagaa

SEQ ID NO: 98480 - DNA, 20 bp, Artificial Sequence
  MKO10098480_B_Mettl9
  gRNA
cacctaaatcaagaagtcta

SEQ ID NO: 98481 - DNA, 20 bp, Artificial Sequence
  MKO10098481_B_Mettl9
  gRNA
tgtacatgtcgccttcacac

SEQ ID NO: 98482 - DNA, 20 bp, Artificial Sequence
  MKO10098482_B_Mettl9
  gRNA
tagatgttctagacataaac

SEQ ID NO: 98483 - DNA, 20 bp, Artificial Sequence
  MKO10098483_B_Met
  gRNA
atttgtcgtgctctcgctta

SEQ ID NO: 98484 - DNA, 20 bp, Artificial Sequence
  MKO10098484_B_Met
  gRNA
cccaccagcgcgccccttga

SEQ ID NO: 98485 - DNA, 20 bp, Artificial Sequence
  MKO10098485_B_Met
  gRNA
ctcttgagtccatgtaccgc

SEQ ID NO: 98486 - DNA, 20 bp, Artificial Sequence
  MKO10098486_B_Mex3a
  gRNA
cgtgcccacctccgagcacg

SEQ ID NO: 98487 - DNA, 20 bp, Artificial Sequence
  MKO10098487_B_Mex3a
  gRNA
cgcgcgtgccttggctgaag

SEQ ID NO: 98488 - DNA, 20 bp, Artificial Sequence
  MKO10098488_B_Mex3a
  gRNA
cgcgcacgctccacgttgcc

SEQ ID NO: 98489 - DNA, 20 bp, Artificial Sequence
  MKO10098489_B_Mex3b
  gRNA
ggagctgtcgttgcgatagc

SEQ ID NO: 98490 - DNA, 20 bp, Artificial Sequence
  MKO10098490_B_Mex3b
  gRNA
gcccagttcgagcgctctcc

SEQ ID NO: 98491 - DNA, 20 bp, Artificial Sequence
  MKO10098491_B_Mex3b
  gRNA
tgggagggctatagtccgcc

SEQ ID NO: 98492 - DNA, 20 bp, Artificial Sequence
  MKO10098492_B_Mex3c
  gRNA
agcccgtccccttcgagctc

SEQ ID NO: 98493 - DNA, 20 bp, Artificial Sequence
  MKO10098493_B_Mex3c
  gRNA
ctcccagactcagccgatcc

SEQ ID NO: 98494 - DNA, 20 bp, Artificial Sequence
  MKO10098494_B_Mex3c
  gRNA
cggcgcagtgccaggcccgg

SEQ ID NO: 98495 - DNA, 20 bp, Artificial Sequence
  MKO10098495_B_Mex3d
  gRNA
ctcacgtcggggtccaaaag

SEQ ID NO: 98496 - DNA, 20 bp, Artificial Sequence
  MKO10098496_B_Mex3d
  gRNA
tctctcgaagggcgcccaaa

SEQ ID NO: 98497 - DNA, 20 bp, Artificial Sequence
  MKO10098497_B_Mex3d
  gRNA
gcatccgcaccctgcactcg

SEQ ID NO: 98498 - DNA, 20 bp, Artificial Sequence
  MKO10098498_B_Mfap1a
  gRNA
ggaacaagaagcaaaacgca

SEQ ID NO: 98499 - DNA, 20 bp, Artificial Sequence
  MKO10098499_B_Mfap1a
  gRNA
agagaccaagaaagagctag

SEQ ID NO: 98500 - DNA, 20 bp, Artificial Sequence
  MKO10098500_B_Mfap1a
  gRNA
caagcggtctcttgctgccc

SEQ ID NO: 98501 - DNA, 20 bp, Artificial Sequence
  MKO10098501_B_Mfap1b
  gRNA
ggaacaagaagcaaaacgca

SEQ ID NO: 98502 - DNA, 20 bp, Artificial Sequence
  MKO10098502_B_Mfap1b
  gRNA
agagaccaagaaagagctag

SEQ ID NO: 98503 - DNA, 20 bp, Artificial Sequence
  MKO10098503_B_Mfap1b
  gRNA
caagcggtctcttgctgccc

SEQ ID NO: 98504 - DNA, 20 bp, Artificial Sequence
  MKO10098504_B_Mfap2
  gRNA
gcagactactatgactacca

SEQ ID NO: 98505 - DNA, 20 bp, Artificial Sequence
  MKO10098505_B_Mfap2
  gRNA
gacagcattacctggggtag

SEQ ID NO: 98506 - DNA, 20 bp, Artificial Sequence
  MKO10098506_B_Mfap2
  gRNA
cttcctgttgaacttgctgc

SEQ ID NO: 98507 - DNA, 20 bp, Artificial Sequence
  MKO10098507_B_Mfap3l
  gRNA
tgaccatatcatagtcaaag

SEQ ID NO: 98508 - DNA, 20 bp, Artificial Sequence
  MKO10098508_B_Mfap3l
  gRNA
gtacacgcccatgtctccag

SEQ ID NO: 98509 - DNA, 20 bp, Artificial Sequence
  MKO10098509_B_Mfap3l
  gRNA
ctcttcggacgtcagctccg

SEQ ID NO: 98510 - DNA, 20 bp, Artificial Sequence
  MKO10098510_B_Mfap3
  gRNA
aatgacatcatcacctgagt

SEQ ID NO: 98511 - DNA, 20 bp, Artificial Sequence
  MKO10098511_B_Mfap3
  gRNA
ctcagccaaaaccctcgagc

SEQ ID NO: 98512 - DNA, 20 bp, Artificial Sequence
  MKO10098512_B_Mfap3
  gRNA
cggcagttcagaataagggg

SEQ ID NO: 98513 - DNA, 20 bp, Artificial Sequence
  MKO10098513_B_Mfap4
  gRNA
tgctgacggggagtactggc

SEQ ID NO: 98514 - DNA, 20 bp, Artificial Sequence
  MKO10098514_B_Mfap4
  gRNA
cctcgaagccagccacgtag

SEQ ID NO: 98515 - DNA, 20 bp, Artificial Sequence
  MKO10098515_B_Mfap4
  gRNA
cttctgcgacatgacaactg

SEQ ID NO: 98516 - DNA, 20 bp, Artificial Sequence
  MKO10098516_B_Mfap5
  gRNA
gggtcgtctgtgaatgtctc

SEQ ID NO: 98517 - DNA, 20 bp, Artificial Sequence
  MKO10098517_B_Mfap5
  gRNA
ttgacagactggctacccct

SEQ ID NO: 98518 - DNA, 20 bp, Artificial Sequence
  MKO10098518_B_Mfap5
  gRNA
gaactcacctaggtcatctg

SEQ ID NO: 98519 - DNA, 20 bp, Artificial Sequence
  MKO10098519_B_Mff
  gRNA
cgacaaaatgccacgggcag

SEQ ID NO: 98520 - DNA, 20 bp, Artificial Sequence
  MKO10098520_B_Mff
  gRNA
tgccctagacctgtgttgcg

SEQ ID NO: 98521 - DNA, 20 bp, Artificial Sequence
  MKO10098521_B_Mff
  gRNA
aagccctacgagtagaagac

SEQ ID NO: 98522 - DNA, 20 bp, Artificial Sequence
  MKO10098522_B_Mfge8
  gRNA
actcaccagacgcggcgaag

SEQ ID NO: 98523 - DNA, 20 bp, Artificial Sequence
  MKO10098523_B_Mfge8
  gRNA
attgtcttggcccgtcaagc

SEQ ID NO: 98524 - DNA, 20 bp, Artificial Sequence
  MKO10098524_B_Mfge8
  gRNA
tcgggcatccactgtgaaac

SEQ ID NO: 98525 - DNA, 20 bp, Artificial Sequence
  MKO10098525_B_Mfhas1
  gRNA
ctgatcacagtcggtgtagg

SEQ ID NO: 98526 - DNA, 20 bp, Artificial Sequence
  MKO10098526_B_Mfhas1
  gRNA
atcccatctaggaagaacgt

SEQ ID NO: 98527 - DNA, 20 bp, Artificial Sequence
  MKO10098527_B_Mfhas1
  gRNA
tgcgcaagaccaagacgcga

SEQ ID NO: 98528 - DNA, 20 bp, Artificial Sequence
  MKO10098528_B_Mfi2
  gRNA
acagccgttggtgattattt

SEQ ID NO: 98529 - DNA, 20 bp, Artificial Sequence
  MKO10098529_B_Mfi2
  gRNA
agtggtcagcggagttgccc

SEQ ID NO: 98530 - DNA, 20 bp, Artificial Sequence
  MKO10098530_B_Mfi2
  gRNA
ggaggggccatctatgaggc

SEQ ID NO: 98531 - DNA, 20 bp, Artificial Sequence
  MKO10098531_B_Mfn1
  gRNA
gctgtctcggagacatatga

SEQ ID NO: 98532 - DNA, 20 bp, Artificial Sequence
  MKO10098532_B_Mfn1
  gRNA
tttacctgtctactaaaacc

SEQ ID NO: 98533 - DNA, 20 bp, Artificial Sequence
  MKO10098533_B_Mfn1
  gRNA
actttagactgttaatcagc

SEQ ID NO: 98534 - DNA, 20 bp, Artificial Sequence
  MKO10098534_B_Mfn2
  gRNA
atgacctcgtgctgatggac

SEQ ID NO: 98535 - DNA, 20 bp, Artificial Sequence
  MKO10098535_B_Mfn2
  gRNA
agccaccttcatgtgccgcc

SEQ ID NO: 98536 - DNA, 20 bp, Artificial Sequence
  MKO10098536_B_Mfn2
  gRNA
caggacgagcagttgcatgc

SEQ ID NO: 98537 - DNA, 20 bp, Artificial Sequence
  MKO10098537_B_Mfng
  gRNA
ggcagttacctagtctctcc

SEQ ID NO: 98538 - DNA, 20 bp, Artificial Sequence
  MKO10098538_B_Mfng
  gRNA
cagcccagatgaacgcctcc

SEQ ID NO: 98539 - DNA, 20 bp, Artificial Sequence
  MKO10098539_B_Mfng
  gRNA
atttccaggcccgcacctcg

SEQ ID NO: 98540 - DNA, 20 bp, Artificial Sequence
  MKO10098540_B_Mfrp
  gRNA
gccctccaccagcgttacag

SEQ ID NO: 98541 - DNA, 20 bp, Artificial Sequence
  MKO10098541_B_Mfrp
  gRNA
ggcagtcgggctgtagcccc

SEQ ID NO: 98542 - DNA, 20 bp, Artificial Sequence
  MKO10098542_B_Mfrp
  gRNA
ctgtaatcctgctttcgacc

SEQ ID NO: 98543 - DNA, 20 bp, Artificial Sequence
  MKO10098543_B_Mfsd10
  gRNA
gcgcctccccaggtaatcag

SEQ ID NO: 98544 - DNA, 20 bp, Artificial Sequence
  MKO10098544_B_Mfsd10
  gRNA
gctgatgcctccgatcaccc

SEQ ID NO: 98545 - DNA, 20 bp, Artificial Sequence
  MKO10098545_B_Mfsd10
  gRNA
cctggcagcgtggggtagac

SEQ ID NO: 98546 - DNA, 20 bp, Artificial Sequence
  MKO10098546_B_Mfsd11
  gRNA
ttagtcctttggacagcaca

SEQ ID NO: 98547 - DNA, 20 bp, Artificial Sequence
  MKO10098547_B_Mfsd11
  gRNA
tacacagcatctgtcttcat

SEQ ID NO: 98548 - DNA, 20 bp, Artificial Sequence
  MKO10098548_B_Mfsd11
  gRNA
ccacacagcaaactgtcatc

SEQ ID NO: 98549 - DNA, 20 bp, Artificial Sequence
  MKO10098549_B_Mfsd12
  gRNA
tccaggatgtgcccgtgttc

SEQ ID NO: 98550 - DNA, 20 bp, Artificial Sequence
  MKO10098550_B_Mfsd12
  gRNA
acccaatgagcacacccccc

SEQ ID NO: 98551 - DNA, 20 bp, Artificial Sequence
  MKO10098551_B_Mfsd12
  gRNA
cttgggcaagctgagagaat

SEQ ID NO: 98552 - DNA, 20 bp, Artificial Sequence
  MKO10098552_B_Mfsd1
  gRNA
ccccgctgcccttcagactc

SEQ ID NO: 98553 - DNA, 20 bp, Artificial Sequence
  MKO10098553_B_Mfsd1
  gRNA
gtggtatatttaatgcattt

SEQ ID NO: 98554 - DNA, 20 bp, Artificial Sequence
  MKO10098554_B_Mfsd1
  gRNA
tttagctgctttgtttgcat

SEQ ID NO: 98555 - DNA, 20 bp, Artificial Sequence
  MKO10098555_B_Mfsd2a
  gRNA
tcaccttagccacatccaat

SEQ ID NO: 98556 - DNA, 20 bp, Artificial Sequence
  MKO10098556_B_Mfsd2a
  gRNA
tgtgaactttccgtccctga

SEQ ID NO: 98557 - DNA, 20 bp, Artificial Sequence
  MKO10098557_B_Mfsd2a
  gRNA
ccgtgaccagtgtctcaaag

SEQ ID NO: 98558 - DNA, 20 bp, Artificial Sequence
  MKO10098558_B_Mfsd2b
  gRNA
gatcatagtgagcgcagtgt

SEQ ID NO: 98559 - DNA, 20 bp, Artificial Sequence
  MKO10098559_B_Mfsd2b
  gRNA
ggtctggacggctaatgcct

SEQ ID NO: 98560 - DNA, 20 bp, Artificial Sequence
  MKO10098560_B_Mfsd2b
  gRNA
tcgcctctcagtctgtacaa

SEQ ID NO: 98561 - DNA, 20 bp, Artificial Sequence
  MKO10098561_B_Mfsd3
  gRNA
tctggcaagccaaactccca

SEQ ID NO: 98562 - DNA, 20 bp, Artificial Sequence
  MKO10098562_B_Mfsd3
  gRNA
acagtgctgcagctccgcct

SEQ ID NO: 98563 - DNA, 20 bp, Artificial Sequence
  MKO10098563_B_Mfsd3
  gRNA
gctgtgacctgctccattgc

SEQ ID NO: 98564 - DNA, 20 bp, Artificial Sequence
  MKO10098564_B_Mfsd4
  gRNA
ccccttctgccatgacgtga

SEQ ID NO: 98565 - DNA, 20 bp, Artificial Sequence
  MKO10098565_B_Mfsd4
  gRNA
gggatcgtctggtttatcca

SEQ ID NO: 98566 - DNA, 20 bp, Artificial Sequence
  MKO10098566_B_Mfsd4
  gRNA
ctgctgcgtgatgttggctc

SEQ ID NO: 98567 - DNA, 20 bp, Artificial Sequence
  MKO10098567_B_Mfsd5
  gRNA
ggccttggctctacgaaact

SEQ ID NO: 98568 - DNA, 20 bp, Artificial Sequence
  MKO10098568_B_Mfsd5
  gRNA
accgcatcgctacctccaag

SEQ ID NO: 98569 - DNA, 20 bp, Artificial Sequence
  MKO10098569_B_Mfsd5
  gRNA
tggctgggatccactcggcg

SEQ ID NO: 98570 - DNA, 20 bp, Artificial Sequence
  MKO10098570_B_Mfsd6l
  gRNA
cgtccccagggcactacggg

SEQ ID NO: 98571 - DNA, 20 bp, Artificial Sequence
  MKO10098571_B_Mfsd6l
  gRNA
cagtggcgtctacgaaatcc

SEQ ID NO: 98572 - DNA, 20 bp, Artificial Sequence
  MKO10098572_B_Mfsd6l
  gRNA
ggccaccactatcttaccgc

SEQ ID NO: 98573 - DNA, 20 bp, Artificial Sequence
  MKO10098573_B_Mfsd6
  gRNA
ggggctgctgcaactttccg

SEQ ID NO: 98574 - DNA, 20 bp, Artificial Sequence
  MKO10098574_B_Mfsd6
  gRNA
aatatagcgagctgtattac

SEQ ID NO: 98575 - DNA, 20 bp, Artificial Sequence
  MKO10098575_B_Mfsd6
  gRNA
gtgtcacacacgcagccatc

SEQ ID NO: 98576 - DNA, 20 bp, Artificial Sequence
  MKO10098576_B_Mfsd7a
  gRNA
ctctgttggcctccgtggag

SEQ ID NO: 98577 - DNA, 20 bp, Artificial Sequence
  MKO10098577_B_Mfsd7a
  gRNA
ccccagcttggcatctacat

SEQ ID NO: 98578 - DNA, 20 bp, Artificial Sequence
  MKO10098578_B_Mfsd7a
  gRNA
ggtgctgatcatgttagctg

SEQ ID NO: 98579 - DNA, 20 bp, Artificial Sequence
  MKO10098579_B_Mfsd7b
  gRNA
ttctttgtaggtatcatgac

SEQ ID NO: 98580 - DNA, 20 bp, Artificial Sequence
  MKO10098580_B_Mfsd7b
  gRNA
ttacagcttggaactgcagt

SEQ ID NO: 98581 - DNA, 20 bp, Artificial Sequence
  MKO10098581_B_Mfsd7b
  gRNA
tgttgatgttatgagccagg

SEQ ID NO: 98582 - DNA, 20 bp, Artificial Sequence
  MKO10098582_B_Mfsd7c
  gRNA
aaacctcaacttcgtgctgc

SEQ ID NO: 98583 - DNA, 20 bp, Artificial Sequence
  MKO10098583_B_Mfsd7c
  gRNA
atccactctgctgaatcgca

SEQ ID NO: 98584 - DNA, 20 bp, Artificial Sequence
  MKO10098584_B_Mfsd7c
  gRNA
atgtagcttggaattgcaat

SEQ ID NO: 98585 - DNA, 20 bp, Artificial Sequence
  MKO10098585_B_Mfsd8
  gRNA
aagagcattacaagagtaga

SEQ ID NO: 98586 - DNA, 20 bp, Artificial Sequence
  MKO10098586_B_Mfsd8
  gRNA
gacatacgcatataggcagt

SEQ ID NO: 98587 - DNA, 20 bp, Artificial Sequence
  MKO10098587_B_Mfsd8
  gRNA
ctattgtgataatgtccatc

SEQ ID NO: 98588 - DNA, 20 bp, Artificial Sequence
  MKO10098588_B_Mfsd9
  gRNA
caagatgaagcctacgcctg

SEQ ID NO: 98589 - DNA, 20 bp, Artificial Sequence
  MKO10098589_B_Mfsd9
  gRNA
ggactctagccagcgtaaac

SEQ ID NO: 98590 - DNA, 20 bp, Artificial Sequence
  MKO10098590_B_Mfsd9
  gRNA
gaaggagcgaccacttgtcc

SEQ ID NO: 98591 - DNA, 20 bp, Artificial Sequence
  MKO10098591_B_Mgam
  gRNA
cacaaaccttgttagatgac

SEQ ID NO: 98592 - DNA, 20 bp, Artificial Sequence
  MKO10098592_B_Mgam
  gRNA
cgttccagctcacttagcac

SEQ ID NO: 98593 - DNA, 20 bp, Artificial Sequence
  MKO10098593_B_Mgam
  gRNA
cagggcacatgtgatgagcg

SEQ ID NO: 98594 - DNA, 20 bp, Artificial Sequence
  MKO10098594_B_Mgarp
  gRNA
cactctcggtagtctccacc

SEQ ID NO: 98595 - DNA, 20 bp, Artificial Sequence
  MKO10098595_B_Mgarp
  gRNA
tgactgtcacacctacaacc

SEQ ID NO: 98596 - DNA, 20 bp, Artificial Sequence
  MKO10098596_B_Mgarp
  gRNA
tgaaccgaaagaacaaacaa

SEQ ID NO: 98597 - DNA, 20 bp, Artificial Sequence
  MKO10098597_B_Mgat1
  gRNA
gcttgatgaacttaagatgc

SEQ ID NO: 98598 - DNA, 20 bp, Artificial Sequence
  MKO10098598_B_Mgat1
  gRNA
gctcacacccttgcgaccaa

SEQ ID NO: 98599 - DNA, 20 bp, Artificial Sequence
  MKO10098599_B_Mgat1
  gRNA
gttcgtccccttcacccagt

SEQ ID NO: 98600 - DNA, 20 bp, Artificial Sequence
  MKO10098600_B_Mgat2
  gRNA
attccggcctgttatgcacc

SEQ ID NO: 98601 - DNA, 20 bp, Artificial Sequence
  MKO10098601_B_Mgat2
  gRNA
ccgcctgcggcttcgtcctc

SEQ ID NO: 98602 - DNA, 20 bp, Artificial Sequence
  MKO10098602_B_Mgat2
  gRNA
gtcgcccattgctactccag

SEQ ID NO: 98603 - DNA, 20 bp, Artificial Sequence
  MKO10098603_B_Mgat3
  gRNA
cgggtggccccgacctattg

SEQ ID NO: 98604 - DNA, 20 bp, Artificial Sequence
  MKO10098604_B_Mgat3
  gRNA
aacagcacaccatcacgcgc

SEQ ID NO: 98605 - DNA, 20 bp, Artificial Sequence
  MKO10098605_B_Mgat3
  gRNA
cgtactcaacacgtgcctca

SEQ ID NO: 98606 - DNA, 20 bp, Artificial Sequence
  MKO10098606_B_Mgat4a
  gRNA
tcacagcgttgttgccaacc

SEQ ID NO: 98607 - DNA, 20 bp, Artificial Sequence
  MKO10098607_B_Mgat4a
  gRNA
tgtgttatagtcgtcttcat

SEQ ID NO: 98608 - DNA, 20 bp, Artificial Sequence
  MKO10098608_B_Mgat4a
  gRNA
tcttccactgccaatctgta

SEQ ID NO: 98609 - DNA, 20 bp, Artificial Sequence
  MKO10098609_B_Mgat4b
  gRNA
ctctccaacaggtgacgtgg

SEQ ID NO: 98610 - DNA, 20 bp, Artificial Sequence
  MKO10098610_B_Mgat4b
  gRNA
tgcctgtgcgagacgttcca

SEQ ID NO: 98611 - DNA, 20 bp, Artificial Sequence
  MKO10098611_B_Mgat4b
  gRNA
aggatccgcgactgaagccg

SEQ ID NO: 98612 - DNA, 20 bp, Artificial Sequence
  MKO10098612_B_Mgat4c
  gRNA
acgctatgttcacactttca

SEQ ID NO: 98613 - DNA, 20 bp, Artificial Sequence
  MKO10098613_B_Mgat4c
  gRNA
aaatgagatgcttgcgaaaa

SEQ ID NO: 98614 - DNA, 20 bp, Artificial Sequence
  MKO10098614_B_Mgat4c
  gRNA
cattgaagatagctatgttc

SEQ ID NO: 98615 - DNA, 20 bp, Artificial Sequence
  MKO10098615_B_Mgat5b
  gRNA
agggcgagtcccccaggcgc

SEQ ID NO: 98616 - DNA, 20 bp, Artificial Sequence
  MKO10098616_B_Mgat5b
  gRNA
cacccttgctatgcagaatc

SEQ ID NO: 98617 - DNA, 20 bp, Artificial Sequence
  MKO10098617_B_Mgat5b
  gRNA
tgtgtctgacatcgctgtga

SEQ ID NO: 98618 - DNA, 20 bp, Artificial Sequence
  MKO10098618_B_Mgat5
  gRNA
gacaatctggtcaacggcac

SEQ ID NO: 98619 - DNA, 20 bp, Artificial Sequence
  MKO10098619_B_Mgat5
  gRNA
tttgctctccaaggtaaacg

SEQ ID NO: 98620 - DNA, 20 bp, Artificial Sequence
  MKO10098620_B_Mgat5
  gRNA
agaagctgatcataactcat

SEQ ID NO: 98621 - DNA, 20 bp, Artificial Sequence
  MKO10098621_B_Mga
  gRNA
agtgcctctccaaatactcc

SEQ ID NO: 98622 - DNA, 20 bp, Artificial Sequence
  MKO10098622_B_Mga
  gRNA
gacaatacctgaatcatttg

SEQ ID NO: 98623 - DNA, 20 bp, Artificial Sequence
  MKO10098623_B_Mga
  gRNA
ctagtaccttcttgaagagc

SEQ ID NO: 98624 - DNA, 20 bp, Artificial Sequence
  MKO10098624_B_Mgea5
  gRNA
caggtactgataaatttcat

SEQ ID NO: 98625 - DNA, 20 bp, Artificial Sequence
  MKO10098625_B_Mgea5
  gRNA
caatgaaatttatcagtacc

SEQ ID NO: 98626 - DNA, 20 bp, Artificial Sequence
  MKO10098626_B_Mgea5
  gRNA
tttctctgctccataaccca

SEQ ID NO: 98627 - DNA, 20 bp, Artificial Sequence
  MKO10098627_B_Mgl2
  gRNA
tgttgtctaaaatggctctt

SEQ ID NO: 98628 - DNA, 20 bp, Artificial Sequence
  MKO10098628_B_Mgl2
  gRNA
cctcatcagattcccagtta

SEQ ID NO: 98629 - DNA, 20 bp, Artificial Sequence
  MKO10098629_B_Mgl2
  gRNA
gacttctctggagagcacac

SEQ ID NO: 98630 - DNA, 20 bp, Artificial Sequence
  MKO10098630_B_Mgll
  gRNA
ggaatctgcatcgactttga

SEQ ID NO: 98631 - DNA, 20 bp, Artificial Sequence
  MKO10098631_B_Mgll
  gRNA
cagagatgtgctgcaacacg

SEQ ID NO: 98632 - DNA, 20 bp, Artificial Sequence
  MKO10098632_B_Mgll
  gRNA
ctgtggccgttatgatgagc

SEQ ID NO: 98633 - DNA, 20 bp, Artificial Sequence
  MKO10098633_B_Mgme1
  gRNA
tgacaacccgctgcaagttg

SEQ ID NO: 98634 - DNA, 20 bp, Artificial Sequence
  MKO10098634_B_Mgme1
  gRNA
atgtacgccacaacttgcag

SEQ ID NO: 98635 - DNA, 20 bp, Artificial Sequence
  MKO10098635_B_Mgme1
  gRNA
cgcaggggacccatccttat

SEQ ID NO: 98636 - DNA, 20 bp, Artificial Sequence
  MKO10098636_B_Mgmt
  gRNA
tcctactgcacgagccgctt

SEQ ID NO: 98637 - DNA, 20 bp, Artificial Sequence
  MKO10098637_B_Mgmt
  gRNA
ctcagagctggtcgactcga

SEQ ID NO: 98638 - DNA, 20 bp, Artificial Sequence
  MKO10098638_B_Mgmt
  gRNA
acggaaataggcttccagcc

SEQ ID NO: 98639 - DNA, 20 bp, Artificial Sequence
  MKO10098639_B_Mgp
  gRNA
ttagctcgccacctctgctg

SEQ ID NO: 98640 - DNA, 20 bp, Artificial Sequence
  MKO10098640_B_Mgp
  gRNA
ggcgagctaaagcccaaaag

SEQ ID NO: 98641 - DNA, 20 bp, Artificial Sequence
  MKO10098641_B_Mgp
  gRNA
tccagaatctcacgaaagca

SEQ ID NO: 98642 - DNA, 20 bp, Artificial Sequence
  MKO10098642_B_Mgrn1
  gRNA
agtctttgcgaatgttcacc

SEQ ID NO: 98643 - DNA, 20 bp, Artificial Sequence
  MKO10098643_B_Mgrn1
  gRNA
ctctaccgcctgacaataga

SEQ ID NO: 98644 - DNA, 20 bp, Artificial Sequence
  MKO10098644_B_Mgrn1
  gRNA
cctggactggacgactgccc

SEQ ID NO: 98645 - DNA, 20 bp, Artificial Sequence
  MKO10098645_B_Mgst1
  gRNA
gctctgcgaccgcattccag

SEQ ID NO: 98646 - DNA, 20 bp, Artificial Sequence
  MKO10098646_B_Mgst1
  gRNA
gccaacccagaagactgcgc

SEQ ID NO: 98647 - DNA, 20 bp, Artificial Sequence
  MKO10098647_B_Mgst1
  gRNA
ttactttgtcaatggcttac

SEQ ID NO: 98648 - DNA, 20 bp, Artificial Sequence
  MKO10098648_B_Mgst2
  gRNA
cccttgtaggttatttcgct

SEQ ID NO: 98649 - DNA, 20 bp, Artificial Sequence
  MKO10098649_B_Mgst2
  gRNA
cagattcctgaacgaatacc

SEQ ID NO: 98650 - DNA, 20 bp, Artificial Sequence
  MKO10098650_B_Mgst2
  gRNA
aatattctctcgaattccag

SEQ ID NO: 98651 - DNA, 20 bp, Artificial Sequence
  MKO10098651_B_Mgst3
  gRNA
ctggacccgtagcctaagcc

SEQ ID NO: 98652 - DNA, 20 bp, Artificial Sequence
  MKO10098652_B_Mgst3
  gRNA
acgacactcacgtgttctgg

SEQ ID NO: 98653 - DNA, 20 bp, Artificial Sequence
  MKO10098653_B_Mgst3
  gRNA
atcagaccaggcttaggcta

SEQ ID NO: 98654 - DNA, 20 bp, Artificial Sequence
  MKO10098654_B_Mia2
  gRNA
cttctcccgtagtgaagttc

SEQ ID NO: 98655 - DNA, 20 bp, Artificial Sequence
  MKO10098655_B_Mia2
  gRNA
gagggccttacaagttattt

SEQ ID NO: 98656 - DNA, 20 bp, Artificial Sequence
  MKO10098656_B_Mia2
  gRNA
agatgcagtcgagattgaag

SEQ ID NO: 98657 - DNA, 20 bp, Artificial Sequence
  MKO10098657_B_Mia3
  gRNA
tgggtacacaagtacctcag

SEQ ID NO: 98658 - DNA, 20 bp, Artificial Sequence
  MKO10098658_B_Mia3
  gRNA
tatacagtgttaatgtaccg

SEQ ID NO: 98659 - DNA, 20 bp, Artificial Sequence
  MKO10098659_B_Mia3
  gRNA
acataggttgaacacagttt

SEQ ID NO: 98660 - DNA, 20 bp, Artificial Sequence
  MKO10098660_B_Mia
  gRNA
ctggaagctgtgtgcggacg

SEQ ID NO: 98661 - DNA, 20 bp, Artificial Sequence
  MKO10098661_B_Mia
  gRNA
gtcctcccggacaatgctac

SEQ ID NO: 98662 - DNA, 20 bp, Artificial Sequence
  MKO10098662_B_Mia
  gRNA
aatagcccaggcgggctgcc

SEQ ID NO: 98663 - DNA, 20 bp, Artificial Sequence
  MKO10098663_B_Mib1
  gRNA
gtccactcctcgcaccactc

SEQ ID NO: 98664 - DNA, 20 bp, Artificial Sequence
  MKO10098664_B_Mib1
  gRNA
tgccgccagcaaccaatcat

SEQ ID NO: 98665 - DNA, 20 bp, Artificial Sequence
  MKO10098665_B_Mib1
  gRNA
agagatcattgccctgtgct

SEQ ID NO: 98666 - DNA, 20 bp, Artificial Sequence
  MKO10098666_B_Mib2
  gRNA
gtgtggtggacatccgtggc

SEQ ID NO: 98667 - DNA, 20 bp, Artificial Sequence
  MKO10098667_B_Mib2
  gRNA
ggccttcttgcatatccctt

SEQ ID NO: 98668 - DNA, 20 bp, Artificial Sequence
  MKO10098668_B_Mib2
  gRNA
gatccgagggaggccctgtc

SEQ ID NO: 98669 - DNA, 20 bp, Artificial Sequence
  MKO10098669_B_Mical1
  gRNA
caaactcatagctggccagt

SEQ ID NO: 98670 - DNA, 20 bp, Artificial Sequence
  MKO10098670_B_Mical1
  gRNA
aatctccacccccaacagta

SEQ ID NO: 98671 - DNA, 20 bp, Artificial Sequence
  MKO10098671_B_Mical1
  gRNA
ccactttgagacctttgtgc

SEQ ID NO: 98672 - DNA, 20 bp, Artificial Sequence
  MKO10098672_B_Mical2
  gRNA
ccactcactgatgtggtcga

SEQ ID NO: 98673 - DNA, 20 bp, Artificial Sequence
  MKO10098673_B_Mical2
  gRNA
ggtcacaggaacacgctaga

SEQ ID NO: 98674 - DNA, 20 bp, Artificial Sequence
  MKO10098674_B_Mical2
  gRNA
cgaccgtactttgattctct

SEQ ID NO: 98675 - DNA, 20 bp, Artificial Sequence
  MKO10098675_B_Mical3
  gRNA
agggataggatggcgagcat

SEQ ID NO: 98676 - DNA, 20 bp, Artificial Sequence
  MKO10098676_B_Mical3
  gRNA
caaccgcaacacaaccgcag

SEQ ID NO: 98677 - DNA, 20 bp, Artificial Sequence
  MKO10098677_B_Mical3
  gRNA
tttcgtcgaaaagaatttcg

SEQ ID NO: 98678 - DNA, 20 bp, Artificial Sequence
  MKO10098678_B_Micalcl
  gRNA
gcttcctgacctgagcctta

SEQ ID NO: 98679 - DNA, 20 bp, Artificial Sequence
  MKO10098679_B_Micalcl
  gRNA
ccttctccagcttcacgccc

SEQ ID NO: 98680 - DNA, 20 bp, Artificial Sequence
  MKO10098680_B_Micalcl
  gRNA
gaagaggtggcttctgtcac

SEQ ID NO: 98681 - DNA, 20 bp, Artificial Sequence
  MKO10098681_B_Micall1
  gRNA
acatcacccgctgtgcagcc

SEQ ID NO: 98682 - DNA, 20 bp, Artificial Sequence
  MKO10098682_B_Micall1
  gRNA
gctgcctcaccacccaaacc

SEQ ID NO: 98683 - DNA, 20 bp, Artificial Sequence
  MKO10098683_B_Micall1
  gRNA
tgcaccctaggcctttgaag

SEQ ID NO: 98684 - DNA, 20 bp, Artificial Sequence
  MKO10098684_B_Micall2
  gRNA
cccagccctgctagacgctg

SEQ ID NO: 98685 - DNA, 20 bp, Artificial Sequence
  MKO10098685_B_Micall2
  gRNA
gcctgccaagttgccctcgc

SEQ ID NO: 98686 - DNA, 20 bp, Artificial Sequence
  MKO10098686_B_Micall2
  gRNA
actgctgacagagcttcccg

SEQ ID NO: 98687 - DNA, 20 bp, Artificial Sequence
  MKO10098687_B_Micu1
  gRNA
cccctgctagaaaattgccc

SEQ ID NO: 98688 - DNA, 20 bp, Artificial Sequence
  MKO10098688_B_Micu1
  gRNA
gctttattatatactgatcc

SEQ ID NO: 98689 - DNA, 20 bp, Artificial Sequence
  MKO10098689_B_Micu1
  gRNA
tgcggcagagccttatcctg

SEQ ID NO: 98690 - DNA, 20 bp, Artificial Sequence
  MKO10098690_B_Micu2
  gRNA
ttgatccacagcgtgctgtt

SEQ ID NO: 98691 - DNA, 20 bp, Artificial Sequence
  MKO10098691_B_Micu2
  gRNA
ctttgttgcaggtaaaacac

SEQ ID NO: 98692 - DNA, 20 bp, Artificial Sequence
  MKO10098692_B_Micu2
  gRNA
tgtaagcaagaaaagatact

SEQ ID NO: 98693 - DNA, 20 bp, Artificial Sequence
  MKO10098693_B_Micu3
  gRNA
tctcagaaactccaccagtt

SEQ ID NO: 98694 - DNA, 20 bp, Artificial Sequence
  MKO10098694_B_Micu3
  gRNA
tttgcatctatagaatgtga

SEQ ID NO: 98695 - DNA, 20 bp, Artificial Sequence
  MKO10098695_B_Micu3
  gRNA
cagagccattactgaagact

SEQ ID NO: 98696 - DNA, 20 bp, Artificial Sequence
  MKO10098696_B_Mid1ip1
  gRNA
cgacgtacccctgtccgagc

SEQ ID NO: 98697 - DNA, 20 bp, Artificial Sequence
  MKO10098697_B_Mid1ip1
  gRNA
aacgccatgaatcgcttcat

SEQ ID NO: 98698 - DNA, 20 bp, Artificial Sequence
  MKO10098698_B_Mid1ip1
  gRNA
gggtacgtcgcgcagcagac

SEQ ID NO: 98699 - DNA, 20 bp, Artificial Sequence
  MKO10098699_B_Mid1
  gRNA
attctagcagtttcttctcc

SEQ ID NO: 98700 - DNA, 20 bp, Artificial Sequence
  MKO10098700_B_Mid1
  gRNA
atcacattcttctgtcagtt

SEQ ID NO: 98701 - DNA, 20 bp, Artificial Sequence
  MKO10098701_B_Mid1
  gRNA
cagcaacgaagacaaattat

SEQ ID NO: 98702 - DNA, 20 bp, Artificial Sequence
  MKO10098702_B_Mid2
  gRNA
cgagatgaacctcaccaacc

SEQ ID NO: 98703 - DNA, 20 bp, Artificial Sequence
  MKO10098703_B_Mid2
  gRNA
tatggaagaatgtgacgagt

SEQ ID NO: 98704 - DNA, 20 bp, Artificial Sequence
  MKO10098704_B_Mid2
  gRNA
ggtgaatactgctatgcatg

SEQ ID NO: 98705 - DNA, 20 bp, Artificial Sequence
  MKO10098705_B_Midn
  gRNA
ttgaccctggccctgcgagt

SEQ ID NO: 98706 - DNA, 20 bp, Artificial Sequence
  MKO10098706_B_Midn
  gRNA
gcagcttccccgaactgagc

SEQ ID NO: 98707 - DNA, 20 bp, Artificial Sequence
  MKO10098707_B_Midn
  gRNA
acagtccgttatgcaagcct

SEQ ID NO: 98708 - DNA, 20 bp, Artificial Sequence
  MKO10098708_B_Mief1
  gRNA
tacccgcttaactgccagtg

SEQ ID NO: 98709 - DNA, 20 bp, Artificial Sequence
  MKO10098709_B_Mief1
  gRNA
attggagagcacaaaatcga

SEQ ID NO: 98710 - DNA, 20 bp, Artificial Sequence
  MKO10098710_B_Mief1
  gRNA
cgaggagagcccatccagtt

SEQ ID NO: 98711 - DNA, 20 bp, Artificial Sequence
  MKO10098711_B_Mief2
  gRNA
tgctcgattggtgctaggtg

SEQ ID NO: 98712 - DNA, 20 bp, Artificial Sequence
  MKO10098712_B_Mief2
  gRNA
tttgcctatagctcatcgac

SEQ ID NO: 98713 - DNA, 20 bp, Artificial Sequence
  MKO10098713_B_Mief2
  gRNA
ttcagccagcccctagctac

SEQ ID NO: 98714 - DNA, 20 bp, Artificial Sequence
  MKO10098714_B_Mien1
  gRNA
gccttcgagattgagatcaa

SEQ ID NO: 98715 - DNA, 20 bp, Artificial Sequence
  MKO10098715_B_Mien1
  gRNA
tccattgatctcaatctcga

SEQ ID NO: 98716 - DNA, 20 bp, Artificial Sequence
  MKO10098716_B_Mien1
  gRNA
aggcagtggagtccacatcg

SEQ ID NO: 98717 - DNA, 20 bp, Artificial Sequence
  MKO10098717_B_Mier1
  gRNA
agactgtgagggatcatcat

SEQ ID NO: 98718 - DNA, 20 bp, Artificial Sequence
  MKO10098718_B_Mier1
  gRNA
cacgagctgctcagcctcta

SEQ ID NO: 98719 - DNA, 20 bp, Artificial Sequence
  MKO10098719_B_Mier1
  gRNA
tgaaccagcatgtcagctga

SEQ ID NO: 98720 - DNA, 20 bp, Artificial Sequence
  MKO10098720_B_Mier2
  gRNA
agacggggtgaggtcatcag

SEQ ID NO: 98721 - DNA, 20 bp, Artificial Sequence
  MKO10098721_B_Mier2
  gRNA
acctgccgtggtctgcaagc

SEQ ID NO: 98722 - DNA, 20 bp, Artificial Sequence
  MKO10098722_B_Mier2
  gRNA
acctacacccactctggtta

SEQ ID NO: 98723 - DNA, 20 bp, Artificial Sequence
  MKO10098723_B_Mier3
  gRNA
ctgagtttcctcgtcatcgc

SEQ ID NO: 98724 - DNA, 20 bp, Artificial Sequence
  MKO10098724_B_Mier3
  gRNA
tcctttggaagttcgagccc

SEQ ID NO: 98725 - DNA, 20 bp, Artificial Sequence
  MKO10098725_B_Mier3
  gRNA
acctgggctcgaacttccaa

SEQ ID NO: 98726 - DNA, 20 bp, Artificial Sequence
  MKO10098726_B_Mif4gd
  gRNA
gagagtagccaacgtgattg

SEQ ID NO: 98727 - DNA, 20 bp, Artificial Sequence
  MKO10098727_B_Mif4gd
  gRNA
ctgctgaagaccgcgctcaa

SEQ ID NO: 98728 - DNA, 20 bp, Artificial Sequence
  MKO10098728_B_Mif4gd
  gRNA
gggaggctcacctttgagcg

SEQ ID NO: 98729 - DNA, 20 bp, Artificial Sequence
  MKO10098729_B_Mif
  gRNA
accggtccgggctgatgtgc

SEQ ID NO: 98730 - DNA, 20 bp, Artificial Sequence
  MKO10098730_B_Mif
  gRNA
cgacatgaacgctgccaacg

SEQ ID NO: 98731 - DNA, 20 bp, Artificial Sequence
  MKO10098731_B_Mif
  gRNA
ggccaggactcaagcgaagg

SEQ ID NO: 98732 - DNA, 20 bp, Artificial Sequence
  MKO10098732_B_Miip
  gRNA
tgactggagagctattgtcc

SEQ ID NO: 98733 - DNA, 20 bp, Artificial Sequence
  MKO10098733_B_Miip
  gRNA
ccacaccgctgctctcttgc

SEQ ID NO: 98734 - DNA, 20 bp, Artificial Sequence
  MKO10098734_B_Miip
  gRNA
tcagcccagagtgacctccc

SEQ ID NO: 98735 - DNA, 20 bp, Artificial Sequence
  MKO10098735_B_Mill1
  gRNA
gctcatcatcgaagtatctc

SEQ ID NO: 98736 - DNA, 20 bp, Artificial Sequence
  MKO10098736_B_Mill1
  gRNA
tctcttctcgcaccatagac

SEQ ID NO: 98737 - DNA, 20 bp, Artificial Sequence
  MKO10098737_B_Mill1
  gRNA
cctgctaccgcctgtactct

SEQ ID NO: 98738 - DNA, 20 bp, Artificial Sequence
  MKO10098738_B_Mill2
  gRNA
cccagcagaacaagatgttc

SEQ ID NO: 98739 - DNA, 20 bp, Artificial Sequence
  MKO10098739_B_Mill2
  gRNA
ctggtaggtcccatccccgc

SEQ ID NO: 98740 - DNA, 20 bp, Artificial Sequence
  MKO10098740_B_Mill2
  gRNA
atcctgcagaccgtttctca

SEQ ID NO: 98741 - DNA, 20 bp, Artificial Sequence
  MKO10098741_B_Milr1
  gRNA
acatacagctcgtcctgtgc

SEQ ID NO: 98742 - DNA, 20 bp, Artificial Sequence
  MKO10098742_B_Milr1
  gRNA
tgtacgagggtggaaaataa

SEQ ID NO: 98743 - DNA, 20 bp, Artificial Sequence
  MKO10098743_B_Milr1
  gRNA
aacagtgacagccggcatga

SEQ ID NO: 98744 - DNA, 20 bp, Artificial Sequence
  MKO10098744_B_Mina
  gRNA
cgagtacagtgtggaatctg

SEQ ID NO: 98745 - DNA, 20 bp, Artificial Sequence
  MKO10098745_B_Mina
  gRNA
gacacacgacttcctgctga

SEQ ID NO: 98746 - DNA, 20 bp, Artificial Sequence
  MKO10098746_B_Mina
  gRNA
gatttgttgtactttcccag

SEQ ID NO: 98747 - DNA, 20 bp, Artificial Sequence
  MKO10098747_B_Mink1
  gRNA
cgcaatattgccacctacta

SEQ ID NO: 98748 - DNA, 20 bp, Artificial Sequence
  MKO10098748_B_Mink1
  gRNA
caccttgtatacctgtccat

SEQ ID NO: 98749 - DNA, 20 bp, Artificial Sequence
  MKO10098749_B_Mink1
  gRNA
ccctgcaggaatctttgagc

SEQ ID NO: 98750 - DNA, 20 bp, Artificial Sequence
  MKO10098750_B_Minos1
  gRNA
agaatgtggccattagcctt

SEQ ID NO: 98751 - DNA, 20 bp, Artificial Sequence
  MKO10098751_B_Minos1
  gRNA
aagtcacttactcttaaaga

SEQ ID NO: 98752 - DNA, 20 bp, Artificial Sequence
  MKO10098752_B_Minos1
  gRNA
cagaaagtgggaccggtgca

SEQ ID NO: 98753 - DNA, 20 bp, Artificial Sequence
  MKO10098753_B_Minpp1
  gRNA
atggctacaccattaacagc

SEQ ID NO: 98754 - DNA, 20 bp, Artificial Sequence
  MKO10098754_B_Minpp1
  gRNA
ccaatgaacagtttaaatgc

SEQ ID NO: 98755 - DNA, 20 bp, Artificial Sequence
  MKO10098755_B_Minpp1
  gRNA
cgagacggctctttatcatg

SEQ ID NO: 98756 - DNA, 20 bp, Artificial Sequence
  MKO10098756_B_Mios
  gRNA
gcaatccaaatcctgaatga

SEQ ID NO: 98757 - DNA, 20 bp, Artificial Sequence
  MKO10098757_B_Mios
  gRNA
ctgaagacgccccttcattc

SEQ ID NO: 98758 - DNA, 20 bp, Artificial Sequence
  MKO10098758_B_Mios
  gRNA
aaaggatcattggtttatgc

SEQ ID NO: 98759 - DNA, 20 bp, Artificial Sequence
  MKO10098759_B_Miox
  gRNA
cttccacgcgttccagaccg

SEQ ID NO: 98760 - DNA, 20 bp, Artificial Sequence
  MKO10098760_B_Miox
  gRNA
taaagacacgatccagcagc

SEQ ID NO: 98761 - DNA, 20 bp, Artificial Sequence
  MKO10098761_B_Miox
  gRNA
tgctgacgaagtccacagtc

SEQ ID NO: 98762 - DNA, 20 bp, Artificial Sequence
  MKO10098762_B_Mipep
  gRNA
taggcggactttgtgaaaat

SEQ ID NO: 98763 - DNA, 20 bp, Artificial Sequence
  MKO10098763_B_Mipep
  gRNA
cgagcatgttccacaccccc

SEQ ID NO: 98764 - DNA, 20 bp, Artificial Sequence
  MKO10098764_B_Mipep
  gRNA
cccagaccctgcattcagag

SEQ ID NO: 98765 - DNA, 20 bp, Artificial Sequence
  MKO10098765_B_Mipol1
  gRNA
ccttgagggctaactgcagt

SEQ ID NO: 98766 - DNA, 20 bp, Artificial Sequence
  MKO10098766_B_Mipol1
  gRNA
tctcagagcaagcaatacaa

SEQ ID NO: 98767 - DNA, 20 bp, Artificial Sequence
  MKO10098767_B_Mipol1
  gRNA
gatgtctctttatttaagtc

SEQ ID NO: 98768 - DNA, 20 bp, Artificial Sequence
  MKO10098768_B_Mip
  gRNA
acctgtcgaactgaagactc

SEQ ID NO: 98769 - DNA, 20 bp, Artificial Sequence
  MKO10098769_B_Mip
  gRNA
cccgatcatcggagggggcc

SEQ ID NO: 98770 - DNA, 20 bp, Artificial Sequence
  MKO10098770_B_Mip
  gRNA
cgtcaagaagatctccacag

SEQ ID NO: 98771 - DNA, 20 bp, Artificial Sequence
  MKO10098771_B_Mis12
  gRNA
caggatgtctgtggatccga

SEQ ID NO: 98772 - DNA, 20 bp, Artificial Sequence
  MKO10098772_B_Mis12
  gRNA
tctctgtgcatttccgagtc

SEQ ID NO: 98773 - DNA, 20 bp, Artificial Sequence
  MKO10098773_B_Mis12
  gRNA
tcgagtttctcttcactgaa

SEQ ID NO: 98774 - DNA, 20 bp, Artificial Sequence
  MKO10098774_B_Mis18a
  gRNA
cttatccacagagacgttac

SEQ ID NO: 98775 - DNA, 20 bp, Artificial Sequence
  MKO10098775_B_Mis18a
  gRNA
ctgcacctcagttacacctt

SEQ ID NO: 98776 - DNA, 20 bp, Artificial Sequence
  MKO10098776_B_Mis18a
  gRNA
agttgaatctaaactgtcct

SEQ ID NO: 98777 - DNA, 20 bp, Artificial Sequence
  MKO10098777_B_Mis18bp1
  gRNA
cttaaaaggattgatagact

SEQ ID NO: 98778 - DNA, 20 bp, Artificial Sequence
  MKO10098778_B_Mis18bp1
  gRNA
aatgaacttaggaccttatc

SEQ ID NO: 98779 - DNA, 20 bp, Artificial Sequence
  MKO10098779_B_Mis18bp1
  gRNA
caatgtgttccttccagttg

SEQ ID NO: 98780 - DNA, 20 bp, Artificial Sequence
  MKO10098780_B_Misp
  gRNA
tccacaccagccccgaattc

SEQ ID NO: 98781 - DNA, 20 bp, Artificial Sequence
  MKO10098781_B_Misp
  gRNA
cacccccgtccacctgaatt

SEQ ID NO: 98782 - DNA, 20 bp, Artificial Sequence
  MKO10098782_B_Misp
  gRNA
aaagcggcacaagaatctct

SEQ ID NO: 98783 - DNA, 20 bp, Artificial Sequence
  MKO10098783_B_Mitd1
  gRNA
gcaccactccgtgactcccg

SEQ ID NO: 98784 - DNA, 20 bp, Artificial Sequence
  MKO10098784_B_Mitd1
  gRNA
ttatattagacaaactcatc

SEQ ID NO: 98785 - DNA, 20 bp, Artificial Sequence
  MKO10098785_B_Mitd1
  gRNA
tcagcatctcacaaaaccga

SEQ ID NO: 98786 - DNA, 20 bp, Artificial Sequence
  MKO10098786_B_Mitf
  gRNA
cgagagtgcgtgttcatacc

SEQ ID NO: 98787 - DNA, 20 bp, Artificial Sequence
  MKO10098787_B_Mitf
  gRNA
ggtggcatggcatggtcgcc

SEQ ID NO: 98788 - DNA, 20 bp, Artificial Sequence
  MKO10098788_B_Mitf
  gRNA
tgctcaggtgcagacccacc

SEQ ID NO: 98789 - DNA, 20 bp, Artificial Sequence
  MKO10098789_B_Mixl1
  gRNA
tggacttggcccgtcggttc

SEQ ID NO: 98790 - DNA, 20 bp, Artificial Sequence
  MKO10098790_B_Mixl1
  gRNA
cgctcccgcaagtggatgtc

SEQ ID NO: 98791 - DNA, 20 bp, Artificial Sequence
  MKO10098791_B_Mixl1
  gRNA
aagcggcgccttctgcgaac

SEQ ID NO: 98792 - DNA, 20 bp, Artificial Sequence
  MKO10098792_B_Mki67
  gRNA
agcacagaagctatctcttg

SEQ ID NO: 98793 - DNA, 20 bp, Artificial Sequence
  MKO10098793_B_Mki67
  gRNA
agcaagccaacagaatttcc

SEQ ID NO: 98794 - DNA, 20 bp, Artificial Sequence
  MKO10098794_B_Mki67
  gRNA
gtgcactgtaggtatgaaga

SEQ ID NO: 98795 - DNA, 20 bp, Artificial Sequence
  MKO10098795_B_Mkks
  gRNA
agtcaccccaactctgtcga

SEQ ID NO: 98796 - DNA, 20 bp, Artificial Sequence
  MKO10098796_B_Mkks
  gRNA
tacagaagagtgccacccta

SEQ ID NO: 98797 - DNA, 20 bp, Artificial Sequence
  MKO10098797_B_Mkks
  gRNA
gcagcagaaatgacaccgcc

SEQ ID NO: 98798 - DNA, 20 bp, Artificial Sequence
  MKO10098798_B_Mkl1
  gRNA
agaccgaggactatttgaaa

SEQ ID NO: 98799 - DNA, 20 bp, Artificial Sequence
  MKO10098799_B_Mkl1
  gRNA
ctcggctgagccttcgctcc

SEQ ID NO: 98800 - DNA, 20 bp, Artificial Sequence
  MKO10098800_B_Mkl1
  gRNA
tctctgctcatgaaatgcag

SEQ ID NO: 98801 - DNA, 20 bp, Artificial Sequence
  MKO10098801_B_Mkl2
  gRNA
ttaacaggaagtatagtctt

SEQ ID NO: 98802 - DNA, 20 bp, Artificial Sequence
  MKO10098802_B_Mkl2
  gRNA
tcctttgttgcagcctcagc

SEQ ID NO: 98803 - DNA, 20 bp, Artificial Sequence
  MKO10098803_B_Mkl2
  gRNA
cctgtgctcacagactgagc

SEQ ID NO: 98804 - DNA, 20 bp, Artificial Sequence
  MKO10098804_B_Mkln1
  gRNA
tcgtgcagccctgtctgaac

SEQ ID NO: 98805 - DNA, 20 bp, Artificial Sequence
  MKO10098805_B_Mkln1
  gRNA
atcgttcagaatattacatt

SEQ ID NO: 98806 - DNA, 20 bp, Artificial Sequence
  MKO10098806_B_Mkln1
  gRNA
gttgctctctgaagaccatc

SEQ ID NO: 98807 - DNA, 20 bp, Artificial Sequence
  MKO10098807_B_Mknk1
  gRNA
cattgaagtgcttccgcttc

SEQ ID NO: 98808 - DNA, 20 bp, Artificial Sequence
  MKO10098808_B_Mknk1
  gRNA
tccttctcccagcaattccg

SEQ ID NO: 98809 - DNA, 20 bp, Artificial Sequence
  MKO10098809_B_Mknk1
  gRNA
gtgctgtgaacctacagagt

SEQ ID NO: 98810 - DNA, 20 bp, Artificial Sequence
  MKO10098810_B_Mknk2
  gRNA
acatccgcagcagggtgttc

SEQ ID NO: 98811 - DNA, 20 bp, Artificial Sequence
  MKO10098811_B_Mknk2
  gRNA
cacgcatcttctcaaacacc

SEQ ID NO: 98812 - DNA, 20 bp, Artificial Sequence
  MKO10098812_B_Mknk2
  gRNA
ctggtgtttgagaagatgcg

SEQ ID NO: 98813 - DNA, 20 bp, Artificial Sequence
  MKO10098813_B_Mkrn1
  gRNA
tacttgcacactacgccgta

SEQ ID NO: 98814 - DNA, 20 bp, Artificial Sequence
  MKO10098814_B_Mkrn1
  gRNA
atacttactacggccacagt

SEQ ID NO: 98815 - DNA, 20 bp, Artificial Sequence
  MKO10098815_B_Mkrn1
  gRNA
acatgtcacacgagtctccg

SEQ ID NO: 98816 - DNA, 20 bp, Artificial Sequence
  MKO10098816_B_Mkrn2
  gRNA
acccctttgacccagaacaa

SEQ ID NO: 98817 - DNA, 20 bp, Artificial Sequence
  MKO10098817_B_Mkrn2
  gRNA
attcgaatgaacctggaaaa

SEQ ID NO: 98818 - DNA, 20 bp, Artificial Sequence
  MKO10098818_B_Mkrn2
  gRNA
cctgaggagggcgaagggtt

SEQ ID NO: 98819 - DNA, 20 bp, Artificial Sequence
  MKO10098819_B_Mkrn3
  gRNA
gtggatcatcaagcgcatac

SEQ ID NO: 98820 - DNA, 20 bp, Artificial Sequence
  MKO10098820_B_Mkrn3
  gRNA
ggcggccgcgtgggcctcaa

SEQ ID NO: 98821 - DNA, 20 bp, Artificial Sequence
  MKO10098821_B_Mkrn3
  gRNA
ttgaggccagcgccagccga

SEQ ID NO: 98822 - DNA, 20 bp, Artificial Sequence
  MKO10098822_B_Mks1
  gRNA
atccgctcagccagaaacga

SEQ ID NO: 98823 - DNA, 20 bp, Artificial Sequence
  MKO10098823_B_Mks1
  gRNA
ccgccaagagatcttgaaac

SEQ ID NO: 98824 - DNA, 20 bp, Artificial Sequence
  MKO10098824_B_Mks1
  gRNA
taaaagtggccaagtctatg

SEQ ID NO: 98825 - DNA, 20 bp, Artificial Sequence
  MKO10098825_B_Mkx
  gRNA
cttacctgtgcgatagacaa

SEQ ID NO: 98826 - DNA, 20 bp, Artificial Sequence
  MKO10098826_B_Mkx
  gRNA
tttatagacaccccggacat

SEQ ID NO: 98827 - DNA, 20 bp, Artificial Sequence
  MKO10098827_B_Mkx
  gRNA
cgactccttgagacatgtca

SEQ ID NO: 98828 - DNA, 20 bp, Artificial Sequence
  MKO10098828_B_Mlana
  gRNA
cccggctctcagggtgaata

SEQ ID NO: 98829 - DNA, 20 bp, Artificial Sequence
  MKO10098829_B_Mlana
  gRNA
cgataagcagagcaatcccc

SEQ ID NO: 98830 - DNA, 20 bp, Artificial Sequence
  MKO10098830_B_Mlana
  gRNA
ccccaagaagacattcactt

SEQ ID NO: 98831 - DNA, 20 bp, Artificial Sequence
  MKO10098831_B_Mlc1
  gRNA
gaacgtgttcccctccgaga

SEQ ID NO: 98832 - DNA, 20 bp, Artificial Sequence
  MKO10098832_B_Mlc1
  gRNA
agcgaagctcacaattgctg

SEQ ID NO: 98833 - DNA, 20 bp, Artificial Sequence
  MKO10098833_B_Mlc1
  gRNA
ggcagccacggtgatcattt

SEQ ID NO: 98834 - DNA, 20 bp, Artificial Sequence
  MKO10098834_B_Mlec
  gRNA
gctatacatcgagtttgtca

SEQ ID NO: 98835 - DNA, 20 bp, Artificial Sequence
  MKO10098835_B_Mlec
  gRNA
gggccgtgctgtgcccgaca

SEQ ID NO: 98836 - DNA, 20 bp, Artificial Sequence
  MKO10098836_B_Mlec
  gRNA
ctgctgttgtccgaggcata

SEQ ID NO: 98837 - DNA, 20 bp, Artificial Sequence
  MKO10098837_B_Mlf1
  gRNA
tctctagggccaactttcaa

SEQ ID NO: 98838 - DNA, 20 bp, Artificial Sequence
  MKO10098838_B_Mlf1
  gRNA
atgatggcaaatatgcgaag

SEQ ID NO: 98839 - DNA, 20 bp, Artificial Sequence
  MKO10098839_B_Mlf1
  gRNA
tgaaccaccaaaggtgttcc

SEQ ID NO: 98840 - DNA, 20 bp, Artificial Sequence
  MKO10098840_B_Mlf2
  gRNA
caccattcccaacatcccga

SEQ ID NO: 98841 - DNA, 20 bp, Artificial Sequence
  MKO10098841_B_Mlf2
  gRNA
tcggagatgcgctctgcccc

SEQ ID NO: 98842 - DNA, 20 bp, Artificial Sequence
  MKO10098842_B_Mlf2
  gRNA
caaagccgcctgacaacatg

SEQ ID NO: 98843 - DNA, 20 bp, Artificial Sequence
  MKO10098843_B_Mlh1
  gRNA
taatagtgacatgggccaca

SEQ ID NO: 98844 - DNA, 20 bp, Artificial Sequence
  MKO10098844_B_Mlh1
  gRNA
ctaattcagatccaagacaa

SEQ ID NO: 98845 - DNA, 20 bp, Artificial Sequence
  MKO10098845_B_Mlh1
  gRNA
attggcaagcataagccatg

SEQ ID NO: 98846 - DNA, 20 bp, Artificial Sequence
  MKO10098846_B_Mlh3
  gRNA
agtgtttgctcgatacccag

SEQ ID NO: 98847 - DNA, 20 bp, Artificial Sequence
  MKO10098847_B_Mlh3
  gRNA
taaacttgttatccacttgc

SEQ ID NO: 98848 - DNA, 20 bp, Artificial Sequence
  MKO10098848_B_Mlh3
  gRNA
tctgggtatcgagcaaacac

SEQ ID NO: 98849 - DNA, 20 bp, Artificial Sequence
  MKO10098849_B_Mlip
  gRNA
aagtcattacctccactggt

SEQ ID NO: 98850 - DNA, 20 bp, Artificial Sequence
  MKO10098850_B_Mlip
  gRNA
tcagaacccaacattgtctg

SEQ ID NO: 98851 - DNA, 20 bp, Artificial Sequence
  MKO10098851_B_Mlip
  gRNA
aggcactagatgaaccagcc

SEQ ID NO: 98852 - DNA, 20 bp, Artificial Sequence
  MKO10098852_B_Mlkl
  gRNA
caaagtattcaacaaccccc

SEQ ID NO: 98853 - DNA, 20 bp, Artificial Sequence
  MKO10098853_B_Mlkl
  gRNA
cccaaatatacgcaagatgt

SEQ ID NO: 98854 - DNA, 20 bp, Artificial Sequence
  MKO10098854_B_Mlkl
  gRNA
tggccacttacattgcttca

SEQ ID NO: 98855 - DNA, 20 bp, Artificial Sequence
  MKO10098855_B_Mllt10
  gRNA
ttcttaccagcttactaaag

SEQ ID NO: 98856 - DNA, 20 bp, Artificial Sequence
  MKO10098856_B_Mllt10
  gRNA
gggaaacataccatgttaca

SEQ ID NO: 98857 - DNA, 20 bp, Artificial Sequence
  MKO10098857_B_Mllt10
  gRNA
gacaggctttccatgtaaca

SEQ ID NO: 98858 - DNA, 20 bp, Artificial Sequence
  MKO10098858_B_Mllt11
  gRNA
gctgctatccttgctctcgt

SEQ ID NO: 98859 - DNA, 20 bp, Artificial Sequence
  MKO10098859_B_Mllt11
  gRNA
agctccgacagatccagttc

SEQ ID NO: 98860 - DNA, 20 bp, Artificial Sequence
  MKO10098860_B_Mllt11
  gRNA
agttgaaggtgctgtactca

SEQ ID NO: 98861 - DNA, 20 bp, Artificial Sequence
  MKO10098861_B_Mllt1
  gRNA
gagcagcttgcagcgaaact

SEQ ID NO: 98862 - DNA, 20 bp, Artificial Sequence
  MKO10098862_B_Mllt1
  gRNA
aactcaccacgcttgggttt

SEQ ID NO: 98863 - DNA, 20 bp, Artificial Sequence
  MKO10098863_B_Mllt1
  gRNA
gcccgactcctccactttgt

SEQ ID NO: 98864 - DNA, 20 bp, Artificial Sequence
  MKO10098864_B_Mllt3
  gRNA
tcagtgtcattaaccttctg

SEQ ID NO: 98865 - DNA, 20 bp, Artificial Sequence
  MKO10098865_B_Mllt3
  gRNA
cgcagggtcagcttgagtga

SEQ ID NO: 98866 - DNA, 20 bp, Artificial Sequence
  MKO10098866_B_Mllt3
  gRNA
ggcgggggttcatgatggag

SEQ ID NO: 98867 - DNA, 20 bp, Artificial Sequence
  MKO10098867_B_Mllt4
  gRNA
ttgcagtgagaactcacgac

SEQ ID NO: 98868 - DNA, 20 bp, Artificial Sequence
  MKO10098868_B_Mllt4
  gRNA
ctctagttgtacagttgaat

SEQ ID NO: 98869 - DNA, 20 bp, Artificial Sequence
  MKO10098869_B_Mllt4
  gRNA
ctctatgaagtgcatgtcag

SEQ ID NO: 98870 - DNA, 20 bp, Artificial Sequence
  MKO10098870_B_Mllt6
  gRNA
tgcatgacctgtaaccgcca

SEQ ID NO: 98871 - DNA, 20 bp, Artificial Sequence
  MKO10098871_B_Mllt6
  gRNA
agcttgctatggcatcgtcc

SEQ ID NO: 98872 - DNA, 20 bp, Artificial Sequence
  MKO10098872_B_Mllt6
  gRNA
aatctcaggagcgtgcagcc

SEQ ID NO: 98873 - DNA, 20 bp, Artificial Sequence
  MKO10098873_B_Mlph
  gRNA
cctgctctccttccgagatg

SEQ ID NO: 98874 - DNA, 20 bp, Artificial Sequence
  MKO10098874_B_Mlph
  gRNA
cccgctgcctgcagccctac

SEQ ID NO: 98875 - DNA, 20 bp, Artificial Sequence
  MKO10098875_B_Mlph
  gRNA
ctgaggacaggcccaaggtt

SEQ ID NO: 98876 - DNA, 20 bp, Artificial Sequence
  MKO10098876_B_Mlst8
  gRNA
agcactcacggcactattga

SEQ ID NO: 98877 - DNA, 20 bp, Artificial Sequence
  MKO10098877_B_Mlst8
  gRNA
cgggaatcagctgctcattg

SEQ ID NO: 98878 - DNA, 20 bp, Artificial Sequence
  MKO10098878_B_Mlst8
  gRNA
ctgcagcagcaatcatgctt

SEQ ID NO: 98879 - DNA, 20 bp, Artificial Sequence
  MKO10098879_B_Mlxipl
  gRNA
catagctccgtaagtccagc

SEQ ID NO: 98880 - DNA, 20 bp, Artificial Sequence
  MKO10098880_B_Mlxipl
  gRNA
tgatgcgcgaataccacaag

SEQ ID NO: 98881 - DNA, 20 bp, Artificial Sequence
  MKO10098881_B_Mlxipl
  gRNA
gcaagctggtctctcccaag

SEQ ID NO: 98882 - DNA, 20 bp, Artificial Sequence
  MKO10098882_B_Mlxip
  gRNA
ttgatgtagatgaacaccgt

SEQ ID NO: 98883 - DNA, 20 bp, Artificial Sequence
  MKO10098883_B_Mlxip
  gRNA
ggttaaatacctctggccga

SEQ ID NO: 98884 - DNA, 20 bp, Artificial Sequence
  MKO10098884_B_Mlxip
  gRNA
tgattcgagagtaccacaag

SEQ ID NO: 98885 - DNA, 20 bp, Artificial Sequence
  MKO10098885_B_Mlx
  gRNA
gcgcctctccggaggaccct

SEQ ID NO: 98886 - DNA, 20 bp, Artificial Sequence
  MKO10098886_B_Mlx
  gRNA
acaaggagtcctacaaagac

SEQ ID NO: 98887 - DNA, 20 bp, Artificial Sequence
  MKO10098887_B_Mlx
  gRNA
aaatcctgctgctggcaggt

SEQ ID NO: 98888 - DNA, 20 bp, Artificial Sequence
  MKO10098888_B_Mlycd
  gRNA
ctgtgatgtggcgtatcaac

SEQ ID NO: 98889 - DNA, 20 bp, Artificial Sequence
  MKO10098889_B_Mlycd
  gRNA
agtgccaggtgacccgctcc

SEQ ID NO: 98890 - DNA, 20 bp, Artificial Sequence
  MKO10098890_B_Mlycd
  gRNA
gatcttctgaagtacctcac

SEQ ID NO: 98891 - DNA, 20 bp, Artificial Sequence
  MKO10098891_B_Mmaa
  gRNA
gagatatgaatgcctacatc

SEQ ID NO: 98892 - DNA, 20 bp, Artificial Sequence
  MKO10098892_B_Mmaa
  gRNA
ctcttgacagctcaatcatc

SEQ ID NO: 98893 - DNA, 20 bp, Artificial Sequence
  MKO10098893_B_Mmaa
  gRNA
atttccaggtgtagggcagt

SEQ ID NO: 98894 - DNA, 20 bp, Artificial Sequence
  MKO10098894_B_Mmab
  gRNA
gatgagctaagctcagctat

SEQ ID NO: 98895 - DNA, 20 bp, Artificial Sequence
  MKO10098895_B_Mmab
  gRNA
attacttaagtgagcctccc

SEQ ID NO: 98896 - DNA, 20 bp, Artificial Sequence
  MKO10098896_B_Mmab
  gRNA
ccccaagatttacaccaaga

SEQ ID NO: 98897 - DNA, 20 bp, Artificial Sequence
  MKO10098897_B_Mmachc
  gRNA
actatgaggtacaccccaat

SEQ ID NO: 98898 - DNA, 20 bp, Artificial Sequence
  MKO10098898_B_Mmachc
  gRNA
tgcttcagctctgcgactcg

SEQ ID NO: 98899 - DNA, 20 bp, Artificial Sequence
  MKO10098899_B_Mmachc
  gRNA
cttcgaagtttatcccttcc

SEQ ID NO: 98900 - DNA, 20 bp, Artificial Sequence
  MKO10098900_B_Mmadhc
  gRNA
agtttgctattagccacttc

SEQ ID NO: 98901 - DNA, 20 bp, Artificial Sequence
  MKO10098901_B_Mmadhc
  gRNA
gctctgtaacagagccagac

SEQ ID NO: 98902 - DNA, 20 bp, Artificial Sequence
  MKO10098902_B_Mmadhc
  gRNA
tgaagatcctgcagttgaaa

SEQ ID NO: 98903 - DNA, 20 bp, Artificial Sequence
  MKO10098903_B_Mmd2
  gRNA
ttgccgcctcctatgctcct

SEQ ID NO: 98904 - DNA, 20 bp, Artificial Sequence
  MKO10098904_B_Mmd2
  gRNA
gtttatgaatgaccgagtcc

SEQ ID NO: 98905 - DNA, 20 bp, Artificial Sequence
  MKO10098905_B_Mmd2
  gRNA
acttcctgtccgatgacgac

SEQ ID NO: 98906 - DNA, 20 bp, Artificial Sequence
  MKO10098906_B_Mmd
  gRNA
accaacgcatatgagatgcc

SEQ ID NO: 98907 - DNA, 20 bp, Artificial Sequence
  MKO10098907_B_Mmd
  gRNA
agactatgaagagggcgcaa

SEQ ID NO: 98908 - DNA, 20 bp, Artificial Sequence
  MKO10098908_B_Mmd
  gRNA
cgtagcacgttggtttgtag

SEQ ID NO: 98909 - DNA, 20 bp, Artificial Sequence
  MKO10098909_B_Mmel1
  gRNA
agtgtagcaggctagttaag

SEQ ID NO: 98910 - DNA, 20 bp, Artificial Sequence
  MKO10098910_B_Mmel1
  gRNA
ctactcactttggttcatgc

SEQ ID NO: 98911 - DNA, 20 bp, Artificial Sequence
  MKO10098911_B_Mmel1
  gRNA
tagtgtcttggccttctcca

SEQ ID NO: 98912 - DNA, 20 bp, Artificial Sequence
  MKO10098912_B_Mme
  gRNA
atttatacacgatctgtaca

SEQ ID NO: 98913 - DNA, 20 bp, Artificial Sequence
  MKO10098913_B_Mme
  gRNA
gacttcttcaagtatgcttg

SEQ ID NO: 98914 - DNA, 20 bp, Artificial Sequence
  MKO10098914_B_Mme
  gRNA
tcatcagactgcataaaatc

SEQ ID NO: 98915 - DNA, 20 bp, Artificial Sequence
  MKO10098915_B_Mmgt1
  gRNA
cttacgctgcgcagctgaaa

SEQ ID NO: 98916 - DNA, 20 bp, Artificial Sequence
  MKO10098916_B_Mmgt1
  gRNA
taacttcaacgatgtattag

SEQ ID NO: 98917 - DNA, 20 bp, Artificial Sequence
  MKO10098917_B_Mmgt1
  gRNA
gatatgaactatgccataac

SEQ ID NO: 98918 - DNA, 20 bp, Artificial Sequence
  MKO10098918_B_Mmgt2
  gRNA
catatcctttagttccgaag

SEQ ID NO: 98919 - DNA, 20 bp, Artificial Sequence
  MKO10098919_B_Mmgt2
  gRNA
ccttcggaaccatggtggcg

SEQ ID NO: 98920 - DNA, 20 bp, Artificial Sequence
  MKO10098920_B_Mmgt2
  gRNA
ctaccgactgttccagcgtc

SEQ ID NO: 98921 - DNA, 20 bp, Artificial Sequence
  MKO10098921_B_Mmp10
  gRNA
agcattacctccaactgcaa

SEQ ID NO: 98922 - DNA, 20 bp, Artificial Sequence
  MKO10098922_B_Mmp10
  gRNA
acttcgatgatgatgagaaa

SEQ ID NO: 98923 - DNA, 20 bp, Artificial Sequence
  MKO10098923_B_Mmp10
  gRNA
gaccttcaaagctttctcaa

SEQ ID NO: 98924 - DNA, 20 bp, Artificial Sequence
  MKO10098924_B_Mmp11
  gRNA
cacaccacatcgtagaggcc

SEQ ID NO: 98925 - DNA, 20 bp, Artificial Sequence
  MKO10098925_B_Mmp11
  gRNA
acatcatgatcgacttcgcc

SEQ ID NO: 98926 - DNA, 20 bp, Artificial Sequence
  MKO10098926_B_Mmp11
  gRNA
ctccagcagtgcaatctcat

SEQ ID NO: 98927 - DNA, 20 bp, Artificial Sequence
  MKO10098927_B_Mmp12
  gRNA
cgtaacattcagtccctcta

SEQ ID NO: 98928 - DNA, 20 bp, Artificial Sequence
  MKO10098928_B_Mmp12
  gRNA
tgaagcggtacctcacttac

SEQ ID NO: 98929 - DNA, 20 bp, Artificial Sequence
  MKO10098929_B_Mmp12
  gRNA
tgtgcatctccttgaatacc

SEQ ID NO: 98930 - DNA, 20 bp, Artificial Sequence
  MKO10098930_B_Mmp13
  gRNA
attccttgaacgtcatcatc

SEQ ID NO: 98931 - DNA, 20 bp, Artificial Sequence
  MKO10098931_B_Mmp13
  gRNA
cctaggtctggatcactcca

SEQ ID NO: 98932 - DNA, 20 bp, Artificial Sequence
  MKO10098932_B_Mmp13
  gRNA
acctttggaactgcttgtcc

SEQ ID NO: 98933 - DNA, 20 bp, Artificial Sequence
  MKO10098933_B_Mmp14
  gRNA
atagcgcttcctccgaacat

SEQ ID NO: 98934 - DNA, 20 bp, Artificial Sequence
  MKO10098934_B_Mmp14
  gRNA
ttcggaaggccttccgagta

SEQ ID NO: 98935 - DNA, 20 bp, Artificial Sequence
  MKO10098935_B_Mmp14
  gRNA
accacagcgagggcgcctca

SEQ ID NO: 98936 - DNA, 20 bp, Artificial Sequence
  MKO10098936_B_Mmp15
  gRNA
agggttcatctgcgtcgaaa

SEQ ID NO: 98937 - DNA, 20 bp, Artificial Sequence
  MKO10098937_B_Mmp15
  gRNA
agttgtcggtatccatccac

SEQ ID NO: 98938 - DNA, 20 bp, Artificial Sequence
  MKO10098938_B_Mmp15
  gRNA
gaagggtgccataatagcgc

SEQ ID NO: 98939 - DNA, 20 bp, Artificial Sequence
  MKO10098939_B_Mmp16
  gRNA
cgaattgctctccgggtctc

SEQ ID NO: 98940 - DNA, 20 bp, Artificial Sequence
  MKO10098940_B_Mmp16
  gRNA
gatagacttaccatcatgat

SEQ ID NO: 98941 - DNA, 20 bp, Artificial Sequence
  MKO10098941_B_Mmp16
  gRNA
gctgccatgcagcagttcta

SEQ ID NO: 98942 - DNA, 20 bp, Artificial Sequence
  MKO10098942_B_Mmp17
  gRNA
atagcgtagcgggtcaccca

SEQ ID NO: 98943 - DNA, 20 bp, Artificial Sequence
  MKO10098943_B_Mmp17
  gRNA
ggcccacgcacctccaagaa

SEQ ID NO: 98944 - DNA, 20 bp, Artificial Sequence
  MKO10098944_B_Mmp17
  gRNA
tctgccgcttccttctcgat

SEQ ID NO: 98945 - DNA, 20 bp, Artificial Sequence
  MKO10098945_B_Mmp19
  gRNA
gtagatacccatactgcaac

SEQ ID NO: 98946 - DNA, 20 bp, Artificial Sequence
  MKO10098946_B_Mmp19
  gRNA
tattggagcagtacaggctt

SEQ ID NO: 98947 - DNA, 20 bp, Artificial Sequence
  MKO10098947_B_Mmp19
  gRNA
atgcagggctgctcggactc

SEQ ID NO: 98948 - DNA, 20 bp, Artificial Sequence
  MKO10098948_B_Mmp1a
  gRNA
gtgtgagcaagcttatagtt

SEQ ID NO: 98949 - DNA, 20 bp, Artificial Sequence
  MKO10098949_B_Mmp1a
  gRNA
gcatcttccacaactgcttt

SEQ ID NO: 98950 - DNA, 20 bp, Artificial Sequence
  MKO10098950_B_Mmp1a
  gRNA
ttatttgggctgaaagtgac

SEQ ID NO: 98951 - DNA, 20 bp, Artificial Sequence
  MKO10098951_B_Mmp1b
  gRNA
ttactcacaacaatcctcgt

SEQ ID NO: 98952 - DNA, 20 bp, Artificial Sequence
  MKO10098952_B_Mmp1b
  gRNA
ggtgacctctacacatttga

SEQ ID NO: 98953 - DNA, 20 bp, Artificial Sequence
  MKO10098953_B_Mmp1b
  gRNA
ttatttgggctgaaagtaac

SEQ ID NO: 98954 - DNA, 20 bp, Artificial Sequence
  MKO10098954_B_Mmp20
  gRNA
ggggattcctacccatttga

SEQ ID NO: 98955 - DNA, 20 bp, Artificial Sequence
  MKO10098955_B_Mmp20
  gRNA
gtgatcaagaagcctcgctg

SEQ ID NO: 98956 - DNA, 20 bp, Artificial Sequence
  MKO10098956_B_Mmp20
  gRNA
gtccctcgaggcccatcaaa

SEQ ID NO: 98957 - DNA, 20 bp, Artificial Sequence
  MKO10098957_B_Mmp21
  gRNA
ccactcccgtcaaacacccg

SEQ ID NO: 98958 - DNA, 20 bp, Artificial Sequence
  MKO10098958_B_Mmp21
  gRNA
cctgggccggagacctaaag

SEQ ID NO: 98959 - DNA, 20 bp, Artificial Sequence
  MKO10098959_B_Mmp21
  gRNA
cgaacagactgccagccagt

SEQ ID NO: 98960 - DNA, 20 bp, Artificial Sequence
  MKO10098960_B_Mmp23
  gRNA
aacatcactccacattcgaa

SEQ ID NO: 98961 - DNA, 20 bp, Artificial Sequence
  MKO10098961_B_Mmp23
  gRNA
cacctcaatgccacattgcg

SEQ ID NO: 98962 - DNA, 20 bp, Artificial Sequence
  MKO10098962_B_Mmp23
  gRNA
tttcttccaactgtagcgtg

SEQ ID NO: 98963 - DNA, 20 bp, Artificial Sequence
  MKO10098963_B_Mmp24
  gRNA
aataagcgatatgccctaac

SEQ ID NO: 98964 - DNA, 20 bp, Artificial Sequence
  MKO10098964_B_Mmp24
  gRNA
gatcccagtcaccggtgtgt

SEQ ID NO: 98965 - DNA, 20 bp, Artificial Sequence
  MKO10098965_B_Mmp24
  gRNA
tgatcagggacgccacatcg

SEQ ID NO: 98966 - DNA, 20 bp, Artificial Sequence
  MKO10098966_B_Mmp25
  gRNA
gaagggccgcataatggagt

SEQ ID NO: 98967 - DNA, 20 bp, Artificial Sequence
  MKO10098967_B_Mmp25
  gRNA
cgacgtcgctattctctgag

SEQ ID NO: 98968 - DNA, 20 bp, Artificial Sequence
  MKO10098968_B_Mmp25
  gRNA
aggagggtccgaacaatctg

SEQ ID NO: 98969 - DNA, 20 bp, Artificial Sequence
  MKO10098969_B_Mmp27
  gRNA
gtgacttcttcgaggatcac

SEQ ID NO: 98970 - DNA, 20 bp, Artificial Sequence
  MKO10098970_B_Mmp27
  gRNA
tcactccactgacgtttacc

SEQ ID NO: 98971 - DNA, 20 bp, Artificial Sequence
  MKO10098971_B_Mmp27
  gRNA
aggatccagggagatgtaat

SEQ ID NO: 98972 - DNA, 20 bp, Artificial Sequence
  MKO10098972_B_Mmp28
  gRNA
cagatgacccgcccacgctg

SEQ ID NO: 98973 - DNA, 20 bp, Artificial Sequence
  MKO10098973_B_Mmp28
  gRNA
actcccggagctgcgccagg

SEQ ID NO: 98974 - DNA, 20 bp, Artificial Sequence
  MKO10098974_B_Mmp28
  gRNA
gcagctccgggagtccgtgc

SEQ ID NO: 98975 - DNA, 20 bp, Artificial Sequence
  MKO10098975_B_Mmp2
  gRNA
gccacatcttggcttccgca

SEQ ID NO: 98976 - DNA, 20 bp, Artificial Sequence
  MKO10098976_B_Mmp2
  gRNA
cattggttacacacctgacc

SEQ ID NO: 98977 - DNA, 20 bp, Artificial Sequence
  MKO10098977_B_Mmp2
  gRNA
ccgagcaaaagcatcatcca

SEQ ID NO: 98978 - DNA, 20 bp, Artificial Sequence
  MKO10098978_B_Mmp3
  gRNA
caagttcatgagcagcaacc

SEQ ID NO: 98979 - DNA, 20 bp, Artificial Sequence
  MKO10098979_B_Mmp3
  gRNA
aaatacctagaaaactacta

SEQ ID NO: 98980 - DNA, 20 bp, Artificial Sequence
  MKO10098980_B_Mmp3
  gRNA
atgcatcagctccatagtgt

SEQ ID NO: 98981 - DNA, 20 bp, Artificial Sequence
  MKO10098981_B_Mmp7
  gRNA
ctaggtcatgccttcgcacc

SEQ ID NO: 98982 - DNA, 20 bp, Artificial Sequence
  MKO10098982_B_Mmp7
  gRNA
tttgctgccacccatgaatt

SEQ ID NO: 98983 - DNA, 20 bp, Artificial Sequence
  MKO10098983_B_Mmp7
  gRNA
taatgccaaacagtccaaaa

SEQ ID NO: 98984 - DNA, 20 bp, Artificial Sequence
  MKO10098984_B_Mmp8
  gRNA
gagcatctcctccaatacct

SEQ ID NO: 98985 - DNA, 20 bp, Artificial Sequence
  MKO10098985_B_Mmp8
  gRNA
attccattgggtccatcaaa

SEQ ID NO: 98986 - DNA, 20 bp, Artificial Sequence
  MKO10098986_B_Mmp8
  gRNA
catgagcagccacgagaaat

SEQ ID NO: 98987 - DNA, 20 bp, Artificial Sequence
  MKO10098987_B_Mmp9
  gRNA
ccgcttcgggtccgtacacg

SEQ ID NO: 98988 - DNA, 20 bp, Artificial Sequence
  MKO10098988_B_Mmp9
  gRNA
cgccttcgcgcgcgccttcg

SEQ ID NO: 98989 - DNA, 20 bp, Artificial Sequence
  MKO10098989_B_Mmp9
  gRNA
caggcatacttgtaccgcta

SEQ ID NO: 98990 - DNA, 20 bp, Artificial Sequence
  MKO10098990_B_Mmrn1
  gRNA
ccagtgtccagtatcactgt

SEQ ID NO: 98991 - DNA, 20 bp, Artificial Sequence
  MKO10098991_B_Mmrn1
  gRNA
gctgtcgcttctgcagaaga

SEQ ID NO: 98992 - DNA, 20 bp, Artificial Sequence
  MKO10098992_B_Mmrn1
  gRNA
tgcagccatgattcaaaaac

SEQ ID NO: 98993 - DNA, 20 bp, Artificial Sequence
  MKO10098993_B_Mmrn2
  gRNA
ggcccagaagccagtgtacc

SEQ ID NO: 98994 - DNA, 20 bp, Artificial Sequence
  MKO10098994_B_Mmrn2
  gRNA
actagcctggacttctggta

SEQ ID NO: 98995 - DNA, 20 bp, Artificial Sequence
  MKO10098995_B_Mmrn2
  gRNA
ccaggagacttgggactcga

SEQ ID NO: 98996 - DNA, 20 bp, Artificial Sequence
  MKO10098996_B_Mms19
  gRNA
tcagccggttctcatagaac

SEQ ID NO: 98997 - DNA, 20 bp, Artificial Sequence
  MKO10098997_B_Mms19
  gRNA
ttgtaacactgtatagccac

SEQ ID NO: 98998 - DNA, 20 bp, Artificial Sequence
  MKO10098998_B_Mms19
  gRNA
tgtggtcccatctgtcttac

SEQ ID NO: 98999 - DNA, 20 bp, Artificial Sequence
  MKO10098999_B_Mms22l
  gRNA
gcgctgtttctgtaacccat

SEQ ID NO: 99000 - DNA, 20 bp, Artificial Sequence
  MKO10099000_B_Mms22l
  gRNA
taaatgaaagagctctctac

SEQ ID NO: 99001 - DNA, 20 bp, Artificial Sequence
  MKO10099001_B_Mms22l
  gRNA
ttgcctaatactgtctgctt

SEQ ID NO: 99002 - DNA, 20 bp, Artificial Sequence
  MKO10099002_B_Mn1
  gRNA
cacaaatgtcccaaatcggt

SEQ ID NO: 99003 - DNA, 20 bp, Artificial Sequence
  MKO10099003_B_Mn1
  gRNA
cagacgaactttgagcgcga

SEQ ID NO: 99004 - DNA, 20 bp, Artificial Sequence
  MKO10099004_B_Mn1
  gRNA
cttcgcgctcaaagttcgtc

SEQ ID NO: 99005 - DNA, 20 bp, Artificial Sequence
  MKO10099005_B_Mnat1
  gRNA
gttctccaaatccacattgt

SEQ ID NO: 99006 - DNA, 20 bp, Artificial Sequence
  MKO10099006_B_Mnat1
  gRNA
ttcaacctccttatcaacag

SEQ ID NO: 99007 - DNA, 20 bp, Artificial Sequence
  MKO10099007_B_Mnat1
  gRNA
tcattatactctcttaaact

SEQ ID NO: 99008 - DNA, 20 bp, Artificial Sequence
  MKO10099008_B_Mnd1
  gRNA
atgctttagtcaaagaaaag

SEQ ID NO: 99009 - DNA, 20 bp, Artificial Sequence
  MKO10099009_B_Mnd1
  gRNA
cttacttatgcctttctctt

SEQ ID NO: 99010 - DNA, 20 bp, Artificial Sequence
  MKO10099010_B_Mnd1
  gRNA
caaaaaatatctccatcatc

SEQ ID NO: 99011 - DNA, 20 bp, Artificial Sequence
  MKO10099011_B_Mndal
  gRNA
gtggaggcttaggagaattc

SEQ ID NO: 99012 - DNA, 20 bp, Artificial Sequence
  MKO10099012_B_Mndal
  gRNA
gctcagcttccagaaccttt

SEQ ID NO: 99013 - DNA, 20 bp, Artificial Sequence
  MKO10099013_B_Mndal
  gRNA
acccagcagttccttaaaca

SEQ ID NO: 99014 - DNA, 20 bp, Artificial Sequence
  MKO10099014_B_Mnda
  gRNA
agtaacaggagaaacatcac

SEQ ID NO: 99015 - DNA, 20 bp, Artificial Sequence
  MKO10099015_B_Mnda
  gRNA
ggaagtccccgcctgagctg

SEQ ID NO: 99016 - DNA, 20 bp, Artificial Sequence
  MKO10099016_B_Mnda
  gRNA
cagaaccagaacattcccag

SEQ ID NO: 99017 - DNA, 20 bp, Artificial Sequence
  MKO10099017_B_Mns1
  gRNA
tcatgatagacgaaattgtc

SEQ ID NO: 99018 - DNA, 20 bp, Artificial Sequence
  MKO10099018_B_Mns1
  gRNA
agagagacttgcaaacgaac

SEQ ID NO: 99019 - DNA, 20 bp, Artificial Sequence
  MKO10099019_B_Mns1
  gRNA
cgccatgaagtatgagcaga

SEQ ID NO: 99020 - DNA, 20 bp, Artificial Sequence
  MKO10099020_B_Mnt
  gRNA
ggagcaggagcgccttcgcc

SEQ ID NO: 99021 - DNA, 20 bp, Artificial Sequence
  MKO10099021_B_Mnt
  gRNA
gtggacgcctggtcgtcctc

SEQ ID NO: 99022 - DNA, 20 bp, Artificial Sequence
  MKO10099022_B_Mnt
  gRNA
cagtggtggagcctcgattc

SEQ ID NO: 99023 - DNA, 20 bp, Artificial Sequence
  MKO10099023_B_Mnx1
  gRNA
aggcaagcggccgtcgcctg

SEQ ID NO: 99024 - DNA, 20 bp, Artificial Sequence
  MKO10099024_B_Mnx1
  gRNA
caaaacgcttgggtcgagac

SEQ ID NO: 99025 - DNA, 20 bp, Artificial Sequence
  MKO10099025_B_Mnx1
  gRNA
gctgatggggcctccggttt

SEQ ID NO: 99026 - DNA, 20 bp, Artificial Sequence
  MKO10099026_B_Moap1
  gRNA
atattgtctcaagcgtcttc

SEQ ID NO: 99027 - DNA, 20 bp, Artificial Sequence
  MKO10099027_B_Moap1
  gRNA
cggttgatagagagccttag

SEQ ID NO: 99028 - DNA, 20 bp, Artificial Sequence
  MKO10099028_B_Moap1
  gRNA
tgaccctctcggcctagacc

SEQ ID NO: 99029 - DNA, 20 bp, Artificial Sequence
  MKO10099029_B_Mob1a
  gRNA
ctctcggaagtggcaatctg

SEQ ID NO: 99030 - DNA, 20 bp, Artificial Sequence
  MKO10099030_B_Mob1a
  gRNA
gttaacttaccaatcttaga

SEQ ID NO: 99031 - DNA, 20 bp, Artificial Sequence
  MKO10099031_B_Mob1a
  gRNA
ctattctgaagcgtctcttc

SEQ ID NO: 99032 - DNA, 20 bp, Artificial Sequence
  MKO10099032_B_Mob1b
  gRNA
agctgtccggtgatgtcagc

SEQ ID NO: 99033 - DNA, 20 bp, Artificial Sequence
  MKO10099033_B_Mob1b
  gRNA
ataatgtctcatcatccagc

SEQ ID NO: 99034 - DNA, 20 bp, Artificial Sequence
  MKO10099034_B_Mob1b
  gRNA
tttggtccagctgacatcac

SEQ ID NO: 99035 - DNA, 20 bp, Artificial Sequence
  MKO10099035_B_Mob2
  gRNA
ccagtggcaccactgttacc

SEQ ID NO: 99036 - DNA, 20 bp, Artificial Sequence
  MKO10099036_B_Mob2
  gRNA
gtccctacagacaatactac

SEQ ID NO: 99037 - DNA, 20 bp, Artificial Sequence
  MKO10099037_B_Mob2
  gRNA
ctgagattgtgctatactgc

SEQ ID NO: 99038 - DNA, 20 bp, Artificial Sequence
  MKO10099038_B_Mob3a
  gRNA
cgtgcgcctcagagcccatc

SEQ ID NO: 99039 - DNA, 20 bp, Artificial Sequence
  MKO10099039_B_Mob3a
  gRNA
tacagaaagagatgacatca

SEQ ID NO: 99040 - DNA, 20 bp, Artificial Sequence
  MKO10099040_B_Mob3a
  gRNA
gacatcttccccactaatgt

SEQ ID NO: 99041 - DNA, 20 bp, Artificial Sequence
  MKO10099041_B_Mob3b
  gRNA
ggagtgttagtgacacatcc

SEQ ID NO: 99042 - DNA, 20 bp, Artificial Sequence
  MKO10099042_B_Mob3b
  gRNA
ctgcgcccatcacaatgaca

SEQ ID NO: 99043 - DNA, 20 bp, Artificial Sequence
  MKO10099043_B_Mob3b
  gRNA
tccagaaagagatgacaacc

SEQ ID NO: 99044 - DNA, 20 bp, Artificial Sequence
  MKO10099044_B_Mob3c
  gRNA
gtagtaaaagtgcttatagc

SEQ ID NO: 99045 - DNA, 20 bp, Artificial Sequence
  MKO10099045_B_Mob3c
  gRNA
tacagagggagatgacagaa

SEQ ID NO: 99046 - DNA, 20 bp, Artificial Sequence
  MKO10099046_B_Mob3c
  gRNA
ccccggaagcgcttcgagcc

SEQ ID NO: 99047 - DNA, 20 bp, Artificial Sequence
  MKO10099047_B_Mob4
  gRNA
aaaattcttgaaccacctga

SEQ ID NO: 99048 - DNA, 20 bp, Artificial Sequence
  MKO10099048_B_Mob4
  gRNA
acttccatacaccttcatct

SEQ ID NO: 99049 - DNA, 20 bp, Artificial Sequence
  MKO10099049_B_Mob4
  gRNA
tgatgaatcatttgatgaaa

SEQ ID NO: 99050 - DNA, 20 bp, Artificial Sequence
  MKO10099050_B_Mobp
  gRNA
ccagccgcgtccccgcccag

SEQ ID NO: 99051 - DNA, 20 bp, Artificial Sequence
  MKO10099051_B_Mobp
  gRNA
cttctcggtcacttcttcct

SEQ ID NO: 99052 - DNA, 20 bp, Artificial Sequence
  MKO10099052_B_Mobp
  gRNA
tataaatcagattgaggagg

SEQ ID NO: 99053 - DNA, 20 bp, Artificial Sequence
  MKO10099053_B_Mocos
  gRNA
ggacctgctccacagtgtcg

SEQ ID NO: 99054 - DNA, 20 bp, Artificial Sequence
  MKO10099054_B_Mocos
  gRNA
gagcccaaagatcttataga

SEQ ID NO: 99055 - DNA, 20 bp, Artificial Sequence
  MKO10099055_B_Mocos
  gRNA
caaactcacccacgacactg

SEQ ID NO: 99056 - DNA, 20 bp, Artificial Sequence
  MKO10099056_B_Mocs1
  gRNA
gccgacaacatagttacctg

SEQ ID NO: 99057 - DNA, 20 bp, Artificial Sequence
  MKO10099057_B_Mocs1
  gRNA
gaatagtgcggcagctcctg

SEQ ID NO: 99058 - DNA, 20 bp, Artificial Sequence
  MKO10099058_B_Mocs1
  gRNA
cctcctcgggcatgcaatac

SEQ ID NO: 99059 - DNA, 20 bp, Artificial Sequence
  MKO10099059_B_Mocs2
  gRNA
gccatcatcccgccaatcag

SEQ ID NO: 99060 - DNA, 20 bp, Artificial Sequence
  MKO10099060_B_Mocs2
  gRNA
gcaaaaagtgctgaaatagc

SEQ ID NO: 99061 - DNA, 20 bp, Artificial Sequence
  MKO10099061_B_Mocs2
  gRNA
ttggtggtgtcccctctgtg

SEQ ID NO: 99062 - DNA, 20 bp, Artificial Sequence
  MKO10099062_B_Mocs3
  gRNA
tgcccgcacacgacgcagtc

SEQ ID NO: 99063 - DNA, 20 bp, Artificial Sequence
  MKO10099063_B_Mocs3
  gRNA
cggcctgactgcgtcgtgtg

SEQ ID NO: 99064 - DNA, 20 bp, Artificial Sequence
  MKO10099064_B_Mocs3
  gRNA
gcacgcacgcgtcgttcacc

SEQ ID NO: 99065 - DNA, 20 bp, Artificial Sequence
  MKO10099065_B_Mogat1
  gRNA
gtcttgtatagttcgtagcc

SEQ ID NO: 99066 - DNA, 20 bp, Artificial Sequence
  MKO10099066_B_Mogat1
  gRNA
ccaggcacgaatattccatg

SEQ ID NO: 99067 - DNA, 20 bp, Artificial Sequence
  MKO10099067_B_Mogat1
  gRNA
agtgtagatcagcttccgat

SEQ ID NO: 99068 - DNA, 20 bp, Artificial Sequence
  MKO10099068_B_Mogat2
  gRNA
ctctgcatcgtcatcttcgt

SEQ ID NO: 99069 - DNA, 20 bp, Artificial Sequence
  MKO10099069_B_Mogat2
  gRNA
caagttcccgccgcccttcc

SEQ ID NO: 99070 - DNA, 20 bp, Artificial Sequence
  MKO10099070_B_Mogat2
  gRNA
gccgcggcttgtcccagtcc

SEQ ID NO: 99071 - DNA, 20 bp, Artificial Sequence
  MKO10099071_B_Mogs
  gRNA
gcggacgtttctcactacat

SEQ ID NO: 99072 - DNA, 20 bp, Artificial Sequence
  MKO10099072_B_Mogs
  gRNA
gtggatatgctgccgaccga

SEQ ID NO: 99073 - DNA, 20 bp, Artificial Sequence
  MKO10099073_B_Mogs
  gRNA
gaggtcctactaccagagat

SEQ ID NO: 99074 - DNA, 20 bp, Artificial Sequence
  MKO10099074_B_Mog
  gRNA
tgtgcctacgatcctcctgc

SEQ ID NO: 99075 - DNA, 20 bp, Artificial Sequence
  MKO10099075_B_Mog
  gRNA
tacctctcagtctgtgctgc

SEQ ID NO: 99076 - DNA, 20 bp, Artificial Sequence
  MKO10099076_B_Mog
  gRNA
ggaaaacttcgtgcagaagt

SEQ ID NO: 99077 - DNA, 20 bp, Artificial Sequence
  MKO10099077_B_Mon1a
  gRNA
cccgggccacaccggtcagc

SEQ ID NO: 99078 - DNA, 20 bp, Artificial Sequence
  MKO10099078_B_Mon1a
  gRNA
ccagcgcatcagcttatgga

SEQ ID NO: 99079 - DNA, 20 bp, Artificial Sequence
  MKO10099079_B_Mon1a
  gRNA
ccaatgagaacctcctagcc

SEQ ID NO: 99080 - DNA, 20 bp, Artificial Sequence
  MKO10099080_B_Mon1b
  gRNA
gcacgaacacgtgcttccgc

SEQ ID NO: 99081 - DNA, 20 bp, Artificial Sequence
  MKO10099081_B_Mon1b
  gRNA
ctgttgcagtcccgagctag

SEQ ID NO: 99082 - DNA, 20 bp, Artificial Sequence
  MKO10099082_B_Mon1b
  gRNA
tagtgacgaagctcttgcgc

SEQ ID NO: 99083 - DNA, 20 bp, Artificial Sequence
  MKO10099083_B_Mon2
  gRNA
tcatgacgaggcactttcca

SEQ ID NO: 99084 - DNA, 20 bp, Artificial Sequence
  MKO10099084_B_Mon2
  gRNA
tcgtgcagcctttcctaatg

SEQ ID NO: 99085 - DNA, 20 bp, Artificial Sequence
  MKO10099085_B_Mon2
  gRNA
gttcctacaggctgctgaat

SEQ ID NO: 99086 - DNA, 20 bp, Artificial Sequence
  MKO10099086_B_Morc1
  gRNA
actcagccagtgctccaaag

SEQ ID NO: 99087 - DNA, 20 bp, Artificial Sequence
  MKO10099087_B_Morc1
  gRNA
ctgagttgctggacaacgca

SEQ ID NO: 99088 - DNA, 20 bp, Artificial Sequence
  MKO10099088_B_Morc1
  gRNA
gatggatgtggcatgagccc

SEQ ID NO: 99089 - DNA, 20 bp, Artificial Sequence
  MKO10099089_B_Morc2a
  gRNA
gctgctagtgtgatccagtt

SEQ ID NO: 99090 - DNA, 20 bp, Artificial Sequence
  MKO10099090_B_Morc2a
  gRNA
ctgaactggttgataatgca

SEQ ID NO: 99091 - DNA, 20 bp, Artificial Sequence
  MKO10099091_B_Morc2a
  gRNA
accagcataaatgtctattc

SEQ ID NO: 99092 - DNA, 20 bp, Artificial Sequence
  MKO10099092_B_Morc2b
  gRNA
cttaaaacggtgtgacgtga

SEQ ID NO: 99093 - DNA, 20 bp, Artificial Sequence
  MKO10099093_B_Morc2b
  gRNA
ccgccaccttctgcgggcaa

SEQ ID NO: 99094 - DNA, 20 bp, Artificial Sequence
  MKO10099094_B_Morc2b
  gRNA
atttgaggttacgtctagtt

SEQ ID NO: 99095 - DNA, 20 bp, Artificial Sequence
  MKO10099095_B_Morc3
  gRNA
caatgctatcatgggtaaga

SEQ ID NO: 99096 - DNA, 20 bp, Artificial Sequence
  MKO10099096_B_Morc3
  gRNA
ttctacggaacagaaattac

SEQ ID NO: 99097 - DNA, 20 bp, Artificial Sequence
  MKO10099097_B_Morc3
  gRNA
atctgtttagcattcacatc

SEQ ID NO: 99098 - DNA, 20 bp, Artificial Sequence
  MKO10099098_B_Morc4
  gRNA
cagtccgcctcccggcgttc

SEQ ID NO: 99099 - DNA, 20 bp, Artificial Sequence
  MKO10099099_B_Morc4
  gRNA
accattaccaaagaccccga

SEQ ID NO: 99100 - DNA, 20 bp, Artificial Sequence
  MKO10099100_B_Morc4
  gRNA
ctcacctagcagctccgcga

SEQ ID NO: 99101 - DNA, 20 bp, Artificial Sequence
  MKO10099101_B_Morf4l1
  gRNA
cttataaatggcgcccaagc

SEQ ID NO: 99102 - DNA, 20 bp, Artificial Sequence
  MKO10099102_B_Morf4l1
  gRNA
gtgtgtaaaggttgccataa

SEQ ID NO: 99103 - DNA, 20 bp, Artificial Sequence
  MKO10099103_B_Morf4l1
  gRNA
aaatacttcatccattacag

SEQ ID NO: 99104 - DNA, 20 bp, Artificial Sequence
  MKO10099104_B_Morf4l2
  gRNA
tctgctgagaaccccccttc

SEQ ID NO: 99105 - DNA, 20 bp, Artificial Sequence
  MKO10099105_B_Morf4l2
  gRNA
gcgccgatgtcgcagatcta

SEQ ID NO: 99106 - DNA, 20 bp, Artificial Sequence
  MKO10099106_B_Morf4l2
  gRNA
tttctcatcaaggggcgtat

SEQ ID NO: 99107 - DNA, 20 bp, Artificial Sequence
  MKO10099107_B_Morn1
  gRNA
tcaggacgggcaggtatacc

SEQ ID NO: 99108 - DNA, 20 bp, Artificial Sequence
  MKO10099108_B_Morn1
  gRNA
aattctttcttccgctatga

SEQ ID NO: 99109 - DNA, 20 bp, Artificial Sequence
  MKO10099109_B_Morn1
  gRNA
ctggggaaggctgccagcac

SEQ ID NO: 99110 - DNA, 20 bp, Artificial Sequence
  MKO10099110_B_Morn2
  gRNA
acatgtagagctttagtttc

SEQ ID NO: 99111 - DNA, 20 bp, Artificial Sequence
  MKO10099111_B_Morn2
  gRNA
cacaatcagatgaatggctt

SEQ ID NO: 99112 - DNA, 20 bp, Artificial Sequence
  MKO10099112_B_Morn2
  gRNA
tttaaggacaacatgtttca

SEQ ID NO: 99113 - DNA, 20 bp, Artificial Sequence
  MKO10099113_B_Morn3
  gRNA
ctcaccctcgtaatactcct

SEQ ID NO: 99114 - DNA, 20 bp, Artificial Sequence
  MKO10099114_B_Morn3
  gRNA
ggataagctgatgaagcccg

SEQ ID NO: 99115 - DNA, 20 bp, Artificial Sequence
  MKO10099115_B_Morn3
  gRNA
aagagtggtgcggtctatga

SEQ ID NO: 99116 - DNA, 20 bp, Artificial Sequence
  MKO10099116_B_Morn4
  gRNA
ctccccgctggagtaggtaa

SEQ ID NO: 99117 - DNA, 20 bp, Artificial Sequence
  MKO10099117_B_Morn4
  gRNA
tacctgggtcacttcgagaa

SEQ ID NO: 99118 - DNA, 20 bp, Artificial Sequence
  MKO10099118_B_Morn4
  gRNA
gcccattctcgaagtgaccc

SEQ ID NO: 99119 - DNA, 20 bp, Artificial Sequence
  MKO10099119_B_Morn5
  gRNA
gcttctataaccccacgacc

SEQ ID NO: 99120 - DNA, 20 bp, Artificial Sequence
  MKO10099120_B_Morn5
  gRNA
ttctacaccgagatctgcta

SEQ ID NO: 99121 - DNA, 20 bp, Artificial Sequence
  MKO10099121_B_Morn5
  gRNA
cagatgatgacgaacatgag

SEQ ID NO: 99122 - DNA, 20 bp, Artificial Sequence
  MKO10099122_B_Mospd1
  gRNA
cctttcaggtcttatcacaa

SEQ ID NO: 99123 - DNA, 20 bp, Artificial Sequence
  MKO10099123_B_Mospd1
  gRNA
ccgcaatacataccacaccc

SEQ ID NO: 99124 - DNA, 20 bp, Artificial Sequence
  MKO10099124_B_Mospd1
  gRNA
agtgaagccacagtgctgtg

SEQ ID NO: 99125 - DNA, 20 bp, Artificial Sequence
  MKO10099125_B_Mospd2
  gRNA
atgattcacgtgatgttgaa

SEQ ID NO: 99126 - DNA, 20 bp, Artificial Sequence
  MKO10099126_B_Mospd2
  gRNA
ccaagttctaataaccatct

SEQ ID NO: 99127 - DNA, 20 bp, Artificial Sequence
  MKO10099127_B_Mospd2
  gRNA
gagcttcttcttgtccatta

SEQ ID NO: 99128 - DNA, 20 bp, Artificial Sequence
  MKO10099128_B_Mospd3
  gRNA
atctgtcctggacgtcatag

SEQ ID NO: 99129 - DNA, 20 bp, Artificial Sequence
  MKO10099129_B_Mospd3
  gRNA
actgtgctcacctaagacgt

SEQ ID NO: 99130 - DNA, 20 bp, Artificial Sequence
  MKO10099130_B_Mospd3
  gRNA
agctgagagttcaggtccgg

SEQ ID NO: 99131 - DNA, 20 bp, Artificial Sequence
  MKO10099131_B_Mos
  gRNA
ctacaatctgcgcccctcac

SEQ ID NO: 99132 - DNA, 20 bp, Artificial Sequence
  MKO10099132_B_Mos
  gRNA
gccggagtaaggcacctccc

SEQ ID NO: 99133 - DNA, 20 bp, Artificial Sequence
  MKO10099133_B_Mos
  gRNA
ggccagccggcgtggcagtc

SEQ ID NO: 99134 - DNA, 20 bp, Artificial Sequence
  MKO10099134_B_Mov10l1
  gRNA
actccttgaagctgccggaa

SEQ ID NO: 99135 - DNA, 20 bp, Artificial Sequence
  MKO10099135_B_Mov10l1
  gRNA
tccacacgcttgtacctcag

SEQ ID NO: 99136 - DNA, 20 bp, Artificial Sequence
  MKO10099136_B_Mov10l1
  gRNA
tttcagtaagagtgctccat

SEQ ID NO: 99137 - DNA, 20 bp, Artificial Sequence
  MKO10099137_B_Mov10
  gRNA
agttcagctgccgaaagctc

SEQ ID NO: 99138 - DNA, 20 bp, Artificial Sequence
  MKO10099138_B_Mov10
  gRNA
acctggagacagatcgtgag

SEQ ID NO: 99139 - DNA, 20 bp, Artificial Sequence
  MKO10099139_B_Mov10
  gRNA
tttctacattgcccgattcc

SEQ ID NO: 99140 - DNA, 20 bp, Artificial Sequence
  MKO10099140_B_Moxd1
  gRNA
acacagtgatcgagtttagc

SEQ ID NO: 99141 - DNA, 20 bp, Artificial Sequence
  MKO10099141_B_Moxd1
  gRNA
gtggagccaataatagagag

SEQ ID NO: 99142 - DNA, 20 bp, Artificial Sequence
  MKO10099142_B_Moxd1
  gRNA
atagcaccgtgagagttatc

SEQ ID NO: 99143 - DNA, 20 bp, Artificial Sequence
  MKO10099143_B_Moxd2
  gRNA
catccgggccataggcagcc

SEQ ID NO: 99144 - DNA, 20 bp, Artificial Sequence
  MKO10099144_B_Moxd2
  gRNA
gtatgctcccgactcatctt

SEQ ID NO: 99145 - DNA, 20 bp, Artificial Sequence
  MKO10099145_B_Moxd2
  gRNA
tccacatgatcgtgacatta

SEQ ID NO: 99146 - DNA, 20 bp, Artificial Sequence
  MKO10099146_B_Mpc1
  gRNA
gagctacttcgtttgttaca

SEQ ID NO: 99147 - DNA, 20 bp, Artificial Sequence
  MKO10099147_B_Mpc1
  gRNA
attcatgagatttgcctaca

SEQ ID NO: 99148 - DNA, 20 bp, Artificial Sequence
  MKO10099148_B_Mpc1
  gRNA
tccttgtaccgctatgcaga

SEQ ID NO: 99149 - DNA, 20 bp, Artificial Sequence
  MKO10099149_B_Mpc2
  gRNA
agctcagtccactgtgttga

SEQ ID NO: 99150 - DNA, 20 bp, Artificial Sequence
  MKO10099150_B_Mpc2
  gRNA
tccctttagatttgagttct

SEQ ID NO: 99151 - DNA, 20 bp, Artificial Sequence
  MKO10099151_B_Mpc2
  gRNA
ttgcagggattggtgtgtgc

SEQ ID NO: 99152 - DNA, 20 bp, Artificial Sequence
  MKO10099152_B_Mpdu1
  gRNA
ctagctccagcattactgac

SEQ ID NO: 99153 - DNA, 20 bp, Artificial Sequence
  MKO10099153_B_Mpdu1
  gRNA
ctcgggctgggcatcgtggc

SEQ ID NO: 99154 - DNA, 20 bp, Artificial Sequence
  MKO10099154_B_Mpdu1
  gRNA
tggcaacggtctggagtgtc

SEQ ID NO: 99155 - DNA, 20 bp, Artificial Sequence
  MKO10099155_B_Mpdz
  gRNA
gcccaacaacactaaagccg

SEQ ID NO: 99156 - DNA, 20 bp, Artificial Sequence
  MKO10099156_B_Mpdz
  gRNA
gagctccttaaacctccgtg

SEQ ID NO: 99157 - DNA, 20 bp, Artificial Sequence
  MKO10099157_B_Mpdz
  gRNA
ggcttcccatccatgacagc

SEQ ID NO: 99158 - DNA, 20 bp, Artificial Sequence
  MKO10099158_B_Mpeg1
  gRNA
aacaccgtgaccgcttctgc

SEQ ID NO: 99159 - DNA, 20 bp, Artificial Sequence
  MKO10099159_B_Mpeg1
  gRNA
ggccaagtacctgacaactc

SEQ ID NO: 99160 - DNA, 20 bp, Artificial Sequence
  MKO10099160_B_Mpeg1
  gRNA
gagaacctctggagcttcgt

SEQ ID NO: 99161 - DNA, 20 bp, Artificial Sequence
  MKO10099161_B_Mpg
  gRNA
cggcgggctcgtccaagaaa

SEQ ID NO: 99162 - DNA, 20 bp, Artificial Sequence
  MKO10099162_B_Mpg
  gRNA
ggagttacgaagctgccgca

SEQ ID NO: 99163 - DNA, 20 bp, Artificial Sequence
  MKO10099163_B_Mpg
  gRNA
ttacagctttcccgaaagat

SEQ ID NO: 99164 - DNA, 20 bp, Artificial Sequence
  MKO10099164_B_Mphosph10
  gRNA
tgatccagttgaaagtgacg

SEQ ID NO: 99165 - DNA, 20 bp, Artificial Sequence
  MKO10099165_B_Mphosph10
  gRNA
tccactttgaccatgcagtc

SEQ ID NO: 99166 - DNA, 20 bp, Artificial Sequence
  MKO10099166_B_Mphosph10
  gRNA
ccatacccatcctgactgca

SEQ ID NO: 99167 - DNA, 20 bp, Artificial Sequence
  MKO10099167_B_Mphosph6
  gRNA
tcttaacagttcatgcaaag

SEQ ID NO: 99168 - DNA, 20 bp, Artificial Sequence
  MKO10099168_B_Mphosph6
  gRNA
tcctaacagatatgagactt

SEQ ID NO: 99169 - DNA, 20 bp, Artificial Sequence
  MKO10099169_B_Mphosph6
  gRNA
cgatgtgtctgatgaggaaa

SEQ ID NO: 99170 - DNA, 20 bp, Artificial Sequence
  MKO10099170_B_Mphosph8
  gRNA
tgccaaacagatgagacgtc

SEQ ID NO: 99171 - DNA, 20 bp, Artificial Sequence
  MKO10099171_B_Mphosph8
  gRNA
agaatctttataaagttcga

SEQ ID NO: 99172 - DNA, 20 bp, Artificial Sequence
  MKO10099172_B_Mphosph8
  gRNA
ataccagaaaaggtatgatt

SEQ ID NO: 99173 - DNA, 20 bp, Artificial Sequence
  MKO10099173_B_Mphosph9
  gRNA
gtggtaagtctgtaacatcc

SEQ ID NO: 99174 - DNA, 20 bp, Artificial Sequence
  MKO10099174_B_Mphosph9
  gRNA
gacgtgcagcatcggcagca

SEQ ID NO: 99175 - DNA, 20 bp, Artificial Sequence
  MKO10099175_B_Mphosph9
  gRNA
ttgttctcagcgaatacagg

SEQ ID NO: 99176 - DNA, 20 bp, Artificial Sequence
  MKO10099176_B_Mpi
  gRNA
ggtggagcagcttaacctgt

SEQ ID NO: 99177 - DNA, 20 bp, Artificial Sequence
  MKO10099177_B_Mpi
  gRNA
cccaaccttactcttcataa

SEQ ID NO: 99178 - DNA, 20 bp, Artificial Sequence
  MKO10099178_B_Mpi
  gRNA
tatccaggcacaccctaaca

SEQ ID NO: 99179 - DNA, 20 bp, Artificial Sequence
  MKO10099179_B_Mplkip
  gRNA
aaaaagaatgtctaatgagt

SEQ ID NO: 99180 - DNA, 20 bp, Artificial Sequence
  MKO10099180_B_Mplkip
  gRNA
aacttctcgggggcccgctt

SEQ ID NO: 99181 - DNA, 20 bp, Artificial Sequence
  MKO10099181_B_Mplkip
  gRNA
tgctcccgtacggcctagcc

SEQ ID NO: 99182 - DNA, 20 bp, Artificial Sequence
  MKO10099182_B_Mpl
  gRNA
tatccacaaacagcacccgc

SEQ ID NO: 99183 - DNA, 20 bp, Artificial Sequence
  MKO10099183_B_Mpl
  gRNA
agaagaggcgcacttcatcc

SEQ ID NO: 99184 - DNA, 20 bp, Artificial Sequence
  MKO10099184_B_Mpl
  gRNA
ctcggtaggcatacagcagc

SEQ ID NO: 99185 - DNA, 20 bp, Artificial Sequence
  MKO10099185_B_Mpnd
  gRNA
acctcatcggccgtagctac

SEQ ID NO: 99186 - DNA, 20 bp, Artificial Sequence
  MKO10099186_B_Mpnd
  gRNA
accttgtccatacgcttccc

SEQ ID NO: 99187 - DNA, 20 bp, Artificial Sequence
  MKO10099187_B_Mpnd
  gRNA
taactgacctggcggagtct

SEQ ID NO: 99188 - DNA, 20 bp, Artificial Sequence
  MKO10099188_B_Mpo
  gRNA
atcaagcggagcctccaaag

SEQ ID NO: 99189 - DNA, 20 bp, Artificial Sequence
  MKO10099189_B_Mpo
  gRNA
atgccctttggctggacgcc

SEQ ID NO: 99190 - DNA, 20 bp, Artificial Sequence
  MKO10099190_B_Mpo
  gRNA
agagtacctgtaacattgaa

SEQ ID NO: 99191 - DNA, 20 bp, Artificial Sequence
  MKO10099191_B_Mpp1
  gRNA
ccagtcaaatgttactactg

SEQ ID NO: 99192 - DNA, 20 bp, Artificial Sequence
  MKO10099192_B_Mpp1
  gRNA
accaatgggtcccctgctcc

SEQ ID NO: 99193 - DNA, 20 bp, Artificial Sequence
  MKO10099193_B_Mpp1
  gRNA
ctcagtagatcagttgcaga

SEQ ID NO: 99194 - DNA, 20 bp, Artificial Sequence
  MKO10099194_B_Mpp2
  gRNA
tcagggtgtgacattccgag

SEQ ID NO: 99195 - DNA, 20 bp, Artificial Sequence
  MKO10099195_B_Mpp2
  gRNA
gcccggggatcgctgcccac

SEQ ID NO: 99196 - DNA, 20 bp, Artificial Sequence
  MKO10099196_B_Mpp2
  gRNA
aagtccgatagtcagatccc

SEQ ID NO: 99197 - DNA, 20 bp, Artificial Sequence
  MKO10099197_B_Mpp3
  gRNA
gactctgcctctcataatag

SEQ ID NO: 99198 - DNA, 20 bp, Artificial Sequence
  MKO10099198_B_Mpp3
  gRNA
ggcgtgactaccctgaggtg

SEQ ID NO: 99199 - DNA, 20 bp, Artificial Sequence
  MKO10099199_B_Mpp3
  gRNA
gagcctcagttatttaatga

SEQ ID NO: 99200 - DNA, 20 bp, Artificial Sequence
  MKO10099200_B_Mpp4
  gRNA
acgccacctgatcctgagaa

SEQ ID NO: 99201 - DNA, 20 bp, Artificial Sequence
  MKO10099201_B_Mpp4
  gRNA
ttctacagccgagatgtgaa

SEQ ID NO: 99202 - DNA, 20 bp, Artificial Sequence
  MKO10099202_B_Mpp4
  gRNA
atctgtgcatgagttgtatc

SEQ ID NO: 99203 - DNA, 20 bp, Artificial Sequence
  MKO10099203_B_Mpp5
  gRNA
ttacagtttctcccccgtaa

SEQ ID NO: 99204 - DNA, 20 bp, Artificial Sequence
  MKO10099204_B_Mpp5
  gRNA
tgtacaagaccttgtacaag

SEQ ID NO: 99205 - DNA, 20 bp, Artificial Sequence
  MKO10099205_B_Mpp5
  gRNA
cctgctcagcaaccttatca

SEQ ID NO: 99206 - DNA, 20 bp, Artificial Sequence
  MKO10099206_B_Mpp6
  gRNA
ttagcaagtgacttcacaat

SEQ ID NO: 99207 - DNA, 20 bp, Artificial Sequence
  MKO10099207_B_Mpp6
  gRNA
agctgtgagtgacaataact

SEQ ID NO: 99208 - DNA, 20 bp, Artificial Sequence
  MKO10099208_B_Mpp6
  gRNA
ctccttacagtcgctcctgg

SEQ ID NO: 99209 - DNA, 20 bp, Artificial Sequence
  MKO10099209_B_Mpp7
  gRNA
aatccgttgcccattctcca

SEQ ID NO: 99210 - DNA, 20 bp, Artificial Sequence
  MKO10099210_B_Mpp7
  gRNA
gctgtcaaaacccaatgtca

SEQ ID NO: 99211 - DNA, 20 bp, Artificial Sequence
  MKO10099211_B_Mpp7
  gRNA
cagccaacgctgctgcacca

SEQ ID NO: 99212 - DNA, 20 bp, Artificial Sequence
  MKO10099212_B_Mppe1
  gRNA
catggtcaacagcgttgcaa

SEQ ID NO: 99213 - DNA, 20 bp, Artificial Sequence
  MKO10099213_B_Mppe1
  gRNA
taaactgaattgctcccaag

SEQ ID NO: 99214 - DNA, 20 bp, Artificial Sequence
  MKO10099214_B_Mppe1
  gRNA
aagcgatttgagaaagtgtt

SEQ ID NO: 99215 - DNA, 20 bp, Artificial Sequence
  MKO10099215_B_Mpped1
  gRNA
cgatgtgctgatccacgctg

SEQ ID NO: 99216 - DNA, 20 bp, Artificial Sequence
  MKO10099216_B_Mpped1
  gRNA
cagccacggctgcacgtctt

SEQ ID NO: 99217 - DNA, 20 bp, Artificial Sequence
  MKO10099217_B_Mpped1
  gRNA
tggggattcaacctcccgag

SEQ ID NO: 99218 - DNA, 20 bp, Artificial Sequence
  MKO10099218_B_Mpped2
  gRNA
tggggctttaacctacccag

SEQ ID NO: 99219 - DNA, 20 bp, Artificial Sequence
  MKO10099219_B_Mpped2
  gRNA
atgagtatgtcgatgccctc

SEQ ID NO: 99220 - DNA, 20 bp, Artificial Sequence
  MKO10099220_B_Mpped2
  gRNA
catggcagacctcgttaaac

SEQ ID NO: 99221 - DNA, 20 bp, Artificial Sequence
  MKO10099221_B_Mprip
  gRNA
ttctaggcaaaacccattta

SEQ ID NO: 99222 - DNA, 20 bp, Artificial Sequence
  MKO10099222_B_Mprip
  gRNA
gcagcccaccaccctccctc

SEQ ID NO: 99223 - DNA, 20 bp, Artificial Sequence
  MKO10099223_B_Mprip
  gRNA
ttacccactgatgatctcct

SEQ ID NO: 99224 - DNA, 20 bp, Artificial Sequence
  MKO10099224_B_Mpst
  gRNA
ccccgtgcaggcatcgaacc

SEQ ID NO: 99225 - DNA, 20 bp, Artificial Sequence
  MKO10099225_B_Mpst
  gRNA
gcccaagctgcccgcgtagt

SEQ ID NO: 99226 - DNA, 20 bp, Artificial Sequence
  MKO10099226_B_Mpst
  gRNA
cgatgcacgacgcgagtttg

SEQ ID NO: 99227 - DNA, 20 bp, Artificial Sequence
  MKO10099227_B_Mptx1
  gRNA
cacaatggagaagcttattg

SEQ ID NO: 99228 - DNA, 20 bp, Artificial Sequence
  MKO10099228_B_Mptx1
  gRNA
acaagagcaggattcctatg

SEQ ID NO: 99229 - DNA, 20 bp, Artificial Sequence
  MKO10099229_B_Mptx1
  gRNA
ggtgatgcaatgatcactct

SEQ ID NO: 99230 - DNA, 20 bp, Artificial Sequence
  MKO10099230_B_Mptx2
  gRNA
ctgaaagaacagagagaaac

SEQ ID NO: 99231 - DNA, 20 bp, Artificial Sequence
  MKO10099231_B_Mptx2
  gRNA
ctatgtggtccccataaaag

SEQ ID NO: 99232 - DNA, 20 bp, Artificial Sequence
  MKO10099232_B_Mptx2
  gRNA
aagctcttattcatgaagac

SEQ ID NO: 99233 - DNA, 20 bp, Artificial Sequence
  MKO10099233_B_Mpv17l2
  gRNA
cagtgtcagcccattgatat

SEQ ID NO: 99234 - DNA, 20 bp, Artificial Sequence
  MKO10099234_B_Mpv17l2
  gRNA
ccctgaaccccttcagactc

SEQ ID NO: 99235 - DNA, 20 bp, Artificial Sequence
  MKO10099235_B_Mpv17l2
  gRNA
caaattctgggacttctaca

SEQ ID NO: 99236 - DNA, 20 bp, Artificial Sequence
  MKO10099236_B_Mpv17l
  gRNA
ccatattcatcttccttcgc

SEQ ID NO: 99237 - DNA, 20 bp, Artificial Sequence
  MKO10099237_B_Mpv17l
  gRNA
tccagagtggtctcatgtac

SEQ ID NO: 99238 - DNA, 20 bp, Artificial Sequence
  MKO10099238_B_Mpv17l
  gRNA
ctggcacttacctgcacaaa

SEQ ID NO: 99239 - DNA, 20 bp, Artificial Sequence
  MKO10099239_B_Mpv17
  gRNA
tccactcacccgcttcagtt

SEQ ID NO: 99240 - DNA, 20 bp, Artificial Sequence
  MKO10099240_B_Mpv17
  gRNA
cactctgaccatggtatccc

SEQ ID NO: 99241 - DNA, 20 bp, Artificial Sequence
  MKO10099241_B_Mpv17
  gRNA
gaagaagatgttgttagatc

SEQ ID NO: 99242 - DNA, 20 bp, Artificial Sequence
  MKO10099242_B_Mpzl1
  gRNA
ctcacacagcccgagcatcg

SEQ ID NO: 99243 - DNA, 20 bp, Artificial Sequence
  MKO10099243_B_Mpzl1
  gRNA
cattcgaagcgggattatac

SEQ ID NO: 99244 - DNA, 20 bp, Artificial Sequence
  MKO10099244_B_Mpzl1
  gRNA
gtcaaccatccagttgtgtt

SEQ ID NO: 99245 - DNA, 20 bp, Artificial Sequence
  MKO10099245_B_Mpzl2
  gRNA
gatgatcatcgtagtgatcg

SEQ ID NO: 99246 - DNA, 20 bp, Artificial Sequence
  MKO10099246_B_Mpzl2
  gRNA
ggacagtgctgataaagccg

SEQ ID NO: 99247 - DNA, 20 bp, Artificial Sequence
  MKO10099247_B_Mpzl2
  gRNA
aagctgcagtttgacgacaa

SEQ ID NO: 99248 - DNA, 20 bp, Artificial Sequence
  MKO10099248_B_Mpzl3
  gRNA
tgcgcgtatcgtcctctcct

SEQ ID NO: 99249 - DNA, 20 bp, Artificial Sequence
  MKO10099249_B_Mpzl3
  gRNA
tgtccgctgtgcagagtgtc

SEQ ID NO: 99250 - DNA, 20 bp, Artificial Sequence
  MKO10099250_B_Mpzl3
  gRNA
acagcaatgactgcatgacg

SEQ ID NO: 99251 - DNA, 20 bp, Artificial Sequence
  MKO10099251_B_Mpz
  gRNA
ccattgtggtttacacggac

SEQ ID NO: 99252 - DNA, 20 bp, Artificial Sequence
  MKO10099252_B_Mpz
  gRNA
caacaccaccccatacctag

SEQ ID NO: 99253 - DNA, 20 bp, Artificial Sequence
  MKO10099253_B_Mpz
  gRNA
gagatttcacaaatcttcga

SEQ ID NO: 99254 - DNA, 20 bp, Artificial Sequence
  MKO10099254_B_Mr1
  gRNA
gacgaaaatatctcagcgag

SEQ ID NO: 99255 - DNA, 20 bp, Artificial Sequence
  MKO10099255_B_Mr1
  gRNA
cttcgagtgagcacgatctc

SEQ ID NO: 99256 - DNA, 20 bp, Artificial Sequence
  MKO10099256_B_Mr1
  gRNA
aactgacagccacgtttgat

SEQ ID NO: 99257 - DNA, 20 bp, Artificial Sequence
  MKO10099257_B_Mrap2
  gRNA
ctcatagtactcgtattccc

SEQ ID NO: 99258 - DNA, 20 bp, Artificial Sequence
  MKO10099258_B_Mrap2
  gRNA
catcgaactctgactacacc

SEQ ID NO: 99259 - DNA, 20 bp, Artificial Sequence
  MKO10099259_B_Mrap2
  gRNA
cccagacttactcttggtgt

SEQ ID NO: 99260 - DNA, 20 bp, Artificial Sequence
  MKO10099260_B_Mrap
  gRNA
aaccccagccaatatgttca

SEQ ID NO: 99261 - DNA, 20 bp, Artificial Sequence
  MKO10099261_B_Mrap
  gRNA
ccgaccaggacatgtagagc

SEQ ID NO: 99262 - DNA, 20 bp, Artificial Sequence
  MKO10099262_B_Mrap
  gRNA
ggcctccctgcagacaacag

SEQ ID NO: 99263 - DNA, 20 bp, Artificial Sequence
  MKO10099263_B_Mras
  gRNA
ttggcactggtctctatata

SEQ ID NO: 99264 - DNA, 20 bp, Artificial Sequence
  MKO10099264_B_Mras
  gRNA
gtgcatcagatccaccttgt

SEQ ID NO: 99265 - DNA, 20 bp, Artificial Sequence
  MKO10099265_B_Mras
  gRNA
atgacctagttagagtaatt

SEQ ID NO: 99266 - DNA, 20 bp, Artificial Sequence
  MKO10099266_B_Mrc1
  gRNA
tcggacggatggctctggtg

SEQ ID NO: 99267 - DNA, 20 bp, Artificial Sequence
  MKO10099267_B_Mrc1
  gRNA
acggatgacctgtgctcgag

SEQ ID NO: 99268 - DNA, 20 bp, Artificial Sequence
  MKO10099268_B_Mrc1
  gRNA
ctgtgaggtacatttgctcg

SEQ ID NO: 99269 - DNA, 20 bp, Artificial Sequence
  MKO10099269_B_Mrc2
  gRNA
attaaggccaatccatagcg

SEQ ID NO: 99270 - DNA, 20 bp, Artificial Sequence
  MKO10099270_B_Mrc2
  gRNA
gctcatctttgccgtagtcc

SEQ ID NO: 99271 - DNA, 20 bp, Artificial Sequence
  MKO10099271_B_Mrc2
  gRNA
gtaacgactgtgagaccttc

SEQ ID NO: 99272 - DNA, 20 bp, Artificial Sequence
  MKO10099272_B_Mre11a
  gRNA
agtccggttctgctgcagaa

SEQ ID NO: 99273 - DNA, 20 bp, Artificial Sequence
  MKO10099273_B_Mre11a
  gRNA
agtgatcagtcagtcaactt

SEQ ID NO: 99274 - DNA, 20 bp, Artificial Sequence
  MKO10099274_B_Mre11a
  gRNA
tccatgaaaacaagccctcg

SEQ ID NO: 99275 - DNA, 20 bp, Artificial Sequence
  MKO10099275_B_Mreg
  gRNA
cctctaagattcgtctccat

SEQ ID NO: 99276 - DNA, 20 bp, Artificial Sequence
  MKO10099276_B_Mreg
  gRNA
aacaatccgtattcctcctt

SEQ ID NO: 99277 - DNA, 20 bp, Artificial Sequence
  MKO10099277_B_Mreg
  gRNA
cctctatcttccccgccagc

SEQ ID NO: 99278 - DNA, 20 bp, Artificial Sequence
  MKO10099278_B_Mrfap1
  gRNA
gccggcggcgccgagccccg

SEQ ID NO: 99279 - DNA, 20 bp, Artificial Sequence
  MKO10099279_B_Mrfap1
  gRNA
ggtggaggtgctggagcccg

SEQ ID NO: 99280 - DNA, 20 bp, Artificial Sequence
  MKO10099280_B_Mrfap1
  gRNA
agcagcggcgatgcggcccc

SEQ ID NO: 99281 - DNA, 20 bp, Artificial Sequence
  MKO10099281_B_Mrgbp
  gRNA
tgtcgtacatagtgctcaga

SEQ ID NO: 99282 - DNA, 20 bp, Artificial Sequence
  MKO10099282_B_Mrgbp
  gRNA
gaggatgtggacccccacag

SEQ ID NO: 99283 - DNA, 20 bp, Artificial Sequence
  MKO10099283_B_Mrgbp
  gRNA
ccttccagatgagatcattc

SEQ ID NO: 99284 - DNA, 20 bp, Artificial Sequence
  MKO10099284_B_Mrgpra1
  gRNA
ttggcgaggccgatgtgttt

SEQ ID NO: 99285 - DNA, 20 bp, Artificial Sequence
  MKO10099285_B_Mrgpra1
  gRNA
agtcagctagagctaagttt

SEQ ID NO: 99286 - DNA, 20 bp, Artificial Sequence
  MKO10099286_B_Mrgpra1
  gRNA
gtttctagccctaaacacat

SEQ ID NO: 99287 - DNA, 20 bp, Artificial Sequence
  MKO10099287_B_Mrgpra2a
  gRNA
accagtgacaacaaatccaa

SEQ ID NO: 99288 - DNA, 20 bp, Artificial Sequence
  MKO10099288_B_Mrgpra2a
  gRNA
tgataatgacaatgagtgtc

SEQ ID NO: 99289 - DNA, 20 bp, Artificial Sequence
  MKO10099289_B_Mrgpra2a
  gRNA
gagccaggctggacagacag

SEQ ID NO: 99290 - DNA, 20 bp, Artificial Sequence
  MKO10099290_B_Mrgpra2b
  gRNA
accagtgacaacaaatccaa

SEQ ID NO: 99291 - DNA, 20 bp, Artificial Sequence
  MKO10099291_B_Mrgpra2b
  gRNA
tgataatgacaatgagtgtc

SEQ ID NO: 99292 - DNA, 20 bp, Artificial Sequence
  MKO10099292_B_Mrgpra2b
  gRNA
gagccaggctggacagacag

SEQ ID NO: 99293 - DNA, 20 bp, Artificial Sequence
  MKO10099293_B_Mrgpra3
  gRNA
actagattatagccctcttc

SEQ ID NO: 99294 - DNA, 20 bp, Artificial Sequence
  MKO10099294_B_Mrgpra3
  gRNA
ctcaagtttaccctacccaa

SEQ ID NO: 99295 - DNA, 20 bp, Artificial Sequence
  MKO10099295_B_Mrgpra3
  gRNA
gtccctgttgatctgcattc

SEQ ID NO: 99296 - DNA, 20 bp, Artificial Sequence
  MKO10099296_B_Mrgpra4
  gRNA
tcttctggtttctggtgccc

SEQ ID NO: 99297 - DNA, 20 bp, Artificial Sequence
  MKO10099297_B_Mrgpra4
  gRNA
tcatgatgatgtcaaagcaa

SEQ ID NO: 99298 - DNA, 20 bp, Artificial Sequence
  MKO10099298_B_Mrgpra4
  gRNA
ccagaaaccagaagaagccc

SEQ ID NO: 99299 - DNA, 20 bp, Artificial Sequence
  MKO10099299_B_Mrgpra6
  gRNA
gaagcaccagaccctcaaaa

SEQ ID NO: 99300 - DNA, 20 bp, Artificial Sequence
  MKO10099300_B_Mrgpra6
  gRNA
cccatagtcatcttcatatt

SEQ ID NO: 99301 - DNA, 20 bp, Artificial Sequence
  MKO10099301_B_Mrgpra6
  gRNA
gatgctgatacttctatgca

SEQ ID NO: 99302 - DNA, 20 bp, Artificial Sequence
  MKO10099302_B_Mrgpra9
  gRNA
agatcactggcttctgtaca

SEQ ID NO: 99303 - DNA, 20 bp, Artificial Sequence
  MKO10099303_B_Mrgpra9
  gRNA
cagagctattaatagcactc

SEQ ID NO: 99304 - DNA, 20 bp, Artificial Sequence
  MKO10099304_B_Mrgpra9
  gRNA
tcatttgcctttacaccttc

SEQ ID NO: 99305 - DNA, 20 bp, Artificial Sequence
  MKO10099305_B_Mrgprb1
  gRNA
gtcacgttacgaaaaccaca

SEQ ID NO: 99306 - DNA, 20 bp, Artificial Sequence
  MKO10099306_B_Mrgprb1
  gRNA
gagtcttccgttgaaaccga

SEQ ID NO: 99307 - DNA, 20 bp, Artificial Sequence
  MKO10099307_B_Mrgprb1
  gRNA
ggtaccgctgccaacgccca

SEQ ID NO: 99308 - DNA, 20 bp, Artificial Sequence
  MKO10099308_B_Mrgprb2
  gRNA
catttagtcccatcccaacc

SEQ ID NO: 99309 - DNA, 20 bp, Artificial Sequence
  MKO10099309_B_Mrgprb2
  gRNA
acgtttacagcgataccaaa

SEQ ID NO: 99310 - DNA, 20 bp, Artificial Sequence
  MKO10099310_B_Mrgprb2
  gRNA
gactattacactcacagtct

SEQ ID NO: 99311 - DNA, 20 bp, Artificial Sequence
  MKO10099311_B_Mrgprb3
  gRNA
agaaggcattcctgcatatc

SEQ ID NO: 99312 - DNA, 20 bp, Artificial Sequence
  MKO10099312_B_Mrgprb3
  gRNA
actaataaccaccacagcac

SEQ ID NO: 99313 - DNA, 20 bp, Artificial Sequence
  MKO10099313_B_Mrgprb3
  gRNA
tcttctggatagttgacaaa

SEQ ID NO: 99314 - DNA, 20 bp, Artificial Sequence
  MKO10099314_B_Mrgprb4
  gRNA
ctctctattgttgagcctcg

SEQ ID NO: 99315 - DNA, 20 bp, Artificial Sequence
  MKO10099315_B_Mrgprb4
  gRNA
cactcaagttgtgcattccc

SEQ ID NO: 99316 - DNA, 20 bp, Artificial Sequence
  MKO10099316_B_Mrgprb4
  gRNA
agattgtgtgggggtcacac

SEQ ID NO: 99317 - DNA, 20 bp, Artificial Sequence
  MKO10099317_B_Mrgprb5
  gRNA
tgtgtctcctatttaactga

SEQ ID NO: 99318 - DNA, 20 bp, Artificial Sequence
  MKO10099318_B_Mrgprb5
  gRNA
ttgcaacctgtgctgcctaa

SEQ ID NO: 99319 - DNA, 20 bp, Artificial Sequence
  MKO10099319_B_Mrgprb5
  gRNA
actgtcatcattgccatgtt

SEQ ID NO: 99320 - DNA, 20 bp, Artificial Sequence
  MKO10099320_B_Mrgprb8
  gRNA
tcactacatcgacattcaca

SEQ ID NO: 99321 - DNA, 20 bp, Artificial Sequence
  MKO10099321_B_Mrgprb8
  gRNA
ttgctctcatcatagttgta

SEQ ID NO: 99322 - DNA, 20 bp, Artificial Sequence
  MKO10099322_B_Mrgprb8
  gRNA
gagaattcaattatgccttg

SEQ ID NO: 99323 - DNA, 20 bp, Artificial Sequence
  MKO10099323_B_Mrgprd
  gRNA
ccatccacgtgtactaatga

SEQ ID NO: 99324 - DNA, 20 bp, Artificial Sequence
  MKO10099324_B_Mrgprd
  gRNA
gccccggcacctgtcatcag

SEQ ID NO: 99325 - DNA, 20 bp, Artificial Sequence
  MKO10099325_B_Mrgprd
  gRNA
aaagcacggagaggcagcgc

SEQ ID NO: 99326 - DNA, 20 bp, Artificial Sequence
  MKO10099326_B_Mrgpre
  gRNA
gagaatctgtgtgcacgctc

SEQ ID NO: 99327 - DNA, 20 bp, Artificial Sequence
  MKO10099327_B_Mrgpre
  gRNA
tgcaggcgccgctcagcagc

SEQ ID NO: 99328 - DNA, 20 bp, Artificial Sequence
  MKO10099328_B_Mrgpre
  gRNA
cattgcccagcagcccgccc

SEQ ID NO: 99329 - DNA, 20 bp, Artificial Sequence
  MKO10099329_B_Mrgprf
  gRNA
tcactccaccaaccagaaca

SEQ ID NO: 99330 - DNA, 20 bp, Artificial Sequence
  MKO10099330_B_Mrgprf
  gRNA
ggaagacagagacgatcgcc

SEQ ID NO: 99331 - DNA, 20 bp, Artificial Sequence
  MKO10099331_B_Mrgprf
  gRNA
cacacagcgttcgatgctaa

SEQ ID NO: 99332 - DNA, 20 bp, Artificial Sequence
  MKO10099332_B_Mrgprg
  gRNA
ctgttgccagccaacgcctg

SEQ ID NO: 99333 - DNA, 20 bp, Artificial Sequence
  MKO10099333_B_Mrgprg
  gRNA
accccccaagttctgcaagt

SEQ ID NO: 99334 - DNA, 20 bp, Artificial Sequence
  MKO10099334_B_Mrgprg
  gRNA
ttgtcctctgcctcgtgatc

SEQ ID NO: 99335 - DNA, 20 bp, Artificial Sequence
  MKO10099335_B_Mrgprh
  gRNA
gccctctctgttctcgtgtc

SEQ ID NO: 99336 - DNA, 20 bp, Artificial Sequence
  MKO10099336_B_Mrgprh
  gRNA
cccaaaacaccagtccgctg

SEQ ID NO: 99337 - DNA, 20 bp, Artificial Sequence
  MKO10099337_B_Mrgprh
  gRNA
tctccgtgctttatccaatc

SEQ ID NO: 99338 - DNA, 20 bp, Artificial Sequence
  MKO10099338_B_Mrgprx1
  gRNA
tcctcggattccgcatgcgc

SEQ ID NO: 99339 - DNA, 20 bp, Artificial Sequence
  MKO10099339_B_Mrgprx1
  gRNA
tgtttcctgccagtccaacc

SEQ ID NO: 99340 - DNA, 20 bp, Artificial Sequence
  MKO10099340_B_Mrgprx1
  gRNA
atgctcaggcctgagatata

SEQ ID NO: 99341 - DNA, 20 bp, Artificial Sequence
  MKO10099341_B_Mrgprx2
  gRNA
ttaggcatcatcgatttcaa

SEQ ID NO: 99342 - DNA, 20 bp, Artificial Sequence
  MKO10099342_B_Mrgprx2
  gRNA
agaatgcattcctgcgcatc

SEQ ID NO: 99343 - DNA, 20 bp, Artificial Sequence
  MKO10099343_B_Mrgprx2
  gRNA
atttctcaatccacactaag

SEQ ID NO: 99344 - DNA, 20 bp, Artificial Sequence
  MKO10099344_B_Mri1
  gRNA
cggcggctgccatggcacac

SEQ ID NO: 99345 - DNA, 20 bp, Artificial Sequence
  MKO10099345_B_Mri1
  gRNA
gctgaccgtgttgttgccaa

SEQ ID NO: 99346 - DNA, 20 bp, Artificial Sequence
  MKO10099346_B_Mri1
  gRNA
accgtggtgtttggcgacaa

SEQ ID NO: 99347 - DNA, 20 bp, Artificial Sequence
  MKO10099347_B_Mrm1
  gRNA
cacctccatagccccagcgc

SEQ ID NO: 99348 - DNA, 20 bp, Artificial Sequence
  MKO10099348_B_Mrm1
  gRNA
tgagtccttgaatgtatctg

SEQ ID NO: 99349 - DNA, 20 bp, Artificial Sequence
  MKO10099349_B_Mrm1
  gRNA
acccttcttctgactgcaaa

SEQ ID NO: 99350 - DNA, 20 bp, Artificial Sequence
  MKO10099350_B_Mroh1
  gRNA
atcgcttgccaacagccacc

SEQ ID NO: 99351 - DNA, 20 bp, Artificial Sequence
  MKO10099351_B_Mroh1
  gRNA
gtaccttgtcatgctgccgt

SEQ ID NO: 99352 - DNA, 20 bp, Artificial Sequence
  MKO10099352_B_Mroh1
  gRNA
ggcgagtgtgtgcagcacgg

SEQ ID NO: 99353 - DNA, 20 bp, Artificial Sequence
  MKO10099353_B_Mroh2a
  gRNA
tgtgatatcccgcatctgct

SEQ ID NO: 99354 - DNA, 20 bp, Artificial Sequence
  MKO10099354_B_Mroh2a
  gRNA
cctggacatgcggaagacct

SEQ ID NO: 99355 - DNA, 20 bp, Artificial Sequence
  MKO10099355_B_Mroh2a
  gRNA
ccattgcctccaagcagatg

SEQ ID NO: 99356 - DNA, 20 bp, Artificial Sequence
  MKO10099356_B_Mroh2b
  gRNA
ggaatacccacctatacaga

SEQ ID NO: 99357 - DNA, 20 bp, Artificial Sequence
  MKO10099357_B_Mroh2b
  gRNA
gttgatttattacacttcta

SEQ ID NO: 99358 - DNA, 20 bp, Artificial Sequence
  MKO10099358_B_Mroh2b
  gRNA
actttgcacttcatacatca

SEQ ID NO: 99359 - DNA, 20 bp, Artificial Sequence
  MKO10099359_B_Mroh4
  gRNA
gaccttatcagtagccttcc

SEQ ID NO: 99360 - DNA, 20 bp, Artificial Sequence
  MKO10099360_B_Mroh4
  gRNA
ccccaggaaggctactgata

SEQ ID NO: 99361 - DNA, 20 bp, Artificial Sequence
  MKO10099361_B_Mroh4
  gRNA
cctgctcaccagatcgctcc

SEQ ID NO: 99362 - DNA, 20 bp, Artificial Sequence
  MKO10099362_B_Mroh5
  gRNA
ccgcagcctgttgtatgtga

SEQ ID NO: 99363 - DNA, 20 bp, Artificial Sequence
  MKO10099363_B_Mroh5
  gRNA
actggttgcagtaaaccact

SEQ ID NO: 99364 - DNA, 20 bp, Artificial Sequence
  MKO10099364_B_Mroh5
  gRNA
tgggctatcttagaacagtt

SEQ ID NO: 99365 - DNA, 20 bp, Artificial Sequence
  MKO10099365_B_Mroh6
  gRNA
ccggtccgggggtagcgaac

SEQ ID NO: 99366 - DNA, 20 bp, Artificial Sequence
  MKO10099366_B_Mroh6
  gRNA
tatacaacgcaaggtctgca

SEQ ID NO: 99367 - DNA, 20 bp, Artificial Sequence
  MKO10099367_B_Mroh6
  gRNA
tgtggcggctcccgagtctg

SEQ ID NO: 99368 - DNA, 20 bp, Artificial Sequence
  MKO10099368_B_Mroh7
  gRNA
ccccatccagagacagattc

SEQ ID NO: 99369 - DNA, 20 bp, Artificial Sequence
  MKO10099369_B_Mroh7
  gRNA
ggcaaccgtgaagatgatga

SEQ ID NO: 99370 - DNA, 20 bp, Artificial Sequence
  MKO10099370_B_Mroh7
  gRNA
ccaaagctgctttgttgtca

SEQ ID NO: 99371 - DNA, 20 bp, Artificial Sequence
  MKO10099371_B_Mroh8
  gRNA
ctggaccagtctctcaatgc

SEQ ID NO: 99372 - DNA, 20 bp, Artificial Sequence
  MKO10099372_B_Mroh8
  gRNA
gctcaccatgtaaaacttcc

SEQ ID NO: 99373 - DNA, 20 bp, Artificial Sequence
  MKO10099373_B_Mroh8
  gRNA
ctcgctgcaggtgttggtac

SEQ ID NO: 99374 - DNA, 20 bp, Artificial Sequence
  MKO10099374_B_Mroh9
  gRNA
cacatggtaccaagtcacag

SEQ ID NO: 99375 - DNA, 20 bp, Artificial Sequence
  MKO10099375_B_Mroh9
  gRNA
aatagagctatctttcagaa

SEQ ID NO: 99376 - DNA, 20 bp, Artificial Sequence
  MKO10099376_B_Mroh9
  gRNA
ctacaagatacaaatcttaa

SEQ ID NO: 99377 - DNA, 20 bp, Artificial Sequence
  MKO10099377_B_Mro
  gRNA
aagcgccatctagcaatgag

SEQ ID NO: 99378 - DNA, 20 bp, Artificial Sequence
  MKO10099378_B_Mro
  gRNA
ggcccgtgaagctcctgaca

SEQ ID NO: 99379 - DNA, 20 bp, Artificial Sequence
  MKO10099379_B_Mro
  gRNA
gaaagttatgcttgacctcc

SEQ ID NO: 99380 - DNA, 20 bp, Artificial Sequence
  MKO10099380_B_Mrp63
  gRNA
agcctgggcccgtcgctccg

SEQ ID NO: 99381 - DNA, 20 bp, Artificial Sequence
  MKO10099381_B_Mrp63
  gRNA
gagcatgatccgtcgcctgg

SEQ ID NO: 99382 - DNA, 20 bp, Artificial Sequence
  MKO10099382_B_Mrp63
  gRNA
ggatcatgctctccttcgct

SEQ ID NO: 99383 - DNA, 20 bp, Artificial Sequence
  MKO10099383_B_Mrpl10
  gRNA
ccaaggctgtgacccgccac

SEQ ID NO: 99384 - DNA, 20 bp, Artificial Sequence
  MKO10099384_B_Mrpl10
  gRNA
gggaggatgtagcttctcat

SEQ ID NO: 99385 - DNA, 20 bp, Artificial Sequence
  MKO10099385_B_Mrpl10
  gRNA
aaacaggccggctaggcatc

SEQ ID NO: 99386 - DNA, 20 bp, Artificial Sequence
  MKO10099386_B_Mrpl11
  gRNA
ctagtccttacctgtatgcc

SEQ ID NO: 99387 - DNA, 20 bp, Artificial Sequence
  MKO10099387_B_Mrpl11
  gRNA
cagctgctgggatcgagaag

SEQ ID NO: 99388 - DNA, 20 bp, Artificial Sequence
  MKO10099388_B_Mrpl11
  gRNA
tagcctcagtgcagaagaac

SEQ ID NO: 99389 - DNA, 20 bp, Artificial Sequence
  MKO10099389_B_Mrpl12
  gRNA
cgacgttggctttgatttcc

SEQ ID NO: 99390 - DNA, 20 bp, Artificial Sequence
  MKO10099390_B_Mrpl12
  gRNA
agccaacgtcgccaaagctg

SEQ ID NO: 99391 - DNA, 20 bp, Artificial Sequence
  MKO10099391_B_Mrpl12
  gRNA
gctgcagcagagacgggacc

SEQ ID NO: 99392 - DNA, 20 bp, Artificial Sequence
  MKO10099392_B_Mrpl13
  gRNA
gttctcttacccagtatgtg

SEQ ID NO: 99393 - DNA, 20 bp, Artificial Sequence
  MKO10099393_B_Mrpl13
  gRNA
taacagctgcgcagcttcac

SEQ ID NO: 99394 - DNA, 20 bp, Artificial Sequence
  MKO10099394_B_Mrpl13
  gRNA
gcatcattgtccttctgtgc

SEQ ID NO: 99395 - DNA, 20 bp, Artificial Sequence
  MKO10099395_B_Mrpl14
  gRNA
ttacttacctgaagcagcgc

SEQ ID NO: 99396 - DNA, 20 bp, Artificial Sequence
  MKO10099396_B_Mrpl14
  gRNA
ctcaatgaggaccacgttgt

SEQ ID NO: 99397 - DNA, 20 bp, Artificial Sequence
  MKO10099397_B_Mrpl14
  gRNA
tcatcttctggacggcactg

SEQ ID NO: 99398 - DNA, 20 bp, Artificial Sequence
  MKO10099398_B_Mrpl15
  gRNA
tacatacgaatcccaaaata

SEQ ID NO: 99399 - DNA, 20 bp, Artificial Sequence
  MKO10099399_B_Mrpl15
  gRNA
gagttacctcttcaaccagc

SEQ ID NO: 99400 - DNA, 20 bp, Artificial Sequence
  MKO10099400_B_Mrpl15
  gRNA
aattaatattgaagtgcagc

SEQ ID NO: 99401 - DNA, 20 bp, Artificial Sequence
  MKO10099401_B_Mrpl16
  gRNA
gcgcgtcaacagcctccaca

SEQ ID NO: 99402 - DNA, 20 bp, Artificial Sequence
  MKO10099402_B_Mrpl16
  gRNA
gagcgtcttcagaccagcac

SEQ ID NO: 99403 - DNA, 20 bp, Artificial Sequence
  MKO10099403_B_Mrpl16
  gRNA
aggtactcactttcaaaagt

SEQ ID NO: 99404 - DNA, 20 bp, Artificial Sequence
  MKO10099404_B_Mrpl17
  gRNA
cgatcttgctccttccgatt

SEQ ID NO: 99405 - DNA, 20 bp, Artificial Sequence
  MKO10099405_B_Mrpl17
  gRNA
gaatgctacagatcccgaat

SEQ ID NO: 99406 - DNA, 20 bp, Artificial Sequence
  MKO10099406_B_Mrpl17
  gRNA
tcctcacagctcatcgatta

SEQ ID NO: 99407 - DNA, 20 bp, Artificial Sequence
  MKO10099407_B_Mrpl18
  gRNA
tcccgtcagccatggcgctt

SEQ ID NO: 99408 - DNA, 20 bp, Artificial Sequence
  MKO10099408_B_Mrpl18
  gRNA
tttcagcatccactcgagaa

SEQ ID NO: 99409 - DNA, 20 bp, Artificial Sequence
  MKO10099409_B_Mrpl18
  gRNA
tttcattcatagattcttcg

SEQ ID NO: 99410 - DNA, 20 bp, Artificial Sequence
  MKO10099410_B_Mrpl19
  gRNA
atcgcttgatgcaaatcccc

SEQ ID NO: 99411 - DNA, 20 bp, Artificial Sequence
  MKO10099411_B_Mrpl19
  gRNA
actgtataatcctcgaatcc

SEQ ID NO: 99412 - DNA, 20 bp, Artificial Sequence
  MKO10099412_B_Mrpl19
  gRNA
ccgattccagagttctatgt

SEQ ID NO: 99413 - DNA, 20 bp, Artificial Sequence
  MKO10099413_B_Mrpl1
  gRNA
acctctacggaggcacctta

SEQ ID NO: 99414 - DNA, 20 bp, Artificial Sequence
  MKO10099414_B_Mrpl1
  gRNA
agcaaccttgttgacttctg

SEQ ID NO: 99415 - DNA, 20 bp, Artificial Sequence
  MKO10099415_B_Mrpl1
  gRNA
aagtcttgatacatcatcaa

SEQ ID NO: 99416 - DNA, 20 bp, Artificial Sequence
  MKO10099416_B_Mrpl20
  gRNA
tcaccgccctgacggccagg

SEQ ID NO: 99417 - DNA, 20 bp, Artificial Sequence
  MKO10099417_B_Mrpl20
  gRNA
gccaaagatttaaacgtctt

SEQ ID NO: 99418 - DNA, 20 bp, Artificial Sequence
  MKO10099418_B_Mrpl20
  gRNA
accaaagacgtttaaatctt

SEQ ID NO: 99419 - DNA, 20 bp, Artificial Sequence
  MKO10099419_B_Mrpl21
  gRNA
tcttctcaggtcctgctggt

SEQ ID NO: 99420 - DNA, 20 bp, Artificial Sequence
  MKO10099420_B_Mrpl21
  gRNA
cctccctgagctcaccaccc

SEQ ID NO: 99421 - DNA, 20 bp, Artificial Sequence
  MKO10099421_B_Mrpl21
  gRNA
tggtgtctcgtctcttcaac

SEQ ID NO: 99422 - DNA, 20 bp, Artificial Sequence
  MKO10099422_B_Mrpl22
  gRNA
tgtcaagagaagcactcgtg

SEQ ID NO: 99423 - DNA, 20 bp, Artificial Sequence
  MKO10099423_B_Mrpl22
  gRNA
acaaggaaatttaccattgt

SEQ ID NO: 99424 - DNA, 20 bp, Artificial Sequence
  MKO10099424_B_Mrpl22
  gRNA
ctgcgccaaagcctgatcaa

SEQ ID NO: 99425 - DNA, 20 bp, Artificial Sequence
  MKO10099425_B_Mrpl23
  gRNA
ctcatccaggatgaccaggg

SEQ ID NO: 99426 - DNA, 20 bp, Artificial Sequence
  MKO10099426_B_Mrpl23
  gRNA
ccctcacaggctccaacagg

SEQ ID NO: 99427 - DNA, 20 bp, Artificial Sequence
  MKO10099427_B_Mrpl23
  gRNA
atgctgcacccgtgtgcgca

SEQ ID NO: 99428 - DNA, 20 bp, Artificial Sequence
  MKO10099428_B_Mrpl24
  gRNA
gcaaagtagtccaagtcgtt

SEQ ID NO: 99429 - DNA, 20 bp, Artificial Sequence
  MKO10099429_B_Mrpl24
  gRNA
aacttaccagtccatgtttc

SEQ ID NO: 99430 - DNA, 20 bp, Artificial Sequence
  MKO10099430_B_Mrpl24
  gRNA
tcttgaatcttcgagtctcc

SEQ ID NO: 99431 - DNA, 20 bp, Artificial Sequence
  MKO10099431_B_Mrpl27
  gRNA
cgtagacatctttcgtgtag

SEQ ID NO: 99432 - DNA, 20 bp, Artificial Sequence
  MKO10099432_B_Mrpl27
  gRNA
gtgtgttgcaggtggggctt

SEQ ID NO: 99433 - DNA, 20 bp, Artificial Sequence
  MKO10099433_B_Mrpl27
  gRNA
tgaagcaaatatggcggcgg

SEQ ID NO: 99434 - DNA, 20 bp, Artificial Sequence
  MKO10099434_B_Mrpl28
  gRNA
cgagtgggttggcctgacgc

SEQ ID NO: 99435 - DNA, 20 bp, Artificial Sequence
  MKO10099435_B_Mrpl28
  gRNA
caccctgtacttgtcataga

SEQ ID NO: 99436 - DNA, 20 bp, Artificial Sequence
  MKO10099436_B_Mrpl28
  gRNA
cctgggctccaagtttggca

SEQ ID NO: 99437 - DNA, 20 bp, Artificial Sequence
  MKO10099437_B_Mrpl2
  gRNA
aacaacgtagagagcgagcc

SEQ ID NO: 99438 - DNA, 20 bp, Artificial Sequence
  MKO10099438_B_Mrpl2
  gRNA
tcatgcgataattctgtttg

SEQ ID NO: 99439 - DNA, 20 bp, Artificial Sequence
  MKO10099439_B_Mrpl2
  gRNA
ctaggccgcatccgagtgca

SEQ ID NO: 99440 - DNA, 20 bp, Artificial Sequence
  MKO10099440_B_Mrpl30
  gRNA
gtgacaatgtgcagtttgtg

SEQ ID NO: 99441 - DNA, 20 bp, Artificial Sequence
  MKO10099441_B_Mrpl30
  gRNA
ctgtagtccaagcatcttga

SEQ ID NO: 99442 - DNA, 20 bp, Artificial Sequence
  MKO10099442_B_Mrpl30
  gRNA
agcacatgcctcaagagcac

SEQ ID NO: 99443 - DNA, 20 bp, Artificial Sequence
  MKO10099443_B_Mrpl32
  gRNA
gtcgctttgtcagtcctccg

SEQ ID NO: 99444 - DNA, 20 bp, Artificial Sequence
  MKO10099444_B_Mrpl32
  gRNA
tctcatagcaatatccacaa

SEQ ID NO: 99445 - DNA, 20 bp, Artificial Sequence
  MKO10099445_B_Mrpl32
  gRNA
gtacagcaccatagtctcaa

SEQ ID NO: 99446 - DNA, 20 bp, Artificial Sequence
  MKO10099446_B_Mrpl33
  gRNA
tacttactttgacttgctct

SEQ ID NO: 99447 - DNA, 20 bp, Artificial Sequence
  MKO10099447_B_Mrpl33
  gRNA
aatccactactcagagggaa

SEQ ID NO: 99448 - DNA, 20 bp, Artificial Sequence
  MKO10099448_B_Mrpl33
  gRNA
gaacaaaaaagttctctttg

SEQ ID NO: 99449 - DNA, 20 bp, Artificial Sequence
  MKO10099449_B_Mrpl34
  gRNA
tggatatggctttcctagcc

SEQ ID NO: 99450 - DNA, 20 bp, Artificial Sequence
  MKO10099450_B_Mrpl34
  gRNA
catcctccgtcgcatgctga

SEQ ID NO: 99451 - DNA, 20 bp, Artificial Sequence
  MKO10099451_B_Mrpl34
  gRNA
tgcttgcgcttgatgttgct

SEQ ID NO: 99452 - DNA, 20 bp, Artificial Sequence
  MKO10099452_B_Mrpl35
  gRNA
cgcttcctccgacttcattc

SEQ ID NO: 99453 - DNA, 20 bp, Artificial Sequence
  MKO10099453_B_Mrpl35
  gRNA
tagctctgaactatactcgt

SEQ ID NO: 99454 - DNA, 20 bp, Artificial Sequence
  MKO10099454_B_Mrpl35
  gRNA
caagagaaagacggtaaagt

SEQ ID NO: 99455 - DNA, 20 bp, Artificial Sequence
  MKO10099455_B_Mrpl36
  gRNA
cacgctccgtacaagcagtg

SEQ ID NO: 99456 - DNA, 20 bp, Artificial Sequence
  MKO10099456_B_Mrpl36
  gRNA
aactgagcgcacctctgcgc

SEQ ID NO: 99457 - DNA, 20 bp, Artificial Sequence
  MKO10099457_B_Mrpl36
  gRNA
gcatggccgcactgcttgta

SEQ ID NO: 99458 - DNA, 20 bp, Artificial Sequence
  MKO10099458_B_Mrpl37
  gRNA
gtttgctttcgcaaatgccc

SEQ ID NO: 99459 - DNA, 20 bp, Artificial Sequence
  MKO10099459_B_Mrpl37
  gRNA
cattcttgaagatcgatggt

SEQ ID NO: 99460 - DNA, 20 bp, Artificial Sequence
  MKO10099460_B_Mrpl37
  gRNA
tcatctcccatgcccggctt

SEQ ID NO: 99461 - DNA, 20 bp, Artificial Sequence
  MKO10099461_B_Mrpl38
  gRNA
gaggctcacccgtgcggagg

SEQ ID NO: 99462 - DNA, 20 bp, Artificial Sequence
  MKO10099462_B_Mrpl38
  gRNA
caaaagtggcaccgtggaac

SEQ ID NO: 99463 - DNA, 20 bp, Artificial Sequence
  MKO10099463_B_Mrpl38
  gRNA
tgcccgttcttcttccacat

SEQ ID NO: 99464 - DNA, 20 bp, Artificial Sequence
  MKO10099464_B_Mrpl39
  gRNA
agaggcttatacatgtccca

SEQ ID NO: 99465 - DNA, 20 bp, Artificial Sequence
  MKO10099465_B_Mrpl39
  gRNA
gtcagagcaccggaagttcc

SEQ ID NO: 99466 - DNA, 20 bp, Artificial Sequence
  MKO10099466_B_Mrpl39
  gRNA
tgacccaaaagaagtgaata

SEQ ID NO: 99467 - DNA, 20 bp, Artificial Sequence
  MKO10099467_B_Mrpl3
  gRNA
atcccttgaaagatgagccg

SEQ ID NO: 99468 - DNA, 20 bp, Artificial Sequence
  MKO10099468_B_Mrpl3
  gRNA
ggagaccagttgcttaacaa

SEQ ID NO: 99469 - DNA, 20 bp, Artificial Sequence
  MKO10099469_B_Mrpl3
  gRNA
aaaaatcgcagccctgacag

SEQ ID NO: 99470 - DNA, 20 bp, Artificial Sequence
  MKO10099470_B_Mrpl40
  gRNA
catggggatgagatcccaga

SEQ ID NO: 99471 - DNA, 20 bp, Artificial Sequence
  MKO10099471_B_Mrpl40
  gRNA
tgtgtgctgcgcgggctctg

SEQ ID NO: 99472 - DNA, 20 bp, Artificial Sequence
  MKO10099472_B_Mrpl40
  gRNA
caaaggatcgcttgaaaaag

SEQ ID NO: 99473 - DNA, 20 bp, Artificial Sequence
  MKO10099473_B_Mrpl41
  gRNA
tgtttcctggaagagcgctt

SEQ ID NO: 99474 - DNA, 20 bp, Artificial Sequence
  MKO10099474_B_Mrpl41
  gRNA
gaccgccaaagcgctcttcc

SEQ ID NO: 99475 - DNA, 20 bp, Artificial Sequence
  MKO10099475_B_Mrpl41
  gRNA
cacgcaccttcactaagagt

SEQ ID NO: 99476 - DNA, 20 bp, Artificial Sequence
  MKO10099476_B_Mrpl42
  gRNA
catgagtcgtcatctgtctc

SEQ ID NO: 99477 - DNA, 20 bp, Artificial Sequence
  MKO10099477_B_Mrpl42
  gRNA
cttgctcagttgttctatca

SEQ ID NO: 99478 - DNA, 20 bp, Artificial Sequence
  MKO10099478_B_Mrpl42
  gRNA
atccacatactcttctcttc

SEQ ID NO: 99479 - DNA, 20 bp, Artificial Sequence
  MKO10099479_B_Mrpl43
  gRNA
acgagggcgcatcccggctg

SEQ ID NO: 99480 - DNA, 20 bp, Artificial Sequence
  MKO10099480_B_Mrpl43
  gRNA
gtgcgccatgccacgaatag

SEQ ID NO: 99481 - DNA, 20 bp, Artificial Sequence
  MKO10099481_B_Mrpl43
  gRNA
aaacgtcaacagcaagtcgg

SEQ ID NO: 99482 - DNA, 20 bp, Artificial Sequence
  MKO10099482_B_Mrpl44
  gRNA
gacgcctaccgtcgcactgg

SEQ ID NO: 99483 - DNA, 20 bp, Artificial Sequence
  MKO10099483_B_Mrpl44
  gRNA
cgtcttcgagaaactgtgtg

SEQ ID NO: 99484 - DNA, 20 bp, Artificial Sequence
  MKO10099484_B_Mrpl44
  gRNA
tcccatgggactactcgtag

SEQ ID NO: 99485 - DNA, 20 bp, Artificial Sequence
  MKO10099485_B_Mrpl45
  gRNA
ccacttacttgtttagacaa

SEQ ID NO: 99486 - DNA, 20 bp, Artificial Sequence
  MKO10099486_B_Mrpl45
  gRNA
tttctagctcagaccatgac

SEQ ID NO: 99487 - DNA, 20 bp, Artificial Sequence
  MKO10099487_B_Mrpl45
  gRNA
tgagcgattgagaaagaatg

SEQ ID NO: 99488 - DNA, 20 bp, Artificial Sequence
  MKO10099488_B_Mrpl46
  gRNA
aaggcgcccgacaagcgcca

SEQ ID NO: 99489 - DNA, 20 bp, Artificial Sequence
  MKO10099489_B_Mrpl46
  gRNA
cttgaacttgtagtggccac

SEQ ID NO: 99490 - DNA, 20 bp, Artificial Sequence
  MKO10099490_B_Mrpl46
  gRNA
agaccatgagctccgtgctc

SEQ ID NO: 99491 - DNA, 20 bp, Artificial Sequence
  MKO10099491_B_Mrpl47
  gRNA
tacttcataccacgttgtca

SEQ ID NO: 99492 - DNA, 20 bp, Artificial Sequence
  MKO10099492_B_Mrpl47
  gRNA
gtacaggtatgtccttctga

SEQ ID NO: 99493 - DNA, 20 bp, Artificial Sequence
  MKO10099493_B_Mrpl47
  gRNA
cagtcctttccttgacaacg

SEQ ID NO: 99494 - DNA, 20 bp, Artificial Sequence
  MKO10099494_B_Mrpl48
  gRNA
ttctcttaggtggtattctg

SEQ ID NO: 99495 - DNA, 20 bp, Artificial Sequence
  MKO10099495_B_Mrpl48
  gRNA
ctacttacctgcagaaaaaa

SEQ ID NO: 99496 - DNA, 20 bp, Artificial Sequence
  MKO10099496_B_Mrpl48
  gRNA
tcttgcaggtgctgggtgtg

SEQ ID NO: 99497 - DNA, 20 bp, Artificial Sequence
  MKO10099497_B_Mrpl49
  gRNA
ggagcaggcgctccacaaat

SEQ ID NO: 99498 - DNA, 20 bp, Artificial Sequence
  MKO10099498_B_Mrpl49
  gRNA
agctgcctcggtcggagcta

SEQ ID NO: 99499 - DNA, 20 bp, Artificial Sequence
  MKO10099499_B_Mrpl49
  gRNA
tcctgataaccccggctttg

SEQ ID NO: 99500 - DNA, 20 bp, Artificial Sequence
  MKO10099500_B_Mrpl4
  gRNA
ccgcgccttccgctagagag

SEQ ID NO: 99501 - DNA, 20 bp, Artificial Sequence
  MKO10099501_B_Mrpl4
  gRNA
accggcgtccggtgcaagcc

SEQ ID NO: 99502 - DNA, 20 bp, Artificial Sequence
  MKO10099502_B_Mrpl4
  gRNA
ggatgctgccatgccgagca

SEQ ID NO: 99503 - DNA, 20 bp, Artificial Sequence
  MKO10099503_B_Mrpl50
  gRNA
aaattctctacgtgttgcca

SEQ ID NO: 99504 - DNA, 20 bp, Artificial Sequence
  MKO10099504_B_Mrpl50
  gRNA
ccaggcttcaccaaatgtgc

SEQ ID NO: 99505 - DNA, 20 bp, Artificial Sequence
  MKO10099505_B_Mrpl50
  gRNA
tggcaacacgtagagaattt

SEQ ID NO: 99506 - DNA, 20 bp, Artificial Sequence
  MKO10099506_B_Mrpl51
  gRNA
taatggcagggagtgtccct

SEQ ID NO: 99507 - DNA, 20 bp, Artificial Sequence
  MKO10099507_B_Mrpl51
  gRNA
cctatctgtacttcccatgt

SEQ ID NO: 99508 - DNA, 20 bp, Artificial Sequence
  MKO10099508_B_Mrpl51
  gRNA
gcacccaaaagaactgatca

SEQ ID NO: 99509 - DNA, 20 bp, Artificial Sequence
  MKO10099509_B_Mrpl52
  gRNA
ctccgtgaggggcccatagc

SEQ ID NO: 99510 - DNA, 20 bp, Artificial Sequence
  MKO10099510_B_Mrpl52
  gRNA
cgccctgcacccccaatgaa

SEQ ID NO: 99511 - DNA, 20 bp, Artificial Sequence
  MKO10099511_B_Mrpl52
  gRNA
acgagttgtactgctgacac

SEQ ID NO: 99512 - DNA, 20 bp, Artificial Sequence
  MKO10099512_B_Mrpl53
  gRNA
cagcggcgggtactcgtacc

SEQ ID NO: 99513 - DNA, 20 bp, Artificial Sequence
  MKO10099513_B_Mrpl53
  gRNA
agagccgtcgtgcctcacgt

SEQ ID NO: 99514 - DNA, 20 bp, Artificial Sequence
  MKO10099514_B_Mrpl53
  gRNA
cgccgcggcagcatctgcac

SEQ ID NO: 99515 - DNA, 20 bp, Artificial Sequence
  MKO10099515_B_Mrpl54
  gRNA
caagggcggcgtggccgctg

SEQ ID NO: 99516 - DNA, 20 bp, Artificial Sequence
  MKO10099516_B_Mrpl54
  gRNA
tgcacacctcggggtccttc

SEQ ID NO: 99517 - DNA, 20 bp, Artificial Sequence
  MKO10099517_B_Mrpl54
  gRNA
aaccagagtcccgagagtac

SEQ ID NO: 99518 - DNA, 20 bp, Artificial Sequence
  MKO10099518_B_Mrpl55
  gRNA
tcaaaactgtccactacctc

SEQ ID NO: 99519 - DNA, 20 bp, Artificial Sequence
  MKO10099519_B_Mrpl55
  gRNA
ttatgcttacctaagcagaa

SEQ ID NO: 99520 - DNA, 20 bp, Artificial Sequence
  MKO10099520_B_Mrpl55
  gRNA
tgcctttggccattctgctt

SEQ ID NO: 99521 - DNA, 20 bp, Artificial Sequence
  MKO10099521_B_Mrpl9
  gRNA
cattgacagaaattggagtc

SEQ ID NO: 99522 - DNA, 20 bp, Artificial Sequence
  MKO10099522_B_Mrpl9
  gRNA
tcgtaacaagctcctttctc

SEQ ID NO: 99523 - DNA, 20 bp, Artificial Sequence
  MKO10099523_B_Mrpl9
  gRNA
ccgcctctcctgcctttgtc

SEQ ID NO: 99524 - DNA, 20 bp, Artificial Sequence
  MKO10099524_B_Mrps10
  gRNA
ggtggccatggaagtgacaa

SEQ ID NO: 99525 - DNA, 20 bp, Artificial Sequence
  MKO10099525_B_Mrps10
  gRNA
gtaggtctggtcacatcctt

SEQ ID NO: 99526 - DNA, 20 bp, Artificial Sequence
  MKO10099526_B_Mrps10
  gRNA
tgtctaacacagccctgtca

SEQ ID NO: 99527 - DNA, 20 bp, Artificial Sequence
  MKO10099527_B_Mrps11
  gRNA
tagtaacttacccagcgtcc

SEQ ID NO: 99528 - DNA, 20 bp, Artificial Sequence
  MKO10099528_B_Mrps11
  gRNA
ctctgccaccaatgcgtccc

SEQ ID NO: 99529 - DNA, 20 bp, Artificial Sequence
  MKO10099529_B_Mrps11
  gRNA
gttgctttaatgtgtgcaat

SEQ ID NO: 99530 - DNA, 20 bp, Artificial Sequence
  MKO10099530_B_Mrps12
  gRNA
ggcggcgagatgtcctggcc

SEQ ID NO: 99531 - DNA, 20 bp, Artificial Sequence
  MKO10099531_B_Mrps12
  gRNA
ctgaaccagatgcaccgctt

SEQ ID NO: 99532 - DNA, 20 bp, Artificial Sequence
  MKO10099532_B_Mrps12
  gRNA
gttccttccgggggcctaag

SEQ ID NO: 99533 - DNA, 20 bp, Artificial Sequence
  MKO10099533_B_Mrps14
  gRNA
cgaacttgacctgacgctga

SEQ ID NO: 99534 - DNA, 20 bp, Artificial Sequence
  MKO10099534_B_Mrps14
  gRNA
tggctaacctgaaggtcctt

SEQ ID NO: 99535 - DNA, 20 bp, Artificial Sequence
  MKO10099535_B_Mrps14
  gRNA
gctgctgcggaccttccggc

SEQ ID NO: 99536 - DNA, 20 bp, Artificial Sequence
  MKO10099536_B_Mrps15
  gRNA
cctcgtacctggtttctgga

SEQ ID NO: 99537 - DNA, 20 bp, Artificial Sequence
  MKO10099537_B_Mrps15
  gRNA
ggaccaactttgagcttcca

SEQ ID NO: 99538 - DNA, 20 bp, Artificial Sequence
  MKO10099538_B_Mrps15
  gRNA
acaattgatgaacaagattg

SEQ ID NO: 99539 - DNA, 20 bp, Artificial Sequence
  MKO10099539_B_Mrps16
  gRNA
cctccgtagtctctcagcat

SEQ ID NO: 99540 - DNA, 20 bp, Artificial Sequence
  MKO10099540_B_Mrps16
  gRNA
tgatcatcattggatgaagg

SEQ ID NO: 99541 - DNA, 20 bp, Artificial Sequence
  MKO10099541_B_Mrps16
  gRNA
agcccaactgctccacaaat

SEQ ID NO: 99542 - DNA, 20 bp, Artificial Sequence
  MKO10099542_B_Mrps17
  gRNA
aagagcgaccagacttgttt

SEQ ID NO: 99543 - DNA, 20 bp, Artificial Sequence
  MKO10099543_B_Mrps17
  gRNA
agagccccctcagcgaacct

SEQ ID NO: 99544 - DNA, 20 bp, Artificial Sequence
  MKO10099544_B_Mrps17
  gRNA
gcccttcagcagtgcagcgt

SEQ ID NO: 99545 - DNA, 20 bp, Artificial Sequence
  MKO10099545_B_Mrps18a
  gRNA
gaagcacaaatatacctatg

SEQ ID NO: 99546 - DNA, 20 bp, Artificial Sequence
  MKO10099546_B_Mrps18a
  gRNA
tccagcggcagatggggcac

SEQ ID NO: 99547 - DNA, 20 bp, Artificial Sequence
  MKO10099547_B_Mrps18a
  gRNA
tcctttggtaagcatccttc

SEQ ID NO: 99548 - DNA, 20 bp, Artificial Sequence
  MKO10099548_B_Mrps18b
  gRNA
gaatccttgcccaatctgcc

SEQ ID NO: 99549 - DNA, 20 bp, Artificial Sequence
  MKO10099549_B_Mrps18b
  gRNA
ttccaaggctcgctctcata

SEQ ID NO: 99550 - DNA, 20 bp, Artificial Sequence
  MKO10099550_B_Mrps18b
  gRNA
gccaagctaacctgtgtatg

SEQ ID NO: 99551 - DNA, 20 bp, Artificial Sequence
  MKO10099551_B_Mrps18c
  gRNA
atttatggaaggcacataac

SEQ ID NO: 99552 - DNA, 20 bp, Artificial Sequence
  MKO10099552_B_Mrps18c
  gRNA
gtgccttccataaatgcatc

SEQ ID NO: 99553 - DNA, 20 bp, Artificial Sequence
  MKO10099553_B_Mrps18c
  gRNA
tctctttagtttctgtgatt

SEQ ID NO: 99554 - DNA, 20 bp, Artificial Sequence
  MKO10099554_B_Mrps21
  gRNA
aacatctgaagttcattgcc

SEQ ID NO: 99555 - DNA, 20 bp, Artificial Sequence
  MKO10099555_B_Mrps21
  gRNA
tttatacagaatcctcacca

SEQ ID NO: 99556 - DNA, 20 bp, Artificial Sequence
  MKO10099556_B_Mrps21
  gRNA
gatggttcaggaggggaacg

SEQ ID NO: 99557 - DNA, 20 bp, Artificial Sequence
  MKO10099557_B_Mrps22
  gRNA
tgcctgtgtcattaacttat

SEQ ID NO: 99558 - DNA, 20 bp, Artificial Sequence
  MKO10099558_B_Mrps22
  gRNA
aggatcctcaccaagattac

SEQ ID NO: 99559 - DNA, 20 bp, Artificial Sequence
  MKO10099559_B_Mrps22
  gRNA
actcaccttgatatactcag

SEQ ID NO: 99560 - DNA, 20 bp, Artificial Sequence
  MKO10099560_B_Mrps23
  gRNA
tcacctgcccccgctgcgcc

SEQ ID NO: 99561 - DNA, 20 bp, Artificial Sequence
  MKO10099561_B_Mrps23
  gRNA
gcctcaggaagacgatgacc

SEQ ID NO: 99562 - DNA, 20 bp, Artificial Sequence
  MKO10099562_B_Mrps23
  gRNA
aggaaattctttgcaaccta

SEQ ID NO: 99563 - DNA, 20 bp, Artificial Sequence
  MKO10099563_B_Mrps24
  gRNA
tgcgcctcctcgtagctcac

SEQ ID NO: 99564 - DNA, 20 bp, Artificial Sequence
  MKO10099564_B_Mrps24
  gRNA
caagatggcgtggtccgcgt

SEQ ID NO: 99565 - DNA, 20 bp, Artificial Sequence
  MKO10099565_B_Mrps24
  gRNA
gtttgcaggtggagtcgcac

SEQ ID NO: 99566 - DNA, 20 bp, Artificial Sequence
  MKO10099566_B_Mrps25
  gRNA
tcttcgtctccacgtctacc

SEQ ID NO: 99567 - DNA, 20 bp, Artificial Sequence
  MKO10099567_B_Mrps25
  gRNA
ttccgggggccaaagttgcc

SEQ ID NO: 99568 - DNA, 20 bp, Artificial Sequence
  MKO10099568_B_Mrps25
  gRNA
actcacctagatagaaccgc

SEQ ID NO: 99569 - DNA, 20 bp, Artificial Sequence
  MKO10099569_B_Mrps26
  gRNA
ggcacggatagaagaagcgt

SEQ ID NO: 99570 - DNA, 20 bp, Artificial Sequence
  MKO10099570_B_Mrps26
  gRNA
ccccaggctagagttcacgt

SEQ ID NO: 99571 - DNA, 20 bp, Artificial Sequence
  MKO10099571_B_Mrps26
  gRNA
acggcccagttgtaactctt

SEQ ID NO: 99572 - DNA, 20 bp, Artificial Sequence
  MKO10099572_B_Mrps27
  gRNA
agctgatcttgcatccttaa

SEQ ID NO: 99573 - DNA, 20 bp, Artificial Sequence
  MKO10099573_B_Mrps27
  gRNA
gacactgtctaatccagctg

SEQ ID NO: 99574 - DNA, 20 bp, Artificial Sequence
  MKO10099574_B_Mrps27
  gRNA
ttcatacgctttgtccatta

SEQ ID NO: 99575 - DNA, 20 bp, Artificial Sequence
  MKO10099575_B_Mrps28
  gRNA
agagatcgtcctccacgata

SEQ ID NO: 99576 - DNA, 20 bp, Artificial Sequence
  MKO10099576_B_Mrps28
  gRNA
agcgcagtccattacttgct

SEQ ID NO: 99577 - DNA, 20 bp, Artificial Sequence
  MKO10099577_B_Mrps28
  gRNA
cagggtccggctgcgtctcc

SEQ ID NO: 99578 - DNA, 20 bp, Artificial Sequence
  MKO10099578_B_Mrps2
  gRNA
agatacgccattacagcatt

SEQ ID NO: 99579 - DNA, 20 bp, Artificial Sequence
  MKO10099579_B_Mrps2
  gRNA
gatctttaccgtcgccatcc

SEQ ID NO: 99580 - DNA, 20 bp, Artificial Sequence
  MKO10099580_B_Mrps2
  gRNA
cacggccggagcgggcgcca

SEQ ID NO: 99581 - DNA, 20 bp, Artificial Sequence
  MKO10099581_B_Mrps30
  gRNA
ctgctaccagttaaatactt

SEQ ID NO: 99582 - DNA, 20 bp, Artificial Sequence
  MKO10099582_B_Mrps30
  gRNA
ggtgaagaacgcattcctgc

SEQ ID NO: 99583 - DNA, 20 bp, Artificial Sequence
  MKO10099583_B_Mrps30
  gRNA
ggagcacaagctatgtacca

SEQ ID NO: 99584 - DNA, 20 bp, Artificial Sequence
  MKO10099584_B_Mrps31
  gRNA
gtgaaaacaccaaagccacg

SEQ ID NO: 99585 - DNA, 20 bp, Artificial Sequence
  MKO10099585_B_Mrps31
  gRNA
tgtccttaataatgtccagc

SEQ ID NO: 99586 - DNA, 20 bp, Artificial Sequence
  MKO10099586_B_Mrps31
  gRNA
tgtcttcgtcaaactgaatc

SEQ ID NO: 99587 - DNA, 20 bp, Artificial Sequence
  MKO10099587_B_Mrps33
  gRNA
cgcagtgcatactccgaaag

SEQ ID NO: 99588 - DNA, 20 bp, Artificial Sequence
  MKO10099588_B_Mrps33
  gRNA
tgactcaaagtccatgaaag

SEQ ID NO: 99589 - DNA, 20 bp, Artificial Sequence
  MKO10099589_B_Mrps34
  gRNA
tttcgcagtgaacgcagtga

SEQ ID NO: 99590 - DNA, 20 bp, Artificial Sequence
  MKO10099590_B_Mrps34
  gRNA
tggggcatcctgactttcaa

SEQ ID NO: 99591 - DNA, 20 bp, Artificial Sequence
  MKO10099591_B_Mrps34
  gRNA
gttctgcagaacttggacca

SEQ ID NO: 99592 - DNA, 20 bp, Artificial Sequence
  MKO10099592_B_Mrps35
  gRNA
actgggtatcccattcgaac

SEQ ID NO: 99593 - DNA, 20 bp, Artificial Sequence
  MKO10099593_B_Mrps35
  gRNA
acgtgtacctttctcctcat

SEQ ID NO: 99594 - DNA, 20 bp, Artificial Sequence
  MKO10099594_B_Mrps35
  gRNA
aggcactgtgcagcattgaa

SEQ ID NO: 99595 - DNA, 20 bp, Artificial Sequence
  MKO10099595_B_Mrps36
  gRNA
ttccgccaccagggtcgtgc

SEQ ID NO: 99596 - DNA, 20 bp, Artificial Sequence
  MKO10099596_B_Mrps36
  gRNA
gcaatttcacagcattctaa

SEQ ID NO: 99597 - DNA, 20 bp, Artificial Sequence
  MKO10099597_B_Mrps36
  gRNA
tccatttcctcttgagacat

SEQ ID NO: 99598 - DNA, 20 bp, Artificial Sequence
  MKO10099598_B_Mrps5
  gRNA
cggctacctccattgggtcc

SEQ ID NO: 99599 - DNA, 20 bp, Artificial Sequence
  MKO10099599_B_Mrps5
  gRNA
gctcaccttcaccaatgatc

SEQ ID NO: 99600 - DNA, 20 bp, Artificial Sequence
  MKO10099600_B_Mrps5
  gRNA
gtgaagacagctcttagcca

SEQ ID NO: 99601 - DNA, 20 bp, Artificial Sequence
  MKO10099601_B_Mrps6
  gRNA
ttatgctccgacaagtgctg

SEQ ID NO: 99602 - DNA, 20 bp, Artificial Sequence
  MKO10099602_B_Mrps6
  gRNA
acgtacaatagaatccctga

SEQ ID NO: 99603 - DNA, 20 bp, Artificial Sequence
  MKO10099603_B_Mrps6
  gRNA
gaatcaaagccaactcgtag

SEQ ID NO: 99604 - DNA, 20 bp, Artificial Sequence
  MKO10099604_B_Mrps7
  gRNA
cctgtaggggttccgttcaa

SEQ ID NO: 99605 - DNA, 20 bp, Artificial Sequence
  MKO10099605_B_Mrps7
  gRNA
gccgctatgcccccgaattc

SEQ ID NO: 99606 - DNA, 20 bp, Artificial Sequence
  MKO10099606_B_Mrps7
  gRNA
gaggcaacaaagttctggcc

SEQ ID NO: 99607 - DNA, 20 bp, Artificial Sequence
  MKO10099607_B_Mrps9
  gRNA
cagattgaagaattcaatat

SEQ ID NO: 99608 - DNA, 20 bp, Artificial Sequence
  MKO10099608_B_Mrps9
  gRNA
gaggcacttagccaacatga

SEQ ID NO: 99609 - DNA, 20 bp, Artificial Sequence
  MKO10099609_B_Mrps9
  gRNA
gcaaacttacctctttgttt

SEQ ID NO: 99610 - DNA, 20 bp, Artificial Sequence
  MKO10099610_B_Mrrf
  gRNA
aaggttgctctaaatcagat

SEQ ID NO: 99611 - DNA, 20 bp, Artificial Sequence
  MKO10099611_B_Mrrf
  gRNA
gcaccttacctctgggaagc

SEQ ID NO: 99612 - DNA, 20 bp, Artificial Sequence
  MKO10099612_B_Mrrf
  gRNA
ctgcttctcgatgagtctaa

SEQ ID NO: 99613 - DNA, 20 bp, Artificial Sequence
  MKO10099613_B_Mrs2
  gRNA
ataccatgagttagcactcc

SEQ ID NO: 99614 - DNA, 20 bp, Artificial Sequence
  MKO10099614_B_Mrs2
  gRNA
gctggctaaagtggcttgag

SEQ ID NO: 99615 - DNA, 20 bp, Artificial Sequence
  MKO10099615_B_Mrs2
  gRNA
gtcttctgatactagattat

SEQ ID NO: 99616 - DNA, 20 bp, Artificial Sequence
  MKO10099616_B_Mrto4
  gRNA
gaagcagaacctgatagaag

SEQ ID NO: 99617 - DNA, 20 bp, Artificial Sequence
  MKO10099617_B_Mrto4
  gRNA
ctttgtggtaggatgttctt

SEQ ID NO: 99618 - DNA, 20 bp, Artificial Sequence
  MKO10099618_B_Mrto4
  gRNA
ttgtctttgtattcatcaga

SEQ ID NO: 99619 - DNA, 20 bp, Artificial Sequence
  MKO10099619_B_Mrvi1
  gRNA
ccctcccacaatcgtcctga

SEQ ID NO: 99620 - DNA, 20 bp, Artificial Sequence
  MKO10099620_B_Mrvi1
  gRNA
ccggggggctcctcatcctc

SEQ ID NO: 99621 - DNA, 20 bp, Artificial Sequence
  MKO10099621_B_Mrvi1
  gRNA
caggtcaatgacatgccccg

SEQ ID NO: 99622 - DNA, 20 bp, Artificial Sequence
  MKO10099622_B_Ms4a10
  gRNA
accccgacaggaagatctcc

SEQ ID NO: 99623 - DNA, 20 bp, Artificial Sequence
  MKO10099623_B_Ms4a10
  gRNA
tgaagtgctggtatccactc

SEQ ID NO: 99624 - DNA, 20 bp, Artificial Sequence
  MKO10099624_B_Ms4a10
  gRNA
accagcacttcaacaccacc

SEQ ID NO: 99625 - DNA, 20 bp, Artificial Sequence
  MKO10099625_B_Ms4a13
  gRNA
tttgttgtgctcctaccccc

SEQ ID NO: 99626 - DNA, 20 bp, Artificial Sequence
  MKO10099626_B_Ms4a13
  gRNA
tgcagccagcctaacaatag

SEQ ID NO: 99627 - DNA, 20 bp, Artificial Sequence
  MKO10099627_B_Ms4a13
  gRNA
aatggcgaattccagggggt

SEQ ID NO: 99628 - DNA, 20 bp, Artificial Sequence
  MKO10099628_B_Ms4a15
  gRNA
ggcctcgccgaaccataagc

SEQ ID NO: 99629 - DNA, 20 bp, Artificial Sequence
  MKO10099629_B_Ms4a15
  gRNA
gacttaccaggcaactggtg

SEQ ID NO: 99630 - DNA, 20 bp, Artificial Sequence
  MKO10099630_B_Ms4a15
  gRNA
tgtccccgcgaaggctgcca

SEQ ID NO: 99631 - DNA, 20 bp, Artificial Sequence
  MKO10099631_B_Ms4a18
  gRNA
aattgagtgttgtagagttg

SEQ ID NO: 99632 - DNA, 20 bp, Artificial Sequence
  MKO10099632_B_Ms4a18
  gRNA
cagtgagattagtcctctga

SEQ ID NO: 99633 - DNA, 20 bp, Artificial Sequence
  MKO10099633_B_Ms4a18
  gRNA
aaagaattccaacagttgtg

SEQ ID NO: 99634 - DNA, 20 bp, Artificial Sequence
  MKO10099634_B_Ms4a1
  gRNA
ctgcagcagaaaaaacctcc

SEQ ID NO: 99635 - DNA, 20 bp, Artificial Sequence
  MKO10099635_B_Ms4a1
  gRNA
ctgttacagtactgtgtaga

SEQ ID NO: 99636 - DNA, 20 bp, Artificial Sequence
  MKO10099636_B_Ms4a1
  gRNA
ccaacttacagatttggatc

SEQ ID NO: 99637 - DNA, 20 bp, Artificial Sequence
  MKO10099637_B_Ms4a2
  gRNA
tccattctggggtgcagtgc

SEQ ID NO: 99638 - DNA, 20 bp, Artificial Sequence
  MKO10099638_B_Ms4a2
  gRNA
ggtttgatatgcctttgttt

SEQ ID NO: 99639 - DNA, 20 bp, Artificial Sequence
  MKO10099639_B_Ms4a2
  gRNA
gcttccaagagttcaatgtc

SEQ ID NO: 99640 - DNA, 20 bp, Artificial Sequence
  MKO10099640_B_Ms4a3
  gRNA
attggcaacccttgaaagcc

SEQ ID NO: 99641 - DNA, 20 bp, Artificial Sequence
  MKO10099641_B_Ms4a3
  gRNA
tggtcacggacagctccagc

SEQ ID NO: 99642 - DNA, 20 bp, Artificial Sequence
  MKO10099642_B_Ms4a3
  gRNA
ctagaatcagtattccattc

SEQ ID NO: 99643 - DNA, 20 bp, Artificial Sequence
  MKO10099643_B_Ms4a4b
  gRNA
gaccattaacatcactgaag

SEQ ID NO: 99644 - DNA, 20 bp, Artificial Sequence
  MKO10099644_B_Ms4a4b
  gRNA
cacctcacgggagttacaac

SEQ ID NO: 99645 - DNA, 20 bp, Artificial Sequence
  MKO10099645_B_Ms4a4b
  gRNA
agtgacacctacaaaatgcc

SEQ ID NO: 99646 - DNA, 20 bp, Artificial Sequence
  MKO10099646_B_Ms4a4c
  gRNA
ttctgaaccactcatttctg

SEQ ID NO: 99647 - DNA, 20 bp, Artificial Sequence
  MKO10099647_B_Ms4a4c
  gRNA
agtgaaacctacaaaaagcc

SEQ ID NO: 99648 - DNA, 20 bp, Artificial Sequence
  MKO10099648_B_Ms4a4c
  gRNA
catgaccagttcattgtctc

SEQ ID NO: 99649 - DNA, 20 bp, Artificial Sequence
  MKO10099649_B_Ms4a4d
  gRNA
accattattgatccccaaaa

SEQ ID NO: 99650 - DNA, 20 bp, Artificial Sequence
  MKO10099650_B_Ms4a4d
  gRNA
agtgaaacctacaaaagcca

SEQ ID NO: 99651 - DNA, 20 bp, Artificial Sequence
  MKO10099651_B_Ms4a4d
  gRNA
ttcctgttgtaactccagtg

SEQ ID NO: 99652 - DNA, 20 bp, Artificial Sequence
  MKO10099652_B_Ms4a5
  gRNA
ttcttgtagttcattaactc

SEQ ID NO: 99653 - DNA, 20 bp, Artificial Sequence
  MKO10099653_B_Ms4a5
  gRNA
aaaagttcatgattccaaac

SEQ ID NO: 99654 - DNA, 20 bp, Artificial Sequence
  MKO10099654_B_Ms4a5
  gRNA
ccttcctgattgctctgaaa

SEQ ID NO: 99655 - DNA, 20 bp, Artificial Sequence
  MKO10099655_B_Ms4a6b
  gRNA
actcgttcctgtccaagaat

SEQ ID NO: 99656 - DNA, 20 bp, Artificial Sequence
  MKO10099656_B_Ms4a6b
  gRNA
cagagtcactctaacatccc

SEQ ID NO: 99657 - DNA, 20 bp, Artificial Sequence
  MKO10099657_B_Ms4a6b
  gRNA
tctgagcagtttatagtctc

SEQ ID NO: 99658 - DNA, 20 bp, Artificial Sequence
  MKO10099658_B_Ms4a6c
  gRNA
acttacagtcagaatagact

SEQ ID NO: 99659 - DNA, 20 bp, Artificial Sequence
  MKO10099659_B_Ms4a6c
  gRNA
accctctctcaaccacagca

SEQ ID NO: 99660 - DNA, 20 bp, Artificial Sequence
  MKO10099660_B_Ms4a6c
  gRNA
tgatgatcagcatcactgaa

SEQ ID NO: 99661 - DNA, 20 bp, Artificial Sequence
  MKO10099661_B_Ms4a6d
  gRNA
gtagccagattctaacagga

SEQ ID NO: 99662 - DNA, 20 bp, Artificial Sequence
  MKO10099662_B_Ms4a6d
  gRNA
gatgctaatcagcagtgtgt

SEQ ID NO: 99663 - DNA, 20 bp, Artificial Sequence
  MKO10099663_B_Ms4a6d
  gRNA
gctctgtttccaccacagtg

SEQ ID NO: 99664 - DNA, 20 bp, Artificial Sequence
  MKO10099664_B_Ms4a7
  gRNA
ccccaaagcttgcaagtatc

SEQ ID NO: 99665 - DNA, 20 bp, Artificial Sequence
  MKO10099665_B_Ms4a7
  gRNA
gtttccaccactttgatatc

SEQ ID NO: 99666 - DNA, 20 bp, Artificial Sequence
  MKO10099666_B_Ms4a7
  gRNA
cacctattgtctgatagccc

SEQ ID NO: 99667 - DNA, 20 bp, Artificial Sequence
  MKO10099667_B_Ms4a8a
  gRNA
agcccaggccgatgtgcacc

SEQ ID NO: 99668 - DNA, 20 bp, Artificial Sequence
  MKO10099668_B_Ms4a8a
  gRNA
tccccttctggggaggcatc

SEQ ID NO: 99669 - DNA, 20 bp, Artificial Sequence
  MKO10099669_B_Ms4a8a
  gRNA
acagacatcagtatctcatc

SEQ ID NO: 99670 - DNA, 20 bp, Artificial Sequence
  MKO10099670_B_Msantd1
  gRNA
cgcctcggtctgggacgtag

SEQ ID NO: 99671 - DNA, 20 bp, Artificial Sequence
  MKO10099671_B_Msantd1
  gRNA
ccagcacacggcgcacctct

SEQ ID NO: 99672 - DNA, 20 bp, Artificial Sequence
  MKO10099672_B_Msantd1
  gRNA
ggagcgaatgatgagcctac

SEQ ID NO: 99673 - DNA, 20 bp, Artificial Sequence
  MKO10099673_B_Msantd2
  gRNA
gaattggctataacacccgc

SEQ ID NO: 99674 - DNA, 20 bp, Artificial Sequence
  MKO10099674_B_Msantd2
  gRNA
ccactactgttaataagtac

SEQ ID NO: 99675 - DNA, 20 bp, Artificial Sequence
  MKO10099675_B_Msantd2
  gRNA
cccgactgtaacacctgcga

SEQ ID NO: 99676 - DNA, 20 bp, Artificial Sequence
  MKO10099676_B_Msantd3
  gRNA
cgagttgtactcgtgggcca

SEQ ID NO: 99677 - DNA, 20 bp, Artificial Sequence
  MKO10099677_B_Msantd3
  gRNA
gggccggttaaacgaggaga

SEQ ID NO: 99678 - DNA, 20 bp, Artificial Sequence
  MKO10099678_B_Msantd3
  gRNA
gaaagagttcgggccctttc

SEQ ID NO: 99679 - DNA, 20 bp, Artificial Sequence
  MKO10099679_B_Msantd4
  gRNA
aataaacgtgatgaagcgaa

SEQ ID NO: 99680 - DNA, 20 bp, Artificial Sequence
  MKO10099680_B_Msantd4
  gRNA
aaaacgccgacttgatattg

SEQ ID NO: 99681 - DNA, 20 bp, Artificial Sequence
  MKO10099681_B_Msantd4
  gRNA
ggagcacgagcgcttacagc

SEQ ID NO: 99682 - DNA, 20 bp, Artificial Sequence
  MKO10099682_B_Msc
  gRNA
acgtctttgctgtcagagtc

SEQ ID NO: 99683 - DNA, 20 bp, Artificial Sequence
  MKO10099683_B_Msc
  gRNA
ataggcgatgtccaccggct

SEQ ID NO: 99684 - DNA, 20 bp, Artificial Sequence
  MKO10099684_B_Msc
  gRNA
gaagaagccgctcccgccta

SEQ ID NO: 99685 - DNA, 20 bp, Artificial Sequence
  MKO10099685_B_Msgn1
  gRNA
gcaggtaattccggagcgtg

SEQ ID NO: 99686 - DNA, 20 bp, Artificial Sequence
  MKO10099686_B_Msgn1
  gRNA
ccgatgccctccacacgctc

SEQ ID NO: 99687 - DNA, 20 bp, Artificial Sequence
  MKO10099687_B_Msgn1
  gRNA
gagttccccgatgtacttga

SEQ ID NO: 99688 - DNA, 20 bp, Artificial Sequence
  MKO10099688_B_Msh2
  gRNA
tagtgctgccctaccagaga

SEQ ID NO: 99689 - DNA, 20 bp, Artificial Sequence
  MKO10099689_B_Msh2
  gRNA
ttatcagacgattcaaattt

SEQ ID NO: 99690 - DNA, 20 bp, Artificial Sequence
  MKO10099690_B_Msh2
  gRNA
tgctaagcacaacactctgc

SEQ ID NO: 99691 - DNA, 20 bp, Artificial Sequence
  MKO10099691_B_Msh3
  gRNA
tctgcaacgtgcaaagaatg

SEQ ID NO: 99692 - DNA, 20 bp, Artificial Sequence
  MKO10099692_B_Msh3
  gRNA
tcagtagcagctcaccaccc

SEQ ID NO: 99693 - DNA, 20 bp, Artificial Sequence
  MKO10099693_B_Msh3
  gRNA
tctaagtactgcagttctaa

SEQ ID NO: 99694 - DNA, 20 bp, Artificial Sequence
  MKO10099694_B_Msh4
  gRNA
acaccacaagtaggatattc

SEQ ID NO: 99695 - DNA, 20 bp, Artificial Sequence
  MKO10099695_B_Msh4
  gRNA
gtcaaatactgcttgtgttg

SEQ ID NO: 99696 - DNA, 20 bp, Artificial Sequence
  MKO10099696_B_Msh4
  gRNA
ttaatttcactacagtccaa

SEQ ID NO: 99697 - DNA, 20 bp, Artificial Sequence
  MKO10099697_B_Msh5
  gRNA
agtcatagcctcatcctgtt

SEQ ID NO: 99698 - DNA, 20 bp, Artificial Sequence
  MKO10099698_B_Msh5
  gRNA
tgtcatagtaagcaatgccc

SEQ ID NO: 99699 - DNA, 20 bp, Artificial Sequence
  MKO10099699_B_Msh5
  gRNA
agacgctgtttgcttatctc

SEQ ID NO: 99700 - DNA, 20 bp, Artificial Sequence
  MKO10099700_B_Msh6
  gRNA
gtagacttgccccccatatt

SEQ ID NO: 99701 - DNA, 20 bp, Artificial Sequence
  MKO10099701_B_Msh6
  gRNA
ccggatgaacgttccatcaa

SEQ ID NO: 99702 - DNA, 20 bp, Artificial Sequence
  MKO10099702_B_Msh6
  gRNA
agcaatgcaacgtgcagatg

SEQ ID NO: 99703 - DNA, 20 bp, Artificial Sequence
  MKO10099703_B_Msi1
  gRNA
tttctcgcagattgacccca

SEQ ID NO: 99704 - DNA, 20 bp, Artificial Sequence
  MKO10099704_B_Msi1
  gRNA
accttaggctgtgctcttcg

SEQ ID NO: 99705 - DNA, 20 bp, Artificial Sequence
  MKO10099705_B_Msi1
  gRNA
actctttcacctccccgaac

SEQ ID NO: 99706 - DNA, 20 bp, Artificial Sequence
  MKO10099706_B_Msi2
  gRNA
aacgactcccagcacgaccc

SEQ ID NO: 99707 - DNA, 20 bp, Artificial Sequence
  MKO10099707_B_Msi2
  gRNA
gcaagtgtagataaagtatt

SEQ ID NO: 99708 - DNA, 20 bp, Artificial Sequence
  MKO10099708_B_Msi2
  gRNA
aatactttatctacacttgc

SEQ ID NO: 99709 - DNA, 20 bp, Artificial Sequence
  MKO10099709_B_Msl1
  gRNA
cctaataggaaaaccccatt

SEQ ID NO: 99710 - DNA, 20 bp, Artificial Sequence
  MKO10099710_B_Msl1
  gRNA
tgggaggtctcgcaaagctc

SEQ ID NO: 99711 - DNA, 20 bp, Artificial Sequence
  MKO10099711_B_Msl1
  gRNA
gtttctcctgcaacacttga

SEQ ID NO: 99712 - DNA, 20 bp, Artificial Sequence
  MKO10099712_B_Msl2
  gRNA
cagccaaaaatgtcgttaca

SEQ ID NO: 99713 - DNA, 20 bp, Artificial Sequence
  MKO10099713_B_Msl2
  gRNA
ctagtgctcaactacgaccc

SEQ ID NO: 99714 - DNA, 20 bp, Artificial Sequence
  MKO10099714_B_Msl2
  gRNA
cctccgcgacgtcgctgcga

SEQ ID NO: 99715 - DNA, 20 bp, Artificial Sequence
  MKO10099715_B_Msl3l2
  gRNA
cttcgaccacgcgctcccct

SEQ ID NO: 99716 - DNA, 20 bp, Artificial Sequence
  MKO10099716_B_Msl3l2
  gRNA
ccagcacgctcgccgagaag

SEQ ID NO: 99717 - DNA, 20 bp, Artificial Sequence
  MKO10099717_B_Msl3l2
  gRNA
actgttactacatcaaccgc

SEQ ID NO: 99718 - DNA, 20 bp, Artificial Sequence
  MKO10099718_B_Msl3
  gRNA
tttaagacagagtcgacacc

SEQ ID NO: 99719 - DNA, 20 bp, Artificial Sequence
  MKO10099719_B_Msl3
  gRNA
atgactgttactatatcaac

SEQ ID NO: 99720 - DNA, 20 bp, Artificial Sequence
  MKO10099720_B_Msl3
  gRNA
ccaatttgcgctgtaatctc

SEQ ID NO: 99721 - DNA, 20 bp, Artificial Sequence
  MKO10099721_B_Mslnl
  gRNA
acccagctgtgcagcgaggt

SEQ ID NO: 99722 - DNA, 20 bp, Artificial Sequence
  MKO10099722_B_Mslnl
  gRNA
cgctcacctgacccatgtgt

SEQ ID NO: 99723 - DNA, 20 bp, Artificial Sequence
  MKO10099723_B_Mslnl
  gRNA
tgccctgcagcgcacagcct

SEQ ID NO: 99724 - DNA, 20 bp, Artificial Sequence
  MKO10099724_B_Msln
  gRNA
tacagccatagccagcccct

SEQ ID NO: 99725 - DNA, 20 bp, Artificial Sequence
  MKO10099725_B_Msln
  gRNA
aacccacctggcaaagtcag

SEQ ID NO: 99726 - DNA, 20 bp, Artificial Sequence
  MKO10099726_B_Msln
  gRNA
gttcacagcatggaggagtg

SEQ ID NO: 99727 - DNA, 20 bp, Artificial Sequence
  MKO10099727_B_Msmb
  gRNA
tctcttattccttgctacca

SEQ ID NO: 99728 - DNA, 20 bp, Artificial Sequence
  MKO10099728_B_Msmb
  gRNA
agcatttccttaacactccc

SEQ ID NO: 99729 - DNA, 20 bp, Artificial Sequence
  MKO10099729_B_Msmb
  gRNA
ttaccatcagacatttgatt

SEQ ID NO: 99730 - DNA, 20 bp, Artificial Sequence
  MKO10099730_B_Msmp
  gRNA
ccagcctccgaggatcccct

SEQ ID NO: 99731 - DNA, 20 bp, Artificial Sequence
  MKO10099731_B_Msmp
  gRNA
gagcagcaggaatggcccta

SEQ ID NO: 99732 - DNA, 20 bp, Artificial Sequence
  MKO10099732_B_Msmp
  gRNA
cctagctccctgccactacg

SEQ ID NO: 99733 - DNA, 20 bp, Artificial Sequence
  MKO10099733_B_Msn
  gRNA
cagtgtgcgtgtcaccacca

SEQ ID NO: 99734 - DNA, 20 bp, Artificial Sequence
  MKO10099734_B_Msn
  gRNA
gccattcagcccaacaccac

SEQ ID NO: 99735 - DNA, 20 bp, Artificial Sequence
  MKO10099735_B_Msn
  gRNA
ttccaggtggtgaaaactat

SEQ ID NO: 99736 - DNA, 20 bp, Artificial Sequence
  MKO10099736_B_Msr1
  gRNA
gcagtactaatacctgttgt

SEQ ID NO: 99737 - DNA, 20 bp, Artificial Sequence
  MKO10099737_B_Msr1
  gRNA
ggagaagttgaagtccttca

SEQ ID NO: 99738 - DNA, 20 bp, Artificial Sequence
  MKO10099738_B_Msr1
  gRNA
tcagcatcctcttgttcatg

SEQ ID NO: 99739 - DNA, 20 bp, Artificial Sequence
  MKO10099739_B_Msra
  gRNA
tcaccttcaggcatgcgcca

SEQ ID NO: 99740 - DNA, 20 bp, Artificial Sequence
  MKO10099740_B_Msra
  gRNA
cgcaagttctgggtcttgaa

SEQ ID NO: 99741 - DNA, 20 bp, Artificial Sequence
  MKO10099741_B_Msra
  gRNA
tcaacccaagtgggctttgc

SEQ ID NO: 99742 - DNA, 20 bp, Artificial Sequence
  MKO10099742_B_Msrb1
  gRNA
tcactgaagttcgtccctaa

SEQ ID NO: 99743 - DNA, 20 bp, Artificial Sequence
  MKO10099743_B_Msrb1
  gRNA
agtacgcacactcatccccg

SEQ ID NO: 99744 - DNA, 20 bp, Artificial Sequence
  MKO10099744_B_Msrb1
  gRNA
tacctggctcgaagtgattc

SEQ ID NO: 99745 - DNA, 20 bp, Artificial Sequence
  MKO10099745_B_Msrb2
  gRNA
catggaggtggtctgcaagc

SEQ ID NO: 99746 - DNA, 20 bp, Artificial Sequence
  MKO10099746_B_Msrb2
  gRNA
cctgatggacccaagcccac

SEQ ID NO: 99747 - DNA, 20 bp, Artificial Sequence
  MKO10099747_B_Msrb2
  gRNA
gctctctaagcgaagcagac

SEQ ID NO: 99748 - DNA, 20 bp, Artificial Sequence
  MKO10099748_B_Msrb3
  gRNA
cctacagtaccatgtcactc

SEQ ID NO: 99749 - DNA, 20 bp, Artificial Sequence
  MKO10099749_B_Msrb3
  gRNA
tcagaaaccaaatttgactc

SEQ ID NO: 99750 - DNA, 20 bp, Artificial Sequence
  MKO10099750_B_Msrb3
  gRNA
tacacacatcacaaagatcc

SEQ ID NO: 99751 - DNA, 20 bp, Artificial Sequence
  MKO10099751_B_Mss51
  gRNA
cctggaacaattcagcttag

SEQ ID NO: 99752 - DNA, 20 bp, Artificial Sequence
  MKO10099752_B_Mss51
  gRNA
cacgtcacctcttacagtgc

SEQ ID NO: 99753 - DNA, 20 bp, Artificial Sequence
  MKO10099753_B_Mss51
  gRNA
gagacatttcttattcgttc

SEQ ID NO: 99754 - DNA, 20 bp, Artificial Sequence
  MKO10099754_B_Mst1r
  gRNA
agcctcgtagtgccccttag

SEQ ID NO: 99755 - DNA, 20 bp, Artificial Sequence
  MKO10099755_B_Mst1r
  gRNA
cggctgacatcccgatgaac

SEQ ID NO: 99756 - DNA, 20 bp, Artificial Sequence
  MKO10099756_B_Mst1r
  gRNA
ccacgctagcttcacccgtg

SEQ ID NO: 99757 - DNA, 20 bp, Artificial Sequence
  MKO10099757_B_Mst1
  gRNA
ttatgtgcggacctgcatta

SEQ ID NO: 99758 - DNA, 20 bp, Artificial Sequence
  MKO10099758_B_Mst1
  gRNA
ccactcaccgacagtccaga

SEQ ID NO: 99759 - DNA, 20 bp, Artificial Sequence
  MKO10099759_B_Mst1
  gRNA
cagccgcttaccctccctgc

SEQ ID NO: 99760 - DNA, 20 bp, Artificial Sequence
  MKO10099760_B_Mstn
  gRNA
gtgctgccgctaccccctca

SEQ ID NO: 99761 - DNA, 20 bp, Artificial Sequence
  MKO10099761_B_Mstn
  gRNA
ataccttgtaccgtctttca

SEQ ID NO: 99762 - DNA, 20 bp, Artificial Sequence
  MKO10099762_B_Mstn
  gRNA
gatcttgctgtaaccttccc

SEQ ID NO: 99763 - DNA, 20 bp, Artificial Sequence
  MKO10099763_B_Msto1
  gRNA
cagggagtgcggagtagtga

SEQ ID NO: 99764 - DNA, 20 bp, Artificial Sequence
  MKO10099764_B_Msto1
  gRNA
ctactgcagcctctagctgt

SEQ ID NO: 99765 - DNA, 20 bp, Artificial Sequence
  MKO10099765_B_Msto1
  gRNA
ccctggaggtttgggttctt

SEQ ID NO: 99766 - DNA, 20 bp, Artificial Sequence
  MKO10099766_B_Msx1
  gRNA
cggatgcgccctcctcgccg

SEQ ID NO: 99767 - DNA, 20 bp, Artificial Sequence
  MKO10099767_B_Msx1
  gRNA
tagagtcccacgggcgctac

SEQ ID NO: 99768 - DNA, 20 bp, Artificial Sequence
  MKO10099768_B_Msx1
  gRNA
cctgtctattgccgagcgcg

SEQ ID NO: 99769 - DNA, 20 bp, Artificial Sequence
  MKO10099769_B_Msx2
  gRNA
gaactcggcccgctctgcta

SEQ ID NO: 99770 - DNA, 20 bp, Artificial Sequence
  MKO10099770_B_Msx2
  gRNA
tggcaccgcgggcgattcct

SEQ ID NO: 99771 - DNA, 20 bp, Artificial Sequence
  MKO10099771_B_Msx2
  gRNA
aagtcggaaaattccgaaga

SEQ ID NO: 99772 - DNA, 20 bp, Artificial Sequence
  MKO10099772_B_Msx3
  gRNA
cgttcatgtcgaatgtcgcc

SEQ ID NO: 99773 - DNA, 20 bp, Artificial Sequence
  MKO10099773_B_Msx3
  gRNA
aaccgcgttgccgccgaaag

SEQ ID NO: 99774 - DNA, 20 bp, Artificial Sequence
  MKO10099774_B_Msx3
  gRNA
gatcctcgccgggcctgtcg

SEQ ID NO: 99775 - DNA, 20 bp, Artificial Sequence
  MKO10099775_B_Mt1
  gRNA
tcccaactcactcttcttgc

SEQ ID NO: 99776 - DNA, 20 bp, Artificial Sequence
  MKO10099776_B_Mt1
  gRNA
cccaactgctcctgctccac

SEQ ID NO: 99777 - DNA, 20 bp, Artificial Sequence
  MKO10099777_B_Mt1
  gRNA
ggtgcacttgcagttcttgc

SEQ ID NO: 99778 - DNA, 20 bp, Artificial Sequence
  MKO10099778_B_Mt2
  gRNA
cccaactgctcctgtgcctc

SEQ ID NO: 99779 - DNA, 20 bp, Artificial Sequence
  MKO10099779_B_Mt2
  gRNA
gagcacttcgcacagcccac

SEQ ID NO: 99780 - DNA, 20 bp, Artificial Sequence
  MKO10099780_B_Mt2
  gRNA
tttgcattgtttgcatttgc

SEQ ID NO: 99781 - DNA, 20 bp, Artificial Sequence
  MKO10099781_B_Mt3
  gRNA
aaggggctcaccagtaggac

SEQ ID NO: 99782 - DNA, 20 bp, Artificial Sequence
  MKO10099782_B_Mt3
  gRNA
gccaaggactgtgtgtgcaa

SEQ ID NO: 99783 - DNA, 20 bp, Artificial Sequence
  MKO10099783_B_Mt3
  gRNA
aggtggttcctgcacctgct

SEQ ID NO: 99784 - DNA, 20 bp, Artificial Sequence
  MKO10099784_B_Mt4
  gRNA
gcacacttggcacagcctgg

SEQ ID NO: 99785 - DNA, 20 bp, Artificial Sequence
  MKO10099785_B_Mt4
  gRNA
ctaggagggatctgcatctg

SEQ ID NO: 99786 - DNA, 20 bp, Artificial Sequence
  MKO10099786_B_Mt4
  gRNA
tgctgtccctgctgtccccc

SEQ ID NO: 99787 - DNA, 20 bp, Artificial Sequence
  MKO10099787_B_Mta1
  gRNA
gagactccaactgccgagac

SEQ ID NO: 99788 - DNA, 20 bp, Artificial Sequence
  MKO10099788_B_Mta1
  gRNA
ttccagcagcctcatcgcgc

SEQ ID NO: 99789 - DNA, 20 bp, Artificial Sequence
  MKO10099789_B_Mta1
  gRNA
caagtcctacttggagcgtg

SEQ ID NO: 99790 - DNA, 20 bp, Artificial Sequence
  MKO10099790_B_Mta2
  gRNA
ttctagtagcctcaacagct

SEQ ID NO: 99791 - DNA, 20 bp, Artificial Sequence
  MKO10099791_B_Mta2
  gRNA
acggattgaggagctcaata

SEQ ID NO: 99792 - DNA, 20 bp, Artificial Sequence
  MKO10099792_B_Mta2
  gRNA
cactattctaggggagtttg

SEQ ID NO: 99793 - DNA, 20 bp, Artificial Sequence
  MKO10099793_B_Mta3
  gRNA
ttagactgcaagtggcaatg

SEQ ID NO: 99794 - DNA, 20 bp, Artificial Sequence
  MKO10099794_B_Mta3
  gRNA
gcaacccgtacctcatcaga

SEQ ID NO: 99795 - DNA, 20 bp, Artificial Sequence
  MKO10099795_B_Mta3
  gRNA
tcacttactagcatgcttgt

SEQ ID NO: 99796 - DNA, 20 bp, Artificial Sequence
  MKO10099796_B_Mtap7d3
  gRNA
aagagatcgtcaagtacacc

SEQ ID NO: 99797 - DNA, 20 bp, Artificial Sequence
  MKO10099797_B_Mtap7d3
  gRNA
ctgttgttctctgcgttctt

SEQ ID NO: 99798 - DNA, 20 bp, Artificial Sequence
  MKO10099798_B_Mtap7d3
  gRNA
agaaaaacaccgtaaactga

SEQ ID NO: 99799 - DNA, 20 bp, Artificial Sequence
  MKO10099799_B_Mtap
  gRNA
ctcccctagattggaataat

SEQ ID NO: 99800 - DNA, 20 bp, Artificial Sequence
  MKO10099800_B_Mtap
  gRNA
ggcaaaacggttcagccatg

SEQ ID NO: 99801 - DNA, 20 bp, Artificial Sequence
  MKO10099801_B_Mtap
  gRNA
atcttcctaggacatcccta

SEQ ID NO: 99802 - DNA, 20 bp, Artificial Sequence
  MKO10099802_B_Mtbp
  gRNA
ccagatgacagtacattccc

SEQ ID NO: 99803 - DNA, 20 bp, Artificial Sequence
  MKO10099803_B_Mtbp
  gRNA
ccagggaatgtactgtcatc

SEQ ID NO: 99804 - DNA, 20 bp, Artificial Sequence
  MKO10099804_B_Mtbp
  gRNA
caccgcaaagaaccacttcc

SEQ ID NO: 99805 - DNA, 20 bp, Artificial Sequence
  MKO10099805_B_Mtch1
  gRNA
tgctcttaccgtgtaaggga

SEQ ID NO: 99806 - DNA, 20 bp, Artificial Sequence
  MKO10099806_B_Mtch1
  gRNA
ctgccgagcttcttcaccta

SEQ ID NO: 99807 - DNA, 20 bp, Artificial Sequence
  MKO10099807_B_Mtch1
  gRNA
ctcactcaagaaagttgtga

SEQ ID NO: 99808 - DNA, 20 bp, Artificial Sequence
  MKO10099808_B_Mtch2
  gRNA
ttgactccaagactgtgttc

SEQ ID NO: 99809 - DNA, 20 bp, Artificial Sequence
  MKO10099809_B_Mtch2
  gRNA
ttacctgtaagactttccca

SEQ ID NO: 99810 - DNA, 20 bp, Artificial Sequence
  MKO10099810_B_Mtch2
  gRNA
ctcttacctctttgataact

SEQ ID NO: 99811 - DNA, 20 bp, Artificial Sequence
  MKO10099811_B_Mtcp1
  gRNA
tgttgtgctcgatatcccaa

SEQ ID NO: 99812 - DNA, 20 bp, Artificial Sequence
  MKO10099812_B_Mtcp1
  gRNA
tacataccaggttaatcatc

SEQ ID NO: 99813 - DNA, 20 bp, Artificial Sequence
  MKO10099813_B_Mtcp1
  gRNA
ctgacaggtcaggggagtac

SEQ ID NO: 99814 - DNA, 20 bp, Artificial Sequence
  MKO10099814_B_Mtdh
  gRNA
gataaagtgctgactgattc

SEQ ID NO: 99815 - DNA, 20 bp, Artificial Sequence
  MKO10099815_B_Mtdh
  gRNA
aaaaggagattctacactgc

SEQ ID NO: 99816 - DNA, 20 bp, Artificial Sequence
  MKO10099816_B_Mtdh
  gRNA
caagttagcaactttaagtc

SEQ ID NO: 99817 - DNA, 20 bp, Artificial Sequence
  MKO10099817_B_Mterf1a
  gRNA
gaagttattccttctgtcca

SEQ ID NO: 99818 - DNA, 20 bp, Artificial Sequence
  MKO10099818_B_Mterf1a
  gRNA
ttctctttgatttaagagac

SEQ ID NO: 99819 - DNA, 20 bp, Artificial Sequence
  MKO10099819_B_Mterf1a
  gRNA
ttatggcatcaagaaacatc

SEQ ID NO: 99820 - DNA, 20 bp, Artificial Sequence
  MKO10099820_B_Mterf1b
  gRNA
aactttctctttgatttaag

SEQ ID NO: 99821 - DNA, 20 bp, Artificial Sequence
  MKO10099821_B_Mterf1b
  gRNA
gaagatattccttctgtcca

SEQ ID NO: 99822 - DNA, 20 bp, Artificial Sequence
  MKO10099822_B_Mterf1b
  gRNA
ttcatatcttctctgactcc

SEQ ID NO: 99823 - DNA, 20 bp, Artificial Sequence
  MKO10099823_B_Mterfd1
  gRNA
tccgttacagtcagtttcag

SEQ ID NO: 99824 - DNA, 20 bp, Artificial Sequence
  MKO10099824_B_Mterfd1
  gRNA
tacgtaatctgcaagtgtga

SEQ ID NO: 99825 - DNA, 20 bp, Artificial Sequence
  MKO10099825_B_Mterfd1
  gRNA
atttctgttgagcttctccg

SEQ ID NO: 99826 - DNA, 20 bp, Artificial Sequence
  MKO10099826_B_Mterfd2
  gRNA
atcgtctactggccctctcc

SEQ ID NO: 99827 - DNA, 20 bp, Artificial Sequence
  MKO10099827_B_Mterfd2
  gRNA
tccagttaccttcggaagct

SEQ ID NO: 99828 - DNA, 20 bp, Artificial Sequence
  MKO10099828_B_Mterfd2
  gRNA
ggtaccgtccaaggcgctcc

SEQ ID NO: 99829 - DNA, 20 bp, Artificial Sequence
  MKO10099829_B_Mterfd3
  gRNA
cagtatattagaacgctgtc

SEQ ID NO: 99830 - DNA, 20 bp, Artificial Sequence
  MKO10099830_B_Mterfd3
  gRNA
ccgctgctgttaacaccaaa

SEQ ID NO: 99831 - DNA, 20 bp, Artificial Sequence
  MKO10099831_B_Mterfd3
  gRNA
tcaacctttaatgatgccac

SEQ ID NO: 99832 - DNA, 20 bp, Artificial Sequence
  MKO10099832_B_Mtf1
  gRNA
aagcacattcggacccatac

SEQ ID NO: 99833 - DNA, 20 bp, Artificial Sequence
  MKO10099833_B_Mtf1
  gRNA
cgtcttctcacagccgttgc

SEQ ID NO: 99834 - DNA, 20 bp, Artificial Sequence
  MKO10099834_B_Mtf1
  gRNA
taaacttaccagtgtgcgtc

SEQ ID NO: 99835 - DNA, 20 bp, Artificial Sequence
  MKO10099835_B_Mtf2
  gRNA
gagctgcttcatcatatttg

SEQ ID NO: 99836 - DNA, 20 bp, Artificial Sequence
  MKO10099836_B_Mtf2
  gRNA
gaccatttccccactcccag

SEQ ID NO: 99837 - DNA, 20 bp, Artificial Sequence
  MKO10099837_B_Mtf2
  gRNA
gttccaaatcctgggttctc

SEQ ID NO: 99838 - DNA, 20 bp, Artificial Sequence
  MKO10099838_B_Mtfmt
  gRNA
ctgattcagagacggcaaag

SEQ ID NO: 99839 - DNA, 20 bp, Artificial Sequence
  MKO10099839_B_Mtfmt
  gRNA
ctgcccgaaagtctgaacaa

SEQ ID NO: 99840 - DNA, 20 bp, Artificial Sequence
  MKO10099840_B_Mtfmt
  gRNA
ggagcgggaccacgccacct

SEQ ID NO: 99841 - DNA, 20 bp, Artificial Sequence
  MKO10099841_B_Mtfp1
  gRNA
gcgcaagctgtacccgtcag

SEQ ID NO: 99842 - DNA, 20 bp, Artificial Sequence
  MKO10099842_B_Mtfp1
  gRNA
gggggaggctttccgctcgc

SEQ ID NO: 99843 - DNA, 20 bp, Artificial Sequence
  MKO10099843_B_Mtfp1
  gRNA
ctgacgggtacagcttgcgc

SEQ ID NO: 99844 - DNA, 20 bp, Artificial Sequence
  MKO10099844_B_Mtfr1l
  gRNA
gcctcagtgcccaaccttcg

SEQ ID NO: 99845 - DNA, 20 bp, Artificial Sequence
  MKO10099845_B_Mtfr1l
  gRNA
cgaagagacattcgaacttc

SEQ ID NO: 99846 - DNA, 20 bp, Artificial Sequence
  MKO10099846_B_Mtfr1l
  gRNA
tgttctggtttgcaacactc

SEQ ID NO: 99847 - DNA, 20 bp, Artificial Sequence
  MKO10099847_B_Mtfr1
  gRNA
tttccttaggtactatggtc

SEQ ID NO: 99848 - DNA, 20 bp, Artificial Sequence
  MKO10099848_B_Mtfr1
  gRNA
tcgctggccagcgtcctctc

SEQ ID NO: 99849 - DNA, 20 bp, Artificial Sequence
  MKO10099849_B_Mtfr1
  gRNA
caagggcagagatcttctgc

SEQ ID NO: 99850 - DNA, 20 bp, Artificial Sequence
  MKO10099850_B_Mtfr2
  gRNA
ttactcgcagacatagtcta

SEQ ID NO: 99851 - DNA, 20 bp, Artificial Sequence
  MKO10099851_B_Mtfr2
  gRNA
aaatatattaagaaacgtgc

SEQ ID NO: 99852 - DNA, 20 bp, Artificial Sequence
  MKO10099852_B_Mtfr2
  gRNA
ttaccgaaatctgagacaac

SEQ ID NO: 99853 - DNA, 20 bp, Artificial Sequence
  MKO10099853_B_Mtg1
  gRNA
agagggtttcgacctgaaaa

SEQ ID NO: 99854 - DNA, 20 bp, Artificial Sequence
  MKO10099854_B_Mtg1
  gRNA
tcgtgaagagaacgttgctc

SEQ ID NO: 99855 - DNA, 20 bp, Artificial Sequence
  MKO10099855_B_Mtg1
  gRNA
tctgcttgtcctcaacaaaa

SEQ ID NO: 99856 - DNA, 20 bp, Artificial Sequence
  MKO10099856_B_Mtg2
  gRNA
caccggagagtgctggtccg

SEQ ID NO: 99857 - DNA, 20 bp, Artificial Sequence
  MKO10099857_B_Mtg2
  gRNA
tggtgccaccctctacattc

SEQ ID NO: 99858 - DNA, 20 bp, Artificial Sequence
  MKO10099858_B_Mtg2
  gRNA
cttccacagtgagccccgca

SEQ ID NO: 99859 - DNA, 20 bp, Artificial Sequence
  MKO10099859_B_Mthfd1l
  gRNA
cttcatcaaattgtcatcac

SEQ ID NO: 99860 - DNA, 20 bp, Artificial Sequence
  MKO10099860_B_Mthfd1l
  gRNA
tatgaaccagaatttggcca

SEQ ID NO: 99861 - DNA, 20 bp, Artificial Sequence
  MKO10099861_B_Mthfd1l
  gRNA
atgaatcttcagagatctga

SEQ ID NO: 99862 - DNA, 20 bp, Artificial Sequence
  MKO10099862_B_Mthfd1
  gRNA
cacgctcacctcggactctg

SEQ ID NO: 99863 - DNA, 20 bp, Artificial Sequence
  MKO10099863_B_Mthfd1
  gRNA
atatgtcatctccctgaacg

SEQ ID NO: 99864 - DNA, 20 bp, Artificial Sequence
  MKO10099864_B_Mthfd1
  gRNA
aagaacatccacagagtccg

SEQ ID NO: 99865 - DNA, 20 bp, Artificial Sequence
  MKO10099865_B_Mthfd2l
  gRNA
ggagagcacgagcgtcctgg

SEQ ID NO: 99866 - DNA, 20 bp, Artificial Sequence
  MKO10099866_B_Mthfd2l
  gRNA
gctccagaaaaggacgttga

SEQ ID NO: 99867 - DNA, 20 bp, Artificial Sequence
  MKO10099867_B_Mthfd2l
  gRNA
ctgccactgccagtgccgtt

SEQ ID NO: 99868 - DNA, 20 bp, Artificial Sequence
  MKO10099868_B_Mthfd2
  gRNA
gtgtgcagcaacattgcaat

SEQ ID NO: 99869 - DNA, 20 bp, Artificial Sequence
  MKO10099869_B_Mthfd2
  gRNA
tttgcaggcattccaacctt

SEQ ID NO: 99870 - DNA, 20 bp, Artificial Sequence
  MKO10099870_B_Mthfd2
  gRNA
gccacacctcagtgtcattc

SEQ ID NO: 99871 - DNA, 20 bp, Artificial Sequence
  MKO10099871_B_Mthfr
  gRNA
acctgaatagggaagatccc

SEQ ID NO: 99872 - DNA, 20 bp, Artificial Sequence
  MKO10099872_B_Mthfr
  gRNA
gatgtgcttcaccaggtctg

SEQ ID NO: 99873 - DNA, 20 bp, Artificial Sequence
  MKO10099873_B_Mthfr
  gRNA
gtcaaaatagtcagcaaact

SEQ ID NO: 99874 - DNA, 20 bp, Artificial Sequence
  MKO10099874_B_Mthfsd
  gRNA
gcgtttctctgaggagcgtc

SEQ ID NO: 99875 - DNA, 20 bp, Artificial Sequence
  MKO10099875_B_Mthfsd
  gRNA
gatcctgtgatgaacgggtc

SEQ ID NO: 99876 - DNA, 20 bp, Artificial Sequence
  MKO10099876_B_Mthfsd
  gRNA
ttccccgacccgttcatcac

SEQ ID NO: 99877 - DNA, 20 bp, Artificial Sequence
  MKO10099877_B_Mthfs
  gRNA
gccaggaatggcggcggtca

SEQ ID NO: 99878 - DNA, 20 bp, Artificial Sequence
  MKO10099878_B_Mthfs
  gRNA
agatgccttaccagtggata

SEQ ID NO: 99879 - DNA, 20 bp, Artificial Sequence
  MKO10099879_B_Mthfs
  gRNA
cttgacctcatcttccttcc

SEQ ID NO: 99880 - DNA, 20 bp, Artificial Sequence
  MKO10099880_B_Mtif2
  gRNA
ggaggcatcactcaacacat

SEQ ID NO: 99881 - DNA, 20 bp, Artificial Sequence
  MKO10099881_B_Mtif2
  gRNA
actcacatttagatgaagtc

SEQ ID NO: 99882 - DNA, 20 bp, Artificial Sequence
  MKO10099882_B_Mtif2
  gRNA
tggggtaatgaaacaaactg

SEQ ID NO: 99883 - DNA, 20 bp, Artificial Sequence
  MKO10099883_B_Mtif3
  gRNA
acgttcaagtcacgataaag

SEQ ID NO: 99884 - DNA, 20 bp, Artificial Sequence
  MKO10099884_B_Mtif3
  gRNA
actttgagcaaagacgacga

SEQ ID NO: 99885 - DNA, 20 bp, Artificial Sequence
  MKO10099885_B_Mtif3
  gRNA
cttgagaaggttgctatgtc

SEQ ID NO: 99886 - DNA, 20 bp, Artificial Sequence
  MKO10099886_B_Mtl5
  gRNA
gcctggaaagctgcgtcttc

SEQ ID NO: 99887 - DNA, 20 bp, Artificial Sequence
  MKO10099887_B_Mtl5
  gRNA
gaagttaaatctcatcacac

SEQ ID NO: 99888 - DNA, 20 bp, Artificial Sequence
  MKO10099888_B_Mtl5
  gRNA
caacaggattcctgagccag

SEQ ID NO: 99889 - DNA, 20 bp, Artificial Sequence
  MKO10099889_B_Mtm1
  gRNA
ccaggggagttactaattac

SEQ ID NO: 99890 - DNA, 20 bp, Artificial Sequence
  MKO10099890_B_Mtm1
  gRNA
tctaatacttgatgttcctc

SEQ ID NO: 99891 - DNA, 20 bp, Artificial Sequence
  MKO10099891_B_Mtm1
  gRNA
tcgtctttatttaagaagtt

SEQ ID NO: 99892 - DNA, 20 bp, Artificial Sequence
  MKO10099892_B_Mtmr10
  gRNA
gcaaatacctgtaatggcat

SEQ ID NO: 99893 - DNA, 20 bp, Artificial Sequence
  MKO10099893_B_Mtmr10
  gRNA
agatgacccaatgccattac

SEQ ID NO: 99894 - DNA, 20 bp, Artificial Sequence
  MKO10099894_B_Mtmr10
  gRNA
atctgttcaatacatgtcaa

SEQ ID NO: 99895 - DNA, 20 bp, Artificial Sequence
  MKO10099895_B_Mtmr11
  gRNA
taggggagcatatcctagca

SEQ ID NO: 99896 - DNA, 20 bp, Artificial Sequence
  MKO10099896_B_Mtmr11
  gRNA
agagtgcagcttctccgtcc

SEQ ID NO: 99897 - DNA, 20 bp, Artificial Sequence
  MKO10099897_B_Mtmr11
  gRNA
gctccggcatcctgttccct

SEQ ID NO: 99898 - DNA, 20 bp, Artificial Sequence
  MKO10099898_B_Mtmr12
  gRNA
tgacgtgccactgcactgtg

SEQ ID NO: 99899 - DNA, 20 bp, Artificial Sequence
  MKO10099899_B_Mtmr12
  gRNA
gtcactcttcacttgttgcc

SEQ ID NO: 99900 - DNA, 20 bp, Artificial Sequence
  MKO10099900_B_Mtmr12
  gRNA
cagtttaagaataagatcat

SEQ ID NO: 99901 - DNA, 20 bp, Artificial Sequence
  MKO10099901_B_Mtmr14
  gRNA
gacaaaccgacctctgcacc

SEQ ID NO: 99902 - DNA, 20 bp, Artificial Sequence
  MKO10099902_B_Mtmr14
  gRNA
accttaccttgcctttgaac

SEQ ID NO: 99903 - DNA, 20 bp, Artificial Sequence
  MKO10099903_B_Mtmr14
  gRNA
ttgtctcccagcatatttgc

SEQ ID NO: 99904 - DNA, 20 bp, Artificial Sequence
  MKO10099904_B_Mtmr1
  gRNA
ctacagggtcacatgttgaa

SEQ ID NO: 99905 - DNA, 20 bp, Artificial Sequence
  MKO10099905_B_Mtmr1
  gRNA
tcttgccaggctctaaggga

SEQ ID NO: 99906 - DNA, 20 bp, Artificial Sequence
  MKO10099906_B_Mtmr1
  gRNA
acaatttctagtcagatttc

SEQ ID NO: 99907 - DNA, 20 bp, Artificial Sequence
  MKO10099907_B_Mtmr2
  gRNA
aatatacataccctcaagtc

SEQ ID NO: 99908 - DNA, 20 bp, Artificial Sequence
  MKO10099908_B_Mtmr2
  gRNA
gttgtctgcagaggttgaaa

SEQ ID NO: 99909 - DNA, 20 bp, Artificial Sequence
  MKO10099909_B_Mtmr2
  gRNA
ttaccttgcacacagtttcc

SEQ ID NO: 99910 - DNA, 20 bp, Artificial Sequence
  MKO10099910_B_Mtmr3
  gRNA
tcgggaggatgagaatcttc

SEQ ID NO: 99911 - DNA, 20 bp, Artificial Sequence
  MKO10099911_B_Mtmr3
  gRNA
ctagcctacctggtctgcac

SEQ ID NO: 99912 - DNA, 20 bp, Artificial Sequence
  MKO10099912_B_Mtmr3
  gRNA
acgctttcaataagctgtaa

SEQ ID NO: 99913 - DNA, 20 bp, Artificial Sequence
  MKO10099913_B_Mtmr4
  gRNA
gggggaacagatccttggct

SEQ ID NO: 99914 - DNA, 20 bp, Artificial Sequence
  MKO10099914_B_Mtmr4
  gRNA
ggtacccttcacagtgctgc

SEQ ID NO: 99915 - DNA, 20 bp, Artificial Sequence
  MKO10099915_B_Mtmr4
  gRNA
ttccactgcaggtgcccctc

SEQ ID NO: 99916 - DNA, 20 bp, Artificial Sequence
  MKO10099916_B_Mtmr6
  gRNA
gctgagcgtcaataaataat

SEQ ID NO: 99917 - DNA, 20 bp, Artificial Sequence
  MKO10099917_B_Mtmr6
  gRNA
tcctctcatactccgcagca

SEQ ID NO: 99918 - DNA, 20 bp, Artificial Sequence
  MKO10099918_B_Mtmr6
  gRNA
ggatgccaaccgagagtaca

SEQ ID NO: 99919 - DNA, 20 bp, Artificial Sequence
  MKO10099919_B_Mtmr7
  gRNA
ctaggttgaaaacgtgcgct

SEQ ID NO: 99920 - DNA, 20 bp, Artificial Sequence
  MKO10099920_B_Mtmr7
  gRNA
cgtacaacttgtcattccac

SEQ ID NO: 99921 - DNA, 20 bp, Artificial Sequence
  MKO10099921_B_Mtmr7
  gRNA
tctggggacgtacagttccg

SEQ ID NO: 99922 - DNA, 20 bp, Artificial Sequence
  MKO10099922_B_Mtmr9
  gRNA
ttccaggtgattatgcgaag

SEQ ID NO: 99923 - DNA, 20 bp, Artificial Sequence
  MKO10099923_B_Mtmr9
  gRNA
catacttacctcaatggaac

SEQ ID NO: 99924 - DNA, 20 bp, Artificial Sequence
  MKO10099924_B_Mtmr9
  gRNA
ggtagaagaaagggtacatc

SEQ ID NO: 99925 - DNA, 20 bp, Artificial Sequence
  MKO10099925_B_Mtnr1a
  gRNA
ctcgctgacattgcccttca

SEQ ID NO: 99926 - DNA, 20 bp, Artificial Sequence
  MKO10099926_B_Mtnr1a
  gRNA
tgcctcaacgcaattatata

SEQ ID NO: 99927 - DNA, 20 bp, Artificial Sequence
  MKO10099927_B_Mtnr1a
  gRNA
ctcagcgtacacgatagcag

SEQ ID NO: 99928 - DNA, 20 bp, Artificial Sequence
  MKO10099928_B_Mtnr1b
  gRNA
tgggcccccctcaactgtat

SEQ ID NO: 99929 - DNA, 20 bp, Artificial Sequence
  MKO10099929_B_Mtnr1b
  gRNA
gcaccagtacccagattcgc

SEQ ID NO: 99930 - DNA, 20 bp, Artificial Sequence
  MKO10099930_B_Mtnr1b
  gRNA
gacgactactgtagatagca

SEQ ID NO: 99931 - DNA, 20 bp, Artificial Sequence
  MKO10099931_B_Mto1
  gRNA
gactcacaccaacccccgag

SEQ ID NO: 99932 - DNA, 20 bp, Artificial Sequence
  MKO10099932_B_Mto1
  gRNA
cccctttccgatgccaccaa

SEQ ID NO: 99933 - DNA, 20 bp, Artificial Sequence
  MKO10099933_B_Mto1
  gRNA
ccgggaacacagaccatcca

SEQ ID NO: 99934 - DNA, 20 bp, Artificial Sequence
  MKO10099934_B_Mtor
  gRNA
cgctacagcgccttcccgga

SEQ ID NO: 99935 - DNA, 20 bp, Artificial Sequence
  MKO10099935_B_Mtor
  gRNA
aatcgagatgatcgaatcca

SEQ ID NO: 99936 - DNA, 20 bp, Artificial Sequence
  MKO10099936_B_Mtor
  gRNA
aagtgtcccctgccatcgcc

SEQ ID NO: 99937 - DNA, 20 bp, Artificial Sequence
  MKO10099937_B_Mtpap
  gRNA
tgtccagatacttggctaga

SEQ ID NO: 99938 - DNA, 20 bp, Artificial Sequence
  MKO10099938_B_Mtpap
  gRNA
gtgatctgactgctaacaat

SEQ ID NO: 99939 - DNA, 20 bp, Artificial Sequence
  MKO10099939_B_Mtpap
  gRNA
ggctcctcagtgaacacatt

SEQ ID NO: 99940 - DNA, 20 bp, Artificial Sequence
  MKO10099940_B_Mtpn
  gRNA
caatctgcagcataatgaag

SEQ ID NO: 99941 - DNA, 20 bp, Artificial Sequence
  MKO10099941_B_Mtpn
  gRNA
cttcattatgctgcagattg

SEQ ID NO: 99942 - DNA, 20 bp, Artificial Sequence
  MKO10099942_B_Mtpn
  gRNA
cgtgaaattgcttctgtcaa

SEQ ID NO: 99943 - DNA, 20 bp, Artificial Sequence
  MKO10099943_B_Mtrf1l
  gRNA
atcgatactaaaagagcgag

SEQ ID NO: 99944 - DNA, 20 bp, Artificial Sequence
  MKO10099944_B_Mtrf1l
  gRNA
tatccgaacagcactgtctg

SEQ ID NO: 99945 - DNA, 20 bp, Artificial Sequence
  MKO10099945_B_Mtrf1l
  gRNA
agtacgctgcatttaaaaga

SEQ ID NO: 99946 - DNA, 20 bp, Artificial Sequence
  MKO10099946_B_Mtrf1
  gRNA
atatgcttaccataatcggc

SEQ ID NO: 99947 - DNA, 20 bp, Artificial Sequence
  MKO10099947_B_Mtrf1
  gRNA
tttggagcgtttagtgccta

SEQ ID NO: 99948 - DNA, 20 bp, Artificial Sequence
  MKO10099948_B_Mtrf1
  gRNA
atacctcactatacagtctg

SEQ ID NO: 99949 - DNA, 20 bp, Artificial Sequence
  MKO10099949_B_Mtrr
  gRNA
tgactcctcgcttgtgcact

SEQ ID NO: 99950 - DNA, 20 bp, Artificial Sequence
  MKO10099950_B_Mtrr
  gRNA
ggggaccgagtgcacaagcg

SEQ ID NO: 99951 - DNA, 20 bp, Artificial Sequence
  MKO10099951_B_Mtrr
  gRNA
ggtgatggttgtatctacca

SEQ ID NO: 99952 - DNA, 20 bp, Artificial Sequence
  MKO10099952_B_Mtr
  gRNA
ttactgatgttcctataatc

SEQ ID NO: 99953 - DNA, 20 bp, Artificial Sequence
  MKO10099953_B_Mtr
  gRNA
ctgcagagcacttgttcatc

SEQ ID NO: 99954 - DNA, 20 bp, Artificial Sequence
  MKO10099954_B_Mtr
  gRNA
caggccaagggactgctgga

SEQ ID NO: 99955 - DNA, 20 bp, Artificial Sequence
  MKO10099955_B_Mtss1l
  gRNA
cttggtgaactgccgcagct

SEQ ID NO: 99956 - DNA, 20 bp, Artificial Sequence
  MKO10099956_B_Mtss1l
  gRNA
ggagttgaagtcctcccaga

SEQ ID NO: 99957 - DNA, 20 bp, Artificial Sequence
  MKO10099957_B_Mtss1l
  gRNA
tggccatgtcagctactttc

SEQ ID NO: 99958 - DNA, 20 bp, Artificial Sequence
  MKO10099958_B_Mtss1
  gRNA
cctaggggagctatccagtt

SEQ ID NO: 99959 - DNA, 20 bp, Artificial Sequence
  MKO10099959_B_Mtss1
  gRNA
ttgcgtggtccttgtccagc

SEQ ID NO: 99960 - DNA, 20 bp, Artificial Sequence
  MKO10099960_B_Mtss1
  gRNA
tttatgaagtcttcccaaac

SEQ ID NO: 99961 - DNA, 20 bp, Artificial Sequence
  MKO10099961_B_Mttp
  gRNA
agctgttaacgttgaaaatg

SEQ ID NO: 99962 - DNA, 20 bp, Artificial Sequence
  MKO10099962_B_Mttp
  gRNA
aggaaaaccgcaagacagcg

SEQ ID NO: 99963 - DNA, 20 bp, Artificial Sequence
  MKO10099963_B_Mttp
  gRNA
ctgttccaggtagatatctc

SEQ ID NO: 99964 - DNA, 20 bp, Artificial Sequence
  MKO10099964_B_Mturn
  gRNA
gcacgtgtggagcgagagcg

SEQ ID NO: 99965 - DNA, 20 bp, Artificial Sequence
  MKO10099965_B_Mturn
  gRNA
ttcacttacggacacttaaa

SEQ ID NO: 99966 - DNA, 20 bp, Artificial Sequence
  MKO10099966_B_Mturn
  gRNA
tgctgactgacccccatttg

SEQ ID NO: 99967 - DNA, 20 bp, Artificial Sequence
  MKO10099967_B_Mtus1
  gRNA
agcttcaatctcaagcttag

SEQ ID NO: 99968 - DNA, 20 bp, Artificial Sequence
  MKO10099968_B_Mtus1
  gRNA
ctcaagaacttgtcagcctc

SEQ ID NO: 99969 - DNA, 20 bp, Artificial Sequence
  MKO10099969_B_Mtus1
  gRNA
ggctgacaagttcttgagag

SEQ ID NO: 99970 - DNA, 20 bp, Artificial Sequence
  MKO10099970_B_Mtus2
  gRNA
gccaccaaacctcactcgcc

SEQ ID NO: 99971 - DNA, 20 bp, Artificial Sequence
  MKO10099971_B_Mtus2
  gRNA
ccaatgcaacaacaccacgc

SEQ ID NO: 99972 - DNA, 20 bp, Artificial Sequence
  MKO10099972_B_Mtus2
  gRNA
ccgctgtttcgtctcccaag

SEQ ID NO: 99973 - DNA, 20 bp, Artificial Sequence
  MKO10099973_B_Mtx1
  gRNA
cacctacctctttacgaaga

SEQ ID NO: 99974 - DNA, 20 bp, Artificial Sequence
  MKO10099974_B_Mtx1
  gRNA
gctgtagccgctccatgtac

SEQ ID NO: 99975 - DNA, 20 bp, Artificial Sequence
  MKO10099975_B_Mtx1
  gRNA
cagacctataccagatttac

SEQ ID NO: 99976 - DNA, 20 bp, Artificial Sequence
  MKO10099976_B_Mtx2
  gRNA
agtccaatttgttaaagcca

SEQ ID NO: 99977 - DNA, 20 bp, Artificial Sequence
  MKO10099977_B_Mtx2
  gRNA
tgcagcatctcttgctgtgc

SEQ ID NO: 99978 - DNA, 20 bp, Artificial Sequence
  MKO10099978_B_Mtx2
  gRNA
ttaccttggctttaacaaat

SEQ ID NO: 99979 - DNA, 20 bp, Artificial Sequence
  MKO10099979_B_Mtx3
  gRNA
tgtacctcttgaccctctcc

SEQ ID NO: 99980 - DNA, 20 bp, Artificial Sequence
  MKO10099980_B_Mtx3
  gRNA
tcaatattatagataacacc

SEQ ID NO: 99981 - DNA, 20 bp, Artificial Sequence
  MKO10099981_B_Mtx3
  gRNA
ctgtcttcagttgtcaaaat

SEQ ID NO: 99982 - DNA, 20 bp, Artificial Sequence
  MKO10099982_B_Muc13
  gRNA
acactcatgctaatgtcccc

SEQ ID NO: 99983 - DNA, 20 bp, Artificial Sequence
  MKO10099983_B_Muc13
  gRNA
agctcttccaccgtgcctag

SEQ ID NO: 99984 - DNA, 20 bp, Artificial Sequence
  MKO10099984_B_Muc13
  gRNA
acatttaataagactgacta

SEQ ID NO: 99985 - DNA, 20 bp, Artificial Sequence
  MKO10099985_B_Muc15
  gRNA
agtggaggtatagcatccat

SEQ ID NO: 99986 - DNA, 20 bp, Artificial Sequence
  MKO10099986_B_Muc15
  gRNA
gcttcactgcttagccttgt

SEQ ID NO: 99987 - DNA, 20 bp, Artificial Sequence
  MKO10099987_B_Muc15
  gRNA
gaaccttatgatgtcaattt

SEQ ID NO: 99988 - DNA, 20 bp, Artificial Sequence
  MKO10099988_B_Muc19
  gRNA
aagtaaattacctgaagtac

SEQ ID NO: 99989 - DNA, 20 bp, Artificial Sequence
  MKO10099989_B_Muc19
  gRNA
tgaatcatcttattgctgaa

SEQ ID NO: 99990 - DNA, 20 bp, Artificial Sequence
  MKO10099990_B_Muc19
  gRNA
gaagaatcttgtctctaaag

SEQ ID NO: 99991 - DNA, 20 bp, Artificial Sequence
  MKO10099991_B_Muc1
  gRNA
tgtgaccaggtcaggctccg

SEQ ID NO: 99992 - DNA, 20 bp, Artificial Sequence
  MKO10099992_B_Muc1
  gRNA
aggctggggcattgccctgc

SEQ ID NO: 99993 - DNA, 20 bp, Artificial Sequence
  MKO10099993_B_Muc1
  gRNA
tatcgtctatttccttgccc

SEQ ID NO: 99994 - DNA, 20 bp, Artificial Sequence
  MKO10099994_B_Muc20
  gRNA
cctccttgtacggctgaccg

SEQ ID NO: 99995 - DNA, 20 bp, Artificial Sequence
  MKO10099995_B_Muc20
  gRNA
caggcacgatgggctctgtc

SEQ ID NO: 99996 - DNA, 20 bp, Artificial Sequence
  MKO10099996_B_Muc20
  gRNA
acatgtggacaagtggcatg

SEQ ID NO: 99997 - DNA, 20 bp, Artificial Sequence
  MKO10099997_B_Muc2
  gRNA
cctcgcccaagccccgcttc

SEQ ID NO: 99998 - DNA, 20 bp, Artificial Sequence
  MKO10099998_B_Muc2
  gRNA
gtggctcacgtgttcagagc

SEQ ID NO: 99999 - DNA, 20 bp, Artificial Sequence
  MKO10099999_B_Muc2
  gRNA
tccggttcttgtactgcctc

SEQ ID NO: 100000 - DNA, 20 bp, Artificial Sequence
  MKO10100000_B_Muc4
  gRNA
aacacacagcacgtctactc

SEQ ID NO: 100001 - DNA, 20 bp, Artificial Sequence
  MKO10100001_B_Muc4
  gRNA
tggttgggctggggctagta

SEQ ID NO: 100002 - DNA, 20 bp, Artificial Sequence
  MKO10100002_B_Muc4
  gRNA
ccctgatctggtaaaagaga

SEQ ID NO: 100003 - DNA, 20 bp, Artificial Sequence
  MKO10100003_B_Muc5ac
  gRNA
gctgctcttcgtgtggaacg

SEQ ID NO: 100004 - DNA, 20 bp, Artificial Sequence
  MKO10100004_B_Muc5ac
  gRNA
cagctgccctttagccagtc

SEQ ID NO: 100005 - DNA, 20 bp, Artificial Sequence
  MKO10100005_B_Muc5ac
  gRNA
gaacatcagagcggtgttca

SEQ ID NO: 100006 - DNA, 20 bp, Artificial Sequence
  MKO10100006_B_Muc5b
  gRNA
aagctgccctacagtcgtgc

SEQ ID NO: 100007 - DNA, 20 bp, Artificial Sequence
  MKO10100007_B_Muc5b
  gRNA
actgtcttccctagcatgag

SEQ ID NO: 100008 - DNA, 20 bp, Artificial Sequence
  MKO10100008_B_Muc5b
  gRNA
tcagaacatctagaactcac

SEQ ID NO: 100009 - DNA, 20 bp, Artificial Sequence
  MKO10100009_B_Muc6
  gRNA
agctgcacgctctggccgta

SEQ ID NO: 100010 - DNA, 20 bp, Artificial Sequence
  MKO10100010_B_Muc6
  gRNA
attatactcatggccgtcaa

SEQ ID NO: 100011 - DNA, 20 bp, Artificial Sequence
  MKO10100011_B_Muc6
  gRNA
ggtggtactgttggtctccg

SEQ ID NO: 100012 - DNA, 20 bp, Artificial Sequence
  MKO10100012_B_Mucl1
  gRNA
tgttctagtctgtgtcagaa

SEQ ID NO: 100013 - DNA, 20 bp, Artificial Sequence
  MKO10100013_B_Mucl1
  gRNA
gtttcagtactgtttgtctc

SEQ ID NO: 100014 - DNA, 20 bp, Artificial Sequence
  MKO10100014_B_Mucl1
  gRNA
acaaacagtactgaaacttc

SEQ ID NO: 100015 - DNA, 20 bp, Artificial Sequence
  MKO10100015_B_Mug1
  gRNA
aaaatcctcctcatcagaag

SEQ ID NO: 100016 - DNA, 20 bp, Artificial Sequence
  MKO10100016_B_Mug1
  gRNA
tctttgtccagttaaatttc

SEQ ID NO: 100017 - DNA, 20 bp, Artificial Sequence
  MKO10100017_B_Mug1
  gRNA
tagactctcctcttctgatg

SEQ ID NO: 100018 - DNA, 20 bp, Artificial Sequence
  MKO10100018_B_Mug2
  gRNA
tacactcaactctcctgatg

SEQ ID NO: 100019 - DNA, 20 bp, Artificial Sequence
  MKO10100019_B_Mug2
  gRNA
aaagactcaccaactcattc

SEQ ID NO: 100020 - DNA, 20 bp, Artificial Sequence
  MKO10100020_B_Mug2
  gRNA
tctctctccagttaaatttc

SEQ ID NO: 100021 - DNA, 20 bp, Artificial Sequence
  MKO10100021_B_Mul1
  gRNA
ccttgagttcctgcgcgacc

SEQ ID NO: 100022 - DNA, 20 bp, Artificial Sequence
  MKO10100022_B_Mul1
  gRNA
gtcgcttcaggagcataaga

SEQ ID NO: 100023 - DNA, 20 bp, Artificial Sequence
  MKO10100023_B_Mul1
  gRNA
gctcctgaagcgacagccgc

SEQ ID NO: 100024 - DNA, 20 bp, Artificial Sequence
  MKO10100024_B_Mum1l1
  gRNA
tggcattaatggccttcgtt

SEQ ID NO: 100025 - DNA, 20 bp, Artificial Sequence
  MKO10100025_B_Mum1l1
  gRNA
gtgcacctgcaacttatcat

SEQ ID NO: 100026 - DNA, 20 bp, Artificial Sequence
  MKO10100026_B_Mum1l1
  gRNA
caaatgcacgtgtctcataa

SEQ ID NO: 100027 - DNA, 20 bp, Artificial Sequence
  MKO10100027_B_Mum1
  gRNA
ctctctcaccgtgatacaga

SEQ ID NO: 100028 - DNA, 20 bp, Artificial Sequence
  MKO10100028_B_Mum1
  gRNA
tgttcagatactctcgctga

SEQ ID NO: 100029 - DNA, 20 bp, Artificial Sequence
  MKO10100029_B_Mum1
  gRNA
tctcaatgtgcgacttctgc

SEQ ID NO: 100030 - DNA, 20 bp, Artificial Sequence
  MKO10100030_B_Mup10
  gRNA
gtcagcaaccatagataatt

SEQ ID NO: 100031 - DNA, 20 bp, Artificial Sequence
  MKO10100031_B_Mup10
  gRNA
agactatgataactttctta

SEQ ID NO: 100032 - DNA, 20 bp, Artificial Sequence
  MKO10100032_B_Mup10
  gRNA
taccatagagccccatcagc

SEQ ID NO: 100033 - DNA, 20 bp, Artificial Sequence
  MKO10100033_B_Mup11
  gRNA
ggttgctgacaaaacagaaa

SEQ ID NO: 100034 - DNA, 20 bp, Artificial Sequence
  MKO10100034_B_Mup11
  gRNA
agactatgataactttctta

SEQ ID NO: 100035 - DNA, 20 bp, Artificial Sequence
  MKO10100035_B_Mup11
  gRNA
taccatagagccccatcagc

SEQ ID NO: 100036 - DNA, 20 bp, Artificial Sequence
  MKO10100036_B_Mup12
  gRNA
ggttgctgacaaaacagaaa

SEQ ID NO: 100037 - DNA, 20 bp, Artificial Sequence
  MKO10100037_B_Mup12
  gRNA
agactatgataactttctta

SEQ ID NO: 100038 - DNA, 20 bp, Artificial Sequence
  MKO10100038_B_Mup12
  gRNA
taccatagagccccatcagc

SEQ ID NO: 100039 - DNA, 20 bp, Artificial Sequence
  MKO10100039_B_Mup13
  gRNA
ggttgctgacaaaacagaaa

SEQ ID NO: 100040 - DNA, 20 bp, Artificial Sequence
  MKO10100040_B_Mup13
  gRNA
agactatgataactttctta

SEQ ID NO: 100041 - DNA, 20 bp, Artificial Sequence
  MKO10100041_B_Mup13
  gRNA
taccatagagccccatcagc

SEQ ID NO: 100042 - DNA, 20 bp, Artificial Sequence
  MKO10100042_B_Mup14
  gRNA
ggttgctgacaaaacagaaa

SEQ ID NO: 100043 - DNA, 20 bp, Artificial Sequence
  MKO10100043_B_Mup14
  gRNA
agactatgataactttctta

SEQ ID NO: 100044 - DNA, 20 bp, Artificial Sequence
  MKO10100044_B_Mup14
  gRNA
taccatagagccccatcagc

SEQ ID NO: 100045 - DNA, 20 bp, Artificial Sequence
  MKO10100045_B_Mup15
  gRNA
ggttgctgacaaaacagaaa

SEQ ID NO: 100046 - DNA, 20 bp, Artificial Sequence
  MKO10100046_B_Mup15
  gRNA
agactatgataactttctta

SEQ ID NO: 100047 - DNA, 20 bp, Artificial Sequence
  MKO10100047_B_Mup15
  gRNA
taccatagagccccatcagc

SEQ ID NO: 100048 - DNA, 20 bp, Artificial Sequence
  MKO10100048_B_Mup16
  gRNA
gtcagcaaccatagataatt

SEQ ID NO: 100049 - DNA, 20 bp, Artificial Sequence
  MKO10100049_B_Mup16
  gRNA
agactatgataactttctta

SEQ ID NO: 100050 - DNA, 20 bp, Artificial Sequence
  MKO10100050_B_Mup16
  gRNA
taccatagagccccatcagc

SEQ ID NO: 100051 - DNA, 20 bp, Artificial Sequence
  MKO10100051_B_Mup17
  gRNA
agagtgctccgaattatcta

SEQ ID NO: 100052 - DNA, 20 bp, Artificial Sequence
  MKO10100052_B_Mup17
  gRNA
gtcagcaaccatagataatt

SEQ ID NO: 100053 - DNA, 20 bp, Artificial Sequence
  MKO10100053_B_Mup17
  gRNA
agactatgataactttctta

SEQ ID NO: 100054 - DNA, 20 bp, Artificial Sequence
  MKO10100054_B_Mup19
  gRNA
gtcagcaaccatagataatt

SEQ ID NO: 100055 - DNA, 20 bp, Artificial Sequence
  MKO10100055_B_Mup19
  gRNA
agactatgataactttctta

SEQ ID NO: 100056 - DNA, 20 bp, Artificial Sequence
  MKO10100056_B_Mup19
  gRNA
taccatagagccccatcagc

SEQ ID NO: 100057 - DNA, 20 bp, Artificial Sequence
  MKO10100057_B_Mup1
  gRNA
agtatggaatttaagaacta

SEQ ID NO: 100058 - DNA, 20 bp, Artificial Sequence
  MKO10100058_B_Mup1
  gRNA
cagaagagatgaagagtgct

SEQ ID NO: 100059 - DNA, 20 bp, Artificial Sequence
  MKO10100059_B_Mup1
  gRNA
ggttgctgacaaaacagaaa

SEQ ID NO: 100060 - DNA, 20 bp, Artificial Sequence
  MKO10100060_B_Mup20
  gRNA
gctgacaaaacagaaaaggc

SEQ ID NO: 100061 - DNA, 20 bp, Artificial Sequence
  MKO10100061_B_Mup20
  gRNA
gattcatctcattaacaaaa

SEQ ID NO: 100062 - DNA, 20 bp, Artificial Sequence
  MKO10100062_B_Mup20
  gRNA
agatttgagttcagacatca

SEQ ID NO: 100063 - DNA, 20 bp, Artificial Sequence
  MKO10100063_B_Mup21
  gRNA
ttcaccaatcaaagtcattt

SEQ ID NO: 100064 - DNA, 20 bp, Artificial Sequence
  MKO10100064_B_Mup21
  gRNA
aaaatggaatttaaagacta

SEQ ID NO: 100065 - DNA, 20 bp, Artificial Sequence
  MKO10100065_B_Mup21
  gRNA
tatctcattaacgaaaaaga

SEQ ID NO: 100066 - DNA, 20 bp, Artificial Sequence
  MKO10100066_B_Mup2
  gRNA
ggttgctgacaaaacagaaa

SEQ ID NO: 100067 - DNA, 20 bp, Artificial Sequence
  MKO10100067_B_Mup2
  gRNA
agactatgataactttctta

SEQ ID NO: 100068 - DNA, 20 bp, Artificial Sequence
  MKO10100068_B_Mup2
  gRNA
taccatagagccccatcagc

SEQ ID NO: 100069 - DNA, 20 bp, Artificial Sequence
  MKO10100069_B_Mup3
  gRNA
taaatggaatttaaagacta

SEQ ID NO: 100070 - DNA, 20 bp, Artificial Sequence
  MKO10100070_B_Mup3
  gRNA
atgacttactgacattggtt

SEQ ID NO: 100071 - DNA, 20 bp, Artificial Sequence
  MKO10100071_B_Mup3
  gRNA
agatttgagtttagacatca

SEQ ID NO: 100072 - DNA, 20 bp, Artificial Sequence
  MKO10100072_B_Mup4
  gRNA
agatttgaattcagacatca

SEQ ID NO: 100073 - DNA, 20 bp, Artificial Sequence
  MKO10100073_B_Mup4
  gRNA
tattacagattaatggggaa

SEQ ID NO: 100074 - DNA, 20 bp, Artificial Sequence
  MKO10100074_B_Mup4
  gRNA
taccatagagctccatcagc

SEQ ID NO: 100075 - DNA, 20 bp, Artificial Sequence
  MKO10100075_B_Mup5
  gRNA
tgaggaaaacttccagctga

SEQ ID NO: 100076 - DNA, 20 bp, Artificial Sequence
  MKO10100076_B_Mup5
  gRNA
gctgacaaaacagaaaaagc

SEQ ID NO: 100077 - DNA, 20 bp, Artificial Sequence
  MKO10100077_B_Mup5
  gRNA
aaagtttgcaaaactatgtg

SEQ ID NO: 100078 - DNA, 20 bp, Artificial Sequence
  MKO10100078_B_Mup6
  gRNA
agtatggaatttaaaaccta

SEQ ID NO: 100079 - DNA, 20 bp, Artificial Sequence
  MKO10100079_B_Mup6
  gRNA
agagcaaagatagaagaaca

SEQ ID NO: 100080 - DNA, 20 bp, Artificial Sequence
  MKO10100080_B_Mup6
  gRNA
gtcagcaaccaaaaatattt

SEQ ID NO: 100081 - DNA, 20 bp, Artificial Sequence
  MKO10100081_B_Mup7
  gRNA
gtcagcaaccatagataatt

SEQ ID NO: 100082 - DNA, 20 bp, Artificial Sequence
  MKO10100082_B_Mup7
  gRNA
agactatgataactttctta

SEQ ID NO: 100083 - DNA, 20 bp, Artificial Sequence
  MKO10100083_B_Mup7
  gRNA
taccatagagccccatcagc

SEQ ID NO: 100084 - DNA, 20 bp, Artificial Sequence
  MKO10100084_B_Mup8
  gRNA
ggttgctgacaaaacagaaa

SEQ ID NO: 100085 - DNA, 20 bp, Artificial Sequence
  MKO10100085_B_Mup8
  gRNA
agactatgataactttctta

SEQ ID NO: 100086 - DNA, 20 bp, Artificial Sequence
  MKO10100086_B_Mup8
  gRNA
taccatagagccccatcagc

SEQ ID NO: 100087 - DNA, 20 bp, Artificial Sequence
  MKO10100087_B_Mup9
  gRNA
gtcagcaaccatagataatt

SEQ ID NO: 100088 - DNA, 20 bp, Artificial Sequence
  MKO10100088_B_Mup9
  gRNA
agactatgataactttctta

SEQ ID NO: 100089 - DNA, 20 bp, Artificial Sequence
  MKO10100089_B_Mup9
  gRNA
taccatagagccccatcagc

SEQ ID NO: 100090 - DNA, 20 bp, Artificial Sequence
  MKO10100090_B_Murc
  gRNA
ggagggtacagtccccaaga

SEQ ID NO: 100091 - DNA, 20 bp, Artificial Sequence
  MKO10100091_B_Murc
  gRNA
ttccagtgccgctccctcaa

SEQ ID NO: 100092 - DNA, 20 bp, Artificial Sequence
  MKO10100092_B_Murc
  gRNA
tgggggatcgaagacttctt

SEQ ID NO: 100093 - DNA, 20 bp, Artificial Sequence
  MKO10100093_B_Mus81
  gRNA
ttgctcaggtggccctttgc

SEQ ID NO: 100094 - DNA, 20 bp, Artificial Sequence
  MKO10100094_B_Mus81
  gRNA
gctccctgtagagttgcagc

SEQ ID NO: 100095 - DNA, 20 bp, Artificial Sequence
  MKO10100095_B_Mus81
  gRNA
tcactggcatggaagagtcc

SEQ ID NO: 100096 - DNA, 20 bp, Artificial Sequence
  MKO10100096_B_Musk
  gRNA
agtcgctacttcttcaacca

SEQ ID NO: 100097 - DNA, 20 bp, Artificial Sequence
  MKO10100097_B_Musk
  gRNA
agcgactttcatgtgtgccg

SEQ ID NO: 100098 - DNA, 20 bp, Artificial Sequence
  MKO10100098_B_Musk
  gRNA
actgtcttccacgctcagaa

SEQ ID NO: 100099 - DNA, 20 bp, Artificial Sequence
  MKO10100099_B_Mustn1
  gRNA
gtctcagccaaacacgctct

SEQ ID NO: 100100 - DNA, 20 bp, Artificial Sequence
  MKO10100100_B_Mustn1
  gRNA
catcaagtctaagacatacc

SEQ ID NO: 100101 - DNA, 20 bp, Artificial Sequence
  MKO10100101_B_Mustn1
  gRNA
cggttgcggctgaatacaga

SEQ ID NO: 100102 - DNA, 20 bp, Artificial Sequence
  MKO10100102_B_Mutyh
  gRNA
atatcatctcttcagcgacg

SEQ ID NO: 100103 - DNA, 20 bp, Artificial Sequence
  MKO10100103_B_Mutyh
  gRNA
tcggacaggagggcctatgc

SEQ ID NO: 100104 - DNA, 20 bp, Artificial Sequence
  MKO10100104_B_Mutyh
  gRNA
agtataatagtcgatcactg

SEQ ID NO: 100105 - DNA, 20 bp, Artificial Sequence
  MKO10100105_B_Mut
  gRNA
atcatgtacgaccctcccca

SEQ ID NO: 100106 - DNA, 20 bp, Artificial Sequence
  MKO10100106_B_Mut
  gRNA
ctataccatcgcagatgggt

SEQ ID NO: 100107 - DNA, 20 bp, Artificial Sequence
  MKO10100107_B_Mut
  gRNA
tccaacatctccacgaactc

SEQ ID NO: 100108 - DNA, 20 bp, Artificial Sequence
  MKO10100108_B_Mvb12a
  gRNA
ccgggatgcccagcgtgctc

SEQ ID NO: 100109 - DNA, 20 bp, Artificial Sequence
  MKO10100109_B_Mvb12a
  gRNA
gggagaggcctcgcatgtcc

SEQ ID NO: 100110 - DNA, 20 bp, Artificial Sequence
  MKO10100110_B_Mvb12a
  gRNA
agtggacatgcagatcgtga

SEQ ID NO: 100111 - DNA, 20 bp, Artificial Sequence
  MKO10100111_B_Mvb12b
  gRNA
catgaagctcatcgatgtca

SEQ ID NO: 100112 - DNA, 20 bp, Artificial Sequence
  MKO10100112_B_Mvb12b
  gRNA
ccgccccagtacacgtttat

SEQ ID NO: 100113 - DNA, 20 bp, Artificial Sequence
  MKO10100113_B_Mvb12b
  gRNA
cttaccacgtcgtagcctgt

SEQ ID NO: 100114 - DNA, 20 bp, Artificial Sequence
  MKO10100114_B_Mvd
  gRNA
gaatggtcgcgaggaggacg

SEQ ID NO: 100115 - DNA, 20 bp, Artificial Sequence
  MKO10100115_B_Mvd
  gRNA
ccacgtgcaccttatagctg

SEQ ID NO: 100116 - DNA, 20 bp, Artificial Sequence
  MKO10100116_B_Mvd
  gRNA
gctccgaatccttatccttg

SEQ ID NO: 100117 - DNA, 20 bp, Artificial Sequence
  MKO10100117_B_Mvk
  gRNA
acggagaccccgtccttgag

SEQ ID NO: 100118 - DNA, 20 bp, Artificial Sequence
  MKO10100118_B_Mvk
  gRNA
gtgtggtcggaacttccccc

SEQ ID NO: 100119 - DNA, 20 bp, Artificial Sequence
  MKO10100119_B_Mvk
  gRNA
tggacaatgccgtcagcacc

SEQ ID NO: 100120 - DNA, 20 bp, Artificial Sequence
  MKO10100120_B_Mvp
  gRNA
cccgcaaggaatgctttgac

SEQ ID NO: 100121 - DNA, 20 bp, Artificial Sequence
  MKO10100121_B_Mvp
  gRNA
gctgcaatcaggttaggccg

SEQ ID NO: 100122 - DNA, 20 bp, Artificial Sequence
  MKO10100122_B_Mvp
  gRNA
ggaagtcgtggagatcattc

SEQ ID NO: 100123 - DNA, 20 bp, Artificial Sequence
  MKO10100123_B_Mx1
  gRNA
ttgacctcatcgacaccctg

SEQ ID NO: 100124 - DNA, 20 bp, Artificial Sequence
  MKO10100124_B_Mx1
  gRNA
aggatactgacccttgttaa

SEQ ID NO: 100125 - DNA, 20 bp, Artificial Sequence
  MKO10100125_B_Mx1
  gRNA
tgagcttatcactgatcccc

SEQ ID NO: 100126 - DNA, 20 bp, Artificial Sequence
  MKO10100126_B_Mx2
  gRNA
agaatactgacccttgttga

SEQ ID NO: 100127 - DNA, 20 bp, Artificial Sequence
  MKO10100127_B_Mx2
  gRNA
tctgtactagaagcactgtc

SEQ ID NO: 100128 - DNA, 20 bp, Artificial Sequence
  MKO10100128_B_Mx2
  gRNA
tggcctaggagagaaagacc

SEQ ID NO: 100129 - DNA, 20 bp, Artificial Sequence
  MKO10100129_B_Mxd1
  gRNA
acctacctttatatgcaatt

SEQ ID NO: 100130 - DNA, 20 bp, Artificial Sequence
  MKO10100130_B_Mxd1
  gRNA
acagagatgccttcaaacgg

SEQ ID NO: 100131 - DNA, 20 bp, Artificial Sequence
  MKO10100131_B_Mxd1
  gRNA
ctccatgctgccatacagca

SEQ ID NO: 100132 - DNA, 20 bp, Artificial Sequence
  MKO10100132_B_Mxd3
  gRNA
cgcccactgttcagcgcgcc

SEQ ID NO: 100133 - DNA, 20 bp, Artificial Sequence
  MKO10100133_B_Mxd3
  gRNA
ctacactaagcctcctgcgc

SEQ ID NO: 100134 - DNA, 20 bp, Artificial Sequence
  MKO10100134_B_Mxd3
  gRNA
gtctgagtctgagcgctcag

SEQ ID NO: 100135 - DNA, 20 bp, Artificial Sequence
  MKO10100135_B_Mxd4
  gRNA
tcgcttcctaaagagacgtt

SEQ ID NO: 100136 - DNA, 20 bp, Artificial Sequence
  MKO10100136_B_Mxd4
  gRNA
gctgctccaaacgtctcttt

SEQ ID NO: 100137 - DNA, 20 bp, Artificial Sequence
  MKO10100137_B_Mxd4
  gRNA
gcgtgctaagatgcacatca

SEQ ID NO: 100138 - DNA, 20 bp, Artificial Sequence
  MKO10100138_B_Mxi1
  gRNA
tacagcactcgaagccccca

SEQ ID NO: 100139 - DNA, 20 bp, Artificial Sequence
  MKO10100139_B_Mxi1
  gRNA
cttgaaagttctgatcccgc

SEQ ID NO: 100140 - DNA, 20 bp, Artificial Sequence
  MKO10100140_B_Mxi1
  gRNA
ctttcaagcgttctaaacac

SEQ ID NO: 100141 - DNA, 20 bp, Artificial Sequence
  MKO10100141_B_Mxra7
  gRNA
gccacgcgctcggactggct

SEQ ID NO: 100142 - DNA, 20 bp, Artificial Sequence
  MKO10100142_B_Mxra7
  gRNA
gccacccactgaagaacctg

SEQ ID NO: 100143 - DNA, 20 bp, Artificial Sequence
  MKO10100143_B_Mxra7
  gRNA
tgctcaccgtcttcttcctc

SEQ ID NO: 100144 - DNA, 20 bp, Artificial Sequence
  MKO10100144_B_Mxra8
  gRNA
gctgcatgatcgccagcgcg

SEQ ID NO: 100145 - DNA, 20 bp, Artificial Sequence
  MKO10100145_B_Mxra8
  gRNA
tgtgcgcctcgaggttacag

SEQ ID NO: 100146 - DNA, 20 bp, Artificial Sequence
  MKO10100146_B_Mxra8
  gRNA
ctgccacctcgatgagagcc

SEQ ID NO: 100147 - DNA, 20 bp, Artificial Sequence
  MKO10100147_B_Myadml2
  gRNA
tccaggtagccccatgtcaa

SEQ ID NO: 100148 - DNA, 20 bp, Artificial Sequence
  MKO10100148_B_Myadml2
  gRNA
acacagcagggtcgccaaca

SEQ ID NO: 100149 - DNA, 20 bp, Artificial Sequence
  MKO10100149_B_Myadml2
  gRNA
tacagcccgaatgctgcagc

SEQ ID NO: 100150 - DNA, 20 bp, Artificial Sequence
  MKO10100150_B_Myadm
  gRNA
gcagaagagggccgcgtagc

SEQ ID NO: 100151 - DNA, 20 bp, Artificial Sequence
  MKO10100151_B_Myadm
  gRNA
ggatggacaccgccagtcgt

SEQ ID NO: 100152 - DNA, 20 bp, Artificial Sequence
  MKO10100152_B_Myadm
  gRNA
acacgttggtacaatccccc

SEQ ID NO: 100153 - DNA, 20 bp, Artificial Sequence
  MKO10100153_B_Mybbp1a
  gRNA
gcaccttgttcatggcttgt

SEQ ID NO: 100154 - DNA, 20 bp, Artificial Sequence
  MKO10100154_B_Mybbp1a
  gRNA
aagctcttaccttcactagg

SEQ ID NO: 100155 - DNA, 20 bp, Artificial Sequence
  MKO10100155_B_Mybbp1a
  gRNA
ccaacaccccaaccacttac

SEQ ID NO: 100156 - DNA, 20 bp, Artificial Sequence
  MKO10100156_B_Mybl1
  gRNA
tatgaagtacctcaacaaaa

SEQ ID NO: 100157 - DNA, 20 bp, Artificial Sequence
  MKO10100157_B_Mybl1
  gRNA
acttcttcacttcagggttc

SEQ ID NO: 100158 - DNA, 20 bp, Artificial Sequence
  MKO10100158_B_Mybl1
  gRNA
aatcatgatcagcatattga

SEQ ID NO: 100159 - DNA, 20 bp, Artificial Sequence
  MKO10100159_B_Mybl2
  gRNA
tttgaatcccgaccttgtta

SEQ ID NO: 100160 - DNA, 20 bp, Artificial Sequence
  MKO10100160_B_Mybl2
  gRNA
ccatggtcccttaacaaggt

SEQ ID NO: 100161 - DNA, 20 bp, Artificial Sequence
  MKO10100161_B_Mybl2
  gRNA
ggcagtttggacagcaagac

SEQ ID NO: 100162 - DNA, 20 bp, Artificial Sequence
  MKO10100162_B_Mybpc1
  gRNA
cttaacttaccttccggggg

SEQ ID NO: 100163 - DNA, 20 bp, Artificial Sequence
  MKO10100163_B_Mybpc1
  gRNA
tcctgctcttccccgccagc

SEQ ID NO: 100164 - DNA, 20 bp, Artificial Sequence
  MKO10100164_B_Mybpc1
  gRNA
gttcttaccctctttcttag

SEQ ID NO: 100165 - DNA, 20 bp, Artificial Sequence
  MKO10100165_B_Mybpc2
  gRNA
ctatgttacagcggccaaaa

SEQ ID NO: 100166 - DNA, 20 bp, Artificial Sequence
  MKO10100166_B_Mybpc2
  gRNA
aaagccggactctgtgtcag

SEQ ID NO: 100167 - DNA, 20 bp, Artificial Sequence
  MKO10100167_B_Mybpc2
  gRNA
caggcaagccgaccatcaag

SEQ ID NO: 100168 - DNA, 20 bp, Artificial Sequence
  MKO10100168_B_Mybpc3
  gRNA
cagcctcctgaaaccgcctg

SEQ ID NO: 100169 - DNA, 20 bp, Artificial Sequence
  MKO10100169_B_Mybpc3
  gRNA
cattgtcttctcagcccgag

SEQ ID NO: 100170 - DNA, 20 bp, Artificial Sequence
  MKO10100170_B_Mybpc3
  gRNA
acggtcacctcaccatcctg

SEQ ID NO: 100171 - DNA, 20 bp, Artificial Sequence
  MKO10100171_B_Mybphl
  gRNA
ttggggcgccaatgctactc

SEQ ID NO: 100172 - DNA, 20 bp, Artificial Sequence
  MKO10100172_B_Mybphl
  gRNA
taagtctgcttcagggcccg

SEQ ID NO: 100173 - DNA, 20 bp, Artificial Sequence
  MKO10100173_B_Mybphl
  gRNA
agcatcctgagtcagtgcgt

SEQ ID NO: 100174 - DNA, 20 bp, Artificial Sequence
  MKO10100174_B_Mybph
  gRNA
tgtgaatccccggcccgtga

SEQ ID NO: 100175 - DNA, 20 bp, Artificial Sequence
  MKO10100175_B_Mybph
  gRNA
cgctgcgcacattaactctc

SEQ ID NO: 100176 - DNA, 20 bp, Artificial Sequence
  MKO10100176_B_Mybph
  gRNA
tgtgttggagttctgtcgag

SEQ ID NO: 100177 - DNA, 20 bp, Artificial Sequence
  MKO10100177_B_Myb
  gRNA
gcagcagcccatcgtagtca

SEQ ID NO: 100178 - DNA, 20 bp, Artificial Sequence
  MKO10100178_B_Myb
  gRNA
atgtgtgaccatgactacga

SEQ ID NO: 100179 - DNA, 20 bp, Artificial Sequence
  MKO10100179_B_Myb
  gRNA
aacagaacggaacagacgac

SEQ ID NO: 100180 - DNA, 20 bp, Artificial Sequence
  MKO10100180_B_Mycbp2
  gRNA
ataatcttacctaggacttc

SEQ ID NO: 100181 - DNA, 20 bp, Artificial Sequence
  MKO10100181_B_Mycbp2
  gRNA
ggccttgaagcacattcagc

SEQ ID NO: 100182 - DNA, 20 bp, Artificial Sequence
  MKO10100182_B_Mycbp2
  gRNA
tcaacatttactgtaacgtg

SEQ ID NO: 100183 - DNA, 20 bp, Artificial Sequence
  MKO10100183_B_Mycbpap
  gRNA
tgccttgcggaagaagcaac

SEQ ID NO: 100184 - DNA, 20 bp, Artificial Sequence
  MKO10100184_B_Mycbpap
  gRNA
agatgccgccaccaagcctc

SEQ ID NO: 100185 - DNA, 20 bp, Artificial Sequence
  MKO10100185_B_Mycbpap
  gRNA
tcttgccttggccattaaaa

SEQ ID NO: 100186 - DNA, 20 bp, Artificial Sequence
  MKO10100186_B_Mycbp
  gRNA
agagctgcttcgcctagaat

SEQ ID NO: 100187 - DNA, 20 bp, Artificial Sequence
  MKO10100187_B_Mycbp
  gRNA
aaaaggatactccagagcac

SEQ ID NO: 100188 - DNA, 20 bp, Artificial Sequence
  MKO10100188_B_Mycbp
  gRNA
agagaagcccaccagtgctc

SEQ ID NO: 100189 - DNA, 20 bp, Artificial Sequence
  MKO10100189_B_Mycl
  gRNA
ggaggaatgacctccgctcc

SEQ ID NO: 100190 - DNA, 20 bp, Artificial Sequence
  MKO10100190_B_Mycl
  gRNA
gcggcttctccgcccgagaa

SEQ ID NO: 100191 - DNA, 20 bp, Artificial Sequence
  MKO10100191_B_Mycl
  gRNA
agaggatttctaccgctcca

SEQ ID NO: 100192 - DNA, 20 bp, Artificial Sequence
  MKO10100192_B_Mycn
  gRNA
gaggaggatgcgttcggtct

SEQ ID NO: 100193 - DNA, 20 bp, Artificial Sequence
  MKO10100193_B_Mycn
  gRNA
gcgtcccaagacctccgctc

SEQ ID NO: 100194 - DNA, 20 bp, Artificial Sequence
  MKO10100194_B_Mycn
  gRNA
ggccgacctgtggggcaacc

SEQ ID NO: 100195 - DNA, 20 bp, Artificial Sequence
  MKO10100195_B_Mycs
  gRNA
tagccctcaaatgcgtcttc

SEQ ID NO: 100196 - DNA, 20 bp, Artificial Sequence
  MKO10100196_B_Mycs
  gRNA
taagcgctacgacctcattc

SEQ ID NO: 100197 - DNA, 20 bp, Artificial Sequence
  MKO10100197_B_Mycs
  gRNA
ggccaaggtgcctgcgccga

SEQ ID NO: 100198 - DNA, 20 bp, Artificial Sequence
  MKO10100198_B_Myct1
  gRNA
ccaaggactccctaagctcg

SEQ ID NO: 100199 - DNA, 20 bp, Artificial Sequence
  MKO10100199_B_Myct1
  gRNA
gattgcaagcccaatcgcca

SEQ ID NO: 100200 - DNA, 20 bp, Artificial Sequence
  MKO10100200_B_Myct1
  gRNA
ttcgccgttcatagccactg

SEQ ID NO: 100201 - DNA, 20 bp, Artificial Sequence
  MKO10100201_B_Myc
  gRNA
tgagcccgactccgacctct

SEQ ID NO: 100202 - DNA, 20 bp, Artificial Sequence
  MKO10100202_B_Myc
  gRNA
ccggggtttccaacgcccaa

SEQ ID NO: 100203 - DNA, 20 bp, Artificial Sequence
  MKO10100203_B_Myc
  gRNA
tttgaaggctggatttcctt

SEQ ID NO: 100204 - DNA, 20 bp, Artificial Sequence
  MKO10100204_B_Myd88
  gRNA
cgcatatagtgatgaaccgc

SEQ ID NO: 100205 - DNA, 20 bp, Artificial Sequence
  MKO10100205_B_Myd88
  gRNA
tgacgattatctacagagca

SEQ ID NO: 100206 - DNA, 20 bp, Artificial Sequence
  MKO10100206_B_Myd88
  gRNA
ccttacctagggggtcatca

SEQ ID NO: 100207 - DNA, 20 bp, Artificial Sequence
  MKO10100207_B_Myef2
  gRNA
ggagaatgatgagtcagtga

SEQ ID NO: 100208 - DNA, 20 bp, Artificial Sequence
  MKO10100208_B_Myef2
  gRNA
agttggtgaggttacatacg

SEQ ID NO: 100209 - DNA, 20 bp, Artificial Sequence
  MKO10100209_B_Myef2
  gRNA
aggatgcggaaggaaaatca

SEQ ID NO: 100210 - DNA, 20 bp, Artificial Sequence
  MKO10100210_B_Myeov2
  gRNA
attaaaaaagtctgcatgaa

SEQ ID NO: 100211 - DNA, 20 bp, Artificial Sequence
  MKO10100211_B_Myeov2
  gRNA
ggacatcatcatcatcaaaa

SEQ ID NO: 100212 - DNA, 20 bp, Artificial Sequence
  MKO10100212_B_Myeov2
  gRNA
gatgatgatgatgtccagtg

SEQ ID NO: 100213 - DNA, 20 bp, Artificial Sequence
  MKO10100213_B_Myf5
  gRNA
taatacgtgatagataagtc

SEQ ID NO: 100214 - DNA, 20 bp, Artificial Sequence
  MKO10100214_B_Myf5
  gRNA
cagacagggctgttacattc

SEQ ID NO: 100215 - DNA, 20 bp, Artificial Sequence
  MKO10100215_B_Myf5
  gRNA
tactgtcctgatgtatcaaa

SEQ ID NO: 100216 - DNA, 20 bp, Artificial Sequence
  MKO10100216_B_Myf6
  gRNA
ggaacgcaaactccccagcg

SEQ ID NO: 100217 - DNA, 20 bp, Artificial Sequence
  MKO10100217_B_Myf6
  gRNA
ctggaatgatccgaaacact

SEQ ID NO: 100218 - DNA, 20 bp, Artificial Sequence
  MKO10100218_B_Myf6
  gRNA
tcagcgcctttcttccatcg

SEQ ID NO: 100219 - DNA, 20 bp, Artificial Sequence
  MKO10100219_B_Myg1
  gRNA
gccagcccgggccttagtag

SEQ ID NO: 100220 - DNA, 20 bp, Artificial Sequence
  MKO10100220_B_Myg1
  gRNA
agcaatggacctggtacaag

SEQ ID NO: 100221 - DNA, 20 bp, Artificial Sequence
  MKO10100221_B_Myg1
  gRNA
gttggcttcgtgtgacatcg

SEQ ID NO: 100222 - DNA, 20 bp, Artificial Sequence
  MKO10100222_B_Myh10
  gRNA
gcttacagatgcatgcttca

SEQ ID NO: 100223 - DNA, 20 bp, Artificial Sequence
  MKO10100223_B_Myh10
  gRNA
tttacaagcaaatccaattc

SEQ ID NO: 100224 - DNA, 20 bp, Artificial Sequence
  MKO10100224_B_Myh10
  gRNA
cacagtcttcgcatttccaa

SEQ ID NO: 100225 - DNA, 20 bp, Artificial Sequence
  MKO10100225_B_Myh11
  gRNA
tgtggtggcatcctcccaca

SEQ ID NO: 100226 - DNA, 20 bp, Artificial Sequence
  MKO10100226_B_Myh11
  gRNA
gcctacagaagcatgctaca

SEQ ID NO: 100227 - DNA, 20 bp, Artificial Sequence
  MKO10100227_B_Myh11
  gRNA
atgtctttcagaggtgagtc

SEQ ID NO: 100228 - DNA, 20 bp, Artificial Sequence
  MKO10100228_B_Myh13
  gRNA
tcctcgatcttgtcaaactt

SEQ ID NO: 100229 - DNA, 20 bp, Artificial Sequence
  MKO10100229_B_Myh13
  gRNA
ctgcaattgttgcaaagtat

SEQ ID NO: 100230 - DNA, 20 bp, Artificial Sequence
  MKO10100230_B_Myh13
  gRNA
acttacctgttagcatgaac

SEQ ID NO: 100231 - DNA, 20 bp, Artificial Sequence
  MKO10100231_B_Myh14
  gRNA
gtgtggcttacagggacacc

SEQ ID NO: 100232 - DNA, 20 bp, Artificial Sequence
  MKO10100232_B_Myh14
  gRNA
gacaactcacgtgcagagaa

SEQ ID NO: 100233 - DNA, 20 bp, Artificial Sequence
  MKO10100233_B_Myh14
  gRNA
catccagtacctggcccatg

SEQ ID NO: 100234 - DNA, 20 bp, Artificial Sequence
  MKO10100234_B_Myh15
  gRNA
atgacctctttctgatacac

SEQ ID NO: 100235 - DNA, 20 bp, Artificial Sequence
  MKO10100235_B_Myh15
  gRNA
tctatcatttcaagctcttc

SEQ ID NO: 100236 - DNA, 20 bp, Artificial Sequence
  MKO10100236_B_Myh15
  gRNA
tgggaagaatgcttatattg

SEQ ID NO: 100237 - DNA, 20 bp, Artificial Sequence
  MKO10100237_B_Myh1
  gRNA
tgtaacagtaaaagatgatc

SEQ ID NO: 100238 - DNA, 20 bp, Artificial Sequence
  MKO10100238_B_Myh1
  gRNA
catacgtgatcaaaatagac

SEQ ID NO: 100239 - DNA, 20 bp, Artificial Sequence
  MKO10100239_B_Myh1
  gRNA
cgaactcacgtagatcatcc

SEQ ID NO: 100240 - DNA, 20 bp, Artificial Sequence
  MKO10100240_B_Myh2
  gRNA
cagccatttgtaagggttga

SEQ ID NO: 100241 - DNA, 20 bp, Artificial Sequence
  MKO10100241_B_Myh2
  gRNA
gtcactcacgtagatcatcc

SEQ ID NO: 100242 - DNA, 20 bp, Artificial Sequence
  MKO10100242_B_Myh2
  gRNA
ctgcaattgttgcaaagtac

SEQ ID NO: 100243 - DNA, 20 bp, Artificial Sequence
  MKO10100243_B_Myh3
  gRNA
gaccctggtggttaagccag

SEQ ID NO: 100244 - DNA, 20 bp, Artificial Sequence
  MKO10100244_B_Myh3
  gRNA
ctaccgaggcaaaaaacgcc

SEQ ID NO: 100245 - DNA, 20 bp, Artificial Sequence
  MKO10100245_B_Myh3
  gRNA
ggaagacggtgaacaccaag

SEQ ID NO: 100246 - DNA, 20 bp, Artificial Sequence
  MKO10100246_B_Myh4
  gRNA
gaagacttgatcatccttga

SEQ ID NO: 100247 - DNA, 20 bp, Artificial Sequence
  MKO10100247_B_Myh4
  gRNA
aagaaggaggaggcgacttc

SEQ ID NO: 100248 - DNA, 20 bp, Artificial Sequence
  MKO10100248_B_Myh4
  gRNA
actcacccgtcagcatgaac

SEQ ID NO: 100249 - DNA, 20 bp, Artificial Sequence
  MKO10100249_B_Myh6
  gRNA
gcttgctcacgtgatgagga

SEQ ID NO: 100250 - DNA, 20 bp, Artificial Sequence
  MKO10100250_B_Myh6
  gRNA
cttcttgctacggtccccta

SEQ ID NO: 100251 - DNA, 20 bp, Artificial Sequence
  MKO10100251_B_Myh6
  gRNA
ccgcctaccggggcaagaag

SEQ ID NO: 100252 - DNA, 20 bp, Artificial Sequence
  MKO10100252_B_Myh7b
  gRNA
actgcggagcatgtcgttgt

SEQ ID NO: 100253 - DNA, 20 bp, Artificial Sequence
  MKO10100253_B_Myh7b
  gRNA
ccccactcacgtgatcagca

SEQ ID NO: 100254 - DNA, 20 bp, Artificial Sequence
  MKO10100254_B_Myh7b
  gRNA
tgatgagcaggatgcctatg

SEQ ID NO: 100255 - DNA, 20 bp, Artificial Sequence
  MKO10100255_B_Myh7
  gRNA
tgtcacaacagcggagaatc

SEQ ID NO: 100256 - DNA, 20 bp, Artificial Sequence
  MKO10100256_B_Myh7
  gRNA
gttccagacggtgactgtga

SEQ ID NO: 100257 - DNA, 20 bp, Artificial Sequence
  MKO10100257_B_Myh7
  gRNA
gacgcagaagaggcccgagt

SEQ ID NO: 100258 - DNA, 20 bp, Artificial Sequence
  MKO10100258_B_Myh8
  gRNA
gacaagaagaaggaggagtc

SEQ ID NO: 100259 - DNA, 20 bp, Artificial Sequence
  MKO10100259_B_Myh8
  gRNA
actcacccgtcagcatgaac

SEQ ID NO: 100260 - DNA, 20 bp, Artificial Sequence
  MKO10100260_B_Myh8
  gRNA
tcaccgtcaacccctacaag

SEQ ID NO: 100261 - DNA, 20 bp, Artificial Sequence
  MKO10100261_B_Myh9
  gRNA
acaggccaaccctatcctag

SEQ ID NO: 100262 - DNA, 20 bp, Artificial Sequence
  MKO10100262_B_Myh9
  gRNA
aaacacttacgtgcacagga

SEQ ID NO: 100263 - DNA, 20 bp, Artificial Sequence
  MKO10100263_B_Myh9
  gRNA
tttccaaaggcctctaggat

SEQ ID NO: 100264 - DNA, 20 bp, Artificial Sequence
  MKO10100264_B_Myl10
  gRNA
ccatcaggccttcactatca

SEQ ID NO: 100265 - DNA, 20 bp, Artificial Sequence
  MKO10100265_B_Myl10
  gRNA
ttactcacccagtgcagcaa

SEQ ID NO: 100266 - DNA, 20 bp, Artificial Sequence
  MKO10100266_B_Myl10
  gRNA
tgaccggttcagtgaggagg

SEQ ID NO: 100267 - DNA, 20 bp, Artificial Sequence
  MKO10100267_B_Myl12a
  gRNA
ttgacgccagcatgtcgtgc

SEQ ID NO: 100268 - DNA, 20 bp, Artificial Sequence
  MKO10100268_B_Myl12a
  gRNA
taaaggcttctttgaactcc

SEQ ID NO: 100269 - DNA, 20 bp, Artificial Sequence
  MKO10100269_B_Myl12a
  gRNA
tgtctttcgcgccgtgcttc

SEQ ID NO: 100270 - DNA, 20 bp, Artificial Sequence
  MKO10100270_B_Myl12b
  gRNA
ccgcttcacagacgaggaag

SEQ ID NO: 100271 - DNA, 20 bp, Artificial Sequence
  MKO10100271_B_Myl12b
  gRNA
gtttgaccagtcccagatcc

SEQ ID NO: 100272 - DNA, 20 bp, Artificial Sequence
  MKO10100272_B_Myl12b
  gRNA
gagacgccagcatgtcgtgc

SEQ ID NO: 100273 - DNA, 20 bp, Artificial Sequence
  MKO10100273_B_Myl1
  gRNA
caccaatcccaccaatgcag

SEQ ID NO: 100274 - DNA, 20 bp, Artificial Sequence
  MKO10100274_B_Myl1
  gRNA
gcaagctatctccaacaaca

SEQ ID NO: 100275 - DNA, 20 bp, Artificial Sequence
  MKO10100275_B_Myl1
  gRNA
ttcatagttgatgcagccat

SEQ ID NO: 100276 - DNA, 20 bp, Artificial Sequence
  MKO10100276_B_Myl2
  gRNA
acggtgaagttaattggacc

SEQ ID NO: 100277 - DNA, 20 bp, Artificial Sequence
  MKO10100277_B_Myl2
  gRNA
caccttgaatgcgttgagaa

SEQ ID NO: 100278 - DNA, 20 bp, Artificial Sequence
  MKO10100278_B_Myl2
  gRNA
tcatcgacaagaatgaccta

SEQ ID NO: 100279 - DNA, 20 bp, Artificial Sequence
  MKO10100279_B_Myl3
  gRNA
tgcagagctccgacacgtgc

SEQ ID NO: 100280 - DNA, 20 bp, Artificial Sequence
  MKO10100280_B_Myl3
  gRNA
tgctcaccttcaatctgttc

SEQ ID NO: 100281 - DNA, 20 bp, Artificial Sequence
  MKO10100281_B_Myl3
  gRNA
gaaactgatggctggtcaag

SEQ ID NO: 100282 - DNA, 20 bp, Artificial Sequence
  MKO10100282_B_Myl4
  gRNA
gggcacctatgaggacttcg

SEQ ID NO: 100283 - DNA, 20 bp, Artificial Sequence
  MKO10100283_B_Myl4
  gRNA
cggacgtacccagggtagca

SEQ ID NO: 100284 - DNA, 20 bp, Artificial Sequence
  MKO10100284_B_Myl4
  gRNA
gaggtggagcagctgttgtc

SEQ ID NO: 100285 - DNA, 20 bp, Artificial Sequence
  MKO10100285_B_Myl6b
  gRNA
cctacagatcgagtttaaca

SEQ ID NO: 100286 - DNA, 20 bp, Artificial Sequence
  MKO10100286_B_Myl6b
  gRNA
gtggccaagaaccgggacca

SEQ ID NO: 100287 - DNA, 20 bp, Artificial Sequence
  MKO10100287_B_Myl6b
  gRNA
gaggtagagactgttctggc

SEQ ID NO: 100288 - DNA, 20 bp, Artificial Sequence
  MKO10100288_B_Myl6
  gRNA
tgaatcctcagaattcaagg

SEQ ID NO: 100289 - DNA, 20 bp, Artificial Sequence
  MKO10100289_B_Myl6
  gRNA
gaaatgctcaccatcactct

SEQ ID NO: 100290 - DNA, 20 bp, Artificial Sequence
  MKO10100290_B_Myl6
  gRNA
aatggttgcatcaactatga

SEQ ID NO: 100291 - DNA, 20 bp, Artificial Sequence
  MKO10100291_B_Myl7
  gRNA
cctagggagggtaagtgttc

SEQ ID NO: 100292 - DNA, 20 bp, Artificial Sequence
  MKO10100292_B_Myl7
  gRNA
catctgcaaatcagacctga

SEQ ID NO: 100293 - DNA, 20 bp, Artificial Sequence
  MKO10100293_B_Myl7
  gRNA
ccactcaccgagctgggaat

SEQ ID NO: 100294 - DNA, 20 bp, Artificial Sequence
  MKO10100294_B_Myl9
  gRNA
gaaccccacagacgagtatc

SEQ ID NO: 100295 - DNA, 20 bp, Artificial Sequence
  MKO10100295_B_Myl9
  gRNA
atgattgatcagaaccgaga

SEQ ID NO: 100296 - DNA, 20 bp, Artificial Sequence
  MKO10100296_B_Myl9
  gRNA
gatgtcgagcaagagagcca

SEQ ID NO: 100297 - DNA, 20 bp, Artificial Sequence
  MKO10100297_B_Mylip
  gRNA
caccgcccaatacagctatg

SEQ ID NO: 100298 - DNA, 20 bp, Artificial Sequence
  MKO10100298_B_Mylip
  gRNA
atcatcgaggttgattattt

SEQ ID NO: 100299 - DNA, 20 bp, Artificial Sequence
  MKO10100299_B_Mylip
  gRNA
agctgtattgggcggtgttc

SEQ ID NO: 100300 - DNA, 20 bp, Artificial Sequence
  MKO10100300_B_Mylk2
  gRNA
cagacacccctgtaaagacg

SEQ ID NO: 100301 - DNA, 20 bp, Artificial Sequence
  MKO10100301_B_Mylk2
  gRNA
cccgggtctttcttcgcgtt

SEQ ID NO: 100302 - DNA, 20 bp, Artificial Sequence
  MKO10100302_B_Mylk2
  gRNA
gcctgtggctctctccgtgc

SEQ ID NO: 100303 - DNA, 20 bp, Artificial Sequence
  MKO10100303_B_Mylk3
  gRNA
ccgtgtagcctgctgagatc

SEQ ID NO: 100304 - DNA, 20 bp, Artificial Sequence
  MKO10100304_B_Mylk3
  gRNA
ggacatacctgtgcgaacag

SEQ ID NO: 100305 - DNA, 20 bp, Artificial Sequence
  MKO10100305_B_Mylk3
  gRNA
accctcctaagacttcatgt

SEQ ID NO: 100306 - DNA, 20 bp, Artificial Sequence
  MKO10100306_B_Mylk4
  gRNA
ttctttggcagggggcgttt

SEQ ID NO: 100307 - DNA, 20 bp, Artificial Sequence
  MKO10100307_B_Mylk4
  gRNA
ccaaccgtgcactagatgaa

SEQ ID NO: 100308 - DNA, 20 bp, Artificial Sequence
  MKO10100308_B_Mylk4
  gRNA
gctaaaatcattaagactag

SEQ ID NO: 100309 - DNA, 20 bp, Artificial Sequence
  MKO10100309_B_Mylk
  gRNA
ggagccacagccaagttcga

SEQ ID NO: 100310 - DNA, 20 bp, Artificial Sequence
  MKO10100310_B_Mylk
  gRNA
tggctccttctttgacgcag

SEQ ID NO: 100311 - DNA, 20 bp, Artificial Sequence
  MKO10100311_B_Mylk
  gRNA
aggccggccagtgatcttgc

SEQ ID NO: 100312 - DNA, 20 bp, Artificial Sequence
  MKO10100312_B_Mylpf
  gRNA
gctccagtgatcacatcctc

SEQ ID NO: 100313 - DNA, 20 bp, Artificial Sequence
  MKO10100313_B_Mylpf
  gRNA
gtcaaacatggagaagacgt

SEQ ID NO: 100314 - DNA, 20 bp, Artificial Sequence
  MKO10100314_B_Mylpf
  gRNA
gtttgaccagactcagatcc

SEQ ID NO: 100315 - DNA, 20 bp, Artificial Sequence
  MKO10100315_B_Mynn
  gRNA
ccttatgtgtgcgacacctg

SEQ ID NO: 100316 - DNA, 20 bp, Artificial Sequence
  MKO10100316_B_Mynn
  gRNA
aaacactttcgatcccatac

SEQ ID NO: 100317 - DNA, 20 bp, Artificial Sequence
  MKO10100317_B_Mynn
  gRNA
atttgctcagaaatgccagc

SEQ ID NO: 100318 - DNA, 20 bp, Artificial Sequence
  MKO10100318_B_Myo10
  gRNA
agctatgcaccccctgcacg

SEQ ID NO: 100319 - DNA, 20 bp, Artificial Sequence
  MKO10100319_B_Myo10
  gRNA
cgtggacgacatggcttccc

SEQ ID NO: 100320 - DNA, 20 bp, Artificial Sequence
  MKO10100320_B_Myo10
  gRNA
gaccacgacgccttctgcac

SEQ ID NO: 100321 - DNA, 20 bp, Artificial Sequence
  MKO10100321_B_Myo15
  gRNA
catagaaggcaggttgcgta

SEQ ID NO: 100322 - DNA, 20 bp, Artificial Sequence
  MKO10100322_B_Myo15
  gRNA
caccagaatactgccaatat

SEQ ID NO: 100323 - DNA, 20 bp, Artificial Sequence
  MKO10100323_B_Myo15
  gRNA
tacgcaacctgccttctatg

SEQ ID NO: 100324 - DNA, 20 bp, Artificial Sequence
  MKO10100324_B_Myo16
  gRNA
ttgcagaagtcctcattgac

SEQ ID NO: 100325 - DNA, 20 bp, Artificial Sequence
  MKO10100325_B_Myo16
  gRNA
gctacctttctcatccagat

SEQ ID NO: 100326 - DNA, 20 bp, Artificial Sequence
  MKO10100326_B_Myo16
  gRNA
cattgacgcccctgtcaatg

SEQ ID NO: 100327 - DNA, 20 bp, Artificial Sequence
  MKO10100327_B_Myo18a
  gRNA
gctcagcctacccgagggga

SEQ ID NO: 100328 - DNA, 20 bp, Artificial Sequence
  MKO10100328_B_Myo18a
  gRNA
agagcagattgccgctgaag

SEQ ID NO: 100329 - DNA, 20 bp, Artificial Sequence
  MKO10100329_B_Myo18a
  gRNA
gactaccagctttcagcatc

SEQ ID NO: 100330 - DNA, 20 bp, Artificial Sequence
  MKO10100330_B_Myo18b
  gRNA
ggctctgcatcgatgcagac

SEQ ID NO: 100331 - DNA, 20 bp, Artificial Sequence
  MKO10100331_B_Myo18b
  gRNA
aacggtgcttaaaccagatg

SEQ ID NO: 100332 - DNA, 20 bp, Artificial Sequence
  MKO10100332_B_Myo18b
  gRNA
gggccattcacctctacttc

SEQ ID NO: 100333 - DNA, 20 bp, Artificial Sequence
  MKO10100333_B_Myo19
  gRNA
caaggtgaatcccgtgacac

SEQ ID NO: 100334 - DNA, 20 bp, Artificial Sequence
  MKO10100334_B_Myo19
  gRNA
gacatattctataccaatgc

SEQ ID NO: 100335 - DNA, 20 bp, Artificial Sequence
  MKO10100335_B_Myo19
  gRNA
actctctccactgaccacga

SEQ ID NO: 100336 - DNA, 20 bp, Artificial Sequence
  MKO10100336_B_Myo1a
  gRNA
ctccactctcgcctgtgatg

SEQ ID NO: 100337 - DNA, 20 bp, Artificial Sequence
  MKO10100337_B_Myo1a
  gRNA
tacgagcagcttcccatcta

SEQ ID NO: 100338 - DNA, 20 bp, Artificial Sequence
  MKO10100338_B_Myo1a
  gRNA
ggtcccgatccttcagtgac

SEQ ID NO: 100339 - DNA, 20 bp, Artificial Sequence
  MKO10100339_B_Myo1b
  gRNA
ttatatctgttaacccctac

SEQ ID NO: 100340 - DNA, 20 bp, Artificial Sequence
  MKO10100340_B_Myo1b
  gRNA
gatcaatgcattctcattac

SEQ ID NO: 100341 - DNA, 20 bp, Artificial Sequence
  MKO10100341_B_Myo1b
  gRNA
tcctatgtcgctgccgtgtg

SEQ ID NO: 100342 - DNA, 20 bp, Artificial Sequence
  MKO10100342_B_Myo1c
  gRNA
cagcatatggaacgctaccg

SEQ ID NO: 100343 - DNA, 20 bp, Artificial Sequence
  MKO10100343_B_Myo1c
  gRNA
ccgccggaggttctcaatga

SEQ ID NO: 100344 - DNA, 20 bp, Artificial Sequence
  MKO10100344_B_Myo1c
  gRNA
gttatcgttgcggagagtct

SEQ ID NO: 100345 - DNA, 20 bp, Artificial Sequence
  MKO10100345_B_Myo1d
  gRNA
gacacctgtattatgatatc

SEQ ID NO: 100346 - DNA, 20 bp, Artificial Sequence
  MKO10100346_B_Myo1d
  gRNA
atactgcatgatgtacttac

SEQ ID NO: 100347 - DNA, 20 bp, Artificial Sequence
  MKO10100347_B_Myo1d
  gRNA
cgtgtgattgtgcagcagcc

SEQ ID NO: 100348 - DNA, 20 bp, Artificial Sequence
  MKO10100348_B_Myo1e
  gRNA
gacatagctcataatgtact

SEQ ID NO: 100349 - DNA, 20 bp, Artificial Sequence
  MKO10100349_B_Myo1e
  gRNA
aaagaagtcgaaatgtacca

SEQ ID NO: 100350 - DNA, 20 bp, Artificial Sequence
  MKO10100350_B_Myo1e
  gRNA
ttctgtacatactatcagca

SEQ ID NO: 100351 - DNA, 20 bp, Artificial Sequence
  MKO10100351_B_Myo1f
  gRNA
gttgctcacaatggcgtcct

SEQ ID NO: 100352 - DNA, 20 bp, Artificial Sequence
  MKO10100352_B_Myo1f
  gRNA
cacagtcgatcagcatattc

SEQ ID NO: 100353 - DNA, 20 bp, Artificial Sequence
  MKO10100353_B_Myo1f
  gRNA
ccgagaaattgacctctatc

SEQ ID NO: 100354 - DNA, 20 bp, Artificial Sequence
  MKO10100354_B_Myo1g
  gRNA
agttgtggttgcgattggtg

SEQ ID NO: 100355 - DNA, 20 bp, Artificial Sequence
  MKO10100355_B_Myo1g
  gRNA
agggttctcaagcaacatgt

SEQ ID NO: 100356 - DNA, 20 bp, Artificial Sequence
  MKO10100356_B_Myo1g
  gRNA
gtactgcatgatgtgcttgc

SEQ ID NO: 100357 - DNA, 20 bp, Artificial Sequence
  MKO10100357_B_Myo1h
  gRNA
ggacatacagttcgacttcc

SEQ ID NO: 100358 - DNA, 20 bp, Artificial Sequence
  MKO10100358_B_Myo1h
  gRNA
aagtcaccgcgaagtactgg

SEQ ID NO: 100359 - DNA, 20 bp, Artificial Sequence
  MKO10100359_B_Myo1h
  gRNA
gttgtcgttacggagggtct

SEQ ID NO: 100360 - DNA, 20 bp, Artificial Sequence
  MKO10100360_B_Myo3a
  gRNA
ctacgggatttactttaaaa

SEQ ID NO: 100361 - DNA, 20 bp, Artificial Sequence
  MKO10100361_B_Myo3a
  gRNA
aacatcctgttgactactga

SEQ ID NO: 100362 - DNA, 20 bp, Artificial Sequence
  MKO10100362_B_Myo3a
  gRNA
ggagtaaaactagtagattt

SEQ ID NO: 100363 - DNA, 20 bp, Artificial Sequence
  MKO10100363_B_Myo3b
  gRNA
gccttctgaggtgcggcaag

SEQ ID NO: 100364 - DNA, 20 bp, Artificial Sequence
  MKO10100364_B_Myo3b
  gRNA
cccataaaactttacaacgt

SEQ ID NO: 100365 - DNA, 20 bp, Artificial Sequence
  MKO10100365_B_Myo3b
  gRNA
gcctcttgccgcacctcaga

SEQ ID NO: 100366 - DNA, 20 bp, Artificial Sequence
  MKO10100366_B_Myo5a
  gRNA
aaacttatttatacgtattg

SEQ ID NO: 100367 - DNA, 20 bp, Artificial Sequence
  MKO10100367_B_Myo5a
  gRNA
tatgagcagctgcctattta

SEQ ID NO: 100368 - DNA, 20 bp, Artificial Sequence
  MKO10100368_B_Myo5a
  gRNA
agtgctcctgcttcacctcg

SEQ ID NO: 100369 - DNA, 20 bp, Artificial Sequence
  MKO10100369_B_Myo5b
  gRNA
taggaccttctcttcaatgt

SEQ ID NO: 100370 - DNA, 20 bp, Artificial Sequence
  MKO10100370_B_Myo5b
  gRNA
cgcagttctgcataacttaa

SEQ ID NO: 100371 - DNA, 20 bp, Artificial Sequence
  MKO10100371_B_Myo5b
  gRNA
cggaatccagatatcttagt

SEQ ID NO: 100372 - DNA, 20 bp, Artificial Sequence
  MKO10100372_B_Myo5c
  gRNA
atgatggcatccccgtatat

SEQ ID NO: 100373 - DNA, 20 bp, Artificial Sequence
  MKO10100373_B_Myo5c
  gRNA
gcttcggaaccctgacatcc

SEQ ID NO: 100374 - DNA, 20 bp, Artificial Sequence
  MKO10100374_B_Myo5c
  gRNA
aatcgcaaaggactacagag

SEQ ID NO: 100375 - DNA, 20 bp, Artificial Sequence
  MKO10100375_B_Myo6
  gRNA
tcctccacaatgtcaaagtt

SEQ ID NO: 100376 - DNA, 20 bp, Artificial Sequence
  MKO10100376_B_Myo6
  gRNA
ccaccccatgtctttgccat

SEQ ID NO: 100377 - DNA, 20 bp, Artificial Sequence
  MKO10100377_B_Myo6
  gRNA
attcactgcaatcagaatgt

SEQ ID NO: 100378 - DNA, 20 bp, Artificial Sequence
  MKO10100378_B_Myo7a
  gRNA
gatgtgctctggcgagtaga

SEQ ID NO: 100379 - DNA, 20 bp, Artificial Sequence
  MKO10100379_B_Myo7a
  gRNA
cgagtcgcagagcttcacca

SEQ ID NO: 100380 - DNA, 20 bp, Artificial Sequence
  MKO10100380_B_Myo7a
  gRNA
gctggaggccaccccgatcc

SEQ ID NO: 100381 - DNA, 20 bp, Artificial Sequence
  MKO10100381_B_Myo7b
  gRNA
ggggaggcagctcgcccatg

SEQ ID NO: 100382 - DNA, 20 bp, Artificial Sequence
  MKO10100382_B_Myo7b
  gRNA
aatctactacagccgccaca

SEQ ID NO: 100383 - DNA, 20 bp, Artificial Sequence
  MKO10100383_B_Myo7b
  gRNA
tcacatagatcttgtgctgc

SEQ ID NO: 100384 - DNA, 20 bp, Artificial Sequence
  MKO10100384_B_Myo9a
  gRNA
ttattgctatgattctgagc

SEQ ID NO: 100385 - DNA, 20 bp, Artificial Sequence
  MKO10100385_B_Myo9a
  gRNA
tttatcaagagcataatgaa

SEQ ID NO: 100386 - DNA, 20 bp, Artificial Sequence
  MKO10100386_B_Myo9a
  gRNA
caagtacagtgcctgtttct

SEQ ID NO: 100387 - DNA, 20 bp, Artificial Sequence
  MKO10100387_B_Myo9b
  gRNA
agactatttctacctcaacc

SEQ ID NO: 100388 - DNA, 20 bp, Artificial Sequence
  MKO10100388_B_Myo9b
  gRNA
tgtcagtgaggaggagcgcc

SEQ ID NO: 100389 - DNA, 20 bp, Artificial Sequence
  MKO10100389_B_Myo9b
  gRNA
cttggatgaacttcccgaag

SEQ ID NO: 100390 - DNA, 20 bp, Artificial Sequence
  MKO10100390_B_Myocd
  gRNA
aacactctttgctgattaga

SEQ ID NO: 100391 - DNA, 20 bp, Artificial Sequence
  MKO10100391_B_Myocd
  gRNA
ccatgacccgagaaaacaat

SEQ ID NO: 100392 - DNA, 20 bp, Artificial Sequence
  MKO10100392_B_Myocd
  gRNA
gagactcaccatgacactcc

SEQ ID NO: 100393 - DNA, 20 bp, Artificial Sequence
  MKO10100393_B_Myoc
  gRNA
aaaatccatctggccgaccc

SEQ ID NO: 100394 - DNA, 20 bp, Artificial Sequence
  MKO10100394_B_Myoc
  gRNA
caatctccttcgagataagt

SEQ ID NO: 100395 - DNA, 20 bp, Artificial Sequence
  MKO10100395_B_Myoc
  gRNA
tcctgcttcccaaatcttga

SEQ ID NO: 100396 - DNA, 20 bp, Artificial Sequence
  MKO10100396_B_Myod1
  gRNA
gcgcgccgcctcactgtagt

SEQ ID NO: 100397 - DNA, 20 bp, Artificial Sequence
  MKO10100397_B_Myod1
  gRNA
agcggcccccggcggcagaa

SEQ ID NO: 100398 - DNA, 20 bp, Artificial Sequence
  MKO10100398_B_Myod1
  gRNA
cggcgtcgggagacggggtc

SEQ ID NO: 100399 - DNA, 20 bp, Artificial Sequence
  MKO10100399_B_Myof
  gRNA
gacctccctgctaaatgaaa

SEQ ID NO: 100400 - DNA, 20 bp, Artificial Sequence
  MKO10100400_B_Myof
  gRNA
ataatgaactcaaccctgtc

SEQ ID NO: 100401 - DNA, 20 bp, Artificial Sequence
  MKO10100401_B_Myof
  gRNA
aatctttgacaacaatcacc

SEQ ID NO: 100402 - DNA, 20 bp, Artificial Sequence
  MKO10100402_B_Myog
  gRNA
caccgtgatgctgtccacga

SEQ ID NO: 100403 - DNA, 20 bp, Artificial Sequence
  MKO10100403_B_Myog
  gRNA
gattcacttacctcctgggt

SEQ ID NO: 100404 - DNA, 20 bp, Artificial Sequence
  MKO10100404_B_Myog
  gRNA
gctgtgggagttgcattcac

SEQ ID NO: 100405 - DNA, 20 bp, Artificial Sequence
  MKO10100405_B_Myom1
  gRNA
agtggctcatggtcgtgcga

SEQ ID NO: 100406 - DNA, 20 bp, Artificial Sequence
  MKO10100406_B_Myom1
  gRNA
aagcttgccaggcaactacc

SEQ ID NO: 100407 - DNA, 20 bp, Artificial Sequence
  MKO10100407_B_Myom1
  gRNA
atagccgtaatcatatgcag

SEQ ID NO: 100408 - DNA, 20 bp, Artificial Sequence
  MKO10100408_B_Myom2
  gRNA
cccataggtggaagacaatc

SEQ ID NO: 100409 - DNA, 20 bp, Artificial Sequence
  MKO10100409_B_Myom2
  gRNA
gcaaggattccccacgcctg

SEQ ID NO: 100410 - DNA, 20 bp, Artificial Sequence
  MKO10100410_B_Myom2
  gRNA
ctccgtacctgctctcaatc

SEQ ID NO: 100411 - DNA, 20 bp, Artificial Sequence
  MKO10100411_B_Myom3
  gRNA
tgctgcgtcagaggcgagac

SEQ ID NO: 100412 - DNA, 20 bp, Artificial Sequence
  MKO10100412_B_Myom3
  gRNA
acaggtacaagaacgacatc

SEQ ID NO: 100413 - DNA, 20 bp, Artificial Sequence
  MKO10100413_B_Myom3
  gRNA
ggtaggctttggcaatgacc

SEQ ID NO: 100414 - DNA, 20 bp, Artificial Sequence
  MKO10100414_B_Myot
  gRNA
agaagcgttgattcaagatt

SEQ ID NO: 100415 - DNA, 20 bp, Artificial Sequence
  MKO10100415_B_Myot
  gRNA
aatgtacctgtggtgaatct

SEQ ID NO: 100416 - DNA, 20 bp, Artificial Sequence
  MKO10100416_B_Myot
  gRNA
acgtgcagccgtgcttgctc

SEQ ID NO: 100417 - DNA, 20 bp, Artificial Sequence
  MKO10100417_B_Myoz1
  gRNA
ggagcatgtagactacaacg

SEQ ID NO: 100418 - DNA, 20 bp, Artificial Sequence
  MKO10100418_B_Myoz1
  gRNA
tggctctgaccgtcatcagc

SEQ ID NO: 100419 - DNA, 20 bp, Artificial Sequence
  MKO10100419_B_Myoz1
  gRNA
tcaatcgaacccctattccc

SEQ ID NO: 100420 - DNA, 20 bp, Artificial Sequence
  MKO10100420_B_Myoz2
  gRNA
aggctcagttgtgatcacga

SEQ ID NO: 100421 - DNA, 20 bp, Artificial Sequence
  MKO10100421_B_Myoz2
  gRNA
gcaggcgattggcagcgatc

SEQ ID NO: 100422 - DNA, 20 bp, Artificial Sequence
  MKO10100422_B_Myoz2
  gRNA
tcttgcagatgttgacggca

SEQ ID NO: 100423 - DNA, 20 bp, Artificial Sequence
  MKO10100423_B_Myoz3
  gRNA
tgctgccactcgagtagtct

SEQ ID NO: 100424 - DNA, 20 bp, Artificial Sequence
  MKO10100424_B_Myoz3
  gRNA
accggagaagttcaaccaca

SEQ ID NO: 100425 - DNA, 20 bp, Artificial Sequence
  MKO10100425_B_Myoz3
  gRNA
ctgtctctacgaaacaaccg

SEQ ID NO: 100426 - DNA, 20 bp, Artificial Sequence
  MKO10100426_B_Mypn
  gRNA
ttagttaccttcgtaaacac

SEQ ID NO: 100427 - DNA, 20 bp, Artificial Sequence
  MKO10100427_B_Mypn
  gRNA
tgcagcgccagtgtttacga

SEQ ID NO: 100428 - DNA, 20 bp, Artificial Sequence
  MKO10100428_B_Mypn
  gRNA
cagagtgtccaccgtccagc

SEQ ID NO: 100429 - DNA, 20 bp, Artificial Sequence
  MKO10100429_B_Mypop
  gRNA
tgccacttgggccagcgccg

SEQ ID NO: 100430 - DNA, 20 bp, Artificial Sequence
  MKO10100430_B_Mypop
  gRNA
gtggtctcctccgcttcgcc

SEQ ID NO: 100431 - DNA, 20 bp, Artificial Sequence
  MKO10100431_B_Mypop
  gRNA
ctctgcgcgccgtagagctg

SEQ ID NO: 100432 - DNA, 20 bp, Artificial Sequence
  MKO10100432_B_Myrfl
  gRNA
cgtgggtcggatgcagagta

SEQ ID NO: 100433 - DNA, 20 bp, Artificial Sequence
  MKO10100433_B_Myrfl
  gRNA
aaagcactcgcagatacaag

SEQ ID NO: 100434 - DNA, 20 bp, Artificial Sequence
  MKO10100434_B_Myrfl
  gRNA
gctcacttggtctgaagtag

SEQ ID NO: 100435 - DNA, 20 bp, Artificial Sequence
  MKO10100435_B_Myrf
  gRNA
atactggtgtctatattgga

SEQ ID NO: 100436 - DNA, 20 bp, Artificial Sequence
  MKO10100436_B_Myrf
  gRNA
ccggccattcccggctccag

SEQ ID NO: 100437 - DNA, 20 bp, Artificial Sequence
  MKO10100437_B_Myrf
  gRNA
ctttgccaatgtactcctcc

SEQ ID NO: 100438 - DNA, 20 bp, Artificial Sequence
  MKO10100438_B_Myrip
  gRNA
aaaagccgcttcaagcgctt

SEQ ID NO: 100439 - DNA, 20 bp, Artificial Sequence
  MKO10100439_B_Myrip
  gRNA
ggtacctaggatgtcgaagc

SEQ ID NO: 100440 - DNA, 20 bp, Artificial Sequence
  MKO10100440_B_Myrip
  gRNA
gtcctaccaggctgtcccca

SEQ ID NO: 100441 - DNA, 20 bp, Artificial Sequence
  MKO10100441_B_Mysm1
  gRNA
ttatctaataaatcacttcc

SEQ ID NO: 100442 - DNA, 20 bp, Artificial Sequence
  MKO10100442_B_Mysm1
  gRNA
agctctgttctcatcactga

SEQ ID NO: 100443 - DNA, 20 bp, Artificial Sequence
  MKO10100443_B_Mysm1
  gRNA
ataataaaaaatacacaaac

SEQ ID NO: 100444 - DNA, 20 bp, Artificial Sequence
  MKO10100444_B_Myt1l
  gRNA
aggcttacctcgaacccctt

SEQ ID NO: 100445 - DNA, 20 bp, Artificial Sequence
  MKO10100445_B_Myt1l
  gRNA
tgaccactgccgtcgcagcc

SEQ ID NO: 100446 - DNA, 20 bp, Artificial Sequence
  MKO10100446_B_Myt1l
  gRNA
cagccatacaagagctgttc

SEQ ID NO: 100447 - DNA, 20 bp, Artificial Sequence
  MKO10100447_B_Myt1
  gRNA
atagtaccttcagctgtctg

SEQ ID NO: 100448 - DNA, 20 bp, Artificial Sequence
  MKO10100448_B_Myt1
  gRNA
tctggatgagggttaccgca

SEQ ID NO: 100449 - DNA, 20 bp, Artificial Sequence
  MKO10100449_B_Myt1
  gRNA
gcactgacctcggagggtct

SEQ ID NO: 100450 - DNA, 20 bp, Artificial Sequence
  MKO10100450_B_Myzap
  gRNA
agctatccagggccgatgcc

SEQ ID NO: 100451 - DNA, 20 bp, Artificial Sequence
  MKO10100451_B_Myzap
  gRNA
acacgaccatttccttctgc

SEQ ID NO: 100452 - DNA, 20 bp, Artificial Sequence
  MKO10100452_B_Myzap
  gRNA
acaccatagacaacaccctg

SEQ ID NO: 100453 - DNA, 20 bp, Artificial Sequence
  MKO10100453_B_Mzb1
  gRNA
atgctattacctattgggcc

SEQ ID NO: 100454 - DNA, 20 bp, Artificial Sequence
  MKO10100454_B_Mzb1
  gRNA
acctgcgctgcgatgcctgc

SEQ ID NO: 100455 - DNA, 20 bp, Artificial Sequence
  MKO10100455_B_Mzb1
  gRNA
gaaccagatgaagcgtctca

SEQ ID NO: 100456 - DNA, 20 bp, Artificial Sequence
  MKO10100456_B_Mzf1
  gRNA
ggcatagggtcctcactcca

SEQ ID NO: 100457 - DNA, 20 bp, Artificial Sequence
  MKO10100457_B_Mzf1
  gRNA
acagagttgttggggaatcc

SEQ ID NO: 100458 - DNA, 20 bp, Artificial Sequence
  MKO10100458_B_Mzf1
  gRNA
agggttccatcttctctgat

SEQ ID NO: 100459 - DNA, 20 bp, Artificial Sequence
  MKO10100459_B_Mzt1
  gRNA
caagggtactgaggcactaa

SEQ ID NO: 100460 - DNA, 20 bp, Artificial Sequence
  MKO10100460_B_Mzt1
  gRNA
ggcctcggccaacctgaacg

SEQ ID NO: 100461 - DNA, 20 bp, Artificial Sequence
  MKO10100461_B_Mzt1
  gRNA
ttggccgaggccgccgcgcc

SEQ ID NO: 100462 - DNA, 20 bp, Artificial Sequence
  MKO10100462_B_Mzt2
  gRNA
gagatatgggcaccgagtcc

SEQ ID NO: 100463 - DNA, 20 bp, Artificial Sequence
  MKO10100463_B_Mzt2
  gRNA
cacgccagcccagtgcgact

SEQ ID NO: 100464 - DNA, 20 bp, Artificial Sequence
  MKO10100464_B_Mzt2
  gRNA
caactcccgaagcagcccat

SEQ ID NO: 100465 - DNA, 20 bp, Artificial Sequence
  MKO10100465_B_N28178
  gRNA
agcagaggcgagcgcccccg

SEQ ID NO: 100466 - DNA, 20 bp, Artificial Sequence
  MKO10100466_B_N28178
  gRNA
gagcggctccgagatgggcg

SEQ ID NO: 100467 - DNA, 20 bp, Artificial Sequence
  MKO10100467_B_N28178
  gRNA
gatgactttacaccgctgaa

SEQ ID NO: 100468 - DNA, 20 bp, Artificial Sequence
  MKO10100468_B_N4bp1
  gRNA
tgggcctcacctgtgatatt

SEQ ID NO: 100469 - DNA, 20 bp, Artificial Sequence
  MKO10100469_B_N4bp1
  gRNA
agacgggatcctaatatcac

SEQ ID NO: 100470 - DNA, 20 bp, Artificial Sequence
  MKO10100470_B_N4bp1
  gRNA
cagagagtttgtgaccgagt

SEQ ID NO: 100471 - DNA, 20 bp, Artificial Sequence
  MKO10100471_B_N4bp2l1
  gRNA
gttgaatttccagcgagtgt

SEQ ID NO: 100472 - DNA, 20 bp, Artificial Sequence
  MKO10100472_B_N4bp2l1
  gRNA
ataacaccaacctgcacgcc

SEQ ID NO: 100473 - DNA, 20 bp, Artificial Sequence
  MKO10100473_B_N4bp2l1
  gRNA
tctccctaccatgactgcat

SEQ ID NO: 100474 - DNA, 20 bp, Artificial Sequence
  MKO10100474_B_N4bp2l2
  gRNA
acaacactaatacacaagcc

SEQ ID NO: 100475 - DNA, 20 bp, Artificial Sequence
  MKO10100475_B_N4bp2l2
  gRNA
gcaaaacaagctattgacca

SEQ ID NO: 100476 - DNA, 20 bp, Artificial Sequence
  MKO10100476_B_N4bp2l2
  gRNA
cagagtagagtttcatgaac

SEQ ID NO: 100477 - DNA, 20 bp, Artificial Sequence
  MKO10100477_B_N4bp2
  gRNA
tcaagccgaaggagcttgcg

SEQ ID NO: 100478 - DNA, 20 bp, Artificial Sequence
  MKO10100478_B_N4bp2
  gRNA
ttgaacttccaccacgtgtc

SEQ ID NO: 100479 - DNA, 20 bp, Artificial Sequence
  MKO10100479_B_N4bp2
  gRNA
ataatacaaacctccaagcg

SEQ ID NO: 100480 - DNA, 20 bp, Artificial Sequence
  MKO10100480_B_N4bp3
  gRNA
ggacatgtaccgccgcaacc

SEQ ID NO: 100481 - DNA, 20 bp, Artificial Sequence
  MKO10100481_B_N4bp3
  gRNA
cgctaccagcgagaaatcca

SEQ ID NO: 100482 - DNA, 20 bp, Artificial Sequence
  MKO10100482_B_N4bp3
  gRNA
atgctcccggtagtagaggg

SEQ ID NO: 100483 - DNA, 20 bp, Artificial Sequence
  MKO10100483_B_N6amt1
  gRNA
agggggggttaaacaccagc

SEQ ID NO: 100484 - DNA, 20 bp, Artificial Sequence
  MKO10100484_B_N6amt1
  gRNA
gtgcactgatatcaaccctg

SEQ ID NO: 100485 - DNA, 20 bp, Artificial Sequence
  MKO10100485_B_N6amt1
  gRNA
cagatcctgctcctacttca

SEQ ID NO: 100486 - DNA, 20 bp, Artificial Sequence
  MKO10100486_B_N6amt2
  gRNA
agtcatagttcgtgtaacag

SEQ ID NO: 100487 - DNA, 20 bp, Artificial Sequence
  MKO10100487_B_N6amt2
  gRNA
ggatgataaatataacgttg

SEQ ID NO: 100488 - DNA, 20 bp, Artificial Sequence
  MKO10100488_B_N6amt2
  gRNA
aagcaatccgtcaaccccag

SEQ ID NO: 100489 - DNA, 20 bp, Artificial Sequence
  MKO10100489_B_Naa10
  gRNA
tgcccacctggggccaagag

SEQ ID NO: 100490 - DNA, 20 bp, Artificial Sequence
  MKO10100490_B_Naa10
  gRNA
gacccagacgatgtgcccca

SEQ ID NO: 100491 - DNA, 20 bp, Artificial Sequence
  MKO10100491_B_Naa10
  gRNA
cgatgaacatccgcaatgct

SEQ ID NO: 100492 - DNA, 20 bp, Artificial Sequence
  MKO10100492_B_Naa11
  gRNA
cgggcgatgatcgagaactt

SEQ ID NO: 100493 - DNA, 20 bp, Artificial Sequence
  MKO10100493_B_Naa11
  gRNA
ccagcgaggtgatgtgcccg

SEQ ID NO: 100494 - DNA, 20 bp, Artificial Sequence
  MKO10100494_B_Naa11
  gRNA
agtacgtgtccctgcacgtc

SEQ ID NO: 100495 - DNA, 20 bp, Artificial Sequence
  MKO10100495_B_Naa15
  gRNA
gataccagttgcttcagctt

SEQ ID NO: 100496 - DNA, 20 bp, Artificial Sequence
  MKO10100496_B_Naa15
  gRNA
acctccatgctctgcaaatt

SEQ ID NO: 100497 - DNA, 20 bp, Artificial Sequence
  MKO10100497_B_Naa15
  gRNA
gattcaaatgcgagatcttg

SEQ ID NO: 100498 - DNA, 20 bp, Artificial Sequence
  MKO10100498_B_Naa16
  gRNA
cctccatgttcagcaaactt

SEQ ID NO: 100499 - DNA, 20 bp, Artificial Sequence
  MKO10100499_B_Naa16
  gRNA
atccaggaagcacgctgtgt

SEQ ID NO: 100500 - DNA, 20 bp, Artificial Sequence
  MKO10100500_B_Naa16
  gRNA
gcatatgaatttgttcgtaa

SEQ ID NO: 100501 - DNA, 20 bp, Artificial Sequence
  MKO10100501_B_Naa20
  gRNA
ttcatcgtcgctgaagcacc

SEQ ID NO: 100502 - DNA, 20 bp, Artificial Sequence
  MKO10100502_B_Naa20
  gRNA
gcccctgaattccgccgtct

SEQ ID NO: 100503 - DNA, 20 bp, Artificial Sequence
  MKO10100503_B_Naa20
  gRNA
taacccattagttctccgcc

SEQ ID NO: 100504 - DNA, 20 bp, Artificial Sequence
  MKO10100504_B_Naa25
  gRNA
cccatagattatcttgataa

SEQ ID NO: 100505 - DNA, 20 bp, Artificial Sequence
  MKO10100505_B_Naa25
  gRNA
gttagtcacaaagctctatg

SEQ ID NO: 100506 - DNA, 20 bp, Artificial Sequence
  MKO10100506_B_Naa25
  gRNA
ccaaaaacccttactacttt

SEQ ID NO: 100507 - DNA, 20 bp, Artificial Sequence
  MKO10100507_B_Naa30
  gRNA
ttatatagccatgttagccg

SEQ ID NO: 100508 - DNA, 20 bp, Artificial Sequence
  MKO10100508_B_Naa30
  gRNA
cacaaaaagatgttccgcag

SEQ ID NO: 100509 - DNA, 20 bp, Artificial Sequence
  MKO10100509_B_Naa30
  gRNA
ttatattctaggtactaact

SEQ ID NO: 100510 - DNA, 20 bp, Artificial Sequence
  MKO10100510_B_Naa35
  gRNA
agtcgggattatgaatgtaa

SEQ ID NO: 100511 - DNA, 20 bp, Artificial Sequence
  MKO10100511_B_Naa35
  gRNA
caacagatcacatggctcga

SEQ ID NO: 100512 - DNA, 20 bp, Artificial Sequence
  MKO10100512_B_Naa35
  gRNA
tccattattcctatcagttc

SEQ ID NO: 100513 - DNA, 20 bp, Artificial Sequence
  MKO10100513_B_Naa40
  gRNA
gctggaaggaccgagaaaaa

SEQ ID NO: 100514 - DNA, 20 bp, Artificial Sequence
  MKO10100514_B_Naa40
  gRNA
tgcttacatcgtctgcatat

SEQ ID NO: 100515 - DNA, 20 bp, Artificial Sequence
  MKO10100515_B_Naa40
  gRNA
agacactcgcttacattcaa

SEQ ID NO: 100516 - DNA, 20 bp, Artificial Sequence
  MKO10100516_B_Naa50
  gRNA
cttgcaccttaccgaagact

SEQ ID NO: 100517 - DNA, 20 bp, Artificial Sequence
  MKO10100517_B_Naa50
  gRNA
tcgctgactcattgctgatc

SEQ ID NO: 100518 - DNA, 20 bp, Artificial Sequence
  MKO10100518_B_Naa50
  gRNA
tgtcctaaacatctgtgaga

SEQ ID NO: 100519 - DNA, 20 bp, Artificial Sequence
  MKO10100519_B_Naa60
  gRNA
tcatatttcaaccaccgccc

SEQ ID NO: 100520 - DNA, 20 bp, Artificial Sequence
  MKO10100520_B_Naa60
  gRNA
cccaatggcattacatggta

SEQ ID NO: 100521 - DNA, 20 bp, Artificial Sequence
  MKO10100521_B_Naa60
  gRNA
tcccttgctgcaacctacag

SEQ ID NO: 100522 - DNA, 20 bp, Artificial Sequence
  MKO10100522_B_Naaa
  gRNA
ggttccggccgtggtaaata

SEQ ID NO: 100523 - DNA, 20 bp, Artificial Sequence
  MKO10100523_B_Naaa
  gRNA
ggtcggagaaattgtgtcga

SEQ ID NO: 100524 - DNA, 20 bp, Artificial Sequence
  MKO10100524_B_Naaa
  gRNA
cggaacctggactatccttt

SEQ ID NO: 100525 - DNA, 20 bp, Artificial Sequence
  MKO10100525_B_Naalad2
  gRNA
gtaacattctcatatccatc

SEQ ID NO: 100526 - DNA, 20 bp, Artificial Sequence
  MKO10100526_B_Naalad2
  gRNA
gaaatgaacatcaactgcac

SEQ ID NO: 100527 - DNA, 20 bp, Artificial Sequence
  MKO10100527_B_Naalad2
  gRNA
taccttgaaccaccaccaga

SEQ ID NO: 100528 - DNA, 20 bp, Artificial Sequence
  MKO10100528_B_Naaladl1
  gRNA
accatcgctctgactcgcta

SEQ ID NO: 100529 - DNA, 20 bp, Artificial Sequence
  MKO10100529_B_Naaladl1
  gRNA
tcaccgacttccacgctgtt

SEQ ID NO: 100530 - DNA, 20 bp, Artificial Sequence
  MKO10100530_B_Naaladl1
  gRNA
gggaatcgggggaaatcctg

SEQ ID NO: 100531 - DNA, 20 bp, Artificial Sequence
  MKO10100531_B_Nab1
  gRNA
ggtcctgtaagtgtacttgt

SEQ ID NO: 100532 - DNA, 20 bp, Artificial Sequence
  MKO10100532_B_Nab1
  gRNA
tgtgccaacactcttccagc

SEQ ID NO: 100533 - DNA, 20 bp, Artificial Sequence
  MKO10100533_B_Nab1
  gRNA
aacttctcgagaaacctgcc

SEQ ID NO: 100534 - DNA, 20 bp, Artificial Sequence
  MKO10100534_B_Nab2
  gRNA
gccacagctgaccatcaacg

SEQ ID NO: 100535 - DNA, 20 bp, Artificial Sequence
  MKO10100535_B_Nab2
  gRNA
tgttgtccctcatgcagaac

SEQ ID NO: 100536 - DNA, 20 bp, Artificial Sequence
  MKO10100536_B_Nab2
  gRNA
tggctgttccgctgtgggag

SEQ ID NO: 100537 - DNA, 20 bp, Artificial Sequence
  MKO10100537_B_Nabp1
  gRNA
ggtggtgaacttcaaaaaat

SEQ ID NO: 100538 - DNA, 20 bp, Artificial Sequence
  MKO10100538_B_Nabp1
  gRNA
gagccaaacccagattatag

SEQ ID NO: 100539 - DNA, 20 bp, Artificial Sequence
  MKO10100539_B_Nabp1
  gRNA
ttctgctgtcctctataatc

SEQ ID NO: 100540 - DNA, 20 bp, Artificial Sequence
  MKO10100540_B_Nabp2
  gRNA
gcctgctgcgtgttatactc

SEQ ID NO: 100541 - DNA, 20 bp, Artificial Sequence
  MKO10100541_B_Nabp2
  gRNA
taatgtccccaggttggatc

SEQ ID NO: 100542 - DNA, 20 bp, Artificial Sequence
  MKO10100542_B_Nabp2
  gRNA
cagagactcaccgatttgtt

SEQ ID NO: 100543 - DNA, 20 bp, Artificial Sequence
  MKO10100543_B_Nacad
  gRNA
acctcagaaatcgcagtgcc

SEQ ID NO: 100544 - DNA, 20 bp, Artificial Sequence
  MKO10100544_B_Nacad
  gRNA
ccctcccccagacgcgcaga

SEQ ID NO: 100545 - DNA, 20 bp, Artificial Sequence
  MKO10100545_B_Nacad
  gRNA
gggcccggcaggcagcaacg

SEQ ID NO: 100546 - DNA, 20 bp, Artificial Sequence
  MKO10100546_B_Naca
  gRNA
cacctacctgtctcagcctg

SEQ ID NO: 100547 - DNA, 20 bp, Artificial Sequence
  MKO10100547_B_Naca
  gRNA
aaccgtccctgctacagagc

SEQ ID NO: 100548 - DNA, 20 bp, Artificial Sequence
  MKO10100548_B_Naca
  gRNA
cttctcacttcgactctgct

SEQ ID NO: 100549 - DNA, 20 bp, Artificial Sequence
  MKO10100549_B_Nacc1
  gRNA
cgacacttgcaagatagaac

SEQ ID NO: 100550 - DNA, 20 bp, Artificial Sequence
  MKO10100550_B_Nacc1
  gRNA
gccgcgtgcctgcactgacg

SEQ ID NO: 100551 - DNA, 20 bp, Artificial Sequence
  MKO10100551_B_Nacc1
  gRNA
aacactcacacttgacagca

SEQ ID NO: 100552 - DNA, 20 bp, Artificial Sequence
  MKO10100552_B_Nacc2
  gRNA
actcacgtttcacagcgttc

SEQ ID NO: 100553 - DNA, 20 bp, Artificial Sequence
  MKO10100553_B_Nacc2
  gRNA
ggacacaggagcggctctcc

SEQ ID NO: 100554 - DNA, 20 bp, Artificial Sequence
  MKO10100554_B_Nacc2
  gRNA
tgtcctcatccgtcgagacc

SEQ ID NO: 100555 - DNA, 20 bp, Artificial Sequence
  MKO10100555_B_Nadk2
  gRNA
aggtgatggcacgatgcttc

SEQ ID NO: 100556 - DNA, 20 bp, Artificial Sequence
  MKO10100556_B_Nadk2
  gRNA
acgatgaagagacagttcga

SEQ ID NO: 100557 - DNA, 20 bp, Artificial Sequence
  MKO10100557_B_Nadk2
  gRNA
tcagtgttgaccccaatgac

SEQ ID NO: 100558 - DNA, 20 bp, Artificial Sequence
  MKO10100558_B_Nadk
  gRNA
atagacttcatcatatgcct

SEQ ID NO: 100559 - DNA, 20 bp, Artificial Sequence
  MKO10100559_B_Nadk
  gRNA
tccaggaccctgcaagtcaa

SEQ ID NO: 100560 - DNA, 20 bp, Artificial Sequence
  MKO10100560_B_Nadk
  gRNA
tatgatgaagtctatctggt

SEQ ID NO: 100561 - DNA, 20 bp, Artificial Sequence
  MKO10100561_B_Nadsyn1
  gRNA
tctgcaggcctataatgcac

SEQ ID NO: 100562 - DNA, 20 bp, Artificial Sequence
  MKO10100562_B_Nadsyn1
  gRNA
tctggactctccggtcactc

SEQ ID NO: 100563 - DNA, 20 bp, Artificial Sequence
  MKO10100563_B_Nadsyn1
  gRNA
tcttcagcggctatggatgt

SEQ ID NO: 100564 - DNA, 20 bp, Artificial Sequence
  MKO10100564_B_Nae1
  gRNA
ggatcatttacaattattga

SEQ ID NO: 100565 - DNA, 20 bp, Artificial Sequence
  MKO10100565_B_Nae1
  gRNA
ctggtcagcggagaagatgc

SEQ ID NO: 100566 - DNA, 20 bp, Artificial Sequence
  MKO10100566_B_Nae1
  gRNA
ttccttcaaaaaagcagtat

SEQ ID NO: 100567 - DNA, 20 bp, Artificial Sequence
  MKO10100567_B_Naf1
  gRNA
tcaagcattattgaacaatt

SEQ ID NO: 100568 - DNA, 20 bp, Artificial Sequence
  MKO10100568_B_Naf1
  gRNA
ttctagatatttgagatatt

SEQ ID NO: 100569 - DNA, 20 bp, Artificial Sequence
  MKO10100569_B_Naf1
  gRNA
tttcctcctgtgttgtcaga

SEQ ID NO: 100570 - DNA, 20 bp, Artificial Sequence
  MKO10100570_B_Naga
  gRNA
gtccaccttccactccgcga

SEQ ID NO: 100571 - DNA, 20 bp, Artificial Sequence
  MKO10100571_B_Naga
  gRNA
gctggacgcggaaaccttcg

SEQ ID NO: 100572 - DNA, 20 bp, Artificial Sequence
  MKO10100572_B_Naga
  gRNA
aggacccgaagaactgcatc

SEQ ID NO: 100573 - DNA, 20 bp, Artificial Sequence
  MKO10100573_B_Nagk
  gRNA
ggccacatgatgggagacga

SEQ ID NO: 100574 - DNA, 20 bp, Artificial Sequence
  MKO10100574_B_Nagk
  gRNA
tgtaggcttatcaaccctga

SEQ ID NO: 100575 - DNA, 20 bp, Artificial Sequence
  MKO10100575_B_Nagk
  gRNA
gattggcacagaccagtgtg

SEQ ID NO: 100576 - DNA, 20 bp, Artificial Sequence
  MKO10100576_B_Naglu
  gRNA
gtaggaagaggttcccgatg

SEQ ID NO: 100577 - DNA, 20 bp, Artificial Sequence
  MKO10100577_B_Naglu
  gRNA
tccctcccagcatcgaatcc

SEQ ID NO: 100578 - DNA, 20 bp, Artificial Sequence
  MKO10100578_B_Naglu
  gRNA
tcatgccaaaggagcgcatc

SEQ ID NO: 100579 - DNA, 20 bp, Artificial Sequence
  MKO10100579_B_Nagpa
  gRNA
gcagaagcgccgcgctactg

SEQ ID NO: 100580 - DNA, 20 bp, Artificial Sequence
  MKO10100580_B_Nagpa
  gRNA
catcgagtgtgacgagacac

SEQ ID NO: 100581 - DNA, 20 bp, Artificial Sequence
  MKO10100581_B_Nagpa
  gRNA
ctctgcacagccttaaccta

SEQ ID NO: 100582 - DNA, 20 bp, Artificial Sequence
  MKO10100582_B_Nags
  gRNA
accttgttaccaacgctgag

SEQ ID NO: 100583 - DNA, 20 bp, Artificial Sequence
  MKO10100583_B_Nags
  gRNA
gcgcgcagccgtttccccaa

SEQ ID NO: 100584 - DNA, 20 bp, Artificial Sequence
  MKO10100584_B_Nags
  gRNA
acatagatcgagtgcaaccg

SEQ ID NO: 100585 - DNA, 20 bp, Artificial Sequence
  MKO10100585_B_Naif1
  gRNA
ggcaaccttgcgacggacct

SEQ ID NO: 100586 - DNA, 20 bp, Artificial Sequence
  MKO10100586_B_Naif1
  gRNA
gggcgatctcctttatgtgc

SEQ ID NO: 100587 - DNA, 20 bp, Artificial Sequence
  MKO10100587_B_Naif1
  gRNA
cgagaccacctaccacacgc

SEQ ID NO: 100588 - DNA, 20 bp, Artificial Sequence
  MKO10100588_B_Naip1
  gRNA
cacttacttggggaaccact

SEQ ID NO: 100589 - DNA, 20 bp, Artificial Sequence
  MKO10100589_B_Naip1
  gRNA
agcttgggcaactgggaaga

SEQ ID NO: 100590 - DNA, 20 bp, Artificial Sequence
  MKO10100590_B_Naip1
  gRNA
agagaattacctatggtatc

SEQ ID NO: 100591 - DNA, 20 bp, Artificial Sequence
  MKO10100591_B_Naip2
  gRNA
caatatgtacaaagctatga

SEQ ID NO: 100592 - DNA, 20 bp, Artificial Sequence
  MKO10100592_B_Naip2
  gRNA
tcaaagtaagaagtccccag

SEQ ID NO: 100593 - DNA, 20 bp, Artificial Sequence
  MKO10100593_B_Naip2
  gRNA
aactcacttggggaaccact

SEQ ID NO: 100594 - DNA, 20 bp, Artificial Sequence
  MKO10100594_B_Naip5
  gRNA
gttgaagctctagtcagagc

SEQ ID NO: 100595 - DNA, 20 bp, Artificial Sequence
  MKO10100595_B_Naip5
  gRNA
gaggctttacctgataccat

SEQ ID NO: 100596 - DNA, 20 bp, Artificial Sequence
  MKO10100596_B_Naip5
  gRNA
actgtgcagtgtttctcctg

SEQ ID NO: 100597 - DNA, 20 bp, Artificial Sequence
  MKO10100597_B_Naip6
  gRNA
tttgaagctctagtcagagc

SEQ ID NO: 100598 - DNA, 20 bp, Artificial Sequence
  MKO10100598_B_Naip6
  gRNA
actgtgcagtgtttctcctg

SEQ ID NO: 100599 - DNA, 20 bp, Artificial Sequence
  MKO10100599_B_Naip6
  gRNA
agctcacttggggaaccact

SEQ ID NO: 100600 - DNA, 20 bp, Artificial Sequence
  MKO10100600_B_Naip7
  gRNA
ccagtatattcaagactacg

SEQ ID NO: 100601 - DNA, 20 bp, Artificial Sequence
  MKO10100601_B_Naip7
  gRNA
actgtgcagtgtttctcctg

SEQ ID NO: 100602 - DNA, 20 bp, Artificial Sequence
  MKO10100602_B_Naip7
  gRNA
agctcacttggggaaccact

SEQ ID NO: 100603 - DNA, 20 bp, Artificial Sequence
  MKO10100603_B_Nalcn
  gRNA
ggcggtcaggagaacaaata

SEQ ID NO: 100604 - DNA, 20 bp, Artificial Sequence
  MKO10100604_B_Nalcn
  gRNA
aagaggaggatagtgctcaa

SEQ ID NO: 100605 - DNA, 20 bp, Artificial Sequence
  MKO10100605_B_Nalcn
  gRNA
gggtgatagctcctatgtga

SEQ ID NO: 100606 - DNA, 20 bp, Artificial Sequence
  MKO10100606_B_Nampt
  gRNA
tgtgaacagcacgttccctc

SEQ ID NO: 100607 - DNA, 20 bp, Artificial Sequence
  MKO10100607_B_Nampt
  gRNA
agactattcttgttcagtcc

SEQ ID NO: 100608 - DNA, 20 bp, Artificial Sequence
  MKO10100608_B_Nampt
  gRNA
ggaataaactttgcttgtgt

SEQ ID NO: 100609 - DNA, 20 bp, Artificial Sequence
  MKO10100609_B_Nanog
  gRNA
gcggagcagcattccaaggc

SEQ ID NO: 100610 - DNA, 20 bp, Artificial Sequence
  MKO10100610_B_Nanog
  gRNA
accccacctgcttatagctc

SEQ ID NO: 100611 - DNA, 20 bp, Artificial Sequence
  MKO10100611_B_Nanog
  gRNA
ttgtaagcaagaatagttct

SEQ ID NO: 100612 - DNA, 20 bp, Artificial Sequence
  MKO10100612_B_Nanos1
  gRNA
cccggccgtccgggcccttg

SEQ ID NO: 100613 - DNA, 20 bp, Artificial Sequence
  MKO10100613_B_Nanos1
  gRNA
cacgtgtagcggcgcaagac

SEQ ID NO: 100614 - DNA, 20 bp, Artificial Sequence
  MKO10100614_B_Nanos1
  gRNA
gcccgaggcgctcacgtagc

SEQ ID NO: 100615 - DNA, 20 bp, Artificial Sequence
  MKO10100615_B_Nanos2
  gRNA
gaattatatccatcaccacc

SEQ ID NO: 100616 - DNA, 20 bp, Artificial Sequence
  MKO10100616_B_Nanos2
  gRNA
acctaccgccctttgacatg

SEQ ID NO: 100617 - DNA, 20 bp, Artificial Sequence
  MKO10100617_B_Nanos2
  gRNA
ccccttcaggcgtcttcagc

SEQ ID NO: 100618 - DNA, 20 bp, Artificial Sequence
  MKO10100618_B_Nanos3
  gRNA
gtgggcaaaagcgtcgagtg

SEQ ID NO: 100619 - DNA, 20 bp, Artificial Sequence
  MKO10100619_B_Nanos3
  gRNA
acacacataatcccgcaaaa

SEQ ID NO: 100620 - DNA, 20 bp, Artificial Sequence
  MKO10100620_B_Nanos3
  gRNA
ctgtctactgctacaccacc

SEQ ID NO: 100621 - DNA, 20 bp, Artificial Sequence
  MKO10100621_B_Nanp
  gRNA
tctatgctttgcaagagagc

SEQ ID NO: 100622 - DNA, 20 bp, Artificial Sequence
  MKO10100622_B_Nanp
  gRNA
ccgcgcggtcttctttgacc

SEQ ID NO: 100623 - DNA, 20 bp, Artificial Sequence
  MKO10100623_B_Nanp
  gRNA
tgtcgatgagtgtgttgtcc

SEQ ID NO: 100624 - DNA, 20 bp, Artificial Sequence
  MKO10100624_B_Nans
  gRNA
cgcgtacccactacagcccg

SEQ ID NO: 100625 - DNA, 20 bp, Artificial Sequence
  MKO10100625_B_Nans
  gRNA
caagtttaaccggaaggccc

SEQ ID NO: 100626 - DNA, 20 bp, Artificial Sequence
  MKO10100626_B_Nans
  gRNA
cttctgaaacttagcgcagt

SEQ ID NO: 100627 - DNA, 20 bp, Artificial Sequence
  MKO10100627_B_Nap1l1
  gRNA
tacctttcaatgtatcctgt

SEQ ID NO: 100628 - DNA, 20 bp, Artificial Sequence
  MKO10100628_B_Nap1l1
  gRNA
gtctgaacttgatcaagatt

SEQ ID NO: 100629 - DNA, 20 bp, Artificial Sequence
  MKO10100629_B_Nap1l1
  gRNA
agaagtagaagaagaagaaa

SEQ ID NO: 100630 - DNA, 20 bp, Artificial Sequence
  MKO10100630_B_Nap1l2
  gRNA
tgcgacatagattggaacga

SEQ ID NO: 100631 - DNA, 20 bp, Artificial Sequence
  MKO10100631_B_Nap1l2
  gRNA
actgccattgagtacgccac

SEQ ID NO: 100632 - DNA, 20 bp, Artificial Sequence
  MKO10100632_B_Nap1l2
  gRNA
tgggagactttcaacgaaat

SEQ ID NO: 100633 - DNA, 20 bp, Artificial Sequence
  MKO10100633_B_Nap1l3
  gRNA
tgcctgcacccgatttctta

SEQ ID NO: 100634 - DNA, 20 bp, Artificial Sequence
  MKO10100634_B_Nap1l3
  gRNA
atgttacggtgacaaccacc

SEQ ID NO: 100635 - DNA, 20 bp, Artificial Sequence
  MKO10100635_B_Nap1l3
  gRNA
agggcccagcgacgtccctc

SEQ ID NO: 100636 - DNA, 20 bp, Artificial Sequence
  MKO10100636_B_Nap1l4
  gRNA
tacgtttctatgtaactaga

SEQ ID NO: 100637 - DNA, 20 bp, Artificial Sequence
  MKO10100637_B_Nap1l4
  gRNA
ccacagatgcagagtcagcg

SEQ ID NO: 100638 - DNA, 20 bp, Artificial Sequence
  MKO10100638_B_Nap1l4
  gRNA
gctaaaaatgccagtaatac

SEQ ID NO: 100639 - DNA, 20 bp, Artificial Sequence
  MKO10100639_B_Nap1l5
  gRNA
tgacagtgccgctgctcccg

SEQ ID NO: 100640 - DNA, 20 bp, Artificial Sequence
  MKO10100640_B_Nap1l5
  gRNA
cgaggtaatggaaggcgccc

SEQ ID NO: 100641 - DNA, 20 bp, Artificial Sequence
  MKO10100641_B_Nap1l5
  gRNA
gcttgggcgcgttctccgcg

SEQ ID NO: 100642 - DNA, 20 bp, Artificial Sequence
  MKO10100642_B_Napa
  gRNA
tgctgggaacgctttctgcc

SEQ ID NO: 100643 - DNA, 20 bp, Artificial Sequence
  MKO10100643_B_Napa
  gRNA
tgtctcatagatctcagcga

SEQ ID NO: 100644 - DNA, 20 bp, Artificial Sequence
  MKO10100644_B_Napa
  gRNA
tgagatctatgagacagaac

SEQ ID NO: 100645 - DNA, 20 bp, Artificial Sequence
  MKO10100645_B_Napb
  gRNA
catgtctgtgtaaatgtcga

SEQ ID NO: 100646 - DNA, 20 bp, Artificial Sequence
  MKO10100646_B_Napb
  gRNA
agctgcaaatatgttcaaga

SEQ ID NO: 100647 - DNA, 20 bp, Artificial Sequence
  MKO10100647_B_Napb
  gRNA
tagcagagtcatgcttgctc

SEQ ID NO: 100648 - DNA, 20 bp, Artificial Sequence
  MKO10100648_B_Napepld
  gRNA
acgggagatttgttaaccca

SEQ ID NO: 100649 - DNA, 20 bp, Artificial Sequence
  MKO10100649_B_Napepld
  gRNA
caaacttacctcattagcta

SEQ ID NO: 100650 - DNA, 20 bp, Artificial Sequence
  MKO10100650_B_Napepld
  gRNA
atcagccatctgagcacatt

SEQ ID NO: 100651 - DNA, 20 bp, Artificial Sequence
  MKO10100651_B_Napg
  gRNA
ctgttgcccatgaaaataac

SEQ ID NO: 100652 - DNA, 20 bp, Artificial Sequence
  MKO10100652_B_Napg
  gRNA
ctttgcttgctcaaattgtt

SEQ ID NO: 100653 - DNA, 20 bp, Artificial Sequence
  MKO10100653_B_Napg
  gRNA
tgctttcccatattcagaag

SEQ ID NO: 100654 - DNA, 20 bp, Artificial Sequence
  MKO10100654_B_Naprt1
  gRNA
cggcgagctcagggtcccga

SEQ ID NO: 100655 - DNA, 20 bp, Artificial Sequence
  MKO10100655_B_Naprt1
  gRNA
cagagcaatcaagggctcga

SEQ ID NO: 100656 - DNA, 20 bp, Artificial Sequence
  MKO10100656_B_Naprt1
  gRNA
cttcgagcccttgattgctc

SEQ ID NO: 100657 - DNA, 20 bp, Artificial Sequence
  MKO10100657_B_Napsa
  gRNA
gagactcacgttcatgaact

SEQ ID NO: 100658 - DNA, 20 bp, Artificial Sequence
  MKO10100658_B_Napsa
  gRNA
tgctccaccatcgcatccag

SEQ ID NO: 100659 - DNA, 20 bp, Artificial Sequence
  MKO10100659_B_Napsa
  gRNA
cacccacagtcagattgtcc

SEQ ID NO: 100660 - DNA, 20 bp, Artificial Sequence
  MKO10100660_B_Narfl
  gRNA
aaggctgaagttcctcgcga

SEQ ID NO: 100661 - DNA, 20 bp, Artificial Sequence
  MKO10100661_B_Narfl
  gRNA
accaccagccgctgctgacc

SEQ ID NO: 100662 - DNA, 20 bp, Artificial Sequence
  MKO10100662_B_Narfl
  gRNA
gggtccttacttggttcact

SEQ ID NO: 100663 - DNA, 20 bp, Artificial Sequence
  MKO10100663_B_Narf
  gRNA
gtgtcactgatgcatctaga

SEQ ID NO: 100664 - DNA, 20 bp, Artificial Sequence
  MKO10100664_B_Narf
  gRNA
accataccttattaagattc

SEQ ID NO: 100665 - DNA, 20 bp, Artificial Sequence
  MKO10100665_B_Narf
  gRNA
gaagggagagttccataaat

SEQ ID NO: 100666 - DNA, 20 bp, Artificial Sequence
  MKO10100666_B_Narg2
  gRNA
ttataatatgctctctgatg

SEQ ID NO: 100667 - DNA, 20 bp, Artificial Sequence
  MKO10100667_B_Narg2
  gRNA
agggatgttacacccaaaaa

SEQ ID NO: 100668 - DNA, 20 bp, Artificial Sequence
  MKO10100668_B_Narg2
  gRNA
cttgttcaatgcaagctctt

SEQ ID NO: 100669 - DNA, 20 bp, Artificial Sequence
  MKO10100669_B_Nars2
  gRNA
ttgaatccgcaacaatctga

SEQ ID NO: 100670 - DNA, 20 bp, Artificial Sequence
  MKO10100670_B_Nars2
  gRNA
gagcattagtcctgcacctc

SEQ ID NO: 100671 - DNA, 20 bp, Artificial Sequence
  MKO10100671_B_Nars2
  gRNA
cagtcgttggatgtgagtac

SEQ ID NO: 100672 - DNA, 20 bp, Artificial Sequence
  MKO10100672_B_Nars
  gRNA
cccaaggctttgatgacagt

SEQ ID NO: 100673 - DNA, 20 bp, Artificial Sequence
  MKO10100673_B_Nars
  gRNA
tgacccgagcctgccagagc

SEQ ID NO: 100674 - DNA, 20 bp, Artificial Sequence
  MKO10100674_B_Nars
  gRNA
gccatttcccaccatttatg

SEQ ID NO: 100675 - DNA, 20 bp, Artificial Sequence
  MKO10100675_B_Nasp
  gRNA
tgacttcccataaaaaaaga

SEQ ID NO: 100676 - DNA, 20 bp, Artificial Sequence
  MKO10100676_B_Nasp
  gRNA
acaaaagactagctgcttcc

SEQ ID NO: 100677 - DNA, 20 bp, Artificial Sequence
  MKO10100677_B_Nasp
  gRNA
agcagctgttaatgcattcc

SEQ ID NO: 100678 - DNA, 20 bp, Artificial Sequence
  MKO10100678_B_Nat10
  gRNA
gactgaggcccatcaggacg

SEQ ID NO: 100679 - DNA, 20 bp, Artificial Sequence
  MKO10100679_B_Nat10
  gRNA
atcttcccaccacgtcctga

SEQ ID NO: 100680 - DNA, 20 bp, Artificial Sequence
  MKO10100680_B_Nat10
  gRNA
ccgagccttcacagttgcct

SEQ ID NO: 100681 - DNA, 20 bp, Artificial Sequence
  MKO10100681_B_Nat14
  gRNA
cccctaaccacctgtcagtg

SEQ ID NO: 100682 - DNA, 20 bp, Artificial Sequence
  MKO10100682_B_Nat14
  gRNA
ctggaggtcgtgtcagagcg

SEQ ID NO: 100683 - DNA, 20 bp, Artificial Sequence
  MKO10100683_B_Nat14
  gRNA
tctggcccctggtgccaacg

SEQ ID NO: 100684 - DNA, 20 bp, Artificial Sequence
  MKO10100684_B_Nat1
  gRNA
tgggctccacctttacaagt

SEQ ID NO: 100685 - DNA, 20 bp, Artificial Sequence
  MKO10100685_B_Nat1
  gRNA
gatgtactgaaaaccgcatt

SEQ ID NO: 100686 - DNA, 20 bp, Artificial Sequence
  MKO10100686_B_Nat1
  gRNA
acatcgaagcatactttgaa

SEQ ID NO: 100687 - DNA, 20 bp, Artificial Sequence
  MKO10100687_B_Nat2
  gRNA
cctcacaatttgatcaaaga

SEQ ID NO: 100688 - DNA, 20 bp, Artificial Sequence
  MKO10100688_B_Nat2
  gRNA
gatgtactgagaactatatt

SEQ ID NO: 100689 - DNA, 20 bp, Artificial Sequence
  MKO10100689_B_Nat2
  gRNA
aaggactacattgttgatgc

SEQ ID NO: 100690 - DNA, 20 bp, Artificial Sequence
  MKO10100690_B_Nat3
  gRNA
gaatggtgcccattaagcca

SEQ ID NO: 100691 - DNA, 20 bp, Artificial Sequence
  MKO10100691_B_Nat3
  gRNA
tcacagatgttcgagatacc

SEQ ID NO: 100692 - DNA, 20 bp, Artificial Sequence
  MKO10100692_B_Nat3
  gRNA
ctgcaagtccagtttgttgc

SEQ ID NO: 100693 - DNA, 20 bp, Artificial Sequence
  MKO10100693_B_Nat6
  gRNA
tttggtcgccgcctcatgga

SEQ ID NO: 100694 - DNA, 20 bp, Artificial Sequence
  MKO10100694_B_Nat6
  gRNA
agctcgggtcggcagtgtac

SEQ ID NO: 100695 - DNA, 20 bp, Artificial Sequence
  MKO10100695_B_Nat6
  gRNA
gacatgctatcgagatctga

SEQ ID NO: 100696 - DNA, 20 bp, Artificial Sequence
  MKO10100696_B_Nat8l
  gRNA
tccgcggaaacgcgagtcca

SEQ ID NO: 100697 - DNA, 20 bp, Artificial Sequence
  MKO10100697_B_Nat8l
  gRNA
ggtagcggtggtagcggacc

SEQ ID NO: 100698 - DNA, 20 bp, Artificial Sequence
  MKO10100698_B_Nat8l
  gRNA
tgcggctgtagtagtagcgc

SEQ ID NO: 100699 - DNA, 20 bp, Artificial Sequence
  MKO10100699_B_Nat8
  gRNA
tgtgactctctactacagca

SEQ ID NO: 100700 - DNA, 20 bp, Artificial Sequence
  MKO10100700_B_Nat8
  gRNA
ccatgtgagtatgtccacga

SEQ ID NO: 100701 - DNA, 20 bp, Artificial Sequence
  MKO10100701_B_Nat8
  gRNA
tcacagcaccttgctgcaaa

SEQ ID NO: 100702 - DNA, 20 bp, Artificial Sequence
  MKO10100702_B_Nat9
  gRNA
ttctcctagagcctagctac

SEQ ID NO: 100703 - DNA, 20 bp, Artificial Sequence
  MKO10100703_B_Nat9
  gRNA
gagatcgaggtcatgattgc

SEQ ID NO: 100704 - DNA, 20 bp, Artificial Sequence
  MKO10100704_B_Nat9
  gRNA
catgacctcgatctccccca

SEQ ID NO: 100705 - DNA, 20 bp, Artificial Sequence
  MKO10100705_B_Nav1
  gRNA
gagctgcgatgacgcatcca

SEQ ID NO: 100706 - DNA, 20 bp, Artificial Sequence
  MKO10100706_B_Nav1
  gRNA
gaaaccatgtccagcctgcg

SEQ ID NO: 100707 - DNA, 20 bp, Artificial Sequence
  MKO10100707_B_Nav1
  gRNA
gagaacagtacagaacgttc

SEQ ID NO: 100708 - DNA, 20 bp, Artificial Sequence
  MKO10100708_B_Nav2
  gRNA
agctaagggaatcaacaccc

SEQ ID NO: 100709 - DNA, 20 bp, Artificial Sequence
  MKO10100709_B_Nav2
  gRNA
tccaaagaacagatcgcaaa

SEQ ID NO: 100710 - DNA, 20 bp, Artificial Sequence
  MKO10100710_B_Nav2
  gRNA
cggggcgccttcccagtgcc

SEQ ID NO: 100711 - DNA, 20 bp, Artificial Sequence
  MKO10100711_B_Nav3
  gRNA
ctcgggctgccagaaagcta

SEQ ID NO: 100712 - DNA, 20 bp, Artificial Sequence
  MKO10100712_B_Nav3
  gRNA
gagaaagtcgaagatatcaa

SEQ ID NO: 100713 - DNA, 20 bp, Artificial Sequence
  MKO10100713_B_Nav3
  gRNA
acctggactgcatatcttgc

SEQ ID NO: 100714 - DNA, 20 bp, Artificial Sequence
  MKO10100714_B_Nbas
  gRNA
tgctgtccaggaccagtgtg

SEQ ID NO: 100715 - DNA, 20 bp, Artificial Sequence
  MKO10100715_B_Nbas
  gRNA
atgcagcaatggcaagcttc

SEQ ID NO: 100716 - DNA, 20 bp, Artificial Sequence
  MKO10100716_B_Nbas
  gRNA
tggtcaataaacagataaac

SEQ ID NO: 100717 - DNA, 20 bp, Artificial Sequence
  MKO10100717_B_Nbeal1
  gRNA
tgtatgatccatatagaaat

SEQ ID NO: 100718 - DNA, 20 bp, Artificial Sequence
  MKO10100718_B_Nbeal1
  gRNA
ctgaatatacagtgttgtca

SEQ ID NO: 100719 - DNA, 20 bp, Artificial Sequence
  MKO10100719_B_Nbeal1
  gRNA
actttgaaaagctgcctaca

SEQ ID NO: 100720 - DNA, 20 bp, Artificial Sequence
  MKO10100720_B_Nbeal2
  gRNA
agatgctctacatgcactag

SEQ ID NO: 100721 - DNA, 20 bp, Artificial Sequence
  MKO10100721_B_Nbeal2
  gRNA
caggaacctagagaacgtag

SEQ ID NO: 100722 - DNA, 20 bp, Artificial Sequence
  MKO10100722_B_Nbeal2
  gRNA
tctttgacccttaccagact

SEQ ID NO: 100723 - DNA, 20 bp, Artificial Sequence
  MKO10100723_B_Nbea
  gRNA
gcagtagatgacatgatagc

SEQ ID NO: 100724 - DNA, 20 bp, Artificial Sequence
  MKO10100724_B_Nbea
  gRNA
cattgcctcccattgcaaag

SEQ ID NO: 100725 - DNA, 20 bp, Artificial Sequence
  MKO10100725_B_Nbea
  gRNA
agagtgaagccattctgata

SEQ ID NO: 100726 - DNA, 20 bp, Artificial Sequence
  MKO10100726_B_Nbl1
  gRNA
tgggctccttgccgcaagcc

SEQ ID NO: 100727 - DNA, 20 bp, Artificial Sequence
  MKO10100727_B_Nbl1
  gRNA
tgtactcacaatctcccaca

SEQ ID NO: 100728 - DNA, 20 bp, Artificial Sequence
  MKO10100728_B_Nbl1
  gRNA
tgtggactgcgggaaggtgt

SEQ ID NO: 100729 - DNA, 20 bp, Artificial Sequence
  MKO10100729_B_Nbn
  gRNA
atctcctgtcttcaacgtgc

SEQ ID NO: 100730 - DNA, 20 bp, Artificial Sequence
  MKO10100730_B_Nbn
  gRNA
cagagtagaatacgagccct

SEQ ID NO: 100731 - DNA, 20 bp, Artificial Sequence
  MKO10100731_B_Nbn
  gRNA
ctttcctgcacgttgaagac

SEQ ID NO: 100732 - DNA, 20 bp, Artificial Sequence
  MKO10100732_B_Nbr1
  gRNA
tagatatccatcaatagtca

SEQ ID NO: 100733 - DNA, 20 bp, Artificial Sequence
  MKO10100733_B_Nbr1
  gRNA
tactatccagataaaatacc

SEQ ID NO: 100734 - DNA, 20 bp, Artificial Sequence
  MKO10100734_B_Nbr1
  gRNA
tgaatatgaagaagcactta

SEQ ID NO: 100735 - DNA, 20 bp, Artificial Sequence
  MKO10100735_B_Ncald
  gRNA
tccctaggcgatctacaaaa

SEQ ID NO: 100736 - DNA, 20 bp, Artificial Sequence
  MKO10100736_B_Ncald
  gRNA
agaaaagatcttccgccaga

SEQ ID NO: 100737 - DNA, 20 bp, Artificial Sequence
  MKO10100737_B_Ncald
  gRNA
gtgcagggctcagaactggc

SEQ ID NO: 100738 - DNA, 20 bp, Artificial Sequence
  MKO10100738_B_Ncam1
  gRNA
tgggaacaatatctacctgc

SEQ ID NO: 100739 - DNA, 20 bp, Artificial Sequence
  MKO10100739_B_Ncam1
  gRNA
gtttacaatgctgcgaacta

SEQ ID NO: 100740 - DNA, 20 bp, Artificial Sequence
  MKO10100740_B_Ncam1
  gRNA
caagaatgcaccaaccccac

SEQ ID NO: 100741 - DNA, 20 bp, Artificial Sequence
  MKO10100741_B_Ncam2
  gRNA
aaaatactaactgtcgggga

SEQ ID NO: 100742 - DNA, 20 bp, Artificial Sequence
  MKO10100742_B_Ncam2
  gRNA
gtgagcctgagagtatcgac

SEQ ID NO: 100743 - DNA, 20 bp, Artificial Sequence
  MKO10100743_B_Ncam2
  gRNA
tagcaaagtagagcttagtg

SEQ ID NO: 100744 - DNA, 20 bp, Artificial Sequence
  MKO10100744_B_Ncan
  gRNA
ctacgggagacgcgacccgc

SEQ ID NO: 100745 - DNA, 20 bp, Artificial Sequence
  MKO10100745_B_Ncan
  gRNA
accttagtccacttgatccg

SEQ ID NO: 100746 - DNA, 20 bp, Artificial Sequence
  MKO10100746_B_Ncan
  gRNA
gtatcgctgccaagtggtaa

SEQ ID NO: 100747 - DNA, 20 bp, Artificial Sequence
  MKO10100747_B_Ncapd2
  gRNA
cactttcgaagtatagaacc

SEQ ID NO: 100748 - DNA, 20 bp, Artificial Sequence
  MKO10100748_B_Ncapd2
  gRNA
ataggtgacggatgtccagc

SEQ ID NO: 100749 - DNA, 20 bp, Artificial Sequence
  MKO10100749_B_Ncapd2
  gRNA
caattgaagaagaatttgtc

SEQ ID NO: 100750 - DNA, 20 bp, Artificial Sequence
  MKO10100750_B_Ncapd3
  gRNA
attgttctgtcacttcgtcc

SEQ ID NO: 100751 - DNA, 20 bp, Artificial Sequence
  MKO10100751_B_Ncapd3
  gRNA
ctcgtatttgacaaaggtcc

SEQ ID NO: 100752 - DNA, 20 bp, Artificial Sequence
  MKO10100752_B_Ncapd3
  gRNA
gtctattcaaacttgtatag

SEQ ID NO: 100753 - DNA, 20 bp, Artificial Sequence
  MKO10100753_B_Ncapg2
  gRNA
gagtgtgctgttatattgaa

SEQ ID NO: 100754 - DNA, 20 bp, Artificial Sequence
  MKO10100754_B_Ncapg2
  gRNA
acagatcctgaatagagttc

SEQ ID NO: 100755 - DNA, 20 bp, Artificial Sequence
  MKO10100755_B_Ncapg2
  gRNA
aaatgttaattacatcaaga

SEQ ID NO: 100756 - DNA, 20 bp, Artificial Sequence
  MKO10100756_B_Ncapg
  gRNA
ttcatttcaccagtctgatg

SEQ ID NO: 100757 - DNA, 20 bp, Artificial Sequence
  MKO10100757_B_Ncapg
  gRNA
ccatacataccatcaactac

SEQ ID NO: 100758 - DNA, 20 bp, Artificial Sequence
  MKO10100758_B_Ncapg
  gRNA
tttgacaaagtctttgctga

SEQ ID NO: 100759 - DNA, 20 bp, Artificial Sequence
  MKO10100759_B_Ncaph2
  gRNA
cagggaagtcgtccagtgac

SEQ ID NO: 100760 - DNA, 20 bp, Artificial Sequence
  MKO10100760_B_Ncaph2
  gRNA
caccttcttactgtagacac

SEQ ID NO: 100761 - DNA, 20 bp, Artificial Sequence
  MKO10100761_B_Ncaph2
  gRNA
tgcctcaatgaagttcattg

SEQ ID NO: 100762 - DNA, 20 bp, Artificial Sequence
  MKO10100762_B_Ncaph
  gRNA
ttcagaagaaagcttgatac

SEQ ID NO: 100763 - DNA, 20 bp, Artificial Sequence
  MKO10100763_B_Ncaph
  gRNA
tgtctttgcccagcccccca

SEQ ID NO: 100764 - DNA, 20 bp, Artificial Sequence
  MKO10100764_B_Ncaph
  gRNA
ctccttactttaaagttggt

SEQ ID NO: 100765 - DNA, 20 bp, Artificial Sequence
  MKO10100765_B_Ncbp1
  gRNA
actacaagagcaagatctta

SEQ ID NO: 100766 - DNA, 20 bp, Artificial Sequence
  MKO10100766_B_Ncbp1
  gRNA
tcctccaaagttgtaattcc

SEQ ID NO: 100767 - DNA, 20 bp, Artificial Sequence
  MKO10100767_B_Ncbp1
  gRNA
acaatttacacaacattagt

SEQ ID NO: 100768 - DNA, 20 bp, Artificial Sequence
  MKO10100768_B_Ncbp2
  gRNA
agtaccgggaccagcacttt

SEQ ID NO: 100769 - DNA, 20 bp, Artificial Sequence
  MKO10100769_B_Ncbp2
  gRNA
gtctggatgaccggatcata

SEQ ID NO: 100770 - DNA, 20 bp, Artificial Sequence
  MKO10100770_B_Ncbp2
  gRNA
gaggactacgatgctggaag

SEQ ID NO: 100771 - DNA, 20 bp, Artificial Sequence
  MKO10100771_B_Nccrp1
  gRNA
ggtcctctcccattggtccg

SEQ ID NO: 100772 - DNA, 20 bp, Artificial Sequence
  MKO10100772_B_Nccrp1
  gRNA
aggcattaatatctaccagc

SEQ ID NO: 100773 - DNA, 20 bp, Artificial Sequence
  MKO10100773_B_Nccrp1
  gRNA
cggggctcaccagtccatga

SEQ ID NO: 100774 - DNA, 20 bp, Artificial Sequence
  MKO10100774_B_Ncdn
  gRNA
atccccgggccatgatacct

SEQ ID NO: 100775 - DNA, 20 bp, Artificial Sequence
  MKO10100775_B_Ncdn
  gRNA
aggccgatctccacgctgtc

SEQ ID NO: 100776 - DNA, 20 bp, Artificial Sequence
  MKO10100776_B_Ncdn
  gRNA
aaactgctcgctgtcattct

SEQ ID NO: 100777 - DNA, 20 bp, Artificial Sequence
  MKO10100777_B_Nceh1
  gRNA
tgacagacaccgacttcgat

SEQ ID NO: 100778 - DNA, 20 bp, Artificial Sequence
  MKO10100778_B_Nceh1
  gRNA
cagatacaggctagtcccac

SEQ ID NO: 100779 - DNA, 20 bp, Artificial Sequence
  MKO10100779_B_Nceh1
  gRNA
ccagaaataccgactcttcc

SEQ ID NO: 100780 - DNA, 20 bp, Artificial Sequence
  MKO10100780_B_Ncf1
  gRNA
gatggcaagaataacgtagc

SEQ ID NO: 100781 - DNA, 20 bp, Artificial Sequence
  MKO10100781_B_Ncf1
  gRNA
tgtagaccaccttctccgac

SEQ ID NO: 100782 - DNA, 20 bp, Artificial Sequence
  MKO10100782_B_Ncf1
  gRNA
tacgttattcttgccatctt

SEQ ID NO: 100783 - DNA, 20 bp, Artificial Sequence
  MKO10100783_B_Ncf2
  gRNA
tttcttccattcctctttct

SEQ ID NO: 100784 - DNA, 20 bp, Artificial Sequence
  MKO10100784_B_Ncf2
  gRNA
tgtagtagagcattcctctc

SEQ ID NO: 100785 - DNA, 20 bp, Artificial Sequence
  MKO10100785_B_Ncf2
  gRNA
cagagacaagcactctgcag

SEQ ID NO: 100786 - DNA, 20 bp, Artificial Sequence
  MKO10100786_B_Ncf4
  gRNA
gtaccttcatgtaggcattg

SEQ ID NO: 100787 - DNA, 20 bp, Artificial Sequence
  MKO10100787_B_Ncf4
  gRNA
gtgcagcctacctggcaatg

SEQ ID NO: 100788 - DNA, 20 bp, Artificial Sequence
  MKO10100788_B_Ncf4
  gRNA
tgctgatggaccccgacgtc

SEQ ID NO: 100789 - DNA, 20 bp, Artificial Sequence
  MKO10100789_B_Nck1
  gRNA
ccttgctcacttgtaaagat

SEQ ID NO: 100790 - DNA, 20 bp, Artificial Sequence
  MKO10100790_B_Nck1
  gRNA
ccgatctttacaagtgagca

SEQ ID NO: 100791 - DNA, 20 bp, Artificial Sequence
  MKO10100791_B_Nck1
  gRNA
tcaagaagaatgagcgatta

SEQ ID NO: 100792 - DNA, 20 bp, Artificial Sequence
  MKO10100792_B_Nck2
  gRNA
ccacagcatggacgagcttg

SEQ ID NO: 100793 - DNA, 20 bp, Artificial Sequence
  MKO10100793_B_Nck2
  gRNA
actcacctagtgtgtccttg

SEQ ID NO: 100794 - DNA, 20 bp, Artificial Sequence
  MKO10100794_B_Nck2
  gRNA
aggcacgtagcctgtcctgt

SEQ ID NO: 100795 - DNA, 20 bp, Artificial Sequence
  MKO10100795_B_Nckap1l
  gRNA
aagttctcaccgtgctattt

SEQ ID NO: 100796 - DNA, 20 bp, Artificial Sequence
  MKO10100796_B_Nckap1l
  gRNA
ccatgacatccacaaatgac

SEQ ID NO: 100797 - DNA, 20 bp, Artificial Sequence
  MKO10100797_B_Nckap1l
  gRNA
taactattaccagtcatttg

SEQ ID NO: 100798 - DNA, 20 bp, Artificial Sequence
  MKO10100798_B_Nckap1
  gRNA
gaagaacggaaggcaatcat

SEQ ID NO: 100799 - DNA, 20 bp, Artificial Sequence
  MKO10100799_B_Nckap1
  gRNA
tcacaatatcaaagaagact

SEQ ID NO: 100800 - DNA, 20 bp, Artificial Sequence
  MKO10100800_B_Nckap1
  gRNA
tattcagcaagtcacagaca

SEQ ID NO: 100801 - DNA, 20 bp, Artificial Sequence
  MKO10100801_B_Nckap5l
  gRNA
ggggaggttggtcgttctga

SEQ ID NO: 100802 - DNA, 20 bp, Artificial Sequence
  MKO10100802_B_Nckap5l
  gRNA
tccccaggttgccaaccacg

SEQ ID NO: 100803 - DNA, 20 bp, Artificial Sequence
  MKO10100803_B_Nckap5l
  gRNA
ttacgaacgctgtctggatg

SEQ ID NO: 100804 - DNA, 20 bp, Artificial Sequence
  MKO10100804_B_Nckap5
  gRNA
cgaagtctgttgcagagcca

SEQ ID NO: 100805 - DNA, 20 bp, Artificial Sequence
  MKO10100805_B_Nckap5
  gRNA
ccatgtggtggcagctgatg

SEQ ID NO: 100806 - DNA, 20 bp, Artificial Sequence
  MKO10100806_B_Nckap5
  gRNA
aagaagcgagcacagtagtg

SEQ ID NO: 100807 - DNA, 20 bp, Artificial Sequence
  MKO10100807_B_Nckipsd
  gRNA
agctattgaccgtgccattg

SEQ ID NO: 100808 - DNA, 20 bp, Artificial Sequence
  MKO10100808_B_Nckipsd
  gRNA
gtacttgccgccatctcgca

SEQ ID NO: 100809 - DNA, 20 bp, Artificial Sequence
  MKO10100809_B_Nckipsd
  gRNA
cccagttcgacacaccccat

SEQ ID NO: 100810 - DNA, 20 bp, Artificial Sequence
  MKO10100810_B_Ncln
  gRNA
ctctccacaggggcggctaa

SEQ ID NO: 100811 - DNA, 20 bp, Artificial Sequence
  MKO10100811_B_Ncln
  gRNA
gggctccactggtcaccatc

SEQ ID NO: 100812 - DNA, 20 bp, Artificial Sequence
  MKO10100812_B_Ncln
  gRNA
acttactggggctaccccaa

SEQ ID NO: 100813 - DNA, 20 bp, Artificial Sequence
  MKO10100813_B_Ncl
  gRNA
gaacctgttaaagcagcacc

SEQ ID NO: 100814 - DNA, 20 bp, Artificial Sequence
  MKO10100814_B_Ncl
  gRNA
gaaaatggctcctcctccaa

SEQ ID NO: 100815 - DNA, 20 bp, Artificial Sequence
  MKO10100815_B_Ncl
  gRNA
ttcaggggcttctttctgct

SEQ ID NO: 100816 - DNA, 20 bp, Artificial Sequence
  MKO10100816_B_Ncmap
  gRNA
tcttctcgctgaacatgacc

SEQ ID NO: 100817 - DNA, 20 bp, Artificial Sequence
  MKO10100817_B_Ncmap
  gRNA
ggtcatgttcagcgagaaga

SEQ ID NO: 100818 - DNA, 20 bp, Artificial Sequence
  MKO10100818_B_Ncmap
  gRNA
tgcaggctctggagccatcg

SEQ ID NO: 100819 - DNA, 20 bp, Artificial Sequence
  MKO10100819_B_Ncoa1
  gRNA
actgcattacttcatagcgc

SEQ ID NO: 100820 - DNA, 20 bp, Artificial Sequence
  MKO10100820_B_Ncoa1
  gRNA
atgcagtatgctgtagacgc

SEQ ID NO: 100821 - DNA, 20 bp, Artificial Sequence
  MKO10100821_B_Ncoa1
  gRNA
gacatctcctcgagcagcca

SEQ ID NO: 100822 - DNA, 20 bp, Artificial Sequence
  MKO10100822_B_Ncoa2
  gRNA
aaggaatgtcccgaccagct

SEQ ID NO: 100823 - DNA, 20 bp, Artificial Sequence
  MKO10100823_B_Ncoa2
  gRNA
caacgaagaagaacccatcg

SEQ ID NO: 100824 - DNA, 20 bp, Artificial Sequence
  MKO10100824_B_Ncoa2
  gRNA
gcaccctgtaggccctcgat

SEQ ID NO: 100825 - DNA, 20 bp, Artificial Sequence
  MKO10100825_B_Ncoa3
  gRNA
tgtagacacttgtgttaacc

SEQ ID NO: 100826 - DNA, 20 bp, Artificial Sequence
  MKO10100826_B_Ncoa3
  gRNA
catctcgattcaccacaaac

SEQ ID NO: 100827 - DNA, 20 bp, Artificial Sequence
  MKO10100827_B_Ncoa3
  gRNA
acacctacctgtagtaaaag

SEQ ID NO: 100828 - DNA, 20 bp, Artificial Sequence
  MKO10100828_B_Ncoa4
  gRNA
gttcattgagccacacctct

SEQ ID NO: 100829 - DNA, 20 bp, Artificial Sequence
  MKO10100829_B_Ncoa4
  gRNA
cagctgcataagtcgccacc

SEQ ID NO: 100830 - DNA, 20 bp, Artificial Sequence
  MKO10100830_B_Ncoa4
  gRNA
caagcacacagagacttgat

SEQ ID NO: 100831 - DNA, 20 bp, Artificial Sequence
  MKO10100831_B_Ncoa5
  gRNA
gtagagaggagctttatcgt

SEQ ID NO: 100832 - DNA, 20 bp, Artificial Sequence
  MKO10100832_B_Ncoa5
  gRNA
gcagagacattcgagatcct

SEQ ID NO: 100833 - DNA, 20 bp, Artificial Sequence
  MKO10100833_B_Ncoa5
  gRNA
tttgctcgagattgactctc

SEQ ID NO: 100834 - DNA, 20 bp, Artificial Sequence
  MKO10100834_B_Ncoa6
  gRNA
taacgaaccttcaatctgaa

SEQ ID NO: 100835 - DNA, 20 bp, Artificial Sequence
  MKO10100835_B_Ncoa6
  gRNA
tgccgctgttatgacgcccc

SEQ ID NO: 100836 - DNA, 20 bp, Artificial Sequence
  MKO10100836_B_Ncoa6
  gRNA
aagatgacatgttcccgccc

SEQ ID NO: 100837 - DNA, 20 bp, Artificial Sequence
  MKO10100837_B_Ncoa7
  gRNA
cgagcttgaagactctctac

SEQ ID NO: 100838 - DNA, 20 bp, Artificial Sequence
  MKO10100838_B_Ncoa7
  gRNA
gagcacttgcagctactacg

SEQ ID NO: 100839 - DNA, 20 bp, Artificial Sequence
  MKO10100839_B_Ncoa7
  gRNA
acagccccacagtgcactcc

SEQ ID NO: 100840 - DNA, 20 bp, Artificial Sequence
  MKO10100840_B_Ncor1
  gRNA
agttaatacagagtatggac

SEQ ID NO: 100841 - DNA, 20 bp, Artificial Sequence
  MKO10100841_B_Ncor1
  gRNA
tcccagtacccgacaccagc

SEQ ID NO: 100842 - DNA, 20 bp, Artificial Sequence
  MKO10100842_B_Ncor1
  gRNA
ttccattacctgtcagaacc

SEQ ID NO: 100843 - DNA, 20 bp, Artificial Sequence
  MKO10100843_B_Ncor2
  gRNA
cattgatggcttgtctgagc

SEQ ID NO: 100844 - DNA, 20 bp, Artificial Sequence
  MKO10100844_B_Ncor2
  gRNA
ggaaccacgcgcgcaagcag

SEQ ID NO: 100845 - DNA, 20 bp, Artificial Sequence
  MKO10100845_B_Ncor2
  gRNA
gtactacgagaaacagttcc

SEQ ID NO: 100846 - DNA, 20 bp, Artificial Sequence
  MKO10100846_B_Ncr1
  gRNA
gtcgagcaaccccctgaaac

SEQ ID NO: 100847 - DNA, 20 bp, Artificial Sequence
  MKO10100847_B_Ncr1
  gRNA
accgaccctacttcttctct

SEQ ID NO: 100848 - DNA, 20 bp, Artificial Sequence
  MKO10100848_B_Ncr1
  gRNA
tagggctatgtctgagccag

SEQ ID NO: 100849 - DNA, 20 bp, Artificial Sequence
  MKO10100849_B_Ncs1
  gRNA
agcgggcagctggatgccgc

SEQ ID NO: 100850 - DNA, 20 bp, Artificial Sequence
  MKO10100850_B_Ncs1
  gRNA
ttgaggtcaccgacagtgcc

SEQ ID NO: 100851 - DNA, 20 bp, Artificial Sequence
  MKO10100851_B_Ncs1
  gRNA
ataacgatggctacatcacc

SEQ ID NO: 100852 - DNA, 20 bp, Artificial Sequence
  MKO10100852_B_Ncstn
  gRNA
tacaggggttatccatgtag

SEQ ID NO: 100853 - DNA, 20 bp, Artificial Sequence
  MKO10100853_B_Ncstn
  gRNA
ggtatttactccaactccta

SEQ ID NO: 100854 - DNA, 20 bp, Artificial Sequence
  MKO10100854_B_Ncstn
  gRNA
ctggcagccaatctgatgag

SEQ ID NO: 100855 - DNA, 20 bp, Artificial Sequence
  MKO10100855_B_Ndc1
  gRNA
cactactgaccaaacgatgc

SEQ ID NO: 100856 - DNA, 20 bp, Artificial Sequence
  MKO10100856_B_Ndc1
  gRNA
gctatagcccatgaatgctc

SEQ ID NO: 100857 - DNA, 20 bp, Artificial Sequence
  MKO10100857_B_Ndc1
  gRNA
ggatagttaccagcatcgtt

SEQ ID NO: 100858 - DNA, 20 bp, Artificial Sequence
  MKO10100858_B_Ndc80
  gRNA
tcacacgtggcctcacatcg

SEQ ID NO: 100859 - DNA, 20 bp, Artificial Sequence
  MKO10100859_B_Ndc80
  gRNA
gatctttaggaactctttag

SEQ ID NO: 100860 - DNA, 20 bp, Artificial Sequence
  MKO10100860_B_Ndc80
  gRNA
acgatgtgaggccacgtgtg

SEQ ID NO: 100861 - DNA, 20 bp, Artificial Sequence
  MKO10100861_B_Nde1
  gRNA
cctaccgtttggctctttcc

SEQ ID NO: 100862 - DNA, 20 bp, Artificial Sequence
  MKO10100862_B_Nde1
  gRNA
cagagccacaatcatgtccc

SEQ ID NO: 100863 - DNA, 20 bp, Artificial Sequence
  MKO10100863_B_Nde1
  gRNA
tgccttcctagagagtgagc

SEQ ID NO: 100864 - DNA, 20 bp, Artificial Sequence
  MKO10100864_B_Ndel1
  gRNA
aagggcaacaatagtttcac

SEQ ID NO: 100865 - DNA, 20 bp, Artificial Sequence
  MKO10100865_B_Ndel1
  gRNA
taaggcaagaactagcagtt

SEQ ID NO: 100866 - DNA, 20 bp, Artificial Sequence
  MKO10100866_B_Ndel1
  gRNA
ctagctcatcccgagcttcc

SEQ ID NO: 100867 - DNA, 20 bp, Artificial Sequence
  MKO10100867_B_Ndfip1
  gRNA
tgcaacttaccctgacaata

SEQ ID NO: 100868 - DNA, 20 bp, Artificial Sequence
  MKO10100868_B_Ndfip1
  gRNA
tatggggccatctcaggatt

SEQ ID NO: 100869 - DNA, 20 bp, Artificial Sequence
  MKO10100869_B_Ndfip1
  gRNA
ttgatgatactgaccagctg

SEQ ID NO: 100870 - DNA, 20 bp, Artificial Sequence
  MKO10100870_B_Ndfip2
  gRNA
aagaggaagactgtacgcca

SEQ ID NO: 100871 - DNA, 20 bp, Artificial Sequence
  MKO10100871_B_Ndfip2
  gRNA
acatcactgaagtcatcccg

SEQ ID NO: 100872 - DNA, 20 bp, Artificial Sequence
  MKO10100872_B_Ndfip2
  gRNA
agagaggtagcaacactgta

SEQ ID NO: 100873 - DNA, 20 bp, Artificial Sequence
  MKO10100873_B_Ndnf
  gRNA
gaagctgcccacccgagatg

SEQ ID NO: 100874 - DNA, 20 bp, Artificial Sequence
  MKO10100874_B_Ndnf
  gRNA
gacaccttgcgatgcacctt

SEQ ID NO: 100875 - DNA, 20 bp, Artificial Sequence
  MKO10100875_B_Ndnf
  gRNA
cgtgaaaaaattccttatcc

SEQ ID NO: 100876 - DNA, 20 bp, Artificial Sequence
  MKO10100876_B_Ndnl2
  gRNA
ggtacactccgagccgtcgc

SEQ ID NO: 100877 - DNA, 20 bp, Artificial Sequence
  MKO10100877_B_Ndnl2
  gRNA
tgggacttcctgcgacggct

SEQ ID NO: 100878 - DNA, 20 bp, Artificial Sequence
  MKO10100878_B_Ndnl2
  gRNA
ccgcggtcggcccagcacgc

SEQ ID NO: 100879 - DNA, 20 bp, Artificial Sequence
  MKO10100879_B_Ndn
  gRNA
agaaggcgcacgagctcatg

SEQ ID NO: 100880 - DNA, 20 bp, Artificial Sequence
  MKO10100880_B_Ndn
  gRNA
cgcggcccttcacatagatg

SEQ ID NO: 100881 - DNA, 20 bp, Artificial Sequence
  MKO10100881_B_Ndn
  gRNA
gcagcccgaacactctggcg

SEQ ID NO: 100882 - DNA, 20 bp, Artificial Sequence
  MKO10100882_B_Ndor1
  gRNA
tctggctgccgaaaagcacc

SEQ ID NO: 100883 - DNA, 20 bp, Artificial Sequence
  MKO10100883_B_Ndor1
  gRNA
cactggcccccaacactttc

SEQ ID NO: 100884 - DNA, 20 bp, Artificial Sequence
  MKO10100884_B_Ndor1
  gRNA
accctctggttggtgatcac

SEQ ID NO: 100885 - DNA, 20 bp, Artificial Sequence
  MKO10100885_B_Ndp
  gRNA
tttgagctacatttgtacag

SEQ ID NO: 100886 - DNA, 20 bp, Artificial Sequence
  MKO10100886_B_Ndp
  gRNA
aggaacggaaaggttgcttg

SEQ ID NO: 100887 - DNA, 20 bp, Artificial Sequence
  MKO10100887_B_Ndp
  gRNA
ctctgcgtctgcgctgctca

SEQ ID NO: 100888 - DNA, 20 bp, Artificial Sequence
  MKO10100888_B_Ndrg1
  gRNA
cctgaacatcgaactcttgc

SEQ ID NO: 100889 - DNA, 20 bp, Artificial Sequence
  MKO10100889_B_Ndrg1
  gRNA
caggtacatgtacccctcaa

SEQ ID NO: 100890 - DNA, 20 bp, Artificial Sequence
  MKO10100890_B_Ndrg1
  gRNA
gctcttacccaaactggtga

SEQ ID NO: 100891 - DNA, 20 bp, Artificial Sequence
  MKO10100891_B_Ndrg2
  gRNA
agatcatacagaacttcgtg

SEQ ID NO: 100892 - DNA, 20 bp, Artificial Sequence
  MKO10100892_B_Ndrg2
  gRNA
gaggagaagccgctgttgcc

SEQ ID NO: 100893 - DNA, 20 bp, Artificial Sequence
  MKO10100893_B_Ndrg2
  gRNA
cctctcactttaggtactgc

SEQ ID NO: 100894 - DNA, 20 bp, Artificial Sequence
  MKO10100894_B_Ndrg3
  gRNA
caaaccgcttctaaatgata

SEQ ID NO: 100895 - DNA, 20 bp, Artificial Sequence
  MKO10100895_B_Ndrg3
  gRNA
gcactttgctgtctgtcacg

SEQ ID NO: 100896 - DNA, 20 bp, Artificial Sequence
  MKO10100896_B_Ndrg3
  gRNA
ggtgctgcttcttgttggcc

SEQ ID NO: 100897 - DNA, 20 bp, Artificial Sequence
  MKO10100897_B_Ndrg4
  gRNA
tacgattgagacccacatca

SEQ ID NO: 100898 - DNA, 20 bp, Artificial Sequence
  MKO10100898_B_Ndrg4
  gRNA
gtggcacaccacaaagtgtt

SEQ ID NO: 100899 - DNA, 20 bp, Artificial Sequence
  MKO10100899_B_Ndrg4
  gRNA
ggccgccatgctcccgagtg

SEQ ID NO: 100900 - DNA, 20 bp, Artificial Sequence
  MKO10100900_B_Ndst1
  gRNA
cgccgtggctttatccacaa

SEQ ID NO: 100901 - DNA, 20 bp, Artificial Sequence
  MKO10100901_B_Ndst1
  gRNA
cgacagcgaacttcttgttc

SEQ ID NO: 100902 - DNA, 20 bp, Artificial Sequence
  MKO10100902_B_Ndst1
  gRNA
tgccataggtacggatgctg

SEQ ID NO: 100903 - DNA, 20 bp, Artificial Sequence
  MKO10100903_B_Ndst2
  gRNA
acagcataccccagatccgt

SEQ ID NO: 100904 - DNA, 20 bp, Artificial Sequence
  MKO10100904_B_Ndst2
  gRNA
cagctagcacagagcggttg

SEQ ID NO: 100905 - DNA, 20 bp, Artificial Sequence
  MKO10100905_B_Ndst2
  gRNA
acatgctgctgaagcaccgc

SEQ ID NO: 100906 - DNA, 20 bp, Artificial Sequence
  MKO10100906_B_Ndst3
  gRNA
gttctcccaagacaaacctg

SEQ ID NO: 100907 - DNA, 20 bp, Artificial Sequence
  MKO10100907_B_Ndst3
  gRNA
aagagcccacaggtttgtct

SEQ ID NO: 100908 - DNA, 20 bp, Artificial Sequence
  MKO10100908_B_Ndst3
  gRNA
tgaaggggatgattgtctgc

SEQ ID NO: 100909 - DNA, 20 bp, Artificial Sequence
  MKO10100909_B_Ndst4
  gRNA
ccacaatgaatcatctttag

SEQ ID NO: 100910 - DNA, 20 bp, Artificial Sequence
  MKO10100910_B_Ndst4
  gRNA
ccactaaagatgattcattg

SEQ ID NO: 100911 - DNA, 20 bp, Artificial Sequence
  MKO10100911_B_Ndst4
  gRNA
agtatgtgtgaacagcccac

SEQ ID NO: 100912 - DNA, 20 bp, Artificial Sequence
  MKO10100912_B_Ndufa10
  gRNA
gctgttgccatcgttgctct

SEQ ID NO: 100913 - DNA, 20 bp, Artificial Sequence
  MKO10100913_B_Ndufa10
  gRNA
agccgagtgataacagtaga

SEQ ID NO: 100914 - DNA, 20 bp, Artificial Sequence
  MKO10100914_B_Ndufa10
  gRNA
ggttgtcttatcaccaagaa

SEQ ID NO: 100915 - DNA, 20 bp, Artificial Sequence
  MKO10100915_B_Ndufa11
  gRNA
cactgcgagctcccaatgtc

SEQ ID NO: 100916 - DNA, 20 bp, Artificial Sequence
  MKO10100916_B_Ndufa11
  gRNA
gcggccgccctgttcaagat

SEQ ID NO: 100917 - DNA, 20 bp, Artificial Sequence
  MKO10100917_B_Ndufa11
  gRNA
caaccccgcagattccaccc

SEQ ID NO: 100918 - DNA, 20 bp, Artificial Sequence
  MKO10100918_B_Ndufa12
  gRNA
cttaaagggcaaatgatata

SEQ ID NO: 100919 - DNA, 20 bp, Artificial Sequence
  MKO10100919_B_Ndufa12
  gRNA
ctggtgggagaagacaaata

SEQ ID NO: 100920 - DNA, 20 bp, Artificial Sequence
  MKO10100920_B_Ndufa12
  gRNA
tggtgtagatgacccatcgg

SEQ ID NO: 100921 - DNA, 20 bp, Artificial Sequence
  MKO10100921_B_Ndufa13
  gRNA
acccatacatctcgccaatg

SEQ ID NO: 100922 - DNA, 20 bp, Artificial Sequence
  MKO10100922_B_Ndufa13
  gRNA
gcagggcctacctgcgctcc

SEQ ID NO: 100923 - DNA, 20 bp, Artificial Sequence
  MKO10100923_B_Ndufa13
  gRNA
cctccaagtcctcaatcagc

SEQ ID NO: 100924 - DNA, 20 bp, Artificial Sequence
  MKO10100924_B_Ndufa1
  gRNA
cgccattatgggggtgtgct

SEQ ID NO: 100925 - DNA, 20 bp, Artificial Sequence
  MKO10100925_B_Ndufa1
  gRNA
ggcctggaaaacattgacta

SEQ ID NO: 100926 - DNA, 20 bp, Artificial Sequence
  MKO10100926_B_Ndufa1
  gRNA
ttgctcgtgttcagtaccag

SEQ ID NO: 100927 - DNA, 20 bp, Artificial Sequence
  MKO10100927_B_Ndufa2
  gRNA
gctgcacctccgagcattcg

SEQ ID NO: 100928 - DNA, 20 bp, Artificial Sequence
  MKO10100928_B_Ndufa2
  gRNA
tcagagacaccgtcttctct

SEQ ID NO: 100929 - DNA, 20 bp, Artificial Sequence
  MKO10100929_B_Ndufa2
  gRNA
gccgcttagcacattctgca

SEQ ID NO: 100930 - DNA, 20 bp, Artificial Sequence
  MKO10100930_B_Ndufa3
  gRNA
ctctgggtccaagcttggac

SEQ ID NO: 100931 - DNA, 20 bp, Artificial Sequence
  MKO10100931_B_Ndufa3
  gRNA
ctgccttcctcaagaatgcc

SEQ ID NO: 100932 - DNA, 20 bp, Artificial Sequence
  MKO10100932_B_Ndufa3
  gRNA
ctgctcacctgggtagttgt

SEQ ID NO: 100933 - DNA, 20 bp, Artificial Sequence
  MKO10100933_B_Ndufa4l2
  gRNA
aagtcgcagcaagtagagtc

SEQ ID NO: 100934 - DNA, 20 bp, Artificial Sequence
  MKO10100934_B_Ndufa4l2
  gRNA
cggcagataaaaagacaccc

SEQ ID NO: 100935 - DNA, 20 bp, Artificial Sequence
  MKO10100935_B_Ndufa4l2
  gRNA
aagatggcaggaactagtct

SEQ ID NO: 100936 - DNA, 20 bp, Artificial Sequence
  MKO10100936_B_Ndufa4
  gRNA
cactgtttaatccagatgtc

SEQ ID NO: 100937 - DNA, 20 bp, Artificial Sequence
  MKO10100937_B_Ndufa4
  gRNA
aacatgctccgccagatcct

SEQ ID NO: 100938 - DNA, 20 bp, Artificial Sequence
  MKO10100938_B_Ndufa4
  gRNA
agcactgtatgtgatgcgct

SEQ ID NO: 100939 - DNA, 20 bp, Artificial Sequence
  MKO10100939_B_Ndufa5
  gRNA
gtcatattggccacttccac

SEQ ID NO: 100940 - DNA, 20 bp, Artificial Sequence
  MKO10100940_B_Ndufa5
  gRNA
cacttcaccaccctgaagca

SEQ ID NO: 100941 - DNA, 20 bp, Artificial Sequence
  MKO10100941_B_Ndufa5
  gRNA
acagatcaccaacgagaagc

SEQ ID NO: 100942 - DNA, 20 bp, Artificial Sequence
  MKO10100942_B_Ndufa6
  gRNA
gaccagcagatcaaccactc

SEQ ID NO: 100943 - DNA, 20 bp, Artificial Sequence
  MKO10100943_B_Ndufa6
  gRNA
tttagtgcacttaatgcagc

SEQ ID NO: 100944 - DNA, 20 bp, Artificial Sequence
  MKO10100944_B_Ndufa6
  gRNA
acagggaaagatggagctcc

SEQ ID NO: 100945 - DNA, 20 bp, Artificial Sequence
  MKO10100945_B_Ndufa7
  gRNA
cggcggccttgcctgacacc

SEQ ID NO: 100946 - DNA, 20 bp, Artificial Sequence
  MKO10100946_B_Ndufa7
  gRNA
ctcgcgttatccaaaagctg

SEQ ID NO: 100947 - DNA, 20 bp, Artificial Sequence
  MKO10100947_B_Ndufa7
  gRNA
acgcccagttccgcagcttt

SEQ ID NO: 100948 - DNA, 20 bp, Artificial Sequence
  MKO10100948_B_Ndufa8
  gRNA
cccaaggcgctgcctgaagg

SEQ ID NO: 100949 - DNA, 20 bp, Artificial Sequence
  MKO10100949_B_Ndufa8
  gRNA
gatctgaaacccgccaagca

SEQ ID NO: 100950 - DNA, 20 bp, Artificial Sequence
  MKO10100950_B_Ndufa8
  gRNA
gtgacgaaacagctgcatgt

SEQ ID NO: 100951 - DNA, 20 bp, Artificial Sequence
  MKO10100951_B_Ndufa9
  gRNA
tcaatcttattgggcgggag

SEQ ID NO: 100952 - DNA, 20 bp, Artificial Sequence
  MKO10100952_B_Ndufa9
  gRNA
tattcctcgagcaatagctc

SEQ ID NO: 100953 - DNA, 20 bp, Artificial Sequence
  MKO10100953_B_Ndufa9
  gRNA
cacaagtgatcataccatat

SEQ ID NO: 100954 - DNA, 20 bp, Artificial Sequence
  MKO10100954_B_Ndufab1
  gRNA
ctgtgtccgccgcctgcccg

SEQ ID NO: 100955 - DNA, 20 bp, Artificial Sequence
  MKO10100955_B_Ndufab1
  gRNA
gcacccccactgacgttaga

SEQ ID NO: 100956 - DNA, 20 bp, Artificial Sequence
  MKO10100956_B_Ndufab1
  gRNA
cttagacagtttggaccaag

SEQ ID NO: 100957 - DNA, 20 bp, Artificial Sequence
  MKO10100957_B_Ndufaf1
  gRNA
agttacttcatgttcacccg

SEQ ID NO: 100958 - DNA, 20 bp, Artificial Sequence
  MKO10100958_B_Ndufaf1
  gRNA
atcaccttgtccaatacgag

SEQ ID NO: 100959 - DNA, 20 bp, Artificial Sequence
  MKO10100959_B_Ndufaf1
  gRNA
ggccttggatggtaaatatc

SEQ ID NO: 100960 - DNA, 20 bp, Artificial Sequence
  MKO10100960_B_Ndufaf2
  gRNA
caggagacatcccaaccgag

SEQ ID NO: 100961 - DNA, 20 bp, Artificial Sequence
  MKO10100961_B_Ndufaf2
  gRNA
ggcagactattcgagagaaa

SEQ ID NO: 100962 - DNA, 20 bp, Artificial Sequence
  MKO10100962_B_Ndufaf2
  gRNA
tgaaggcaagagttcttcac

SEQ ID NO: 100963 - DNA, 20 bp, Artificial Sequence
  MKO10100963_B_Ndufaf3
  gRNA
tccacccttagagattgttg

SEQ ID NO: 100964 - DNA, 20 bp, Artificial Sequence
  MKO10100964_B_Ndufaf3
  gRNA
agcaattccccgctgcctca

SEQ ID NO: 100965 - DNA, 20 bp, Artificial Sequence
  MKO10100965_B_Ndufaf3
  gRNA
catacaggtgggatctcatc

SEQ ID NO: 100966 - DNA, 20 bp, Artificial Sequence
  MKO10100966_B_Ndufaf4
  gRNA
aggcaagattactgttgtag

SEQ ID NO: 100967 - DNA, 20 bp, Artificial Sequence
  MKO10100967_B_Ndufaf4
  gRNA
ttatcaaagtgatttcctat

SEQ ID NO: 100968 - DNA, 20 bp, Artificial Sequence
  MKO10100968_B_Ndufaf4
  gRNA
gaaacaacttcttcgatttc

SEQ ID NO: 100969 - DNA, 20 bp, Artificial Sequence
  MKO10100969_B_Ndufaf5
  gRNA
catgctctgcaatgtctgtt

SEQ ID NO: 100970 - DNA, 20 bp, Artificial Sequence
  MKO10100970_B_Ndufaf5
  gRNA
ctcttccacatcctatgtcc

SEQ ID NO: 100971 - DNA, 20 bp, Artificial Sequence
  MKO10100971_B_Ndufaf5
  gRNA
cagagactttccccttgccc

SEQ ID NO: 100972 - DNA, 20 bp, Artificial Sequence
  MKO10100972_B_Ndufaf6
  gRNA
ctgagccagttccacattga

SEQ ID NO: 100973 - DNA, 20 bp, Artificial Sequence
  MKO10100973_B_Ndufaf6
  gRNA
tgacaacccaccacaccagc

SEQ ID NO: 100974 - DNA, 20 bp, Artificial Sequence
  MKO10100974_B_Ndufaf6
  gRNA
gcagttctggaaaaaagctg

SEQ ID NO: 100975 - DNA, 20 bp, Artificial Sequence
  MKO10100975_B_Ndufaf7
  gRNA
tacataagatgccgcagcat

SEQ ID NO: 100976 - DNA, 20 bp, Artificial Sequence
  MKO10100976_B_Ndufaf7
  gRNA
tcagggatattatgtgcatc

SEQ ID NO: 100977 - DNA, 20 bp, Artificial Sequence
  MKO10100977_B_Ndufaf7
  gRNA
tgtcatagctactaggggtg

SEQ ID NO: 100978 - DNA, 20 bp, Artificial Sequence
  MKO10100978_B_Ndufb10
  gRNA
atctttcagcaaagttgacc

SEQ ID NO: 100979 - DNA, 20 bp, Artificial Sequence
  MKO10100979_B_Ndufb10
  gRNA
ctattctgccagaaagtgtc

SEQ ID NO: 100980 - DNA, 20 bp, Artificial Sequence
  MKO10100980_B_Ndufb10
  gRNA
gtactgtcggtggtagtagt

SEQ ID NO: 100981 - DNA, 20 bp, Artificial Sequence
  MKO10100981_B_Ndufb11
  gRNA
tggcttatgtgcctgattac

SEQ ID NO: 100982 - DNA, 20 bp, Artificial Sequence
  MKO10100982_B_Ndufb11
  gRNA
atattccagacgtccaccac

SEQ ID NO: 100983 - DNA, 20 bp, Artificial Sequence
  MKO10100983_B_Ndufb11
  gRNA
gtaagccatcagtcatcttc

SEQ ID NO: 100984 - DNA, 20 bp, Artificial Sequence
  MKO10100984_B_Ndufb2
  gRNA
ttgtcttccagcgctggcgg

SEQ ID NO: 100985 - DNA, 20 bp, Artificial Sequence
  MKO10100985_B_Ndufb2
  gRNA
tacatattcagccccggtac

SEQ ID NO: 100986 - DNA, 20 bp, Artificial Sequence
  MKO10100986_B_Ndufb2
  gRNA
cagtgtcagtcctcgtcatc

SEQ ID NO: 100987 - DNA, 20 bp, Artificial Sequence
  MKO10100987_B_Ndufb3
  gRNA
agatacatgggcggctttgc

SEQ ID NO: 100988 - DNA, 20 bp, Artificial Sequence
  MKO10100988_B_Ndufb3
  gRNA
cccatggatccctcagccct

SEQ ID NO: 100989 - DNA, 20 bp, Artificial Sequence
  MKO10100989_B_Ndufb3
  gRNA
ttcttctgcaccgtttctaa

SEQ ID NO: 100990 - DNA, 20 bp, Artificial Sequence
  MKO10100990_B_Ndufb4
  gRNA
aaacataataccagaagatg

SEQ ID NO: 100991 - DNA, 20 bp, Artificial Sequence
  MKO10100991_B_Ndufb4
  gRNA
cagaaaggaaagacttatcc

SEQ ID NO: 100992 - DNA, 20 bp, Artificial Sequence
  MKO10100992_B_Ndufb4
  gRNA
tgccgagtatgacgtgtctc

SEQ ID NO: 100993 - DNA, 20 bp, Artificial Sequence
  MKO10100993_B_Ndufb5
  gRNA
actatgacgctcgcttcttg

SEQ ID NO: 100994 - DNA, 20 bp, Artificial Sequence
  MKO10100994_B_Ndufb5
  gRNA
tgaacactgggagtattaca

SEQ ID NO: 100995 - DNA, 20 bp, Artificial Sequence
  MKO10100995_B_Ndufb5
  gRNA
aaattctaccttatgttgac

SEQ ID NO: 100996 - DNA, 20 bp, Artificial Sequence
  MKO10100996_B_Ndufb6
  gRNA
ttcgagctaacaatggtgta

SEQ ID NO: 100997 - DNA, 20 bp, Artificial Sequence
  MKO10100997_B_Ndufb6
  gRNA
ccattgttagctcgaagccc

SEQ ID NO: 100998 - DNA, 20 bp, Artificial Sequence
  MKO10100998_B_Ndufb6
  gRNA
taatagtgaacaaaccacat

SEQ ID NO: 100999 - DNA, 20 bp, Artificial Sequence
  MKO10100999_B_Ndufb7
  gRNA
tcacctcgctccttgcgctc

SEQ ID NO: 101000 - DNA, 20 bp, Artificial Sequence
  MKO10101000_B_Ndufb7
  gRNA
gcaagcacgagcagcacgac

SEQ ID NO: 101001 - DNA, 20 bp, Artificial Sequence
  MKO10101001_B_Ndufb7
  gRNA
aatccctacagggccacctc

SEQ ID NO: 101002 - DNA, 20 bp, Artificial Sequence
  MKO10101002_B_Ndufb8
  gRNA
ccaaccgatcacagcatgag

SEQ ID NO: 101003 - DNA, 20 bp, Artificial Sequence
  MKO10101003_B_Ndufb8
  gRNA
ttattgtaagggtactgctt

SEQ ID NO: 101004 - DNA, 20 bp, Artificial Sequence
  MKO10101004_B_Ndufb8
  gRNA
gatccctctcatgctgtgat

SEQ ID NO: 101005 - DNA, 20 bp, Artificial Sequence
  MKO10101005_B_Ndufb9
  gRNA
gcttcagtcataataccatc

SEQ ID NO: 101006 - DNA, 20 bp, Artificial Sequence
  MKO10101006_B_Ndufb9
  gRNA
cttctaggttaagcagctgc

SEQ ID NO: 101007 - DNA, 20 bp, Artificial Sequence
  MKO10101007_B_Ndufb9
  gRNA
tgtggatacaccatgactcg

SEQ ID NO: 101008 - DNA, 20 bp, Artificial Sequence
  MKO10101008_B_Ndufc1
  gRNA
actcacagcagctcggcagc

SEQ ID NO: 101009 - DNA, 20 bp, Artificial Sequence
  MKO10101009_B_Ndufc1
  gRNA
gtataaaagaagaaatggat

SEQ ID NO: 101010 - DNA, 20 bp, Artificial Sequence
  MKO10101010_B_Ndufc1
  gRNA
aacacacaatgaagatgttt

SEQ ID NO: 101011 - DNA, 20 bp, Artificial Sequence
  MKO10101011_B_Ndufc2
  gRNA
acgtaacgaacagaagctgg

SEQ ID NO: 101012 - DNA, 20 bp, Artificial Sequence
  MKO10101012_B_Ndufc2
  gRNA
tggctcaagaatttcagcat

SEQ ID NO: 101013 - DNA, 20 bp, Artificial Sequence
  MKO10101013_B_Ndufc2
  gRNA
gcctcaagatgatgaacggc

SEQ ID NO: 101014 - DNA, 20 bp, Artificial Sequence
  MKO10101014_B_Ndufs1
  gRNA
tgtcttctaggcttgcgaga

SEQ ID NO: 101015 - DNA, 20 bp, Artificial Sequence
  MKO10101015_B_Ndufs1
  gRNA
ctcgattctgttaccatgaa

SEQ ID NO: 101016 - DNA, 20 bp, Artificial Sequence
  MKO10101016_B_Ndufs1
  gRNA
atattccagcccttcattac

SEQ ID NO: 101017 - DNA, 20 bp, Artificial Sequence
  MKO10101017_B_Ndufs2
  gRNA
cttctccacagctatcgaat

SEQ ID NO: 101018 - DNA, 20 bp, Artificial Sequence
  MKO10101018_B_Ndufs2
  gRNA
tccccagaggtgctcggcag

SEQ ID NO: 101019 - DNA, 20 bp, Artificial Sequence
  MKO10101019_B_Ndufs2
  gRNA
tcagttccagcacgagtctc

SEQ ID NO: 101020 - DNA, 20 bp, Artificial Sequence
  MKO10101020_B_Ndufs3
  gRNA
ttccagccactgtcagaccc

SEQ ID NO: 101021 - DNA, 20 bp, Artificial Sequence
  MKO10101021_B_Ndufs3
  gRNA
cacctccctctcataccaat

SEQ ID NO: 101022 - DNA, 20 bp, Artificial Sequence
  MKO10101022_B_Ndufs3
  gRNA
agttgaaccgcagagacagc

SEQ ID NO: 101023 - DNA, 20 bp, Artificial Sequence
  MKO10101023_B_Ndufs4
  gRNA
taagctgtgtgtcccgagtc

SEQ ID NO: 101024 - DNA, 20 bp, Artificial Sequence
  MKO10101024_B_Ndufs4
  gRNA
aaagtttgcaccataagact

SEQ ID NO: 101025 - DNA, 20 bp, Artificial Sequence
  MKO10101025_B_Ndufs4
  gRNA
cgctgaccccctctccaaca

SEQ ID NO: 101026 - DNA, 20 bp, Artificial Sequence
  MKO10101026_B_Ndufs5
  gRNA
agctgccccgctcagggcct

SEQ ID NO: 101027 - DNA, 20 bp, Artificial Sequence
  MKO10101027_B_Ndufs5
  gRNA
gccacgcatttgaaaaagag

SEQ ID NO: 101028 - DNA, 20 bp, Artificial Sequence
  MKO10101028_B_Ndufs5
  gRNA
ccttgacatacagaaaaagc

SEQ ID NO: 101029 - DNA, 20 bp, Artificial Sequence
  MKO10101029_B_Ndufs6
  gRNA
cggtgctccacctcattcac

SEQ ID NO: 101030 - DNA, 20 bp, Artificial Sequence
  MKO10101030_B_Ndufs6
  gRNA
tcaggacaaagaaacaaaaa

SEQ ID NO: 101031 - DNA, 20 bp, Artificial Sequence
  MKO10101031_B_Ndufs6
  gRNA
tgtatgatgaaaaagactac

SEQ ID NO: 101032 - DNA, 20 bp, Artificial Sequence
  MKO10101032_B_Ndufs7
  gRNA
cccggcgtgcccagttgatg

SEQ ID NO: 101033 - DNA, 20 bp, Artificial Sequence
  MKO10101033_B_Ndufs7
  gRNA
gacacactcaccgcagaccc

SEQ ID NO: 101034 - DNA, 20 bp, Artificial Sequence
  MKO10101034_B_Ndufs7
  gRNA
gctcgggctcgggccctcag

SEQ ID NO: 101035 - DNA, 20 bp, Artificial Sequence
  MKO10101035_B_Ndufs8
  gRNA
ccttcaggccatcaccattg

SEQ ID NO: 101036 - DNA, 20 bp, Artificial Sequence
  MKO10101036_B_Ndufs8
  gRNA
ccgccactgcgctgctatga

SEQ ID NO: 101037 - DNA, 20 bp, Artificial Sequence
  MKO10101037_B_Ndufs8
  gRNA
ccgcaactgacaatgcagct

SEQ ID NO: 101038 - DNA, 20 bp, Artificial Sequence
  MKO10101038_B_Ndufv1
  gRNA
gccgcctatatctacatccg

SEQ ID NO: 101039 - DNA, 20 bp, Artificial Sequence
  MKO10101039_B_Ndufv1
  gRNA
tgtaccagtcaccccgtctc

SEQ ID NO: 101040 - DNA, 20 bp, Artificial Sequence
  MKO10101040_B_Ndufv1
  gRNA
gccaatcagacctgcttcat

SEQ ID NO: 101041 - DNA, 20 bp, Artificial Sequence
  MKO10101041_B_Ndufv2
  gRNA
gtgaaatcaaatggagtatc

SEQ ID NO: 101042 - DNA, 20 bp, Artificial Sequence
  MKO10101042_B_Ndufv2
  gRNA
attcaataccttgttcatag

SEQ ID NO: 101043 - DNA, 20 bp, Artificial Sequence
  MKO10101043_B_Ndufv2
  gRNA
tcgcccaaaggcagaatgga

SEQ ID NO: 101044 - DNA, 20 bp, Artificial Sequence
  MKO10101044_B_Ndufv3
  gRNA
cttcaggacgagagtcacct

SEQ ID NO: 101045 - DNA, 20 bp, Artificial Sequence
  MKO10101045_B_Ndufv3
  gRNA
tctcgtcctgaagacggctg

SEQ ID NO: 101046 - DNA, 20 bp, Artificial Sequence
  MKO10101046_B_Ndufv3
  gRNA
aagggtgttcccgggagaac

SEQ ID NO: 101047 - DNA, 20 bp, Artificial Sequence
  MKO10101047_B_Nebl
  gRNA
ccactgcgaggtctgcaaga

SEQ ID NO: 101048 - DNA, 20 bp, Artificial Sequence
  MKO10101048_B_Nebl
  gRNA
ttcaggtgtatccgccactg

SEQ ID NO: 101049 - DNA, 20 bp, Artificial Sequence
  MKO10101049_B_Nebl
  gRNA
gcagttcactttgctgcttc

SEQ ID NO: 101050 - DNA, 20 bp, Artificial Sequence
  MKO10101050_B_Neb
  gRNA
tctgcaggttaagtatcgaa

SEQ ID NO: 101051 - DNA, 20 bp, Artificial Sequence
  MKO10101051_B_Neb
  gRNA
ccacctcactgagttgatcc

SEQ ID NO: 101052 - DNA, 20 bp, Artificial Sequence
  MKO10101052_B_Neb
  gRNA
acagtttacgaagaggtgcc

SEQ ID NO: 101053 - DNA, 20 bp, Artificial Sequence
  MKO10101053_B_Necab1
  gRNA
cttggtattgtgtgtgtcaa

SEQ ID NO: 101054 - DNA, 20 bp, Artificial Sequence
  MKO10101054_B_Necab1
  gRNA
gagattcaggtcttcaagtg

SEQ ID NO: 101055 - DNA, 20 bp, Artificial Sequence
  MKO10101055_B_Necab1
  gRNA
ctgaggagagcagacaaaaa

SEQ ID NO: 101056 - DNA, 20 bp, Artificial Sequence
  MKO10101056_B_Necab2
  gRNA
tcctgccccagactactttg

SEQ ID NO: 101057 - DNA, 20 bp, Artificial Sequence
  MKO10101057_B_Necab2
  gRNA
tttcaactcttcttcgcaga

SEQ ID NO: 101058 - DNA, 20 bp, Artificial Sequence
  MKO10101058_B_Necab2
  gRNA
gtacctaccacacagttcct

SEQ ID NO: 101059 - DNA, 20 bp, Artificial Sequence
  MKO10101059_B_Necab3
  gRNA
ttctcagctctgcggagctg

SEQ ID NO: 101060 - DNA, 20 bp, Artificial Sequence
  MKO10101060_B_Necab3
  gRNA
ttccgaagagcagacaaaaa

SEQ ID NO: 101061 - DNA, 20 bp, Artificial Sequence
  MKO10101061_B_Necab3
  gRNA
ttagagacagagaaactgtg

SEQ ID NO: 101062 - DNA, 20 bp, Artificial Sequence
  MKO10101062_B_Necap1
  gRNA
cctgatcacaaagtagcggc

SEQ ID NO: 101063 - DNA, 20 bp, Artificial Sequence
  MKO10101063_B_Necap1
  gRNA
aatggataatcgtcccaagt

SEQ ID NO: 101064 - DNA, 20 bp, Artificial Sequence
  MKO10101064_B_Necap1
  gRNA
tccccaaaggtgggtaaagc

SEQ ID NO: 101065 - DNA, 20 bp, Artificial Sequence
  MKO10101065_B_Necap2
  gRNA
ttcgtcatccgaattgaaga

SEQ ID NO: 101066 - DNA, 20 bp, Artificial Sequence
  MKO10101066_B_Necap2
  gRNA
cactgcgatgttgatcttga

SEQ ID NO: 101067 - DNA, 20 bp, Artificial Sequence
  MKO10101067_B_Necap2
  gRNA
tgacttcaacgtggcattac

SEQ ID NO: 101068 - DNA, 20 bp, Artificial Sequence
  MKO10101068_B_Nedd1
  gRNA
tcttacttgaagtatcatag

SEQ ID NO: 101069 - DNA, 20 bp, Artificial Sequence
  MKO10101069_B_Nedd1
  gRNA
aggtgtgctggatgtattag

SEQ ID NO: 101070 - DNA, 20 bp, Artificial Sequence
  MKO10101070_B_Nedd1
  gRNA
ggctttgtgtgtactgtcaa

SEQ ID NO: 101071 - DNA, 20 bp, Artificial Sequence
  MKO10101071_B_Nedd4l
  gRNA
agcgtcggtgtgcagcctcc

SEQ ID NO: 101072 - DNA, 20 bp, Artificial Sequence
  MKO10101072_B_Nedd4l
  gRNA
agcctcaccttctaggtcgc

SEQ ID NO: 101073 - DNA, 20 bp, Artificial Sequence
  MKO10101073_B_Nedd4l
  gRNA
gtactcacatcaagctgggt

SEQ ID NO: 101074 - DNA, 20 bp, Artificial Sequence
  MKO10101074_B_Nedd4
  gRNA
aacatacgttgtggagctcc

SEQ ID NO: 101075 - DNA, 20 bp, Artificial Sequence
  MKO10101075_B_Nedd4
  gRNA
ggctcccaagatgtctttct

SEQ ID NO: 101076 - DNA, 20 bp, Artificial Sequence
  MKO10101076_B_Nedd4
  gRNA
cctggccaagaaagacatct

SEQ ID NO: 101077 - DNA, 20 bp, Artificial Sequence
  MKO10101077_B_Nedd8
  gRNA
gcagctgattacaagattct

SEQ ID NO: 101078 - DNA, 20 bp, Artificial Sequence
  MKO10101078_B_Nedd8
  gRNA
acctgactcaccttgtctgt

SEQ ID NO: 101079 - DNA, 20 bp, Artificial Sequence
  MKO10101079_B_Nedd8
  gRNA
gaagatgctaattaaagtga

SEQ ID NO: 101080 - DNA, 20 bp, Artificial Sequence
  MKO10101080_B_Nedd9
  gRNA
ggacatcgtagacatccttt

SEQ ID NO: 101081 - DNA, 20 bp, Artificial Sequence
  MKO10101081_B_Nedd9
  gRNA
ggaatgtcatataccccttg

SEQ ID NO: 101082 - DNA, 20 bp, Artificial Sequence
  MKO10101082_B_Nedd9
  gRNA
agtaggctgctcatgaccgg

SEQ ID NO: 101083 - DNA, 20 bp, Artificial Sequence
  MKO10101083_B_Nefh
  gRNA
gaagagtgtcggattggctt

SEQ ID NO: 101084 - DNA, 20 bp, Artificial Sequence
  MKO10101084_B_Nefh
  gRNA
gaggttggaccgactctcag

SEQ ID NO: 101085 - DNA, 20 bp, Artificial Sequence
  MKO10101085_B_Nefh
  gRNA
acattgagattgccgcttac

SEQ ID NO: 101086 - DNA, 20 bp, Artificial Sequence
  MKO10101086_B_Nefl
  gRNA
ctactataccagccacgtcc

SEQ ID NO: 101087 - DNA, 20 bp, Artificial Sequence
  MKO10101087_B_Nefl
  gRNA
acatcgagattgcagcttac

SEQ ID NO: 101088 - DNA, 20 bp, Artificial Sequence
  MKO10101088_B_Nefl
  gRNA
agctgcaatctcgatgtcca

SEQ ID NO: 101089 - DNA, 20 bp, Artificial Sequence
  MKO10101089_B_Nefm
  gRNA
agcaccatcgcccccctcgc

SEQ ID NO: 101090 - DNA, 20 bp, Artificial Sequence
  MKO10101090_B_Nefm
  gRNA
agggagtgaccgtagcccgc

SEQ ID NO: 101091 - DNA, 20 bp, Artificial Sequence
  MKO10101091_B_Nefm
  gRNA
acatcgagatcgccgcgtac

SEQ ID NO: 101092 - DNA, 20 bp, Artificial Sequence
  MKO10101092_B_Negr1
  gRNA
agatgaacctgcattgtccg

SEQ ID NO: 101093 - DNA, 20 bp, Artificial Sequence
  MKO10101093_B_Negr1
  gRNA
actctcactttcttcacgtc

SEQ ID NO: 101094 - DNA, 20 bp, Artificial Sequence
  MKO10101094_B_Negr1
  gRNA
caatgtcacccttacttgtt

SEQ ID NO: 101095 - DNA, 20 bp, Artificial Sequence
  MKO10101095_B_Neil1
  gRNA
atggcattggcaactatctg

SEQ ID NO: 101096 - DNA, 20 bp, Artificial Sequence
  MKO10101096_B_Neil1
  gRNA
tcaccggccggcactgttgc

SEQ ID NO: 101097 - DNA, 20 bp, Artificial Sequence
  MKO10101097_B_Neil1
  gRNA
actgtacgagccttctcaaa

SEQ ID NO: 101098 - DNA, 20 bp, Artificial Sequence
  MKO10101098_B_Neil2
  gRNA
gccagaaggtggtcaagacg

SEQ ID NO: 101099 - DNA, 20 bp, Artificial Sequence
  MKO10101099_B_Neil2
  gRNA
tctgctgaaacatataatct

SEQ ID NO: 101100 - DNA, 20 bp, Artificial Sequence
  MKO10101100_B_Neil2
  gRNA
cagcagcccacagcctatac

SEQ ID NO: 101101 - DNA, 20 bp, Artificial Sequence
  MKO10101101_B_Neil3
  gRNA
tttatcttaccgtaaagctc

SEQ ID NO: 101102 - DNA, 20 bp, Artificial Sequence
  MKO10101102_B_Neil3
  gRNA
ggctgctccaatgaatgcta

SEQ ID NO: 101103 - DNA, 20 bp, Artificial Sequence
  MKO10101103_B_Neil3
  gRNA
gctccatcttgattaaccca

SEQ ID NO: 101104 - DNA, 20 bp, Artificial Sequence
  MKO10101104_B_Nek10
  gRNA
tcaagagatcttcacagctc

SEQ ID NO: 101105 - DNA, 20 bp, Artificial Sequence
  MKO10101105_B_Nek10
  gRNA
gttcaaccaacctgataaca

SEQ ID NO: 101106 - DNA, 20 bp, Artificial Sequence
  MKO10101106_B_Nek10
  gRNA
cgttcagtcaagcaaacagc

SEQ ID NO: 101107 - DNA, 20 bp, Artificial Sequence
  MKO10101107_B_Nek11
  gRNA
aaatccaaatgagaccgtgc

SEQ ID NO: 101108 - DNA, 20 bp, Artificial Sequence
  MKO10101108_B_Nek11
  gRNA
gagttgactacatgcatgag

SEQ ID NO: 101109 - DNA, 20 bp, Artificial Sequence
  MKO10101109_B_Nek11
  gRNA
tggctacagaaaggtactga

SEQ ID NO: 101110 - DNA, 20 bp, Artificial Sequence
  MKO10101110_B_Nek1
  gRNA
acagtgcagcttggagattt

SEQ ID NO: 101111 - DNA, 20 bp, Artificial Sequence
  MKO10101111_B_Nek1
  gRNA
tcaccgagacataaagtcac

SEQ ID NO: 101112 - DNA, 20 bp, Artificial Sequence
  MKO10101112_B_Nek1
  gRNA
atacctgtgactttatgtct

SEQ ID NO: 101113 - DNA, 20 bp, Artificial Sequence
  MKO10101113_B_Nek2
  gRNA
cacaaccctgtacatcgtaa

SEQ ID NO: 101114 - DNA, 20 bp, Artificial Sequence
  MKO10101114_B_Nek2
  gRNA
tcaactgagtcatcactcga

SEQ ID NO: 101115 - DNA, 20 bp, Artificial Sequence
  MKO10101115_B_Nek2
  gRNA
aattcagcatccgagtgatg

SEQ ID NO: 101116 - DNA, 20 bp, Artificial Sequence
  MKO10101116_B_Nek3
  gRNA
aatactccatcacaatgtac

SEQ ID NO: 101117 - DNA, 20 bp, Artificial Sequence
  MKO10101117_B_Nek3
  gRNA
agccctggccaatcactctc

SEQ ID NO: 101118 - DNA, 20 bp, Artificial Sequence
  MKO10101118_B_Nek3
  gRNA
tttccttacagatacttaat

SEQ ID NO: 101119 - DNA, 20 bp, Artificial Sequence
  MKO10101119_B_Nek4
  gRNA
gcgaaggaggtgatctgtac

SEQ ID NO: 101120 - DNA, 20 bp, Artificial Sequence
  MKO10101120_B_Nek4
  gRNA
ttgcattaaaagcgtgcttc

SEQ ID NO: 101121 - DNA, 20 bp, Artificial Sequence
  MKO10101121_B_Nek4
  gRNA
cgcacagagggcctctcctc

SEQ ID NO: 101122 - DNA, 20 bp, Artificial Sequence
  MKO10101122_B_Nek5
  gRNA
accttcttcagctcgtttca

SEQ ID NO: 101123 - DNA, 20 bp, Artificial Sequence
  MKO10101123_B_Nek5
  gRNA
agtgatgttcagcgaagacc

SEQ ID NO: 101124 - DNA, 20 bp, Artificial Sequence
  MKO10101124_B_Nek5
  gRNA
accttgaaacgagctgaaga

SEQ ID NO: 101125 - DNA, 20 bp, Artificial Sequence
  MKO10101125_B_Nek6
  gRNA
tccgaatatcatcaagtatc

SEQ ID NO: 101126 - DNA, 20 bp, Artificial Sequence
  MKO10101126_B_Nek6
  gRNA
ccagtgagcagcgaaaagac

SEQ ID NO: 101127 - DNA, 20 bp, Artificial Sequence
  MKO10101127_B_Nek6
  gRNA
acagttcagtgaggtttaca

SEQ ID NO: 101128 - DNA, 20 bp, Artificial Sequence
  MKO10101128_B_Nek7
  gRNA
tgacctctccagaatgataa

SEQ ID NO: 101129 - DNA, 20 bp, Artificial Sequence
  MKO10101129_B_Nek7
  gRNA
ctgaacgaagtatttccaaa

SEQ ID NO: 101130 - DNA, 20 bp, Artificial Sequence
  MKO10101130_B_Nek7
  gRNA
aaagtattatagcccatatc

SEQ ID NO: 101131 - DNA, 20 bp, Artificial Sequence
  MKO10101131_B_Nek8
  gRNA
tgtactcactgcagcctcga

SEQ ID NO: 101132 - DNA, 20 bp, Artificial Sequence
  MKO10101132_B_Nek8
  gRNA
gcgctgcaactctctgctag

SEQ ID NO: 101133 - DNA, 20 bp, Artificial Sequence
  MKO10101133_B_Nek8
  gRNA
catgcgcacgctgcccacat

SEQ ID NO: 101134 - DNA, 20 bp, Artificial Sequence
  MKO10101134_B_Nek9
  gRNA
agtactccagctcaatcagc

SEQ ID NO: 101135 - DNA, 20 bp, Artificial Sequence
  MKO10101135_B_Nek9
  gRNA
acttaattctgagtactcta

SEQ ID NO: 101136 - DNA, 20 bp, Artificial Sequence
  MKO10101136_B_Nek9
  gRNA
ctgctgaaacaatctgaaaa

SEQ ID NO: 101137 - DNA, 20 bp, Artificial Sequence
  MKO10101137_B_Nelfa
  gRNA
ggactccaataccaccttcg

SEQ ID NO: 101138 - DNA, 20 bp, Artificial Sequence
  MKO10101138_B_Nelfa
  gRNA
cagcagttctgcccgcagcg

SEQ ID NO: 101139 - DNA, 20 bp, Artificial Sequence
  MKO10101139_B_Nelfa
  gRNA
tttagctgaaaatgcttgac

SEQ ID NO: 101140 - DNA, 20 bp, Artificial Sequence
  MKO10101140_B_Nelfb
  gRNA
tgtcccgtgtagatccaaga

SEQ ID NO: 101141 - DNA, 20 bp, Artificial Sequence
  MKO10101141_B_Nelfb
  gRNA
tggctgacaaggagttgtac

SEQ ID NO: 101142 - DNA, 20 bp, Artificial Sequence
  MKO10101142_B_Nelfb
  gRNA
tctgtgcaggtacaagaagc

SEQ ID NO: 101143 - DNA, 20 bp, Artificial Sequence
  MKO10101143_B_Nelfcd
  gRNA
agcatcgtcctctccttctc

SEQ ID NO: 101144 - DNA, 20 bp, Artificial Sequence
  MKO10101144_B_Nelfcd
  gRNA
cccaggcgttgagcctgtgc

SEQ ID NO: 101145 - DNA, 20 bp, Artificial Sequence
  MKO10101145_B_Nelfcd
  gRNA
agatgatcgcacacacaaca

SEQ ID NO: 101146 - DNA, 20 bp, Artificial Sequence
  MKO10101146_B_Nelfe
  gRNA
gctgtggcagtgtccaccac

SEQ ID NO: 101147 - DNA, 20 bp, Artificial Sequence
  MKO10101147_B_Nelfe
  gRNA
agccatccagacgtccccag

SEQ ID NO: 101148 - DNA, 20 bp, Artificial Sequence
  MKO10101148_B_Nelfe
  gRNA
catcagcagacatgctcctc

SEQ ID NO: 101149 - DNA, 20 bp, Artificial Sequence
  MKO10101149_B_Nell1
  gRNA
tactccatgtcgactgcaat

SEQ ID NO: 101150 - DNA, 20 bp, Artificial Sequence
  MKO10101150_B_Nell1
  gRNA
gggcaacgtaatcaaaagca

SEQ ID NO: 101151 - DNA, 20 bp, Artificial Sequence
  MKO10101151_B_Nell1
  gRNA
cagccacctgagtgacgccc

SEQ ID NO: 101152 - DNA, 20 bp, Artificial Sequence
  MKO10101152_B_Nell2
  gRNA
ggataactcccgaatttaag

SEQ ID NO: 101153 - DNA, 20 bp, Artificial Sequence
  MKO10101153_B_Nell2
  gRNA
tttcaggatctatgaacgag

SEQ ID NO: 101154 - DNA, 20 bp, Artificial Sequence
  MKO10101154_B_Nell2
  gRNA
ggtgagtgccagagcggtag

SEQ ID NO: 101155 - DNA, 20 bp, Artificial Sequence
  MKO10101155_B_Nemf
  gRNA
agtaaacaacgtttatgatg

SEQ ID NO: 101156 - DNA, 20 bp, Artificial Sequence
  MKO10101156_B_Nemf
  gRNA
taatcattgagctctatgac

SEQ ID NO: 101157 - DNA, 20 bp, Artificial Sequence
  MKO10101157_B_Nemf
  gRNA
accttcatggcaaaactcga

SEQ ID NO: 101158 - DNA, 20 bp, Artificial Sequence
  MKO10101158_B_Nenf
  gRNA
agcccgaaggatcctcaacg

SEQ ID NO: 101159 - DNA, 20 bp, Artificial Sequence
  MKO10101159_B_Nenf
  gRNA
ggaggatcagcccatctact

SEQ ID NO: 101160 - DNA, 20 bp, Artificial Sequence
  MKO10101160_B_Nenf
  gRNA
gtggtgttcgatgtcacctc

SEQ ID NO: 101161 - DNA, 20 bp, Artificial Sequence
  MKO10101161_B_Neo1
  gRNA
ggttccaagattatccacag

SEQ ID NO: 101162 - DNA, 20 bp, Artificial Sequence
  MKO10101162_B_Neo1
  gRNA
cttgctagcaggaggttgct

SEQ ID NO: 101163 - DNA, 20 bp, Artificial Sequence
  MKO10101163_B_Neo1
  gRNA
tcctgaggaaattgtagact

SEQ ID NO: 101164 - DNA, 20 bp, Artificial Sequence
  MKO10101164_B_Nepn
  gRNA
cttgcagtctcctacgagcc

SEQ ID NO: 101165 - DNA, 20 bp, Artificial Sequence
  MKO10101165_B_Nepn
  gRNA
caatgttgtcagcttgttcg

SEQ ID NO: 101166 - DNA, 20 bp, Artificial Sequence
  MKO10101166_B_Nepn
  gRNA
tcaagcttctgtaacctcga

SEQ ID NO: 101167 - DNA, 20 bp, Artificial Sequence
  MKO10101167_B_Nes
  gRNA
caggcagcgctaacagtccc

SEQ ID NO: 101168 - DNA, 20 bp, Artificial Sequence
  MKO10101168_B_Nes
  gRNA
gagtcagatcgctcagatcc

SEQ ID NO: 101169 - DNA, 20 bp, Artificial Sequence
  MKO10101169_B_Nes
  gRNA
aactctcgcttgcagacacc

SEQ ID NO: 101170 - DNA, 20 bp, Artificial Sequence
  MKO10101170_B_Net1
  gRNA
caaagctgaccttcgtgcag

SEQ ID NO: 101171 - DNA, 20 bp, Artificial Sequence
  MKO10101171_B_Net1
  gRNA
tctagctcgggtcacatctt

SEQ ID NO: 101172 - DNA, 20 bp, Artificial Sequence
  MKO10101172_B_Net1
  gRNA
tggacctgctgaatgacttc

SEQ ID NO: 101173 - DNA, 20 bp, Artificial Sequence
  MKO10101173_B_Neto1
  gRNA
ttaatcatcctccattcttc

SEQ ID NO: 101174 - DNA, 20 bp, Artificial Sequence
  MKO10101174_B_Neto1
  gRNA
gagtgtgtctacatcataga

SEQ ID NO: 101175 - DNA, 20 bp, Artificial Sequence
  MKO10101175_B_Neto1
  gRNA
gcaatggtttcaaaactcca

SEQ ID NO: 101176 - DNA, 20 bp, Artificial Sequence
  MKO10101176_B_Neto2
  gRNA
gctgataacagtacttgtcg

SEQ ID NO: 101177 - DNA, 20 bp, Artificial Sequence
  MKO10101177_B_Neto2
  gRNA
cctccaaggtaagtaaagtc

SEQ ID NO: 101178 - DNA, 20 bp, Artificial Sequence
  MKO10101178_B_Neto2
  gRNA
atttgggttcgaaccagcaa

SEQ ID NO: 101179 - DNA, 20 bp, Artificial Sequence
  MKO10101179_B_Neu1
  gRNA
ataactaccattgccgctgc

SEQ ID NO: 101180 - DNA, 20 bp, Artificial Sequence
  MKO10101180_B_Neu1
  gRNA
acagccttcatcgtagacga

SEQ ID NO: 101181 - DNA, 20 bp, Artificial Sequence
  MKO10101181_B_Neu1
  gRNA
cctcctcatggcgatgaact

SEQ ID NO: 101182 - DNA, 20 bp, Artificial Sequence
  MKO10101182_B_Neu2
  gRNA
tgcgtgctcatccgtcttgc

SEQ ID NO: 101183 - DNA, 20 bp, Artificial Sequence
  MKO10101183_B_Neu2
  gRNA
ctgaacttaccggaaaacca

SEQ ID NO: 101184 - DNA, 20 bp, Artificial Sequence
  MKO10101184_B_Neu2
  gRNA
tgacagtccaaccttctcca

SEQ ID NO: 101185 - DNA, 20 bp, Artificial Sequence
  MKO10101185_B_Neu3
  gRNA
gcggacctcagtcagagatg

SEQ ID NO: 101186 - DNA, 20 bp, Artificial Sequence
  MKO10101186_B_Neu3
  gRNA
gcccacggttcaagatccac

SEQ ID NO: 101187 - DNA, 20 bp, Artificial Sequence
  MKO10101187_B_Neu3
  gRNA
acctaggcatctactacaac

SEQ ID NO: 101188 - DNA, 20 bp, Artificial Sequence
  MKO10101188_B_Neu4
  gRNA
gcgtgcccctccgtagcacc

SEQ ID NO: 101189 - DNA, 20 bp, Artificial Sequence
  MKO10101189_B_Neu4
  gRNA
tccaccctcaatcgagcctc

SEQ ID NO: 101190 - DNA, 20 bp, Artificial Sequence
  MKO10101190_B_Neu4
  gRNA
cttgccagtggcgatttgca

SEQ ID NO: 101191 - DNA, 20 bp, Artificial Sequence
  MKO10101191_B_Neurl1a
  gRNA
tggacgtctacggcctcacg

SEQ ID NO: 101192 - DNA, 20 bp, Artificial Sequence
  MKO10101192_B_Neurl1a
  gRNA
gcagctggacaccccgcgtg

SEQ ID NO: 101193 - DNA, 20 bp, Artificial Sequence
  MKO10101193_B_Neurl1a
  gRNA
agccccccacctgacagcgt

SEQ ID NO: 101194 - DNA, 20 bp, Artificial Sequence
  MKO10101194_B_Neurl1b
  gRNA
cagctcgttgttgtcgaagt

SEQ ID NO: 101195 - DNA, 20 bp, Artificial Sequence
  MKO10101195_B_Neurl1b
  gRNA
ttctccgcacccgagccgac

SEQ ID NO: 101196 - DNA, 20 bp, Artificial Sequence
  MKO10101196_B_Neurl1b
  gRNA
cacagtgtgcttcgacagcg

SEQ ID NO: 101197 - DNA, 20 bp, Artificial Sequence
  MKO10101197_B_Neurl2
  gRNA
gatgtgctccacctgcccaa

SEQ ID NO: 101198 - DNA, 20 bp, Artificial Sequence
  MKO10101198_B_Neurl2
  gRNA
ttccaccaagagcgtgcgtc

SEQ ID NO: 101199 - DNA, 20 bp, Artificial Sequence
  MKO10101199_B_Neurl2
  gRNA
cgcgtggagagtttcgccca

SEQ ID NO: 101200 - DNA, 20 bp, Artificial Sequence
  MKO10101200_B_Neurl3
  gRNA
tccagagggcttcgttcgtg

SEQ ID NO: 101201 - DNA, 20 bp, Artificial Sequence
  MKO10101201_B_Neurl3
  gRNA
aggctcaccactacgaatcc

SEQ ID NO: 101202 - DNA, 20 bp, Artificial Sequence
  MKO10101202_B_Neurl3
  gRNA
tagatcccaaagccaacgcc

SEQ ID NO: 101203 - DNA, 20 bp, Artificial Sequence
  MKO10101203_B_Neurl4
  gRNA
aacagccttgattcgcataa

SEQ ID NO: 101204 - DNA, 20 bp, Artificial Sequence
  MKO10101204_B_Neurl4
  gRNA
tgctacagactttgccagta

SEQ ID NO: 101205 - DNA, 20 bp, Artificial Sequence
  MKO10101205_B_Neurl4
  gRNA
gtctccggccgtgcctgcgc

SEQ ID NO: 101206 - DNA, 20 bp, Artificial Sequence
  MKO10101206_B_Neurod1
  gRNA
tgaaggccaacgcccgcgag

SEQ ID NO: 101207 - DNA, 20 bp, Artificial Sequence
  MKO10101207_B_Neurod1
  gRNA
tgactcgctcatgatgcgaa

SEQ ID NO: 101208 - DNA, 20 bp, Artificial Sequence
  MKO10101208_B_Neurod1
  gRNA
gcactaccctgcagcgacgc

SEQ ID NO: 101209 - DNA, 20 bp, Artificial Sequence
  MKO10101209_B_Neurod2
  gRNA
gacggcgccggccgctttca

SEQ ID NO: 101210 - DNA, 20 bp, Artificial Sequence
  MKO10101210_B_Neurod2
  gRNA
ggagcgctccagacgcgcct

SEQ ID NO: 101211 - DNA, 20 bp, Artificial Sequence
  MKO10101211_B_Neurod2
  gRNA
acggcgacgacgacgagccg

SEQ ID NO: 101212 - DNA, 20 bp, Artificial Sequence
  MKO10101212_B_Neurod4
  gRNA
ctgcagtacccccccttatg

SEQ ID NO: 101213 - DNA, 20 bp, Artificial Sequence
  MKO10101213_B_Neurod4
  gRNA
tctacaggaacatcatagcg

SEQ ID NO: 101214 - DNA, 20 bp, Artificial Sequence
  MKO10101214_B_Neurod4
  gRNA
aggggagccgtcttgcttta

SEQ ID NO: 101215 - DNA, 20 bp, Artificial Sequence
  MKO10101215_B_Neurod6
  gRNA
aaagaccaccaaactacgac

SEQ ID NO: 101216 - DNA, 20 bp, Artificial Sequence
  MKO10101216_B_Neurod6
  gRNA
gaccctttccagtcgtagtt

SEQ ID NO: 101217 - DNA, 20 bp, Artificial Sequence
  MKO10101217_B_Neurod6
  gRNA
gcacggcctcaatgatgctc

SEQ ID NO: 101218 - DNA, 20 bp, Artificial Sequence
  MKO10101218_B_Neurog1
  gRNA
gcggttgcgctcgcgatcgt

SEQ ID NO: 101219 - DNA, 20 bp, Artificial Sequence
  MKO10101219_B_Neurog1
  gRNA
tgacgcgacgactcctccgc

SEQ ID NO: 101220 - DNA, 20 bp, Artificial Sequence
  MKO10101220_B_Neurog1
  gRNA
cttggtgtcgtcggggaacg

SEQ ID NO: 101221 - DNA, 20 bp, Artificial Sequence
  MKO10101221_B_Neurog2
  gRNA
ccagtagtccacgtctgacc

SEQ ID NO: 101222 - DNA, 20 bp, Artificial Sequence
  MKO10101222_B_Neurog2
  gRNA
ctgcaccgtctccgccgtct

SEQ ID NO: 101223 - DNA, 20 bp, Artificial Sequence
  MKO10101223_B_Neurog2
  gRNA
gcacaacctaaacgccgcgc

SEQ ID NO: 101224 - DNA, 20 bp, Artificial Sequence
  MKO10101224_B_Neurog3
  gRNA
gcgattgcgctcccgatcat

SEQ ID NO: 101225 - DNA, 20 bp, Artificial Sequence
  MKO10101225_B_Neurog3
  gRNA
gactcagacgctgcgcatag

SEQ ID NO: 101226 - DNA, 20 bp, Artificial Sequence
  MKO10101226_B_Neurog3
  gRNA
gatagagccccagtccccgt

SEQ ID NO: 101227 - DNA, 20 bp, Artificial Sequence
  MKO10101227_B_Nexn
  gRNA
gtgtgtttagggacagttaa

SEQ ID NO: 101228 - DNA, 20 bp, Artificial Sequence
  MKO10101228_B_Nexn
  gRNA
gattgaggacataaacaata

SEQ ID NO: 101229 - DNA, 20 bp, Artificial Sequence
  MKO10101229_B_Nexn
  gRNA
aggctctcacctgttagctt

SEQ ID NO: 101230 - DNA, 20 bp, Artificial Sequence
  MKO10101230_B_Nf1
  gRNA
gaccagagaaaacttgtatt

SEQ ID NO: 101231 - DNA, 20 bp, Artificial Sequence
  MKO10101231_B_Nf1
  gRNA
tctctctcagttgatcatat

SEQ ID NO: 101232 - DNA, 20 bp, Artificial Sequence
  MKO10101232_B_Nf1
  gRNA
attgttacagtatatcaatg

SEQ ID NO: 101233 - DNA, 20 bp, Artificial Sequence
  MKO10101233_B_Nf2
  gRNA
cactggggcttcgggaaacc

SEQ ID NO: 101234 - DNA, 20 bp, Artificial Sequence
  MKO10101234_B_Nf2
  gRNA
tggactgcagtatacaatca

SEQ ID NO: 101235 - DNA, 20 bp, Artificial Sequence
  MKO10101235_B_Nf2
  gRNA
gttggatcatgatgtttcga

SEQ ID NO: 101236 - DNA, 20 bp, Artificial Sequence
  MKO10101236_B_Nfam1
  gRNA
cacactgctaagacttgttc

SEQ ID NO: 101237 - DNA, 20 bp, Artificial Sequence
  MKO10101237_B_Nfam1
  gRNA
taccagcctgatgagcgtcc

SEQ ID NO: 101238 - DNA, 20 bp, Artificial Sequence
  MKO10101238_B_Nfam1
  gRNA
gagtttaaccatgcaatccc

SEQ ID NO: 101239 - DNA, 20 bp, Artificial Sequence
  MKO10101239_B_Nfasc
  gRNA
tagcaaccgcatccgcctgc

SEQ ID NO: 101240 - DNA, 20 bp, Artificial Sequence
  MKO10101240_B_Nfasc
  gRNA
aggggccatcgagattccga

SEQ ID NO: 101241 - DNA, 20 bp, Artificial Sequence
  MKO10101241_B_Nfasc
  gRNA
tatctcgagggtccacgatg

SEQ ID NO: 101242 - DNA, 20 bp, Artificial Sequence
  MKO10101242_B_Nfat5
  gRNA
caatctcgtcgtttgacccc

SEQ ID NO: 101243 - DNA, 20 bp, Artificial Sequence
  MKO10101243_B_Nfat5
  gRNA
ctgaaacccaacaccgagcc

SEQ ID NO: 101244 - DNA, 20 bp, Artificial Sequence
  MKO10101244_B_Nfat5
  gRNA
acagtatccggttaaaagtg

SEQ ID NO: 101245 - DNA, 20 bp, Artificial Sequence
  MKO10101245_B_Nfatc1
  gRNA
cgcgtatgggtaggagtagt

SEQ ID NO: 101246 - DNA, 20 bp, Artificial Sequence
  MKO10101246_B_Nfatc1
  gRNA
agacagtcttccccgtgatc

SEQ ID NO: 101247 - DNA, 20 bp, Artificial Sequence
  MKO10101247_B_Nfatc1
  gRNA
atgaacagctgtagcgtgag

SEQ ID NO: 101248 - DNA, 20 bp, Artificial Sequence
  MKO10101248_B_Nfatc2ip
  gRNA
ttcaagagggatgaattatc

SEQ ID NO: 101249 - DNA, 20 bp, Artificial Sequence
  MKO10101249_B_Nfatc2ip
  gRNA
ttaccatcttcaggctctga

SEQ ID NO: 101250 - DNA, 20 bp, Artificial Sequence
  MKO10101250_B_Nfatc2ip
  gRNA
gaggatgatgccctgccttc

SEQ ID NO: 101251 - DNA, 20 bp, Artificial Sequence
  MKO10101251_B_Nfatc2
  gRNA
ttggagagtggccactcgag

SEQ ID NO: 101252 - DNA, 20 bp, Artificial Sequence
  MKO10101252_B_Nfatc2
  gRNA
tacgatcttctcatagctcg

SEQ ID NO: 101253 - DNA, 20 bp, Artificial Sequence
  MKO10101253_B_Nfatc2
  gRNA
gcagctcgatgtcagcgttt

SEQ ID NO: 101254 - DNA, 20 bp, Artificial Sequence
  MKO10101254_B_Nfatc3
  gRNA
taccaactcaccgaaatata

SEQ ID NO: 101255 - DNA, 20 bp, Artificial Sequence
  MKO10101255_B_Nfatc3
  gRNA
ggttacttacagcactcaac

SEQ ID NO: 101256 - DNA, 20 bp, Artificial Sequence
  MKO10101256_B_Nfatc3
  gRNA
ggggcagtgaaagcctctac

SEQ ID NO: 101257 - DNA, 20 bp, Artificial Sequence
  MKO10101257_B_Nfatc4
  gRNA
catgggggccgcaagctgcg

SEQ ID NO: 101258 - DNA, 20 bp, Artificial Sequence
  MKO10101258_B_Nfatc4
  gRNA
ccaccatcttgccagtaatc

SEQ ID NO: 101259 - DNA, 20 bp, Artificial Sequence
  MKO10101259_B_Nfatc4
  gRNA
ggaaaaggagccccccccgc

SEQ ID NO: 101260 - DNA, 20 bp, Artificial Sequence
  MKO10101260_B_Nfe2l1
  gRNA
tgaccagcaggctcggcgac

SEQ ID NO: 101261 - DNA, 20 bp, Artificial Sequence
  MKO10101261_B_Nfe2l1
  gRNA
gcaagatctcatgtccatca

SEQ ID NO: 101262 - DNA, 20 bp, Artificial Sequence
  MKO10101262_B_Nfe2l1
  gRNA
tcctacctgcatttccatga

SEQ ID NO: 101263 - DNA, 20 bp, Artificial Sequence
  MKO10101263_B_Nfe2l2
  gRNA
agaattcctcccaattcagc

SEQ ID NO: 101264 - DNA, 20 bp, Artificial Sequence
  MKO10101264_B_Nfe2l2
  gRNA
tgaagactgaactttcagcg

SEQ ID NO: 101265 - DNA, 20 bp, Artificial Sequence
  MKO10101265_B_Nfe2l2
  gRNA
ctgcctccagagagctattg

SEQ ID NO: 101266 - DNA, 20 bp, Artificial Sequence
  MKO10101266_B_Nfe2l3
  gRNA
ttcctcttcgcctgatatca

SEQ ID NO: 101267 - DNA, 20 bp, Artificial Sequence
  MKO10101267_B_Nfe2l3
  gRNA
atcgcgacagcagagtaaga

SEQ ID NO: 101268 - DNA, 20 bp, Artificial Sequence
  MKO10101268_B_Nfe2l3
  gRNA
gcttacctcgttcctagcct

SEQ ID NO: 101269 - DNA, 20 bp, Artificial Sequence
  MKO10101269_B_Nfe2
  gRNA
actcacctgcagctcagtaa

SEQ ID NO: 101270 - DNA, 20 bp, Artificial Sequence
  MKO10101270_B_Nfe2
  gRNA
ccttgttcttgccccgtcga

SEQ ID NO: 101271 - DNA, 20 bp, Artificial Sequence
  MKO10101271_B_Nfe2
  gRNA
gtacgcggacatgtacccag

SEQ ID NO: 101272 - DNA, 20 bp, Artificial Sequence
  MKO10101272_B_Nfia
  gRNA
gccaagtgaagctgacatta

SEQ ID NO: 101273 - DNA, 20 bp, Artificial Sequence
  MKO10101273_B_Nfia
  gRNA
ctgatgtgacaaagctgtcc

SEQ ID NO: 101274 - DNA, 20 bp, Artificial Sequence
  MKO10101274_B_Nfia
  gRNA
ttctccgctctgtctcaccc

SEQ ID NO: 101275 - DNA, 20 bp, Artificial Sequence
  MKO10101275_B_Nfib
  gRNA
atatttacctggaggattct

SEQ ID NO: 101276 - DNA, 20 bp, Artificial Sequence
  MKO10101276_B_Nfib
  gRNA
ctctgatacattgaagactc

SEQ ID NO: 101277 - DNA, 20 bp, Artificial Sequence
  MKO10101277_B_Nfib
  gRNA
ttctcccatctgtctcactc

SEQ ID NO: 101278 - DNA, 20 bp, Artificial Sequence
  MKO10101278_B_Nfic
  gRNA
gacactcactccgagacact

SEQ ID NO: 101279 - DNA, 20 bp, Artificial Sequence
  MKO10101279_B_Nfic
  gRNA
ctccccgctctgcctgaccc

SEQ ID NO: 101280 - DNA, 20 bp, Artificial Sequence
  MKO10101280_B_Nfic
  gRNA
cgtacctgggtcaggcagag

SEQ ID NO: 101281 - DNA, 20 bp, Artificial Sequence
  MKO10101281_B_Nfil3
  gRNA
catagccacacaaccgatct

SEQ ID NO: 101282 - DNA, 20 bp, Artificial Sequence
  MKO10101282_B_Nfil3
  gRNA
ggaggaatgggccatacccg

SEQ ID NO: 101283 - DNA, 20 bp, Artificial Sequence
  MKO10101283_B_Nfil3
  gRNA
acacatcggagagcgagctc

SEQ ID NO: 101284 - DNA, 20 bp, Artificial Sequence
  MKO10101284_B_Nfix
  gRNA
tcgccccagtgctcgaaccc

SEQ ID NO: 101285 - DNA, 20 bp, Artificial Sequence
  MKO10101285_B_Nfix
  gRNA
tgatgtccgcatctccttgc

SEQ ID NO: 101286 - DNA, 20 bp, Artificial Sequence
  MKO10101286_B_Nfix
  gRNA
gctttgtgacgtctggggtc

SEQ ID NO: 101287 - DNA, 20 bp, Artificial Sequence
  MKO10101287_B_Nfkb1
  gRNA
aactgaacgataacctttgc

SEQ ID NO: 101288 - DNA, 20 bp, Artificial Sequence
  MKO10101288_B_Nfkb1
  gRNA
aatattagagcaaccaaaac

SEQ ID NO: 101289 - DNA, 20 bp, Artificial Sequence
  MKO10101289_B_Nfkb1
  gRNA
ccagaaataccactgtcaac

SEQ ID NO: 101290 - DNA, 20 bp, Artificial Sequence
  MKO10101290_B_Nfkb2
  gRNA
tccagctgatggcccctatc

SEQ ID NO: 101291 - DNA, 20 bp, Artificial Sequence
  MKO10101291_B_Nfkb2
  gRNA
ctgttccacaatcaccagat

SEQ ID NO: 101292 - DNA, 20 bp, Artificial Sequence
  MKO10101292_B_Nfkb2
  gRNA
tggatccttaggctccacga

SEQ ID NO: 101293 - DNA, 20 bp, Artificial Sequence
  MKO10101293_B_Nfkbia
  gRNA
ggcagacctaccattgtagt

SEQ ID NO: 101294 - DNA, 20 bp, Artificial Sequence
  MKO10101294_B_Nfkbia
  gRNA
actccccctaccagcttacc

SEQ ID NO: 101295 - DNA, 20 bp, Artificial Sequence
  MKO10101295_B_Nfkbia
  gRNA
ggtagccgtggatagaggct

SEQ ID NO: 101296 - DNA, 20 bp, Artificial Sequence
  MKO10101296_B_Nfkbib
  gRNA
gaccccaccgcccgcatgta

SEQ ID NO: 101297 - DNA, 20 bp, Artificial Sequence
  MKO10101297_B_Nfkbib
  gRNA
aggccaagtgcaatgccgtg

SEQ ID NO: 101298 - DNA, 20 bp, Artificial Sequence
  MKO10101298_B_Nfkbib
  gRNA
agtgtcttaccggtttattg

SEQ ID NO: 101299 - DNA, 20 bp, Artificial Sequence
  MKO10101299_B_Nfkbid
  gRNA
ccctggtggtcagtggcgtt

SEQ ID NO: 101300 - DNA, 20 bp, Artificial Sequence
  MKO10101300_B_Nfkbid
  gRNA
tccaggaccctacctgtgac

SEQ ID NO: 101301 - DNA, 20 bp, Artificial Sequence
  MKO10101301_B_Nfkbid
  gRNA
gttcacgaatatccagctgt

SEQ ID NO: 101302 - DNA, 20 bp, Artificial Sequence
  MKO10101302_B_Nfkbie
  gRNA
gtagatgcccgcatgcttaa

SEQ ID NO: 101303 - DNA, 20 bp, Artificial Sequence
  MKO10101303_B_Nfkbie
  gRNA
agtgattcacgaagccccgt

SEQ ID NO: 101304 - DNA, 20 bp, Artificial Sequence
  MKO10101304_B_Nfkbie
  gRNA
cttcgtgaatcactgccagg

SEQ ID NO: 101305 - DNA, 20 bp, Artificial Sequence
  MKO10101305_B_Nfkbil1
  gRNA
tccgaagccagattgagacc

SEQ ID NO: 101306 - DNA, 20 bp, Artificial Sequence
  MKO10101306_B_Nfkbil1
  gRNA
ggcgctttggcgatgtgccc

SEQ ID NO: 101307 - DNA, 20 bp, Artificial Sequence
  MKO10101307_B_Nfkbil1
  gRNA
ctgccgccattcccgctcct

SEQ ID NO: 101308 - DNA, 20 bp, Artificial Sequence
  MKO10101308_B_Nfkbiz
  gRNA
cttcacgcgaacaccttgaa

SEQ ID NO: 101309 - DNA, 20 bp, Artificial Sequence
  MKO10101309_B_Nfkbiz
  gRNA
agccccacatgggggttggc

SEQ ID NO: 101310 - DNA, 20 bp, Artificial Sequence
  MKO10101310_B_Nfkbiz
  gRNA
agagctggcctcttgcaaac

SEQ ID NO: 101311 - DNA, 20 bp, Artificial Sequence
  MKO10101311_B_Nfrkb
  gRNA
agcacgttctcctagtcctg

SEQ ID NO: 101312 - DNA, 20 bp, Artificial Sequence
  MKO10101312_B_Nfrkb
  gRNA
tgtgcagcgggtttccgaag

SEQ ID NO: 101313 - DNA, 20 bp, Artificial Sequence
  MKO10101313_B_Nfrkb
  gRNA
atcgcccagaagctcttccg

SEQ ID NO: 101314 - DNA, 20 bp, Artificial Sequence
  MKO10101314_B_Nfs1
  gRNA
gtccaacaacatagcaatta

SEQ ID NO: 101315 - DNA, 20 bp, Artificial Sequence
  MKO10101315_B_Nfs1
  gRNA
atgatcccgctcttctgcac

SEQ ID NO: 101316 - DNA, 20 bp, Artificial Sequence
  MKO10101316_B_Nfs1
  gRNA
tttccttgacctgtagaacc

SEQ ID NO: 101317 - DNA, 20 bp, Artificial Sequence
  MKO10101317_B_Nfu1
  gRNA
acagcgctacctgcttctcc

SEQ ID NO: 101318 - DNA, 20 bp, Artificial Sequence
  MKO10101318_B_Nfu1
  gRNA
agaaacagtacctggccaga

SEQ ID NO: 101319 - DNA, 20 bp, Artificial Sequence
  MKO10101319_B_Nfu1
  gRNA
agacatttatgccacaatta

SEQ ID NO: 101320 - DNA, 20 bp, Artificial Sequence
  MKO10101320_B_Nfx1
  gRNA
ctcctgtagaaaacctgtag

SEQ ID NO: 101321 - DNA, 20 bp, Artificial Sequence
  MKO10101321_B_Nfx1
  gRNA
caaacctcaccacaactatg

SEQ ID NO: 101322 - DNA, 20 bp, Artificial Sequence
  MKO10101322_B_Nfx1
  gRNA
gcagaaacattctgacaagc

SEQ ID NO: 101323 - DNA, 20 bp, Artificial Sequence
  MKO10101323_B_Nfxl1
  gRNA
acaacatacactactcacac

SEQ ID NO: 101324 - DNA, 20 bp, Artificial Sequence
  MKO10101324_B_Nfxl1
  gRNA
atatgccctgtattcagaag

SEQ ID NO: 101325 - DNA, 20 bp, Artificial Sequence
  MKO10101325_B_Nfxl1
  gRNA
gtgctcctccaacagctttc

SEQ ID NO: 101326 - DNA, 20 bp, Artificial Sequence
  MKO10101326_B_Nfya
  gRNA
attgtgccatctgcattaac

SEQ ID NO: 101327 - DNA, 20 bp, Artificial Sequence
  MKO10101327_B_Nfya
  gRNA
cagatacagttggtgcctcc

SEQ ID NO: 101328 - DNA, 20 bp, Artificial Sequence
  MKO10101328_B_Nfya
  gRNA
taccaaccagttaatgcaga

SEQ ID NO: 101329 - DNA, 20 bp, Artificial Sequence
  MKO10101329_B_Nfyb
  gRNA
ggagcagtctccgccacaga

SEQ ID NO: 101330 - DNA, 20 bp, Artificial Sequence
  MKO10101330_B_Nfyb
  gRNA
aagcgaagagctcacggaag

SEQ ID NO: 101331 - DNA, 20 bp, Artificial Sequence
  MKO10101331_B_Nfyb
  gRNA
tggccttaccatcatggggc

SEQ ID NO: 101332 - DNA, 20 bp, Artificial Sequence
  MKO10101332_B_Nfyc
  gRNA
atcttcttaatacgagccag

SEQ ID NO: 101333 - DNA, 20 bp, Artificial Sequence
  MKO10101333_B_Nfyc
  gRNA
gctccgcaggagtcacagac

SEQ ID NO: 101334 - DNA, 20 bp, Artificial Sequence
  MKO10101334_B_Nfyc
  gRNA
acgccagtctgtgactcctg

SEQ ID NO: 101335 - DNA, 20 bp, Artificial Sequence
  MKO10101335_B_Ngb
  gRNA
atggcactgtcctgttcgcc

SEQ ID NO: 101336 - DNA, 20 bp, Artificial Sequence
  MKO10101336_B_Ngb
  gRNA
agaactggcggccattgtac

SEQ ID NO: 101337 - DNA, 20 bp, Artificial Sequence
  MKO10101337_B_Ngb
  gRNA
ggtactcctccaatgaagac

SEQ ID NO: 101338 - DNA, 20 bp, Artificial Sequence
  MKO10101338_B_Ngdn
  gRNA
gagccacctcatcctggaca

SEQ ID NO: 101339 - DNA, 20 bp, Artificial Sequence
  MKO10101339_B_Ngdn
  gRNA
gaagtatcaaattgacaaac

SEQ ID NO: 101340 - DNA, 20 bp, Artificial Sequence
  MKO10101340_B_Ngdn
  gRNA
acatactcacctgctcctgg

SEQ ID NO: 101341 - DNA, 20 bp, Artificial Sequence
  MKO10101341_B_Ngef
  gRNA
ccatgaagtgcgacaccagc

SEQ ID NO: 101342 - DNA, 20 bp, Artificial Sequence
  MKO10101342_B_Ngef
  gRNA
tgtccagcacgccactgctc

SEQ ID NO: 101343 - DNA, 20 bp, Artificial Sequence
  MKO10101343_B_Ngef
  gRNA
acccacctatttgttcaatg

SEQ ID NO: 101344 - DNA, 20 bp, Artificial Sequence
  MKO10101344_B_Ngfrap1
  gRNA
ggttagacagctcccccata

SEQ ID NO: 101345 - DNA, 20 bp, Artificial Sequence
  MKO10101345_B_Ngfrap1
  gRNA
aaattgtctacgcatcctta

SEQ ID NO: 101346 - DNA, 20 bp, Artificial Sequence
  MKO10101346_B_Ngfrap1
  gRNA
atgaccgaagtcaaggcata

SEQ ID NO: 101347 - DNA, 20 bp, Artificial Sequence
  MKO10101347_B_Ngfr
  gRNA
ggggtgtctggttcaccggc

SEQ ID NO: 101348 - DNA, 20 bp, Artificial Sequence
  MKO10101348_B_Ngfr
  gRNA
catcacagtggtcaccgtat

SEQ ID NO: 101349 - DNA, 20 bp, Artificial Sequence
  MKO10101349_B_Ngfr
  gRNA
gcgtagaccttgtgatccat

SEQ ID NO: 101350 - DNA, 20 bp, Artificial Sequence
  MKO10101350_B_Ngf
  gRNA
tttattgggcccagacactg

SEQ ID NO: 101351 - DNA, 20 bp, Artificial Sequence
  MKO10101351_B_Ngf
  gRNA
tgcctcaagccagtgaaatt

SEQ ID NO: 101352 - DNA, 20 bp, Artificial Sequence
  MKO10101352_B_Ngf
  gRNA
agcctaatttcactggcttg

SEQ ID NO: 101353 - DNA, 20 bp, Artificial Sequence
  MKO10101353_B_Ngly1
  gRNA
ttctactggagctcctacac

SEQ ID NO: 101354 - DNA, 20 bp, Artificial Sequence
  MKO10101354_B_Ngly1
  gRNA
aaatacagatccatccgtat

SEQ ID NO: 101355 - DNA, 20 bp, Artificial Sequence
  MKO10101355_B_Ngly1
  gRNA
tacaagtcaatgctttctcc

SEQ ID NO: 101356 - DNA, 20 bp, Artificial Sequence
  MKO10101356_B_Ngp
  gRNA
gttgccgatgatatcatact

SEQ ID NO: 101357 - DNA, 20 bp, Artificial Sequence
  MKO10101357_B_Ngp
  gRNA
gcctaaagactgcgacttcc

SEQ ID NO: 101358 - DNA, 20 bp, Artificial Sequence
  MKO10101358_B_Ngp
  gRNA
gtcttgcttatcattaaaac

SEQ ID NO: 101359 - DNA, 20 bp, Artificial Sequence
  MKO10101359_B_Ngrn
  gRNA
cgcacctctctcgctcgctg

SEQ ID NO: 101360 - DNA, 20 bp, Artificial Sequence
  MKO10101360_B_Ngrn
  gRNA
tcagcactgatgttatccga

SEQ ID NO: 101361 - DNA, 20 bp, Artificial Sequence
  MKO10101361_B_Ngrn
  gRNA
caccacccagaacactgacg

SEQ ID NO: 101362 - DNA, 20 bp, Artificial Sequence
  MKO10101362_B_Nhej1
  gRNA
tcaccaacagcacacgcctc

SEQ ID NO: 101363 - DNA, 20 bp, Artificial Sequence
  MKO10101363_B_Nhej1
  gRNA
ctcaccacaggctcatattc

SEQ ID NO: 101364 - DNA, 20 bp, Artificial Sequence
  MKO10101364_B_Nhej1
  gRNA
gagtctgcagagtctgtatg

SEQ ID NO: 101365 - DNA, 20 bp, Artificial Sequence
  MKO10101365_B_Nhlh1
  gRNA
gagtcgggctttagcgactg

SEQ ID NO: 101366 - DNA, 20 bp, Artificial Sequence
  MKO10101366_B_Nhlh1
  gRNA
ggaccgggccccgatggtgc

SEQ ID NO: 101367 - DNA, 20 bp, Artificial Sequence
  MKO10101367_B_Nhlh1
  gRNA
acagtcgctaaagcccgact

SEQ ID NO: 101368 - DNA, 20 bp, Artificial Sequence
  MKO10101368_B_Nhlh2
  gRNA
cgccacggccaagtaccgat

SEQ ID NO: 101369 - DNA, 20 bp, Artificial Sequence
  MKO10101369_B_Nhlh2
  gRNA
cgtgtcggacctagagccag

SEQ ID NO: 101370 - DNA, 20 bp, Artificial Sequence
  MKO10101370_B_Nhlh2
  gRNA
acttggccgtggcgcgccgg

SEQ ID NO: 101371 - DNA, 20 bp, Artificial Sequence
  MKO10101371_B_Nhlrc1
  gRNA
tagggtcccccacccgccga

SEQ ID NO: 101372 - DNA, 20 bp, Artificial Sequence
  MKO10101372_B_Nhlrc1
  gRNA
ttggtgacggcgacatccag

SEQ ID NO: 101373 - DNA, 20 bp, Artificial Sequence
  MKO10101373_B_Nhlrc1
  gRNA
gagaggccgtgagtgattat

SEQ ID NO: 101374 - DNA, 20 bp, Artificial Sequence
  MKO10101374_B_Nhlrc2
  gRNA
gcatctgcatcgttaaccac

SEQ ID NO: 101375 - DNA, 20 bp, Artificial Sequence
  MKO10101375_B_Nhlrc2
  gRNA
gacgttgcgcttgggacctc

SEQ ID NO: 101376 - DNA, 20 bp, Artificial Sequence
  MKO10101376_B_Nhlrc2
  gRNA
tctgctatagctacaccctg

SEQ ID NO: 101377 - DNA, 20 bp, Artificial Sequence
  MKO10101377_B_Nhlrc3
  gRNA
atggctatttcctacgagcc

SEQ ID NO: 101378 - DNA, 20 bp, Artificial Sequence
  MKO10101378_B_Nhlrc3
  gRNA
gcgtcaagtgtaacgctgtg

SEQ ID NO: 101379 - DNA, 20 bp, Artificial Sequence
  MKO10101379_B_Nhlrc3
  gRNA
tttgggttggcccaagaatt

SEQ ID NO: 101380 - DNA, 20 bp, Artificial Sequence
  MKO10101380_B_Nhlrc4
  gRNA
ggccaaagttatgcccagtc

SEQ ID NO: 101381 - DNA, 20 bp, Artificial Sequence
  MKO10101381_B_Nhlrc4
  gRNA
ctggagggcccttgttgggt

SEQ ID NO: 101382 - DNA, 20 bp, Artificial Sequence
  MKO10101382_B_Nhlrc4
  gRNA
ctgcatctgccaccactagt

SEQ ID NO: 101383 - DNA, 20 bp, Artificial Sequence
  MKO10101383_B_Nhp2l1
  gRNA
cctttcaatagactgctgaa

SEQ ID NO: 101384 - DNA, 20 bp, Artificial Sequence
  MKO10101384_B_Nhp2l1
  gRNA
ccacctcaccaagaagctgc

SEQ ID NO: 101385 - DNA, 20 bp, Artificial Sequence
  MKO10101385_B_Nhp2l1
  gRNA
ccagcagcttcttggtgagg

SEQ ID NO: 101386 - DNA, 20 bp, Artificial Sequence
  MKO10101386_B_Nhp2
  gRNA
gcgcttctcaccgtcttaga

SEQ ID NO: 101387 - DNA, 20 bp, Artificial Sequence
  MKO10101387_B_Nhp2
  gRNA
gacctacgacaagtgcctgg

SEQ ID NO: 101388 - DNA, 20 bp, Artificial Sequence
  MKO10101388_B_Nhp2
  gRNA
gaagccccatgaagaatatc

SEQ ID NO: 101389 - DNA, 20 bp, Artificial Sequence
  MKO10101389_B_Nhsl1
  gRNA
tcgatggactgtccactaca

SEQ ID NO: 101390 - DNA, 20 bp, Artificial Sequence
  MKO10101390_B_Nhsl1
  gRNA
tcgactctcctcgtccaagt

SEQ ID NO: 101391 - DNA, 20 bp, Artificial Sequence
  MKO10101391_B_Nhsl1
  gRNA
ccagacggtccaggctgacg

SEQ ID NO: 101392 - DNA, 20 bp, Artificial Sequence
  MKO10101392_B_Nhsl2
  gRNA
gtattcggaggccagacttc

SEQ ID NO: 101393 - DNA, 20 bp, Artificial Sequence
  MKO10101393_B_Nhsl2
  gRNA
cttgtgccaatcaacatctc

SEQ ID NO: 101394 - DNA, 20 bp, Artificial Sequence
  MKO10101394_B_Nhsl2
  gRNA
cagtacaaactccagacgct

SEQ ID NO: 101395 - DNA, 20 bp, Artificial Sequence
  MKO10101395_B_Nhs
  gRNA
tttgctctctgcgatcactc

SEQ ID NO: 101396 - DNA, 20 bp, Artificial Sequence
  MKO10101396_B_Nhs
  gRNA
aacgataccggtgacattga

SEQ ID NO: 101397 - DNA, 20 bp, Artificial Sequence
  MKO10101397_B_Nhs
  gRNA
ccacaatgttccctctacac

SEQ ID NO: 101398 - DNA, 20 bp, Artificial Sequence
  MKO10101398_B_Niacr1
  gRNA
catagtaacttaacgagatg

SEQ ID NO: 101399 - DNA, 20 bp, Artificial Sequence
  MKO10101399_B_Niacr1
  gRNA
gatggaccacccggaagtag

SEQ ID NO: 101400 - DNA, 20 bp, Artificial Sequence
  MKO10101400_B_Niacr1
  gRNA
gggtcagccattagcgcccc

SEQ ID NO: 101401 - DNA, 20 bp, Artificial Sequence
  MKO10101401_B_Nicn1
  gRNA
tggagctttgttgacgaaca

SEQ ID NO: 101402 - DNA, 20 bp, Artificial Sequence
  MKO10101402_B_Nicn1
  gRNA
ggaactgcagatctaccaac

SEQ ID NO: 101403 - DNA, 20 bp, Artificial Sequence
  MKO10101403_B_Nicn1
  gRNA
tgtatcactgttcaagcacc

SEQ ID NO: 101404 - DNA, 20 bp, Artificial Sequence
  MKO10101404_B_Nid1
  gRNA
gcctctaggagcagcaacgc

SEQ ID NO: 101405 - DNA, 20 bp, Artificial Sequence
  MKO10101405_B_Nid1
  gRNA
aggtgtgtggccaactacac

SEQ ID NO: 101406 - DNA, 20 bp, Artificial Sequence
  MKO10101406_B_Nid1
  gRNA
gagtgcagagactatgctac

SEQ ID NO: 101407 - DNA, 20 bp, Artificial Sequence
  MKO10101407_B_Nid2
  gRNA
cccgcgactgacctcctcgt

SEQ ID NO: 101408 - DNA, 20 bp, Artificial Sequence
  MKO10101408_B_Nid2
  gRNA
ggcggaacgtgaccagactc

SEQ ID NO: 101409 - DNA, 20 bp, Artificial Sequence
  MKO10101409_B_Nid2
  gRNA
tcttcagtcttcacgtataa

SEQ ID NO: 101410 - DNA, 20 bp, Artificial Sequence
  MKO10101410_B_Nif3l1
  gRNA
ggttcacactgaattctagt

SEQ ID NO: 101411 - DNA, 20 bp, Artificial Sequence
  MKO10101411_B_Nif3l1
  gRNA
tctgggggcagtgttctaca

SEQ ID NO: 101412 - DNA, 20 bp, Artificial Sequence
  MKO10101412_B_Nif3l1
  gRNA
gaggccgacctttacctcac

SEQ ID NO: 101413 - DNA, 20 bp, Artificial Sequence
  MKO10101413_B_Nifk
  gRNA
tgtcgctcatagagattctg

SEQ ID NO: 101414 - DNA, 20 bp, Artificial Sequence
  MKO10101414_B_Nifk
  gRNA
tataactactgtgcccagtt

SEQ ID NO: 101415 - DNA, 20 bp, Artificial Sequence
  MKO10101415_B_Nifk
  gRNA
tgagcgacagcaatgttctt

SEQ ID NO: 101416 - DNA, 20 bp, Artificial Sequence
  MKO10101416_B_Nim1
  gRNA
atcacgctggggaaacgcat

SEQ ID NO: 101417 - DNA, 20 bp, Artificial Sequence
  MKO10101417_B_Nim1
  gRNA
acccttcgagaaactgactc

SEQ ID NO: 101418 - DNA, 20 bp, Artificial Sequence
  MKO10101418_B_Nim1
  gRNA
gtccaagctacacctagtga

SEQ ID NO: 101419 - DNA, 20 bp, Artificial Sequence
  MKO10101419_B_Ninj1
  gRNA
ccccggttcccccgacgcct

SEQ ID NO: 101420 - DNA, 20 bp, Artificial Sequence
  MKO10101420_B_Ninj1
  gRNA
cgtgcttggccgggttgttg

SEQ ID NO: 101421 - DNA, 20 bp, Artificial Sequence
  MKO10101421_B_Ninj1
  gRNA
tgccaacaagaagagcgctg

SEQ ID NO: 101422 - DNA, 20 bp, Artificial Sequence
  MKO10101422_B_Ninj2
  gRNA
tagtcatcaaataggattgc

SEQ ID NO: 101423 - DNA, 20 bp, Artificial Sequence
  MKO10101423_B_Ninj2
  gRNA
agaacttacttgaaggtgga

SEQ ID NO: 101424 - DNA, 20 bp, Artificial Sequence
  MKO10101424_B_Ninj2
  gRNA
cagcactgatttcagccgca

SEQ ID NO: 101425 - DNA, 20 bp, Artificial Sequence
  MKO10101425_B_Ninl
  gRNA
gtggcagagtcaccgagctc

SEQ ID NO: 101426 - DNA, 20 bp, Artificial Sequence
  MKO10101426_B_Ninl
  gRNA
cttcaggccagctgcgatcc

SEQ ID NO: 101427 - DNA, 20 bp, Artificial Sequence
  MKO10101427_B_Ninl
  gRNA
cgtcggagcctacctgagct

SEQ ID NO: 101428 - DNA, 20 bp, Artificial Sequence
  MKO10101428_B_Nin
  gRNA
ctggaagacacaacgcagtg

SEQ ID NO: 101429 - DNA, 20 bp, Artificial Sequence
  MKO10101429_B_Nin
  gRNA
gctgcaacagacgctactcc

SEQ ID NO: 101430 - DNA, 20 bp, Artificial Sequence
  MKO10101430_B_Nin
  gRNA
gtctagaactctatccagtg

SEQ ID NO: 101431 - DNA, 20 bp, Artificial Sequence
  MKO10101431_B_Nip7
  gRNA
ccggaaacagtacgtgccgt

SEQ ID NO: 101432 - DNA, 20 bp, Artificial Sequence
  MKO10101432_B_Nip7
  gRNA
tacccaagactgccgaaaag

SEQ ID NO: 101433 - DNA, 20 bp, Artificial Sequence
  MKO10101433_B_Nip7
  gRNA
cgtactccccaatgtctgct

SEQ ID NO: 101434 - DNA, 20 bp, Artificial Sequence
  MKO10101434_B_Nipa1
  gRNA
acagtggctgtcggccagat

SEQ ID NO: 101435 - DNA, 20 bp, Artificial Sequence
  MKO10101435_B_Nipa1
  gRNA
gtggtcacactctcagactt

SEQ ID NO: 101436 - DNA, 20 bp, Artificial Sequence
  MKO10101436_B_Nipa1
  gRNA
gctcaacatcttgggcaagt

SEQ ID NO: 101437 - DNA, 20 bp, Artificial Sequence
  MKO10101437_B_Nipa2
  gRNA
aggaggccatgcatatctta

SEQ ID NO: 101438 - DNA, 20 bp, Artificial Sequence
  MKO10101438_B_Nipa2
  gRNA
aatgaagacgacttaccctg

SEQ ID NO: 101439 - DNA, 20 bp, Artificial Sequence
  MKO10101439_B_Nipa2
  gRNA
tatggtcattcatgctccaa

SEQ ID NO: 101440 - DNA, 20 bp, Artificial Sequence
  MKO10101440_B_Nipal1
  gRNA
ggcgaagttcgcagcctctc

SEQ ID NO: 101441 - DNA, 20 bp, Artificial Sequence
  MKO10101441_B_Nipal1
  gRNA
gaccaaggtggcaggcgcaa

SEQ ID NO: 101442 - DNA, 20 bp, Artificial Sequence
  MKO10101442_B_Nipal1
  gRNA
aatgagcgcttgaatattca

SEQ ID NO: 101443 - DNA, 20 bp, Artificial Sequence
  MKO10101443_B_Nipal2
  gRNA
gataaccaggtttcctaaaa

SEQ ID NO: 101444 - DNA, 20 bp, Artificial Sequence
  MKO10101444_B_Nipal2
  gRNA
cagcatttccctaaatatcc

SEQ ID NO: 101445 - DNA, 20 bp, Artificial Sequence
  MKO10101445_B_Nipal2
  gRNA
ggtatgacactagcatttgc

SEQ ID NO: 101446 - DNA, 20 bp, Artificial Sequence
  MKO10101446_B_Nipal3
  gRNA
gaccaccaggtgcccaaaaa

SEQ ID NO: 101447 - DNA, 20 bp, Artificial Sequence
  MKO10101447_B_Nipal3
  gRNA
ggccaagccgcagccaacaa

SEQ ID NO: 101448 - DNA, 20 bp, Artificial Sequence
  MKO10101448_B_Nipal3
  gRNA
tttccagcaagcgccatcat

SEQ ID NO: 101449 - DNA, 20 bp, Artificial Sequence
  MKO10101449_B_Nipal4
  gRNA
ctatgcatttgcacctgcga

SEQ ID NO: 101450 - DNA, 20 bp, Artificial Sequence
  MKO10101450_B_Nipal4
  gRNA
acctgaaggacccaatgtgg

SEQ ID NO: 101451 - DNA, 20 bp, Artificial Sequence
  MKO10101451_B_Nipal4
  gRNA
tctacagtgaatggaggcta

SEQ ID NO: 101452 - DNA, 20 bp, Artificial Sequence
  MKO10101452_B_Nipbl
  gRNA
cttcgggatcatcactgcca

SEQ ID NO: 101453 - DNA, 20 bp, Artificial Sequence
  MKO10101453_B_Nipbl
  gRNA
acacatccgcagatgcagca

SEQ ID NO: 101454 - DNA, 20 bp, Artificial Sequence
  MKO10101454_B_Nipbl
  gRNA
gtgttgtgtaacttgaagga

SEQ ID NO: 101455 - DNA, 20 bp, Artificial Sequence
  MKO10101455_B_Nipsnap1
  gRNA
agccacctgagaaccgccat

SEQ ID NO: 101456 - DNA, 20 bp, Artificial Sequence
  MKO10101456_B_Nipsnap1
  gRNA
cactcacgtcagactgttgt

SEQ ID NO: 101457 - DNA, 20 bp, Artificial Sequence
  MKO10101457_B_Nipsnap1
  gRNA
ccccaacagtacacctatgg

SEQ ID NO: 101458 - DNA, 20 bp, Artificial Sequence
  MKO10101458_B_Nipsnap3a
  gRNA
aatgcttcaccccatagagc

SEQ ID NO: 101459 - DNA, 20 bp, Artificial Sequence
  MKO10101459_B_Nipsnap3a
  gRNA
gatcccagagtcgtgtctgc

SEQ ID NO: 101460 - DNA, 20 bp, Artificial Sequence
  MKO10101460_B_Nipsnap3a
  gRNA
ctctcttgtttgtcaatgag

SEQ ID NO: 101461 - DNA, 20 bp, Artificial Sequence
  MKO10101461_B_Nipsnap3b
  gRNA
gaatgtgccattgctttgcc

SEQ ID NO: 101462 - DNA, 20 bp, Artificial Sequence
  MKO10101462_B_Nipsnap3b
  gRNA
gccgccaggcttcatctgaa

SEQ ID NO: 101463 - DNA, 20 bp, Artificial Sequence
  MKO10101463_B_Nipsnap3b
  gRNA
gtctcacgaggaccctagag

SEQ ID NO: 101464 - DNA, 20 bp, Artificial Sequence
  MKO10101464_B_Nisch
  gRNA
gcatcaccactggcacaagt

SEQ ID NO: 101465 - DNA, 20 bp, Artificial Sequence
  MKO10101465_B_Nisch
  gRNA
tctttaccttaagatactta

SEQ ID NO: 101466 - DNA, 20 bp, Artificial Sequence
  MKO10101466_B_Nisch
  gRNA
aaatggtgtcactgcagcac

SEQ ID NO: 101467 - DNA, 20 bp, Artificial Sequence
  MKO10101467_B_Nit1
  gRNA
tagcaatctgttatgacatg

SEQ ID NO: 101468 - DNA, 20 bp, Artificial Sequence
  MKO10101468_B_Nit1
  gRNA
ttcggacaggagtaatgtct

SEQ ID NO: 101469 - DNA, 20 bp, Artificial Sequence
  MKO10101469_B_Nit1
  gRNA
gtatagttgctttctctcat

SEQ ID NO: 101470 - DNA, 20 bp, Artificial Sequence
  MKO10101470_B_Nit2
  gRNA
ttaaatcagataaccttacc

SEQ ID NO: 101471 - DNA, 20 bp, Artificial Sequence
  MKO10101471_B_Nit2
  gRNA
ggaatcttctctgcatagtc

SEQ ID NO: 101472 - DNA, 20 bp, Artificial Sequence
  MKO10101472_B_Nit2
  gRNA
gagtgcttcaattctccata

SEQ ID NO: 101473 - DNA, 20 bp, Artificial Sequence
  MKO10101473_B_Nkain1
  gRNA
gacataccaggatgagatac

SEQ ID NO: 101474 - DNA, 20 bp, Artificial Sequence
  MKO10101474_B_Nkain1
  gRNA
gccaacccagagtacaagcc

SEQ ID NO: 101475 - DNA, 20 bp, Artificial Sequence
  MKO10101475_B_Nkain1
  gRNA
actttctgcagtatgcagcc

SEQ ID NO: 101476 - DNA, 20 bp, Artificial Sequence
  MKO10101476_B_Nkain2
  gRNA
cacttactgcgaggacaatc

SEQ ID NO: 101477 - DNA, 20 bp, Artificial Sequence
  MKO10101477_B_Nkain2
  gRNA
cttactcctgttacgtaacg

SEQ ID NO: 101478 - DNA, 20 bp, Artificial Sequence
  MKO10101478_B_Nkain2
  gRNA
atatttcaatgcaccgatct

SEQ ID NO: 101479 - DNA, 20 bp, Artificial Sequence
  MKO10101479_B_Nkain3
  gRNA
tacacatacgtctcagtcac

SEQ ID NO: 101480 - DNA, 20 bp, Artificial Sequence
  MKO10101480_B_Nkain3
  gRNA
caggttagaagaaccaagac

SEQ ID NO: 101481 - DNA, 20 bp, Artificial Sequence
  MKO10101481_B_Nkain3
  gRNA
ttcctatagcagacctgtct

SEQ ID NO: 101482 - DNA, 20 bp, Artificial Sequence
  MKO10101482_B_Nkain4
  gRNA
ggtctccctagtatgttgta

SEQ ID NO: 101483 - DNA, 20 bp, Artificial Sequence
  MKO10101483_B_Nkain4
  gRNA
agagcgcaagaagcgtgcag

SEQ ID NO: 101484 - DNA, 20 bp, Artificial Sequence
  MKO10101484_B_Nkain4
  gRNA
tgccatggtgcacagctatg

SEQ ID NO: 101485 - DNA, 20 bp, Artificial Sequence
  MKO10101485_B_Nkapl
  gRNA
atcccgatctcgccctaatg

SEQ ID NO: 101486 - DNA, 20 bp, Artificial Sequence
  MKO10101486_B_Nkapl
  gRNA
acgccctgagcaccccgcgg

SEQ ID NO: 101487 - DNA, 20 bp, Artificial Sequence
  MKO10101487_B_Nkapl
  gRNA
tggtagcaggcatcgccgaa

SEQ ID NO: 101488 - DNA, 20 bp, Artificial Sequence
  MKO10101488_B_Nkap
  gRNA
gaatctgacacagactccag

SEQ ID NO: 101489 - DNA, 20 bp, Artificial Sequence
  MKO10101489_B_Nkap
  gRNA
acttcagcatctagttcaga

SEQ ID NO: 101490 - DNA, 20 bp, Artificial Sequence
  MKO10101490_B_Nkap
  gRNA
agcaaagaaagctaagaaaa

SEQ ID NO: 101491 - DNA, 20 bp, Artificial Sequence
  MKO10101491_B_Nkd1
  gRNA
agaagcagcgagccccactc

SEQ ID NO: 101492 - DNA, 20 bp, Artificial Sequence
  MKO10101492_B_Nkd1
  gRNA
ggagtcaaccacttcataga

SEQ ID NO: 101493 - DNA, 20 bp, Artificial Sequence
  MKO10101493_B_Nkd1
  gRNA
gagtgaaagtccactcttgc

SEQ ID NO: 101494 - DNA, 20 bp, Artificial Sequence
  MKO10101494_B_Nkd2
  gRNA
gacgacaagggttccctaga

SEQ ID NO: 101495 - DNA, 20 bp, Artificial Sequence
  MKO10101495_B_Nkd2
  gRNA
tcatggccctcagacttctc

SEQ ID NO: 101496 - DNA, 20 bp, Artificial Sequence
  MKO10101496_B_Nkd2
  gRNA
cagccgcagcagcctgcaag

SEQ ID NO: 101497 - DNA, 20 bp, Artificial Sequence
  MKO10101497_B_Nkg7
  gRNA
cccagctctctccatattag

SEQ ID NO: 101498 - DNA, 20 bp, Artificial Sequence
  MKO10101498_B_Nkg7
  gRNA
cagtgtacaccagtatgaga

SEQ ID NO: 101499 - DNA, 20 bp, Artificial Sequence
  MKO10101499_B_Nkg7
  gRNA
gccatgacagttgagaccag

SEQ ID NO: 101500 - DNA, 20 bp, Artificial Sequence
  MKO10101500_B_Nkiras1
  gRNA
gcaaatgagaagtaatgctt

SEQ ID NO: 101501 - DNA, 20 bp, Artificial Sequence
  MKO10101501_B_Nkiras1
  gRNA
caatagtgtgattcccataa

SEQ ID NO: 101502 - DNA, 20 bp, Artificial Sequence
  MKO10101502_B_Nkiras1
  gRNA
atttgtgggttgctgtctgt

SEQ ID NO: 101503 - DNA, 20 bp, Artificial Sequence
  MKO10101503_B_Nkiras2
  gRNA
cttgttgccaaggaccacga

SEQ ID NO: 101504 - DNA, 20 bp, Artificial Sequence
  MKO10101504_B_Nkiras2
  gRNA
cgtgtgcggccaggcatctg

SEQ ID NO: 101505 - DNA, 20 bp, Artificial Sequence
  MKO10101505_B_Nkiras2
  gRNA
tcccgtacagaagctgctca

SEQ ID NO: 101506 - DNA, 20 bp, Artificial Sequence
  MKO10101506_B_Nkpd1
  gRNA
gcgtagaaacccaccgtcac

SEQ ID NO: 101507 - DNA, 20 bp, Artificial Sequence
  MKO10101507_B_Nkpd1
  gRNA
cagcggctcggtccagttcg

SEQ ID NO: 101508 - DNA, 20 bp, Artificial Sequence
  MKO10101508_B_Nkpd1
  gRNA
cccgagttggggcaccaaaa

SEQ ID NO: 101509 - DNA, 20 bp, Artificial Sequence
  MKO10101509_B_Nkrf
  gRNA
ggcagcattagatcatatga

SEQ ID NO: 101510 - DNA, 20 bp, Artificial Sequence
  MKO10101510_B_Nkrf
  gRNA
aggtctccgctggaaatgca

SEQ ID NO: 101511 - DNA, 20 bp, Artificial Sequence
  MKO10101511_B_Nkrf
  gRNA
ttgaggttagagttgtccga

SEQ ID NO: 101512 - DNA, 20 bp, Artificial Sequence
  MKO10101512_B_Nktr
  gRNA
atttatggtggatactttaa

SEQ ID NO: 101513 - DNA, 20 bp, Artificial Sequence
  MKO10101513_B_Nktr
  gRNA
ggttaaaaactttatgattc

SEQ ID NO: 101514 - DNA, 20 bp, Artificial Sequence
  MKO10101514_B_Nktr
  gRNA
actcacctgagcacaggcat

SEQ ID NO: 101515 - DNA, 20 bp, Artificial Sequence
  MKO10101515_B_Nkx1-2
  gRNA
ggggtctcctgtgacccgat

SEQ ID NO: 101516 - DNA, 20 bp, Artificial Sequence
  MKO10101516_B_Nkx1-2
  gRNA
gcacaccgacagatagcgcg

SEQ ID NO: 101517 - DNA, 20 bp, Artificial Sequence
  MKO10101517_B_Nkx1-2
  gRNA
acaccgggcgcggtagcggg

SEQ ID NO: 101518 - DNA, 20 bp, Artificial Sequence
  MKO10101518_B_Nkx2-1
  gRNA
ggcgccatagtccgagcccg

SEQ ID NO: 101519 - DNA, 20 bp, Artificial Sequence
  MKO10101519_B_Nkx2-1
  gRNA
gggctactgcaacggcaacc

SEQ ID NO: 101520 - DNA, 20 bp, Artificial Sequence
  MKO10101520_B_Nkx2-1
  gRNA
ccatgcagcagcacgccgtg

SEQ ID NO: 101521 - DNA, 20 bp, Artificial Sequence
  MKO10101521_B_Nkx2-2
  gRNA
ttgtcgctgctgtcgtagaa

SEQ ID NO: 101522 - DNA, 20 bp, Artificial Sequence
  MKO10101522_B_Nkx2-2
  gRNA
tgcccatagtgtccgcaagg

SEQ ID NO: 101523 - DNA, 20 bp, Artificial Sequence
  MKO10101523_B_Nkx2-2
  gRNA
gggcaccgcagcttcgatcc

SEQ ID NO: 101524 - DNA, 20 bp, Artificial Sequence
  MKO10101524_B_Nkx2-3
  gRNA
gaactcactagctgctgccg

SEQ ID NO: 101525 - DNA, 20 bp, Artificial Sequence
  MKO10101525_B_Nkx2-3
  gRNA
ggcgcgcaacccttgcatca

SEQ ID NO: 101526 - DNA, 20 bp, Artificial Sequence
  MKO10101526_B_Nkx2-3
  gRNA
cacgccgtagggcgagccgt

SEQ ID NO: 101527 - DNA, 20 bp, Artificial Sequence
  MKO10101527_B_Nkx2-4
  gRNA
gccacgttcacgcccgccga

SEQ ID NO: 101528 - DNA, 20 bp, Artificial Sequence
  MKO10101528_B_Nkx2-4
  gRNA
cgctcacttgacgagtagcg

SEQ ID NO: 101529 - DNA, 20 bp, Artificial Sequence
  MKO10101529_B_Nkx2-4
  gRNA
gggttcgctgaccggcatcg

SEQ ID NO: 101530 - DNA, 20 bp, Artificial Sequence
  MKO10101530_B_Nkx2-5
  gRNA
cgaggcggcagcgtccggcc

SEQ ID NO: 101531 - DNA, 20 bp, Artificial Sequence
  MKO10101531_B_Nkx2-5
  gRNA
tctctcggcgccatccgtct

SEQ ID NO: 101532 - DNA, 20 bp, Artificial Sequence
  MKO10101532_B_Nkx2-5
  gRNA
ctacgctcccgcctacggcg

SEQ ID NO: 101533 - DNA, 20 bp, Artificial Sequence
  MKO10101533_B_Nkx2-6
  gRNA
tggttcattcttaggtaccg

SEQ ID NO: 101534 - DNA, 20 bp, Artificial Sequence
  MKO10101534_B_Nkx2-6
  gRNA
ctcgcatagctagcgtcgta

SEQ ID NO: 101535 - DNA, 20 bp, Artificial Sequence
  MKO10101535_B_Nkx2-6
  gRNA
ctcggcgcatgtcgccactc

SEQ ID NO: 101536 - DNA, 20 bp, Artificial Sequence
  MKO10101536_B_Nkx2-9
  gRNA
ggctgcgcaccgtgaagccg

SEQ ID NO: 101537 - DNA, 20 bp, Artificial Sequence
  MKO10101537_B_Nkx2-9
  gRNA
ctccaggccgctctcgtccg

SEQ ID NO: 101538 - DNA, 20 bp, Artificial Sequence
  MKO10101538_B_Nkx2-9
  gRNA
ggacaagtgcagcgcacgcc

SEQ ID NO: 101539 - DNA, 20 bp, Artificial Sequence
  MKO10101539_B_Nkx3-1
  gRNA
ggacttagcaagtgcccccc

SEQ ID NO: 101540 - DNA, 20 bp, Artificial Sequence
  MKO10101540_B_Nkx3-1
  gRNA
aggcaatccgcagcactcgc

SEQ ID NO: 101541 - DNA, 20 bp, Artificial Sequence
  MKO10101541_B_Nkx3-1
  gRNA
ggtgagccgcttggactgcg

SEQ ID NO: 101542 - DNA, 20 bp, Artificial Sequence
  MKO10101542_B_Nkx3-2
  gRNA
gcccgggagcgcttctttcg

SEQ ID NO: 101543 - DNA, 20 bp, Artificial Sequence
  MKO10101543_B_Nkx3-2
  gRNA
ctgcgagctgcacgccgcca

SEQ ID NO: 101544 - DNA, 20 bp, Artificial Sequence
  MKO10101544_B_Nkx3-2
  gRNA
gtcgctacaagaccaaacgc

SEQ ID NO: 101545 - DNA, 20 bp, Artificial Sequence
  MKO10101545_B_Nkx6-1
  gRNA
tttcgaacaaacgaagtact

SEQ ID NO: 101546 - DNA, 20 bp, Artificial Sequence
  MKO10101546_B_Nkx6-1
  gRNA
ctccgtcatccccagagaat

SEQ ID NO: 101547 - DNA, 20 bp, Artificial Sequence
  MKO10101547_B_Nkx6-1
  gRNA
ctgaaaaagcacaaatcgag

SEQ ID NO: 101548 - DNA, 20 bp, Artificial Sequence
  MKO10101548_B_Nkx6-2
  gRNA
ttaccggagccggccagtcg

SEQ ID NO: 101549 - DNA, 20 bp, Artificial Sequence
  MKO10101549_B_Nkx6-2
  gRNA
cggccagcagatcttcgcgc

SEQ ID NO: 101550 - DNA, 20 bp, Artificial Sequence
  MKO10101550_B_Nkx6-2
  gRNA
cgcgcggcttgcctactctc

SEQ ID NO: 101551 - DNA, 20 bp, Artificial Sequence
  MKO10101551_B_Nkx6-3
  gRNA
taagccagcctcgcccgctc

SEQ ID NO: 101552 - DNA, 20 bp, Artificial Sequence
  MKO10101552_B_Nkx6-3
  gRNA
ctggaaatgagtacccgacc

SEQ ID NO: 101553 - DNA, 20 bp, Artificial Sequence
  MKO10101553_B_Nkx6-3
  gRNA
cggtccccgctcgcacctcc

SEQ ID NO: 101554 - DNA, 20 bp, Artificial Sequence
  MKO10101554_B_Nle1
  gRNA
ctttcttaggacaccggcac

SEQ ID NO: 101555 - DNA, 20 bp, Artificial Sequence
  MKO10101555_B_Nle1
  gRNA
gagacaccactgtgcgcttc

SEQ ID NO: 101556 - DNA, 20 bp, Artificial Sequence
  MKO10101556_B_Nle1
  gRNA
gacgcggtgcaccagctcat

SEQ ID NO: 101557 - DNA, 20 bp, Artificial Sequence
  MKO10101557_B_Nlgn1
  gRNA
gcagaccttcactcgaactt

SEQ ID NO: 101558 - DNA, 20 bp, Artificial Sequence
  MKO10101558_B_Nlgn1
  gRNA
ccattggttactactaactt

SEQ ID NO: 101559 - DNA, 20 bp, Artificial Sequence
  MKO10101559_B_Nlgn1
  gRNA
tccaaacacagtgattcgca

SEQ ID NO: 101560 - DNA, 20 bp, Artificial Sequence
  MKO10101560_B_Nlgn2
  gRNA
ccaaagatagtgatgcgttc

SEQ ID NO: 101561 - DNA, 20 bp, Artificial Sequence
  MKO10101561_B_Nlgn2
  gRNA
gctcacaaaaaaacgtgacg

SEQ ID NO: 101562 - DNA, 20 bp, Artificial Sequence
  MKO10101562_B_Nlgn2
  gRNA
tgagccgtcaaacatgttcc

SEQ ID NO: 101563 - DNA, 20 bp, Artificial Sequence
  MKO10101563_B_Nlgn3
  gRNA
gccatagcgggcgtgcagat

SEQ ID NO: 101564 - DNA, 20 bp, Artificial Sequence
  MKO10101564_B_Nlgn3
  gRNA
aggatccggcgctaagaaac

SEQ ID NO: 101565 - DNA, 20 bp, Artificial Sequence
  MKO10101565_B_Nlgn3
  gRNA
ccccgtagaattactgtctt

SEQ ID NO: 101566 - DNA, 20 bp, Artificial Sequence
  MKO10101566_B_Nlk
  gRNA
tctcttgcaaaagagtcttc

SEQ ID NO: 101567 - DNA, 20 bp, Artificial Sequence
  MKO10101567_B_Nlk
  gRNA
tcttcaaaatagtcaatgtg

SEQ ID NO: 101568 - DNA, 20 bp, Artificial Sequence
  MKO10101568_B_Nlk
  gRNA
ctctcctcagccactcagct

SEQ ID NO: 101569 - DNA, 20 bp, Artificial Sequence
  MKO10101569_B_Nln
  gRNA
ctgtcagacgacacgtgctg

SEQ ID NO: 101570 - DNA, 20 bp, Artificial Sequence
  MKO10101570_B_Nln
  gRNA
gggacgtgtcatcctcattg

SEQ ID NO: 101571 - DNA, 20 bp, Artificial Sequence
  MKO10101571_B_Nln
  gRNA
caagcacagaagcggacaaa

SEQ ID NO: 101572 - DNA, 20 bp, Artificial Sequence
  MKO10101572_B_Nlrc3
  gRNA
tctgttaaccaggagggatc

SEQ ID NO: 101573 - DNA, 20 bp, Artificial Sequence
  MKO10101573_B_Nlrc3
  gRNA
gctggacaacaaccagttcc

SEQ ID NO: 101574 - DNA, 20 bp, Artificial Sequence
  MKO10101574_B_Nlrc3
  gRNA
agctggggagccaacactgt

SEQ ID NO: 101575 - DNA, 20 bp, Artificial Sequence
  MKO10101575_B_Nlrc4
  gRNA
acagacgagcccttattcaa

SEQ ID NO: 101576 - DNA, 20 bp, Artificial Sequence
  MKO10101576_B_Nlrc4
  gRNA
catccagtatgagtctctcg

SEQ ID NO: 101577 - DNA, 20 bp, Artificial Sequence
  MKO10101577_B_Nlrc4
  gRNA
tcgggcggcttcctgctcca

SEQ ID NO: 101578 - DNA, 20 bp, Artificial Sequence
  MKO10101578_B_Nlrc5
  gRNA
tagtaggcaaactcctgcag

SEQ ID NO: 101579 - DNA, 20 bp, Artificial Sequence
  MKO10101579_B_Nlrc5
  gRNA
gaggacccatagctctgaaa

SEQ ID NO: 101580 - DNA, 20 bp, Artificial Sequence
  MKO10101580_B_Nlrc5
  gRNA
acagaattctctaagcagct

SEQ ID NO: 101581 - DNA, 20 bp, Artificial Sequence
  MKO10101581_B_Nlrp10
  gRNA
gcttgtagactacctcaacc

SEQ ID NO: 101582 - DNA, 20 bp, Artificial Sequence
  MKO10101582_B_Nlrp10
  gRNA
atgtcgccgttcacccaaca

SEQ ID NO: 101583 - DNA, 20 bp, Artificial Sequence
  MKO10101583_B_Nlrp10
  gRNA
gaactgcatcgactaccgag

SEQ ID NO: 101584 - DNA, 20 bp, Artificial Sequence
  MKO10101584_B_Nlrp12
  gRNA
cagccgctgtcatcgccaac

SEQ ID NO: 101585 - DNA, 20 bp, Artificial Sequence
  MKO10101585_B_Nlrp12
  gRNA
cagctcgatcaggttggagt

SEQ ID NO: 101586 - DNA, 20 bp, Artificial Sequence
  MKO10101586_B_Nlrp12
  gRNA
tgacagcggctgcgaggtcc

SEQ ID NO: 101587 - DNA, 20 bp, Artificial Sequence
  MKO10101587_B_Nlrp14
  gRNA
ccaatgctctccaaaccaat

SEQ ID NO: 101588 - DNA, 20 bp, Artificial Sequence
  MKO10101588_B_Nlrp14
  gRNA
catacagatccatttctatc

SEQ ID NO: 101589 - DNA, 20 bp, Artificial Sequence
  MKO10101589_B_Nlrp14
  gRNA
catcatttgatagattgttg

SEQ ID NO: 101590 - DNA, 20 bp, Artificial Sequence
  MKO10101590_B_Nlrp1a
  gRNA
tgtactgcatagtagctcag

SEQ ID NO: 101591 - DNA, 20 bp, Artificial Sequence
  MKO10101591_B_Nlrp1a
  gRNA
agacctgcagctgaatgacc

SEQ ID NO: 101592 - DNA, 20 bp, Artificial Sequence
  MKO10101592_B_Nlrp1a
  gRNA
gctgcaggtctagctcagtc

SEQ ID NO: 101593 - DNA, 20 bp, Artificial Sequence
  MKO10101593_B_Nlrp1b
  gRNA
gtgtaggatgccacaaatga

SEQ ID NO: 101594 - DNA, 20 bp, Artificial Sequence
  MKO10101594_B_Nlrp1b
  gRNA
ccccaatcactaatgccagt

SEQ ID NO: 101595 - DNA, 20 bp, Artificial Sequence
  MKO10101595_B_Nlrp1b
  gRNA
tcctgagctctgtaatcacc

SEQ ID NO: 101596 - DNA, 20 bp, Artificial Sequence
  MKO10101596_B_Nlrp2
  gRNA
aacaacgcatgttaactttc

SEQ ID NO: 101597 - DNA, 20 bp, Artificial Sequence
  MKO10101597_B_Nlrp2
  gRNA
gctccttgaacaaaattcca

SEQ ID NO: 101598 - DNA, 20 bp, Artificial Sequence
  MKO10101598_B_Nlrp2
  gRNA
ctctctttcaggagaaccct

SEQ ID NO: 101599 - DNA, 20 bp, Artificial Sequence
  MKO10101599_B_Nlrp3
  gRNA
gccagactcaccacagtttc

SEQ ID NO: 101600 - DNA, 20 bp, Artificial Sequence
  MKO10101600_B_Nlrp3
  gRNA
cagttcagtgaggctccggt

SEQ ID NO: 101601 - DNA, 20 bp, Artificial Sequence
  MKO10101601_B_Nlrp3
  gRNA
agatgtcgaagcagcattga

SEQ ID NO: 101602 - DNA, 20 bp, Artificial Sequence
  MKO10101602_B_Nlrp4a
  gRNA
aagtgctcgagaatgcagtc

SEQ ID NO: 101603 - DNA, 20 bp, Artificial Sequence
  MKO10101603_B_Nlrp4a
  gRNA
gaccttgaagcatcttaatt

SEQ ID NO: 101604 - DNA, 20 bp, Artificial Sequence
  MKO10101604_B_Nlrp4a
  gRNA
ctctgtgttcataatcagta

SEQ ID NO: 101605 - DNA, 20 bp, Artificial Sequence
  MKO10101605_B_Nlrp4b
  gRNA
gaaaacacaagttatccagc

SEQ ID NO: 101606 - DNA, 20 bp, Artificial Sequence
  MKO10101606_B_Nlrp4b
  gRNA
ggggaaagctactcatactt

SEQ ID NO: 101607 - DNA, 20 bp, Artificial Sequence
  MKO10101607_B_Nlrp4b
  gRNA
agctgatgtttaggtatctc

SEQ ID NO: 101608 - DNA, 20 bp, Artificial Sequence
  MKO10101608_B_Nlrp4c
  gRNA
ggtccaagtgctgcaaacac

SEQ ID NO: 101609 - DNA, 20 bp, Artificial Sequence
  MKO10101609_B_Nlrp4c
  gRNA
atgactatataacaccaaag

SEQ ID NO: 101610 - DNA, 20 bp, Artificial Sequence
  MKO10101610_B_Nlrp4c
  gRNA
taacttacacaagtgcttta

SEQ ID NO: 101611 - DNA, 20 bp, Artificial Sequence
  MKO10101611_B_Nlrp4e
  gRNA
tcaccaaactgaaaatttcc

SEQ ID NO: 101612 - DNA, 20 bp, Artificial Sequence
  MKO10101612_B_Nlrp4e
  gRNA
tgaaattagtgtctttcact

SEQ ID NO: 101613 - DNA, 20 bp, Artificial Sequence
  MKO10101613_B_Nlrp4e
  gRNA
ttacttactcaagtacttta

SEQ ID NO: 101614 - DNA, 20 bp, Artificial Sequence
  MKO10101614_B_Nlrp4f
  gRNA
gcatccaacaatttgaatca

SEQ ID NO: 101615 - DNA, 20 bp, Artificial Sequence
  MKO10101615_B_Nlrp4f
  gRNA
cagcaactgcatttgatgag

SEQ ID NO: 101616 - DNA, 20 bp, Artificial Sequence
  MKO10101616_B_Nlrp4f
  gRNA
agattcatataaaactcgaa

SEQ ID NO: 101617 - DNA, 20 bp, Artificial Sequence
  MKO10101617_B_Nlrp4g
  gRNA
gaatcaattcaaagaatgcg

SEQ ID NO: 101618 - DNA, 20 bp, Artificial Sequence
  MKO10101618_B_Nlrp4g
  gRNA
gaactgcagtttgcaatatt

SEQ ID NO: 101619 - DNA, 20 bp, Artificial Sequence
  MKO10101619_B_Nlrp4g
  gRNA
ggaaaaaactaatcatctgt

SEQ ID NO: 101620 - DNA, 20 bp, Artificial Sequence
  MKO10101620_B_Nlrp5
  gRNA
aaagcaatcttgaaagcacg

SEQ ID NO: 101621 - DNA, 20 bp, Artificial Sequence
  MKO10101621_B_Nlrp5
  gRNA
ttggaagaggaacagaagtc

SEQ ID NO: 101622 - DNA, 20 bp, Artificial Sequence
  MKO10101622_B_Nlrp5
  gRNA
cctgatgtctgctcctgctc

SEQ ID NO: 101623 - DNA, 20 bp, Artificial Sequence
  MKO10101623_B_Nlrp6
  gRNA
ggggcgcatcccttagcttg

SEQ ID NO: 101624 - DNA, 20 bp, Artificial Sequence
  MKO10101624_B_Nlrp6
  gRNA
aggcctggaaggagcgttac

SEQ ID NO: 101625 - DNA, 20 bp, Artificial Sequence
  MKO10101625_B_Nlrp6
  gRNA
tgacacggagagaagcaccg

SEQ ID NO: 101626 - DNA, 20 bp, Artificial Sequence
  MKO10101626_B_Nlrp9a
  gRNA
taactcacatcagtgattcc

SEQ ID NO: 101627 - DNA, 20 bp, Artificial Sequence
  MKO10101627_B_Nlrp9a
  gRNA
agcttcccttatcaattctg

SEQ ID NO: 101628 - DNA, 20 bp, Artificial Sequence
  MKO10101628_B_Nlrp9a
  gRNA
atctccaaagttagtcgtga

SEQ ID NO: 101629 - DNA, 20 bp, Artificial Sequence
  MKO10101629_B_Nlrp9b
  gRNA
ttcgatgtctccaactccta

SEQ ID NO: 101630 - DNA, 20 bp, Artificial Sequence
  MKO10101630_B_Nlrp9b
  gRNA
acatgtaggttgggtaaatg

SEQ ID NO: 101631 - DNA, 20 bp, Artificial Sequence
  MKO10101631_B_Nlrp9b
  gRNA
taactcacatcagtgactgc

SEQ ID NO: 101632 - DNA, 20 bp, Artificial Sequence
  MKO10101632_B_Nlrp9c
  gRNA
aaaacagtcagaggcatatt

SEQ ID NO: 101633 - DNA, 20 bp, Artificial Sequence
  MKO10101633_B_Nlrp9c
  gRNA
cactgatctctctaatgatg

SEQ ID NO: 101634 - DNA, 20 bp, Artificial Sequence
  MKO10101634_B_Nlrp9c
  gRNA
atcaaacttacaacaatctt

SEQ ID NO: 101635 - DNA, 20 bp, Artificial Sequence
  MKO10101635_B_Nlrx1
  gRNA
tgggcgccgcgtgcagaccg

SEQ ID NO: 101636 - DNA, 20 bp, Artificial Sequence
  MKO10101636_B_Nlrx1
  gRNA
agggcctttatccgttacca

SEQ ID NO: 101637 - DNA, 20 bp, Artificial Sequence
  MKO10101637_B_Nlrx1
  gRNA
ggtctcacctagggggcctc

SEQ ID NO: 101638 - DNA, 20 bp, Artificial Sequence
  MKO10101638_B_Nmbr
  gRNA
ttcttactgctgacgagctg

SEQ ID NO: 101639 - DNA, 20 bp, Artificial Sequence
  MKO10101639_B_Nmbr
  gRNA
cgcggtggtcccatctgagt

SEQ ID NO: 101640 - DNA, 20 bp, Artificial Sequence
  MKO10101640_B_Nmbr
  gRNA
agacgtccggtgtgttgctg

SEQ ID NO: 101641 - DNA, 20 bp, Artificial Sequence
  MKO10101641_B_Nmb
  gRNA
tgcctagagctttctttcgc

SEQ ID NO: 101642 - DNA, 20 bp, Artificial Sequence
  MKO10101642_B_Nmb
  gRNA
tggcatcacttctgcagtag

SEQ ID NO: 101643 - DNA, 20 bp, Artificial Sequence
  MKO10101643_B_Nmb
  gRNA
ccttcagtacaggaggctgc

SEQ ID NO: 101644 - DNA, 20 bp, Artificial Sequence
  MKO10101644_B_Nmd3
  gRNA
gcacactgtacccatgatgc

SEQ ID NO: 101645 - DNA, 20 bp, Artificial Sequence
  MKO10101645_B_Nmd3
  gRNA
agacctgctttggaacacct

SEQ ID NO: 101646 - DNA, 20 bp, Artificial Sequence
  MKO10101646_B_Nmd3
  gRNA
ggaaggctgtgatccaagtc

SEQ ID NO: 101647 - DNA, 20 bp, Artificial Sequence
  MKO10101647_B_Nme1
  gRNA
tcaagtcttacctgccaact

SEQ ID NO: 101648 - DNA, 20 bp, Artificial Sequence
  MKO10101648_B_Nme1
  gRNA
acaagagctgtgcgcagaac

SEQ ID NO: 101649 - DNA, 20 bp, Artificial Sequence
  MKO10101649_B_Nme1
  gRNA
tctcgcccaccagcccccgc

SEQ ID NO: 101650 - DNA, 20 bp, Artificial Sequence
  MKO10101650_B_Nme2
  gRNA
tttcttaggaacatcattca

SEQ ID NO: 101651 - DNA, 20 bp, Artificial Sequence
  MKO10101651_B_Nme2
  gRNA
gtctggtgaaggtctgggag

SEQ ID NO: 101652 - DNA, 20 bp, Artificial Sequence
  MKO10101652_B_Nme2
  gRNA
ctgagaaagagatccatctg

SEQ ID NO: 101653 - DNA, 20 bp, Artificial Sequence
  MKO10101653_B_Nme3
  gRNA
atacatgagttctggccccg

SEQ ID NO: 101654 - DNA, 20 bp, Artificial Sequence
  MKO10101654_B_Nme3
  gRNA
gtaccgggcatggcgtcccc

SEQ ID NO: 101655 - DNA, 20 bp, Artificial Sequence
  MKO10101655_B_Nme3
  gRNA
ccgcacaggaatgtaattca

SEQ ID NO: 101656 - DNA, 20 bp, Artificial Sequence
  MKO10101656_B_Nme4
  gRNA
catccatgctagcgattctg

SEQ ID NO: 101657 - DNA, 20 bp, Artificial Sequence
  MKO10101657_B_Nme4
  gRNA
tgagtcggtgtgtcctatca

SEQ ID NO: 101658 - DNA, 20 bp, Artificial Sequence
  MKO10101658_B_Nme4
  gRNA
ggtctgggaaggccccaatg

SEQ ID NO: 101659 - DNA, 20 bp, Artificial Sequence
  MKO10101659_B_Nme5
  gRNA
catagctctggctcgctgat

SEQ ID NO: 101660 - DNA, 20 bp, Artificial Sequence
  MKO10101660_B_Nme5
  gRNA
atgtatcttacgtaagggtc

SEQ ID NO: 101661 - DNA, 20 bp, Artificial Sequence
  MKO10101661_B_Nme5
  gRNA
gctaatatcatagcaacaag

SEQ ID NO: 101662 - DNA, 20 bp, Artificial Sequence
  MKO10101662_B_Nme6
  gRNA
aaacttccacgaattgaatc

SEQ ID NO: 101663 - DNA, 20 bp, Artificial Sequence
  MKO10101663_B_Nme6
  gRNA
ctgacttcagtgaacagcgc

SEQ ID NO: 101664 - DNA, 20 bp, Artificial Sequence
  MKO10101664_B_Nme6
  gRNA
gaaggctgcaatctctctgc

SEQ ID NO: 101665 - DNA, 20 bp, Artificial Sequence
  MKO10101665_B_Nme7
  gRNA
catttcaacagatccgtctg

SEQ ID NO: 101666 - DNA, 20 bp, Artificial Sequence
  MKO10101666_B_Nme7
  gRNA
caaaccagatgcagtgtcaa

SEQ ID NO: 101667 - DNA, 20 bp, Artificial Sequence
  MKO10101667_B_Nme7
  gRNA
tccgaatgatgactctgaca

SEQ ID NO: 101668 - DNA, 20 bp, Artificial Sequence
  MKO10101668_B_Nme8
  gRNA
tgattgatgtttaccaagcc

SEQ ID NO: 101669 - DNA, 20 bp, Artificial Sequence
  MKO10101669_B_Nme8
  gRNA
gatgagatgttgctgaacaa

SEQ ID NO: 101670 - DNA, 20 bp, Artificial Sequence
  MKO10101670_B_Nme8
  gRNA
tgcaaggtccacaccaggct

SEQ ID NO: 101671 - DNA, 20 bp, Artificial Sequence
  MKO10101671_B_Nme9
  gRNA
caacctcgatcctcatcttt

SEQ ID NO: 101672 - DNA, 20 bp, Artificial Sequence
  MKO10101672_B_Nme9
  gRNA
aacttctgggtgcactcaag

SEQ ID NO: 101673 - DNA, 20 bp, Artificial Sequence
  MKO10101673_B_Nme9
  gRNA
tttgtcctaggctactgatg

SEQ ID NO: 101674 - DNA, 20 bp, Artificial Sequence
  MKO10101674_B_Nmi
  gRNA
cacccagtcccactaaacac

SEQ ID NO: 101675 - DNA, 20 bp, Artificial Sequence
  MKO10101675_B_Nmi
  gRNA
agcgctcatcacctttgaga

SEQ ID NO: 101676 - DNA, 20 bp, Artificial Sequence
  MKO10101676_B_Nmi
  gRNA
acaaattctctatgagctgc

SEQ ID NO: 101677 - DNA, 20 bp, Artificial Sequence
  MKO10101677_B_Nmnat1
  gRNA
agcccaccaccgaatcatca

SEQ ID NO: 101678 - DNA, 20 bp, Artificial Sequence
  MKO10101678_B_Nmnat1
  gRNA
ccccaagagcccaaaccaac

SEQ ID NO: 101679 - DNA, 20 bp, Artificial Sequence
  MKO10101679_B_Nmnat1
  gRNA
ccatcaccaacatgcacctc

SEQ ID NO: 101680 - DNA, 20 bp, Artificial Sequence
  MKO10101680_B_Nmnat2
  gRNA
ttaccttcatcaggtctcga

SEQ ID NO: 101681 - DNA, 20 bp, Artificial Sequence
  MKO10101681_B_Nmnat2
  gRNA
tccagaattccgactggatc

SEQ ID NO: 101682 - DNA, 20 bp, Artificial Sequence
  MKO10101682_B_Nmnat2
  gRNA
gcagacaacctgcagtgtgt

SEQ ID NO: 101683 - DNA, 20 bp, Artificial Sequence
  MKO10101683_B_Nmnat3
  gRNA
tcacccgtcaatgacagcta

SEQ ID NO: 101684 - DNA, 20 bp, Artificial Sequence
  MKO10101684_B_Nmnat3
  gRNA
agagaccacctacaccaaac

SEQ ID NO: 101685 - DNA, 20 bp, Artificial Sequence
  MKO10101685_B_Nmnat3
  gRNA
ccagccgggccatggccact

SEQ ID NO: 101686 - DNA, 20 bp, Artificial Sequence
  MKO10101686_B_Nmral1
  gRNA
acatcgggctcagtacctgc

SEQ ID NO: 101687 - DNA, 20 bp, Artificial Sequence
  MKO10101687_B_Nmral1
  gRNA
gcccgtgcattgctagaaga

SEQ ID NO: 101688 - DNA, 20 bp, Artificial Sequence
  MKO10101688_B_Nmral1
  gRNA
ttctgccctacgtactcttc

SEQ ID NO: 101689 - DNA, 20 bp, Artificial Sequence
  MKO10101689_B_Nmrk1
  gRNA
ctgagatatgacgctgcagt

SEQ ID NO: 101690 - DNA, 20 bp, Artificial Sequence
  MKO10101690_B_Nmrk1
  gRNA
ctcctcttacattcttcata

SEQ ID NO: 101691 - DNA, 20 bp, Artificial Sequence
  MKO10101691_B_Nmrk1
  gRNA
tcttggctcagtgtgacaaa

SEQ ID NO: 101692 - DNA, 20 bp, Artificial Sequence
  MKO10101692_B_Nmrk2
  gRNA
cagggtggtcttcccaccgt

SEQ ID NO: 101693 - DNA, 20 bp, Artificial Sequence
  MKO10101693_B_Nmrk2
  gRNA
tgagcgcgtgcaaacttgtg

SEQ ID NO: 101694 - DNA, 20 bp, Artificial Sequence
  MKO10101694_B_Nmrk2
  gRNA
cacaagtttgcacgcgctca

SEQ ID NO: 101695 - DNA, 20 bp, Artificial Sequence
  MKO10101695_B_Nms
  gRNA
atccacaatatccaagccgt

SEQ ID NO: 101696 - DNA, 20 bp, Artificial Sequence
  MKO10101696_B_Nms
  gRNA
aatacattctaaccaaccta

SEQ ID NO: 101697 - DNA, 20 bp, Artificial Sequence
  MKO10101697_B_Nms
  gRNA
tggcatactttctgaagcag

SEQ ID NO: 101698 - DNA, 20 bp, Artificial Sequence
  MKO10101698_B_Nmt1
  gRNA
cctcctgaacgagaactacg

SEQ ID NO: 101699 - DNA, 20 bp, Artificial Sequence
  MKO10101699_B_Nmt1
  gRNA
tgacaaagacaacattcgcc

SEQ ID NO: 101700 - DNA, 20 bp, Artificial Sequence
  MKO10101700_B_Nmt1
  gRNA
tccaggttaccttcacgggc

SEQ ID NO: 101701 - DNA, 20 bp, Artificial Sequence
  MKO10101701_B_Nmt2
  gRNA
gtcagatgcagagtcggact

SEQ ID NO: 101702 - DNA, 20 bp, Artificial Sequence
  MKO10101702_B_Nmt2
  gRNA
caaaacgcagataccagttt

SEQ ID NO: 101703 - DNA, 20 bp, Artificial Sequence
  MKO10101703_B_Nmt2
  gRNA
actgctgaatcttaatctcc

SEQ ID NO: 101704 - DNA, 20 bp, Artificial Sequence
  MKO10101704_B_Nmur1
  gRNA
ccgttgagtgtccatacacc

SEQ ID NO: 101705 - DNA, 20 bp, Artificial Sequence
  MKO10101705_B_Nmur1
  gRNA
ggatctgaaccttaccgatg

SEQ ID NO: 101706 - DNA, 20 bp, Artificial Sequence
  MKO10101706_B_Nmur1
  gRNA
tgcgcatagtcttgttgcgc

SEQ ID NO: 101707 - DNA, 20 bp, Artificial Sequence
  MKO10101707_B_Nmur2
  gRNA
ggtctttacctgataccacg

SEQ ID NO: 101708 - DNA, 20 bp, Artificial Sequence
  MKO10101708_B_Nmur2
  gRNA
gaggcccctgtgggcgatgc

SEQ ID NO: 101709 - DNA, 20 bp, Artificial Sequence
  MKO10101709_B_Nmur2
  gRNA
tgtgttcaacctcatccacg

SEQ ID NO: 101710 - DNA, 20 bp, Artificial Sequence
  MKO10101710_B_Nmu
  gRNA
cacaattgtagttcttgttc

SEQ ID NO: 101711 - DNA, 20 bp, Artificial Sequence
  MKO10101711_B_Nmu
  gRNA
agagccttacctgaggcttc

SEQ ID NO: 101712 - DNA, 20 bp, Artificial Sequence
  MKO10101712_B_Nmu
  gRNA
cctttctgtccattgattcc

SEQ ID NO: 101713 - DNA, 20 bp, Artificial Sequence
  MKO10101713_B_Nnat
  gRNA
tttcggaaccatggccgcag

SEQ ID NO: 101714 - DNA, 20 bp, Artificial Sequence
  MKO10101714_B_Nnat
  gRNA
catcttccgcgtgctgctgc

SEQ ID NO: 101715 - DNA, 20 bp, Artificial Sequence
  MKO10101715_B_Nnat
  gRNA
ggcaggtgctgggggagcgc

SEQ ID NO: 101716 - DNA, 20 bp, Artificial Sequence
  MKO10101716_B_Nnmt
  gRNA
agagacaatgatctccgtga

SEQ ID NO: 101717 - DNA, 20 bp, Artificial Sequence
  MKO10101717_B_Nnmt
  gRNA
atgacttagataagtgtcct

SEQ ID NO: 101718 - DNA, 20 bp, Artificial Sequence
  MKO10101718_B_Nnmt
  gRNA
ggaatctggcttcacctcca

SEQ ID NO: 101719 - DNA, 20 bp, Artificial Sequence
  MKO10101719_B_Nnt
  gRNA
acgaacgcttcgtactcacc

SEQ ID NO: 101720 - DNA, 20 bp, Artificial Sequence
  MKO10101720_B_Nnt
  gRNA
gttatacataccttcgcagg

SEQ ID NO: 101721 - DNA, 20 bp, Artificial Sequence
  MKO10101721_B_Nnt
  gRNA
ttcaatgttgtcgtggaatc

SEQ ID NO: 101722 - DNA, 20 bp, Artificial Sequence
  MKO10101722_B_Noa1
  gRNA
agaagatgcgaccaaagctg

SEQ ID NO: 101723 - DNA, 20 bp, Artificial Sequence
  MKO10101723_B_Noa1
  gRNA
ttacctgtaggaaatctatt

SEQ ID NO: 101724 - DNA, 20 bp, Artificial Sequence
  MKO10101724_B_Noa1
  gRNA
gctctgtatgagaaacatgc

SEQ ID NO: 101725 - DNA, 20 bp, Artificial Sequence
  MKO10101725_B_Nob1
  gRNA
tctcgggcccatcagctgcg

SEQ ID NO: 101726 - DNA, 20 bp, Artificial Sequence
  MKO10101726_B_Nob1
  gRNA
gctggctctgacttaccagc

SEQ ID NO: 101727 - DNA, 20 bp, Artificial Sequence
  MKO10101727_B_Nob1
  gRNA
cctctctgccacagatatcc

SEQ ID NO: 101728 - DNA, 20 bp, Artificial Sequence
  MKO10101728_B_Nobox
  gRNA
gggaccacatgcggctgctg

SEQ ID NO: 101729 - DNA, 20 bp, Artificial Sequence
  MKO10101729_B_Nobox
  gRNA
ggtaaccccccaaagaatca

SEQ ID NO: 101730 - DNA, 20 bp, Artificial Sequence
  MKO10101730_B_Nobox
  gRNA
acgccatgagatttcccaga

SEQ ID NO: 101731 - DNA, 20 bp, Artificial Sequence
  MKO10101731_B_Noc2l
  gRNA
cgcgaggagccgcgtggaac

SEQ ID NO: 101732 - DNA, 20 bp, Artificial Sequence
  MKO10101732_B_Noc2l
  gRNA
ccaggaagcgagcgaaacag

SEQ ID NO: 101733 - DNA, 20 bp, Artificial Sequence
  MKO10101733_B_Noc2l
  gRNA
ggtttcacctccagcgtgtc

SEQ ID NO: 101734 - DNA, 20 bp, Artificial Sequence
  MKO10101734_B_Noc3l
  gRNA
gattcacctgctccctatca

SEQ ID NO: 101735 - DNA, 20 bp, Artificial Sequence
  MKO10101735_B_Noc3l
  gRNA
ggatgacctacagctgatga

SEQ ID NO: 101736 - DNA, 20 bp, Artificial Sequence
  MKO10101736_B_Noc3l
  gRNA
cactgacgtgcagcaagaag

SEQ ID NO: 101737 - DNA, 20 bp, Artificial Sequence
  MKO10101737_B_Noc4l
  gRNA
cgcacgtgcagccgactctt

SEQ ID NO: 101738 - DNA, 20 bp, Artificial Sequence
  MKO10101738_B_Noc4l
  gRNA
ggcccgggccatgatgctag

SEQ ID NO: 101739 - DNA, 20 bp, Artificial Sequence
  MKO10101739_B_Noc4l
  gRNA
caaacttcatgagtgtcttg

SEQ ID NO: 101740 - DNA, 20 bp, Artificial Sequence
  MKO10101740_B_Nod1
  gRNA
ggtccgaaagatccttgacc

SEQ ID NO: 101741 - DNA, 20 bp, Artificial Sequence
  MKO10101741_B_Nod1
  gRNA
tggctccgatatcagttatc

SEQ ID NO: 101742 - DNA, 20 bp, Artificial Sequence
  MKO10101742_B_Nod1
  gRNA
gaacgtcacgatcttatact

SEQ ID NO: 101743 - DNA, 20 bp, Artificial Sequence
  MKO10101743_B_Nod2
  gRNA
gagcacactcaaccagcgtg

SEQ ID NO: 101744 - DNA, 20 bp, Artificial Sequence
  MKO10101744_B_Nod2
  gRNA
aaggctgcttgatctcgctg

SEQ ID NO: 101745 - DNA, 20 bp, Artificial Sequence
  MKO10101745_B_Nod2
  gRNA
gataacaatatctcagaccg

SEQ ID NO: 101746 - DNA, 20 bp, Artificial Sequence
  MKO10101746_B_Nodal
  gRNA
gccctcgtcaccgtcccctc

SEQ ID NO: 101747 - DNA, 20 bp, Artificial Sequence
  MKO10101747_B_Nodal
  gRNA
cagtcagcggggtcccgctc

SEQ ID NO: 101748 - DNA, 20 bp, Artificial Sequence
  MKO10101748_B_Nodal
  gRNA
cttcacgggggcacagcacg

SEQ ID NO: 101749 - DNA, 20 bp, Artificial Sequence
  MKO10101749_B_Nog
  gRNA
tcattccacgcgtacagcac

SEQ ID NO: 101750 - DNA, 20 bp, Artificial Sequence
  MKO10101750_B_Nog
  gRNA
agcgccaccgcagcaccgtg

SEQ ID NO: 101751 - DNA, 20 bp, Artificial Sequence
  MKO10101751_B_Nog
  gRNA
tctgcccggtgctgtacgcg

SEQ ID NO: 101752 - DNA, 20 bp, Artificial Sequence
  MKO10101752_B_Nol10
  gRNA
tttatcagatgactattcaa

SEQ ID NO: 101753 - DNA, 20 bp, Artificial Sequence
  MKO10101753_B_Nol10
  gRNA
ccaagcacctttcaaacttc

SEQ ID NO: 101754 - DNA, 20 bp, Artificial Sequence
  MKO10101754_B_Nol10
  gRNA
tctcgtagtggctttctgac

SEQ ID NO: 101755 - DNA, 20 bp, Artificial Sequence
  MKO10101755_B_Nol11
  gRNA
tattatggtacatgaccata

SEQ ID NO: 101756 - DNA, 20 bp, Artificial Sequence
  MKO10101756_B_Nol11
  gRNA
ggtttctgaccagaaaccgt

SEQ ID NO: 101757 - DNA, 20 bp, Artificial Sequence
  MKO10101757_B_Nol11
  gRNA
ttccgaggaggcgctgctcg

SEQ ID NO: 101758 - DNA, 20 bp, Artificial Sequence
  MKO10101758_B_Nol12
  gRNA
ctctcaggggcccggctgct

SEQ ID NO: 101759 - DNA, 20 bp, Artificial Sequence
  MKO10101759_B_Nol12
  gRNA
gtttctctagcaaggggacc

SEQ ID NO: 101760 - DNA, 20 bp, Artificial Sequence
  MKO10101760_B_Nol12
  gRNA
gggatgacatctcctcttcc

SEQ ID NO: 101761 - DNA, 20 bp, Artificial Sequence
  MKO10101761_B_Nol3
  gRNA
aagggtcatagctgcggttc

SEQ ID NO: 101762 - DNA, 20 bp, Artificial Sequence
  MKO10101762_B_Nol3
  gRNA
agcagaaatgggcaacgtgc

SEQ ID NO: 101763 - DNA, 20 bp, Artificial Sequence
  MKO10101763_B_Nol3
  gRNA
ctaccagccgtttccgttcc

SEQ ID NO: 101764 - DNA, 20 bp, Artificial Sequence
  MKO10101764_B_Nol4
  gRNA
ttcatgtacgccattgtgat

SEQ ID NO: 101765 - DNA, 20 bp, Artificial Sequence
  MKO10101765_B_Nol4
  gRNA
catgttgtagtcgatcatgc

SEQ ID NO: 101766 - DNA, 20 bp, Artificial Sequence
  MKO10101766_B_Nol4
  gRNA
catcatctattccatgcatg

SEQ ID NO: 101767 - DNA, 20 bp, Artificial Sequence
  MKO10101767_B_Nol6
  gRNA
acgtacttgtaaacgaagca

SEQ ID NO: 101768 - DNA, 20 bp, Artificial Sequence
  MKO10101768_B_Nol6
  gRNA
ccaagtgccctatgccgtga

SEQ ID NO: 101769 - DNA, 20 bp, Artificial Sequence
  MKO10101769_B_Nol6
  gRNA
aggcactttctggatccgct

SEQ ID NO: 101770 - DNA, 20 bp, Artificial Sequence
  MKO10101770_B_Nol7
  gRNA
gtacagaaagtgcagtctgt

SEQ ID NO: 101771 - DNA, 20 bp, Artificial Sequence
  MKO10101771_B_Nol7
  gRNA
agctgctctaatacagcatc

SEQ ID NO: 101772 - DNA, 20 bp, Artificial Sequence
  MKO10101772_B_Nol7
  gRNA
aaaagtgaacagcatgcaaa

SEQ ID NO: 101773 - DNA, 20 bp, Artificial Sequence
  MKO10101773_B_Nol8
  gRNA
ttccaggcacagccttcata

SEQ ID NO: 101774 - DNA, 20 bp, Artificial Sequence
  MKO10101774_B_Nol8
  gRNA
taacattcaaataacagaag

SEQ ID NO: 101775 - DNA, 20 bp, Artificial Sequence
  MKO10101775_B_Nol8
  gRNA
agaaatgaagcgcctctttg

SEQ ID NO: 101776 - DNA, 20 bp, Artificial Sequence
  MKO10101776_B_Nol9
  gRNA
aactcagaattgacccgaac

SEQ ID NO: 101777 - DNA, 20 bp, Artificial Sequence
  MKO10101777_B_Nol9
  gRNA
tgcgtacggaaccccattga

SEQ ID NO: 101778 - DNA, 20 bp, Artificial Sequence
  MKO10101778_B_Nol9
  gRNA
acacgctgactaactcttcc

SEQ ID NO: 101779 - DNA, 20 bp, Artificial Sequence
  MKO10101779_B_Nolc1
  gRNA
cgccaatgcctcgtccctct

SEQ ID NO: 101780 - DNA, 20 bp, Artificial Sequence
  MKO10101780_B_Nolc1
  gRNA
cagtagtgaagaatccagtg

SEQ ID NO: 101781 - DNA, 20 bp, Artificial Sequence
  MKO10101781_B_Nolc1
  gRNA
ggacgaggacaaaaaagccc

SEQ ID NO: 101782 - DNA, 20 bp, Artificial Sequence
  MKO10101782_B_Nom1
  gRNA
agatgacgccttgtcactta

SEQ ID NO: 101783 - DNA, 20 bp, Artificial Sequence
  MKO10101783_B_Nom1
  gRNA
ttctataagtgggcagctag

SEQ ID NO: 101784 - DNA, 20 bp, Artificial Sequence
  MKO10101784_B_Nom1
  gRNA
ccttaaggtacggtttatgt

SEQ ID NO: 101785 - DNA, 20 bp, Artificial Sequence
  MKO10101785_B_Nomo1
  gRNA
atccactcgcagctccacgt

SEQ ID NO: 101786 - DNA, 20 bp, Artificial Sequence
  MKO10101786_B_Nomo1
  gRNA
caggctgcgtgactgtagac

SEQ ID NO: 101787 - DNA, 20 bp, Artificial Sequence
  MKO10101787_B_Nomo1
  gRNA
tatgatccccttgtatgata

SEQ ID NO: 101788 - DNA, 20 bp, Artificial Sequence
  MKO10101788_B_Nono
  gRNA
ggctgcacgtcatgagcacc

SEQ ID NO: 101789 - DNA, 20 bp, Artificial Sequence
  MKO10101789_B_Nono
  gRNA
tactcatactcaaaggagcc

SEQ ID NO: 101790 - DNA, 20 bp, Artificial Sequence
  MKO10101790_B_Nono
  gRNA
atttcctcggcctgtgactg

SEQ ID NO: 101791 - DNA, 20 bp, Artificial Sequence
  MKO10101791_B_Nop10
  gRNA
ggagaaccgagcaggatggg

SEQ ID NO: 101792 - DNA, 20 bp, Artificial Sequence
  MKO10101792_B_Nop10
  gRNA
ccaatattacctcaacgagc

SEQ ID NO: 101793 - DNA, 20 bp, Artificial Sequence
  MKO10101793_B_Nop10
  gRNA
tgagcagaaatttgacccta

SEQ ID NO: 101794 - DNA, 20 bp, Artificial Sequence
  MKO10101794_B_Nop14
  gRNA
acttacctgacaatgccccc

SEQ ID NO: 101795 - DNA, 20 bp, Artificial Sequence
  MKO10101795_B_Nop14
  gRNA
gatgaagaattgactcatta

SEQ ID NO: 101796 - DNA, 20 bp, Artificial Sequence
  MKO10101796_B_Nop14
  gRNA
gaactgactgcttcccactt

SEQ ID NO: 101797 - DNA, 20 bp, Artificial Sequence
  MKO10101797_B_Nop16
  gRNA
actctgcagagaatcgatga

SEQ ID NO: 101798 - DNA, 20 bp, Artificial Sequence
  MKO10101798_B_Nop16
  gRNA
ctccgccaggttctgccgca

SEQ ID NO: 101799 - DNA, 20 bp, Artificial Sequence
  MKO10101799_B_Nop16
  gRNA
catggtagagaatcacgggg

SEQ ID NO: 101800 - DNA, 20 bp, Artificial Sequence
  MKO10101800_B_Nop2
  gRNA
actcttctcaggagcagtcc

SEQ ID NO: 101801 - DNA, 20 bp, Artificial Sequence
  MKO10101801_B_Nop2
  gRNA
attctttcagggcagccaag

SEQ ID NO: 101802 - DNA, 20 bp, Artificial Sequence
  MKO10101802_B_Nop2
  gRNA
taacctttggataactctcc

SEQ ID NO: 101803 - DNA, 20 bp, Artificial Sequence
  MKO10101803_B_Nop56
  gRNA
ccaccagacgaacgacattg

SEQ ID NO: 101804 - DNA, 20 bp, Artificial Sequence
  MKO10101804_B_Nop56
  gRNA
ctacgcgctgttggcgctga

SEQ ID NO: 101805 - DNA, 20 bp, Artificial Sequence
  MKO10101805_B_Nop56
  gRNA
gtgatagctgagatccttcg

SEQ ID NO: 101806 - DNA, 20 bp, Artificial Sequence
  MKO10101806_B_Nop58
  gRNA
ttagcatcagcgacagccag

SEQ ID NO: 101807 - DNA, 20 bp, Artificial Sequence
  MKO10101807_B_Nop58
  gRNA
gaatgagaagaaacttcaag

SEQ ID NO: 101808 - DNA, 20 bp, Artificial Sequence
  MKO10101808_B_Nop58
  gRNA
atctcacgtggttctacccc

SEQ ID NO: 101809 - DNA, 20 bp, Artificial Sequence
  MKO10101809_B_Nop9
  gRNA
gtcctgaaggcgattcaaga

SEQ ID NO: 101810 - DNA, 20 bp, Artificial Sequence
  MKO10101810_B_Nop9
  gRNA
gcatccagcaagcgctgcaa

SEQ ID NO: 101811 - DNA, 20 bp, Artificial Sequence
  MKO10101811_B_Nop9
  gRNA
tcgtctgatcccgaagaaac

SEQ ID NO: 101812 - DNA, 20 bp, Artificial Sequence
  MKO10101812_B_Nos1ap
  gRNA
tggctgccatgcgcagaatc

SEQ ID NO: 101813 - DNA, 20 bp, Artificial Sequence
  MKO10101813_B_Nos1ap
  gRNA
gttacatctgaagatattgc

SEQ ID NO: 101814 - DNA, 20 bp, Artificial Sequence
  MKO10101814_B_Nos1ap
  gRNA
ttcagctatattgccagaga

SEQ ID NO: 101815 - DNA, 20 bp, Artificial Sequence
  MKO10101815_B_Nos1
  gRNA
gtcagaagatgtccgcacca

SEQ ID NO: 101816 - DNA, 20 bp, Artificial Sequence
  MKO10101816_B_Nos1
  gRNA
ctttgtgcagtttgccgtcg

SEQ ID NO: 101817 - DNA, 20 bp, Artificial Sequence
  MKO10101817_B_Nos1
  gRNA
cctgcacctgaagagcacgc

SEQ ID NO: 101818 - DNA, 20 bp, Artificial Sequence
  MKO10101818_B_Nos2
  gRNA
gagttcatcaaccagtatta

SEQ ID NO: 101819 - DNA, 20 bp, Artificial Sequence
  MKO10101819_B_Nos2
  gRNA
aaccccaagagtttgaccag

SEQ ID NO: 101820 - DNA, 20 bp, Artificial Sequence
  MKO10101820_B_Nos2
  gRNA
ttcttaccgatgtggccttg

SEQ ID NO: 101821 - DNA, 20 bp, Artificial Sequence
  MKO10101821_B_Nos3
  gRNA
acttcccaattctttactcg

SEQ ID NO: 101822 - DNA, 20 bp, Artificial Sequence
  MKO10101822_B_Nos3
  gRNA
ctgtacctcaagacgctgct

SEQ ID NO: 101823 - DNA, 20 bp, Artificial Sequence
  MKO10101823_B_Nos3
  gRNA
agtactgattgatgaagtcc

SEQ ID NO: 101824 - DNA, 20 bp, Artificial Sequence
  MKO10101824_B_Nosip
  gRNA
ggatcgcttccctctcatac

SEQ ID NO: 101825 - DNA, 20 bp, Artificial Sequence
  MKO10101825_B_Nosip
  gRNA
cagacggctacctgtatgag

SEQ ID NO: 101826 - DNA, 20 bp, Artificial Sequence
  MKO10101826_B_Nosip
  gRNA
cgctcctcgctgcttctcat

SEQ ID NO: 101827 - DNA, 20 bp, Artificial Sequence
  MKO10101827_B_Nostrin
  gRNA
ctgaaagagtttgcccaaca

SEQ ID NO: 101828 - DNA, 20 bp, Artificial Sequence
  MKO10101828_B_Nostrin
  gRNA
tgcagaaattgtctccatgt

SEQ ID NO: 101829 - DNA, 20 bp, Artificial Sequence
  MKO10101829_B_Nostrin
  gRNA
acttggcaaagcaattgagt

SEQ ID NO: 101830 - DNA, 20 bp, Artificial Sequence
  MKO10101830_B_Notch1
  gRNA
cacacaggcttcagtgccgt

SEQ ID NO: 101831 - DNA, 20 bp, Artificial Sequence
  MKO10101831_B_Notch1
  gRNA
acgtgccacgttgtggacca

SEQ ID NO: 101832 - DNA, 20 bp, Artificial Sequence
  MKO10101832_B_Notch1
  gRNA
gcctgccgtgccacccatac

SEQ ID NO: 101833 - DNA, 20 bp, Artificial Sequence
  MKO10101833_B_Notch2
  gRNA
gcaccctcgccctgcgtcaa

SEQ ID NO: 101834 - DNA, 20 bp, Artificial Sequence
  MKO10101834_B_Notch2
  gRNA
cattacctgtgaagccgact

SEQ ID NO: 101835 - DNA, 20 bp, Artificial Sequence
  MKO10101835_B_Notch2
  gRNA
attgccgctgtccccctcag

SEQ ID NO: 101836 - DNA, 20 bp, Artificial Sequence
  MKO10101836_B_Notch3
  gRNA
ggtgggtgagcggtgccagc

SEQ ID NO: 101837 - DNA, 20 bp, Artificial Sequence
  MKO10101837_B_Notch3
  gRNA
aggcgtttgccagagttcag

SEQ ID NO: 101838 - DNA, 20 bp, Artificial Sequence
  MKO10101838_B_Notch3
  gRNA
cctggacatcggtgtctcaa

SEQ ID NO: 101839 - DNA, 20 bp, Artificial Sequence
  MKO10101839_B_Notch4
  gRNA
cgacatcaacgagtgcttcc

SEQ ID NO: 101840 - DNA, 20 bp, Artificial Sequence
  MKO10101840_B_Notch4
  gRNA
cctgacaggtttcacggggc

SEQ ID NO: 101841 - DNA, 20 bp, Artificial Sequence
  MKO10101841_B_Notch4
  gRNA
cttgtccccgagatagcctc

SEQ ID NO: 101842 - DNA, 20 bp, Artificial Sequence
  MKO10101842_B_Noto
  gRNA
ctctcacctgattctccgtc

SEQ ID NO: 101843 - DNA, 20 bp, Artificial Sequence
  MKO10101843_B_Noto
  gRNA
cccgtggtcccgaaggtcca

SEQ ID NO: 101844 - DNA, 20 bp, Artificial Sequence
  MKO10101844_B_Noto
  gRNA
tccaattataggtgaggatc

SEQ ID NO: 101845 - DNA, 20 bp, Artificial Sequence
  MKO10101845_B_Notum
  gRNA
cttactgctccagtgacgtt

SEQ ID NO: 101846 - DNA, 20 bp, Artificial Sequence
  MKO10101846_B_Notum
  gRNA
agtccaagggcagtcggcgg

SEQ ID NO: 101847 - DNA, 20 bp, Artificial Sequence
  MKO10101847_B_Notum
  gRNA
agccccactccaaacgtcac

SEQ ID NO: 101848 - DNA, 20 bp, Artificial Sequence
  MKO10101848_B_Nova1
  gRNA
gaagcgctgaacgcagttca

SEQ ID NO: 101849 - DNA, 20 bp, Artificial Sequence
  MKO10101849_B_Nova1
  gRNA
cagcacggctggtggaacgg

SEQ ID NO: 101850 - DNA, 20 bp, Artificial Sequence
  MKO10101850_B_Nova1
  gRNA
gaccacctccagagccaatc

SEQ ID NO: 101851 - DNA, 20 bp, Artificial Sequence
  MKO10101851_B_Nova2
  gRNA
acccctcgagacgccccccg

SEQ ID NO: 101852 - DNA, 20 bp, Artificial Sequence
  MKO10101852_B_Nova2
  gRNA
acctttgccgatgattgagc

SEQ ID NO: 101853 - DNA, 20 bp, Artificial Sequence
  MKO10101853_B_Nova2
  gRNA
ctcatccccagctacgccgc

SEQ ID NO: 101854 - DNA, 20 bp, Artificial Sequence
  MKO10101854_B_Nov
  gRNA
agactcgtctctgcatcgtt

SEQ ID NO: 101855 - DNA, 20 bp, Artificial Sequence
  MKO10101855_B_Nov
  gRNA
ggcgcaggtcggtgatatac

SEQ ID NO: 101856 - DNA, 20 bp, Artificial Sequence
  MKO10101856_B_Nov
  gRNA
tagtgcaattctcgaactgt

SEQ ID NO: 101857 - DNA, 20 bp, Artificial Sequence
  MKO10101857_B_Nox1
  gRNA
tcatatatgccaccagctta

SEQ ID NO: 101858 - DNA, 20 bp, Artificial Sequence
  MKO10101858_B_Nox1
  gRNA
caacctcaccttccataagc

SEQ ID NO: 101859 - DNA, 20 bp, Artificial Sequence
  MKO10101859_B_Nox1
  gRNA
aaaaatgttcagccccaacc

SEQ ID NO: 101860 - DNA, 20 bp, Artificial Sequence
  MKO10101860_B_Nox3
  gRNA
tgcccgggcccatgccaatg

SEQ ID NO: 101861 - DNA, 20 bp, Artificial Sequence
  MKO10101861_B_Nox3
  gRNA
atggatagtccgcattggca

SEQ ID NO: 101862 - DNA, 20 bp, Artificial Sequence
  MKO10101862_B_Nox3
  gRNA
atccctagttatccacattg

SEQ ID NO: 101863 - DNA, 20 bp, Artificial Sequence
  MKO10101863_B_Nox4
  gRNA
acagtcctggcttatcttcg

SEQ ID NO: 101864 - DNA, 20 bp, Artificial Sequence
  MKO10101864_B_Nox4
  gRNA
ctgtccggcacataggtaaa

SEQ ID NO: 101865 - DNA, 20 bp, Artificial Sequence
  MKO10101865_B_Nox4
  gRNA
aagactctacacatcacatg

SEQ ID NO: 101866 - DNA, 20 bp, Artificial Sequence
  MKO10101866_B_Noxa1
  gRNA
gattgcctccactagagtat

SEQ ID NO: 101867 - DNA, 20 bp, Artificial Sequence
  MKO10101867_B_Noxa1
  gRNA
atttgaccaagcagtgacta

SEQ ID NO: 101868 - DNA, 20 bp, Artificial Sequence
  MKO10101868_B_Noxa1
  gRNA
ggcaatctccaaatggccag

SEQ ID NO: 101869 - DNA, 20 bp, Artificial Sequence
  MKO10101869_B_Noxo1
  gRNA
atattactacgacatccttc

SEQ ID NO: 101870 - DNA, 20 bp, Artificial Sequence
  MKO10101870_B_Noxo1
  gRNA
catttgccttctccgtgtgc

SEQ ID NO: 101871 - DNA, 20 bp, Artificial Sequence
  MKO10101871_B_Noxo1
  gRNA
ggtgatcctgcctacaccag

SEQ ID NO: 101872 - DNA, 20 bp, Artificial Sequence
  MKO10101872_B_Noxred1
  gRNA
aaacacgctccttgacgtac

SEQ ID NO: 101873 - DNA, 20 bp, Artificial Sequence
  MKO10101873_B_Noxred1
  gRNA
cagcgttgtcatagacgcac

SEQ ID NO: 101874 - DNA, 20 bp, Artificial Sequence
  MKO10101874_B_Noxred1
  gRNA
tcatcaatgcctgtacgtca

SEQ ID NO: 101875 - DNA, 20 bp, Artificial Sequence
  MKO10101875_B_Npas1
  gRNA
gaagtcttcgagcaacacct

SEQ ID NO: 101876 - DNA, 20 bp, Artificial Sequence
  MKO10101876_B_Npas1
  gRNA
cttcgtgttcgctttgaacc

SEQ ID NO: 101877 - DNA, 20 bp, Artificial Sequence
  MKO10101877_B_Npas1
  gRNA
cccgcaatccaagttgctct

SEQ ID NO: 101878 - DNA, 20 bp, Artificial Sequence
  MKO10101878_B_Npas2
  gRNA
tctcttgcaggcggatgtca

SEQ ID NO: 101879 - DNA, 20 bp, Artificial Sequence
  MKO10101879_B_Npas2
  gRNA
cttctcagacttatttcgag

SEQ ID NO: 101880 - DNA, 20 bp, Artificial Sequence
  MKO10101880_B_Npas2
  gRNA
aactcaccggtaaatgtcca

SEQ ID NO: 101881 - DNA, 20 bp, Artificial Sequence
  MKO10101881_B_Npas3
  gRNA
catcaccagccagctcgaca

SEQ ID NO: 101882 - DNA, 20 bp, Artificial Sequence
  MKO10101882_B_Npas3
  gRNA
ttagaggtacctgcaaaatg

SEQ ID NO: 101883 - DNA, 20 bp, Artificial Sequence
  MKO10101883_B_Npas3
  gRNA
gtgcaaatacgaagccatcc

SEQ ID NO: 101884 - DNA, 20 bp, Artificial Sequence
  MKO10101884_B_Npas4
  gRNA
gttcgctgcgctcaaagccc

SEQ ID NO: 101885 - DNA, 20 bp, Artificial Sequence
  MKO10101885_B_Npas4
  gRNA
actgctacaccccgaggacc

SEQ ID NO: 101886 - DNA, 20 bp, Artificial Sequence
  MKO10101886_B_Npas4
  gRNA
tcaccctacaggcactcctt

SEQ ID NO: 101887 - DNA, 20 bp, Artificial Sequence
  MKO10101887_B_Npat
  gRNA
gcagaacactgtactgatga

SEQ ID NO: 101888 - DNA, 20 bp, Artificial Sequence
  MKO10101888_B_Npat
  gRNA
taaataccaacctctctgat

SEQ ID NO: 101889 - DNA, 20 bp, Artificial Sequence
  MKO10101889_B_Npat
  gRNA
aggagcatgcacagttctcc

SEQ ID NO: 101890 - DNA, 20 bp, Artificial Sequence
  MKO10101890_B_Npbwr1
  gRNA
caaattaccccgtagacgac

SEQ ID NO: 101891 - DNA, 20 bp, Artificial Sequence
  MKO10101891_B_Npbwr1
  gRNA
ccttggcgtggctatctagc

SEQ ID NO: 101892 - DNA, 20 bp, Artificial Sequence
  MKO10101892_B_Npbwr1
  gRNA
catgagcgccgaccgatacc

SEQ ID NO: 101893 - DNA, 20 bp, Artificial Sequence
  MKO10101893_B_Npb
  gRNA
agaagacgtccgctttacac

SEQ ID NO: 101894 - DNA, 20 bp, Artificial Sequence
  MKO10101894_B_Npb
  gRNA
cgcatctctaaattgcgcag

SEQ ID NO: 101895 - DNA, 20 bp, Artificial Sequence
  MKO10101895_B_Npb
  gRNA
cgcggcccaccgagtagtgg

SEQ ID NO: 101896 - DNA, 20 bp, Artificial Sequence
  MKO10101896_B_Npc1l1
  gRNA
ccccgctgatgatccccgca

SEQ ID NO: 101897 - DNA, 20 bp, Artificial Sequence
  MKO10101897_B_Npc1l1
  gRNA
gtgccatctttgtacgtgag

SEQ ID NO: 101898 - DNA, 20 bp, Artificial Sequence
  MKO10101898_B_Npc1l1
  gRNA
caccgcaactcggctccatc

SEQ ID NO: 101899 - DNA, 20 bp, Artificial Sequence
  MKO10101899_B_Npc1
  gRNA
ggagagtgtggaattgcgac

SEQ ID NO: 101900 - DNA, 20 bp, Artificial Sequence
  MKO10101900_B_Npc1
  gRNA
tctgaatgtgacagcaactg

SEQ ID NO: 101901 - DNA, 20 bp, Artificial Sequence
  MKO10101901_B_Npc1
  gRNA
cctacctggacaggaactgc

SEQ ID NO: 101902 - DNA, 20 bp, Artificial Sequence
  MKO10101902_B_Npc2
  gRNA
gtcaacatcacctttaccag

SEQ ID NO: 101903 - DNA, 20 bp, Artificial Sequence
  MKO10101903_B_Npc2
  gRNA
ggcggagcccctgcacttca

SEQ ID NO: 101904 - DNA, 20 bp, Artificial Sequence
  MKO10101904_B_Npc2
  gRNA
gcctagcttgtgatctgaac

SEQ ID NO: 101905 - DNA, 20 bp, Artificial Sequence
  MKO10101905_B_Npcd
  gRNA
tccaactcacttctgctcga

SEQ ID NO: 101906 - DNA, 20 bp, Artificial Sequence
  MKO10101906_B_Npcd
  gRNA
gactcggcaggtacagcact

SEQ ID NO: 101907 - DNA, 20 bp, Artificial Sequence
  MKO10101907_B_Npcd
  gRNA
gaaagggaacgtgagctgta

SEQ ID NO: 101908 - DNA, 20 bp, Artificial Sequence
  MKO10101908_B_Npdc1
  gRNA
gcctcttcagtgcacaatcc

SEQ ID NO: 101909 - DNA, 20 bp, Artificial Sequence
  MKO10101909_B_Npdc1
  gRNA
ggagatcgattctctggccc

SEQ ID NO: 101910 - DNA, 20 bp, Artificial Sequence
  MKO10101910_B_Npdc1
  gRNA
gcctggattgtgcactgaag

SEQ ID NO: 101911 - DNA, 20 bp, Artificial Sequence
  MKO10101911_B_Npepl1
  gRNA
ctgccactgtggcgcagttc

SEQ ID NO: 101912 - DNA, 20 bp, Artificial Sequence
  MKO10101912_B_Npepl1
  gRNA
tgatgaagtgggctgcggac

SEQ ID NO: 101913 - DNA, 20 bp, Artificial Sequence
  MKO10101913_B_Npepl1
  gRNA
ccacaatgcgagctgctagt

SEQ ID NO: 101914 - DNA, 20 bp, Artificial Sequence
  MKO10101914_B_Npepps
  gRNA
gatagttaaatcctgtcgca

SEQ ID NO: 101915 - DNA, 20 bp, Artificial Sequence
  MKO10101915_B_Npepps
  gRNA
agcagatacaccacccctgc

SEQ ID NO: 101916 - DNA, 20 bp, Artificial Sequence
  MKO10101916_B_Npepps
  gRNA
cagagtggctttatcaaata

SEQ ID NO: 101917 - DNA, 20 bp, Artificial Sequence
  MKO10101917_B_Npffr1
  gRNA
gagtgatgctgaaaccgccc

SEQ ID NO: 101918 - DNA, 20 bp, Artificial Sequence
  MKO10101918_B_Npffr1
  gRNA
tgtgaaaaccgacgcagaca

SEQ ID NO: 101919 - DNA, 20 bp, Artificial Sequence
  MKO10101919_B_Npffr1
  gRNA
ttctcacctctccacggcaa

SEQ ID NO: 101920 - DNA, 20 bp, Artificial Sequence
  MKO10101920_B_Npffr2
  gRNA
ctatgttgcgtttcgctctc

SEQ ID NO: 101921 - DNA, 20 bp, Artificial Sequence
  MKO10101921_B_Npffr2
  gRNA
ttgcacatgctgcttccgaa

SEQ ID NO: 101922 - DNA, 20 bp, Artificial Sequence
  MKO10101922_B_Npffr2
  gRNA
ccccatgcaggatggccatt

SEQ ID NO: 101923 - DNA, 20 bp, Artificial Sequence
  MKO10101923_B_Npff
  gRNA
cctctttcgtgttctgctcc

SEQ ID NO: 101924 - DNA, 20 bp, Artificial Sequence
  MKO10101924_B_Npff
  gRNA
gttcactcactgcaaagact

SEQ ID NO: 101925 - DNA, 20 bp, Artificial Sequence
  MKO10101925_B_Npff
  gRNA
atggcagcatggactccaag

SEQ ID NO: 101926 - DNA, 20 bp, Artificial Sequence
  MKO10101926_B_Nphp1
  gRNA
tctgttgtaggttgatagtt

SEQ ID NO: 101927 - DNA, 20 bp, Artificial Sequence
  MKO10101927_B_Nphp1
  gRNA
tagatgtatccagttaaaac

SEQ ID NO: 101928 - DNA, 20 bp, Artificial Sequence
  MKO10101928_B_Nphp1
  gRNA
gacttcgctgctcagcagac

SEQ ID NO: 101929 - DNA, 20 bp, Artificial Sequence
  MKO10101929_B_Nphp3
  gRNA
acctcggttgatgtttgcaa

SEQ ID NO: 101930 - DNA, 20 bp, Artificial Sequence
  MKO10101930_B_Nphp3
  gRNA
agatgaaacacagcccgaaa

SEQ ID NO: 101931 - DNA, 20 bp, Artificial Sequence
  MKO10101931_B_Nphp3
  gRNA
aaatgtgaccgctctctcca

SEQ ID NO: 101932 - DNA, 20 bp, Artificial Sequence
  MKO10101932_B_Nphp4
  gRNA
ttcaggttgaggctgtatca

SEQ ID NO: 101933 - DNA, 20 bp, Artificial Sequence
  MKO10101933_B_Nphp4
  gRNA
caagctccgacagcatgtct

SEQ ID NO: 101934 - DNA, 20 bp, Artificial Sequence
  MKO10101934_B_Nphp4
  gRNA
agcttacccgtgtccccatg

SEQ ID NO: 101935 - DNA, 20 bp, Artificial Sequence
  MKO10101935_B_Nphs1
  gRNA
gttgtcccaaggtggacgca

SEQ ID NO: 101936 - DNA, 20 bp, Artificial Sequence
  MKO10101936_B_Nphs1
  gRNA
ctctgatccctcattcacgc

SEQ ID NO: 101937 - DNA, 20 bp, Artificial Sequence
  MKO10101937_B_Nphs1
  gRNA
cgtcagggcccccggcagtg

SEQ ID NO: 101938 - DNA, 20 bp, Artificial Sequence
  MKO10101938_B_Nphs2
  gRNA
tccctaggcatcaagccctc

SEQ ID NO: 101939 - DNA, 20 bp, Artificial Sequence
  MKO10101939_B_Nphs2
  gRNA
acggagatcaaccttgtgat

SEQ ID NO: 101940 - DNA, 20 bp, Artificial Sequence
  MKO10101940_B_Nphs2
  gRNA
tgttagcttacctcatggaa

SEQ ID NO: 101941 - DNA, 20 bp, Artificial Sequence
  MKO10101941_B_Nploc4
  gRNA
gtgatcctcttcacgccatc

SEQ ID NO: 101942 - DNA, 20 bp, Artificial Sequence
  MKO10101942_B_Nploc4
  gRNA
aaactgagaagccgttgttt

SEQ ID NO: 101943 - DNA, 20 bp, Artificial Sequence
  MKO10101943_B_Nploc4
  gRNA
atccgtgtccagtcccctga

SEQ ID NO: 101944 - DNA, 20 bp, Artificial Sequence
  MKO10101944_B_Npl
  gRNA
ctcccacgtgaatcaccacc

SEQ ID NO: 101945 - DNA, 20 bp, Artificial Sequence
  MKO10101945_B_Npl
  gRNA
gtatgtggattacctggtga

SEQ ID NO: 101946 - DNA, 20 bp, Artificial Sequence
  MKO10101946_B_Npl
  gRNA
ctccaatttctgctgcatgt

SEQ ID NO: 101947 - DNA, 20 bp, Artificial Sequence
  MKO10101947_B_Npm1
  gRNA
ttaccgaaaaggtagttctg

SEQ ID NO: 101948 - DNA, 20 bp, Artificial Sequence
  MKO10101948_B_Npm1
  gRNA
ataccgttcttaatgacaac

SEQ ID NO: 101949 - DNA, 20 bp, Artificial Sequence
  MKO10101949_B_Npm1
  gRNA
gtgtaatttcaaagccccct

SEQ ID NO: 101950 - DNA, 20 bp, Artificial Sequence
  MKO10101950_B_Npm2
  gRNA
ttcagcgtagcaatagtgat

SEQ ID NO: 101951 - DNA, 20 bp, Artificial Sequence
  MKO10101951_B_Npm2
  gRNA
cagagacttcggacctgacc

SEQ ID NO: 101952 - DNA, 20 bp, Artificial Sequence
  MKO10101952_B_Npm2
  gRNA
acaacttaccataacattcc

SEQ ID NO: 101953 - DNA, 20 bp, Artificial Sequence
  MKO10101953_B_Npm3
  gRNA
cttgcaggttgtgagctctc

SEQ ID NO: 101954 - DNA, 20 bp, Artificial Sequence
  MKO10101954_B_Npm3
  gRNA
aggcctgcccctgtgcttct

SEQ ID NO: 101955 - DNA, 20 bp, Artificial Sequence
  MKO10101955_B_Npm3
  gRNA
ctcctcaaccttgaaagtga

SEQ ID NO: 101956 - DNA, 20 bp, Artificial Sequence
  MKO10101956_B_Npnt
  gRNA
atacttgagcaggacccgtc

SEQ ID NO: 101957 - DNA, 20 bp, Artificial Sequence
  MKO10101957_B_Npnt
  gRNA
ggtttgcctaccttggttgc

SEQ ID NO: 101958 - DNA, 20 bp, Artificial Sequence
  MKO10101958_B_Npnt
  gRNA
tcctgcctccatagcgacat

SEQ ID NO: 101959 - DNA, 20 bp, Artificial Sequence
  MKO10101959_B_Nppa
  gRNA
acacaggatttgctccaata

SEQ ID NO: 101960 - DNA, 20 bp, Artificial Sequence
  MKO10101960_B_Nppa
  gRNA
gtgctctagggcgcagcccc

SEQ ID NO: 101961 - DNA, 20 bp, Artificial Sequence
  MKO10101961_B_Nppa
  gRNA
agatctatcggaggggtccc

SEQ ID NO: 101962 - DNA, 20 bp, Artificial Sequence
  MKO10101962_B_Nppb
  gRNA
acctgcatcttgaattgctc

SEQ ID NO: 101963 - DNA, 20 bp, Artificial Sequence
  MKO10101963_B_Nppb
  gRNA
cacagcactgaagttgttgt

SEQ ID NO: 101964 - DNA, 20 bp, Artificial Sequence
  MKO10101964_B_Nppb
  gRNA
gggtgctgccttgagaccga

SEQ ID NO: 101965 - DNA, 20 bp, Artificial Sequence
  MKO10101965_B_Nppc
  gRNA
tgctcgcgctactctcgctc

SEQ ID NO: 101966 - DNA, 20 bp, Artificial Sequence
  MKO10101966_B_Nppc
  gRNA
gcctttgtatttgcgcgcgt

SEQ ID NO: 101967 - DNA, 20 bp, Artificial Sequence
  MKO10101967_B_Nppc
  gRNA
caggtcccgagaaccccgcc

SEQ ID NO: 101968 - DNA, 20 bp, Artificial Sequence
  MKO10101968_B_Npr1
  gRNA
gcaggataggagagcccgcc

SEQ ID NO: 101969 - DNA, 20 bp, Artificial Sequence
  MKO10101969_B_Npr1
  gRNA
aaacatagtcctccccagtc

SEQ ID NO: 101970 - DNA, 20 bp, Artificial Sequence
  MKO10101970_B_Npr1
  gRNA
taccctgaaggcacctgtct

SEQ ID NO: 101971 - DNA, 20 bp, Artificial Sequence
  MKO10101971_B_Npr2
  gRNA
agtcctgaatgagactatac

SEQ ID NO: 101972 - DNA, 20 bp, Artificial Sequence
  MKO10101972_B_Npr2
  gRNA
atcgcctgctgatcagagcc

SEQ ID NO: 101973 - DNA, 20 bp, Artificial Sequence
  MKO10101973_B_Npr2
  gRNA
tatcttaggtgtaactggac

SEQ ID NO: 101974 - DNA, 20 bp, Artificial Sequence
  MKO10101974_B_Npr3
  gRNA
caccattcggagaatcatgt

SEQ ID NO: 101975 - DNA, 20 bp, Artificial Sequence
  MKO10101975_B_Npr3
  gRNA
cgccatcctcctctacgttc

SEQ ID NO: 101976 - DNA, 20 bp, Artificial Sequence
  MKO10101976_B_Npr3
  gRNA
tccaaacagtcaccctactg

SEQ ID NO: 101977 - DNA, 20 bp, Artificial Sequence
  MKO10101977_B_Nprl2
  gRNA
ctccagcgtggtcaagtagc

SEQ ID NO: 101978 - DNA, 20 bp, Artificial Sequence
  MKO10101978_B_Nprl2
  gRNA
ctcgcgagaactgtttgaca

SEQ ID NO: 101979 - DNA, 20 bp, Artificial Sequence
  MKO10101979_B_Nprl2
  gRNA
cccatcgttaaaaagctggc

SEQ ID NO: 101980 - DNA, 20 bp, Artificial Sequence
  MKO10101980_B_Nprl3
  gRNA
ttgacagcatatctgctccg

SEQ ID NO: 101981 - DNA, 20 bp, Artificial Sequence
  MKO10101981_B_Nprl3
  gRNA
ggagcttcccgctttggaga

SEQ ID NO: 101982 - DNA, 20 bp, Artificial Sequence
  MKO10101982_B_Nprl3
  gRNA
taccacgttaaaaagaatca

SEQ ID NO: 101983 - DNA, 20 bp, Artificial Sequence
  MKO10101983_B_Npsr1
  gRNA
cagagtcgtccgctacttgc

SEQ ID NO: 101984 - DNA, 20 bp, Artificial Sequence
  MKO10101984_B_Npsr1
  gRNA
ccacaatagtgacgacaaac

SEQ ID NO: 101985 - DNA, 20 bp, Artificial Sequence
  MKO10101985_B_Npsr1
  gRNA
cgtaggtagaggcatacagc

SEQ ID NO: 101986 - DNA, 20 bp, Artificial Sequence
  MKO10101986_B_Nps
  gRNA
tgtctgtaatgcacgtgctt

SEQ ID NO: 101987 - DNA, 20 bp, Artificial Sequence
  MKO10101987_B_Nps
  gRNA
atcgatgtcttctccaaaat

SEQ ID NO: 101988 - DNA, 20 bp, Artificial Sequence
  MKO10101988_B_Nps
  gRNA
ttatccggtcctctcttcca

SEQ ID NO: 101989 - DNA, 20 bp, Artificial Sequence
  MKO10101989_B_Nptn
  gRNA
tcgaataatgacctcttcac

SEQ ID NO: 101990 - DNA, 20 bp, Artificial Sequence
  MKO10101990_B_Nptn
  gRNA
atgatgtactgcaagtcagt

SEQ ID NO: 101991 - DNA, 20 bp, Artificial Sequence
  MKO10101991_B_Nptn
  gRNA
ggctgtacctttcacttcaa

SEQ ID NO: 101992 - DNA, 20 bp, Artificial Sequence
  MKO10101992_B_Nptx1
  gRNA
ccgcaagctgacccccgggg

SEQ ID NO: 101993 - DNA, 20 bp, Artificial Sequence
  MKO10101993_B_Nptx1
  gRNA
gagtcccagatcgagatctt

SEQ ID NO: 101994 - DNA, 20 bp, Artificial Sequence
  MKO10101994_B_Nptx1
  gRNA
tctccagctcgctgatccgt

SEQ ID NO: 101995 - DNA, 20 bp, Artificial Sequence
  MKO10101995_B_Nptx2
  gRNA
ctgcggtccagtgcctcgcc

SEQ ID NO: 101996 - DNA, 20 bp, Artificial Sequence
  MKO10101996_B_Nptx2
  gRNA
ttcccacatgccgtctcgag

SEQ ID NO: 101997 - DNA, 20 bp, Artificial Sequence
  MKO10101997_B_Nptx2
  gRNA
ctccgtacaaactacctgta

SEQ ID NO: 101998 - DNA, 20 bp, Artificial Sequence
  MKO10101998_B_Nptxr
  gRNA
ggcgtcaaatcggcctccca

SEQ ID NO: 101999 - DNA, 20 bp, Artificial Sequence
  MKO10101999_B_Nptxr
  gRNA
agcgagccgccctcagtcac

SEQ ID NO: 102000 - DNA, 20 bp, Artificial Sequence
  MKO10102000_B_Nptxr
  gRNA
ccacgctctgacaccggccc

SEQ ID NO: 102001 - DNA, 20 bp, Artificial Sequence
  MKO10102001_B_Npvf
  gRNA
catgaactcatctgtacaga

SEQ ID NO: 102002 - DNA, 20 bp, Artificial Sequence
  MKO10102002_B_Npvf
  gRNA
ccttctttgctgtgaaaatg

SEQ ID NO: 102003 - DNA, 20 bp, Artificial Sequence
  MKO10102003_B_Npvf
  gRNA
agaaaggaaaccagaaaaat

SEQ ID NO: 102004 - DNA, 20 bp, Artificial Sequence
  MKO10102004_B_Npw
  gRNA
ggcacgaagcgtctctccga

SEQ ID NO: 102005 - DNA, 20 bp, Artificial Sequence
  MKO10102005_B_Npw
  gRNA
tgaaggcttagcgactgctc

SEQ ID NO: 102006 - DNA, 20 bp, Artificial Sequence
  MKO10102006_B_Npw
  gRNA
agctgtgggaggtacgaagc

SEQ ID NO: 102007 - DNA, 20 bp, Artificial Sequence
  MKO10102007_B_Npy1r
  gRNA
acgccgcaagtgacacattt

SEQ ID NO: 102008 - DNA, 20 bp, Artificial Sequence
  MKO10102008_B_Npy1r
  gRNA
atccgtatgcatggtagaca

SEQ ID NO: 102009 - DNA, 20 bp, Artificial Sequence
  MKO10102009_B_Npy1r
  gRNA
cagcatgatgttgattcgct

SEQ ID NO: 102010 - DNA, 20 bp, Artificial Sequence
  MKO10102010_B_Npy2r
  gRNA
ccagggcacactactcctag

SEQ ID NO: 102011 - DNA, 20 bp, Artificial Sequence
  MKO10102011_B_Npy2r
  gRNA
cgaatcagcttcctgatcat

SEQ ID NO: 102012 - DNA, 20 bp, Artificial Sequence
  MKO10102012_B_Npy2r
  gRNA
tgtcgatgtccacagcgagt

SEQ ID NO: 102013 - DNA, 20 bp, Artificial Sequence
  MKO10102013_B_Npy4r
  gRNA
gcacgcttgcagctcacgag

SEQ ID NO: 102014 - DNA, 20 bp, Artificial Sequence
  MKO10102014_B_Npy4r
  gRNA
gctgttggccaggaacggca

SEQ ID NO: 102015 - DNA, 20 bp, Artificial Sequence
  MKO10102015_B_Npy4r
  gRNA
gaaactctacaaccttagag

SEQ ID NO: 102016 - DNA, 20 bp, Artificial Sequence
  MKO10102016_B_Npy5r
  gRNA
taatatcgattgccattgtc

SEQ ID NO: 102017 - DNA, 20 bp, Artificial Sequence
  MKO10102017_B_Npy5r
  gRNA
taagatcggattaagacaac

SEQ ID NO: 102018 - DNA, 20 bp, Artificial Sequence
  MKO10102018_B_Npy5r
  gRNA
gccactccacgtcttccacg

SEQ ID NO: 102019 - DNA, 20 bp, Artificial Sequence
  MKO10102019_B_Npy6r
  gRNA
aaactacaaataccaggtcg

SEQ ID NO: 102020 - DNA, 20 bp, Artificial Sequence
  MKO10102020_B_Npy6r
  gRNA
cagctgattgtgaacccccg

SEQ ID NO: 102021 - DNA, 20 bp, Artificial Sequence
  MKO10102021_B_Npy6r
  gRNA
aactgagacactttgcacgt

SEQ ID NO: 102022 - DNA, 20 bp, Artificial Sequence
  MKO10102022_B_Npy
  gRNA
cagaaaacgcccccagaaca

SEQ ID NO: 102023 - DNA, 20 bp, Artificial Sequence
  MKO10102023_B_Npy
  gRNA
gatttcagacctcttaatga

SEQ ID NO: 102024 - DNA, 20 bp, Artificial Sequence
  MKO10102024_B_Npy
  gRNA
atttcccatcaccacatgga

SEQ ID NO: 102025 - DNA, 20 bp, Artificial Sequence
  MKO10102025_B_Nqo1
  gRNA
gaaaggaccgttgtcgtaca

SEQ ID NO: 102026 - DNA, 20 bp, Artificial Sequence
  MKO10102026_B_Nqo1
  gRNA
acgcctgagcccagatattg

SEQ ID NO: 102027 - DNA, 20 bp, Artificial Sequence
  MKO10102027_B_Nqo1
  gRNA
catggagccgctacccccag

SEQ ID NO: 102028 - DNA, 20 bp, Artificial Sequence
  MKO10102028_B_Nqo2
  gRNA
atcccataactgaagacgtc

SEQ ID NO: 102029 - DNA, 20 bp, Artificial Sequence
  MKO10102029_B_Nqo2
  gRNA
gcggagatgtacacaaaaga

SEQ ID NO: 102030 - DNA, 20 bp, Artificial Sequence
  MKO10102030_B_Nqo2
  gRNA
gccacaagaaatgatatcac

SEQ ID NO: 102031 - DNA, 20 bp, Artificial Sequence
  MKO10102031_B_Nr0b1
  gRNA
caatgtatttcacgcactgc

SEQ ID NO: 102032 - DNA, 20 bp, Artificial Sequence
  MKO10102032_B_Nr0b1
  gRNA
cttgcggggtcgctggtgtt

SEQ ID NO: 102033 - DNA, 20 bp, Artificial Sequence
  MKO10102033_B_Nr0b1
  gRNA
aagcatttcctgcgtcgtgt

SEQ ID NO: 102034 - DNA, 20 bp, Artificial Sequence
  MKO10102034_B_Nr0b2
  gRNA
ccacatcgcacacctgcaac

SEQ ID NO: 102035 - DNA, 20 bp, Artificial Sequence
  MKO10102035_B_Nr0b2
  gRNA
ggcggctgctagagtgctgc

SEQ ID NO: 102036 - DNA, 20 bp, Artificial Sequence
  MKO10102036_B_Nr0b2
  gRNA
atgtcaacgtctcccatgat

SEQ ID NO: 102037 - DNA, 20 bp, Artificial Sequence
  MKO10102037_B_Nr1d1
  gRNA
caggaccctgcccgctcttt

SEQ ID NO: 102038 - DNA, 20 bp, Artificial Sequence
  MKO10102038_B_Nr1d1
  gRNA
ctagtggctcctccccgagc

SEQ ID NO: 102039 - DNA, 20 bp, Artificial Sequence
  MKO10102039_B_Nr1d1
  gRNA
ttcaagaagtgtctctccgt

SEQ ID NO: 102040 - DNA, 20 bp, Artificial Sequence
  MKO10102040_B_Nr1d2
  gRNA
tgccctagaatttagtggca

SEQ ID NO: 102041 - DNA, 20 bp, Artificial Sequence
  MKO10102041_B_Nr1d2
  gRNA
catgccgtttgtattgcaaa

SEQ ID NO: 102042 - DNA, 20 bp, Artificial Sequence
  MKO10102042_B_Nr1d2
  gRNA
cagacagacacttcttaaag

SEQ ID NO: 102043 - DNA, 20 bp, Artificial Sequence
  MKO10102043_B_Nr1h2
  gRNA
ctggcacttgcgccgcatga

SEQ ID NO: 102044 - DNA, 20 bp, Artificial Sequence
  MKO10102044_B_Nr1h2
  gRNA
ccccatctcacccacgatgt

SEQ ID NO: 102045 - DNA, 20 bp, Artificial Sequence
  MKO10102045_B_Nr1h2
  gRNA
cgccacgtcacccactatta

SEQ ID NO: 102046 - DNA, 20 bp, Artificial Sequence
  MKO10102046_B_Nr1h3
  gRNA
ccgccgcatgtaggtgtcca

SEQ ID NO: 102047 - DNA, 20 bp, Artificial Sequence
  MKO10102047_B_Nr1h3
  gRNA
ctctgagggtcgggtgcaat

SEQ ID NO: 102048 - DNA, 20 bp, Artificial Sequence
  MKO10102048_B_Nr1h3
  gRNA
agcgctgttgtcgggcttcc

SEQ ID NO: 102049 - DNA, 20 bp, Artificial Sequence
  MKO10102049_B_Nr1h4
  gRNA
tgatggacatgtacatgcgc

SEQ ID NO: 102050 - DNA, 20 bp, Artificial Sequence
  MKO10102050_B_Nr1h4
  gRNA
ttagccgtttagatttacac

SEQ ID NO: 102051 - DNA, 20 bp, Artificial Sequence
  MKO10102051_B_Nr1h4
  gRNA
acgaatccataatataatcc

SEQ ID NO: 102052 - DNA, 20 bp, Artificial Sequence
  MKO10102052_B_Nr1h5
  gRNA
cctgtaccctgccatccaag

SEQ ID NO: 102053 - DNA, 20 bp, Artificial Sequence
  MKO10102053_B_Nr1h5
  gRNA
gcagtgtattcttgcaagaa

SEQ ID NO: 102054 - DNA, 20 bp, Artificial Sequence
  MKO10102054_B_Nr1h5
  gRNA
caacatgactctaactcaag

SEQ ID NO: 102055 - DNA, 20 bp, Artificial Sequence
  MKO10102055_B_Nr1i2
  gRNA
gatctctttcccgtcgctct

SEQ ID NO: 102056 - DNA, 20 bp, Artificial Sequence
  MKO10102056_B_Nr1i2
  gRNA
ctgaggtgccccttccgcaa

SEQ ID NO: 102057 - DNA, 20 bp, Artificial Sequence
  MKO10102057_B_Nr1i2
  gRNA
gggccatgaaacgcaatgtc

SEQ ID NO: 102058 - DNA, 20 bp, Artificial Sequence
  MKO10102058_B_Nr1i3
  gRNA
gggggcccacactcgccatg

SEQ ID NO: 102059 - DNA, 20 bp, Artificial Sequence
  MKO10102059_B_Nr1i3
  gRNA
ccggaagagcggcagatcct

SEQ ID NO: 102060 - DNA, 20 bp, Artificial Sequence
  MKO10102060_B_Nr1i3
  gRNA
gtgaagaagaatatgggccg

SEQ ID NO: 102061 - DNA, 20 bp, Artificial Sequence
  MKO10102061_B_Nr2c1
  gRNA
gcgttgcggctagagggctt

SEQ ID NO: 102062 - DNA, 20 bp, Artificial Sequence
  MKO10102062_B_Nr2c1
  gRNA
gttcattctggcaaaccacg

SEQ ID NO: 102063 - DNA, 20 bp, Artificial Sequence
  MKO10102063_B_Nr2c1
  gRNA
taacagacagcgagactgcc

SEQ ID NO: 102064 - DNA, 20 bp, Artificial Sequence
  MKO10102064_B_Nr2c2ap
  gRNA
gacgtgctggaactctgacc

SEQ ID NO: 102065 - DNA, 20 bp, Artificial Sequence
  MKO10102065_B_Nr2c2ap
  gRNA
gactacacggccaaaaaagt

SEQ ID NO: 102066 - DNA, 20 bp, Artificial Sequence
  MKO10102066_B_Nr2c2ap
  gRNA
ccttctcacccagcacccgc

SEQ ID NO: 102067 - DNA, 20 bp, Artificial Sequence
  MKO10102067_B_Nr2c2
  gRNA
acttcttcagccggcagaac

SEQ ID NO: 102068 - DNA, 20 bp, Artificial Sequence
  MKO10102068_B_Nr2c2
  gRNA
ccactgagaagatctatatc

SEQ ID NO: 102069 - DNA, 20 bp, Artificial Sequence
  MKO10102069_B_Nr2c2
  gRNA
catccactgcggtgactatc

SEQ ID NO: 102070 - DNA, 20 bp, Artificial Sequence
  MKO10102070_B_Nr2e1
  gRNA
gtagaccccgtagtgcttcc

SEQ ID NO: 102071 - DNA, 20 bp, Artificial Sequence
  MKO10102071_B_Nr2e1
  gRNA
ccacttcgtagagatacatt

SEQ ID NO: 102072 - DNA, 20 bp, Artificial Sequence
  MKO10102072_B_Nr2e1
  gRNA
tcttcaagaggagcattcga

SEQ ID NO: 102073 - DNA, 20 bp, Artificial Sequence
  MKO10102073_B_Nr2e3
  gRNA
ggcacatccctgccccgact

SEQ ID NO: 102074 - DNA, 20 bp, Artificial Sequence
  MKO10102074_B_Nr2e3
  gRNA
ctgtgtacctggtcccggaa

SEQ ID NO: 102075 - DNA, 20 bp, Artificial Sequence
  MKO10102075_B_Nr2e3
  gRNA
tctggttgcagacacagacg

SEQ ID NO: 102076 - DNA, 20 bp, Artificial Sequence
  MKO10102076_B_Nr2f1
  gRNA
gatccgcaggacgacgtggc

SEQ ID NO: 102077 - DNA, 20 bp, Artificial Sequence
  MKO10102077_B_Nr2f1
  gRNA
cgatgtgggcagcatccgac

SEQ ID NO: 102078 - DNA, 20 bp, Artificial Sequence
  MKO10102078_B_Nr2f1
  gRNA
gctgcctgcgctgcggggtt

SEQ ID NO: 102079 - DNA, 20 bp, Artificial Sequence
  MKO10102079_B_Nr2f2
  gRNA
aagagctttccgaaccgtgt

SEQ ID NO: 102080 - DNA, 20 bp, Artificial Sequence
  MKO10102080_B_Nr2f2
  gRNA
gcgtgctggccgggccccct

SEQ ID NO: 102081 - DNA, 20 bp, Artificial Sequence
  MKO10102081_B_Nr2f2
  gRNA
tgccggacagtaacatatcc

SEQ ID NO: 102082 - DNA, 20 bp, Artificial Sequence
  MKO10102082_B_Nr2f6
  gRNA
gtcgcccggctccgcgtcgc

SEQ ID NO: 102083 - DNA, 20 bp, Artificial Sequence
  MKO10102083_B_Nr2f6
  gRNA
ctatcactagcccgagccat

SEQ ID NO: 102084 - DNA, 20 bp, Artificial Sequence
  MKO10102084_B_Nr2f6
  gRNA
gtactgggcacgcacatact

SEQ ID NO: 102085 - DNA, 20 bp, Artificial Sequence
  MKO10102085_B_Nr3c1
  gRNA
aagtgattgccgcagtgaaa

SEQ ID NO: 102086 - DNA, 20 bp, Artificial Sequence
  MKO10102086_B_Nr3c1
  gRNA
gaagcttcgggatgccatta

SEQ ID NO: 102087 - DNA, 20 bp, Artificial Sequence
  MKO10102087_B_Nr3c1
  gRNA
acatccatgagtactgtaga

SEQ ID NO: 102088 - DNA, 20 bp, Artificial Sequence
  MKO10102088_B_Nr3c2
  gRNA
cttacctcctaagttcatgc

SEQ ID NO: 102089 - DNA, 20 bp, Artificial Sequence
  MKO10102089_B_Nr3c2
  gRNA
actttacgaagtgtttctac

SEQ ID NO: 102090 - DNA, 20 bp, Artificial Sequence
  MKO10102090_B_Nr3c2
  gRNA
tatcatcgtttgccttgagt

SEQ ID NO: 102091 - DNA, 20 bp, Artificial Sequence
  MKO10102091_B_Nr4a1
  gRNA
cgggcctagcactgccaaat

SEQ ID NO: 102092 - DNA, 20 bp, Artificial Sequence
  MKO10102092_B_Nr4a1
  gRNA
aagcgccaagtacatctgcc

SEQ ID NO: 102093 - DNA, 20 bp, Artificial Sequence
  MKO10102093_B_Nr4a1
  gRNA
ccttctgccagatctaaacc

SEQ ID NO: 102094 - DNA, 20 bp, Artificial Sequence
  MKO10102094_B_Nr4a2
  gRNA
cacaggttgcaatgcgtgcg

SEQ ID NO: 102095 - DNA, 20 bp, Artificial Sequence
  MKO10102095_B_Nr4a2
  gRNA
taattgcaggtccaacccag

SEQ ID NO: 102096 - DNA, 20 bp, Artificial Sequence
  MKO10102096_B_Nr4a2
  gRNA
tgacctgcccaaagccgacc

SEQ ID NO: 102097 - DNA, 20 bp, Artificial Sequence
  MKO10102097_B_Nr4a3
  gRNA
tttcggcgtctcttgtccac

SEQ ID NO: 102098 - DNA, 20 bp, Artificial Sequence
  MKO10102098_B_Nr4a3
  gRNA
accaaagagcccactacaac

SEQ ID NO: 102099 - DNA, 20 bp, Artificial Sequence
  MKO10102099_B_Nr4a3
  gRNA
gtgcgtacagacagtctgaa

SEQ ID NO: 102100 - DNA, 20 bp, Artificial Sequence
  MKO10102100_B_Nr5a1
  gRNA
ccaggcgcatgcccaccgtc

SEQ ID NO: 102101 - DNA, 20 bp, Artificial Sequence
  MKO10102101_B_Nr5a1
  gRNA
acgtgtaatgcttgttgttc

SEQ ID NO: 102102 - DNA, 20 bp, Artificial Sequence
  MKO10102102_B_Nr5a1
  gRNA
ccagctgcagtgcatgcaac

SEQ ID NO: 102103 - DNA, 20 bp, Artificial Sequence
  MKO10102103_B_Nr5a2
  gRNA
ccaggactggtccgatcgca

SEQ ID NO: 102104 - DNA, 20 bp, Artificial Sequence
  MKO10102104_B_Nr5a2
  gRNA
gacactttatcgccacacac

SEQ ID NO: 102105 - DNA, 20 bp, Artificial Sequence
  MKO10102105_B_Nr5a2
  gRNA
gcccctgttccccatgcgat

SEQ ID NO: 102106 - DNA, 20 bp, Artificial Sequence
  MKO10102106_B_Nr6a1
  gRNA
gctgatgtcagccgaagacc

SEQ ID NO: 102107 - DNA, 20 bp, Artificial Sequence
  MKO10102107_B_Nr6a1
  gRNA
agctcacctggatgatagtg

SEQ ID NO: 102108 - DNA, 20 bp, Artificial Sequence
  MKO10102108_B_Nr6a1
  gRNA
gcccccacaagctcgaagcc

SEQ ID NO: 102109 - DNA, 20 bp, Artificial Sequence
  MKO10102109_B_Nradd
  gRNA
tgccagcctataccctgcta

SEQ ID NO: 102110 - DNA, 20 bp, Artificial Sequence
  MKO10102110_B_Nradd
  gRNA
ctaccatttgaaggccacat

SEQ ID NO: 102111 - DNA, 20 bp, Artificial Sequence
  MKO10102111_B_Nradd
  gRNA
gacaggaatgatgttgctcg

SEQ ID NO: 102112 - DNA, 20 bp, Artificial Sequence
  MKO10102112_B_Nrap
  gRNA
gaagatcagctgcatagatc

SEQ ID NO: 102113 - DNA, 20 bp, Artificial Sequence
  MKO10102113_B_Nrap
  gRNA
agctagccggctgatgaatg

SEQ ID NO: 102114 - DNA, 20 bp, Artificial Sequence
  MKO10102114_B_Nrap
  gRNA
acactccaagatgaatgtgc

SEQ ID NO: 102115 - DNA, 20 bp, Artificial Sequence
  MKO10102115_B_Nrarp
  gRNA
ccaagtacgcggccagcggc

SEQ ID NO: 102116 - DNA, 20 bp, Artificial Sequence
  MKO10102116_B_Nrarp
  gRNA
gggtggctatcaccggccgc

SEQ ID NO: 102117 - DNA, 20 bp, Artificial Sequence
  MKO10102117_B_Nrarp
  gRNA
gtagcgcgctccagccgtcg

SEQ ID NO: 102118 - DNA, 20 bp, Artificial Sequence
  MKO10102118_B_Nras
  gRNA
cttcgcctgtcctcatgtac

SEQ ID NO: 102119 - DNA, 20 bp, Artificial Sequence
  MKO10102119_B_Nras
  gRNA
aagctcaacagcagtgacga

SEQ ID NO: 102120 - DNA, 20 bp, Artificial Sequence
  MKO10102120_B_Nras
  gRNA
ctgggcctcacctctatggt

SEQ ID NO: 102121 - DNA, 20 bp, Artificial Sequence
  MKO10102121_B_Nrbf2
  gRNA
atggctcacctgctcagact

SEQ ID NO: 102122 - DNA, 20 bp, Artificial Sequence
  MKO10102122_B_Nrbf2
  gRNA
cccggggtttatggaagtga

SEQ ID NO: 102123 - DNA, 20 bp, Artificial Sequence
  MKO10102123_B_Nrbf2
  gRNA
gcagaccgtttgttagctgc

SEQ ID NO: 102124 - DNA, 20 bp, Artificial Sequence
  MKO10102124_B_Nrbp1
  gRNA
tgacagtgcatacctggcca

SEQ ID NO: 102125 - DNA, 20 bp, Artificial Sequence
  MKO10102125_B_Nrbp1
  gRNA
gtttgataatctgattcagc

SEQ ID NO: 102126 - DNA, 20 bp, Artificial Sequence
  MKO10102126_B_Nrbp1
  gRNA
tcagattatcaaacactgca

SEQ ID NO: 102127 - DNA, 20 bp, Artificial Sequence
  MKO10102127_B_Nrbp2
  gRNA
gctgagatgccgcagcccca

SEQ ID NO: 102128 - DNA, 20 bp, Artificial Sequence
  MKO10102128_B_Nrbp2
  gRNA
acaaattcctagaggatgtc

SEQ ID NO: 102129 - DNA, 20 bp, Artificial Sequence
  MKO10102129_B_Nrbp2
  gRNA
actactcaccgccactgcat

SEQ ID NO: 102130 - DNA, 20 bp, Artificial Sequence
  MKO10102130_B_Nrcam
  gRNA
tacctccggccataatattt

SEQ ID NO: 102131 - DNA, 20 bp, Artificial Sequence
  MKO10102131_B_Nrcam
  gRNA
tgggcggacaacaatgttat

SEQ ID NO: 102132 - DNA, 20 bp, Artificial Sequence
  MKO10102132_B_Nrcam
  gRNA
tggattacaatattctcccg

SEQ ID NO: 102133 - DNA, 20 bp, Artificial Sequence
  MKO10102133_B_Nrd1
  gRNA
gatttcagatctaagtaatg

SEQ ID NO: 102134 - DNA, 20 bp, Artificial Sequence
  MKO10102134_B_Nrd1
  gRNA
tccaaaaagtgtgccagccc

SEQ ID NO: 102135 - DNA, 20 bp, Artificial Sequence
  MKO10102135_B_Nrd1
  gRNA
attgcatctctgatcatcag

SEQ ID NO: 102136 - DNA, 20 bp, Artificial Sequence
  MKO10102136_B_Nrde2
  gRNA
gatgaatgtgacgggctcgg

SEQ ID NO: 102137 - DNA, 20 bp, Artificial Sequence
  MKO10102137_B_Nrde2
  gRNA
cttatcagtcctgaagacgt

SEQ ID NO: 102138 - DNA, 20 bp, Artificial Sequence
  MKO10102138_B_Nrde2
  gRNA
agcaacccaagctttcgtgt

SEQ ID NO: 102139 - DNA, 20 bp, Artificial Sequence
  MKO10102139_B_Nrep
  gRNA
ccaagaaccgtttgcataca

SEQ ID NO: 102140 - DNA, 20 bp, Artificial Sequence
  MKO10102140_B_Nrep
  gRNA
aatggagggaggtcttatta

SEQ ID NO: 102141 - DNA, 20 bp, Artificial Sequence
  MKO10102141_B_Nrep
  gRNA
ggtttactacccagaactct

SEQ ID NO: 102142 - DNA, 20 bp, Artificial Sequence
  MKO10102142_B_Nrf1
  gRNA
agaacacgcccctgcgccac

SEQ ID NO: 102143 - DNA, 20 bp, Artificial Sequence
  MKO10102143_B_Nrf1
  gRNA
catactgtgctcagtgtacg

SEQ ID NO: 102144 - DNA, 20 bp, Artificial Sequence
  MKO10102144_B_Nrf1
  gRNA
caggaaactcagagccacgt

SEQ ID NO: 102145 - DNA, 20 bp, Artificial Sequence
  MKO10102145_B_Nrg1
  gRNA
tggcatctgtatcgccctgt

SEQ ID NO: 102146 - DNA, 20 bp, Artificial Sequence
  MKO10102146_B_Nrg1
  gRNA
agtggacgtactgtagaagc

SEQ ID NO: 102147 - DNA, 20 bp, Artificial Sequence
  MKO10102147_B_Nrg1
  gRNA
cagccatctcataaagtgtg

SEQ ID NO: 102148 - DNA, 20 bp, Artificial Sequence
  MKO10102148_B_Nrg2
  gRNA
tgccggggagtacgtctgtg

SEQ ID NO: 102149 - DNA, 20 bp, Artificial Sequence
  MKO10102149_B_Nrg2
  gRNA
gacacctaccgctgttgaca

SEQ ID NO: 102150 - DNA, 20 bp, Artificial Sequence
  MKO10102150_B_Nrg2
  gRNA
tggcggtctcattgcacttc

SEQ ID NO: 102151 - DNA, 20 bp, Artificial Sequence
  MKO10102151_B_Nrg3
  gRNA
cttcaaaccctgtcgagaca

SEQ ID NO: 102152 - DNA, 20 bp, Artificial Sequence
  MKO10102152_B_Nrg3
  gRNA
gggcttaccgacagtgctta

SEQ ID NO: 102153 - DNA, 20 bp, Artificial Sequence
  MKO10102153_B_Nrg3
  gRNA
tcggcagaaattgatcacaa

SEQ ID NO: 102154 - DNA, 20 bp, Artificial Sequence
  MKO10102154_B_Nrg4
  gRNA
ttactcactgtgacgggttc

SEQ ID NO: 102155 - DNA, 20 bp, Artificial Sequence
  MKO10102155_B_Nrg4
  gRNA
gcggcactcacctacagaat

SEQ ID NO: 102156 - DNA, 20 bp, Artificial Sequence
  MKO10102156_B_Nrg4
  gRNA
ccaggaagggccaccttcag

SEQ ID NO: 102157 - DNA, 20 bp, Artificial Sequence
  MKO10102157_B_Nrgn
  gRNA
tcacctggcctagtctccgc

SEQ ID NO: 102158 - DNA, 20 bp, Artificial Sequence
  MKO10102158_B_Nrgn
  gRNA
cgccgctgcagccaaaatcc

SEQ ID NO: 102159 - DNA, 20 bp, Artificial Sequence
  MKO10102159_B_Nrgn
  gRNA
ccggaaactcgcctggattt

SEQ ID NO: 102160 - DNA, 20 bp, Artificial Sequence
  MKO10102160_B_Nrip1
  gRNA
ctgtgcccgttcatcggcgt

SEQ ID NO: 102161 - DNA, 20 bp, Artificial Sequence
  MKO10102161_B_Nrip1
  gRNA
aggcgcggtgttcgtgagct

SEQ ID NO: 102162 - DNA, 20 bp, Artificial Sequence
  MKO10102162_B_Nrip1
  gRNA
tgatccgtcacacaactgcc

SEQ ID NO: 102163 - DNA, 20 bp, Artificial Sequence
  MKO10102163_B_Nrip2
  gRNA
cagcaggaccagtgcgacac

SEQ ID NO: 102164 - DNA, 20 bp, Artificial Sequence
  MKO10102164_B_Nrip2
  gRNA
actccccctgaagccgcctc

SEQ ID NO: 102165 - DNA, 20 bp, Artificial Sequence
  MKO10102165_B_Nrip2
  gRNA
ccacagccactcgaagcatc

SEQ ID NO: 102166 - DNA, 20 bp, Artificial Sequence
  MKO10102166_B_Nrip3
  gRNA
ttaccccaatctgtccacac

SEQ ID NO: 102167 - DNA, 20 bp, Artificial Sequence
  MKO10102167_B_Nrip3
  gRNA
ccttcagggatctaagagtc

SEQ ID NO: 102168 - DNA, 20 bp, Artificial Sequence
  MKO10102168_B_Nrip3
  gRNA
gtcaaatctcacaagcatga

SEQ ID NO: 102169 - DNA, 20 bp, Artificial Sequence
  MKO10102169_B_Nrk
  gRNA
tccataagtaccaagaccaa

SEQ ID NO: 102170 - DNA, 20 bp, Artificial Sequence
  MKO10102170_B_Nrk
  gRNA
atacccaaagttggtgctga

SEQ ID NO: 102171 - DNA, 20 bp, Artificial Sequence
  MKO10102171_B_Nrk
  gRNA
tctagtgagaatattccagt

SEQ ID NO: 102172 - DNA, 20 bp, Artificial Sequence
  MKO10102172_B_Nrl
  gRNA
gggcctcttggctactattc

SEQ ID NO: 102173 - DNA, 20 bp, Artificial Sequence
  MKO10102173_B_Nrl
  gRNA
tgtgtgtggtcgtcggaccc

SEQ ID NO: 102174 - DNA, 20 bp, Artificial Sequence
  MKO10102174_B_Nrl
  gRNA
gcgggccgaggtggcacgcc

SEQ ID NO: 102175 - DNA, 20 bp, Artificial Sequence
  MKO10102175_B_Nrm
  gRNA
tccccaccttgggcaccgat

SEQ ID NO: 102176 - DNA, 20 bp, Artificial Sequence
  MKO10102176_B_Nrm
  gRNA
gaaacgcacgaattccactc

SEQ ID NO: 102177 - DNA, 20 bp, Artificial Sequence
  MKO10102177_B_Nrm
  gRNA
tcactgcctcagtcgccata

SEQ ID NO: 102178 - DNA, 20 bp, Artificial Sequence
  MKO10102178_B_Nrn1l
  gRNA
acaggcgtggaagtcattcc

SEQ ID NO: 102179 - DNA, 20 bp, Artificial Sequence
  MKO10102179_B_Nrn1l
  gRNA
cacagggtagccgctgacag

SEQ ID NO: 102180 - DNA, 20 bp, Artificial Sequence
  MKO10102180_B_Nrn1l
  gRNA
gtagtagcagcaacagcgtc

SEQ ID NO: 102181 - DNA, 20 bp, Artificial Sequence
  MKO10102181_B_Nrn1
  gRNA
cacagctcttacggattgcc

SEQ ID NO: 102182 - DNA, 20 bp, Artificial Sequence
  MKO10102182_B_Nrn1
  gRNA
cagcatggccaactacccgc

SEQ ID NO: 102183 - DNA, 20 bp, Artificial Sequence
  MKO10102183_B_Nrn1
  gRNA
atatatttcactgatcctcg

SEQ ID NO: 102184 - DNA, 20 bp, Artificial Sequence
  MKO10102184_B_Nrp1
  gRNA
gagcaagactcgaatcctcc

SEQ ID NO: 102185 - DNA, 20 bp, Artificial Sequence
  MKO10102185_B_Nrp1
  gRNA
gtaggtgcactccaagctgt

SEQ ID NO: 102186 - DNA, 20 bp, Artificial Sequence
  MKO10102186_B_Nrp1
  gRNA
ctgtcctccaaatcgaaatg

SEQ ID NO: 102187 - DNA, 20 bp, Artificial Sequence
  MKO10102187_B_Nrp2
  gRNA
cgctatgagatcttcaaaac

SEQ ID NO: 102188 - DNA, 20 bp, Artificial Sequence
  MKO10102188_B_Nrp2
  gRNA
agttcacctcagactacgcc

SEQ ID NO: 102189 - DNA, 20 bp, Artificial Sequence
  MKO10102189_B_Nrp2
  gRNA
agcatgaccctctacaagtg

SEQ ID NO: 102190 - DNA, 20 bp, Artificial Sequence
  MKO10102190_B_Nrp
  gRNA
cgcctctgagaagtcgatga

SEQ ID NO: 102191 - DNA, 20 bp, Artificial Sequence
  MKO10102191_B_Nrp
  gRNA
cagtgcgcttagccccttta

SEQ ID NO: 102192 - DNA, 20 bp, Artificial Sequence
  MKO10102192_B_Nrp
  gRNA
agccgtcatcgacttctcag

SEQ ID NO: 102193 - DNA, 20 bp, Artificial Sequence
  MKO10102193_B_Nrros
  gRNA
ttcacttcttgattgtggaa

SEQ ID NO: 102194 - DNA, 20 bp, Artificial Sequence
  MKO10102194_B_Nrros
  gRNA
actggaagcattgaatcctc

SEQ ID NO: 102195 - DNA, 20 bp, Artificial Sequence
  MKO10102195_B_Nrros
  gRNA
tcaatgcttccagtctccaa

SEQ ID NO: 102196 - DNA, 20 bp, Artificial Sequence
  MKO10102196_B_Nrsn1
  gRNA
ctctaggtcggactcatctc

SEQ ID NO: 102197 - DNA, 20 bp, Artificial Sequence
  MKO10102197_B_Nrsn1
  gRNA
ccccccaaaatcgaagcttt

SEQ ID NO: 102198 - DNA, 20 bp, Artificial Sequence
  MKO10102198_B_Nrsn1
  gRNA
accagcagcgctatggagtt

SEQ ID NO: 102199 - DNA, 20 bp, Artificial Sequence
  MKO10102199_B_Nrsn2
  gRNA
ggattctctctgggttatag

SEQ ID NO: 102200 - DNA, 20 bp, Artificial Sequence
  MKO10102200_B_Nrsn2
  gRNA
tgcagacttacaagtcccgc

SEQ ID NO: 102201 - DNA, 20 bp, Artificial Sequence
  MKO10102201_B_Nrsn2
  gRNA
agccctcatgacctgccgtg

SEQ ID NO: 102202 - DNA, 20 bp, Artificial Sequence
  MKO10102202_B_Nrtn
  gRNA
agctgcagatgagcgacacc

SEQ ID NO: 102203 - DNA, 20 bp, Artificial Sequence
  MKO10102203_B_Nrtn
  gRNA
ggccatccgcatctacgacc

SEQ ID NO: 102204 - DNA, 20 bp, Artificial Sequence
  MKO10102204_B_Nrtn
  gRNA
tcgagctcgcgcagcccaca

SEQ ID NO: 102205 - DNA, 20 bp, Artificial Sequence
  MKO10102205_B_Nrxn1
  gRNA
tgttacctgacgcagattcc

SEQ ID NO: 102206 - DNA, 20 bp, Artificial Sequence
  MKO10102206_B_Nrxn1
  gRNA
taccttggtcgcccatcatc

SEQ ID NO: 102207 - DNA, 20 bp, Artificial Sequence
  MKO10102207_B_Nrxn1
  gRNA
aggtctggcacacctgatga

SEQ ID NO: 102208 - DNA, 20 bp, Artificial Sequence
  MKO10102208_B_Nrxn2
  gRNA
taccttcgctgtttaacgtc

SEQ ID NO: 102209 - DNA, 20 bp, Artificial Sequence
  MKO10102209_B_Nrxn2
  gRNA
gatgtgcaccagccgacaaa

SEQ ID NO: 102210 - DNA, 20 bp, Artificial Sequence
  MKO10102210_B_Nrxn2
  gRNA
gactttagaggaacacccca

SEQ ID NO: 102211 - DNA, 20 bp, Artificial Sequence
  MKO10102211_B_Nrxn3
  gRNA
ccgtctagagctgtctcgct

SEQ ID NO: 102212 - DNA, 20 bp, Artificial Sequence
  MKO10102212_B_Nrxn3
  gRNA
catcacgctgaatatccacg

SEQ ID NO: 102213 - DNA, 20 bp, Artificial Sequence
  MKO10102213_B_Nrxn3
  gRNA
tcgctgtgacatgaagcgga

SEQ ID NO: 102214 - DNA, 20 bp, Artificial Sequence
  MKO10102214_B_Nsa2
  gRNA
tctgcttaatcatgttagaa

SEQ ID NO: 102215 - DNA, 20 bp, Artificial Sequence
  MKO10102215_B_Nsa2
  gRNA
ctaatgaacctttcatattt

SEQ ID NO: 102216 - DNA, 20 bp, Artificial Sequence
  MKO10102216_B_Nsa2
  gRNA
ctacccaaagttcgtgccca

SEQ ID NO: 102217 - DNA, 20 bp, Artificial Sequence
  MKO10102217_B_Nsd1
  gRNA
gctcggccacagttgcgcct

SEQ ID NO: 102218 - DNA, 20 bp, Artificial Sequence
  MKO10102218_B_Nsd1
  gRNA
caaaattcaagagacgccct

SEQ ID NO: 102219 - DNA, 20 bp, Artificial Sequence
  MKO10102219_B_Nsd1
  gRNA
ggtcagagaagaaacgcctc

SEQ ID NO: 102220 - DNA, 20 bp, Artificial Sequence
  MKO10102220_B_Nsdhl
  gRNA
gtaatagtcaataggcttca

SEQ ID NO: 102221 - DNA, 20 bp, Artificial Sequence
  MKO10102221_B_Nsdhl
  gRNA
accgcagccattcgtcctca

SEQ ID NO: 102222 - DNA, 20 bp, Artificial Sequence
  MKO10102222_B_Nsdhl
  gRNA
tccgccgtacagtaacaaca

SEQ ID NO: 102223 - DNA, 20 bp, Artificial Sequence
  MKO10102223_B_Nsfl1c
  gRNA
cttcctcctcctcttcatct

SEQ ID NO: 102224 - DNA, 20 bp, Artificial Sequence
  MKO10102224_B_Nsfl1c
  gRNA
acttggggttgcttgtgaaa

SEQ ID NO: 102225 - DNA, 20 bp, Artificial Sequence
  MKO10102225_B_Nsfl1c
  gRNA
agctacagccccatgctctt

SEQ ID NO: 102226 - DNA, 20 bp, Artificial Sequence
  MKO10102226_B_Nsf
  gRNA
catcgcgttcagcttgcctc

SEQ ID NO: 102227 - DNA, 20 bp, Artificial Sequence
  MKO10102227_B_Nsf
  gRNA
cagctactcactggccagac

SEQ ID NO: 102228 - DNA, 20 bp, Artificial Sequence
  MKO10102228_B_Nsf
  gRNA
aacgaaaaagatttccagtc

SEQ ID NO: 102229 - DNA, 20 bp, Artificial Sequence
  MKO10102229_B_Nsg1
  gRNA
ggggctcataccttatctgg

SEQ ID NO: 102230 - DNA, 20 bp, Artificial Sequence
  MKO10102230_B_Nsg1
  gRNA
tgtacactttgtagacaacc

SEQ ID NO: 102231 - DNA, 20 bp, Artificial Sequence
  MKO10102231_B_Nsg1
  gRNA
actgcagctggttgacatcg

SEQ ID NO: 102232 - DNA, 20 bp, Artificial Sequence
  MKO10102232_B_Nsg2
  gRNA
accgtaaattcagcgatctt

SEQ ID NO: 102233 - DNA, 20 bp, Artificial Sequence
  MKO10102233_B_Nsg2
  gRNA
ctgcaaatgattaacctcca

SEQ ID NO: 102234 - DNA, 20 bp, Artificial Sequence
  MKO10102234_B_Nsg2
  gRNA
gccaaagatcgctgaattta

SEQ ID NO: 102235 - DNA, 20 bp, Artificial Sequence
  MKO10102235_B_Nsl1
  gRNA
tcaccctgttgtacatcctc

SEQ ID NO: 102236 - DNA, 20 bp, Artificial Sequence
  MKO10102236_B_Nsl1
  gRNA
gacactctcaaggatccttc

SEQ ID NO: 102237 - DNA, 20 bp, Artificial Sequence
  MKO10102237_B_Nsl1
  gRNA
atgctctttagcttcctccc

SEQ ID NO: 102238 - DNA, 20 bp, Artificial Sequence
  MKO10102238_B_Nsmaf
  gRNA
ttcatttcagggcaaaatca

SEQ ID NO: 102239 - DNA, 20 bp, Artificial Sequence
  MKO10102239_B_Nsmaf
  gRNA
ttccttactgcttctcaact

SEQ ID NO: 102240 - DNA, 20 bp, Artificial Sequence
  MKO10102240_B_Nsmaf
  gRNA
ctactttgcaaagtgtttat

SEQ ID NO: 102241 - DNA, 20 bp, Artificial Sequence
  MKO10102241_B_Nsmce1
  gRNA
ctcgcataccagtgcataaa

SEQ ID NO: 102242 - DNA, 20 bp, Artificial Sequence
  MKO10102242_B_Nsmce1
  gRNA
aaacttctgcagcacctgct

SEQ ID NO: 102243 - DNA, 20 bp, Artificial Sequence
  MKO10102243_B_Nsmce1
  gRNA
cctcgtgctgccctgcatgt

SEQ ID NO: 102244 - DNA, 20 bp, Artificial Sequence
  MKO10102244_B_Nsmce2
  gRNA
actgcacagccttaacataa

SEQ ID NO: 102245 - DNA, 20 bp, Artificial Sequence
  MKO10102245_B_Nsmce2
  gRNA
agtgagtagtgagtacagta

SEQ ID NO: 102246 - DNA, 20 bp, Artificial Sequence
  MKO10102246_B_Nsmce2
  gRNA
tgcagttcaagcaacagctg

SEQ ID NO: 102247 - DNA, 20 bp, Artificial Sequence
  MKO10102247_B_Nsmce4a
  gRNA
tccgttgtagctgacacata

SEQ ID NO: 102248 - DNA, 20 bp, Artificial Sequence
  MKO10102248_B_Nsmce4a
  gRNA
ggatgcccagtttcttgttc

SEQ ID NO: 102249 - DNA, 20 bp, Artificial Sequence
  MKO10102249_B_Nsmce4a
  gRNA
cgggaagacatactgaatgc

SEQ ID NO: 102250 - DNA, 20 bp, Artificial Sequence
  MKO10102250_B_Nsmf
  gRNA
agtcaccctgagaaccgcaa

SEQ ID NO: 102251 - DNA, 20 bp, Artificial Sequence
  MKO10102251_B_Nsmf
  gRNA
tgtgcctacctgcaccgttg

SEQ ID NO: 102252 - DNA, 20 bp, Artificial Sequence
  MKO10102252_B_Nsmf
  gRNA
ggacccgtcgtggccagagt

SEQ ID NO: 102253 - DNA, 20 bp, Artificial Sequence
  MKO10102253_B_Nsun2
  gRNA
caagggaaacatcagccgcc

SEQ ID NO: 102254 - DNA, 20 bp, Artificial Sequence
  MKO10102254_B_Nsun2
  gRNA
ggcaaagttccatcagttcc

SEQ ID NO: 102255 - DNA, 20 bp, Artificial Sequence
  MKO10102255_B_Nsun2
  gRNA
ctcggagtgactccatgaat

SEQ ID NO: 102256 - DNA, 20 bp, Artificial Sequence
  MKO10102256_B_Nsun3
  gRNA
ttcggtctggggttcggctg

SEQ ID NO: 102257 - DNA, 20 bp, Artificial Sequence
  MKO10102257_B_Nsun3
  gRNA
catgttcaaatgatcgaagc

SEQ ID NO: 102258 - DNA, 20 bp, Artificial Sequence
  MKO10102258_B_Nsun3
  gRNA
agtaccttgtcaaatgttgc

SEQ ID NO: 102259 - DNA, 20 bp, Artificial Sequence
  MKO10102259_B_Nsun4
  gRNA
ggcttcactgacgaagtcct

SEQ ID NO: 102260 - DNA, 20 bp, Artificial Sequence
  MKO10102260_B_Nsun4
  gRNA
tctcatggactactacctga

SEQ ID NO: 102261 - DNA, 20 bp, Artificial Sequence
  MKO10102261_B_Nsun4
  gRNA
attctgcagagcaagccgac

SEQ ID NO: 102262 - DNA, 20 bp, Artificial Sequence
  MKO10102262_B_Nsun5
  gRNA
aaataatcgattgcatcctc

SEQ ID NO: 102263 - DNA, 20 bp, Artificial Sequence
  MKO10102263_B_Nsun5
  gRNA
gtgcgagacgcagcgctact

SEQ ID NO: 102264 - DNA, 20 bp, Artificial Sequence
  MKO10102264_B_Nsun5
  gRNA
gtgttcacacgcacgaaccg

SEQ ID NO: 102265 - DNA, 20 bp, Artificial Sequence
  MKO10102265_B_Nsun6
  gRNA
cacaaaccttggtccagtca

SEQ ID NO: 102266 - DNA, 20 bp, Artificial Sequence
  MKO10102266_B_Nsun6
  gRNA
gtgattgttggcgcacagtg

SEQ ID NO: 102267 - DNA, 20 bp, Artificial Sequence
  MKO10102267_B_Nsun6
  gRNA
tttgaagctgacacaattcc

SEQ ID NO: 102268 - DNA, 20 bp, Artificial Sequence
  MKO10102268_B_Nsun7
  gRNA
gaagtcgagaaccttctaaa

SEQ ID NO: 102269 - DNA, 20 bp, Artificial Sequence
  MKO10102269_B_Nsun7
  gRNA
ttaagacattgaagcagtgc

SEQ ID NO: 102270 - DNA, 20 bp, Artificial Sequence
  MKO10102270_B_Nsun7
  gRNA
aattattatagacttcttca

SEQ ID NO: 102271 - DNA, 20 bp, Artificial Sequence
  MKO10102271_B_Nt5c1a
  gRNA
gacgatgcgctctgactcat

SEQ ID NO: 102272 - DNA, 20 bp, Artificial Sequence
  MKO10102272_B_Nt5c1a
  gRNA
aggctgtgaacaagcgactt

SEQ ID NO: 102273 - DNA, 20 bp, Artificial Sequence
  MKO10102273_B_Nt5c1a
  gRNA
tcaaagatatcttcgctatc

SEQ ID NO: 102274 - DNA, 20 bp, Artificial Sequence
  MKO10102274_B_Nt5c1b
  gRNA
gatttcgtacaacgtaacct

SEQ ID NO: 102275 - DNA, 20 bp, Artificial Sequence
  MKO10102275_B_Nt5c1b
  gRNA
aatctacgaagaggaaggtc

SEQ ID NO: 102276 - DNA, 20 bp, Artificial Sequence
  MKO10102276_B_Nt5c1b
  gRNA
atcagtggtcccgaacatca

SEQ ID NO: 102277 - DNA, 20 bp, Artificial Sequence
  MKO10102277_B_Nt5c2
  gRNA
cttgtctttgacacgctcta

SEQ ID NO: 102278 - DNA, 20 bp, Artificial Sequence
  MKO10102278_B_Nt5c2
  gRNA
tctccagaatatgaatccct

SEQ ID NO: 102279 - DNA, 20 bp, Artificial Sequence
  MKO10102279_B_Nt5c2
  gRNA
atgattctacattccctacc

SEQ ID NO: 102280 - DNA, 20 bp, Artificial Sequence
  MKO10102280_B_Nt5c3b
  gRNA
cagcggcgtgatggcggagg

SEQ ID NO: 102281 - DNA, 20 bp, Artificial Sequence
  MKO10102281_B_Nt5c3b
  gRNA
taacagcaaaattatcagtg

SEQ ID NO: 102282 - DNA, 20 bp, Artificial Sequence
  MKO10102282_B_Nt5c3b
  gRNA
ctgagcagatttgcttacaa

SEQ ID NO: 102283 - DNA, 20 bp, Artificial Sequence
  MKO10102283_B_Nt5c3
  gRNA
tacagatgaatgtcgaagaa

SEQ ID NO: 102284 - DNA, 20 bp, Artificial Sequence
  MKO10102284_B_Nt5c3
  gRNA
agttcccttacatggtagag

SEQ ID NO: 102285 - DNA, 20 bp, Artificial Sequence
  MKO10102285_B_Nt5c3
  gRNA
ataatttcttctactcttgt

SEQ ID NO: 102286 - DNA, 20 bp, Artificial Sequence
  MKO10102286_B_Nt5c
  gRNA
aaagcagccgtctcctggtg

SEQ ID NO: 102287 - DNA, 20 bp, Artificial Sequence
  MKO10102287_B_Nt5c
  gRNA
gccagtgtgtatgaatctcc

SEQ ID NO: 102288 - DNA, 20 bp, Artificial Sequence
  MKO10102288_B_Nt5c
  gRNA
gcctagaggagaccccaagc

SEQ ID NO: 102289 - DNA, 20 bp, Artificial Sequence
  MKO10102289_B_Nt5dc1
  gRNA
cacacagaagagcccccggc

SEQ ID NO: 102290 - DNA, 20 bp, Artificial Sequence
  MKO10102290_B_Nt5dc1
  gRNA
ctttgctcagttcttagtca

SEQ ID NO: 102291 - DNA, 20 bp, Artificial Sequence
  MKO10102291_B_Nt5dc1
  gRNA
atcagctgcaagtttaatga

SEQ ID NO: 102292 - DNA, 20 bp, Artificial Sequence
  MKO10102292_B_Nt5dc2
  gRNA
atttgcggtgctgagccgcc

SEQ ID NO: 102293 - DNA, 20 bp, Artificial Sequence
  MKO10102293_B_Nt5dc2
  gRNA
tgtgctgggtgccgccgtac

SEQ ID NO: 102294 - DNA, 20 bp, Artificial Sequence
  MKO10102294_B_Nt5dc2
  gRNA
ctgtgtggtggactactttc

SEQ ID NO: 102295 - DNA, 20 bp, Artificial Sequence
  MKO10102295_B_Nt5dc3
  gRNA
catatatttcgatgtctgac

SEQ ID NO: 102296 - DNA, 20 bp, Artificial Sequence
  MKO10102296_B_Nt5dc3
  gRNA
acctgtacactgtccccatc

SEQ ID NO: 102297 - DNA, 20 bp, Artificial Sequence
  MKO10102297_B_Nt5dc3
  gRNA
gagcagatgagtgacttcta

SEQ ID NO: 102298 - DNA, 20 bp, Artificial Sequence
  MKO10102298_B_Nt5e
  gRNA
atgaatgggtacttccccgc

SEQ ID NO: 102299 - DNA, 20 bp, Artificial Sequence
  MKO10102299_B_Nt5e
  gRNA
ttaatgtttgcgctcagaat

SEQ ID NO: 102300 - DNA, 20 bp, Artificial Sequence
  MKO10102300_B_Nt5e
  gRNA
cctctagcacatcagatatc

SEQ ID NO: 102301 - DNA, 20 bp, Artificial Sequence
  MKO10102301_B_Nt5m
  gRNA
gttactccagtatgcctggg

SEQ ID NO: 102302 - DNA, 20 bp, Artificial Sequence
  MKO10102302_B_Nt5m
  gRNA
ggactccttaccttctcata

SEQ ID NO: 102303 - DNA, 20 bp, Artificial Sequence
  MKO10102303_B_Nt5m
  gRNA
aggagaaggcgatcagcatc

SEQ ID NO: 102304 - DNA, 20 bp, Artificial Sequence
  MKO10102304_B_Ntan1
  gRNA
tcatcatacctgtatgtctc

SEQ ID NO: 102305 - DNA, 20 bp, Artificial Sequence
  MKO10102305_B_Ntan1
  gRNA
tgttcaacaagtgggacccc

SEQ ID NO: 102306 - DNA, 20 bp, Artificial Sequence
  MKO10102306_B_Ntan1
  gRNA
tcctaacctaccatcctttg

SEQ ID NO: 102307 - DNA, 20 bp, Artificial Sequence
  MKO10102307_B_Ntf3
  gRNA
tgccatggttacttctgcca

SEQ ID NO: 102308 - DNA, 20 bp, Artificial Sequence
  MKO10102308_B_Ntf3
  gRNA
ccggtcaaaaacggttgcag

SEQ ID NO: 102309 - DNA, 20 bp, Artificial Sequence
  MKO10102309_B_Ntf3
  gRNA
ggattatgtgggcaacccgg

SEQ ID NO: 102310 - DNA, 20 bp, Artificial Sequence
  MKO10102310_B_Ntf5
  gRNA
tgcagtcaacgcccgcacat

SEQ ID NO: 102311 - DNA, 20 bp, Artificial Sequence
  MKO10102311_B_Ntf5
  gRNA
gaatccagcgccagcctacg

SEQ ID NO: 102312 - DNA, 20 bp, Artificial Sequence
  MKO10102312_B_Ntf5
  gRNA
tgcacgctcctcagccgaac

SEQ ID NO: 102313 - DNA, 20 bp, Artificial Sequence
  MKO10102313_B_Nthl1
  gRNA
tgatgcaagtgcctccccga

SEQ ID NO: 102314 - DNA, 20 bp, Artificial Sequence
  MKO10102314_B_Nthl1
  gRNA
ctcaccattagccgcttcat

SEQ ID NO: 102315 - DNA, 20 bp, Artificial Sequence
  MKO10102315_B_Nthl1
  gRNA
cgactcacctatgcctgata

SEQ ID NO: 102316 - DNA, 20 bp, Artificial Sequence
  MKO10102316_B_Ntmt1
  gRNA
ctggctcctatgacgtgatc

SEQ ID NO: 102317 - DNA, 20 bp, Artificial Sequence
  MKO10102317_B_Ntmt1
  gRNA
ctgcagtgcggatgatccgg

SEQ ID NO: 102318 - DNA, 20 bp, Artificial Sequence
  MKO10102318_B_Ntmt1
  gRNA
cccgagcatgccgtccaccg

SEQ ID NO: 102319 - DNA, 20 bp, Artificial Sequence
  MKO10102319_B_Ntm
  gRNA
actgttcccgagtgatgccc

SEQ ID NO: 102320 - DNA, 20 bp, Artificial Sequence
  MKO10102320_B_Ntm
  gRNA
tgtaggctccggtctacctg

SEQ ID NO: 102321 - DNA, 20 bp, Artificial Sequence
  MKO10102321_B_Ntm
  gRNA
gaccggagcctacagtaacc

SEQ ID NO: 102322 - DNA, 20 bp, Artificial Sequence
  MKO10102322_B_Ntn1
  gRNA
agtggcggcccgcagtgttg

SEQ ID NO: 102323 - DNA, 20 bp, Artificial Sequence
  MKO10102323_B_Ntn1
  gRNA
agaagccctccttgcagtag

SEQ ID NO: 102324 - DNA, 20 bp, Artificial Sequence
  MKO10102324_B_Ntn1
  gRNA
gcagtggtgggtggcgccac

SEQ ID NO: 102325 - DNA, 20 bp, Artificial Sequence
  MKO10102325_B_Ntn3
  gRNA
tcactaacgcaaggtgccac

SEQ ID NO: 102326 - DNA, 20 bp, Artificial Sequence
  MKO10102326_B_Ntn3
  gRNA
gcagcctaccatagtccttc

SEQ ID NO: 102327 - DNA, 20 bp, Artificial Sequence
  MKO10102327_B_Ntn3
  gRNA
acctgtaaccgctgtgcccc

SEQ ID NO: 102328 - DNA, 20 bp, Artificial Sequence
  MKO10102328_B_Ntn4
  gRNA
cctaccacgtggaacgctcc

SEQ ID NO: 102329 - DNA, 20 bp, Artificial Sequence
  MKO10102329_B_Ntn4
  gRNA
gaaagcatgcaaccctcgca

SEQ ID NO: 102330 - DNA, 20 bp, Artificial Sequence
  MKO10102330_B_Ntn4
  gRNA
gtgcaccattgtacaatgac

SEQ ID NO: 102331 - DNA, 20 bp, Artificial Sequence
  MKO10102331_B_Ntn5
  gRNA
ttacctgatcgagatgcaac

SEQ ID NO: 102332 - DNA, 20 bp, Artificial Sequence
  MKO10102332_B_Ntn5
  gRNA
ggcctgacatgcaatcgctg

SEQ ID NO: 102333 - DNA, 20 bp, Artificial Sequence
  MKO10102333_B_Ntn5
  gRNA
gagcggctctgctggtagcc

SEQ ID NO: 102334 - DNA, 20 bp, Artificial Sequence
  MKO10102334_B_Ntng1
  gRNA
gggtctccacaggtaatatc

SEQ ID NO: 102335 - DNA, 20 bp, Artificial Sequence
  MKO10102335_B_Ntng1
  gRNA
gtgttactcacaggtgtttg

SEQ ID NO: 102336 - DNA, 20 bp, Artificial Sequence
  MKO10102336_B_Ntng1
  gRNA
gaatgtgagcacaacactac

SEQ ID NO: 102337 - DNA, 20 bp, Artificial Sequence
  MKO10102337_B_Ntng2
  gRNA
tgcccctacaggtgcggccg

SEQ ID NO: 102338 - DNA, 20 bp, Artificial Sequence
  MKO10102338_B_Ntng2
  gRNA
tgccctctcgcactgtgcac

SEQ ID NO: 102339 - DNA, 20 bp, Artificial Sequence
  MKO10102339_B_Ntng2
  gRNA
gcgcctgaaggattatgtca

SEQ ID NO: 102340 - DNA, 20 bp, Artificial Sequence
  MKO10102340_B_Ntpcr
  gRNA
ttcgatgtcgtcaccctgtc

SEQ ID NO: 102341 - DNA, 20 bp, Artificial Sequence
  MKO10102341_B_Ntpcr
  gRNA
gtgccaaccacgataatgcc

SEQ ID NO: 102342 - DNA, 20 bp, Artificial Sequence
  MKO10102342_B_Ntpcr
  gRNA
acactcacgtttcttaggac

SEQ ID NO: 102343 - DNA, 20 bp, Artificial Sequence
  MKO10102343_B_Ntrk1
  gRNA
gcccttcctgctcccaacgc

SEQ ID NO: 102344 - DNA, 20 bp, Artificial Sequence
  MKO10102344_B_Ntrk1
  gRNA
gaatctgtcctccaatgcgt

SEQ ID NO: 102345 - DNA, 20 bp, Artificial Sequence
  MKO10102345_B_Ntrk1
  gRNA
ccagcagcacctgcaacgct

SEQ ID NO: 102346 - DNA, 20 bp, Artificial Sequence
  MKO10102346_B_Ntrk2
  gRNA
acaagctgacgagtttgtcc

SEQ ID NO: 102347 - DNA, 20 bp, Artificial Sequence
  MKO10102347_B_Ntrk2
  gRNA
gctctactcacatgtgccgc

SEQ ID NO: 102348 - DNA, 20 bp, Artificial Sequence
  MKO10102348_B_Ntrk2
  gRNA
gtaagccacaaactttaagc

SEQ ID NO: 102349 - DNA, 20 bp, Artificial Sequence
  MKO10102349_B_Ntrk3
  gRNA
ctactcacatataacgcaag

SEQ ID NO: 102350 - DNA, 20 bp, Artificial Sequence
  MKO10102350_B_Ntrk3
  gRNA
gcagaaacttgtcaagtaac

SEQ ID NO: 102351 - DNA, 20 bp, Artificial Sequence
  MKO10102351_B_Ntrk3
  gRNA
gggttcttggcgaaggctct

SEQ ID NO: 102352 - DNA, 20 bp, Artificial Sequence
  MKO10102352_B_Ntsr1
  gRNA
atcgtctccagtccgaactg

SEQ ID NO: 102353 - DNA, 20 bp, Artificial Sequence
  MKO10102353_B_Ntsr1
  gRNA
ttcaacatgtccatcgagcc

SEQ ID NO: 102354 - DNA, 20 bp, Artificial Sequence
  MKO10102354_B_Ntsr1
  gRNA
gctgacgtagaagagagcgt

SEQ ID NO: 102355 - DNA, 20 bp, Artificial Sequence
  MKO10102355_B_Ntsr2
  gRNA
ggctgccgtaccatgcccgc

SEQ ID NO: 102356 - DNA, 20 bp, Artificial Sequence
  MKO10102356_B_Ntsr2
  gRNA
accttcacaggtgaacgtgc

SEQ ID NO: 102357 - DNA, 20 bp, Artificial Sequence
  MKO10102357_B_Ntsr2
  gRNA
tactgctacatccccgatga

SEQ ID NO: 102358 - DNA, 20 bp, Artificial Sequence
  MKO10102358_B_Nts
  gRNA
ttgtcaatagatctgcctcc

SEQ ID NO: 102359 - DNA, 20 bp, Artificial Sequence
  MKO10102359_B_Nts
  gRNA
attagcttctcagtagtagt

SEQ ID NO: 102360 - DNA, 20 bp, Artificial Sequence
  MKO10102360_B_Nts
  gRNA
gagaggaatgaatctccagc

SEQ ID NO: 102361 - DNA, 20 bp, Artificial Sequence
  MKO10102361_B_Nuak1
  gRNA
tgctataaaatccatccgta

SEQ ID NO: 102362 - DNA, 20 bp, Artificial Sequence
  MKO10102362_B_Nuak1
  gRNA
aatctgccggaagaagtgtc

SEQ ID NO: 102363 - DNA, 20 bp, Artificial Sequence
  MKO10102363_B_Nuak1
  gRNA
tgcagaatggtgtggtccac

SEQ ID NO: 102364 - DNA, 20 bp, Artificial Sequence
  MKO10102364_B_Nuak2
  gRNA
aggtggccatcaagtccatc

SEQ ID NO: 102365 - DNA, 20 bp, Artificial Sequence
  MKO10102365_B_Nuak2
  gRNA
tcacctggtggcagtagtgc

SEQ ID NO: 102366 - DNA, 20 bp, Artificial Sequence
  MKO10102366_B_Nuak2
  gRNA
gctcaccttgatgtttccat

SEQ ID NO: 102367 - DNA, 20 bp, Artificial Sequence
  MKO10102367_B_Nub1
  gRNA
acagaacgaggccgagctga

SEQ ID NO: 102368 - DNA, 20 bp, Artificial Sequence
  MKO10102368_B_Nub1
  gRNA
gcacgataagaaaagcttgt

SEQ ID NO: 102369 - DNA, 20 bp, Artificial Sequence
  MKO10102369_B_Nub1
  gRNA
ctctaccagtgacatgcaag

SEQ ID NO: 102370 - DNA, 20 bp, Artificial Sequence
  MKO10102370_B_Nubp1
  gRNA
gtgtatctccatcctccgct

SEQ ID NO: 102371 - DNA, 20 bp, Artificial Sequence
  MKO10102371_B_Nubp1
  gRNA
ggcctgggcgctgtcggccc

SEQ ID NO: 102372 - DNA, 20 bp, Artificial Sequence
  MKO10102372_B_Nubp1
  gRNA
ttcccacaggttcaccagag

SEQ ID NO: 102373 - DNA, 20 bp, Artificial Sequence
  MKO10102373_B_Nubp2
  gRNA
ctaagactcacagcgcagtg

SEQ ID NO: 102374 - DNA, 20 bp, Artificial Sequence
  MKO10102374_B_Nubp2
  gRNA
tggaagccctgcgcccctac

SEQ ID NO: 102375 - DNA, 20 bp, Artificial Sequence
  MKO10102375_B_Nubp2
  gRNA
gccgtgcaccagtgtgacaa

SEQ ID NO: 102376 - DNA, 20 bp, Artificial Sequence
  MKO10102376_B_Nubpl
  gRNA
agtgaaccttgctcttgcgc

SEQ ID NO: 102377 - DNA, 20 bp, Artificial Sequence
  MKO10102377_B_Nubpl
  gRNA
ttgctgccagcgcaagagca

SEQ ID NO: 102378 - DNA, 20 bp, Artificial Sequence
  MKO10102378_B_Nubpl
  gRNA
ttattccagataacctaatg

SEQ ID NO: 102379 - DNA, 20 bp, Artificial Sequence
  MKO10102379_B_Nucb1
  gRNA
gtgcagcgtcatactgggcg

SEQ ID NO: 102380 - DNA, 20 bp, Artificial Sequence
  MKO10102380_B_Nucb1
  gRNA
ctagcacgttgatgacctcc

SEQ ID NO: 102381 - DNA, 20 bp, Artificial Sequence
  MKO10102381_B_Nucb1
  gRNA
caccttaatgtcctcagcgt

SEQ ID NO: 102382 - DNA, 20 bp, Artificial Sequence
  MKO10102382_B_Nucb2
  gRNA
agacttcaatcacttgcttg

SEQ ID NO: 102383 - DNA, 20 bp, Artificial Sequence
  MKO10102383_B_Nucb2
  gRNA
gatgctcatcaaagctaagc

SEQ ID NO: 102384 - DNA, 20 bp, Artificial Sequence
  MKO10102384_B_Nucb2
  gRNA
caagcaagtgattgaagtct

SEQ ID NO: 102385 - DNA, 20 bp, Artificial Sequence
  MKO10102385_B_Nucks1
  gRNA
cccgagaggctaaaaataag

SEQ ID NO: 102386 - DNA, 20 bp, Artificial Sequence
  MKO10102386_B_Nucks1
  gRNA
cgagtgagaatcatccttct

SEQ ID NO: 102387 - DNA, 20 bp, Artificial Sequence
  MKO10102387_B_Nucks1
  gRNA
tttcaggaatcagatgatgc

SEQ ID NO: 102388 - DNA, 20 bp, Artificial Sequence
  MKO10102388_B_Nudcd1
  gRNA
tatgctgcaattgaacctaa

SEQ ID NO: 102389 - DNA, 20 bp, Artificial Sequence
  MKO10102389_B_Nudcd1
  gRNA
gtctactacattgataacct

SEQ ID NO: 102390 - DNA, 20 bp, Artificial Sequence
  MKO10102390_B_Nudcd1
  gRNA
gcatgtgttctaatgtatac

SEQ ID NO: 102391 - DNA, 20 bp, Artificial Sequence
  MKO10102391_B_Nudcd2
  gRNA
gctccactaaagtcaaaacc

SEQ ID NO: 102392 - DNA, 20 bp, Artificial Sequence
  MKO10102392_B_Nudcd2
  gRNA
gattctacaattgctgatga

SEQ ID NO: 102393 - DNA, 20 bp, Artificial Sequence
  MKO10102393_B_Nudcd2
  gRNA
acagtttgctgcatctctct

SEQ ID NO: 102394 - DNA, 20 bp, Artificial Sequence
  MKO10102394_B_Nudcd3
  gRNA
gagtgagcttcccctccatg

SEQ ID NO: 102395 - DNA, 20 bp, Artificial Sequence
  MKO10102395_B_Nudcd3
  gRNA
cgacatcgacaagatcaaca

SEQ ID NO: 102396 - DNA, 20 bp, Artificial Sequence
  MKO10102396_B_Nudcd3
  gRNA
ctcggatggtgccactgcta

SEQ ID NO: 102397 - DNA, 20 bp, Artificial Sequence
  MKO10102397_B_Nudc
  gRNA
caaggctgccgttcttgagc

SEQ ID NO: 102398 - DNA, 20 bp, Artificial Sequence
  MKO10102398_B_Nudc
  gRNA
tgaacaggatgcggaggacg

SEQ ID NO: 102399 - DNA, 20 bp, Artificial Sequence
  MKO10102399_B_Nudc
  gRNA
accacagaaaaaggatgcag

SEQ ID NO: 102400 - DNA, 20 bp, Artificial Sequence
  MKO10102400_B_Nudt10
  gRNA
caagatcgaagatgccatca

SEQ ID NO: 102401 - DNA, 20 bp, Artificial Sequence
  MKO10102401_B_Nudt10
  gRNA
cgatccagcggtcggggtag

SEQ ID NO: 102402 - DNA, 20 bp, Artificial Sequence
  MKO10102402_B_Nudt10
  gRNA
gcccgtgcacgccgagtacc

SEQ ID NO: 102403 - DNA, 20 bp, Artificial Sequence
  MKO10102403_B_Nudt11
  gRNA
cgatccagcggtcggggtag

SEQ ID NO: 102404 - DNA, 20 bp, Artificial Sequence
  MKO10102404_B_Nudt11
  gRNA
caagatcgaagatgccatca

SEQ ID NO: 102405 - DNA, 20 bp, Artificial Sequence
  MKO10102405_B_Nudt11
  gRNA
cctcgtcctcgcgctcgctg

SEQ ID NO: 102406 - DNA, 20 bp, Artificial Sequence
  MKO10102406_B_Nudt12
  gRNA
atgccctcctcgttaatgat

SEQ ID NO: 102407 - DNA, 20 bp, Artificial Sequence
  MKO10102407_B_Nudt12
  gRNA
agctggcaaagccggacttc

SEQ ID NO: 102408 - DNA, 20 bp, Artificial Sequence
  MKO10102408_B_Nudt12
  gRNA
gccaagtaaccctttacatc

SEQ ID NO: 102409 - DNA, 20 bp, Artificial Sequence
  MKO10102409_B_Nudt13
  gRNA
tgctgcccgccacgttcttc

SEQ ID NO: 102410 - DNA, 20 bp, Artificial Sequence
  MKO10102410_B_Nudt13
  gRNA
gggaactaccgtgaacagca

SEQ ID NO: 102411 - DNA, 20 bp, Artificial Sequence
  MKO10102411_B_Nudt13
  gRNA
ccttacctgctcggctaagc

SEQ ID NO: 102412 - DNA, 20 bp, Artificial Sequence
  MKO10102412_B_Nudt14
  gRNA
gaggtagagcgtcacttccc

SEQ ID NO: 102413 - DNA, 20 bp, Artificial Sequence
  MKO10102413_B_Nudt14
  gRNA
ggaactgtttcaccaacacc

SEQ ID NO: 102414 - DNA, 20 bp, Artificial Sequence
  MKO10102414_B_Nudt14
  gRNA
atgtgtcttcataaagtccc

SEQ ID NO: 102415 - DNA, 20 bp, Artificial Sequence
  MKO10102415_B_Nudt15
  gRNA
aatgcgctcagagagaaacc

SEQ ID NO: 102416 - DNA, 20 bp, Artificial Sequence
  MKO10102416_B_Nudt15
  gRNA
ttcccttctaggttgggagt

SEQ ID NO: 102417 - DNA, 20 bp, Artificial Sequence
  MKO10102417_B_Nudt15
  gRNA
tcctttcaaggtgctctcct

SEQ ID NO: 102418 - DNA, 20 bp, Artificial Sequence
  MKO10102418_B_Nudt16l1
  gRNA
aatcagcttcggtaaggcgt

SEQ ID NO: 102419 - DNA, 20 bp, Artificial Sequence
  MKO10102419_B_Nudt16l1
  gRNA
atatttggcagtgctgacga

SEQ ID NO: 102420 - DNA, 20 bp, Artificial Sequence
  MKO10102420_B_Nudt16l1
  gRNA
tacacacagaaggatcgagt

SEQ ID NO: 102421 - DNA, 20 bp, Artificial Sequence
  MKO10102421_B_Nudt16
  gRNA
gtcagagcgttcaacgcgga

SEQ ID NO: 102422 - DNA, 20 bp, Artificial Sequence
  MKO10102422_B_Nudt16
  gRNA
caccatcacggaggacgtac

SEQ ID NO: 102423 - DNA, 20 bp, Artificial Sequence
  MKO10102423_B_Nudt16
  gRNA
gtccgattctacttagaatc

SEQ ID NO: 102424 - DNA, 20 bp, Artificial Sequence
  MKO10102424_B_Nudt17
  gRNA
ctacgtactcgtgatctccc

SEQ ID NO: 102425 - DNA, 20 bp, Artificial Sequence
  MKO10102425_B_Nudt17
  gRNA
tcacgagtacgtagagaatg

SEQ ID NO: 102426 - DNA, 20 bp, Artificial Sequence
  MKO10102426_B_Nudt17
  gRNA
acagagccgctcacaaatag

SEQ ID NO: 102427 - DNA, 20 bp, Artificial Sequence
  MKO10102427_B_Nudt18
  gRNA
gcggaagaatgtctgctacg

SEQ ID NO: 102428 - DNA, 20 bp, Artificial Sequence
  MKO10102428_B_Nudt18
  gRNA
atgccgcccctttgttccat

SEQ ID NO: 102429 - DNA, 20 bp, Artificial Sequence
  MKO10102429_B_Nudt18
  gRNA
aagacgagcccccaaagatt

SEQ ID NO: 102430 - DNA, 20 bp, Artificial Sequence
  MKO10102430_B_Nudt19
  gRNA
catgtagatttcgtacacat

SEQ ID NO: 102431 - DNA, 20 bp, Artificial Sequence
  MKO10102431_B_Nudt19
  gRNA
acagtggttgtccccatcag

SEQ ID NO: 102432 - DNA, 20 bp, Artificial Sequence
  MKO10102432_B_Nudt19
  gRNA
aaacattcagttgcctctga

SEQ ID NO: 102433 - DNA, 20 bp, Artificial Sequence
  MKO10102433_B_Nudt1
  gRNA
gatggacgtgcatatcttct

SEQ ID NO: 102434 - DNA, 20 bp, Artificial Sequence
  MKO10102434_B_Nudt1
  gRNA
ctggaatggcttcgggggca

SEQ ID NO: 102435 - DNA, 20 bp, Artificial Sequence
  MKO10102435_B_Nudt1
  gRNA
tgcccccgaagccattccag

SEQ ID NO: 102436 - DNA, 20 bp, Artificial Sequence
  MKO10102436_B_Nudt21
  gRNA
cagatacttggtcgtcaaga

SEQ ID NO: 102437 - DNA, 20 bp, Artificial Sequence
  MKO10102437_B_Nudt21
  gRNA
ccgcttaccaattatacttt

SEQ ID NO: 102438 - DNA, 20 bp, Artificial Sequence
  MKO10102438_B_Nudt21
  gRNA
aagttgtccccagctgcagc

SEQ ID NO: 102439 - DNA, 20 bp, Artificial Sequence
  MKO10102439_B_Nudt22
  gRNA
cgccatccacctctacagtc

SEQ ID NO: 102440 - DNA, 20 bp, Artificial Sequence
  MKO10102440_B_Nudt22
  gRNA
ttctcgtaccaccagcaacc

SEQ ID NO: 102441 - DNA, 20 bp, Artificial Sequence
  MKO10102441_B_Nudt22
  gRNA
cctgaggcccacgagtctac

SEQ ID NO: 102442 - DNA, 20 bp, Artificial Sequence
  MKO10102442_B_Nudt2
  gRNA
catcagacggcattcatcac

SEQ ID NO: 102443 - DNA, 20 bp, Artificial Sequence
  MKO10102443_B_Nudt2
  gRNA
tttcctcccgagtctctcgc

SEQ ID NO: 102444 - DNA, 20 bp, Artificial Sequence
  MKO10102444_B_Nudt2
  gRNA
aaacagccctgcgagagact

SEQ ID NO: 102445 - DNA, 20 bp, Artificial Sequence
  MKO10102445_B_Nudt3
  gRNA
cgtcatactttgagacgttg

SEQ ID NO: 102446 - DNA, 20 bp, Artificial Sequence
  MKO10102446_B_Nudt3
  gRNA
gacgatgagcacatacacgt

SEQ ID NO: 102447 - DNA, 20 bp, Artificial Sequence
  MKO10102447_B_Nudt3
  gRNA
gtacctcctcacacacttcc

SEQ ID NO: 102448 - DNA, 20 bp, Artificial Sequence
  MKO10102448_B_Nudt4
  gRNA
tgggaagactccgtgaatat

SEQ ID NO: 102449 - DNA, 20 bp, Artificial Sequence
  MKO10102449_B_Nudt4
  gRNA
tccctcacagcagcaccgcc

SEQ ID NO: 102450 - DNA, 20 bp, Artificial Sequence
  MKO10102450_B_Nudt4
  gRNA
tattcaagcagaatcaagac

SEQ ID NO: 102451 - DNA, 20 bp, Artificial Sequence
  MKO10102451_B_Nudt5
  gRNA
gaagttgcggaatgctctcc

SEQ ID NO: 102452 - DNA, 20 bp, Artificial Sequence
  MKO10102452_B_Nudt5
  gRNA
aaacagtgaaacttacaacc

SEQ ID NO: 102453 - DNA, 20 bp, Artificial Sequence
  MKO10102453_B_Nudt5
  gRNA
atttgaaaaaacaacttata

SEQ ID NO: 102454 - DNA, 20 bp, Artificial Sequence
  MKO10102454_B_Nudt6
  gRNA
acacaccaagttggagttgc

SEQ ID NO: 102455 - DNA, 20 bp, Artificial Sequence
  MKO10102455_B_Nudt6
  gRNA
ctgtatttgatgttagcacc

SEQ ID NO: 102456 - DNA, 20 bp, Artificial Sequence
  MKO10102456_B_Nudt6
  gRNA
cagaaggacggatagctgcc

SEQ ID NO: 102457 - DNA, 20 bp, Artificial Sequence
  MKO10102457_B_Nudt7
  gRNA
acctgataccgtcttgtgaa

SEQ ID NO: 102458 - DNA, 20 bp, Artificial Sequence
  MKO10102458_B_Nudt7
  gRNA
tcctttcacaagacggtatc

SEQ ID NO: 102459 - DNA, 20 bp, Artificial Sequence
  MKO10102459_B_Nudt7
  gRNA
ggggctgcatccccaccaag

SEQ ID NO: 102460 - DNA, 20 bp, Artificial Sequence
  MKO10102460_B_Nudt8
  gRNA
tggctcacccggtcatacac

SEQ ID NO: 102461 - DNA, 20 bp, Artificial Sequence
  MKO10102461_B_Nudt8
  gRNA
agtcccagtacttgccaacg

SEQ ID NO: 102462 - DNA, 20 bp, Artificial Sequence
  MKO10102462_B_Nudt8
  gRNA
accattcacctcctcaaggt

SEQ ID NO: 102463 - DNA, 20 bp, Artificial Sequence
  MKO10102463_B_Nudt9
  gRNA
tgcagttcgttgccatcaag

SEQ ID NO: 102464 - DNA, 20 bp, Artificial Sequence
  MKO10102464_B_Nudt9
  gRNA
agattgaaaacggaagaccc

SEQ ID NO: 102465 - DNA, 20 bp, Artificial Sequence
  MKO10102465_B_Nudt9
  gRNA
ggtctttacctggttataat

SEQ ID NO: 102466 - DNA, 20 bp, Artificial Sequence
  MKO10102466_B_Nuf2
  gRNA
tcacttcagagaaacgtgcc

SEQ ID NO: 102467 - DNA, 20 bp, Artificial Sequence
  MKO10102467_B_Nuf2
  gRNA
caatctcaaagtcattcacc

SEQ ID NO: 102468 - DNA, 20 bp, Artificial Sequence
  MKO10102468_B_Nuf2
  gRNA
attcctttatgcccatttgc

SEQ ID NO: 102469 - DNA, 20 bp, Artificial Sequence
  MKO10102469_B_Nufip1
  gRNA
agaagattgtccagttccat

SEQ ID NO: 102470 - DNA, 20 bp, Artificial Sequence
  MKO10102470_B_Nufip1
  gRNA
aatcttctcatgtgcactaa

SEQ ID NO: 102471 - DNA, 20 bp, Artificial Sequence
  MKO10102471_B_Nufip1
  gRNA
tcacagaaaaaatggaaaac

SEQ ID NO: 102472 - DNA, 20 bp, Artificial Sequence
  MKO10102472_B_Nufip2
  gRNA
attgtaagtgattatccttt

SEQ ID NO: 102473 - DNA, 20 bp, Artificial Sequence
  MKO10102473_B_Nufip2
  gRNA
ccatgctgcaggtattggtg

SEQ ID NO: 102474 - DNA, 20 bp, Artificial Sequence
  MKO10102474_B_Nufip2
  gRNA
ctttcaatggaggagaagcc

SEQ ID NO: 102475 - DNA, 20 bp, Artificial Sequence
  MKO10102475_B_Nuggc
  gRNA
gtttaccaggggaaacgcct

SEQ ID NO: 102476 - DNA, 20 bp, Artificial Sequence
  MKO10102476_B_Nuggc
  gRNA
agcatacctgatcggacaga

SEQ ID NO: 102477 - DNA, 20 bp, Artificial Sequence
  MKO10102477_B_Nuggc
  gRNA
agtgttgctcaagaccctcc

SEQ ID NO: 102478 - DNA, 20 bp, Artificial Sequence
  MKO10102478_B_Numa1
  gRNA
tccttcatctacacaatgcc

SEQ ID NO: 102479 - DNA, 20 bp, Artificial Sequence
  MKO10102479_B_Numa1
  gRNA
aatcctacagcagccactac

SEQ ID NO: 102480 - DNA, 20 bp, Artificial Sequence
  MKO10102480_B_Numa1
  gRNA
gactgggagcagtttgaata

SEQ ID NO: 102481 - DNA, 20 bp, Artificial Sequence
  MKO10102481_B_Numbl
  gRNA
acccaagtacctgggccacg

SEQ ID NO: 102482 - DNA, 20 bp, Artificial Sequence
  MKO10102482_B_Numbl
  gRNA
gtcagctgatgggctccgag

SEQ ID NO: 102483 - DNA, 20 bp, Artificial Sequence
  MKO10102483_B_Numbl
  gRNA
cttcacaaacgtgcattccc

SEQ ID NO: 102484 - DNA, 20 bp, Artificial Sequence
  MKO10102484_B_Numb
  gRNA
gttctgtgggtgtcagcgga

SEQ ID NO: 102485 - DNA, 20 bp, Artificial Sequence
  MKO10102485_B_Numb
  gRNA
aaagtgtagcttcccagtta

SEQ ID NO: 102486 - DNA, 20 bp, Artificial Sequence
  MKO10102486_B_Numb
  gRNA
gtagaagttgatgagtcaag

SEQ ID NO: 102487 - DNA, 20 bp, Artificial Sequence
  MKO10102487_B_Nup107
  gRNA
agagcatcatagtatgaccg

SEQ ID NO: 102488 - DNA, 20 bp, Artificial Sequence
  MKO10102488_B_Nup107
  gRNA
ttggcgttcgaggaatgatc

SEQ ID NO: 102489 - DNA, 20 bp, Artificial Sequence
  MKO10102489_B_Nup107
  gRNA
tcctcgtcacctccgcatcc

SEQ ID NO: 102490 - DNA, 20 bp, Artificial Sequence
  MKO10102490_B_Nup133
  gRNA
gaggctgggccaatagcgga

SEQ ID NO: 102491 - DNA, 20 bp, Artificial Sequence
  MKO10102491_B_Nup133
  gRNA
ctttctgtccatgtcgatga

SEQ ID NO: 102492 - DNA, 20 bp, Artificial Sequence
  MKO10102492_B_Nup133
  gRNA
agggccgttaccttagtgac

SEQ ID NO: 102493 - DNA, 20 bp, Artificial Sequence
  MKO10102493_B_Nup153
  gRNA
aagtatctttgtagccaccc

SEQ ID NO: 102494 - DNA, 20 bp, Artificial Sequence
  MKO10102494_B_Nup153
  gRNA
cacggtggaaagtgttccaa

SEQ ID NO: 102495 - DNA, 20 bp, Artificial Sequence
  MKO10102495_B_Nup153
  gRNA
acatcctctgcgttcccaat

SEQ ID NO: 102496 - DNA, 20 bp, Artificial Sequence
  MKO10102496_B_Nup155
  gRNA
gacatggattaccctctgca

SEQ ID NO: 102497 - DNA, 20 bp, Artificial Sequence
  MKO10102497_B_Nup155
  gRNA
acctcatgtaagacacttgc

SEQ ID NO: 102498 - DNA, 20 bp, Artificial Sequence
  MKO10102498_B_Nup155
  gRNA
ctcactgagtccatcaaaat

SEQ ID NO: 102499 - DNA, 20 bp, Artificial Sequence
  MKO10102499_B_Nup160
  gRNA
tgtgagtaatcgctgcatca

SEQ ID NO: 102500 - DNA, 20 bp, Artificial Sequence
  MKO10102500_B_Nup160
  gRNA
gtgatgcagcgattactcac

SEQ ID NO: 102501 - DNA, 20 bp, Artificial Sequence
  MKO10102501_B_Nup160
  gRNA
tacttaccaggtacgtcata

SEQ ID NO: 102502 - DNA, 20 bp, Artificial Sequence
  MKO10102502_B_Nup188
  gRNA
tttcttactacaaacctccc

SEQ ID NO: 102503 - DNA, 20 bp, Artificial Sequence
  MKO10102503_B_Nup188
  gRNA
ccaagaacttgctgactctt

SEQ ID NO: 102504 - DNA, 20 bp, Artificial Sequence
  MKO10102504_B_Nup188
  gRNA
tacccctgtaatcctcctga

SEQ ID NO: 102505 - DNA, 20 bp, Artificial Sequence
  MKO10102505_B_Nup205
  gRNA
cagctaccaatcccctggtg

SEQ ID NO: 102506 - DNA, 20 bp, Artificial Sequence
  MKO10102506_B_Nup205
  gRNA
gtctggttccttgttgcccc

SEQ ID NO: 102507 - DNA, 20 bp, Artificial Sequence
  MKO10102507_B_Nup205
  gRNA
ttcctcgtctagactgtatc

SEQ ID NO: 102508 - DNA, 20 bp, Artificial Sequence
  MKO10102508_B_Nup210l
  gRNA
ctctcgatgactcattgtcc

SEQ ID NO: 102509 - DNA, 20 bp, Artificial Sequence
  MKO10102509_B_Nup210l
  gRNA
gtttgagtggagtattgccc

SEQ ID NO: 102510 - DNA, 20 bp, Artificial Sequence
  MKO10102510_B_Nup210l
  gRNA
ccctgactatataattgaga

SEQ ID NO: 102511 - DNA, 20 bp, Artificial Sequence
  MKO10102511_B_Nup210
  gRNA
cttcgactggacaattgtga

SEQ ID NO: 102512 - DNA, 20 bp, Artificial Sequence
  MKO10102512_B_Nup210
  gRNA
ggcgacaccatcctagtgtc

SEQ ID NO: 102513 - DNA, 20 bp, Artificial Sequence
  MKO10102513_B_Nup210
  gRNA
gccatcgttgatctcatcca

SEQ ID NO: 102514 - DNA, 20 bp, Artificial Sequence
  MKO10102514_B_Nup214
  gRNA
gaagagcataccatacttat

SEQ ID NO: 102515 - DNA, 20 bp, Artificial Sequence
  MKO10102515_B_Nup214
  gRNA
gtattcactagacatcatgc

SEQ ID NO: 102516 - DNA, 20 bp, Artificial Sequence
  MKO10102516_B_Nup214
  gRNA
tgcatgatgtctagtgaata

SEQ ID NO: 102517 - DNA, 20 bp, Artificial Sequence
  MKO10102517_B_Nup35
  gRNA
aggatctgaaccaatgatgt

SEQ ID NO: 102518 - DNA, 20 bp, Artificial Sequence
  MKO10102518_B_Nup35
  gRNA
cctgctcataaagataagag

SEQ ID NO: 102519 - DNA, 20 bp, Artificial Sequence
  MKO10102519_B_Nup35
  gRNA
ggagttgtagctccaacaag

SEQ ID NO: 102520 - DNA, 20 bp, Artificial Sequence
  MKO10102520_B_Nup37
  gRNA
gagtgtatgctggcatcccg

SEQ ID NO: 102521 - DNA, 20 bp, Artificial Sequence
  MKO10102521_B_Nup37
  gRNA
tgagtgacgaccacacctgc

SEQ ID NO: 102522 - DNA, 20 bp, Artificial Sequence
  MKO10102522_B_Nup37
  gRNA
tgccagcatacactcattcc

SEQ ID NO: 102523 - DNA, 20 bp, Artificial Sequence
  MKO10102523_B_Nup43
  gRNA
ccctgtccgtcaatcagcag

SEQ ID NO: 102524 - DNA, 20 bp, Artificial Sequence
  MKO10102524_B_Nup43
  gRNA
ccactgctgattgacggaca

SEQ ID NO: 102525 - DNA, 20 bp, Artificial Sequence
  MKO10102525_B_Nup43
  gRNA
ttacagtgatagtatctgac

SEQ ID NO: 102526 - DNA, 20 bp, Artificial Sequence
  MKO10102526_B_Nup50
  gRNA
tgacgagccacccaaggtag

SEQ ID NO: 102527 - DNA, 20 bp, Artificial Sequence
  MKO10102527_B_Nup50
  gRNA
tctgcgctttgccttcttta

SEQ ID NO: 102528 - DNA, 20 bp, Artificial Sequence
  MKO10102528_B_Nup50
  gRNA
ctactcaccaaaggctgcct

SEQ ID NO: 102529 - DNA, 20 bp, Artificial Sequence
  MKO10102529_B_Nup54
  gRNA
tgttctgagtgccaccgaga

SEQ ID NO: 102530 - DNA, 20 bp, Artificial Sequence
  MKO10102530_B_Nup54
  gRNA
attctaccaattgctgttgc

SEQ ID NO: 102531 - DNA, 20 bp, Artificial Sequence
  MKO10102531_B_Nup54
  gRNA
ggaacaacaactacaactgc

SEQ ID NO: 102532 - DNA, 20 bp, Artificial Sequence
  MKO10102532_B_Nup62-il4i1
  gRNA
tggccgccaggacaagacgc

SEQ ID NO: 102533 - DNA, 20 bp, Artificial Sequence
  MKO10102533_B_Nup62-il4i1
  gRNA
cacagtatgatgagaacacg

SEQ ID NO: 102534 - DNA, 20 bp, Artificial Sequence
  MKO10102534_B_Nup62-il4i1
  gRNA
ccaccttgttgagtgccatc

SEQ ID NO: 102535 - DNA, 20 bp, Artificial Sequence
  MKO10102535_B_Nup62cl
  gRNA
aaccaagcactgattgagtc

SEQ ID NO: 102536 - DNA, 20 bp, Artificial Sequence
  MKO10102536_B_Nup62cl
  gRNA
gagtgaaaattgatcagagc

SEQ ID NO: 102537 - DNA, 20 bp, Artificial Sequence
  MKO10102537_B_Nup62cl
  gRNA
acaaatgttgactcctatag

SEQ ID NO: 102538 - DNA, 20 bp, Artificial Sequence
  MKO10102538_B_Nup62
  gRNA
tgcgctcctgttccttgcgc

SEQ ID NO: 102539 - DNA, 20 bp, Artificial Sequence
  MKO10102539_B_Nup62
  gRNA
gcgtgagaagacctacaagc

SEQ ID NO: 102540 - DNA, 20 bp, Artificial Sequence
  MKO10102540_B_Nup62
  gRNA
gttgttccaaagttgaatcc

SEQ ID NO: 102541 - DNA, 20 bp, Artificial Sequence
  MKO10102541_B_Nup85
  gRNA
gaaacttccttcaaccaaac

SEQ ID NO: 102542 - DNA, 20 bp, Artificial Sequence
  MKO10102542_B_Nup85
  gRNA
gctgctaaagatccagccag

SEQ ID NO: 102543 - DNA, 20 bp, Artificial Sequence
  MKO10102543_B_Nup85
  gRNA
aaaattaccgttcagtcata

SEQ ID NO: 102544 - DNA, 20 bp, Artificial Sequence
  MKO10102544_B_Nup88
  gRNA
cgataagtgctacatgatgt

SEQ ID NO: 102545 - DNA, 20 bp, Artificial Sequence
  MKO10102545_B_Nup88
  gRNA
gtgaaaaatctctcagcaat

SEQ ID NO: 102546 - DNA, 20 bp, Artificial Sequence
  MKO10102546_B_Nup88
  gRNA
tggcattagaattacctcag

SEQ ID NO: 102547 - DNA, 20 bp, Artificial Sequence
  MKO10102547_B_Nup93
  gRNA
ctgtcggcagacctttggca

SEQ ID NO: 102548 - DNA, 20 bp, Artificial Sequence
  MKO10102548_B_Nup93
  gRNA
ctcgagaggttcaaaagtgg

SEQ ID NO: 102549 - DNA, 20 bp, Artificial Sequence
  MKO10102549_B_Nup93
  gRNA
tgaatgtccgtgtccttcac

SEQ ID NO: 102550 - DNA, 20 bp, Artificial Sequence
  MKO10102550_B_Nup98
  gRNA
tttgggtttggcacatcaac

SEQ ID NO: 102551 - DNA, 20 bp, Artificial Sequence
  MKO10102551_B_Nup98
  gRNA
gaccatagtatctgtaccag

SEQ ID NO: 102552 - DNA, 20 bp, Artificial Sequence
  MKO10102552_B_Nup98
  gRNA
tcccactggtacagatacta

SEQ ID NO: 102553 - DNA, 20 bp, Artificial Sequence
  MKO10102553_B_Nupl1
  gRNA
cctgccactggatttactct

SEQ ID NO: 102554 - DNA, 20 bp, Artificial Sequence
  MKO10102554_B_Nupl1
  gRNA
gagagtaagaccactagctg

SEQ ID NO: 102555 - DNA, 20 bp, Artificial Sequence
  MKO10102555_B_Nupl1
  gRNA
tgaacctcccaaaccagcta

SEQ ID NO: 102556 - DNA, 20 bp, Artificial Sequence
  MKO10102556_B_Nupl2
  gRNA
cgtagaagtttgggagtcgt

SEQ ID NO: 102557 - DNA, 20 bp, Artificial Sequence
  MKO10102557_B_Nupl2
  gRNA
ttcaacagcttgtaagtcag

SEQ ID NO: 102558 - DNA, 20 bp, Artificial Sequence
  MKO10102558_B_Nupl2
  gRNA
tattcaagcctcaactcctc

SEQ ID NO: 102559 - DNA, 20 bp, Artificial Sequence
  MKO10102559_B_Nupr1l
  gRNA
tggcgcagatactgctcaac

SEQ ID NO: 102560 - DNA, 20 bp, Artificial Sequence
  MKO10102560_B_Nupr1l
  gRNA
gcagctacgcaccaactacc

SEQ ID NO: 102561 - DNA, 20 bp, Artificial Sequence
  MKO10102561_B_Nupr1l
  gRNA
cacgcaggtagtagtaatcc

SEQ ID NO: 102562 - DNA, 20 bp, Artificial Sequence
  MKO10102562_B_Nupr1
  gRNA
aaaccttaccgacacaggga

SEQ ID NO: 102563 - DNA, 20 bp, Artificial Sequence
  MKO10102563_B_Nupr1
  gRNA
tgaatatgatcagtacagcc

SEQ ID NO: 102564 - DNA, 20 bp, Artificial Sequence
  MKO10102564_B_Nupr1
  gRNA
tgtactgatcatattcatcc

SEQ ID NO: 102565 - DNA, 20 bp, Artificial Sequence
  MKO10102565_B_Nus1
  gRNA
ctcagtcaatctgatttgcc

SEQ ID NO: 102566 - DNA, 20 bp, Artificial Sequence
  MKO10102566_B_Nus1
  gRNA
tctgctgctgggctactaac

SEQ ID NO: 102567 - DNA, 20 bp, Artificial Sequence
  MKO10102567_B_Nus1
  gRNA
agtaatgacaaagacgatca

SEQ ID NO: 102568 - DNA, 20 bp, Artificial Sequence
  MKO10102568_B_Nusap1
  gRNA
acgtcaccaaaacgaggagg

SEQ ID NO: 102569 - DNA, 20 bp, Artificial Sequence
  MKO10102569_B_Nusap1
  gRNA
gggcctccgggctaacatga

SEQ ID NO: 102570 - DNA, 20 bp, Artificial Sequence
  MKO10102570_B_Nusap1
  gRNA
ttcctttcagactttgttgc

SEQ ID NO: 102571 - DNA, 20 bp, Artificial Sequence
  MKO10102571_B_Nutf2
  gRNA
ttgatgcatcatgccttaca

SEQ ID NO: 102572 - DNA, 20 bp, Artificial Sequence
  MKO10102572_B_Nutf2
  gRNA
atgctgatgatgcagctatc

SEQ ID NO: 102573 - DNA, 20 bp, Artificial Sequence
  MKO10102573_B_Nutf2
  gRNA
gaaaattcagcatagcatca

SEQ ID NO: 102574 - DNA, 20 bp, Artificial Sequence
  MKO10102574_B_Nutm1
  gRNA
tagcccagtgcttcgttccc

SEQ ID NO: 102575 - DNA, 20 bp, Artificial Sequence
  MKO10102575_B_Nutm1
  gRNA
ggcggcaacgcaaacctcaa

SEQ ID NO: 102576 - DNA, 20 bp, Artificial Sequence
  MKO10102576_B_Nutm1
  gRNA
agcgctacaaagtcttggcc

SEQ ID NO: 102577 - DNA, 20 bp, Artificial Sequence
  MKO10102577_B_Nvl
  gRNA
gtttgtcttacctgtggatc

SEQ ID NO: 102578 - DNA, 20 bp, Artificial Sequence
  MKO10102578_B_Nvl
  gRNA
aatcttaaagaactagaaga

SEQ ID NO: 102579 - DNA, 20 bp, Artificial Sequence
  MKO10102579_B_Nvl
  gRNA
aagagcaagacaagatgaag

SEQ ID NO: 102580 - DNA, 20 bp, Artificial Sequence
  MKO10102580_B_Nwd1
  gRNA
tagtcagtggcctgcgtatt

SEQ ID NO: 102581 - DNA, 20 bp, Artificial Sequence
  MKO10102581_B_Nwd1
  gRNA
acgagcgtgagccttgttct

SEQ ID NO: 102582 - DNA, 20 bp, Artificial Sequence
  MKO10102582_B_Nwd1
  gRNA
ctgcctagtcaggaggcccg

SEQ ID NO: 102583 - DNA, 20 bp, Artificial Sequence
  MKO10102583_B_Nxf1
  gRNA
tcttacctcgatgggattga

SEQ ID NO: 102584 - DNA, 20 bp, Artificial Sequence
  MKO10102584_B_Nxf1
  gRNA
ctaatcgtcggggagatggt

SEQ ID NO: 102585 - DNA, 20 bp, Artificial Sequence
  MKO10102585_B_Nxf1
  gRNA
tgtccccttcaatcccatcg

SEQ ID NO: 102586 - DNA, 20 bp, Artificial Sequence
  MKO10102586_B_Nxf2
  gRNA
agagaggtgtgaattatatc

SEQ ID NO: 102587 - DNA, 20 bp, Artificial Sequence
  MKO10102587_B_Nxf2
  gRNA
tcttacatcaacagggatga

SEQ ID NO: 102588 - DNA, 20 bp, Artificial Sequence
  MKO10102588_B_Nxf2
  gRNA
gatgatagtaaaactgagga

SEQ ID NO: 102589 - DNA, 20 bp, Artificial Sequence
  MKO10102589_B_Nxf3
  gRNA
gcatctcattcttcttcgca

SEQ ID NO: 102590 - DNA, 20 bp, Artificial Sequence
  MKO10102590_B_Nxf3
  gRNA
gtacactgactctctgataa

SEQ ID NO: 102591 - DNA, 20 bp, Artificial Sequence
  MKO10102591_B_Nxf3
  gRNA
gtgcagcatccctttcactc

SEQ ID NO: 102592 - DNA, 20 bp, Artificial Sequence
  MKO10102592_B_Nxf7
  gRNA
ctcctatgttgcccaacata

SEQ ID NO: 102593 - DNA, 20 bp, Artificial Sequence
  MKO10102593_B_Nxf7
  gRNA
tctcatagcacaccttatgt

SEQ ID NO: 102594 - DNA, 20 bp, Artificial Sequence
  MKO10102594_B_Nxf7
  gRNA
cttacccatggggctttgcc

SEQ ID NO: 102595 - DNA, 20 bp, Artificial Sequence
  MKO10102595_B_Nxnl1
  gRNA
gccgcacgaagaagtctttg

SEQ ID NO: 102596 - DNA, 20 bp, Artificial Sequence
  MKO10102596_B_Nxnl1
  gRNA
cggtacttgcgacggcgcag

SEQ ID NO: 102597 - DNA, 20 bp, Artificial Sequence
  MKO10102597_B_Nxnl1
  gRNA
cccgctcccggccgacatcc

SEQ ID NO: 102598 - DNA, 20 bp, Artificial Sequence
  MKO10102598_B_Nxnl2
  gRNA
cggaagcagatccgagagcg

SEQ ID NO: 102599 - DNA, 20 bp, Artificial Sequence
  MKO10102599_B_Nxnl2
  gRNA
tccccactcactgccggtag

SEQ ID NO: 102600 - DNA, 20 bp, Artificial Sequence
  MKO10102600_B_Nxnl2
  gRNA
cgtggcgatggtggacgtgc

SEQ ID NO: 102601 - DNA, 20 bp, Artificial Sequence
  MKO10102601_B_Nxn
  gRNA
acccttccgggaagttattg

SEQ ID NO: 102602 - DNA, 20 bp, Artificial Sequence
  MKO10102602_B_Nxn
  gRNA
atattcctagacgccaccac

SEQ ID NO: 102603 - DNA, 20 bp, Artificial Sequence
  MKO10102603_B_Nxn
  gRNA
ccgccgggcctcatcagtgt

SEQ ID NO: 102604 - DNA, 20 bp, Artificial Sequence
  MKO10102604_B_Nxpe2
  gRNA
ggtaaagaatctgtccatcg

SEQ ID NO: 102605 - DNA, 20 bp, Artificial Sequence
  MKO10102605_B_Nxpe2
  gRNA
gcagtgttgaatcacccatg

SEQ ID NO: 102606 - DNA, 20 bp, Artificial Sequence
  MKO10102606_B_Nxpe2
  gRNA
atttcttgaaggttcaacat

SEQ ID NO: 102607 - DNA, 20 bp, Artificial Sequence
  MKO10102607_B_Nxpe3
  gRNA
cagtggtggccatagccgta

SEQ ID NO: 102608 - DNA, 20 bp, Artificial Sequence
  MKO10102608_B_Nxpe3
  gRNA
taatgaccccgacaacatta

SEQ ID NO: 102609 - DNA, 20 bp, Artificial Sequence
  MKO10102609_B_Nxpe3
  gRNA
gtatggcggagattacctgc

SEQ ID NO: 102610 - DNA, 20 bp, Artificial Sequence
  MKO10102610_B_Nxpe4
  gRNA
tagaccaatgacccgataag

SEQ ID NO: 102611 - DNA, 20 bp, Artificial Sequence
  MKO10102611_B_Nxpe4
  gRNA
gaccaagttccagcgattga

SEQ ID NO: 102612 - DNA, 20 bp, Artificial Sequence
  MKO10102612_B_Nxpe4
  gRNA
ttccacaatccgccagtgga

SEQ ID NO: 102613 - DNA, 20 bp, Artificial Sequence
  MKO10102613_B_Nxpe5
  gRNA
tgccagacaacatccaccca

SEQ ID NO: 102614 - DNA, 20 bp, Artificial Sequence
  MKO10102614_B_Nxpe5
  gRNA
atgtctcagaatccatcgac

SEQ ID NO: 102615 - DNA, 20 bp, Artificial Sequence
  MKO10102615_B_Nxpe5
  gRNA
ctcccaccactgccgaagtg

SEQ ID NO: 102616 - DNA, 20 bp, Artificial Sequence
  MKO10102616_B_Nxph1
  gRNA
cctgcagcccaccgtctact

SEQ ID NO: 102617 - DNA, 20 bp, Artificial Sequence
  MKO10102617_B_Nxph1
  gRNA
aaaaatcgtggaattcgatt

SEQ ID NO: 102618 - DNA, 20 bp, Artificial Sequence
  MKO10102618_B_Nxph1
  gRNA
cctgttcatcttcatccgga

SEQ ID NO: 102619 - DNA, 20 bp, Artificial Sequence
  MKO10102619_B_Nxph2
  gRNA
ctgcctctccttgtagtccc

SEQ ID NO: 102620 - DNA, 20 bp, Artificial Sequence
  MKO10102620_B_Nxph2
  gRNA
cccatccaaaatctgctacc

SEQ ID NO: 102621 - DNA, 20 bp, Artificial Sequence
  MKO10102621_B_Nxph2
  gRNA
aaacttaacttgctcatcac

SEQ ID NO: 102622 - DNA, 20 bp, Artificial Sequence
  MKO10102622_B_Nxph3
  gRNA
ctgcttcgtgttcctagtgc

SEQ ID NO: 102623 - DNA, 20 bp, Artificial Sequence
  MKO10102623_B_Nxph3
  gRNA
ctagggctgttagccccacc

SEQ ID NO: 102624 - DNA, 20 bp, Artificial Sequence
  MKO10102624_B_Nxph3
  gRNA
acaccccaaacctccccggg

SEQ ID NO: 102625 - DNA, 20 bp, Artificial Sequence
  MKO10102625_B_Nxph4
  gRNA
cgggaagatgcggctgctcc

SEQ ID NO: 102626 - DNA, 20 bp, Artificial Sequence
  MKO10102626_B_Nxph4
  gRNA
attaaaagcgcgcgactctt

SEQ ID NO: 102627 - DNA, 20 bp, Artificial Sequence
  MKO10102627_B_Nxph4
  gRNA
gcggcacgatactgacgctt

SEQ ID NO: 102628 - DNA, 20 bp, Artificial Sequence
  MKO10102628_B_Nxt1
  gRNA
ggcagtctaccacgctgatt

SEQ ID NO: 102629 - DNA, 20 bp, Artificial Sequence
  MKO10102629_B_Nxt1
  gRNA
tatcttccacaccgtgttac

SEQ ID NO: 102630 - DNA, 20 bp, Artificial Sequence
  MKO10102630_B_Nxt1
  gRNA
caatgtctattacacgacta

SEQ ID NO: 102631 - DNA, 20 bp, Artificial Sequence
  MKO10102631_B_Nxt2
  gRNA
acagtgctcgttgtgaccag

SEQ ID NO: 102632 - DNA, 20 bp, Artificial Sequence
  MKO10102632_B_Nxt2
  gRNA
tcaggcatgtagagctgccg

SEQ ID NO: 102633 - DNA, 20 bp, Artificial Sequence
  MKO10102633_B_Nxt2
  gRNA
caatatttactatgagacaa

SEQ ID NO: 102634 - DNA, 20 bp, Artificial Sequence
  MKO10102634_B_Nyap1
  gRNA
catgacgatgcccgcgtccc

SEQ ID NO: 102635 - DNA, 20 bp, Artificial Sequence
  MKO10102635_B_Nyap1
  gRNA
cctcgcttcgacgatccctc

SEQ ID NO: 102636 - DNA, 20 bp, Artificial Sequence
  MKO10102636_B_Nyap1
  gRNA
ttgggcctagatttcacggg

SEQ ID NO: 102637 - DNA, 20 bp, Artificial Sequence
  MKO10102637_B_Nyap2
  gRNA
atggcccaggtcgtcgaaaa

SEQ ID NO: 102638 - DNA, 20 bp, Artificial Sequence
  MKO10102638_B_Nyap2
  gRNA
aggccaggacgccagttacg

SEQ ID NO: 102639 - DNA, 20 bp, Artificial Sequence
  MKO10102639_B_Nyap2
  gRNA
cttgccatcgctatgaatag

SEQ ID NO: 102640 - DNA, 20 bp, Artificial Sequence
  MKO10102640_B_Nynrin
  gRNA
agctggtggcacggttgcgc

SEQ ID NO: 102641 - DNA, 20 bp, Artificial Sequence
  MKO10102641_B_Nynrin
  gRNA
ggcatacctgtaatcgtaag

SEQ ID NO: 102642 - DNA, 20 bp, Artificial Sequence
  MKO10102642_B_Nynrin
  gRNA
ccatggccgtgcagtacttc

SEQ ID NO: 102643 - DNA, 20 bp, Artificial Sequence
  MKO10102643_B_Nyx
  gRNA
aggactcaccatgaagaagc

SEQ ID NO: 102644 - DNA, 20 bp, Artificial Sequence
  MKO10102644_B_Nyx
  gRNA
ggttattgtggcgcagcgac

SEQ ID NO: 102645 - DNA, 20 bp, Artificial Sequence
  MKO10102645_B_Nyx
  gRNA
ctttggcgactgcggcgccc

SEQ ID NO: 102646 - DNA, 20 bp, Artificial Sequence
  MKO10102646_B_OTTMUSG00000016609
  gRNA
tatagctgtgagattcttat

SEQ ID NO: 102647 - DNA, 20 bp, Artificial Sequence
  MKO10102647_B_OTTMUSG00000016609
  gRNA
tactgggtttaggttacatt

SEQ ID NO: 102648 - DNA, 20 bp, Artificial Sequence
  MKO10102648_B_OTTMUSG00000016609
  gRNA
gacttctagaagtttgaaaa

SEQ ID NO: 102649 - DNA, 20 bp, Artificial Sequence
  MKO10102649_B_Oacyl
  gRNA
gttcagaaacacgtcattct

SEQ ID NO: 102650 - DNA, 20 bp, Artificial Sequence
  MKO10102650_B_Oacyl
  gRNA
tgcaggttcatcaccttgct

SEQ ID NO: 102651 - DNA, 20 bp, Artificial Sequence
  MKO10102651_B_Oacyl
  gRNA
ggatggaacagactatagtg

SEQ ID NO: 102652 - DNA, 20 bp, Artificial Sequence
  MKO10102652_B_Oaf
  gRNA
atgccacacttgtagggcgc

SEQ ID NO: 102653 - DNA, 20 bp, Artificial Sequence
  MKO10102653_B_Oaf
  gRNA
ttacctcgttgtggacgagt

SEQ ID NO: 102654 - DNA, 20 bp, Artificial Sequence
  MKO10102654_B_Oaf
  gRNA
cctcagcctgccgcactgcg

SEQ ID NO: 102655 - DNA, 20 bp, Artificial Sequence
  MKO10102655_B_Oard1
  gRNA
tttgttctcaggattggatg

SEQ ID NO: 102656 - DNA, 20 bp, Artificial Sequence
  MKO10102656_B_Oard1
  gRNA
tggcctccaaactcttctgt

SEQ ID NO: 102657 - DNA, 20 bp, Artificial Sequence
  MKO10102657_B_Oard1
  gRNA
gacaatcctcactgatacaa

SEQ ID NO: 102658 - DNA, 20 bp, Artificial Sequence
  MKO10102658_B_Oas1a
  gRNA
ccaccggccacattccctgt

SEQ ID NO: 102659 - DNA, 20 bp, Artificial Sequence
  MKO10102659_B_Oas1a
  gRNA
acatccattcccttgttccc

SEQ ID NO: 102660 - DNA, 20 bp, Artificial Sequence
  MKO10102660_B_Oas1a
  gRNA
gggcaagtcagacgctgacc

SEQ ID NO: 102661 - DNA, 20 bp, Artificial Sequence
  MKO10102661_B_Oas1b
  gRNA
aaggactggaggcgtctagc

SEQ ID NO: 102662 - DNA, 20 bp, Artificial Sequence
  MKO10102662_B_Oas1b
  gRNA
ttctacgccaatctcatcag

SEQ ID NO: 102663 - DNA, 20 bp, Artificial Sequence
  MKO10102663_B_Oas1b
  gRNA
gcgtaccccgccggggaagg

SEQ ID NO: 102664 - DNA, 20 bp, Artificial Sequence
  MKO10102664_B_Oas1c
  gRNA
gggtctcaccgacaaatccc

SEQ ID NO: 102665 - DNA, 20 bp, Artificial Sequence
  MKO10102665_B_Oas1c
  gRNA
gcgacggggagagttcgttg

SEQ ID NO: 102666 - DNA, 20 bp, Artificial Sequence
  MKO10102666_B_Oas1c
  gRNA
acctccatcagaacttcatg

SEQ ID NO: 102667 - DNA, 20 bp, Artificial Sequence
  MKO10102667_B_Oas1d
  gRNA
gaaccatgatatgtccattg

SEQ ID NO: 102668 - DNA, 20 bp, Artificial Sequence
  MKO10102668_B_Oas1d
  gRNA
gtagactttgttgtagttac

SEQ ID NO: 102669 - DNA, 20 bp, Artificial Sequence
  MKO10102669_B_Oas1d
  gRNA
caaagcttgtgagattgata

SEQ ID NO: 102670 - DNA, 20 bp, Artificial Sequence
  MKO10102670_B_Oas1e
  gRNA
acaaatgccttctaatctac

SEQ ID NO: 102671 - DNA, 20 bp, Artificial Sequence
  MKO10102671_B_Oas1e
  gRNA
gtagactttgttgtagttaa

SEQ ID NO: 102672 - DNA, 20 bp, Artificial Sequence
  MKO10102672_B_Oas1e
  gRNA
tgtgatatgtcccttgtgaa

SEQ ID NO: 102673 - DNA, 20 bp, Artificial Sequence
  MKO10102673_B_Oas1f
  gRNA
gcttgggtgcacgatcctcc

SEQ ID NO: 102674 - DNA, 20 bp, Artificial Sequence
  MKO10102674_B_Oas1f
  gRNA
ctggtaccaacctactaggc

SEQ ID NO: 102675 - DNA, 20 bp, Artificial Sequence
  MKO10102675_B_Oas1f
  gRNA
gattcgaagccacttgtact

SEQ ID NO: 102676 - DNA, 20 bp, Artificial Sequence
  MKO10102676_B_Oas1g
  gRNA
catagacagtgagtagctcc

SEQ ID NO: 102677 - DNA, 20 bp, Artificial Sequence
  MKO10102677_B_Oas1g
  gRNA
gcttccagcctttgatgtcc

SEQ ID NO: 102678 - DNA, 20 bp, Artificial Sequence
  MKO10102678_B_Oas1g
  gRNA
tggcttacccaggacatcaa

SEQ ID NO: 102679 - DNA, 20 bp, Artificial Sequence
  MKO10102679_B_Oas1h
  gRNA
aggttggataagttcataga

SEQ ID NO: 102680 - DNA, 20 bp, Artificial Sequence
  MKO10102680_B_Oas1h
  gRNA
gagctaccccaagtttcagc

SEQ ID NO: 102681 - DNA, 20 bp, Artificial Sequence
  MKO10102681_B_Oas1h
  gRNA
agtgcttgaccagacaaatg

SEQ ID NO: 102682 - DNA, 20 bp, Artificial Sequence
  MKO10102682_B_Oas2
  gRNA
aattcctagaccagtcatct

SEQ ID NO: 102683 - DNA, 20 bp, Artificial Sequence
  MKO10102683_B_Oas2
  gRNA
accttgacgtcattgaactg

SEQ ID NO: 102684 - DNA, 20 bp, Artificial Sequence
  MKO10102684_B_Oas2
  gRNA
tcagttggatccaagatgac

SEQ ID NO: 102685 - DNA, 20 bp, Artificial Sequence
  MKO10102685_B_Oas3
  gRNA
aggcccggggtggccccccc

SEQ ID NO: 102686 - DNA, 20 bp, Artificial Sequence
  MKO10102686_B_Oas3
  gRNA
cgcaagaactctccaactgc

SEQ ID NO: 102687 - DNA, 20 bp, Artificial Sequence
  MKO10102687_B_Oas3
  gRNA
gcaacattcgcatggcaccc

SEQ ID NO: 102688 - DNA, 20 bp, Artificial Sequence
  MKO10102688_B_Oasl1
  gRNA
gcactacacgctgcagcacc

SEQ ID NO: 102689 - DNA, 20 bp, Artificial Sequence
  MKO10102689_B_Oasl1
  gRNA
tcatcttcacgatccagacc

SEQ ID NO: 102690 - DNA, 20 bp, Artificial Sequence
  MKO10102690_B_Oasl1
  gRNA
gctcaggagcactacagacg

SEQ ID NO: 102691 - DNA, 20 bp, Artificial Sequence
  MKO10102691_B_Oasl2
  gRNA
tgaagggttcgtagccgtga

SEQ ID NO: 102692 - DNA, 20 bp, Artificial Sequence
  MKO10102692_B_Oasl2
  gRNA
tctcgcctgctcttcgaaac

SEQ ID NO: 102693 - DNA, 20 bp, Artificial Sequence
  MKO10102693_B_Oasl2
  gRNA
ttacccaaagcatcgtaagc

SEQ ID NO: 102694 - DNA, 20 bp, Artificial Sequence
  MKO10102694_B_Oat
  gRNA
tgtactcctcgtattcacca

SEQ ID NO: 102695 - DNA, 20 bp, Artificial Sequence
  MKO10102695_B_Oat
  gRNA
ccggatccaggatacctgac

SEQ ID NO: 102696 - DNA, 20 bp, Artificial Sequence
  MKO10102696_B_Oat
  gRNA
agagttcccgaactcctgtc

SEQ ID NO: 102697 - DNA, 20 bp, Artificial Sequence
  MKO10102697_B_Oaz1
  gRNA
ccttaattgctgtagtaacc

SEQ ID NO: 102698 - DNA, 20 bp, Artificial Sequence
  MKO10102698_B_Oaz1
  gRNA
tgactgttccctcgcccacc

SEQ ID NO: 102699 - DNA, 20 bp, Artificial Sequence
  MKO10102699_B_Oaz1
  gRNA
cacccacccctgaagatccc

SEQ ID NO: 102700 - DNA, 20 bp, Artificial Sequence
  MKO10102700_B_Oaz2
  gRNA
ccgaggtgaaggtctcttcc

SEQ ID NO: 102701 - DNA, 20 bp, Artificial Sequence
  MKO10102701_B_Oaz2
  gRNA
actgctcacctctgtcttcc

SEQ ID NO: 102702 - DNA, 20 bp, Artificial Sequence
  MKO10102702_B_Oaz2
  gRNA
tatattagagctgagagaga

SEQ ID NO: 102703 - DNA, 20 bp, Artificial Sequence
  MKO10102703_B_Oaz3
  gRNA
acatgtttagggaggctcac

SEQ ID NO: 102704 - DNA, 20 bp, Artificial Sequence
  MKO10102704_B_Oaz3
  gRNA
ccatatcaggccttggatca

SEQ ID NO: 102705 - DNA, 20 bp, Artificial Sequence
  MKO10102705_B_Oaz3
  gRNA
ctcgaagcccatgtagctaa

SEQ ID NO: 102706 - DNA, 20 bp, Artificial Sequence
  MKO10102706_B_Obfc1
  gRNA
gcgatttgcatgttccacac

SEQ ID NO: 102707 - DNA, 20 bp, Artificial Sequence
  MKO10102707_B_Obfc1
  gRNA
aataaggcgggtagatatca

SEQ ID NO: 102708 - DNA, 20 bp, Artificial Sequence
  MKO10102708_B_Obfc1
  gRNA
tgcgcacagagcctcggact

SEQ ID NO: 102709 - DNA, 20 bp, Artificial Sequence
  MKO10102709_B_Obox1
  gRNA
caagtactgccagagtcaaa

SEQ ID NO: 102710 - DNA, 20 bp, Artificial Sequence
  MKO10102710_B_Obox1
  gRNA
ctacttaagcaagagtctca

SEQ ID NO: 102711 - DNA, 20 bp, Artificial Sequence
  MKO10102711_B_Obox1
  gRNA
aaatatgttaacaaacaaac

SEQ ID NO: 102712 - DNA, 20 bp, Artificial Sequence
  MKO10102712_B_Obox2
  gRNA
ctacttaagcaagagtctga

SEQ ID NO: 102713 - DNA, 20 bp, Artificial Sequence
  MKO10102713_B_Obox2
  gRNA
tcatctgcctgtacttagct

SEQ ID NO: 102714 - DNA, 20 bp, Artificial Sequence
  MKO10102714_B_Obox2
  gRNA
agaacaaccgagctaagtac

SEQ ID NO: 102715 - DNA, 20 bp, Artificial Sequence
  MKO10102715_B_Obox3
  gRNA
cgaaactttcttaaagccat

SEQ ID NO: 102716 - DNA, 20 bp, Artificial Sequence
  MKO10102716_B_Obox3
  gRNA
ttaacatatctatctgacag

SEQ ID NO: 102717 - DNA, 20 bp, Artificial Sequence
  MKO10102717_B_Obox3
  gRNA
cttgcatccaaaactccaag

SEQ ID NO: 102718 - DNA, 20 bp, Artificial Sequence
  MKO10102718_B_Obox5
  gRNA
tttgaagccacttgaagttt

SEQ ID NO: 102719 - DNA, 20 bp, Artificial Sequence
  MKO10102719_B_Obox5
  gRNA
cccaaacgagaagaaaatta

SEQ ID NO: 102720 - DNA, 20 bp, Artificial Sequence
  MKO10102720_B_Obox5
  gRNA
aaatatgttaacaaacaaac

SEQ ID NO: 102721 - DNA, 20 bp, Artificial Sequence
  MKO10102721_B_Obox6
  gRNA
attctggagactctcccgct

SEQ ID NO: 102722 - DNA, 20 bp, Artificial Sequence
  MKO10102722_B_Obox6
  gRNA
gagtcacaaggctgactcgt

SEQ ID NO: 102723 - DNA, 20 bp, Artificial Sequence
  MKO10102723_B_Obox6
  gRNA
aatacgcactgtatacaccg

SEQ ID NO: 102724 - DNA, 20 bp, Artificial Sequence
  MKO10102724_B_Obp1a
  gRNA
ctataaaatgttaagttctc

SEQ ID NO: 102725 - DNA, 20 bp, Artificial Sequence
  MKO10102725_B_Obp1a
  gRNA
agagtagacaagatagagag

SEQ ID NO: 102726 - DNA, 20 bp, Artificial Sequence
  MKO10102726_B_Obp1a
  gRNA
tcgtagccttacctgtgaaa

SEQ ID NO: 102727 - DNA, 20 bp, Artificial Sequence
  MKO10102727_B_Obp2a
  gRNA
atctgcagttcataacacga

SEQ ID NO: 102728 - DNA, 20 bp, Artificial Sequence
  MKO10102728_B_Obp2a
  gRNA
tcacaagcggtgtatttgcc

SEQ ID NO: 102729 - DNA, 20 bp, Artificial Sequence
  MKO10102729_B_Obp2a
  gRNA
tggagaccacagttgtattc

SEQ ID NO: 102730 - DNA, 20 bp, Artificial Sequence
  MKO10102730_B_Obp2b
  gRNA
agaagtctcctgtatataga

SEQ ID NO: 102731 - DNA, 20 bp, Artificial Sequence
  MKO10102731_B_Obp2b
  gRNA
acactcaccagaatgttagc

SEQ ID NO: 102732 - DNA, 20 bp, Artificial Sequence
  MKO10102732_B_Obp2b
  gRNA
caagaaatttgcaatgagca

SEQ ID NO: 102733 - DNA, 20 bp, Artificial Sequence
  MKO10102733_B_Obscn
  gRNA
cagcgccaagtacgacatcg

SEQ ID NO: 102734 - DNA, 20 bp, Artificial Sequence
  MKO10102734_B_Obscn
  gRNA
tgtccggtggctacggaacc

SEQ ID NO: 102735 - DNA, 20 bp, Artificial Sequence
  MKO10102735_B_Obscn
  gRNA
gaccgccctgtcactattga

SEQ ID NO: 102736 - DNA, 20 bp, Artificial Sequence
  MKO10102736_B_Obsl1
  gRNA
cagaaccgttgaacacgaca

SEQ ID NO: 102737 - DNA, 20 bp, Artificial Sequence
  MKO10102737_B_Obsl1
  gRNA
ccatcctgaagcgtttaccc

SEQ ID NO: 102738 - DNA, 20 bp, Artificial Sequence
  MKO10102738_B_Obsl1
  gRNA
gttaccaaccttggatagtg

SEQ ID NO: 102739 - DNA, 20 bp, Artificial Sequence
  MKO10102739_B_Oc90
  gRNA
gctgctgcttccagcatcgc

SEQ ID NO: 102740 - DNA, 20 bp, Artificial Sequence
  MKO10102740_B_Oc90
  gRNA
gcctaggttcccacttcacc

SEQ ID NO: 102741 - DNA, 20 bp, Artificial Sequence
  MKO10102741_B_Oc90
  gRNA
aatccccaggaattgcctcc

SEQ ID NO: 102742 - DNA, 20 bp, Artificial Sequence
  MKO10102742_B_Oca2
  gRNA
aggaaagttctggcagctgt

SEQ ID NO: 102743 - DNA, 20 bp, Artificial Sequence
  MKO10102743_B_Oca2
  gRNA
ggaattcatcccaaaagaaa

SEQ ID NO: 102744 - DNA, 20 bp, Artificial Sequence
  MKO10102744_B_Oca2
  gRNA
acagctgccagaactttcct

SEQ ID NO: 102745 - DNA, 20 bp, Artificial Sequence
  MKO10102745_B_Ocel1
  gRNA
ccgctatgccgcagtgttcc

SEQ ID NO: 102746 - DNA, 20 bp, Artificial Sequence
  MKO10102746_B_Ocel1
  gRNA
gctgcccccgccacgaagcc

SEQ ID NO: 102747 - DNA, 20 bp, Artificial Sequence
  MKO10102747_B_Ocel1
  gRNA
ggctcgctgtaactacctga

SEQ ID NO: 102748 - DNA, 20 bp, Artificial Sequence
  MKO10102748_B_Ociad1
  gRNA
atattccgacagaggaggag

SEQ ID NO: 102749 - DNA, 20 bp, Artificial Sequence
  MKO10102749_B_Ociad1
  gRNA
ctgtcaagtcatccaaaata

SEQ ID NO: 102750 - DNA, 20 bp, Artificial Sequence
  MKO10102750_B_Ociad1
  gRNA
tgaaccagaagcactcttca

SEQ ID NO: 102751 - DNA, 20 bp, Artificial Sequence
  MKO10102751_B_Ociad2
  gRNA
ttagccgctaatccaagatt

SEQ ID NO: 102752 - DNA, 20 bp, Artificial Sequence
  MKO10102752_B_Ociad2
  gRNA
ttgacactctctgataatct

SEQ ID NO: 102753 - DNA, 20 bp, Artificial Sequence
  MKO10102753_B_Ociad2
  gRNA
tatgacttacatgcaacttt

SEQ ID NO: 102754 - DNA, 20 bp, Artificial Sequence
  MKO10102754_B_Ocln
  gRNA
ttaccattgctgctgtaccg

SEQ ID NO: 102755 - DNA, 20 bp, Artificial Sequence
  MKO10102755_B_Ocln
  gRNA
cataccgatccatctttctt

SEQ ID NO: 102756 - DNA, 20 bp, Artificial Sequence
  MKO10102756_B_Ocln
  gRNA
ccaatggcctactcctccaa

SEQ ID NO: 102757 - DNA, 20 bp, Artificial Sequence
  MKO10102757_B_Ocm
  gRNA
gcagcggacaacgatggaga

SEQ ID NO: 102758 - DNA, 20 bp, Artificial Sequence
  MKO10102758_B_Ocm
  gRNA
agtcaccttggcattcctgc

SEQ ID NO: 102759 - DNA, 20 bp, Artificial Sequence
  MKO10102759_B_Ocm
  gRNA
gagcgctgatgacattgcag

SEQ ID NO: 102760 - DNA, 20 bp, Artificial Sequence
  MKO10102760_B_Ocrl
  gRNA
aggttaataatccagttgca

SEQ ID NO: 102761 - DNA, 20 bp, Artificial Sequence
  MKO10102761_B_Ocrl
  gRNA
gttgttcctttccatgcaac

SEQ ID NO: 102762 - DNA, 20 bp, Artificial Sequence
  MKO10102762_B_Ocrl
  gRNA
actcatactgcccattcctc

SEQ ID NO: 102763 - DNA, 20 bp, Artificial Sequence
  MKO10102763_B_Ocstamp
  gRNA
ctatggccacccgggaatcc

SEQ ID NO: 102764 - DNA, 20 bp, Artificial Sequence
  MKO10102764_B_Ocstamp
  gRNA
agacgtaccccaagccaaag

SEQ ID NO: 102765 - DNA, 20 bp, Artificial Sequence
  MKO10102765_B_Ocstamp
  gRNA
gcagccacggaacacctctt

SEQ ID NO: 102766 - DNA, 20 bp, Artificial Sequence
  MKO10102766_B_Odam
  gRNA
gttgaccattattaagattc

SEQ ID NO: 102767 - DNA, 20 bp, Artificial Sequence
  MKO10102767_B_Odam
  gRNA
tcagatacctttatcaagac

SEQ ID NO: 102768 - DNA, 20 bp, Artificial Sequence
  MKO10102768_B_Odam
  gRNA
gtctgctagcaacagtcatg

SEQ ID NO: 102769 - DNA, 20 bp, Artificial Sequence
  MKO10102769_B_Odc1
  gRNA
tgatcctgagaccttcgttc

SEQ ID NO: 102770 - DNA, 20 bp, Artificial Sequence
  MKO10102770_B_Odc1
  gRNA
ttgtatttcagcttccatgt

SEQ ID NO: 102771 - DNA, 20 bp, Artificial Sequence
  MKO10102771_B_Odc1
  gRNA
gcatagataaccctctctgc

SEQ ID NO: 102772 - DNA, 20 bp, Artificial Sequence
  MKO10102772_B_Odf1
  gRNA
acgggtagtagaggtcacac

SEQ ID NO: 102773 - DNA, 20 bp, Artificial Sequence
  MKO10102773_B_Odf1
  gRNA
aggtctgcgtgtcggccgag

SEQ ID NO: 102774 - DNA, 20 bp, Artificial Sequence
  MKO10102774_B_Odf1
  gRNA
gtcaaagtgcgcgtgaaaga

SEQ ID NO: 102775 - DNA, 20 bp, Artificial Sequence
  MKO10102775_B_Odf2l
  gRNA
atggagatgcctactagtga

SEQ ID NO: 102776 - DNA, 20 bp, Artificial Sequence
  MKO10102776_B_Odf2l
  gRNA
cagcttgctatgcttgttga

SEQ ID NO: 102777 - DNA, 20 bp, Artificial Sequence
  MKO10102777_B_Odf2l
  gRNA
gaaacagacacgagagttca

SEQ ID NO: 102778 - DNA, 20 bp, Artificial Sequence
  MKO10102778_B_Odf2
  gRNA
gagtgtccgggtgaaaacca

SEQ ID NO: 102779 - DNA, 20 bp, Artificial Sequence
  MKO10102779_B_Odf2
  gRNA
catttcagcctccactagtt

SEQ ID NO: 102780 - DNA, 20 bp, Artificial Sequence
  MKO10102780_B_Odf2
  gRNA
aaggggacaccgtgaatgta

SEQ ID NO: 102781 - DNA, 20 bp, Artificial Sequence
  MKO10102781_B_Odf3b
  gRNA
ataccatcgctccccgaaac

SEQ ID NO: 102782 - DNA, 20 bp, Artificial Sequence
  MKO10102782_B_Odf3b
  gRNA
agccccgcagttcacgatgc

SEQ ID NO: 102783 - DNA, 20 bp, Artificial Sequence
  MKO10102783_B_Odf3b
  gRNA
ctacaccgtgccttcgctct

SEQ ID NO: 102784 - DNA, 20 bp, Artificial Sequence
  MKO10102784_B_Odf3l1
  gRNA
cgtgtatgcagactgtaagc

SEQ ID NO: 102785 - DNA, 20 bp, Artificial Sequence
  MKO10102785_B_Odf3l1
  gRNA
tatagccagtacaggatgac

SEQ ID NO: 102786 - DNA, 20 bp, Artificial Sequence
  MKO10102786_B_Odf3l1
  gRNA
tattccaaaacgagttactt

SEQ ID NO: 102787 - DNA, 20 bp, Artificial Sequence
  MKO10102787_B_Odf3l2
  gRNA
cggccaaagcgagtaacttt

SEQ ID NO: 102788 - DNA, 20 bp, Artificial Sequence
  MKO10102788_B_Odf3l2
  gRNA
tatgttcttccgtccaccgt

SEQ ID NO: 102789 - DNA, 20 bp, Artificial Sequence
  MKO10102789_B_Odf3l2
  gRNA
tgtgtccatcagccacccgc

SEQ ID NO: 102790 - DNA, 20 bp, Artificial Sequence
  MKO10102790_B_Odf3
  gRNA
cttcagcgacgacctgcaca

SEQ ID NO: 102791 - DNA, 20 bp, Artificial Sequence
  MKO10102791_B_Odf3
  gRNA
tcacttgaacctcagtctga

SEQ ID NO: 102792 - DNA, 20 bp, Artificial Sequence
  MKO10102792_B_Odf3
  gRNA
gggctccacccgggcagcca

SEQ ID NO: 102793 - DNA, 20 bp, Artificial Sequence
  MKO10102793_B_Odf4
  gRNA
aagcaacaaacaactctcgc

SEQ ID NO: 102794 - DNA, 20 bp, Artificial Sequence
  MKO10102794_B_Odf4
  gRNA
attccaatcaggccaaagaa

SEQ ID NO: 102795 - DNA, 20 bp, Artificial Sequence
  MKO10102795_B_Odf4
  gRNA
tccatccacagtatgtccac

SEQ ID NO: 102796 - DNA, 20 bp, Artificial Sequence
  MKO10102796_B_Ofcc1
  gRNA
taagcagaagaaatccacgt

SEQ ID NO: 102797 - DNA, 20 bp, Artificial Sequence
  MKO10102797_B_Ofcc1
  gRNA
tttatttcctcctccgtcag

SEQ ID NO: 102798 - DNA, 20 bp, Artificial Sequence
  MKO10102798_B_Ofcc1
  gRNA
ccagcttcagcgggacccaa

SEQ ID NO: 102799 - DNA, 20 bp, Artificial Sequence
  MKO10102799_B_Ofd1
  gRNA
aaagctataccagacgttta

SEQ ID NO: 102800 - DNA, 20 bp, Artificial Sequence
  MKO10102800_B_Ofd1
  gRNA
taccaatgatttatagagac

SEQ ID NO: 102801 - DNA, 20 bp, Artificial Sequence
  MKO10102801_B_Ofd1
  gRNA
atccagtctctataaatcat

SEQ ID NO: 102802 - DNA, 20 bp, Artificial Sequence
  MKO10102802_B_Ogdhl
  gRNA
agcacctactgccagcatat

SEQ ID NO: 102803 - DNA, 20 bp, Artificial Sequence
  MKO10102803_B_Ogdhl
  gRNA
ttccaccagcttgctggtct

SEQ ID NO: 102804 - DNA, 20 bp, Artificial Sequence
  MKO10102804_B_Ogdhl
  gRNA
ctagatccgaggccaccatg

SEQ ID NO: 102805 - DNA, 20 bp, Artificial Sequence
  MKO10102805_B_Ogdh
  gRNA
gactagttcgaactatgtgg

SEQ ID NO: 102806 - DNA, 20 bp, Artificial Sequence
  MKO10102806_B_Ogdh
  gRNA
agaagcggaccttgctggcc

SEQ ID NO: 102807 - DNA, 20 bp, Artificial Sequence
  MKO10102807_B_Ogdh
  gRNA
ctcctgtcccccgatgaaag

SEQ ID NO: 102808 - DNA, 20 bp, Artificial Sequence
  MKO10102808_B_Ogfod1
  gRNA
cggcggatcctggcccagcg

SEQ ID NO: 102809 - DNA, 20 bp, Artificial Sequence
  MKO10102809_B_Ogfod1
  gRNA
tccaacagaagctattgcct

SEQ ID NO: 102810 - DNA, 20 bp, Artificial Sequence
  MKO10102810_B_Ogfod1
  gRNA
agccccatatctcagcttta

SEQ ID NO: 102811 - DNA, 20 bp, Artificial Sequence
  MKO10102811_B_Ogfod2
  gRNA
gcgccgccgcaggctgggac

SEQ ID NO: 102812 - DNA, 20 bp, Artificial Sequence
  MKO10102812_B_Ogfod2
  gRNA
cagaggagaagcgcatctat

SEQ ID NO: 102813 - DNA, 20 bp, Artificial Sequence
  MKO10102813_B_Ogfod2
  gRNA
cagaacttggccgagaacac

SEQ ID NO: 102814 - DNA, 20 bp, Artificial Sequence
  MKO10102814_B_Ogfod3
  gRNA
cccctccatccgatccacct

SEQ ID NO: 102815 - DNA, 20 bp, Artificial Sequence
  MKO10102815_B_Ogfod3
  gRNA
tcactgacatcgtcatcacc

SEQ ID NO: 102816 - DNA, 20 bp, Artificial Sequence
  MKO10102816_B_Ogfod3
  gRNA
aggaggcggagcagattcgc

SEQ ID NO: 102817 - DNA, 20 bp, Artificial Sequence
  MKO10102817_B_Ogfrl1
  gRNA
gtcctagggcggcgagtcca

SEQ ID NO: 102818 - DNA, 20 bp, Artificial Sequence
  MKO10102818_B_Ogfrl1
  gRNA
gaaaggggactacgagaagc

SEQ ID NO: 102819 - DNA, 20 bp, Artificial Sequence
  MKO10102819_B_Ogfrl1
  gRNA
cattacctcgatttcatatg

SEQ ID NO: 102820 - DNA, 20 bp, Artificial Sequence
  MKO10102820_B_Ogfr
  gRNA
atccactcaccactggatgt

SEQ ID NO: 102821 - DNA, 20 bp, Artificial Sequence
  MKO10102821_B_Ogfr
  gRNA
ttgacagatcaagactgcaa

SEQ ID NO: 102822 - DNA, 20 bp, Artificial Sequence
  MKO10102822_B_Ogfr
  gRNA
agaatcactcctacatccag

SEQ ID NO: 102823 - DNA, 20 bp, Artificial Sequence
  MKO10102823_B_Ogg1
  gRNA
aacaacattgctcgcattac

SEQ ID NO: 102824 - DNA, 20 bp, Artificial Sequence
  MKO10102824_B_Ogg1
  gRNA
agcacgccactccagtgagc

SEQ ID NO: 102825 - DNA, 20 bp, Artificial Sequence
  MKO10102825_B_Ogg1
  gRNA
tcatcaagctgaatgagtcg

SEQ ID NO: 102826 - DNA, 20 bp, Artificial Sequence
  MKO10102826_B_Ogn
  gRNA
tgctgtaccaccattgccaa

SEQ ID NO: 102827 - DNA, 20 bp, Artificial Sequence
  MKO10102827_B_Ogn
  gRNA
gaactggaagtcttagtagt

SEQ ID NO: 102828 - DNA, 20 bp, Artificial Sequence
  MKO10102828_B_Ogn
  gRNA
acgcatgtctgcaaaatcct

SEQ ID NO: 102829 - DNA, 20 bp, Artificial Sequence
  MKO10102829_B_Ogt
  gRNA
agcagaagcctattcgaatt

SEQ ID NO: 102830 - DNA, 20 bp, Artificial Sequence
  MKO10102830_B_Ogt
  gRNA
tggcttcttccaagcgaccc

SEQ ID NO: 102831 - DNA, 20 bp, Artificial Sequence
  MKO10102831_B_Ogt
  gRNA
aacacagccgagattactcc

SEQ ID NO: 102832 - DNA, 20 bp, Artificial Sequence
  MKO10102832_B_Oip5
  gRNA
accttctatgccaaccaaaa

SEQ ID NO: 102833 - DNA, 20 bp, Artificial Sequence
  MKO10102833_B_Oip5
  gRNA
tttaccagaaaagattgcag

SEQ ID NO: 102834 - DNA, 20 bp, Artificial Sequence
  MKO10102834_B_Oip5
  gRNA
tttctagtgataaaatgctg

SEQ ID NO: 102835 - DNA, 20 bp, Artificial Sequence
  MKO10102835_B_Oit1
  gRNA
tgcaggtctgatccgtgttg

SEQ ID NO: 102836 - DNA, 20 bp, Artificial Sequence
  MKO10102836_B_Oit1
  gRNA
tagatactcacggatgtcct

SEQ ID NO: 102837 - DNA, 20 bp, Artificial Sequence
  MKO10102837_B_Oit1
  gRNA
catttcgtcttcaaagcaca

SEQ ID NO: 102838 - DNA, 20 bp, Artificial Sequence
  MKO10102838_B_Oit3
  gRNA
aactcacaccgctgcgcatg

SEQ ID NO: 102839 - DNA, 20 bp, Artificial Sequence
  MKO10102839_B_Oit3
  gRNA
accgagtgtgcatgctctcc

SEQ ID NO: 102840 - DNA, 20 bp, Artificial Sequence
  MKO10102840_B_Oit3
  gRNA
gaagataatcacacttgcca

SEQ ID NO: 102841 - DNA, 20 bp, Artificial Sequence
  MKO10102841_B_Ola1
  gRNA
gccagtaccataaaccagca

SEQ ID NO: 102842 - DNA, 20 bp, Artificial Sequence
  MKO10102842_B_Ola1
  gRNA
attaaaccgcctccaattat

SEQ ID NO: 102843 - DNA, 20 bp, Artificial Sequence
  MKO10102843_B_Ola1
  gRNA
atcgttggattgccaaatgt

SEQ ID NO: 102844 - DNA, 20 bp, Artificial Sequence
  MKO10102844_B_Olah
  gRNA
gaactgtttgtgtcaaaagc

SEQ ID NO: 102845 - DNA, 20 bp, Artificial Sequence
  MKO10102845_B_Olah
  gRNA
tccagtgcatgctgtaagac

SEQ ID NO: 102846 - DNA, 20 bp, Artificial Sequence
  MKO10102846_B_Olah
  gRNA
ccgaaagattaatggcttat

SEQ ID NO: 102847 - DNA, 20 bp, Artificial Sequence
  MKO10102847_B_Olfm1
  gRNA
gccataagcagcatctagcc

SEQ ID NO: 102848 - DNA, 20 bp, Artificial Sequence
  MKO10102848_B_Olfm1
  gRNA
tcgcctgtccaagacttcta

SEQ ID NO: 102849 - DNA, 20 bp, Artificial Sequence
  MKO10102849_B_Olfm1
  gRNA
ggtgttgcccaccaaccccg

SEQ ID NO: 102850 - DNA, 20 bp, Artificial Sequence
  MKO10102850_B_Olfm2
  gRNA
tggggtcccgcttcggttcc

SEQ ID NO: 102851 - DNA, 20 bp, Artificial Sequence
  MKO10102851_B_Olfm2
  gRNA
tctccagtatgttcgcagca

SEQ ID NO: 102852 - DNA, 20 bp, Artificial Sequence
  MKO10102852_B_Olfm2
  gRNA
tctccatgctgcgaacatac

SEQ ID NO: 102853 - DNA, 20 bp, Artificial Sequence
  MKO10102853_B_Olfm3
  gRNA
tcgatttggtgcttggatga

SEQ ID NO: 102854 - DNA, 20 bp, Artificial Sequence
  MKO10102854_B_Olfm3
  gRNA
tgggcgatgcatttgtactg

SEQ ID NO: 102855 - DNA, 20 bp, Artificial Sequence
  MKO10102855_B_Olfm3
  gRNA
tttcatgcagtcacgaagcc

SEQ ID NO: 102856 - DNA, 20 bp, Artificial Sequence
  MKO10102856_B_Olfm4
  gRNA
ggcctagcaggaaagctgtt

SEQ ID NO: 102857 - DNA, 20 bp, Artificial Sequence
  MKO10102857_B_Olfm4
  gRNA
gataaggaatatgaccctct

SEQ ID NO: 102858 - DNA, 20 bp, Artificial Sequence
  MKO10102858_B_Olfm4
  gRNA
cgcctttcccgctgacagag

SEQ ID NO: 102859 - DNA, 20 bp, Artificial Sequence
  MKO10102859_B_Olfml1
  gRNA
cacgctccactcttagggca

SEQ ID NO: 102860 - DNA, 20 bp, Artificial Sequence
  MKO10102860_B_Olfml1
  gRNA
gcaaaagtgtatctattagc

SEQ ID NO: 102861 - DNA, 20 bp, Artificial Sequence
  MKO10102861_B_Olfml1
  gRNA
ggtcacctacctcgaggact

SEQ ID NO: 102862 - DNA, 20 bp, Artificial Sequence
  MKO10102862_B_Olfml2a
  gRNA
tgctgctgagccagcgcacg

SEQ ID NO: 102863 - DNA, 20 bp, Artificial Sequence
  MKO10102863_B_Olfml2a
  gRNA
ccgaggcttcacctactaca

SEQ ID NO: 102864 - DNA, 20 bp, Artificial Sequence
  MKO10102864_B_Olfml2a
  gRNA
agcctcaagccccgacagca

SEQ ID NO: 102865 - DNA, 20 bp, Artificial Sequence
  MKO10102865_B_Olfml2b
  gRNA
ctcgcttgttcagctccgtt

SEQ ID NO: 102866 - DNA, 20 bp, Artificial Sequence
  MKO10102866_B_Olfml2b
  gRNA
ctgcgtcctcaggagttcga

SEQ ID NO: 102867 - DNA, 20 bp, Artificial Sequence
  MKO10102867_B_Olfml2b
  gRNA
ggctgacagccgagatttga

SEQ ID NO: 102868 - DNA, 20 bp, Artificial Sequence
  MKO10102868_B_Olfml3
  gRNA
catgccgactactctgatcc

SEQ ID NO: 102869 - DNA, 20 bp, Artificial Sequence
  MKO10102869_B_Olfml3
  gRNA
aagagtggaccgtcttgaaa

SEQ ID NO: 102870 - DNA, 20 bp, Artificial Sequence
  MKO10102870_B_Olfml3
  gRNA
tcacctctaaggcagctagt

SEQ ID NO: 102871 - DNA, 20 bp, Artificial Sequence
  MKO10102871_B_Olfr1000
  gRNA
atgccacggaagagaaactc

SEQ ID NO: 102872 - DNA, 20 bp, Artificial Sequence
  MKO10102872_B_Olfr1000
  gRNA
agcgacagtcaccaagtgag

SEQ ID NO: 102873 - DNA, 20 bp, Artificial Sequence
  MKO10102873_B_Olfr1000
  gRNA
tgccttcaagatgcatacat

SEQ ID NO: 102874 - DNA, 20 bp, Artificial Sequence
  MKO10102874_B_Olfr1002
  gRNA
catcagcagaattgatcttt

SEQ ID NO: 102875 - DNA, 20 bp, Artificial Sequence
  MKO10102875_B_Olfr1002
  gRNA
gcatttattcttccatactg

SEQ ID NO: 102876 - DNA, 20 bp, Artificial Sequence
  MKO10102876_B_Olfr1002
  gRNA
gatgttgtctgacatctttg

SEQ ID NO: 102877 - DNA, 20 bp, Artificial Sequence
  MKO10102877_B_Olfr1006
  gRNA
ggtgtttgcagtatgggcta

SEQ ID NO: 102878 - DNA, 20 bp, Artificial Sequence
  MKO10102878_B_Olfr1006
  gRNA
atctacttgttgacattgtc

SEQ ID NO: 102879 - DNA, 20 bp, Artificial Sequence
  MKO10102879_B_Olfr1006
  gRNA
ccgtgaagcccaccacaccc

SEQ ID NO: 102880 - DNA, 20 bp, Artificial Sequence
  MKO10102880_B_Olfr1008
  gRNA
tcctctcttctgatagtcct

SEQ ID NO: 102881 - DNA, 20 bp, Artificial Sequence
  MKO10102881_B_Olfr1008
  gRNA
actctttatcttgtcctcaa

SEQ ID NO: 102882 - DNA, 20 bp, Artificial Sequence
  MKO10102882_B_Olfr1008
  gRNA
ttgtaggcgagagtccagct

SEQ ID NO: 102883 - DNA, 20 bp, Artificial Sequence
  MKO10102883_B_Olfr1009
  gRNA
gagataccaccctaatctgc

SEQ ID NO: 102884 - DNA, 20 bp, Artificial Sequence
  MKO10102884_B_Olfr1009
  gRNA
tttagcaactgtcctgccca

SEQ ID NO: 102885 - DNA, 20 bp, Artificial Sequence
  MKO10102885_B_Olfr1009
  gRNA
tggcggatgagaactataca

SEQ ID NO: 102886 - DNA, 20 bp, Artificial Sequence
  MKO10102886_B_Olfr100
  gRNA
tgtcattacagagtgaagta

SEQ ID NO: 102887 - DNA, 20 bp, Artificial Sequence
  MKO10102887_B_Olfr100
  gRNA
catctttggcagtgtcacag

SEQ ID NO: 102888 - DNA, 20 bp, Artificial Sequence
  MKO10102888_B_Olfr100
  gRNA
ctgtgatattaagccattgt

SEQ ID NO: 102889 - DNA, 20 bp, Artificial Sequence
  MKO10102889_B_Olfr1010
  gRNA
cagaagaataccacagatcc

SEQ ID NO: 102890 - DNA, 20 bp, Artificial Sequence
  MKO10102890_B_Olfr1010
  gRNA
ttggccgggagtaaataaag

SEQ ID NO: 102891 - DNA, 20 bp, Artificial Sequence
  MKO10102891_B_Olfr1010
  gRNA
tattgtctcgacagaaactc

SEQ ID NO: 102892 - DNA, 20 bp, Artificial Sequence
  MKO10102892_B_Olfr1012
  gRNA
aactagcaacacattcacat

SEQ ID NO: 102893 - DNA, 20 bp, Artificial Sequence
  MKO10102893_B_Olfr1012
  gRNA
atcaacccagggtcgtctca

SEQ ID NO: 102894 - DNA, 20 bp, Artificial Sequence
  MKO10102894_B_Olfr1012
  gRNA
agaaggccttgagacgaccc

SEQ ID NO: 102895 - DNA, 20 bp, Artificial Sequence
  MKO10102895_B_Olfr1013
  gRNA
cattgcagattaacataatg

SEQ ID NO: 102896 - DNA, 20 bp, Artificial Sequence
  MKO10102896_B_Olfr1013
  gRNA
gaagaactgagctacacaac

SEQ ID NO: 102897 - DNA, 20 bp, Artificial Sequence
  MKO10102897_B_Olfr1013
  gRNA
aacctatcattcctggacct

SEQ ID NO: 102898 - DNA, 20 bp, Artificial Sequence
  MKO10102898_B_Olfr1014
  gRNA
aacaaaccctgtcatgcagc

SEQ ID NO: 102899 - DNA, 20 bp, Artificial Sequence
  MKO10102899_B_Olfr1014
  gRNA
agcagaaccagctgcatgac

SEQ ID NO: 102900 - DNA, 20 bp, Artificial Sequence
  MKO10102900_B_Olfr1014
  gRNA
gatctttggtgtatagactg

SEQ ID NO: 102901 - DNA, 20 bp, Artificial Sequence
  MKO10102901_B_Olfr1015
  gRNA
tgtgcagcctggaatcgatg

SEQ ID NO: 102902 - DNA, 20 bp, Artificial Sequence
  MKO10102902_B_Olfr1015
  gRNA
ggatcctcagtatagccagc

SEQ ID NO: 102903 - DNA, 20 bp, Artificial Sequence
  MKO10102903_B_Olfr1015
  gRNA
agtctgcatcaacttcttaa

SEQ ID NO: 102904 - DNA, 20 bp, Artificial Sequence
  MKO10102904_B_Olfr1016
  gRNA
ctctgaccctaccacacaat

SEQ ID NO: 102905 - DNA, 20 bp, Artificial Sequence
  MKO10102905_B_Olfr1016
  gRNA
ctacagtgagtgttacctgc

SEQ ID NO: 102906 - DNA, 20 bp, Artificial Sequence
  MKO10102906_B_Olfr1016
  gRNA
agcaatgggtatcattacat

SEQ ID NO: 102907 - DNA, 20 bp, Artificial Sequence
  MKO10102907_B_Olfr1018
  gRNA
ggtccataataacagtgtag

SEQ ID NO: 102908 - DNA, 20 bp, Artificial Sequence
  MKO10102908_B_Olfr1018
  gRNA
tctccactacactgttatta

SEQ ID NO: 102909 - DNA, 20 bp, Artificial Sequence
  MKO10102909_B_Olfr1018
  gRNA
aatgaccttcccaccagccc

SEQ ID NO: 102910 - DNA, 20 bp, Artificial Sequence
  MKO10102910_B_Olfr1019
  gRNA
atgctgggctcttacttcgc

SEQ ID NO: 102911 - DNA, 20 bp, Artificial Sequence
  MKO10102911_B_Olfr1019
  gRNA
accagtaagatgagacccgc

SEQ ID NO: 102912 - DNA, 20 bp, Artificial Sequence
  MKO10102912_B_Olfr1019
  gRNA
caatagctgatgagtagccc

SEQ ID NO: 102913 - DNA, 20 bp, Artificial Sequence
  MKO10102913_B_Olfr101
  gRNA
gaccatgctgctgccagtga

SEQ ID NO: 102914 - DNA, 20 bp, Artificial Sequence
  MKO10102914_B_Olfr101
  gRNA
tgtcattacagagtgaagca

SEQ ID NO: 102915 - DNA, 20 bp, Artificial Sequence
  MKO10102915_B_Olfr101
  gRNA
catcgccatcatgtacagtg

SEQ ID NO: 102916 - DNA, 20 bp, Artificial Sequence
  MKO10102916_B_Olfr1020
  gRNA
acaactgatgacattgaaac

SEQ ID NO: 102917 - DNA, 20 bp, Artificial Sequence
  MKO10102917_B_Olfr1020
  gRNA
caagatgctagtgaacctca

SEQ ID NO: 102918 - DNA, 20 bp, Artificial Sequence
  MKO10102918_B_Olfr1020
  gRNA
ctgttccatagagtagctag

SEQ ID NO: 102919 - DNA, 20 bp, Artificial Sequence
  MKO10102919_B_Olfr1022
  gRNA
gagcaagctagcatgataag

SEQ ID NO: 102920 - DNA, 20 bp, Artificial Sequence
  MKO10102920_B_Olfr1022
  gRNA
tgatcagcacaatcatacac

SEQ ID NO: 102921 - DNA, 20 bp, Artificial Sequence
  MKO10102921_B_Olfr1022
  gRNA
tgacactcacgttaaaaaga

SEQ ID NO: 102922 - DNA, 20 bp, Artificial Sequence
  MKO10102922_B_Olfr1023
  gRNA
tgtcatcaatgccatgaaac

SEQ ID NO: 102923 - DNA, 20 bp, Artificial Sequence
  MKO10102923_B_Olfr1023
  gRNA
cttaaaccatactgcaatga

SEQ ID NO: 102924 - DNA, 20 bp, Artificial Sequence
  MKO10102924_B_Olfr1023
  gRNA
atatggtgactgttgtcatg

SEQ ID NO: 102925 - DNA, 20 bp, Artificial Sequence
  MKO10102925_B_Olfr1024
  gRNA
tagtatggtgggcacaatgc

SEQ ID NO: 102926 - DNA, 20 bp, Artificial Sequence
  MKO10102926_B_Olfr1024
  gRNA
accatactaccccagaagta

SEQ ID NO: 102927 - DNA, 20 bp, Artificial Sequence
  MKO10102927_B_Olfr1024
  gRNA
actgccctctttgtgtcagc

SEQ ID NO: 102928 - DNA, 20 bp, Artificial Sequence
  MKO10102928_B_Olfr1026
  gRNA
tacatttacggctttgtaaa

SEQ ID NO: 102929 - DNA, 20 bp, Artificial Sequence
  MKO10102929_B_Olfr1026
  gRNA
ggttaaacgaagcatcagaa

SEQ ID NO: 102930 - DNA, 20 bp, Artificial Sequence
  MKO10102930_B_Olfr1026
  gRNA
cattgttctgcatgcacctg

SEQ ID NO: 102931 - DNA, 20 bp, Artificial Sequence
  MKO10102931_B_Olfr1028
  gRNA
tgattgtaagggagctggaa

SEQ ID NO: 102932 - DNA, 20 bp, Artificial Sequence
  MKO10102932_B_Olfr1028
  gRNA
ttgcctgagtattgtcttca

SEQ ID NO: 102933 - DNA, 20 bp, Artificial Sequence
  MKO10102933_B_Olfr1028
  gRNA
cagctcccttacaatcatcc

SEQ ID NO: 102934 - DNA, 20 bp, Artificial Sequence
  MKO10102934_B_Olfr1029
  gRNA
attcagcagaggacttacaa

SEQ ID NO: 102935 - DNA, 20 bp, Artificial Sequence
  MKO10102935_B_Olfr1029
  gRNA
caactcccttacaatcatcc

SEQ ID NO: 102936 - DNA, 20 bp, Artificial Sequence
  MKO10102936_B_Olfr1029
  gRNA
caagcccatgttgcctaaga

SEQ ID NO: 102937 - DNA, 20 bp, Artificial Sequence
  MKO10102937_B_Olfr102
  gRNA
tgtcattacagagtgaagta

SEQ ID NO: 102938 - DNA, 20 bp, Artificial Sequence
  MKO10102938_B_Olfr102
  gRNA
catctttggcagtgtcacag

SEQ ID NO: 102939 - DNA, 20 bp, Artificial Sequence
  MKO10102939_B_Olfr102
  gRNA
ctgtgatattaagccattgt

SEQ ID NO: 102940 - DNA, 20 bp, Artificial Sequence
  MKO10102940_B_Olfr1030
  gRNA
acatatcgcttgaccttctg

SEQ ID NO: 102941 - DNA, 20 bp, Artificial Sequence
  MKO10102941_B_Olfr1030
  gRNA
tgccaccagatgagatccac

SEQ ID NO: 102942 - DNA, 20 bp, Artificial Sequence
  MKO10102942_B_Olfr1030
  gRNA
taaacacgcagcatatgaaa

SEQ ID NO: 102943 - DNA, 20 bp, Artificial Sequence
  MKO10102943_B_Olfr1031
  gRNA
gagctaatcctcagaatagc

SEQ ID NO: 102944 - DNA, 20 bp, Artificial Sequence
  MKO10102944_B_Olfr1031
  gRNA
tccacagactctctagatgt

SEQ ID NO: 102945 - DNA, 20 bp, Artificial Sequence
  MKO10102945_B_Olfr1031
  gRNA
atgcaatgaagaggtaacat

SEQ ID NO: 102946 - DNA, 20 bp, Artificial Sequence
  MKO10102946_B_Olfr1032
  gRNA
tttacttagttaagcccttt

SEQ ID NO: 102947 - DNA, 20 bp, Artificial Sequence
  MKO10102947_B_Olfr1032
  gRNA
gttcaacatggggatcacgg

SEQ ID NO: 102948 - DNA, 20 bp, Artificial Sequence
  MKO10102948_B_Olfr1032
  gRNA
aagtcgaatgcaaaccaccc

SEQ ID NO: 102949 - DNA, 20 bp, Artificial Sequence
  MKO10102949_B_Olfr1033
  gRNA
aaaatatgccaactgctgta

SEQ ID NO: 102950 - DNA, 20 bp, Artificial Sequence
  MKO10102950_B_Olfr1033
  gRNA
gagtcgaatgcaaaccaccc

SEQ ID NO: 102951 - DNA, 20 bp, Artificial Sequence
  MKO10102951_B_Olfr1033
  gRNA
tacattgggctactgagctg

SEQ ID NO: 102952 - DNA, 20 bp, Artificial Sequence
  MKO10102952_B_Olfr1034
  gRNA
agtctacaagatagttgcca

SEQ ID NO: 102953 - DNA, 20 bp, Artificial Sequence
  MKO10102953_B_Olfr1034
  gRNA
catgtatctgagaagaccaa

SEQ ID NO: 102954 - DNA, 20 bp, Artificial Sequence
  MKO10102954_B_Olfr1034
  gRNA
acactacaaaaaagagaacc

SEQ ID NO: 102955 - DNA, 20 bp, Artificial Sequence
  MKO10102955_B_Olfr1036
  gRNA
cttcacatattccttgtcag

SEQ ID NO: 102956 - DNA, 20 bp, Artificial Sequence
  MKO10102956_B_Olfr1036
  gRNA
acaccacaaaaaagagaacc

SEQ ID NO: 102957 - DNA, 20 bp, Artificial Sequence
  MKO10102957_B_Olfr1036
  gRNA
tcaaaaactatttcttatgt

SEQ ID NO: 102958 - DNA, 20 bp, Artificial Sequence
  MKO10102958_B_Olfr1037
  gRNA
gatctatagcttaagaaatc

SEQ ID NO: 102959 - DNA, 20 bp, Artificial Sequence
  MKO10102959_B_Olfr1037
  gRNA
tacgcctgtgcaacccaact

SEQ ID NO: 102960 - DNA, 20 bp, Artificial Sequence
  MKO10102960_B_Olfr1037
  gRNA
atgaccaccatatacagaag

SEQ ID NO: 102961 - DNA, 20 bp, Artificial Sequence
  MKO10102961_B_Olfr1038-ps
  gRNA
ttatgttgatttatttaagt

SEQ ID NO: 102962 - DNA, 20 bp, Artificial Sequence
  MKO10102962_B_Olfr1038-ps
  gRNA
ttgggttgattgtcataatc

SEQ ID NO: 102963 - DNA, 20 bp, Artificial Sequence
  MKO10102963_B_Olfr1038-ps
  gRNA
atcatttattatgtatgagc

SEQ ID NO: 102964 - DNA, 20 bp, Artificial Sequence
  MKO10102964_B_Olfr1039
  gRNA
catgaggaccacatagagga

SEQ ID NO: 102965 - DNA, 20 bp, Artificial Sequence
  MKO10102965_B_Olfr1039
  gRNA
aatgattgttccataaaata

SEQ ID NO: 102966 - DNA, 20 bp, Artificial Sequence
  MKO10102966_B_Olfr1039
  gRNA
gatgaaacagcaaacctgag

SEQ ID NO: 102967 - DNA, 20 bp, Artificial Sequence
  MKO10102967_B_Olfr103
  gRNA
gtatgtctctcactcccaaa

SEQ ID NO: 102968 - DNA, 20 bp, Artificial Sequence
  MKO10102968_B_Olfr103
  gRNA
aagtgaggagtgcattgaat

SEQ ID NO: 102969 - DNA, 20 bp, Artificial Sequence
  MKO10102969_B_Olfr103
  gRNA
atgccatcactgctagcagc

SEQ ID NO: 102970 - DNA, 20 bp, Artificial Sequence
  MKO10102970_B_Olfr1040
  gRNA
accttccacttctcattctg

SEQ ID NO: 102971 - DNA, 20 bp, Artificial Sequence
  MKO10102971_B_Olfr1040
  gRNA
attgctagcacatacattta

SEQ ID NO: 102972 - DNA, 20 bp, Artificial Sequence
  MKO10102972_B_Olfr1040
  gRNA
agaaagtttataattgtgct

SEQ ID NO: 102973 - DNA, 20 bp, Artificial Sequence
  MKO10102973_B_Olfr1042
  gRNA
ttctgtcactccaaacactc

SEQ ID NO: 102974 - DNA, 20 bp, Artificial Sequence
  MKO10102974_B_Olfr1042
  gRNA
catgcggaccgcatagagga

SEQ ID NO: 102975 - DNA, 20 bp, Artificial Sequence
  MKO10102975_B_Olfr1042
  gRNA
agaaaattcaccagagtgtt

SEQ ID NO: 102976 - DNA, 20 bp, Artificial Sequence
  MKO10102976_B_Olfr1043
  gRNA
gtattaacacaaccaaccct

SEQ ID NO: 102977 - DNA, 20 bp, Artificial Sequence
  MKO10102977_B_Olfr1043
  gRNA
tctatgtcattctcatgccg

SEQ ID NO: 102978 - DNA, 20 bp, Artificial Sequence
  MKO10102978_B_Olfr1043
  gRNA
atctgaatgcagagtctccg

SEQ ID NO: 102979 - DNA, 20 bp, Artificial Sequence
  MKO10102979_B_Olfr1044
  gRNA
gtgatgatatgcctctcctc

SEQ ID NO: 102980 - DNA, 20 bp, Artificial Sequence
  MKO10102980_B_Olfr1044
  gRNA
ttgtaaccctctactctata

SEQ ID NO: 102981 - DNA, 20 bp, Artificial Sequence
  MKO10102981_B_Olfr1044
  gRNA
aaatggtcactgctagcata

SEQ ID NO: 102982 - DNA, 20 bp, Artificial Sequence
  MKO10102982_B_Olfr1045
  gRNA
ctgtcagaaggtagataact

SEQ ID NO: 102983 - DNA, 20 bp, Artificial Sequence
  MKO10102983_B_Olfr1045
  gRNA
agataccaacactatactca

SEQ ID NO: 102984 - DNA, 20 bp, Artificial Sequence
  MKO10102984_B_Olfr1045
  gRNA
tcttatcagtatctagtgag

SEQ ID NO: 102985 - DNA, 20 bp, Artificial Sequence
  MKO10102985_B_Olfr1046
  gRNA
actgtttatcctctcagcca

SEQ ID NO: 102986 - DNA, 20 bp, Artificial Sequence
  MKO10102986_B_Olfr1046
  gRNA
tcttctctatgtgatcatca

SEQ ID NO: 102987 - DNA, 20 bp, Artificial Sequence
  MKO10102987_B_Olfr1046
  gRNA
aggaaaagtacgttgggggc

SEQ ID NO: 102988 - DNA, 20 bp, Artificial Sequence
  MKO10102988_B_Olfr1047
  gRNA
ttatgtcacaaaagttatgt

SEQ ID NO: 102989 - DNA, 20 bp, Artificial Sequence
  MKO10102989_B_Olfr1047
  gRNA
agcagagttcatcctcacaa

SEQ ID NO: 102990 - DNA, 20 bp, Artificial Sequence
  MKO10102990_B_Olfr1047
  gRNA
atctatctaatttcactgat

SEQ ID NO: 102991 - DNA, 20 bp, Artificial Sequence
  MKO10102991_B_Olfr1048
  gRNA
tactagttatcatcacagct

SEQ ID NO: 102992 - DNA, 20 bp, Artificial Sequence
  MKO10102992_B_Olfr1048
  gRNA
gtgaaggcgagagtccaact

SEQ ID NO: 102993 - DNA, 20 bp, Artificial Sequence
  MKO10102993_B_Olfr1048
  gRNA
catgctcatgttgcctatca

SEQ ID NO: 102994 - DNA, 20 bp, Artificial Sequence
  MKO10102994_B_Olfr1049
  gRNA
ttatgcttgtgccacacaaa

SEQ ID NO: 102995 - DNA, 20 bp, Artificial Sequence
  MKO10102995_B_Olfr1049
  gRNA
aatgaagcatgccatttgtg

SEQ ID NO: 102996 - DNA, 20 bp, Artificial Sequence
  MKO10102996_B_Olfr1049
  gRNA
gtgaggaagactgcaaacag

SEQ ID NO: 102997 - DNA, 20 bp, Artificial Sequence
  MKO10102997_B_Olfr1051
  gRNA
gcaaggaagactgcaaacag

SEQ ID NO: 102998 - DNA, 20 bp, Artificial Sequence
  MKO10102998_B_Olfr1051
  gRNA
aatgaagcatgccatctgtg

SEQ ID NO: 102999 - DNA, 20 bp, Artificial Sequence
  MKO10102999_B_Olfr1051
  gRNA
ttatgcttgtgccacacaga

SEQ ID NO: 103000 - DNA, 20 bp, Artificial Sequence
  MKO10103000_B_Olfr1052
  gRNA
catgagagtatcagcagcga

SEQ ID NO: 103001 - DNA, 20 bp, Artificial Sequence
  MKO10103001_B_Olfr1052
  gRNA
tgcaatgactgatgaataac

SEQ ID NO: 103002 - DNA, 20 bp, Artificial Sequence
  MKO10103002_B_Olfr1052
  gRNA
actctggtattaacatgaga

SEQ ID NO: 103003 - DNA, 20 bp, Artificial Sequence
  MKO10103003_B_Olfr1053
  gRNA
tagtcaaaatgatcataccc

SEQ ID NO: 103004 - DNA, 20 bp, Artificial Sequence
  MKO10103004_B_Olfr1053
  gRNA
aggttaaaaatgccttctac

SEQ ID NO: 103005 - DNA, 20 bp, Artificial Sequence
  MKO10103005_B_Olfr1053
  gRNA
attcagtgataataaacata

SEQ ID NO: 103006 - DNA, 20 bp, Artificial Sequence
  MKO10103006_B_Olfr1054
  gRNA
acgatcctgtaatcacaaaa

SEQ ID NO: 103007 - DNA, 20 bp, Artificial Sequence
  MKO10103007_B_Olfr1054
  gRNA
gtcaaatgagtgacttgatt

SEQ ID NO: 103008 - DNA, 20 bp, Artificial Sequence
  MKO10103008_B_Olfr1054
  gRNA
tcactcatttgacactgata

SEQ ID NO: 103009 - DNA, 20 bp, Artificial Sequence
  MKO10103009_B_Olfr1055
  gRNA
ctgaagtatttcattctaac

SEQ ID NO: 103010 - DNA, 20 bp, Artificial Sequence
  MKO10103010_B_Olfr1055
  gRNA
caccaaatataggaaattgt

SEQ ID NO: 103011 - DNA, 20 bp, Artificial Sequence
  MKO10103011_B_Olfr1055
  gRNA
gagcataacatcaatatcaa

SEQ ID NO: 103012 - DNA, 20 bp, Artificial Sequence
  MKO10103012_B_Olfr1056
  gRNA
tgcacaccaattatagggga

SEQ ID NO: 103013 - DNA, 20 bp, Artificial Sequence
  MKO10103013_B_Olfr1056
  gRNA
catgattgtccttaccaagt

SEQ ID NO: 103014 - DNA, 20 bp, Artificial Sequence
  MKO10103014_B_Olfr1056
  gRNA
cacagatcgccctgaactac

SEQ ID NO: 103015 - DNA, 20 bp, Artificial Sequence
  MKO10103015_B_Olfr1057
  gRNA
cgtggcacattcgtagtata

SEQ ID NO: 103016 - DNA, 20 bp, Artificial Sequence
  MKO10103016_B_Olfr1057
  gRNA
gttcaacattggaattatta

SEQ ID NO: 103017 - DNA, 20 bp, Artificial Sequence
  MKO10103017_B_Olfr1057
  gRNA
atctgaccgtccagaactgc

SEQ ID NO: 103018 - DNA, 20 bp, Artificial Sequence
  MKO10103018_B_Olfr1058
  gRNA
aataatggaggctgcagttc

SEQ ID NO: 103019 - DNA, 20 bp, Artificial Sequence
  MKO10103019_B_Olfr1058
  gRNA
ggagaaccataacctcacaa

SEQ ID NO: 103020 - DNA, 20 bp, Artificial Sequence
  MKO10103020_B_Olfr1058
  gRNA
tcattctcatagctattatc

SEQ ID NO: 103021 - DNA, 20 bp, Artificial Sequence
  MKO10103021_B_Olfr1061
  gRNA
cactaaccaccatgagtttc

SEQ ID NO: 103022 - DNA, 20 bp, Artificial Sequence
  MKO10103022_B_Olfr1061
  gRNA
tcatgtcacaaaaagcatgt

SEQ ID NO: 103023 - DNA, 20 bp, Artificial Sequence
  MKO10103023_B_Olfr1061
  gRNA
gctatccaatcatctttctt

SEQ ID NO: 103024 - DNA, 20 bp, Artificial Sequence
  MKO10103024_B_Olfr1062
  gRNA
cagaaatcctcccagctgcg

SEQ ID NO: 103025 - DNA, 20 bp, Artificial Sequence
  MKO10103025_B_Olfr1062
  gRNA
aactgaccgtccagaactgc

SEQ ID NO: 103026 - DNA, 20 bp, Artificial Sequence
  MKO10103026_B_Olfr1062
  gRNA
agcgatcttgtcagtgtcta

SEQ ID NO: 103027 - DNA, 20 bp, Artificial Sequence
  MKO10103027_B_Olfr1065
  gRNA
tcatccttatagctatactt

SEQ ID NO: 103028 - DNA, 20 bp, Artificial Sequence
  MKO10103028_B_Olfr1065
  gRNA
ctgtgtagcacaaaggttaa

SEQ ID NO: 103029 - DNA, 20 bp, Artificial Sequence
  MKO10103029_B_Olfr1065
  gRNA
gcctggagtccaccattgta

SEQ ID NO: 103030 - DNA, 20 bp, Artificial Sequence
  MKO10103030_B_Olfr1066
  gRNA
gacaattatactatagagat

SEQ ID NO: 103031 - DNA, 20 bp, Artificial Sequence
  MKO10103031_B_Olfr1066
  gRNA
gtcctatctacttatcctta

SEQ ID NO: 103032 - DNA, 20 bp, Artificial Sequence
  MKO10103032_B_Olfr1066
  gRNA
tcgtctcttcttatagtaat

SEQ ID NO: 103033 - DNA, 20 bp, Artificial Sequence
  MKO10103033_B_Olfr1076
  gRNA
cactgaccgccctgaactgc

SEQ ID NO: 103034 - DNA, 20 bp, Artificial Sequence
  MKO10103034_B_Olfr1076
  gRNA
taacttgatttcttcaccag

SEQ ID NO: 103035 - DNA, 20 bp, Artificial Sequence
  MKO10103035_B_Olfr1076
  gRNA
tcacaccttaaacactgaca

SEQ ID NO: 103036 - DNA, 20 bp, Artificial Sequence
  MKO10103036_B_Olfr1079
  gRNA
tcatgtcacaaactgtatgt

SEQ ID NO: 103037 - DNA, 20 bp, Artificial Sequence
  MKO10103037_B_Olfr1079
  gRNA
ttgcagccttgattccacta

SEQ ID NO: 103038 - DNA, 20 bp, Artificial Sequence
  MKO10103038_B_Olfr1079
  gRNA
atttaacatagggataacta

SEQ ID NO: 103039 - DNA, 20 bp, Artificial Sequence
  MKO10103039_B_Olfr107
  gRNA
atgaactgtagtaagactcc

SEQ ID NO: 103040 - DNA, 20 bp, Artificial Sequence
  MKO10103040_B_Olfr107
  gRNA
gttcagagtgggagtaacca

SEQ ID NO: 103041 - DNA, 20 bp, Artificial Sequence
  MKO10103041_B_Olfr107
  gRNA
aagaggggctgccatttctc

SEQ ID NO: 103042 - DNA, 20 bp, Artificial Sequence
  MKO10103042_B_Olfr1080
  gRNA
tcatgtcccataaagtatgt

SEQ ID NO: 103043 - DNA, 20 bp, Artificial Sequence
  MKO10103043_B_Olfr1080
  gRNA
cgccaatgtatttctttctc

SEQ ID NO: 103044 - DNA, 20 bp, Artificial Sequence
  MKO10103044_B_Olfr1080
  gRNA
tgcctgagaaagaaatacat

SEQ ID NO: 103045 - DNA, 20 bp, Artificial Sequence
  MKO10103045_B_Olfr1082
  gRNA
cataaatgtatagtaaagat

SEQ ID NO: 103046 - DNA, 20 bp, Artificial Sequence
  MKO10103046_B_Olfr1082
  gRNA
tcatgtcacataaagtatgt

SEQ ID NO: 103047 - DNA, 20 bp, Artificial Sequence
  MKO10103047_B_Olfr1082
  gRNA
cgccaatgtatttctttctt

SEQ ID NO: 103048 - DNA, 20 bp, Artificial Sequence
  MKO10103048_B_Olfr1084
  gRNA
tcgtgtctcataaagtatgt

SEQ ID NO: 103049 - DNA, 20 bp, Artificial Sequence
  MKO10103049_B_Olfr1084
  gRNA
agtcatctacctgacctcag

SEQ ID NO: 103050 - DNA, 20 bp, Artificial Sequence
  MKO10103050_B_Olfr1084
  gRNA
tgagcaaagcaatgatatta

SEQ ID NO: 103051 - DNA, 20 bp, Artificial Sequence
  MKO10103051_B_Olfr1085
  gRNA
atgaagagcagcccaaagag

SEQ ID NO: 103052 - DNA, 20 bp, Artificial Sequence
  MKO10103052_B_Olfr1085
  gRNA
gaataaacagataagacaga

SEQ ID NO: 103053 - DNA, 20 bp, Artificial Sequence
  MKO10103053_B_Olfr1085
  gRNA
cactgaccgtcctgagctgc

SEQ ID NO: 103054 - DNA, 20 bp, Artificial Sequence
  MKO10103054_B_Olfr1086
  gRNA
aaatttaggactgattactc

SEQ ID NO: 103055 - DNA, 20 bp, Artificial Sequence
  MKO10103055_B_Olfr1086
  gRNA
ttgaagacacgctctactga

SEQ ID NO: 103056 - DNA, 20 bp, Artificial Sequence
  MKO10103056_B_Olfr1086
  gRNA
accaagtgacagctatgcct

SEQ ID NO: 103057 - DNA, 20 bp, Artificial Sequence
  MKO10103057_B_Olfr1087
  gRNA
ttgagctcaagtagatgact

SEQ ID NO: 103058 - DNA, 20 bp, Artificial Sequence
  MKO10103058_B_Olfr1087
  gRNA
atctacttgagctcaatgtt

SEQ ID NO: 103059 - DNA, 20 bp, Artificial Sequence
  MKO10103059_B_Olfr1087
  gRNA
atccgtgtcaaaagagtgac

SEQ ID NO: 103060 - DNA, 20 bp, Artificial Sequence
  MKO10103060_B_Olfr1089
  gRNA
aacaatggacccttcagctc

SEQ ID NO: 103061 - DNA, 20 bp, Artificial Sequence
  MKO10103061_B_Olfr1089
  gRNA
actgtcgtcaccgtcttcta

SEQ ID NO: 103062 - DNA, 20 bp, Artificial Sequence
  MKO10103062_B_Olfr1089
  gRNA
catctatctgatctcattaa

SEQ ID NO: 103063 - DNA, 20 bp, Artificial Sequence
  MKO10103063_B_Olfr108
  gRNA
caccacagctcctaaaacac

SEQ ID NO: 103064 - DNA, 20 bp, Artificial Sequence
  MKO10103064_B_Olfr108
  gRNA
agatatggataacctgcttc

SEQ ID NO: 103065 - DNA, 20 bp, Artificial Sequence
  MKO10103065_B_Olfr108
  gRNA
actagaacctcacatctaca

SEQ ID NO: 103066 - DNA, 20 bp, Artificial Sequence
  MKO10103066_B_Olfr1090
  gRNA
gcaaggaacagcccaaataa

SEQ ID NO: 103067 - DNA, 20 bp, Artificial Sequence
  MKO10103067_B_Olfr1090
  gRNA
agtggtcactgatacccatt

SEQ ID NO: 103068 - DNA, 20 bp, Artificial Sequence
  MKO10103068_B_Olfr1090
  gRNA
atgtaaaatttgccctacat

SEQ ID NO: 103069 - DNA, 20 bp, Artificial Sequence
  MKO10103069_B_Olfr1093
  gRNA
actggagtctctatttacca

SEQ ID NO: 103070 - DNA, 20 bp, Artificial Sequence
  MKO10103070_B_Olfr1093
  gRNA
caacccacttctgtatacag

SEQ ID NO: 103071 - DNA, 20 bp, Artificial Sequence
  MKO10103071_B_Olfr1093
  gRNA
tgagcttctagtcttgtact

SEQ ID NO: 103072 - DNA, 20 bp, Artificial Sequence
  MKO10103072_B_Olfr1094
  gRNA
gaataacaagctataatgag

SEQ ID NO: 103073 - DNA, 20 bp, Artificial Sequence
  MKO10103073_B_Olfr1094
  gRNA
agtgacaacggtggaataac

SEQ ID NO: 103074 - DNA, 20 bp, Artificial Sequence
  MKO10103074_B_Olfr1094
  gRNA
acctagttccaactatgcct

SEQ ID NO: 103075 - DNA, 20 bp, Artificial Sequence
  MKO10103075_B_Olfr1095
  gRNA
atgctcactgcatacagtag

SEQ ID NO: 103076 - DNA, 20 bp, Artificial Sequence
  MKO10103076_B_Olfr1095
  gRNA
catttcctattagagtaaaa

SEQ ID NO: 103077 - DNA, 20 bp, Artificial Sequence
  MKO10103077_B_Olfr1095
  gRNA
ctacaaaagacaatgcactg

SEQ ID NO: 103078 - DNA, 20 bp, Artificial Sequence
  MKO10103078_B_Olfr1097
  gRNA
agtcccacaagcgtgaactc

SEQ ID NO: 103079 - DNA, 20 bp, Artificial Sequence
  MKO10103079_B_Olfr1097
  gRNA
atgagagtatatgagcgcct

SEQ ID NO: 103080 - DNA, 20 bp, Artificial Sequence
  MKO10103080_B_Olfr1097
  gRNA
tgattacagttgagtaactg

SEQ ID NO: 103081 - DNA, 20 bp, Artificial Sequence
  MKO10103081_B_Olfr1098
  gRNA
acattcagaacctgctaaga

SEQ ID NO: 103082 - DNA, 20 bp, Artificial Sequence
  MKO10103082_B_Olfr1098
  gRNA
tgaacctgagttcatgcttg

SEQ ID NO: 103083 - DNA, 20 bp, Artificial Sequence
  MKO10103083_B_Olfr1098
  gRNA
aaagaagtgatgaattaccg

SEQ ID NO: 103084 - DNA, 20 bp, Artificial Sequence
  MKO10103084_B_Olfr1099
  gRNA
gatcatagtaccataaaata

SEQ ID NO: 103085 - DNA, 20 bp, Artificial Sequence
  MKO10103085_B_Olfr1099
  gRNA
agattccaaggaggttcagc

SEQ ID NO: 103086 - DNA, 20 bp, Artificial Sequence
  MKO10103086_B_Olfr1099
  gRNA
agtggaactgatcttcaaaa

SEQ ID NO: 103087 - DNA, 20 bp, Artificial Sequence
  MKO10103087_B_Olfr109
  gRNA
atgatagcagtgtagcgaag

SEQ ID NO: 103088 - DNA, 20 bp, Artificial Sequence
  MKO10103088_B_Olfr109
  gRNA
aagtacggaggccatcttgc

SEQ ID NO: 103089 - DNA, 20 bp, Artificial Sequence
  MKO10103089_B_Olfr109
  gRNA
cctggatatttgttactcat

SEQ ID NO: 103090 - DNA, 20 bp, Artificial Sequence
  MKO10103090_B_Olfr10
  gRNA
ctaggaagagctacagtcac

SEQ ID NO: 103091 - DNA, 20 bp, Artificial Sequence
  MKO10103091_B_Olfr10
  gRNA
tgtcttcacagaccaacttg

SEQ ID NO: 103092 - DNA, 20 bp, Artificial Sequence
  MKO10103092_B_Olfr10
  gRNA
tgtgtagtcgaaggtctgtt

SEQ ID NO: 103093 - DNA, 20 bp, Artificial Sequence
  MKO10103093_B_Olfr1100
  gRNA
gataagagacaccactagag

SEQ ID NO: 103094 - DNA, 20 bp, Artificial Sequence
  MKO10103094_B_Olfr1100
  gRNA
cagttgagtaactgagatcg

SEQ ID NO: 103095 - DNA, 20 bp, Artificial Sequence
  MKO10103095_B_Olfr1100
  gRNA
catgataactgggtattgta

SEQ ID NO: 103096 - DNA, 20 bp, Artificial Sequence
  MKO10103096_B_Olfr1101
  gRNA
ctgtgatattccccctttac

SEQ ID NO: 103097 - DNA, 20 bp, Artificial Sequence
  MKO10103097_B_Olfr1101
  gRNA
gcatcttcaagatagcaaac

SEQ ID NO: 103098 - DNA, 20 bp, Artificial Sequence
  MKO10103098_B_Olfr1101
  gRNA
acaaaacgacaagctagcag

SEQ ID NO: 103099 - DNA, 20 bp, Artificial Sequence
  MKO10103099_B_Olfr1102
  gRNA
aatcactgtctttatactac

SEQ ID NO: 103100 - DNA, 20 bp, Artificial Sequence
  MKO10103100_B_Olfr1102
  gRNA
ggacaaatccataagagacc

SEQ ID NO: 103101 - DNA, 20 bp, Artificial Sequence
  MKO10103101_B_Olfr1102
  gRNA
ctcttatggatttgtcctgt

SEQ ID NO: 103102 - DNA, 20 bp, Artificial Sequence
  MKO10103102_B_Olfr1104
  gRNA
ttggtgatctttgttctagc

SEQ ID NO: 103103 - DNA, 20 bp, Artificial Sequence
  MKO10103103_B_Olfr1104
  gRNA
aacagactgacttgtaattc

SEQ ID NO: 103104 - DNA, 20 bp, Artificial Sequence
  MKO10103104_B_Olfr1104
  gRNA
ccagccagttgcacaccttc

SEQ ID NO: 103105 - DNA, 20 bp, Artificial Sequence
  MKO10103105_B_Olfr1105
  gRNA
aaccagctcaagctttccac

SEQ ID NO: 103106 - DNA, 20 bp, Artificial Sequence
  MKO10103106_B_Olfr1105
  gRNA
taaagccttataacttcccc

SEQ ID NO: 103107 - DNA, 20 bp, Artificial Sequence
  MKO10103107_B_Olfr1105
  gRNA
ccaactcacttacccacttg

SEQ ID NO: 103108 - DNA, 20 bp, Artificial Sequence
  MKO10103108_B_Olfr1106
  gRNA
tgcatcactacttaccacag

SEQ ID NO: 103109 - DNA, 20 bp, Artificial Sequence
  MKO10103109_B_Olfr1106
  gRNA
ggtatctgtattctatacac

SEQ ID NO: 103110 - DNA, 20 bp, Artificial Sequence
  MKO10103110_B_Olfr1106
  gRNA
aaacccactaacttacacag

SEQ ID NO: 103111 - DNA, 20 bp, Artificial Sequence
  MKO10103111_B_Olfr1107
  gRNA
agtgtatctcatcatacttg

SEQ ID NO: 103112 - DNA, 20 bp, Artificial Sequence
  MKO10103112_B_Olfr1107
  gRNA
ctccctaccaatgaacttct

SEQ ID NO: 103113 - DNA, 20 bp, Artificial Sequence
  MKO10103113_B_Olfr1107
  gRNA
gtaaacctattgtgtgagtc

SEQ ID NO: 103114 - DNA, 20 bp, Artificial Sequence
  MKO10103114_B_Olfr1109
  gRNA
tacgcctcccctcagttgag

SEQ ID NO: 103115 - DNA, 20 bp, Artificial Sequence
  MKO10103115_B_Olfr1109
  gRNA
gaagaagtgattcacaacgt

SEQ ID NO: 103116 - DNA, 20 bp, Artificial Sequence
  MKO10103116_B_Olfr1109
  gRNA
gtagacttattgtgtgagtc

SEQ ID NO: 103117 - DNA, 20 bp, Artificial Sequence
  MKO10103117_B_Olfr110
  gRNA
ttccttagcgtataaattac

SEQ ID NO: 103118 - DNA, 20 bp, Artificial Sequence
  MKO10103118_B_Olfr110
  gRNA
gatctgattgttaccacaaa

SEQ ID NO: 103119 - DNA, 20 bp, Artificial Sequence
  MKO10103119_B_Olfr110
  gRNA
gaaaggatgacgcacaggaa

SEQ ID NO: 103120 - DNA, 20 bp, Artificial Sequence
  MKO10103120_B_Olfr1110
  gRNA
ctactgaaaacatggcaatt

SEQ ID NO: 103121 - DNA, 20 bp, Artificial Sequence
  MKO10103121_B_Olfr1110
  gRNA
tgtcacagctgtcaaatgtg

SEQ ID NO: 103122 - DNA, 20 bp, Artificial Sequence
  MKO10103122_B_Olfr1110
  gRNA
aattccatgattcatacaat

SEQ ID NO: 103123 - DNA, 20 bp, Artificial Sequence
  MKO10103123_B_Olfr1111
  gRNA
ccgataaatataaactctgt

SEQ ID NO: 103124 - DNA, 20 bp, Artificial Sequence
  MKO10103124_B_Olfr1111
  gRNA
catagtttacaccttaactt

SEQ ID NO: 103125 - DNA, 20 bp, Artificial Sequence
  MKO10103125_B_Olfr1111
  gRNA
aatccagaccagcactttca

SEQ ID NO: 103126 - DNA, 20 bp, Artificial Sequence
  MKO10103126_B_Olfr1112
  gRNA
atttgtctactcctgctgag

SEQ ID NO: 103127 - DNA, 20 bp, Artificial Sequence
  MKO10103127_B_Olfr1112
  gRNA
agactattgttcataatgag

SEQ ID NO: 103128 - DNA, 20 bp, Artificial Sequence
  MKO10103128_B_Olfr1112
  gRNA
caatagtctctgtatacaac

SEQ ID NO: 103129 - DNA, 20 bp, Artificial Sequence
  MKO10103129_B_Olfr1113
  gRNA
cccaggaaccaactactaac

SEQ ID NO: 103130 - DNA, 20 bp, Artificial Sequence
  MKO10103130_B_Olfr1113
  gRNA
catctacatgattatccttc

SEQ ID NO: 103131 - DNA, 20 bp, Artificial Sequence
  MKO10103131_B_Olfr1113
  gRNA
catacctccactactcaagt

SEQ ID NO: 103132 - DNA, 20 bp, Artificial Sequence
  MKO10103132_B_Olfr1115
  gRNA
cccaggaaccaaccactaac

SEQ ID NO: 103133 - DNA, 20 bp, Artificial Sequence
  MKO10103133_B_Olfr1115
  gRNA
catgcctccactactcagat

SEQ ID NO: 103134 - DNA, 20 bp, Artificial Sequence
  MKO10103134_B_Olfr1115
  gRNA
catctacatgtctatccttc

SEQ ID NO: 103135 - DNA, 20 bp, Artificial Sequence
  MKO10103135_B_Olfr1116-ps
  gRNA
atgaaactatcttcagccaa

SEQ ID NO: 103136 - DNA, 20 bp, Artificial Sequence
  MKO10103136_B_Olfr1116-ps
  gRNA
ctgatggaattcattcttct

SEQ ID NO: 103137 - DNA, 20 bp, Artificial Sequence
  MKO10103137_B_Olfr1116-ps
  gRNA
atagttgtaatcttgttcta

SEQ ID NO: 103138 - DNA, 20 bp, Artificial Sequence
  MKO10103138_B_Olfr1118
  gRNA
ataagtagagaatattgtag

SEQ ID NO: 103139 - DNA, 20 bp, Artificial Sequence
  MKO10103139_B_Olfr1118
  gRNA
tgcagtgtatgttgttgcag

SEQ ID NO: 103140 - DNA, 20 bp, Artificial Sequence
  MKO10103140_B_Olfr1118
  gRNA
tacataggagtatggagagc

SEQ ID NO: 103141 - DNA, 20 bp, Artificial Sequence
  MKO10103141_B_Olfr111
  gRNA
gatctgattgttaccacaga

SEQ ID NO: 103142 - DNA, 20 bp, Artificial Sequence
  MKO10103142_B_Olfr111
  gRNA
aaacccacatgtccagcatg

SEQ ID NO: 103143 - DNA, 20 bp, Artificial Sequence
  MKO10103143_B_Olfr111
  gRNA
ttcctcagtgcataaattat

SEQ ID NO: 103144 - DNA, 20 bp, Artificial Sequence
  MKO10103144_B_Olfr1120
  gRNA
atgcattgaagtgtccccac

SEQ ID NO: 103145 - DNA, 20 bp, Artificial Sequence
  MKO10103145_B_Olfr1120
  gRNA
atcagttcctacagaatgaa

SEQ ID NO: 103146 - DNA, 20 bp, Artificial Sequence
  MKO10103146_B_Olfr1120
  gRNA
ctccacttgttcttcacatc

SEQ ID NO: 103147 - DNA, 20 bp, Artificial Sequence
  MKO10103147_B_Olfr1121
  gRNA
caaatgctgtacagaaccct

SEQ ID NO: 103148 - DNA, 20 bp, Artificial Sequence
  MKO10103148_B_Olfr1121
  gRNA
attaagtaggtaatagatgc

SEQ ID NO: 103149 - DNA, 20 bp, Artificial Sequence
  MKO10103149_B_Olfr1121
  gRNA
gatgttagtattagtataaa

SEQ ID NO: 103150 - DNA, 20 bp, Artificial Sequence
  MKO10103150_B_Olfr1122
  gRNA
taagtttgtccagtcacaac

SEQ ID NO: 103151 - DNA, 20 bp, Artificial Sequence
  MKO10103151_B_Olfr1122
  gRNA
gaccttattgttcatgacca

SEQ ID NO: 103152 - DNA, 20 bp, Artificial Sequence
  MKO10103152_B_Olfr1122
  gRNA
acaaccaaaagcatatcagt

SEQ ID NO: 103153 - DNA, 20 bp, Artificial Sequence
  MKO10103153_B_Olfr1123
  gRNA
attctttagtcatgaaccac

SEQ ID NO: 103154 - DNA, 20 bp, Artificial Sequence
  MKO10103154_B_Olfr1123
  gRNA
cttagtaagatactagtgtg

SEQ ID NO: 103155 - DNA, 20 bp, Artificial Sequence
  MKO10103155_B_Olfr1123
  gRNA
ctcacactagtatcttacta

SEQ ID NO: 103156 - DNA, 20 bp, Artificial Sequence
  MKO10103156_B_Olfr1124
  gRNA
cattcccccaatacttcacc

SEQ ID NO: 103157 - DNA, 20 bp, Artificial Sequence
  MKO10103157_B_Olfr1124
  gRNA
aatgtgctgcattcttatcc

SEQ ID NO: 103158 - DNA, 20 bp, Artificial Sequence
  MKO10103158_B_Olfr1124
  gRNA
cacaactggtgattggctcc

SEQ ID NO: 103159 - DNA, 20 bp, Artificial Sequence
  MKO10103159_B_Olfr1126
  gRNA
cacaaaagaagtgatctatt

SEQ ID NO: 103160 - DNA, 20 bp, Artificial Sequence
  MKO10103160_B_Olfr1126
  gRNA
cttacctcccattctcaagc

SEQ ID NO: 103161 - DNA, 20 bp, Artificial Sequence
  MKO10103161_B_Olfr1126
  gRNA
gaggcaagtatcaacaagaa

SEQ ID NO: 103162 - DNA, 20 bp, Artificial Sequence
  MKO10103162_B_Olfr1128
  gRNA
atccaccaagcctactgcat

SEQ ID NO: 103163 - DNA, 20 bp, Artificial Sequence
  MKO10103163_B_Olfr1128
  gRNA
gttggaatgtacaggatgtg

SEQ ID NO: 103164 - DNA, 20 bp, Artificial Sequence
  MKO10103164_B_Olfr1128
  gRNA
acccagctcactttactcca

SEQ ID NO: 103165 - DNA, 20 bp, Artificial Sequence
  MKO10103165_B_Olfr1129
  gRNA
cataccaccctttctcaagc

SEQ ID NO: 103166 - DNA, 20 bp, Artificial Sequence
  MKO10103166_B_Olfr1129
  gRNA
atgtatcagtcactcttcct

SEQ ID NO: 103167 - DNA, 20 bp, Artificial Sequence
  MKO10103167_B_Olfr1129
  gRNA
aacagaatcccttgtaagtt

SEQ ID NO: 103168 - DNA, 20 bp, Artificial Sequence
  MKO10103168_B_Olfr112
  gRNA
tcaggaacattgtacataac

SEQ ID NO: 103169 - DNA, 20 bp, Artificial Sequence
  MKO10103169_B_Olfr112
  gRNA
agacgataaagaatgttgta

SEQ ID NO: 103170 - DNA, 20 bp, Artificial Sequence
  MKO10103170_B_Olfr112
  gRNA
gtttcctttgcctgtttcac

SEQ ID NO: 103171 - DNA, 20 bp, Artificial Sequence
  MKO10103171_B_Olfr1130
  gRNA
atttattgacgtgtctccgc

SEQ ID NO: 103172 - DNA, 20 bp, Artificial Sequence
  MKO10103172_B_Olfr1130
  gRNA
gttgtgtttcttccttatgc

SEQ ID NO: 103173 - DNA, 20 bp, Artificial Sequence
  MKO10103173_B_Olfr1130
  gRNA
gtggtatgtcacacaagaag

SEQ ID NO: 103174 - DNA, 20 bp, Artificial Sequence
  MKO10103174_B_Olfr1131
  gRNA
aagatgctgctagatatgtt

SEQ ID NO: 103175 - DNA, 20 bp, Artificial Sequence
  MKO10103175_B_Olfr1131
  gRNA
atttacttgagtatctaagc

SEQ ID NO: 103176 - DNA, 20 bp, Artificial Sequence
  MKO10103176_B_Olfr1131
  gRNA
cataaatagtaaatagtgcc

SEQ ID NO: 103177 - DNA, 20 bp, Artificial Sequence
  MKO10103177_B_Olfr1132
  gRNA
aagaaggtcactctcatgtc

SEQ ID NO: 103178 - DNA, 20 bp, Artificial Sequence
  MKO10103178_B_Olfr1132
  gRNA
gactgctgttgcagtattcc

SEQ ID NO: 103179 - DNA, 20 bp, Artificial Sequence
  MKO10103179_B_Olfr1132
  gRNA
caccagggtgtagaagagtg

SEQ ID NO: 103180 - DNA, 20 bp, Artificial Sequence
  MKO10103180_B_Olfr1133
  gRNA
gtggaaggtcacaaaaaaag

SEQ ID NO: 103181 - DNA, 20 bp, Artificial Sequence
  MKO10103181_B_Olfr1133
  gRNA
agccatgaggtgggaagcac

SEQ ID NO: 103182 - DNA, 20 bp, Artificial Sequence
  MKO10103182_B_Olfr1133
  gRNA
atccaccaagcctattgcat

SEQ ID NO: 103183 - DNA, 20 bp, Artificial Sequence
  MKO10103183_B_Olfr1134
  gRNA
aatggtcatattgattaaac

SEQ ID NO: 103184 - DNA, 20 bp, Artificial Sequence
  MKO10103184_B_Olfr1134
  gRNA
ctgtgacatcccacccttac

SEQ ID NO: 103185 - DNA, 20 bp, Artificial Sequence
  MKO10103185_B_Olfr1134
  gRNA
gaagctctgcatccaacttg

SEQ ID NO: 103186 - DNA, 20 bp, Artificial Sequence
  MKO10103186_B_Olfr1135
  gRNA
cagtatctatcattcctact

SEQ ID NO: 103187 - DNA, 20 bp, Artificial Sequence
  MKO10103187_B_Olfr1135
  gRNA
caccagggtataaaaaagtg

SEQ ID NO: 103188 - DNA, 20 bp, Artificial Sequence
  MKO10103188_B_Olfr1135
  gRNA
ttaaaaatccgctccactga

SEQ ID NO: 103189 - DNA, 20 bp, Artificial Sequence
  MKO10103189_B_Olfr1136
  gRNA
tacgtttgtcagaagaatag

SEQ ID NO: 103190 - DNA, 20 bp, Artificial Sequence
  MKO10103190_B_Olfr1136
  gRNA
tggtttcatacatacctcat

SEQ ID NO: 103191 - DNA, 20 bp, Artificial Sequence
  MKO10103191_B_Olfr1136
  gRNA
acataagctgaatgccaatg

SEQ ID NO: 103192 - DNA, 20 bp, Artificial Sequence
  MKO10103192_B_Olfr1137
  gRNA
ctctgctactccaccgcagt

SEQ ID NO: 103193 - DNA, 20 bp, Artificial Sequence
  MKO10103193_B_Olfr1137
  gRNA
ttatcatggggataatgagg

SEQ ID NO: 103194 - DNA, 20 bp, Artificial Sequence
  MKO10103194_B_Olfr1137
  gRNA
aaccatctatagtacttgtc

SEQ ID NO: 103195 - DNA, 20 bp, Artificial Sequence
  MKO10103195_B_Olfr1138
  gRNA
acgtcactttatcttgatct

SEQ ID NO: 103196 - DNA, 20 bp, Artificial Sequence
  MKO10103196_B_Olfr1138
  gRNA
tgtatgcagtagacatgtcc

SEQ ID NO: 103197 - DNA, 20 bp, Artificial Sequence
  MKO10103197_B_Olfr1138
  gRNA
acatgtctactgcatacaaa

SEQ ID NO: 103198 - DNA, 20 bp, Artificial Sequence
  MKO10103198_B_Olfr113
  gRNA
agacgataaaaagtgttata

SEQ ID NO: 103199 - DNA, 20 bp, Artificial Sequence
  MKO10103199_B_Olfr113
  gRNA
gacatttgcctgacacagag

SEQ ID NO: 103200 - DNA, 20 bp, Artificial Sequence
  MKO10103200_B_Olfr113
  gRNA
gttgacaatcccaatgaagc

SEQ ID NO: 103201 - DNA, 20 bp, Artificial Sequence
  MKO10103201_B_Olfr1140
  gRNA
cataaactccagccagaagc

SEQ ID NO: 103202 - DNA, 20 bp, Artificial Sequence
  MKO10103202_B_Olfr1140
  gRNA
acatgtctacaacatacatc

SEQ ID NO: 103203 - DNA, 20 bp, Artificial Sequence
  MKO10103203_B_Olfr1140
  gRNA
tctaaggagtatgaagaact

SEQ ID NO: 103204 - DNA, 20 bp, Artificial Sequence
  MKO10103204_B_Olfr1141
  gRNA
aagcatctgtcattcctaca

SEQ ID NO: 103205 - DNA, 20 bp, Artificial Sequence
  MKO10103205_B_Olfr1141
  gRNA
tatggctttgtactgatcaa

SEQ ID NO: 103206 - DNA, 20 bp, Artificial Sequence
  MKO10103206_B_Olfr1141
  gRNA
tgcaacagcagtcagatgca

SEQ ID NO: 103207 - DNA, 20 bp, Artificial Sequence
  MKO10103207_B_Olfr1143
  gRNA
atacaacaaacatgtctaac

SEQ ID NO: 103208 - DNA, 20 bp, Artificial Sequence
  MKO10103208_B_Olfr1143
  gRNA
actgtcctgctcagatacac

SEQ ID NO: 103209 - DNA, 20 bp, Artificial Sequence
  MKO10103209_B_Olfr1143
  gRNA
ctttactgaattcatactaa

SEQ ID NO: 103210 - DNA, 20 bp, Artificial Sequence
  MKO10103210_B_Olfr1145
  gRNA
agtggcattccaattcagat

SEQ ID NO: 103211 - DNA, 20 bp, Artificial Sequence
  MKO10103211_B_Olfr1145
  gRNA
ctttggcctcaagtatgtaa

SEQ ID NO: 103212 - DNA, 20 bp, Artificial Sequence
  MKO10103212_B_Olfr1145
  gRNA
agtgatacaatttgttctgc

SEQ ID NO: 103213 - DNA, 20 bp, Artificial Sequence
  MKO10103213_B_Olfr1148
  gRNA
ccacaagccagcgtgagaat

SEQ ID NO: 103214 - DNA, 20 bp, Artificial Sequence
  MKO10103214_B_Olfr1148
  gRNA
caatggtgtagaacagagac

SEQ ID NO: 103215 - DNA, 20 bp, Artificial Sequence
  MKO10103215_B_Olfr1148
  gRNA
ggctgcattcccctttatat

SEQ ID NO: 103216 - DNA, 20 bp, Artificial Sequence
  MKO10103216_B_Olfr114
  gRNA
gctgacttcctgtcagtaat

SEQ ID NO: 103217 - DNA, 20 bp, Artificial Sequence
  MKO10103217_B_Olfr114
  gRNA
cttccttacaacactcttta

SEQ ID NO: 103218 - DNA, 20 bp, Artificial Sequence
  MKO10103218_B_Olfr114
  gRNA
gacacatgatgatctcatag

SEQ ID NO: 103219 - DNA, 20 bp, Artificial Sequence
  MKO10103219_B_Olfr1151
  gRNA
cactgtgaacatgtctagca

SEQ ID NO: 103220 - DNA, 20 bp, Artificial Sequence
  MKO10103220_B_Olfr1151
  gRNA
tgcacagcacaaccaaaaaa

SEQ ID NO: 103221 - DNA, 20 bp, Artificial Sequence
  MKO10103221_B_Olfr1151
  gRNA
ggcaactgtggtgagatgag

SEQ ID NO: 103222 - DNA, 20 bp, Artificial Sequence
  MKO10103222_B_Olfr1152
  gRNA
agcaggtccaataacatctt

SEQ ID NO: 103223 - DNA, 20 bp, Artificial Sequence
  MKO10103223_B_Olfr1152
  gRNA
tgtaaactacagccagaagt

SEQ ID NO: 103224 - DNA, 20 bp, Artificial Sequence
  MKO10103224_B_Olfr1152
  gRNA
agtaattgaattgctgctct

SEQ ID NO: 103225 - DNA, 20 bp, Artificial Sequence
  MKO10103225_B_Olfr1153
  gRNA
tcagctcaataaacccaaat

SEQ ID NO: 103226 - DNA, 20 bp, Artificial Sequence
  MKO10103226_B_Olfr1153
  gRNA
aaattgcaacaacagttaga

SEQ ID NO: 103227 - DNA, 20 bp, Artificial Sequence
  MKO10103227_B_Olfr1153
  gRNA
catatctaccgcatacatca

SEQ ID NO: 103228 - DNA, 20 bp, Artificial Sequence
  MKO10103228_B_Olfr1154
  gRNA
caaaagagtctgtactcacc

SEQ ID NO: 103229 - DNA, 20 bp, Artificial Sequence
  MKO10103229_B_Olfr1154
  gRNA
attggaaagtattagtagta

SEQ ID NO: 103230 - DNA, 20 bp, Artificial Sequence
  MKO10103230_B_Olfr1154
  gRNA
acagtagttactatttatca

SEQ ID NO: 103231 - DNA, 20 bp, Artificial Sequence
  MKO10103231_B_Olfr1155
  gRNA
ctctgtgcactgctagtgct

SEQ ID NO: 103232 - DNA, 20 bp, Artificial Sequence
  MKO10103232_B_Olfr1155
  gRNA
tgaaccttgttgtagaagat

SEQ ID NO: 103233 - DNA, 20 bp, Artificial Sequence
  MKO10103233_B_Olfr1155
  gRNA
ctcagattacccagaactgc

SEQ ID NO: 103234 - DNA, 20 bp, Artificial Sequence
  MKO10103234_B_Olfr1156
  gRNA
aaataaaaaggatcgttcca

SEQ ID NO: 103235 - DNA, 20 bp, Artificial Sequence
  MKO10103235_B_Olfr1156
  gRNA
cccaaagctccgtcttgtac

SEQ ID NO: 103236 - DNA, 20 bp, Artificial Sequence
  MKO10103236_B_Olfr1156
  gRNA
atgatgacagtgtacaatag

SEQ ID NO: 103237 - DNA, 20 bp, Artificial Sequence
  MKO10103237_B_Olfr1157
  gRNA
cctctacagagcgcattctc

SEQ ID NO: 103238 - DNA, 20 bp, Artificial Sequence
  MKO10103238_B_Olfr1157
  gRNA
cctgagaatgcgctctgtag

SEQ ID NO: 103239 - DNA, 20 bp, Artificial Sequence
  MKO10103239_B_Olfr1157
  gRNA
agaattggaccatacatgcc

SEQ ID NO: 103240 - DNA, 20 bp, Artificial Sequence
  MKO10103240_B_Olfr1158
  gRNA
gctggcatttgaagcattct

SEQ ID NO: 103241 - DNA, 20 bp, Artificial Sequence
  MKO10103241_B_Olfr1158
  gRNA
ggaggaacatgcatctatga

SEQ ID NO: 103242 - DNA, 20 bp, Artificial Sequence
  MKO10103242_B_Olfr1158
  gRNA
atactgtaattatgtccaag

SEQ ID NO: 103243 - DNA, 20 bp, Artificial Sequence
  MKO10103243_B_Olfr115
  gRNA
ggttgggtttagatatgcaa

SEQ ID NO: 103244 - DNA, 20 bp, Artificial Sequence
  MKO10103244_B_Olfr115
  gRNA
aatgattaccttgtaacaat

SEQ ID NO: 103245 - DNA, 20 bp, Artificial Sequence
  MKO10103245_B_Olfr115
  gRNA
ctctgctgaaagcaggtata

SEQ ID NO: 103246 - DNA, 20 bp, Artificial Sequence
  MKO10103246_B_Olfr1160
  gRNA
tgtaaaataggttctgcaga

SEQ ID NO: 103247 - DNA, 20 bp, Artificial Sequence
  MKO10103247_B_Olfr1160
  gRNA
caagagagtctgtattcagt

SEQ ID NO: 103248 - DNA, 20 bp, Artificial Sequence
  MKO10103248_B_Olfr1160
  gRNA
actggaaagtattagttgta

SEQ ID NO: 103249 - DNA, 20 bp, Artificial Sequence
  MKO10103249_B_Olfr1161
  gRNA
ctcccagctcacattcaaag

SEQ ID NO: 103250 - DNA, 20 bp, Artificial Sequence
  MKO10103250_B_Olfr1161
  gRNA
tactcaagatgcaatcatcc

SEQ ID NO: 103251 - DNA, 20 bp, Artificial Sequence
  MKO10103251_B_Olfr1161
  gRNA
gaaactctgcatcagtctag

SEQ ID NO: 103252 - DNA, 20 bp, Artificial Sequence
  MKO10103252_B_Olfr1162
  gRNA
ggagattatcttctccctgt

SEQ ID NO: 103253 - DNA, 20 bp, Artificial Sequence
  MKO10103253_B_Olfr1162
  gRNA
gaaaaattgtgatggcagtc

SEQ ID NO: 103254 - DNA, 20 bp, Artificial Sequence
  MKO10103254_B_Olfr1162
  gRNA
tctttgtgctcactaatttc

SEQ ID NO: 103255 - DNA, 20 bp, Artificial Sequence
  MKO10103255_B_Olfr1163
  gRNA
tgatgagcactgtcatgcca

SEQ ID NO: 103256 - DNA, 20 bp, Artificial Sequence
  MKO10103256_B_Olfr1163
  gRNA
tatgtacatcatcactgtag

SEQ ID NO: 103257 - DNA, 20 bp, Artificial Sequence
  MKO10103257_B_Olfr1163
  gRNA
taccgaactccaaaaattct

SEQ ID NO: 103258 - DNA, 20 bp, Artificial Sequence
  MKO10103258_B_Olfr1164
  gRNA
catgtacatggttactgtgt

SEQ ID NO: 103259 - DNA, 20 bp, Artificial Sequence
  MKO10103259_B_Olfr1164
  gRNA
gcaacaagcctcattaaaca

SEQ ID NO: 103260 - DNA, 20 bp, Artificial Sequence
  MKO10103260_B_Olfr1164
  gRNA
atttgtcttctacaatcaag

SEQ ID NO: 103261 - DNA, 20 bp, Artificial Sequence
  MKO10103261_B_Olfr1166
  gRNA
caccaatgttactgagtaga

SEQ ID NO: 103262 - DNA, 20 bp, Artificial Sequence
  MKO10103262_B_Olfr1166
  gRNA
catctactcagtaacattgg

SEQ ID NO: 103263 - DNA, 20 bp, Artificial Sequence
  MKO10103263_B_Olfr1166
  gRNA
agcatatatctaaaaatgat

SEQ ID NO: 103264 - DNA, 20 bp, Artificial Sequence
  MKO10103264_B_Olfr1167
  gRNA
gaaaccgaccaagatgaatg

SEQ ID NO: 103265 - DNA, 20 bp, Artificial Sequence
  MKO10103265_B_Olfr1167
  gRNA
gaaagtgatggcttatgaag

SEQ ID NO: 103266 - DNA, 20 bp, Artificial Sequence
  MKO10103266_B_Olfr1167
  gRNA
ttctgctaccacattcatct

SEQ ID NO: 103267 - DNA, 20 bp, Artificial Sequence
  MKO10103267_B_Olfr1168
  gRNA
gagctctcttattgtgaacc

SEQ ID NO: 103268 - DNA, 20 bp, Artificial Sequence
  MKO10103268_B_Olfr1168
  gRNA
tgcaaagagctcaaagctgc

SEQ ID NO: 103269 - DNA, 20 bp, Artificial Sequence
  MKO10103269_B_Olfr1168
  gRNA
ccaaagtgatcaatgatgcc

SEQ ID NO: 103270 - DNA, 20 bp, Artificial Sequence
  MKO10103270_B_Olfr116
  gRNA
gaggagaaatccgctcattg

SEQ ID NO: 103271 - DNA, 20 bp, Artificial Sequence
  MKO10103271_B_Olfr116
  gRNA
ggttagtttcatgactgcag

SEQ ID NO: 103272 - DNA, 20 bp, Artificial Sequence
  MKO10103272_B_Olfr116
  gRNA
aatgatcaccttgtagtaat

SEQ ID NO: 103273 - DNA, 20 bp, Artificial Sequence
  MKO10103273_B_Olfr1170
  gRNA
catgactgtgtaaagagcag

SEQ ID NO: 103274 - DNA, 20 bp, Artificial Sequence
  MKO10103274_B_Olfr1170
  gRNA
catctactcagtaacattga

SEQ ID NO: 103275 - DNA, 20 bp, Artificial Sequence
  MKO10103275_B_Olfr1170
  gRNA
ttctgcgaccacattcatct

SEQ ID NO: 103276 - DNA, 20 bp, Artificial Sequence
  MKO10103276_B_Olfr1173
  gRNA
tcttgatgattgtgacaatg

SEQ ID NO: 103277 - DNA, 20 bp, Artificial Sequence
  MKO10103277_B_Olfr1173
  gRNA
gaaaccgaccagaataaatg

SEQ ID NO: 103278 - DNA, 20 bp, Artificial Sequence
  MKO10103278_B_Olfr1173
  gRNA
tttctgagtccacctttaga

SEQ ID NO: 103279 - DNA, 20 bp, Artificial Sequence
  MKO10103279_B_Olfr1176
  gRNA
acttgagcacgcagtataga

SEQ ID NO: 103280 - DNA, 20 bp, Artificial Sequence
  MKO10103280_B_Olfr1176
  gRNA
gttagaccttctgataacag

SEQ ID NO: 103281 - DNA, 20 bp, Artificial Sequence
  MKO10103281_B_Olfr1176
  gRNA
catcaagtgaatcagagtac

SEQ ID NO: 103282 - DNA, 20 bp, Artificial Sequence
  MKO10103282_B_Olfr1178
  gRNA
ctgcgtcatgcaaccattgt

SEQ ID NO: 103283 - DNA, 20 bp, Artificial Sequence
  MKO10103283_B_Olfr1178
  gRNA
aaaaagtcgatttcctacaa

SEQ ID NO: 103284 - DNA, 20 bp, Artificial Sequence
  MKO10103284_B_Olfr1178
  gRNA
ttccttcactccctgacata

SEQ ID NO: 103285 - DNA, 20 bp, Artificial Sequence
  MKO10103285_B_Olfr1179
  gRNA
agaccacatcaagactacga

SEQ ID NO: 103286 - DNA, 20 bp, Artificial Sequence
  MKO10103286_B_Olfr1179
  gRNA
cagtcccatcatgcctgaat

SEQ ID NO: 103287 - DNA, 20 bp, Artificial Sequence
  MKO10103287_B_Olfr1179
  gRNA
tgcaccaatacgcacagagt

SEQ ID NO: 103288 - DNA, 20 bp, Artificial Sequence
  MKO10103288_B_Olfr117
  gRNA
aagctgtatagcacagcctg

SEQ ID NO: 103289 - DNA, 20 bp, Artificial Sequence
  MKO10103289_B_Olfr117
  gRNA
catgaagagctgcacttcat

SEQ ID NO: 103290 - DNA, 20 bp, Artificial Sequence
  MKO10103290_B_Olfr117
  gRNA
ggtcaaatgccataactgcg

SEQ ID NO: 103291 - DNA, 20 bp, Artificial Sequence
  MKO10103291_B_Olfr1180
  gRNA
atccttgcagcttgttgtac

SEQ ID NO: 103292 - DNA, 20 bp, Artificial Sequence
  MKO10103292_B_Olfr1180
  gRNA
caaactcctgactgatttac

SEQ ID NO: 103293 - DNA, 20 bp, Artificial Sequence
  MKO10103293_B_Olfr1180
  gRNA
tagttctcatataaccattg

SEQ ID NO: 103294 - DNA, 20 bp, Artificial Sequence
  MKO10103294_B_Olfr1181
  gRNA
aagcagatccccaatcaatt

SEQ ID NO: 103295 - DNA, 20 bp, Artificial Sequence
  MKO10103295_B_Olfr1181
  gRNA
gtgcaagcaactttcagcaa

SEQ ID NO: 103296 - DNA, 20 bp, Artificial Sequence
  MKO10103296_B_Olfr1181
  gRNA
aactgcatctaattgagaaa

SEQ ID NO: 103297 - DNA, 20 bp, Artificial Sequence
  MKO10103297_B_Olfr1182
  gRNA
aataataaatggaatgccag

SEQ ID NO: 103298 - DNA, 20 bp, Artificial Sequence
  MKO10103298_B_Olfr1182
  gRNA
ttcctgaattggcaaccatg

SEQ ID NO: 103299 - DNA, 20 bp, Artificial Sequence
  MKO10103299_B_Olfr1182
  gRNA
aactgcacctaattgagaaa

SEQ ID NO: 103300 - DNA, 20 bp, Artificial Sequence
  MKO10103300_B_Olfr1183
  gRNA
catattagtgattcttgcct

SEQ ID NO: 103301 - DNA, 20 bp, Artificial Sequence
  MKO10103301_B_Olfr1183
  gRNA
catgcaggcaagtttcaata

SEQ ID NO: 103302 - DNA, 20 bp, Artificial Sequence
  MKO10103302_B_Olfr1183
  gRNA
attatagttgtatatctgag

SEQ ID NO: 103303 - DNA, 20 bp, Artificial Sequence
  MKO10103303_B_Olfr1184
  gRNA
gtcttctaagcggaacattg

SEQ ID NO: 103304 - DNA, 20 bp, Artificial Sequence
  MKO10103304_B_Olfr1184
  gRNA
tgacccgaacaagacaacaa

SEQ ID NO: 103305 - DNA, 20 bp, Artificial Sequence
  MKO10103305_B_Olfr1184
  gRNA
tagaagatctccaatcagtt

SEQ ID NO: 103306 - DNA, 20 bp, Artificial Sequence
  MKO10103306_B_Olfr1186
  gRNA
atgcacttctcatatcattg

SEQ ID NO: 103307 - DNA, 20 bp, Artificial Sequence
  MKO10103307_B_Olfr1186
  gRNA
ttagtgattcttgcctggat

SEQ ID NO: 103308 - DNA, 20 bp, Artificial Sequence
  MKO10103308_B_Olfr1186
  gRNA
gccacagaatggtagtctta

SEQ ID NO: 103309 - DNA, 20 bp, Artificial Sequence
  MKO10103309_B_Olfr1188
  gRNA
ccatatgtgctgtcttctag

SEQ ID NO: 103310 - DNA, 20 bp, Artificial Sequence
  MKO10103310_B_Olfr1188
  gRNA
ttgcacaatccctaagatgc

SEQ ID NO: 103311 - DNA, 20 bp, Artificial Sequence
  MKO10103311_B_Olfr1188
  gRNA
gattctgtgttagtcccatg

SEQ ID NO: 103312 - DNA, 20 bp, Artificial Sequence
  MKO10103312_B_Olfr1189
  gRNA
ctttggaaatctactcattg

SEQ ID NO: 103313 - DNA, 20 bp, Artificial Sequence
  MKO10103313_B_Olfr1189
  gRNA
cattgctccaaaattgatta

SEQ ID NO: 103314 - DNA, 20 bp, Artificial Sequence
  MKO10103314_B_Olfr1189
  gRNA
aatgtgagctacatgtagag

SEQ ID NO: 103315 - DNA, 20 bp, Artificial Sequence
  MKO10103315_B_Olfr118
  gRNA
cccaaatctagccacttacc

SEQ ID NO: 103316 - DNA, 20 bp, Artificial Sequence
  MKO10103316_B_Olfr118
  gRNA
aacaagtgtagccgatctcc

SEQ ID NO: 103317 - DNA, 20 bp, Artificial Sequence
  MKO10103317_B_Olfr118
  gRNA
acatggtccacagaagttca

SEQ ID NO: 103318 - DNA, 20 bp, Artificial Sequence
  MKO10103318_B_Olfr1193
  gRNA
tgcactgacacttacattgt

SEQ ID NO: 103319 - DNA, 20 bp, Artificial Sequence
  MKO10103319_B_Olfr1193
  gRNA
acatcttattgcatctttcc

SEQ ID NO: 103320 - DNA, 20 bp, Artificial Sequence
  MKO10103320_B_Olfr1193
  gRNA
atcatagtcatatagtggag

SEQ ID NO: 103321 - DNA, 20 bp, Artificial Sequence
  MKO10103321_B_Olfr1195
  gRNA
catagcggtcaacagccatg

SEQ ID NO: 103322 - DNA, 20 bp, Artificial Sequence
  MKO10103322_B_Olfr1195
  gRNA
agtgagtttccttatgctca

SEQ ID NO: 103323 - DNA, 20 bp, Artificial Sequence
  MKO10103323_B_Olfr1195
  gRNA
atatgtgatcaaccttctcc

SEQ ID NO: 103324 - DNA, 20 bp, Artificial Sequence
  MKO10103324_B_Olfr1196
  gRNA
cttgttcctgctttgctatc

SEQ ID NO: 103325 - DNA, 20 bp, Artificial Sequence
  MKO10103325_B_Olfr1196
  gRNA
agatagccagatagcaaagc

SEQ ID NO: 103326 - DNA, 20 bp, Artificial Sequence
  MKO10103326_B_Olfr1196
  gRNA
tcacagtagaggtgtagcag

SEQ ID NO: 103327 - DNA, 20 bp, Artificial Sequence
  MKO10103327_B_Olfr1197
  gRNA
tccttgttctcacttcctac

SEQ ID NO: 103328 - DNA, 20 bp, Artificial Sequence
  MKO10103328_B_Olfr1197
  gRNA
aacaaccaccatcccagagt

SEQ ID NO: 103329 - DNA, 20 bp, Artificial Sequence
  MKO10103329_B_Olfr1197
  gRNA
aacaagtagtacaataaaaa

SEQ ID NO: 103330 - DNA, 20 bp, Artificial Sequence
  MKO10103330_B_Olfr1198
  gRNA
tgccaagacaaactgtttga

SEQ ID NO: 103331 - DNA, 20 bp, Artificial Sequence
  MKO10103331_B_Olfr1198
  gRNA
catattccccctgctgaaac

SEQ ID NO: 103332 - DNA, 20 bp, Artificial Sequence
  MKO10103332_B_Olfr1198
  gRNA
gattatataagaaatgacca

SEQ ID NO: 103333 - DNA, 20 bp, Artificial Sequence
  MKO10103333_B_Olfr1199
  gRNA
tgtagctcctagaacaattg

SEQ ID NO: 103334 - DNA, 20 bp, Artificial Sequence
  MKO10103334_B_Olfr1199
  gRNA
tattcttcttggcttgacac

SEQ ID NO: 103335 - DNA, 20 bp, Artificial Sequence
  MKO10103335_B_Olfr1199
  gRNA
acatgggactcccaagagcc

SEQ ID NO: 103336 - DNA, 20 bp, Artificial Sequence
  MKO10103336_B_Olfr119
  gRNA
cagcatctattacttacttg

SEQ ID NO: 103337 - DNA, 20 bp, Artificial Sequence
  MKO10103337_B_Olfr119
  gRNA
cttgtagtcacaatgttcta

SEQ ID NO: 103338 - DNA, 20 bp, Artificial Sequence
  MKO10103338_B_Olfr119
  gRNA
agcaagtgtagccaatctcc

SEQ ID NO: 103339 - DNA, 20 bp, Artificial Sequence
  MKO10103339_B_Olfr11
  gRNA
cgtaagtttaccagcatttg

SEQ ID NO: 103340 - DNA, 20 bp, Artificial Sequence
  MKO10103340_B_Olfr11
  gRNA
ttggctttggaaactcggtg

SEQ ID NO: 103341 - DNA, 20 bp, Artificial Sequence
  MKO10103341_B_Olfr11
  gRNA
tgccagtcatgtccttcgac

SEQ ID NO: 103342 - DNA, 20 bp, Artificial Sequence
  MKO10103342_B_Olfr1200
  gRNA
atcttagcaattgttaactc

SEQ ID NO: 103343 - DNA, 20 bp, Artificial Sequence
  MKO10103343_B_Olfr1200
  gRNA
ccgagaccacactttgtgca

SEQ ID NO: 103344 - DNA, 20 bp, Artificial Sequence
  MKO10103344_B_Olfr1200
  gRNA
ttgtactttctgtgacctgt

SEQ ID NO: 103345 - DNA, 20 bp, Artificial Sequence
  MKO10103345_B_Olfr1201
  gRNA
tgcgttactcagtcatcatg

SEQ ID NO: 103346 - DNA, 20 bp, Artificial Sequence
  MKO10103346_B_Olfr1201
  gRNA
gttgagaaatggtgttccaa

SEQ ID NO: 103347 - DNA, 20 bp, Artificial Sequence
  MKO10103347_B_Olfr1201
  gRNA
actgttaccatcttgtccat

SEQ ID NO: 103348 - DNA, 20 bp, Artificial Sequence
  MKO10103348_B_Olfr1202
  gRNA
agtgaatcagcaatcacttt

SEQ ID NO: 103349 - DNA, 20 bp, Artificial Sequence
  MKO10103349_B_Olfr1202
  gRNA
cgtgaccgagtttgttctcc

SEQ ID NO: 103350 - DNA, 20 bp, Artificial Sequence
  MKO10103350_B_Olfr1202
  gRNA
caaagtaactgctttatcaa

SEQ ID NO: 103351 - DNA, 20 bp, Artificial Sequence
  MKO10103351_B_Olfr1204
  gRNA
cttactgcttgtgtcctact

SEQ ID NO: 103352 - DNA, 20 bp, Artificial Sequence
  MKO10103352_B_Olfr1204
  gRNA
cagacaaatgaaaccactat

SEQ ID NO: 103353 - DNA, 20 bp, Artificial Sequence
  MKO10103353_B_Olfr1204
  gRNA
acgactctgtaacatcctag

SEQ ID NO: 103354 - DNA, 20 bp, Artificial Sequence
  MKO10103354_B_Olfr1205
  gRNA
acctgccgcctcatgatgac

SEQ ID NO: 103355 - DNA, 20 bp, Artificial Sequence
  MKO10103355_B_Olfr1205
  gRNA
tgcattacccagtcatcatg

SEQ ID NO: 103356 - DNA, 20 bp, Artificial Sequence
  MKO10103356_B_Olfr1205
  gRNA
gtcaccgagtttatactact

SEQ ID NO: 103357 - DNA, 20 bp, Artificial Sequence
  MKO10103357_B_Olfr1206
  gRNA
catgatgactgggtatcgta

SEQ ID NO: 103358 - DNA, 20 bp, Artificial Sequence
  MKO10103358_B_Olfr1206
  gRNA
gatacccagtcatcatgagc

SEQ ID NO: 103359 - DNA, 20 bp, Artificial Sequence
  MKO10103359_B_Olfr1206
  gRNA
tactgctaccatcttgtcca

SEQ ID NO: 103360 - DNA, 20 bp, Artificial Sequence
  MKO10103360_B_Olfr1208
  gRNA
cagaatggacatcacccctg

SEQ ID NO: 103361 - DNA, 20 bp, Artificial Sequence
  MKO10103361_B_Olfr1208
  gRNA
ccttacagaatttatcttac

SEQ ID NO: 103362 - DNA, 20 bp, Artificial Sequence
  MKO10103362_B_Olfr1208
  gRNA
ccagtaagataaattctgta

SEQ ID NO: 103363 - DNA, 20 bp, Artificial Sequence
  MKO10103363_B_Olfr1209
  gRNA
agtgagtttcctcatgctga

SEQ ID NO: 103364 - DNA, 20 bp, Artificial Sequence
  MKO10103364_B_Olfr1209
  gRNA
gcactcagtgaaagatatag

SEQ ID NO: 103365 - DNA, 20 bp, Artificial Sequence
  MKO10103365_B_Olfr1209
  gRNA
aaagagtccacaattgttct

SEQ ID NO: 103366 - DNA, 20 bp, Artificial Sequence
  MKO10103366_B_Olfr120
  gRNA
tataactgagtgttgcctac

SEQ ID NO: 103367 - DNA, 20 bp, Artificial Sequence
  MKO10103367_B_Olfr120
  gRNA
gccaagagtttatctattcc

SEQ ID NO: 103368 - DNA, 20 bp, Artificial Sequence
  MKO10103368_B_Olfr120
  gRNA
caaaggccatagctgccagt

SEQ ID NO: 103369 - DNA, 20 bp, Artificial Sequence
  MKO10103369_B_Olfr1211
  gRNA
caatcacttctactgctgca

SEQ ID NO: 103370 - DNA, 20 bp, Artificial Sequence
  MKO10103370_B_Olfr1211
  gRNA
aagagaagcatgcatccaat

SEQ ID NO: 103371 - DNA, 20 bp, Artificial Sequence
  MKO10103371_B_Olfr1211
  gRNA
ttctgtcatcacaccaaaga

SEQ ID NO: 103372 - DNA, 20 bp, Artificial Sequence
  MKO10103372_B_Olfr1212
  gRNA
ctgaagtaatgcatgcatcc

SEQ ID NO: 103373 - DNA, 20 bp, Artificial Sequence
  MKO10103373_B_Olfr1212
  gRNA
acagagtcaacaatcatctt

SEQ ID NO: 103374 - DNA, 20 bp, Artificial Sequence
  MKO10103374_B_Olfr1212
  gRNA
gtgcatgccaactccagtaa

SEQ ID NO: 103375 - DNA, 20 bp, Artificial Sequence
  MKO10103375_B_Olfr1213
  gRNA
agcaagtccacagttacctt

SEQ ID NO: 103376 - DNA, 20 bp, Artificial Sequence
  MKO10103376_B_Olfr1213
  gRNA
ggtgattgtcttgatatcca

SEQ ID NO: 103377 - DNA, 20 bp, Artificial Sequence
  MKO10103377_B_Olfr1213
  gRNA
acagagcctcctgttcataa

SEQ ID NO: 103378 - DNA, 20 bp, Artificial Sequence
  MKO10103378_B_Olfr1214
  gRNA
tgtcacacctaagatgattg

SEQ ID NO: 103379 - DNA, 20 bp, Artificial Sequence
  MKO10103379_B_Olfr1214
  gRNA
tagtgcaggactgtagacaa

SEQ ID NO: 103380 - DNA, 20 bp, Artificial Sequence
  MKO10103380_B_Olfr1214
  gRNA
tgaactcattgacatagctc

SEQ ID NO: 103381 - DNA, 20 bp, Artificial Sequence
  MKO10103381_B_Olfr1215
  gRNA
cgaactcagttacaatggtt

SEQ ID NO: 103382 - DNA, 20 bp, Artificial Sequence
  MKO10103382_B_Olfr1215
  gRNA
gaataaatctataatcatcg

SEQ ID NO: 103383 - DNA, 20 bp, Artificial Sequence
  MKO10103383_B_Olfr1215
  gRNA
caacacaggactcgaagcaa

SEQ ID NO: 103384 - DNA, 20 bp, Artificial Sequence
  MKO10103384_B_Olfr1216
  gRNA
gttaccgagttcataatctt

SEQ ID NO: 103385 - DNA, 20 bp, Artificial Sequence
  MKO10103385_B_Olfr1216
  gRNA
ttgtgtcatgcaacagccaa

SEQ ID NO: 103386 - DNA, 20 bp, Artificial Sequence
  MKO10103386_B_Olfr1216
  gRNA
agggggtaacatgattattg

SEQ ID NO: 103387 - DNA, 20 bp, Artificial Sequence
  MKO10103387_B_Olfr1217
  gRNA
ctaaaattccacagagcctc

SEQ ID NO: 103388 - DNA, 20 bp, Artificial Sequence
  MKO10103388_B_Olfr1217
  gRNA
gaagcagtctacaattatct

SEQ ID NO: 103389 - DNA, 20 bp, Artificial Sequence
  MKO10103389_B_Olfr1217
  gRNA
actttcacagaacctgaatg

SEQ ID NO: 103390 - DNA, 20 bp, Artificial Sequence
  MKO10103390_B_Olfr1218
  gRNA
ccaaaatgctacagagcctc

SEQ ID NO: 103391 - DNA, 20 bp, Artificial Sequence
  MKO10103391_B_Olfr1218
  gRNA
tgaactcagtaacaaaactc

SEQ ID NO: 103392 - DNA, 20 bp, Artificial Sequence
  MKO10103392_B_Olfr1218
  gRNA
tgttactgagttcataatct

SEQ ID NO: 103393 - DNA, 20 bp, Artificial Sequence
  MKO10103393_B_Olfr1219
  gRNA
tccttattgcttgtctctta

SEQ ID NO: 103394 - DNA, 20 bp, Artificial Sequence
  MKO10103394_B_Olfr1219
  gRNA
accataagagacaagcaata

SEQ ID NO: 103395 - DNA, 20 bp, Artificial Sequence
  MKO10103395_B_Olfr1219
  gRNA
aatgtggaagagattaatag

SEQ ID NO: 103396 - DNA, 20 bp, Artificial Sequence
  MKO10103396_B_Olfr121
  gRNA
tctagccaacttgtctcttc

SEQ ID NO: 103397 - DNA, 20 bp, Artificial Sequence
  MKO10103397_B_Olfr121
  gRNA
gctacagagccttgtaagtg

SEQ ID NO: 103398 - DNA, 20 bp, Artificial Sequence
  MKO10103398_B_Olfr121
  gRNA
cccaagtctagccacttacc

SEQ ID NO: 103399 - DNA, 20 bp, Artificial Sequence
  MKO10103399_B_Olfr1220
  gRNA
agaagtgcaagtatccaata

SEQ ID NO: 103400 - DNA, 20 bp, Artificial Sequence
  MKO10103400_B_Olfr1220
  gRNA
aatgtgcagaagatctaaag

SEQ ID NO: 103401 - DNA, 20 bp, Artificial Sequence
  MKO10103401_B_Olfr1220
  gRNA
actttgcagctaccgttctg

SEQ ID NO: 103402 - DNA, 20 bp, Artificial Sequence
  MKO10103402_B_Olfr1221
  gRNA
gatgcagatagaactactat

SEQ ID NO: 103403 - DNA, 20 bp, Artificial Sequence
  MKO10103403_B_Olfr1221
  gRNA
actttgcaattaccattctg

SEQ ID NO: 103404 - DNA, 20 bp, Artificial Sequence
  MKO10103404_B_Olfr1221
  gRNA
gtgtgttggtaggcatagca

SEQ ID NO: 103405 - DNA, 20 bp, Artificial Sequence
  MKO10103405_B_Olfr1222
  gRNA
tttactagccacttctttgc

SEQ ID NO: 103406 - DNA, 20 bp, Artificial Sequence
  MKO10103406_B_Olfr1222
  gRNA
tagaggaagtgcaagcatcc

SEQ ID NO: 103407 - DNA, 20 bp, Artificial Sequence
  MKO10103407_B_Olfr1222
  gRNA
cgtgcatatattagcataca

SEQ ID NO: 103408 - DNA, 20 bp, Artificial Sequence
  MKO10103408_B_Olfr1223
  gRNA
ccagaatgacacagagtctc

SEQ ID NO: 103409 - DNA, 20 bp, Artificial Sequence
  MKO10103409_B_Olfr1223
  gRNA
ttgtaccatacaacattcaa

SEQ ID NO: 103410 - DNA, 20 bp, Artificial Sequence
  MKO10103410_B_Olfr1223
  gRNA
cagaagaaatgcatgcatcc

SEQ ID NO: 103411 - DNA, 20 bp, Artificial Sequence
  MKO10103411_B_Olfr1225
  gRNA
ggtgatagtactgtcagcca

SEQ ID NO: 103412 - DNA, 20 bp, Artificial Sequence
  MKO10103412_B_Olfr1225
  gRNA
attctgtagtttatactttc

SEQ ID NO: 103413 - DNA, 20 bp, Artificial Sequence
  MKO10103413_B_Olfr1225
  gRNA
caccaaaatgacaaatatat

SEQ ID NO: 103414 - DNA, 20 bp, Artificial Sequence
  MKO10103414_B_Olfr1226
  gRNA
ttcctgaaagtatataccat

SEQ ID NO: 103415 - DNA, 20 bp, Artificial Sequence
  MKO10103415_B_Olfr1226
  gRNA
cttaatattcctgtcctttc

SEQ ID NO: 103416 - DNA, 20 bp, Artificial Sequence
  MKO10103416_B_Olfr1226
  gRNA
agagaacaagatgacactat

SEQ ID NO: 103417 - DNA, 20 bp, Artificial Sequence
  MKO10103417_B_Olfr1228
  gRNA
cgtgcatatattaaaaagca

SEQ ID NO: 103418 - DNA, 20 bp, Artificial Sequence
  MKO10103418_B_Olfr1228
  gRNA
actactcctccattatgacc

SEQ ID NO: 103419 - DNA, 20 bp, Artificial Sequence
  MKO10103419_B_Olfr1228
  gRNA
catcatcttaggggtgacag

SEQ ID NO: 103420 - DNA, 20 bp, Artificial Sequence
  MKO10103420_B_Olfr1229
  gRNA
tggaaagctctatccacttg

SEQ ID NO: 103421 - DNA, 20 bp, Artificial Sequence
  MKO10103421_B_Olfr1229
  gRNA
tgcatccaatagagacaaga

SEQ ID NO: 103422 - DNA, 20 bp, Artificial Sequence
  MKO10103422_B_Olfr1229
  gRNA
ctagagtaccacagagcctc

SEQ ID NO: 103423 - DNA, 20 bp, Artificial Sequence
  MKO10103423_B_Olfr122
  gRNA
tacaaggctctgtaacatct

SEQ ID NO: 103424 - DNA, 20 bp, Artificial Sequence
  MKO10103424_B_Olfr122
  gRNA
cttgtagtcacactcttcta

SEQ ID NO: 103425 - DNA, 20 bp, Artificial Sequence
  MKO10103425_B_Olfr122
  gRNA
tcccattccccatgaaacta

SEQ ID NO: 103426 - DNA, 20 bp, Artificial Sequence
  MKO10103426_B_Olfr1230
  gRNA
taacagtgagtccgaatctg

SEQ ID NO: 103427 - DNA, 20 bp, Artificial Sequence
  MKO10103427_B_Olfr1230
  gRNA
ggaacagaggattactacat

SEQ ID NO: 103428 - DNA, 20 bp, Artificial Sequence
  MKO10103428_B_Olfr1230
  gRNA
cttgtattatcttgtacatg

SEQ ID NO: 103429 - DNA, 20 bp, Artificial Sequence
  MKO10103429_B_Olfr1231
  gRNA
acagtcaccagcttatccac

SEQ ID NO: 103430 - DNA, 20 bp, Artificial Sequence
  MKO10103430_B_Olfr1231
  gRNA
aatgagcagattagccaaca

SEQ ID NO: 103431 - DNA, 20 bp, Artificial Sequence
  MKO10103431_B_Olfr1231
  gRNA
ctatgaggaatctattgaag

SEQ ID NO: 103432 - DNA, 20 bp, Artificial Sequence
  MKO10103432_B_Olfr1232
  gRNA
agttgtttacattgcaacta

SEQ ID NO: 103433 - DNA, 20 bp, Artificial Sequence
  MKO10103433_B_Olfr1232
  gRNA
gtgcgacttatttccattac

SEQ ID NO: 103434 - DNA, 20 bp, Artificial Sequence
  MKO10103434_B_Olfr1232
  gRNA
acaagaccacaacagcaacg

SEQ ID NO: 103435 - DNA, 20 bp, Artificial Sequence
  MKO10103435_B_Olfr1233
  gRNA
ctatggtcccgacaatgagc

SEQ ID NO: 103436 - DNA, 20 bp, Artificial Sequence
  MKO10103436_B_Olfr1233
  gRNA
gcagaaatggtccatgacat

SEQ ID NO: 103437 - DNA, 20 bp, Artificial Sequence
  MKO10103437_B_Olfr1233
  gRNA
tctgtatgaaaagttgttac

SEQ ID NO: 103438 - DNA, 20 bp, Artificial Sequence
  MKO10103438_B_Olfr1234
  gRNA
tgcaccaatacctaccttat

SEQ ID NO: 103439 - DNA, 20 bp, Artificial Sequence
  MKO10103439_B_Olfr1234
  gRNA
caatcatacaaagccctata

SEQ ID NO: 103440 - DNA, 20 bp, Artificial Sequence
  MKO10103440_B_Olfr1234
  gRNA
ctttgtatgattgctaatgg

SEQ ID NO: 103441 - DNA, 20 bp, Artificial Sequence
  MKO10103441_B_Olfr1238
  gRNA
aacaatgctttctgtccagc

SEQ ID NO: 103442 - DNA, 20 bp, Artificial Sequence
  MKO10103442_B_Olfr1238
  gRNA
ccatgattgacaaataagca

SEQ ID NO: 103443 - DNA, 20 bp, Artificial Sequence
  MKO10103443_B_Olfr1238
  gRNA
tcactgtggccacaataagc

SEQ ID NO: 103444 - DNA, 20 bp, Artificial Sequence
  MKO10103444_B_Olfr1239
  gRNA
ctcacagttgttgccaatga

SEQ ID NO: 103445 - DNA, 20 bp, Artificial Sequence
  MKO10103445_B_Olfr1239
  gRNA
ctccctgaagaatctcagtc

SEQ ID NO: 103446 - DNA, 20 bp, Artificial Sequence
  MKO10103446_B_Olfr1239
  gRNA
gactctgagtcaggcccaag

SEQ ID NO: 103447 - DNA, 20 bp, Artificial Sequence
  MKO10103447_B_Olfr123
  gRNA
agccacaggtggccacaacg

SEQ ID NO: 103448 - DNA, 20 bp, Artificial Sequence
  MKO10103448_B_Olfr123
  gRNA
gccaaagagtgattgttcct

SEQ ID NO: 103449 - DNA, 20 bp, Artificial Sequence
  MKO10103449_B_Olfr123
  gRNA
ccagggctctacgccaagcc

SEQ ID NO: 103450 - DNA, 20 bp, Artificial Sequence
  MKO10103450_B_Olfr1240
  gRNA
gtgaccaaaacctccagcac

SEQ ID NO: 103451 - DNA, 20 bp, Artificial Sequence
  MKO10103451_B_Olfr1240
  gRNA
gtacatgctaagcccagtaa

SEQ ID NO: 103452 - DNA, 20 bp, Artificial Sequence
  MKO10103452_B_Olfr1240
  gRNA
tatgaccatcatgaatcgtc

SEQ ID NO: 103453 - DNA, 20 bp, Artificial Sequence
  MKO10103453_B_Olfr1241
  gRNA
gttgagctacagagtgtgca

SEQ ID NO: 103454 - DNA, 20 bp, Artificial Sequence
  MKO10103454_B_Olfr1241
  gRNA
gtgcatgcaagtcctaataa

SEQ ID NO: 103455 - DNA, 20 bp, Artificial Sequence
  MKO10103455_B_Olfr1241
  gRNA
ggtttgcttcctcctattgg

SEQ ID NO: 103456 - DNA, 20 bp, Artificial Sequence
  MKO10103456_B_Olfr1242
  gRNA
acagcaatatatttatccac

SEQ ID NO: 103457 - DNA, 20 bp, Artificial Sequence
  MKO10103457_B_Olfr1242
  gRNA
atagaagaatgcacaccctc

SEQ ID NO: 103458 - DNA, 20 bp, Artificial Sequence
  MKO10103458_B_Olfr1242
  gRNA
gtcttagtcaagatcctgct

SEQ ID NO: 103459 - DNA, 20 bp, Artificial Sequence
  MKO10103459_B_Olfr1243
  gRNA
taacctgctcattgcagtga

SEQ ID NO: 103460 - DNA, 20 bp, Artificial Sequence
  MKO10103460_B_Olfr1243
  gRNA
tcccagcaggatcttgagta

SEQ ID NO: 103461 - DNA, 20 bp, Artificial Sequence
  MKO10103461_B_Olfr1243
  gRNA
gcacacccgctgattcatga

SEQ ID NO: 103462 - DNA, 20 bp, Artificial Sequence
  MKO10103462_B_Olfr1245
  gRNA
ggtgaagatcacaatacaca

SEQ ID NO: 103463 - DNA, 20 bp, Artificial Sequence
  MKO10103463_B_Olfr1245
  gRNA
tgattccataggagcctagg

SEQ ID NO: 103464 - DNA, 20 bp, Artificial Sequence
  MKO10103464_B_Olfr1245
  gRNA
tgactgtcaccacaataagc

SEQ ID NO: 103465 - DNA, 20 bp, Artificial Sequence
  MKO10103465_B_Olfr1246
  gRNA
ttccataagacactatgaga

SEQ ID NO: 103466 - DNA, 20 bp, Artificial Sequence
  MKO10103466_B_Olfr1246
  gRNA
atccttctcatagtgtctta

SEQ ID NO: 103467 - DNA, 20 bp, Artificial Sequence
  MKO10103467_B_Olfr1246
  gRNA
gtgcacacaagtcccaataa

SEQ ID NO: 103468 - DNA, 20 bp, Artificial Sequence
  MKO10103468_B_Olfr1247
  gRNA
aactaagtctttaagcaact

SEQ ID NO: 103469 - DNA, 20 bp, Artificial Sequence
  MKO10103469_B_Olfr1247
  gRNA
gtgcacacaagtgccaataa

SEQ ID NO: 103470 - DNA, 20 bp, Artificial Sequence
  MKO10103470_B_Olfr1247
  gRNA
tgcactgacacctactttat

SEQ ID NO: 103471 - DNA, 20 bp, Artificial Sequence
  MKO10103471_B_Olfr1248
  gRNA
gcaaacctgccgtttcatta

SEQ ID NO: 103472 - DNA, 20 bp, Artificial Sequence
  MKO10103472_B_Olfr1248
  gRNA
actatctgaccataatgaaa

SEQ ID NO: 103473 - DNA, 20 bp, Artificial Sequence
  MKO10103473_B_Olfr1248
  gRNA
ggtttgcattctcttggtgg

SEQ ID NO: 103474 - DNA, 20 bp, Artificial Sequence
  MKO10103474_B_Olfr1249
  gRNA
atgtgcaagacctcccgccc

SEQ ID NO: 103475 - DNA, 20 bp, Artificial Sequence
  MKO10103475_B_Olfr1249
  gRNA
tgtactgatacatacttcct

SEQ ID NO: 103476 - DNA, 20 bp, Artificial Sequence
  MKO10103476_B_Olfr1249
  gRNA
gtacatgcaagtagtaatag

SEQ ID NO: 103477 - DNA, 20 bp, Artificial Sequence
  MKO10103477_B_Olfr124
  gRNA
ctaaggttgaccaacatctg

SEQ ID NO: 103478 - DNA, 20 bp, Artificial Sequence
  MKO10103478_B_Olfr124
  gRNA
cctttgttagtgccctcctc

SEQ ID NO: 103479 - DNA, 20 bp, Artificial Sequence
  MKO10103479_B_Olfr124
  gRNA
gaagctgagcttaatgttct

SEQ ID NO: 103480 - DNA, 20 bp, Artificial Sequence
  MKO10103480_B_Olfr1250
  gRNA
agagaacaaccaccatgatg

SEQ ID NO: 103481 - DNA, 20 bp, Artificial Sequence
  MKO10103481_B_Olfr1250
  gRNA
tgttacagagtttatcctcc

SEQ ID NO: 103482 - DNA, 20 bp, Artificial Sequence
  MKO10103482_B_Olfr1250
  gRNA
tttaatctccatgtttctca

SEQ ID NO: 103483 - DNA, 20 bp, Artificial Sequence
  MKO10103483_B_Olfr1251
  gRNA
tgtactgatacctatttcat

SEQ ID NO: 103484 - DNA, 20 bp, Artificial Sequence
  MKO10103484_B_Olfr1251
  gRNA
atgtgcaaaacctcccgccc

SEQ ID NO: 103485 - DNA, 20 bp, Artificial Sequence
  MKO10103485_B_Olfr1251
  gRNA
ctttctgtcattggcaataa

SEQ ID NO: 103486 - DNA, 20 bp, Artificial Sequence
  MKO10103486_B_Olfr1252
  gRNA
tccaaagtggtcaatgacat

SEQ ID NO: 103487 - DNA, 20 bp, Artificial Sequence
  MKO10103487_B_Olfr1252
  gRNA
gtcctcctccttgtctctta

SEQ ID NO: 103488 - DNA, 20 bp, Artificial Sequence
  MKO10103488_B_Olfr1252
  gRNA
cccaatgtcattgaccactt

SEQ ID NO: 103489 - DNA, 20 bp, Artificial Sequence
  MKO10103489_B_Olfr1253
  gRNA
ggattattgcataagaaagt

SEQ ID NO: 103490 - DNA, 20 bp, Artificial Sequence
  MKO10103490_B_Olfr1253
  gRNA
atgtacaaaacctcccaccc

SEQ ID NO: 103491 - DNA, 20 bp, Artificial Sequence
  MKO10103491_B_Olfr1253
  gRNA
tcccttccttactgtgattc

SEQ ID NO: 103492 - DNA, 20 bp, Artificial Sequence
  MKO10103492_B_Olfr1254
  gRNA
tattacattcagatagacta

SEQ ID NO: 103493 - DNA, 20 bp, Artificial Sequence
  MKO10103493_B_Olfr1254
  gRNA
ttctcctggtgatggcaacc

SEQ ID NO: 103494 - DNA, 20 bp, Artificial Sequence
  MKO10103494_B_Olfr1254
  gRNA
gttattctgttagcctccta

SEQ ID NO: 103495 - DNA, 20 bp, Artificial Sequence
  MKO10103495_B_Olfr1255
  gRNA
tactgtgatgtgtgacacac

SEQ ID NO: 103496 - DNA, 20 bp, Artificial Sequence
  MKO10103496_B_Olfr1255
  gRNA
cataagccatcactgtcaac

SEQ ID NO: 103497 - DNA, 20 bp, Artificial Sequence
  MKO10103497_B_Olfr1255
  gRNA
gatcatcctgttgacagtga

SEQ ID NO: 103498 - DNA, 20 bp, Artificial Sequence
  MKO10103498_B_Olfr1256
  gRNA
tgtattgacacctatgtcat

SEQ ID NO: 103499 - DNA, 20 bp, Artificial Sequence
  MKO10103499_B_Olfr1256
  gRNA
tgtaactaccagtaacagcc

SEQ ID NO: 103500 - DNA, 20 bp, Artificial Sequence
  MKO10103500_B_Olfr1256
  gRNA
tcccaccatagtcaaaacat

SEQ ID NO: 103501 - DNA, 20 bp, Artificial Sequence
  MKO10103501_B_Olfr1257
  gRNA
agtgaatctgctatcagttt

SEQ ID NO: 103502 - DNA, 20 bp, Artificial Sequence
  MKO10103502_B_Olfr1257
  gRNA
tgcaccgatactcacactct

SEQ ID NO: 103503 - DNA, 20 bp, Artificial Sequence
  MKO10103503_B_Olfr1257
  gRNA
gccatgacactcccactagc

SEQ ID NO: 103504 - DNA, 20 bp, Artificial Sequence
  MKO10103504_B_Olfr1258
  gRNA
agtgttgacagaggaataac

SEQ ID NO: 103505 - DNA, 20 bp, Artificial Sequence
  MKO10103505_B_Olfr1258
  gRNA
tgaacgtagaatgaccacat

SEQ ID NO: 103506 - DNA, 20 bp, Artificial Sequence
  MKO10103506_B_Olfr1258
  gRNA
atgcactgatacccacattc

SEQ ID NO: 103507 - DNA, 20 bp, Artificial Sequence
  MKO10103507_B_Olfr1259
  gRNA
ctgtgtgtctcatatcacag

SEQ ID NO: 103508 - DNA, 20 bp, Artificial Sequence
  MKO10103508_B_Olfr1259
  gRNA
cactgtgatatgagacacac

SEQ ID NO: 103509 - DNA, 20 bp, Artificial Sequence
  MKO10103509_B_Olfr1259
  gRNA
gatcatcctattgacagtga

SEQ ID NO: 103510 - DNA, 20 bp, Artificial Sequence
  MKO10103510_B_Olfr125
  gRNA
actgcagtatgagacaatta

SEQ ID NO: 103511 - DNA, 20 bp, Artificial Sequence
  MKO10103511_B_Olfr125
  gRNA
agaatgcagacgttggtcca

SEQ ID NO: 103512 - DNA, 20 bp, Artificial Sequence
  MKO10103512_B_Olfr125
  gRNA
ataattgtctcatactgcag

SEQ ID NO: 103513 - DNA, 20 bp, Artificial Sequence
  MKO10103513_B_Olfr1260
  gRNA
agtcatctctagcccgacac

SEQ ID NO: 103514 - DNA, 20 bp, Artificial Sequence
  MKO10103514_B_Olfr1260
  gRNA
tccttcttatccttcgtaga

SEQ ID NO: 103515 - DNA, 20 bp, Artificial Sequence
  MKO10103515_B_Olfr1260
  gRNA
actacatgatcacaatgaac

SEQ ID NO: 103516 - DNA, 20 bp, Artificial Sequence
  MKO10103516_B_Olfr1261
  gRNA
acaaaatctgtatccctcca

SEQ ID NO: 103517 - DNA, 20 bp, Artificial Sequence
  MKO10103517_B_Olfr1261
  gRNA
tcctacttgtccgtcataga

SEQ ID NO: 103518 - DNA, 20 bp, Artificial Sequence
  MKO10103518_B_Olfr1261
  gRNA
taaacacagtgacccgctgt

SEQ ID NO: 103519 - DNA, 20 bp, Artificial Sequence
  MKO10103519_B_Olfr1262
  gRNA
atagcccaattacccttctg

SEQ ID NO: 103520 - DNA, 20 bp, Artificial Sequence
  MKO10103520_B_Olfr1262
  gRNA
atgtgatttaataccacttt

SEQ ID NO: 103521 - DNA, 20 bp, Artificial Sequence
  MKO10103521_B_Olfr1262
  gRNA
taaacacattgacccgctgt

SEQ ID NO: 103522 - DNA, 20 bp, Artificial Sequence
  MKO10103522_B_Olfr1263
  gRNA
gatggtattgggaccacaga

SEQ ID NO: 103523 - DNA, 20 bp, Artificial Sequence
  MKO10103523_B_Olfr1263
  gRNA
caaacacagtgacccgctgt

SEQ ID NO: 103524 - DNA, 20 bp, Artificial Sequence
  MKO10103524_B_Olfr1263
  gRNA
agcaatacaaactttattta

SEQ ID NO: 103525 - DNA, 20 bp, Artificial Sequence
  MKO10103525_B_Olfr1264
  gRNA
ggatctgaaccaacgaatgc

SEQ ID NO: 103526 - DNA, 20 bp, Artificial Sequence
  MKO10103526_B_Olfr1264
  gRNA
gatgacgtatgtgttggtgc

SEQ ID NO: 103527 - DNA, 20 bp, Artificial Sequence
  MKO10103527_B_Olfr1264
  gRNA
gggtggtttcctgcattcgt

SEQ ID NO: 103528 - DNA, 20 bp, Artificial Sequence
  MKO10103528_B_Olfr1265
  gRNA
caacaatcagtaggccaata

SEQ ID NO: 103529 - DNA, 20 bp, Artificial Sequence
  MKO10103529_B_Olfr1265
  gRNA
aatgtgtgtgcagtcctcgt

SEQ ID NO: 103530 - DNA, 20 bp, Artificial Sequence
  MKO10103530_B_Olfr1265
  gRNA
actctcttctaacaaagagg

SEQ ID NO: 103531 - DNA, 20 bp, Artificial Sequence
  MKO10103531_B_Olfr1269
  gRNA
aacagctcccaaactcatct

SEQ ID NO: 103532 - DNA, 20 bp, Artificial Sequence
  MKO10103532_B_Olfr1269
  gRNA
taggagatccaagatgagtt

SEQ ID NO: 103533 - DNA, 20 bp, Artificial Sequence
  MKO10103533_B_Olfr1269
  gRNA
aagtgtgtgtgcagtcctca

SEQ ID NO: 103534 - DNA, 20 bp, Artificial Sequence
  MKO10103534_B_Olfr126
  gRNA
gtctactttcatgtctgtaa

SEQ ID NO: 103535 - DNA, 20 bp, Artificial Sequence
  MKO10103535_B_Olfr126
  gRNA
ccatgaattgcagatcttac

SEQ ID NO: 103536 - DNA, 20 bp, Artificial Sequence
  MKO10103536_B_Olfr126
  gRNA
tgctaagtgaagaattcatt

SEQ ID NO: 103537 - DNA, 20 bp, Artificial Sequence
  MKO10103537_B_Olfr1270
  gRNA
tcatcatccttgtcaatttg

SEQ ID NO: 103538 - DNA, 20 bp, Artificial Sequence
  MKO10103538_B_Olfr1270
  gRNA
tgtggagagtgtcattgtaa

SEQ ID NO: 103539 - DNA, 20 bp, Artificial Sequence
  MKO10103539_B_Olfr1270
  gRNA
cagacagcccttcagcgaga

SEQ ID NO: 103540 - DNA, 20 bp, Artificial Sequence
  MKO10103540_B_Olfr1271
  gRNA
tttattgtaatggctaacag

SEQ ID NO: 103541 - DNA, 20 bp, Artificial Sequence
  MKO10103541_B_Olfr1271
  gRNA
ctgcaagcaagcttaagtaa

SEQ ID NO: 103542 - DNA, 20 bp, Artificial Sequence
  MKO10103542_B_Olfr1271
  gRNA
aagaccgttgcccagcaatg

SEQ ID NO: 103543 - DNA, 20 bp, Artificial Sequence
  MKO10103543_B_Olfr1272
  gRNA
catcactgacttacttgtta

SEQ ID NO: 103544 - DNA, 20 bp, Artificial Sequence
  MKO10103544_B_Olfr1272
  gRNA
tgctgagattctcctgcttg

SEQ ID NO: 103545 - DNA, 20 bp, Artificial Sequence
  MKO10103545_B_Olfr1272
  gRNA
ttctgcagagggaagacgca

SEQ ID NO: 103546 - DNA, 20 bp, Artificial Sequence
  MKO10103546_B_Olfr1273-ps
  gRNA
agagatttgctactcctcta

SEQ ID NO: 103547 - DNA, 20 bp, Artificial Sequence
  MKO10103547_B_Olfr1273-ps
  gRNA
tgcctgcactgataccttta

SEQ ID NO: 103548 - DNA, 20 bp, Artificial Sequence
  MKO10103548_B_Olfr1273-ps
  gRNA
gaagtagtggtcaattacat

SEQ ID NO: 103549 - DNA, 20 bp, Artificial Sequence
  MKO10103549_B_Olfr1274-ps
  gRNA
tttgtttattgtcatgcatc

SEQ ID NO: 103550 - DNA, 20 bp, Artificial Sequence
  MKO10103550_B_Olfr1274-ps
  gRNA
agggcaagcggaagatgaga

SEQ ID NO: 103551 - DNA, 20 bp, Artificial Sequence
  MKO10103551_B_Olfr1274-ps
  gRNA
gagaagatttccaaacacaa

SEQ ID NO: 103552 - DNA, 20 bp, Artificial Sequence
  MKO10103552_B_Olfr1275
  gRNA
cgaatgaaagattagctaaa

SEQ ID NO: 103553 - DNA, 20 bp, Artificial Sequence
  MKO10103553_B_Olfr1275
  gRNA
tctcacatccccccagtaga

SEQ ID NO: 103554 - DNA, 20 bp, Artificial Sequence
  MKO10103554_B_Olfr1275
  gRNA
tgagtgttcaactcctgagt

SEQ ID NO: 103555 - DNA, 20 bp, Artificial Sequence
  MKO10103555_B_Olfr1276
  gRNA
aatggacaacaaaacctagt

SEQ ID NO: 103556 - DNA, 20 bp, Artificial Sequence
  MKO10103556_B_Olfr1276
  gRNA
ggcatctgagatggtattgc

SEQ ID NO: 103557 - DNA, 20 bp, Artificial Sequence
  MKO10103557_B_Olfr1276
  gRNA
tttgttcctcagcgtgtaaa

SEQ ID NO: 103558 - DNA, 20 bp, Artificial Sequence
  MKO10103558_B_Olfr1277
  gRNA
atgccccatccttagagtga

SEQ ID NO: 103559 - DNA, 20 bp, Artificial Sequence
  MKO10103559_B_Olfr1277
  gRNA
gatgatcatcgacttcctca

SEQ ID NO: 103560 - DNA, 20 bp, Artificial Sequence
  MKO10103560_B_Olfr1277
  gRNA
gatttacaattataaccagt

SEQ ID NO: 103561 - DNA, 20 bp, Artificial Sequence
  MKO10103561_B_Olfr1278
  gRNA
aagggtattgcccagcacga

SEQ ID NO: 103562 - DNA, 20 bp, Artificial Sequence
  MKO10103562_B_Olfr1278
  gRNA
acttgataataaacgctaat

SEQ ID NO: 103563 - DNA, 20 bp, Artificial Sequence
  MKO10103563_B_Olfr1278
  gRNA
caacagtgggtttatttcca

SEQ ID NO: 103564 - DNA, 20 bp, Artificial Sequence
  MKO10103564_B_Olfr1279
  gRNA
tatttgtcgatcgatgatgt

SEQ ID NO: 103565 - DNA, 20 bp, Artificial Sequence
  MKO10103565_B_Olfr1279
  gRNA
cccacacatcgttcaaagac

SEQ ID NO: 103566 - DNA, 20 bp, Artificial Sequence
  MKO10103566_B_Olfr1279
  gRNA
atgatgctcaagtagcgcag

SEQ ID NO: 103567 - DNA, 20 bp, Artificial Sequence
  MKO10103567_B_Olfr127
  gRNA
agaaacatgacaacagtgag

SEQ ID NO: 103568 - DNA, 20 bp, Artificial Sequence
  MKO10103568_B_Olfr127
  gRNA
ctcactgttgtcatgtttct

SEQ ID NO: 103569 - DNA, 20 bp, Artificial Sequence
  MKO10103569_B_Olfr127
  gRNA
cgaagtggctatatttcata

SEQ ID NO: 103570 - DNA, 20 bp, Artificial Sequence
  MKO10103570_B_Olfr1280
  gRNA
atagtgataaatgctgatag

SEQ ID NO: 103571 - DNA, 20 bp, Artificial Sequence
  MKO10103571_B_Olfr1280
  gRNA
ctaccacagtcatcatgtag

SEQ ID NO: 103572 - DNA, 20 bp, Artificial Sequence
  MKO10103572_B_Olfr1280
  gRNA
tccacccaagtgatgctgac

SEQ ID NO: 103573 - DNA, 20 bp, Artificial Sequence
  MKO10103573_B_Olfr1281
  gRNA
ctggctcatgcagccgccaa

SEQ ID NO: 103574 - DNA, 20 bp, Artificial Sequence
  MKO10103574_B_Olfr1281
  gRNA
ggaagactctaatcaaactg

SEQ ID NO: 103575 - DNA, 20 bp, Artificial Sequence
  MKO10103575_B_Olfr1281
  gRNA
aaagatctcaagttgccttg

SEQ ID NO: 103576 - DNA, 20 bp, Artificial Sequence
  MKO10103576_B_Olfr1282
  gRNA
atctatggtcagtttggggg

SEQ ID NO: 103577 - DNA, 20 bp, Artificial Sequence
  MKO10103577_B_Olfr1282
  gRNA
aatcaagagcatctgactaa

SEQ ID NO: 103578 - DNA, 20 bp, Artificial Sequence
  MKO10103578_B_Olfr1282
  gRNA
ctgcatgaatactgatactc

SEQ ID NO: 103579 - DNA, 20 bp, Artificial Sequence
  MKO10103579_B_Olfr1283
  gRNA
aagtataagatatcagtaag

SEQ ID NO: 103580 - DNA, 20 bp, Artificial Sequence
  MKO10103580_B_Olfr1283
  gRNA
ctgcatgaatactgatacac

SEQ ID NO: 103581 - DNA, 20 bp, Artificial Sequence
  MKO10103581_B_Olfr1283
  gRNA
ggaagaaggaaaccagactg

SEQ ID NO: 103582 - DNA, 20 bp, Artificial Sequence
  MKO10103582_B_Olfr1284
  gRNA
tatttgtcagtcgatgatgt

SEQ ID NO: 103583 - DNA, 20 bp, Artificial Sequence
  MKO10103583_B_Olfr1284
  gRNA
cagcaaagtcaacaatgaac

SEQ ID NO: 103584 - DNA, 20 bp, Artificial Sequence
  MKO10103584_B_Olfr1284
  gRNA
gatctgctccatccacatta

SEQ ID NO: 103585 - DNA, 20 bp, Artificial Sequence
  MKO10103585_B_Olfr1286
  gRNA
cacctgggttgacaagtttc

SEQ ID NO: 103586 - DNA, 20 bp, Artificial Sequence
  MKO10103586_B_Olfr1286
  gRNA
tgcacaaatccaacaatcca

SEQ ID NO: 103587 - DNA, 20 bp, Artificial Sequence
  MKO10103587_B_Olfr1286
  gRNA
taggagatctatagtcagtt

SEQ ID NO: 103588 - DNA, 20 bp, Artificial Sequence
  MKO10103588_B_Olfr1287
  gRNA
ctccaaagaagtacacacag

SEQ ID NO: 103589 - DNA, 20 bp, Artificial Sequence
  MKO10103589_B_Olfr1287
  gRNA
tgtgtccagttagcatcacc

SEQ ID NO: 103590 - DNA, 20 bp, Artificial Sequence
  MKO10103590_B_Olfr1287
  gRNA
gtggtttatcagcttcttta

SEQ ID NO: 103591 - DNA, 20 bp, Artificial Sequence
  MKO10103591_B_Olfr1288
  gRNA
catgcaagtttaatgaccct

SEQ ID NO: 103592 - DNA, 20 bp, Artificial Sequence
  MKO10103592_B_Olfr1288
  gRNA
gtcagctcacatcactgtag

SEQ ID NO: 103593 - DNA, 20 bp, Artificial Sequence
  MKO10103593_B_Olfr1288
  gRNA
atatgaggttggccatcaga

SEQ ID NO: 103594 - DNA, 20 bp, Artificial Sequence
  MKO10103594_B_Olfr1289
  gRNA
gatggtaacccttgtagcca

SEQ ID NO: 103595 - DNA, 20 bp, Artificial Sequence
  MKO10103595_B_Olfr1289
  gRNA
gctataagcttacccttctg

SEQ ID NO: 103596 - DNA, 20 bp, Artificial Sequence
  MKO10103596_B_Olfr1289
  gRNA
taatgggactctccaattct

SEQ ID NO: 103597 - DNA, 20 bp, Artificial Sequence
  MKO10103597_B_Olfr128
  gRNA
ctcattgttgtcatgtttct

SEQ ID NO: 103598 - DNA, 20 bp, Artificial Sequence
  MKO10103598_B_Olfr128
  gRNA
atggggattgccttctccta

SEQ ID NO: 103599 - DNA, 20 bp, Artificial Sequence
  MKO10103599_B_Olfr128
  gRNA
tgagaactgtagagaatatt

SEQ ID NO: 103600 - DNA, 20 bp, Artificial Sequence
  MKO10103600_B_Olfr1290
  gRNA
gcatctcttcatattcatga

SEQ ID NO: 103601 - DNA, 20 bp, Artificial Sequence
  MKO10103601_B_Olfr1290
  gRNA
atgaatatgaagagatgcac

SEQ ID NO: 103602 - DNA, 20 bp, Artificial Sequence
  MKO10103602_B_Olfr1290
  gRNA
gacttcaatcctctgtgagc

SEQ ID NO: 103603 - DNA, 20 bp, Artificial Sequence
  MKO10103603_B_Olfr1294
  gRNA
gccacatgtcaacaaaagac

SEQ ID NO: 103604 - DNA, 20 bp, Artificial Sequence
  MKO10103604_B_Olfr1294
  gRNA
tgcaaaaaatttgtccaacc

SEQ ID NO: 103605 - DNA, 20 bp, Artificial Sequence
  MKO10103605_B_Olfr1294
  gRNA
agacctgaatattctttgaa

SEQ ID NO: 103606 - DNA, 20 bp, Artificial Sequence
  MKO10103606_B_Olfr1295
  gRNA
agctcttgctaacagtgaca

SEQ ID NO: 103607 - DNA, 20 bp, Artificial Sequence
  MKO10103607_B_Olfr1295
  gRNA
ctttatctgttcattgtgtc

SEQ ID NO: 103608 - DNA, 20 bp, Artificial Sequence
  MKO10103608_B_Olfr1295
  gRNA
taaattctgacacaacagac

SEQ ID NO: 103609 - DNA, 20 bp, Artificial Sequence
  MKO10103609_B_Olfr1297
  gRNA
gctagcctgcatggattccc

SEQ ID NO: 103610 - DNA, 20 bp, Artificial Sequence
  MKO10103610_B_Olfr1297
  gRNA
tgtttcccctaaatatcacc

SEQ ID NO: 103611 - DNA, 20 bp, Artificial Sequence
  MKO10103611_B_Olfr1297
  gRNA
tgcaggctagcttgattacc

SEQ ID NO: 103612 - DNA, 20 bp, Artificial Sequence
  MKO10103612_B_Olfr1298
  gRNA
acctatcctttgttgacatg

SEQ ID NO: 103613 - DNA, 20 bp, Artificial Sequence
  MKO10103613_B_Olfr1298
  gRNA
caggctagcttaattaccag

SEQ ID NO: 103614 - DNA, 20 bp, Artificial Sequence
  MKO10103614_B_Olfr1298
  gRNA
tctctcctccagcaatacaa

SEQ ID NO: 103615 - DNA, 20 bp, Artificial Sequence
  MKO10103615_B_Olfr1299
  gRNA
gctgcagaactgctacaagc

SEQ ID NO: 103616 - DNA, 20 bp, Artificial Sequence
  MKO10103616_B_Olfr1299
  gRNA
gtgttgacttcctggaccgt

SEQ ID NO: 103617 - DNA, 20 bp, Artificial Sequence
  MKO10103617_B_Olfr1299
  gRNA
aagcacaaattctgacaccg

SEQ ID NO: 103618 - DNA, 20 bp, Artificial Sequence
  MKO10103618_B_Olfr129
  gRNA
tacttctgattagccactcc

SEQ ID NO: 103619 - DNA, 20 bp, Artificial Sequence
  MKO10103619_B_Olfr129
  gRNA
tgaagctgaacttagaccca

SEQ ID NO: 103620 - DNA, 20 bp, Artificial Sequence
  MKO10103620_B_Olfr129
  gRNA
atacttacttgttgtctcag

SEQ ID NO: 103621 - DNA, 20 bp, Artificial Sequence
  MKO10103621_B_Olfr12
  gRNA
acccaggaccagacgggtac

SEQ ID NO: 103622 - DNA, 20 bp, Artificial Sequence
  MKO10103622_B_Olfr12
  gRNA
ccaggacagtcaccacgtac

SEQ ID NO: 103623 - DNA, 20 bp, Artificial Sequence
  MKO10103623_B_Olfr12
  gRNA
ctacacagaagcattccctc

SEQ ID NO: 103624 - DNA, 20 bp, Artificial Sequence
  MKO10103624_B_Olfr1301
  gRNA
gcatgccatgagtcagcttt

SEQ ID NO: 103625 - DNA, 20 bp, Artificial Sequence
  MKO10103625_B_Olfr1301
  gRNA
atgagcctgaaaagatgtgc

SEQ ID NO: 103626 - DNA, 20 bp, Artificial Sequence
  MKO10103626_B_Olfr1301
  gRNA
gtttatctgctcattctatc

SEQ ID NO: 103627 - DNA, 20 bp, Artificial Sequence
  MKO10103627_B_Olfr1302
  gRNA
tgtgcatgccttgagtcacc

SEQ ID NO: 103628 - DNA, 20 bp, Artificial Sequence
  MKO10103628_B_Olfr1302
  gRNA
atatccttatcactgttcga

SEQ ID NO: 103629 - DNA, 20 bp, Artificial Sequence
  MKO10103629_B_Olfr1302
  gRNA
ctgaagacacatgagtaaaa

SEQ ID NO: 103630 - DNA, 20 bp, Artificial Sequence
  MKO10103630_B_Olfr1303
  gRNA
caggccaatctgagaagttt

SEQ ID NO: 103631 - DNA, 20 bp, Artificial Sequence
  MKO10103631_B_Olfr1303
  gRNA
tatttatgaaatacctctaa

SEQ ID NO: 103632 - DNA, 20 bp, Artificial Sequence
  MKO10103632_B_Olfr1303
  gRNA
ccttcctaaacttctcagat

SEQ ID NO: 103633 - DNA, 20 bp, Artificial Sequence
  MKO10103633_B_Olfr1305
  gRNA
catgcaagcttgacaagtcg

SEQ ID NO: 103634 - DNA, 20 bp, Artificial Sequence
  MKO10103634_B_Olfr1305
  gRNA
tgctaatattagttgctgct

SEQ ID NO: 103635 - DNA, 20 bp, Artificial Sequence
  MKO10103635_B_Olfr1305
  gRNA
ctcatgattactgccaatag

SEQ ID NO: 103636 - DNA, 20 bp, Artificial Sequence
  MKO10103636_B_Olfr1306
  gRNA
tgtgagcagaaagagtagat

SEQ ID NO: 103637 - DNA, 20 bp, Artificial Sequence
  MKO10103637_B_Olfr1306
  gRNA
aacacatcttgataagtttc

SEQ ID NO: 103638 - DNA, 20 bp, Artificial Sequence
  MKO10103638_B_Olfr1306
  gRNA
tatgcattctttgattcaac

SEQ ID NO: 103639 - DNA, 20 bp, Artificial Sequence
  MKO10103639_B_Olfr1307
  gRNA
agtgtgcaaaaacattcttc

SEQ ID NO: 103640 - DNA, 20 bp, Artificial Sequence
  MKO10103640_B_Olfr1307
  gRNA
catgctagccacaaaaaaca

SEQ ID NO: 103641 - DNA, 20 bp, Artificial Sequence
  MKO10103641_B_Olfr1307
  gRNA
gacacaccttgataagtttc

SEQ ID NO: 103642 - DNA, 20 bp, Artificial Sequence
  MKO10103642_B_Olfr1308
  gRNA
aaccacttgaagagtgttta

SEQ ID NO: 103643 - DNA, 20 bp, Artificial Sequence
  MKO10103643_B_Olfr1308
  gRNA
gtccataaacactcttcaag

SEQ ID NO: 103644 - DNA, 20 bp, Artificial Sequence
  MKO10103644_B_Olfr1308
  gRNA
atctaatcattatgagccca

SEQ ID NO: 103645 - DNA, 20 bp, Artificial Sequence
  MKO10103645_B_Olfr1309
  gRNA
ggagactatggggctatctt

SEQ ID NO: 103646 - DNA, 20 bp, Artificial Sequence
  MKO10103646_B_Olfr1309
  gRNA
cacgtatagaaaaacattag

SEQ ID NO: 103647 - DNA, 20 bp, Artificial Sequence
  MKO10103647_B_Olfr1309
  gRNA
aagctcttgagtgtttgtgc

SEQ ID NO: 103648 - DNA, 20 bp, Artificial Sequence
  MKO10103648_B_Olfr130
  gRNA
caatgaagtgcagctattca

SEQ ID NO: 103649 - DNA, 20 bp, Artificial Sequence
  MKO10103649_B_Olfr130
  gRNA
cagctcctatgcacacagtc

SEQ ID NO: 103650 - DNA, 20 bp, Artificial Sequence
  MKO10103650_B_Olfr130
  gRNA
aagctgaatagcacagcctg

SEQ ID NO: 103651 - DNA, 20 bp, Artificial Sequence
  MKO10103651_B_Olfr1310
  gRNA
ttgcctaataggaagtacat

SEQ ID NO: 103652 - DNA, 20 bp, Artificial Sequence
  MKO10103652_B_Olfr1310
  gRNA
ggattgtaactgagggtctg

SEQ ID NO: 103653 - DNA, 20 bp, Artificial Sequence
  MKO10103653_B_Olfr1310
  gRNA
gatgcaacccccaaaagaga

SEQ ID NO: 103654 - DNA, 20 bp, Artificial Sequence
  MKO10103654_B_Olfr1311
  gRNA
cacactcgctatgtagaaca

SEQ ID NO: 103655 - DNA, 20 bp, Artificial Sequence
  MKO10103655_B_Olfr1311
  gRNA
ttgcacagagaccagtaaat

SEQ ID NO: 103656 - DNA, 20 bp, Artificial Sequence
  MKO10103656_B_Olfr1311
  gRNA
ccttggacttattcactcag

SEQ ID NO: 103657 - DNA, 20 bp, Artificial Sequence
  MKO10103657_B_Olfr1312
  gRNA
tgtgacaattgcatcaaata

SEQ ID NO: 103658 - DNA, 20 bp, Artificial Sequence
  MKO10103658_B_Olfr1312
  gRNA
agtaacatgagctgaaagtg

SEQ ID NO: 103659 - DNA, 20 bp, Artificial Sequence
  MKO10103659_B_Olfr1312
  gRNA
actttcagctcatgttactg

SEQ ID NO: 103660 - DNA, 20 bp, Artificial Sequence
  MKO10103660_B_Olfr1313
  gRNA
agagtattcagacatctaat

SEQ ID NO: 103661 - DNA, 20 bp, Artificial Sequence
  MKO10103661_B_Olfr1313
  gRNA
gttatcctcagtgttgtatg

SEQ ID NO: 103662 - DNA, 20 bp, Artificial Sequence
  MKO10103662_B_Olfr1313
  gRNA
caagcaagtttgatgaattg

SEQ ID NO: 103663 - DNA, 20 bp, Artificial Sequence
  MKO10103663_B_Olfr1314
  gRNA
tgtgtcagaatttatgttcg

SEQ ID NO: 103664 - DNA, 20 bp, Artificial Sequence
  MKO10103664_B_Olfr1314
  gRNA
caacagcatcaaatatagcc

SEQ ID NO: 103665 - DNA, 20 bp, Artificial Sequence
  MKO10103665_B_Olfr1314
  gRNA
gagaagcacttgcatcttcc

SEQ ID NO: 103666 - DNA, 20 bp, Artificial Sequence
  MKO10103666_B_Olfr1316
  gRNA
ttcctgaatgtatagatcac

SEQ ID NO: 103667 - DNA, 20 bp, Artificial Sequence
  MKO10103667_B_Olfr1316
  gRNA
tcttctttgtagttattgct

SEQ ID NO: 103668 - DNA, 20 bp, Artificial Sequence
  MKO10103668_B_Olfr1316
  gRNA
gctgagccagagagtgtata

SEQ ID NO: 103669 - DNA, 20 bp, Artificial Sequence
  MKO10103669_B_Olfr1317
  gRNA
agatgatttatgacctcttc

SEQ ID NO: 103670 - DNA, 20 bp, Artificial Sequence
  MKO10103670_B_Olfr1317
  gRNA
tgactttgtgcttcctgaag

SEQ ID NO: 103671 - DNA, 20 bp, Artificial Sequence
  MKO10103671_B_Olfr1317
  gRNA
tactaggcctcaccaattca

SEQ ID NO: 103672 - DNA, 20 bp, Artificial Sequence
  MKO10103672_B_Olfr1318
  gRNA
tgtgtcttacatcttcattc

SEQ ID NO: 103673 - DNA, 20 bp, Artificial Sequence
  MKO10103673_B_Olfr1318
  gRNA
acttagaaataatgagatga

SEQ ID NO: 103674 - DNA, 20 bp, Artificial Sequence
  MKO10103674_B_Olfr1318
  gRNA
ttcctggtcgctgccaacag

SEQ ID NO: 103675 - DNA, 20 bp, Artificial Sequence
  MKO10103675_B_Olfr131
  gRNA
acttctttgttacctcgttg

SEQ ID NO: 103676 - DNA, 20 bp, Artificial Sequence
  MKO10103676_B_Olfr131
  gRNA
gtcataaaagttatccccct

SEQ ID NO: 103677 - DNA, 20 bp, Artificial Sequence
  MKO10103677_B_Olfr131
  gRNA
catcagtggatatgcataca

SEQ ID NO: 103678 - DNA, 20 bp, Artificial Sequence
  MKO10103678_B_Olfr1320
  gRNA
cgctgaaaaaatttagcatc

SEQ ID NO: 103679 - DNA, 20 bp, Artificial Sequence
  MKO10103679_B_Olfr1320
  gRNA
tggacttactgcgggaacat

SEQ ID NO: 103680 - DNA, 20 bp, Artificial Sequence
  MKO10103680_B_Olfr1320
  gRNA
gccagaaaatgccactatgg

SEQ ID NO: 103681 - DNA, 20 bp, Artificial Sequence
  MKO10103681_B_Olfr1321
  gRNA
gatgagaatattccccatta

SEQ ID NO: 103682 - DNA, 20 bp, Artificial Sequence
  MKO10103682_B_Olfr1321
  gRNA
aagttgtataccagatctca

SEQ ID NO: 103683 - DNA, 20 bp, Artificial Sequence
  MKO10103683_B_Olfr1321
  gRNA
ttacccatatctatgagatt

SEQ ID NO: 103684 - DNA, 20 bp, Artificial Sequence
  MKO10103684_B_Olfr1322
  gRNA
taaatgataggattggcagc

SEQ ID NO: 103685 - DNA, 20 bp, Artificial Sequence
  MKO10103685_B_Olfr1322
  gRNA
gggttgtttccagctagcat

SEQ ID NO: 103686 - DNA, 20 bp, Artificial Sequence
  MKO10103686_B_Olfr1322
  gRNA
caattgagcctgtaatgctg

SEQ ID NO: 103687 - DNA, 20 bp, Artificial Sequence
  MKO10103687_B_Olfr1323
  gRNA
caacttgttatctcaactac

SEQ ID NO: 103688 - DNA, 20 bp, Artificial Sequence
  MKO10103688_B_Olfr1323
  gRNA
tgcagtcaagtgtgacgcac

SEQ ID NO: 103689 - DNA, 20 bp, Artificial Sequence
  MKO10103689_B_Olfr1323
  gRNA
gtaaagcaatggccgacaga

SEQ ID NO: 103690 - DNA, 20 bp, Artificial Sequence
  MKO10103690_B_Olfr1324
  gRNA
ggaaattgtccaagtccacc

SEQ ID NO: 103691 - DNA, 20 bp, Artificial Sequence
  MKO10103691_B_Olfr1324
  gRNA
aattcatcttcatcgttaaa

SEQ ID NO: 103692 - DNA, 20 bp, Artificial Sequence
  MKO10103692_B_Olfr1324
  gRNA
tacagcagaaccatgcacca

SEQ ID NO: 103693 - DNA, 20 bp, Artificial Sequence
  MKO10103693_B_Olfr1325
  gRNA
tttaagaatccatccaacta

SEQ ID NO: 103694 - DNA, 20 bp, Artificial Sequence
  MKO10103694_B_Olfr1325
  gRNA
atgtgcctctcacttgattg

SEQ ID NO: 103695 - DNA, 20 bp, Artificial Sequence
  MKO10103695_B_Olfr1325
  gRNA
agtaaccacaatcaagtgag

SEQ ID NO: 103696 - DNA, 20 bp, Artificial Sequence
  MKO10103696_B_Olfr1328
  gRNA
atagcgcaatggatagcata

SEQ ID NO: 103697 - DNA, 20 bp, Artificial Sequence
  MKO10103697_B_Olfr1328
  gRNA
aagtacactcagttataccc

SEQ ID NO: 103698 - DNA, 20 bp, Artificial Sequence
  MKO10103698_B_Olfr1328
  gRNA
caaagtccaccatctcaatg

SEQ ID NO: 103699 - DNA, 20 bp, Artificial Sequence
  MKO10103699_B_Olfr1329
  gRNA
tgttccaatttcccttattg

SEQ ID NO: 103700 - DNA, 20 bp, Artificial Sequence
  MKO10103700_B_Olfr1329
  gRNA
ctctgtcttgattgtcattt

SEQ ID NO: 103701 - DNA, 20 bp, Artificial Sequence
  MKO10103701_B_Olfr1329
  gRNA
ttcccctgagcgagacaagc

SEQ ID NO: 103702 - DNA, 20 bp, Artificial Sequence
  MKO10103702_B_Olfr132
  gRNA
ctgttactgtaccatagaac

SEQ ID NO: 103703 - DNA, 20 bp, Artificial Sequence
  MKO10103703_B_Olfr132
  gRNA
tactacccgctgagagcaaa

SEQ ID NO: 103704 - DNA, 20 bp, Artificial Sequence
  MKO10103704_B_Olfr132
  gRNA
taatggccaagggtaacact

SEQ ID NO: 103705 - DNA, 20 bp, Artificial Sequence
  MKO10103705_B_Olfr1330
  gRNA
ctgtcctagaaccacccaca

SEQ ID NO: 103706 - DNA, 20 bp, Artificial Sequence
  MKO10103706_B_Olfr1330
  gRNA
agccttgcagcgcccctctg

SEQ ID NO: 103707 - DNA, 20 bp, Artificial Sequence
  MKO10103707_B_Olfr1330
  gRNA
gggcctcatgtagatgtaag

SEQ ID NO: 103708 - DNA, 20 bp, Artificial Sequence
  MKO10103708_B_Olfr1331
  gRNA
ctgctgccaaccgtatgcag

SEQ ID NO: 103709 - DNA, 20 bp, Artificial Sequence
  MKO10103709_B_Olfr1331
  gRNA
tctcaaaccatctcctttac

SEQ ID NO: 103710 - DNA, 20 bp, Artificial Sequence
  MKO10103710_B_Olfr1331
  gRNA
taacaaaggtcatatccaac

SEQ ID NO: 103711 - DNA, 20 bp, Artificial Sequence
  MKO10103711_B_Olfr1333
  gRNA
cggcctcatgtagatgtaac

SEQ ID NO: 103712 - DNA, 20 bp, Artificial Sequence
  MKO10103712_B_Olfr1333
  gRNA
tgacaaagctcatatccaat

SEQ ID NO: 103713 - DNA, 20 bp, Artificial Sequence
  MKO10103713_B_Olfr1333
  gRNA
ataagccatcacaacaaaaa

SEQ ID NO: 103714 - DNA, 20 bp, Artificial Sequence
  MKO10103714_B_Olfr1335
  gRNA
ttgtcctgacatcctccaca

SEQ ID NO: 103715 - DNA, 20 bp, Artificial Sequence
  MKO10103715_B_Olfr1335
  gRNA
gtctctttcagaagagctgc

SEQ ID NO: 103716 - DNA, 20 bp, Artificial Sequence
  MKO10103716_B_Olfr1335
  gRNA
tctatgtgttgtctgacaca

SEQ ID NO: 103717 - DNA, 20 bp, Artificial Sequence
  MKO10103717_B_Olfr1336
  gRNA
ctttccacagaaccatgcgc

SEQ ID NO: 103718 - DNA, 20 bp, Artificial Sequence
  MKO10103718_B_Olfr1336
  gRNA
attgcaagcctgtcctattg

SEQ ID NO: 103719 - DNA, 20 bp, Artificial Sequence
  MKO10103719_B_Olfr1336
  gRNA
gcctagaactgtcctaccaa

SEQ ID NO: 103720 - DNA, 20 bp, Artificial Sequence
  MKO10103720_B_Olfr1337
  gRNA
ctgagctcaggtacatgaga

SEQ ID NO: 103721 - DNA, 20 bp, Artificial Sequence
  MKO10103721_B_Olfr1337
  gRNA
tggcctcatgtagatgtaac

SEQ ID NO: 103722 - DNA, 20 bp, Artificial Sequence
  MKO10103722_B_Olfr1337
  gRNA
gtttctgagttcatcttgat

SEQ ID NO: 103723 - DNA, 20 bp, Artificial Sequence
  MKO10103723_B_Olfr1338
  gRNA
tggcctaatgtagatgtaaa

SEQ ID NO: 103724 - DNA, 20 bp, Artificial Sequence
  MKO10103724_B_Olfr1338
  gRNA
gatgtatatgttcagtgccc

SEQ ID NO: 103725 - DNA, 20 bp, Artificial Sequence
  MKO10103725_B_Olfr1338
  gRNA
tttctcaaggtaatgggact

SEQ ID NO: 103726 - DNA, 20 bp, Artificial Sequence
  MKO10103726_B_Olfr1339
  gRNA
agatgcagacgtaagaggcc

SEQ ID NO: 103727 - DNA, 20 bp, Artificial Sequence
  MKO10103727_B_Olfr1339
  gRNA
gtgtatggagacgggagtcc

SEQ ID NO: 103728 - DNA, 20 bp, Artificial Sequence
  MKO10103728_B_Olfr1339
  gRNA
atcatgaggccttggctgtg

SEQ ID NO: 103729 - DNA, 20 bp, Artificial Sequence
  MKO10103729_B_Olfr133
  gRNA
taatatagacacgagaatga

SEQ ID NO: 103730 - DNA, 20 bp, Artificial Sequence
  MKO10103730_B_Olfr133
  gRNA
tagatgaaggggttcaatgt

SEQ ID NO: 103731 - DNA, 20 bp, Artificial Sequence
  MKO10103731_B_Olfr133
  gRNA
ctttaaaatcaaatcttcag

SEQ ID NO: 103732 - DNA, 20 bp, Artificial Sequence
  MKO10103732_B_Olfr1340
  gRNA
taacaatgagtccattaccc

SEQ ID NO: 103733 - DNA, 20 bp, Artificial Sequence
  MKO10103733_B_Olfr1340
  gRNA
atatgttatccactccacta

SEQ ID NO: 103734 - DNA, 20 bp, Artificial Sequence
  MKO10103734_B_Olfr1340
  gRNA
actaagactatctcttacac

SEQ ID NO: 103735 - DNA, 20 bp, Artificial Sequence
  MKO10103735_B_Olfr1341
  gRNA
cttctagggactcattctgg

SEQ ID NO: 103736 - DNA, 20 bp, Artificial Sequence
  MKO10103736_B_Olfr1341
  gRNA
tacatcagtcaatgaccatg

SEQ ID NO: 103737 - DNA, 20 bp, Artificial Sequence
  MKO10103737_B_Olfr1341
  gRNA
acccaagtatgaagtccaca

SEQ ID NO: 103738 - DNA, 20 bp, Artificial Sequence
  MKO10103738_B_Olfr1342
  gRNA
ggcgagagtctaggtaaatc

SEQ ID NO: 103739 - DNA, 20 bp, Artificial Sequence
  MKO10103739_B_Olfr1342
  gRNA
cttaagaatccgctcatccc

SEQ ID NO: 103740 - DNA, 20 bp, Artificial Sequence
  MKO10103740_B_Olfr1342
  gRNA
cactctgacctgggattcgc

SEQ ID NO: 103741 - DNA, 20 bp, Artificial Sequence
  MKO10103741_B_Olfr1344
  gRNA
gctgcgtgccacaacgtacc

SEQ ID NO: 103742 - DNA, 20 bp, Artificial Sequence
  MKO10103742_B_Olfr1344
  gRNA
ctacagccttcgaaaccgtg

SEQ ID NO: 103743 - DNA, 20 bp, Artificial Sequence
  MKO10103743_B_Olfr1344
  gRNA
gcgtagtgcagccaccgcat

SEQ ID NO: 103744 - DNA, 20 bp, Artificial Sequence
  MKO10103744_B_Olfr1346
  gRNA
caccatgcccaccctactcg

SEQ ID NO: 103745 - DNA, 20 bp, Artificial Sequence
  MKO10103745_B_Olfr1346
  gRNA
aggccaatccccaacagacc

SEQ ID NO: 103746 - DNA, 20 bp, Artificial Sequence
  MKO10103746_B_Olfr1346
  gRNA
agtaaaaaagacccattaca

SEQ ID NO: 103747 - DNA, 20 bp, Artificial Sequence
  MKO10103747_B_Olfr1347
  gRNA
attgcaagcctgatctactg

SEQ ID NO: 103748 - DNA, 20 bp, Artificial Sequence
  MKO10103748_B_Olfr1347
  gRNA
ttgtgtcatgcaagttataa

SEQ ID NO: 103749 - DNA, 20 bp, Artificial Sequence
  MKO10103749_B_Olfr1347
  gRNA
aacctaacagcacaaactgt

SEQ ID NO: 103750 - DNA, 20 bp, Artificial Sequence
  MKO10103750_B_Olfr1348
  gRNA
aggtgggctgattgtctcag

SEQ ID NO: 103751 - DNA, 20 bp, Artificial Sequence
  MKO10103751_B_Olfr1348
  gRNA
ggggccacagtaagacagac

SEQ ID NO: 103752 - DNA, 20 bp, Artificial Sequence
  MKO10103752_B_Olfr1348
  gRNA
tgttctccacaagtgtcagc

SEQ ID NO: 103753 - DNA, 20 bp, Artificial Sequence
  MKO10103753_B_Olfr1349
  gRNA
ggccaccgtcctcgtcatca

SEQ ID NO: 103754 - DNA, 20 bp, Artificial Sequence
  MKO10103754_B_Olfr1349
  gRNA
agctggccttggggcgcaag

SEQ ID NO: 103755 - DNA, 20 bp, Artificial Sequence
  MKO10103755_B_Olfr1349
  gRNA
tccacagcatacacgcccaa

SEQ ID NO: 103756 - DNA, 20 bp, Artificial Sequence
  MKO10103756_B_Olfr134
  gRNA
gagaaccacaattagatgag

SEQ ID NO: 103757 - DNA, 20 bp, Artificial Sequence
  MKO10103757_B_Olfr134
  gRNA
atgttcctctcatctaattg

SEQ ID NO: 103758 - DNA, 20 bp, Artificial Sequence
  MKO10103758_B_Olfr134
  gRNA
taatatagacacgagaatta

SEQ ID NO: 103759 - DNA, 20 bp, Artificial Sequence
  MKO10103759_B_Olfr1350
  gRNA
tccgttctgcagctggccgc

SEQ ID NO: 103760 - DNA, 20 bp, Artificial Sequence
  MKO10103760_B_Olfr1350
  gRNA
tctgcggaagctttatccac

SEQ ID NO: 103761 - DNA, 20 bp, Artificial Sequence
  MKO10103761_B_Olfr1350
  gRNA
atctacagacccctgacata

SEQ ID NO: 103762 - DNA, 20 bp, Artificial Sequence
  MKO10103762_B_Olfr1351
  gRNA
tgacatctctcttaatgaca

SEQ ID NO: 103763 - DNA, 20 bp, Artificial Sequence
  MKO10103763_B_Olfr1351
  gRNA
caggtgggagtcggcagtga

SEQ ID NO: 103764 - DNA, 20 bp, Artificial Sequence
  MKO10103764_B_Olfr1351
  gRNA
gatgcagtttgcataggtga

SEQ ID NO: 103765 - DNA, 20 bp, Artificial Sequence
  MKO10103765_B_Olfr1352
  gRNA
gatgcaatctgcatagctaa

SEQ ID NO: 103766 - DNA, 20 bp, Artificial Sequence
  MKO10103766_B_Olfr1352
  gRNA
tgccttgttacaaagcatga

SEQ ID NO: 103767 - DNA, 20 bp, Artificial Sequence
  MKO10103767_B_Olfr1352
  gRNA
catgaccacatcattgagaa

SEQ ID NO: 103768 - DNA, 20 bp, Artificial Sequence
  MKO10103768_B_Olfr1353
  gRNA
atgataactgtgtagcgcat

SEQ ID NO: 103769 - DNA, 20 bp, Artificial Sequence
  MKO10103769_B_Olfr1353
  gRNA
aactacagtgtacgtgactg

SEQ ID NO: 103770 - DNA, 20 bp, Artificial Sequence
  MKO10103770_B_Olfr1353
  gRNA
gacctgcaacccattattta

SEQ ID NO: 103771 - DNA, 20 bp, Artificial Sequence
  MKO10103771_B_Olfr1354
  gRNA
tgggaacctgcttatcatca

SEQ ID NO: 103772 - DNA, 20 bp, Artificial Sequence
  MKO10103772_B_Olfr1354
  gRNA
tgatgaccatgatgataagc

SEQ ID NO: 103773 - DNA, 20 bp, Artificial Sequence
  MKO10103773_B_Olfr1354
  gRNA
ggtaaaacagatgtccacaa

SEQ ID NO: 103774 - DNA, 20 bp, Artificial Sequence
  MKO10103774_B_Olfr1355
  gRNA
gtgcaggggagactgtgtga

SEQ ID NO: 103775 - DNA, 20 bp, Artificial Sequence
  MKO10103775_B_Olfr1355
  gRNA
acaatgactgtgtaatacaa

SEQ ID NO: 103776 - DNA, 20 bp, Artificial Sequence
  MKO10103776_B_Olfr1355
  gRNA
tacaattgagctctgtaaga

SEQ ID NO: 103777 - DNA, 20 bp, Artificial Sequence
  MKO10103777_B_Olfr1356
  gRNA
caatttactcctatcagtga

SEQ ID NO: 103778 - DNA, 20 bp, Artificial Sequence
  MKO10103778_B_Olfr1356
  gRNA
ctgccatcccttgcactatg

SEQ ID NO: 103779 - DNA, 20 bp, Artificial Sequence
  MKO10103779_B_Olfr1356
  gRNA
ttcttatggaagtcctacca

SEQ ID NO: 103780 - DNA, 20 bp, Artificial Sequence
  MKO10103780_B_Olfr1357
  gRNA
caggtgagagtctgatatga

SEQ ID NO: 103781 - DNA, 20 bp, Artificial Sequence
  MKO10103781_B_Olfr1357
  gRNA
tagataaaggggtttaatgt

SEQ ID NO: 103782 - DNA, 20 bp, Artificial Sequence
  MKO10103782_B_Olfr1357
  gRNA
atgagcactgagtagcggag

SEQ ID NO: 103783 - DNA, 20 bp, Artificial Sequence
  MKO10103783_B_Olfr1359
  gRNA
aggccaggaaaatgaaaagc

SEQ ID NO: 103784 - DNA, 20 bp, Artificial Sequence
  MKO10103784_B_Olfr1359
  gRNA
tggccaatgagagcatctca

SEQ ID NO: 103785 - DNA, 20 bp, Artificial Sequence
  MKO10103785_B_Olfr1359
  gRNA
acttccttgtgtccacacag

SEQ ID NO: 103786 - DNA, 20 bp, Artificial Sequence
  MKO10103786_B_Olfr135
  gRNA
caaagaccatcagctacttg

SEQ ID NO: 103787 - DNA, 20 bp, Artificial Sequence
  MKO10103787_B_Olfr135
  gRNA
actctgtacctcccattgtg

SEQ ID NO: 103788 - DNA, 20 bp, Artificial Sequence
  MKO10103788_B_Olfr135
  gRNA
ggtcaaaggacataagagct

SEQ ID NO: 103789 - DNA, 20 bp, Artificial Sequence
  MKO10103789_B_Olfr1360
  gRNA
tggccaatgagagcatctca

SEQ ID NO: 103790 - DNA, 20 bp, Artificial Sequence
  MKO10103790_B_Olfr1360
  gRNA
acttccttgtgtccacacag

SEQ ID NO: 103791 - DNA, 20 bp, Artificial Sequence
  MKO10103791_B_Olfr1360
  gRNA
tccaacatgcagccgccaac

SEQ ID NO: 103792 - DNA, 20 bp, Artificial Sequence
  MKO10103792_B_Olfr1361
  gRNA
catatacatgtacctccagc

SEQ ID NO: 103793 - DNA, 20 bp, Artificial Sequence
  MKO10103793_B_Olfr1361
  gRNA
acattgcccgagcagtgttt

SEQ ID NO: 103794 - DNA, 20 bp, Artificial Sequence
  MKO10103794_B_Olfr1361
  gRNA
actgtactttgtcttagccc

SEQ ID NO: 103795 - DNA, 20 bp, Artificial Sequence
  MKO10103795_B_Olfr1362
  gRNA
caccgggcgagcatccacac

SEQ ID NO: 103796 - DNA, 20 bp, Artificial Sequence
  MKO10103796_B_Olfr1362
  gRNA
gagggtccaatatacacacc

SEQ ID NO: 103797 - DNA, 20 bp, Artificial Sequence
  MKO10103797_B_Olfr1362
  gRNA
accatactcagagctgtcgt

SEQ ID NO: 103798 - DNA, 20 bp, Artificial Sequence
  MKO10103798_B_Olfr1364
  gRNA
atgtaaagggcgcactgaag

SEQ ID NO: 103799 - DNA, 20 bp, Artificial Sequence
  MKO10103799_B_Olfr1364
  gRNA
gttgaggagtcccacactcc

SEQ ID NO: 103800 - DNA, 20 bp, Artificial Sequence
  MKO10103800_B_Olfr1364
  gRNA
tgtaactgatgctcttgtcc

SEQ ID NO: 103801 - DNA, 20 bp, Artificial Sequence
  MKO10103801_B_Olfr1366
  gRNA
taccagtctcaatcagttga

SEQ ID NO: 103802 - DNA, 20 bp, Artificial Sequence
  MKO10103802_B_Olfr1366
  gRNA
ttcctatgtctctatttaac

SEQ ID NO: 103803 - DNA, 20 bp, Artificial Sequence
  MKO10103803_B_Olfr1366
  gRNA
gtaggagatggactgagact

SEQ ID NO: 103804 - DNA, 20 bp, Artificial Sequence
  MKO10103804_B_Olfr1367
  gRNA
actgtagtagtgagttagcc

SEQ ID NO: 103805 - DNA, 20 bp, Artificial Sequence
  MKO10103805_B_Olfr1367
  gRNA
taaagtaacctcattgactg

SEQ ID NO: 103806 - DNA, 20 bp, Artificial Sequence
  MKO10103806_B_Olfr1367
  gRNA
tcatatccccttagttgaaa

SEQ ID NO: 103807 - DNA, 20 bp, Artificial Sequence
  MKO10103807_B_Olfr1368
  gRNA
caagccatcttgatcaatgc

SEQ ID NO: 103808 - DNA, 20 bp, Artificial Sequence
  MKO10103808_B_Olfr1368
  gRNA
cagagatgatgtgctccagt

SEQ ID NO: 103809 - DNA, 20 bp, Artificial Sequence
  MKO10103809_B_Olfr1368
  gRNA
ccaaagaagtctattacata

SEQ ID NO: 103810 - DNA, 20 bp, Artificial Sequence
  MKO10103810_B_Olfr136
  gRNA
acattacaattgccattgtg

SEQ ID NO: 103811 - DNA, 20 bp, Artificial Sequence
  MKO10103811_B_Olfr136
  gRNA
ctaacaaaatgcacactctt

SEQ ID NO: 103812 - DNA, 20 bp, Artificial Sequence
  MKO10103812_B_Olfr136
  gRNA
gctgtggagacgagggtcta

SEQ ID NO: 103813 - DNA, 20 bp, Artificial Sequence
  MKO10103813_B_Olfr1370
  gRNA
ctgtatcctcctcgtgtcca

SEQ ID NO: 103814 - DNA, 20 bp, Artificial Sequence
  MKO10103814_B_Olfr1370
  gRNA
gcatgatcgctgggtacctt

SEQ ID NO: 103815 - DNA, 20 bp, Artificial Sequence
  MKO10103815_B_Olfr1370
  gRNA
tgtacgtacatgctaattac

SEQ ID NO: 103816 - DNA, 20 bp, Artificial Sequence
  MKO10103816_B_Olfr1371
  gRNA
aggaactgagtgtgtgcttt

SEQ ID NO: 103817 - DNA, 20 bp, Artificial Sequence
  MKO10103817_B_Olfr1371
  gRNA
acagaggcatggccatcaca

SEQ ID NO: 103818 - DNA, 20 bp, Artificial Sequence
  MKO10103818_B_Olfr1371
  gRNA
ccctgttctctgcagagcat

SEQ ID NO: 103819 - DNA, 20 bp, Artificial Sequence
  MKO10103819_B_Olfr1373
  gRNA
cagtgctggcggtgtagcag

SEQ ID NO: 103820 - DNA, 20 bp, Artificial Sequence
  MKO10103820_B_Olfr1373
  gRNA
agtagtacatgagtgtgtgc

SEQ ID NO: 103821 - DNA, 20 bp, Artificial Sequence
  MKO10103821_B_Olfr1373
  gRNA
ctatttgaacaccagttcag

SEQ ID NO: 103822 - DNA, 20 bp, Artificial Sequence
  MKO10103822_B_Olfr1377
  gRNA
aaggacgcatgtagacaccc

SEQ ID NO: 103823 - DNA, 20 bp, Artificial Sequence
  MKO10103823_B_Olfr1377
  gRNA
ggctactgtcatctttacag

SEQ ID NO: 103824 - DNA, 20 bp, Artificial Sequence
  MKO10103824_B_Olfr1377
  gRNA
aggatatgaaaggagcccta

SEQ ID NO: 103825 - DNA, 20 bp, Artificial Sequence
  MKO10103825_B_Olfr1378
  gRNA
ctttgacatcacgattcctc

SEQ ID NO: 103826 - DNA, 20 bp, Artificial Sequence
  MKO10103826_B_Olfr1378
  gRNA
aattgctgggcagtcaaagg

SEQ ID NO: 103827 - DNA, 20 bp, Artificial Sequence
  MKO10103827_B_Olfr1378
  gRNA
tgtactgaatatgtagacga

SEQ ID NO: 103828 - DNA, 20 bp, Artificial Sequence
  MKO10103828_B_Olfr137
  gRNA
ttccaggacagtccatgcaa

SEQ ID NO: 103829 - DNA, 20 bp, Artificial Sequence
  MKO10103829_B_Olfr137
  gRNA
cccagctgctatttaacctc

SEQ ID NO: 103830 - DNA, 20 bp, Artificial Sequence
  MKO10103830_B_Olfr137
  gRNA
cccagaggttaaatagcagc

SEQ ID NO: 103831 - DNA, 20 bp, Artificial Sequence
  MKO10103831_B_Olfr1380
  gRNA
gatcatcatcctgtctcaac

SEQ ID NO: 103832 - DNA, 20 bp, Artificial Sequence
  MKO10103832_B_Olfr1380
  gRNA
ttcctcagcgtatagatcag

SEQ ID NO: 103833 - DNA, 20 bp, Artificial Sequence
  MKO10103833_B_Olfr1380
  gRNA
tttgaacaccagttcagaag

SEQ ID NO: 103834 - DNA, 20 bp, Artificial Sequence
  MKO10103834_B_Olfr1381
  gRNA
cacagaagaagtgattcagt

SEQ ID NO: 103835 - DNA, 20 bp, Artificial Sequence
  MKO10103835_B_Olfr1381
  gRNA
aggaactgagtgtgtgcttt

SEQ ID NO: 103836 - DNA, 20 bp, Artificial Sequence
  MKO10103836_B_Olfr1381
  gRNA
acagaggcatggccatcaca

SEQ ID NO: 103837 - DNA, 20 bp, Artificial Sequence
  MKO10103837_B_Olfr1382
  gRNA
accctctgatctatacgttg

SEQ ID NO: 103838 - DNA, 20 bp, Artificial Sequence
  MKO10103838_B_Olfr1382
  gRNA
aggttggaggtacgtggaga

SEQ ID NO: 103839 - DNA, 20 bp, Artificial Sequence
  MKO10103839_B_Olfr1382
  gRNA
gtgagagcattatgaagagc

SEQ ID NO: 103840 - DNA, 20 bp, Artificial Sequence
  MKO10103840_B_Olfr1383
  gRNA
aaaaagatatgttccagttg

SEQ ID NO: 103841 - DNA, 20 bp, Artificial Sequence
  MKO10103841_B_Olfr1383
  gRNA
cattcgtgagattgtgatga

SEQ ID NO: 103842 - DNA, 20 bp, Artificial Sequence
  MKO10103842_B_Olfr1383
  gRNA
caacctgtccatgtgtattc

SEQ ID NO: 103843 - DNA, 20 bp, Artificial Sequence
  MKO10103843_B_Olfr1384
  gRNA
gttcttcatagcactcttac

SEQ ID NO: 103844 - DNA, 20 bp, Artificial Sequence
  MKO10103844_B_Olfr1384
  gRNA
cttctaatcagtctttcccg

SEQ ID NO: 103845 - DNA, 20 bp, Artificial Sequence
  MKO10103845_B_Olfr1384
  gRNA
aggctggagatacgtgtaca

SEQ ID NO: 103846 - DNA, 20 bp, Artificial Sequence
  MKO10103846_B_Olfr1385
  gRNA
cagcttctcataaatcttca

SEQ ID NO: 103847 - DNA, 20 bp, Artificial Sequence
  MKO10103847_B_Olfr1385
  gRNA
actctcagaataactgctct

SEQ ID NO: 103848 - DNA, 20 bp, Artificial Sequence
  MKO10103848_B_Olfr1385
  gRNA
agcagttattctgagagtga

SEQ ID NO: 103849 - DNA, 20 bp, Artificial Sequence
  MKO10103849_B_Olfr1386
  gRNA
gctttcagaataactgctct

SEQ ID NO: 103850 - DNA, 20 bp, Artificial Sequence
  MKO10103850_B_Olfr1386
  gRNA
gagcagttattctgaaagca

SEQ ID NO: 103851 - DNA, 20 bp, Artificial Sequence
  MKO10103851_B_Olfr1386
  gRNA
cagctcctcatcaacctcta

SEQ ID NO: 103852 - DNA, 20 bp, Artificial Sequence
  MKO10103852_B_Olfr1387
  gRNA
ttatgaaccccatcctctgc

SEQ ID NO: 103853 - DNA, 20 bp, Artificial Sequence
  MKO10103853_B_Olfr1387
  gRNA
acataggtttgtgcagtcga

SEQ ID NO: 103854 - DNA, 20 bp, Artificial Sequence
  MKO10103854_B_Olfr1387
  gRNA
agccttagcaatgtgaacat

SEQ ID NO: 103855 - DNA, 20 bp, Artificial Sequence
  MKO10103855_B_Olfr1388
  gRNA
ggcagaccaaaactattgtt

SEQ ID NO: 103856 - DNA, 20 bp, Artificial Sequence
  MKO10103856_B_Olfr1388
  gRNA
gttcctatgctcatatcacc

SEQ ID NO: 103857 - DNA, 20 bp, Artificial Sequence
  MKO10103857_B_Olfr1388
  gRNA
tcacacctattctgaaagtg

SEQ ID NO: 103858 - DNA, 20 bp, Artificial Sequence
  MKO10103858_B_Olfr1389
  gRNA
agaagaagtgattcagccga

SEQ ID NO: 103859 - DNA, 20 bp, Artificial Sequence
  MKO10103859_B_Olfr1389
  gRNA
ctttcctgctgcactgattc

SEQ ID NO: 103860 - DNA, 20 bp, Artificial Sequence
  MKO10103860_B_Olfr1389
  gRNA
tatgcaccctcagctgtgtc

SEQ ID NO: 103861 - DNA, 20 bp, Artificial Sequence
  MKO10103861_B_Olfr138
  gRNA
gctgtagagacgagggtcta

SEQ ID NO: 103862 - DNA, 20 bp, Artificial Sequence
  MKO10103862_B_Olfr138
  gRNA
agccttcttcatctatcaca

SEQ ID NO: 103863 - DNA, 20 bp, Artificial Sequence
  MKO10103863_B_Olfr138
  gRNA
tcccttgtgatagatgaaga

SEQ ID NO: 103864 - DNA, 20 bp, Artificial Sequence
  MKO10103864_B_Olfr1390
  gRNA
ccagcttctgattaacctcc

SEQ ID NO: 103865 - DNA, 20 bp, Artificial Sequence
  MKO10103865_B_Olfr1390
  gRNA
acgaaacaatagctagtgag

SEQ ID NO: 103866 - DNA, 20 bp, Artificial Sequence
  MKO10103866_B_Olfr1390
  gRNA
cctggaggttaatcagaagc

SEQ ID NO: 103867 - DNA, 20 bp, Artificial Sequence
  MKO10103867_B_Olfr1391
  gRNA
catcatcgctctgtcacaac

SEQ ID NO: 103868 - DNA, 20 bp, Artificial Sequence
  MKO10103868_B_Olfr1391
  gRNA
cagttgtgacagagcgatga

SEQ ID NO: 103869 - DNA, 20 bp, Artificial Sequence
  MKO10103869_B_Olfr1391
  gRNA
gggaagctttaatgccagtt

SEQ ID NO: 103870 - DNA, 20 bp, Artificial Sequence
  MKO10103870_B_Olfr1392
  gRNA
catcatcgctctctcccgaa

SEQ ID NO: 103871 - DNA, 20 bp, Artificial Sequence
  MKO10103871_B_Olfr1392
  gRNA
cattcgggagagagcgatga

SEQ ID NO: 103872 - DNA, 20 bp, Artificial Sequence
  MKO10103872_B_Olfr1392
  gRNA
aaaaagatgagttctagtgc

SEQ ID NO: 103873 - DNA, 20 bp, Artificial Sequence
  MKO10103873_B_Olfr1393
  gRNA
aatgaagcctcctcccaaac

SEQ ID NO: 103874 - DNA, 20 bp, Artificial Sequence
  MKO10103874_B_Olfr1393
  gRNA
gctgtttatatttcttgctc

SEQ ID NO: 103875 - DNA, 20 bp, Artificial Sequence
  MKO10103875_B_Olfr1393
  gRNA
cagctcctcatcaacctgca

SEQ ID NO: 103876 - DNA, 20 bp, Artificial Sequence
  MKO10103876_B_Olfr1394
  gRNA
ccccagtggtgttctagccg

SEQ ID NO: 103877 - DNA, 20 bp, Artificial Sequence
  MKO10103877_B_Olfr1394
  gRNA
cccgtagtagaggcccacca

SEQ ID NO: 103878 - DNA, 20 bp, Artificial Sequence
  MKO10103878_B_Olfr1394
  gRNA
gggaagctcatctcgctggg

SEQ ID NO: 103879 - DNA, 20 bp, Artificial Sequence
  MKO10103879_B_Olfr1395
  gRNA
gttgagcatgggcgtgatca

SEQ ID NO: 103880 - DNA, 20 bp, Artificial Sequence
  MKO10103880_B_Olfr1395
  gRNA
cctggtagatgggctgatcc

SEQ ID NO: 103881 - DNA, 20 bp, Artificial Sequence
  MKO10103881_B_Olfr1395
  gRNA
gtagcggggtcttggctctt

SEQ ID NO: 103882 - DNA, 20 bp, Artificial Sequence
  MKO10103882_B_Olfr1396
  gRNA
tcctaggatgcgggtataag

SEQ ID NO: 103883 - DNA, 20 bp, Artificial Sequence
  MKO10103883_B_Olfr1396
  gRNA
cagaccatctgctatcccaa

SEQ ID NO: 103884 - DNA, 20 bp, Artificial Sequence
  MKO10103884_B_Olfr1396
  gRNA
gcctcttatacccgcatcct

SEQ ID NO: 103885 - DNA, 20 bp, Artificial Sequence
  MKO10103885_B_Olfr139
  gRNA
ggacactgagataagtatca

SEQ ID NO: 103886 - DNA, 20 bp, Artificial Sequence
  MKO10103886_B_Olfr139
  gRNA
caaaaagcagttgcccattg

SEQ ID NO: 103887 - DNA, 20 bp, Artificial Sequence
  MKO10103887_B_Olfr139
  gRNA
gaactctgcactcatgagcc

SEQ ID NO: 103888 - DNA, 20 bp, Artificial Sequence
  MKO10103888_B_Olfr13
  gRNA
gggtccaacgtacatgacaa

SEQ ID NO: 103889 - DNA, 20 bp, Artificial Sequence
  MKO10103889_B_Olfr13
  gRNA
aggacatcaccactaggaga

SEQ ID NO: 103890 - DNA, 20 bp, Artificial Sequence
  MKO10103890_B_Olfr13
  gRNA
tgcataagagaccacaattg

SEQ ID NO: 103891 - DNA, 20 bp, Artificial Sequence
  MKO10103891_B_Olfr1402
  gRNA
ggtgcgctgagaaaactgac

SEQ ID NO: 103892 - DNA, 20 bp, Artificial Sequence
  MKO10103892_B_Olfr1402
  gRNA
gccttccttaacaatagcag

SEQ ID NO: 103893 - DNA, 20 bp, Artificial Sequence
  MKO10103893_B_Olfr1402
  gRNA
ctatcatgagtgtgttcccc

SEQ ID NO: 103894 - DNA, 20 bp, Artificial Sequence
  MKO10103894_B_Olfr1404
  gRNA
ccatgatgactgaatacctt

SEQ ID NO: 103895 - DNA, 20 bp, Artificial Sequence
  MKO10103895_B_Olfr1404
  gRNA
atacactctgcggaataagg

SEQ ID NO: 103896 - DNA, 20 bp, Artificial Sequence
  MKO10103896_B_Olfr1404
  gRNA
tctgccacatggctctgcgt

SEQ ID NO: 103897 - DNA, 20 bp, Artificial Sequence
  MKO10103897_B_Olfr1406
  gRNA
gtacaggccagatctaaaat

SEQ ID NO: 103898 - DNA, 20 bp, Artificial Sequence
  MKO10103898_B_Olfr1406
  gRNA
tcactgagatcaactgatcc

SEQ ID NO: 103899 - DNA, 20 bp, Artificial Sequence
  MKO10103899_B_Olfr1406
  gRNA
tgtcctatatatcctgactc

SEQ ID NO: 103900 - DNA, 20 bp, Artificial Sequence
  MKO10103900_B_Olfr1408
  gRNA
tttcttaggctatacacaac

SEQ ID NO: 103901 - DNA, 20 bp, Artificial Sequence
  MKO10103901_B_Olfr1408
  gRNA
tgacattgccagtcagcgtc

SEQ ID NO: 103902 - DNA, 20 bp, Artificial Sequence
  MKO10103902_B_Olfr1408
  gRNA
gaatcactactacagtcaga

SEQ ID NO: 103903 - DNA, 20 bp, Artificial Sequence
  MKO10103903_B_Olfr140
  gRNA
caaacaacatcctctgcacc

SEQ ID NO: 103904 - DNA, 20 bp, Artificial Sequence
  MKO10103904_B_Olfr140
  gRNA
gcgcaggatgacaatgtacg

SEQ ID NO: 103905 - DNA, 20 bp, Artificial Sequence
  MKO10103905_B_Olfr140
  gRNA
gttctttgtggctcatttat

SEQ ID NO: 103906 - DNA, 20 bp, Artificial Sequence
  MKO10103906_B_Olfr1410
  gRNA
gacctgtgcccgtcttgtcc

SEQ ID NO: 103907 - DNA, 20 bp, Artificial Sequence
  MKO10103907_B_Olfr1410
  gRNA
aagctcattgatagctgtgc

SEQ ID NO: 103908 - DNA, 20 bp, Artificial Sequence
  MKO10103908_B_Olfr1410
  gRNA
tgtcattatccctaatgccc

SEQ ID NO: 103909 - DNA, 20 bp, Artificial Sequence
  MKO10103909_B_Olfr1411
  gRNA
gttcaggcagccaccacagt

SEQ ID NO: 103910 - DNA, 20 bp, Artificial Sequence
  MKO10103910_B_Olfr1411
  gRNA
gatatctgtcttctacaccc

SEQ ID NO: 103911 - DNA, 20 bp, Artificial Sequence
  MKO10103911_B_Olfr1411
  gRNA
ccaggatggtgaccacgtac

SEQ ID NO: 103912 - DNA, 20 bp, Artificial Sequence
  MKO10103912_B_Olfr1412
  gRNA
agcctcacttgttcccagaa

SEQ ID NO: 103913 - DNA, 20 bp, Artificial Sequence
  MKO10103913_B_Olfr1412
  gRNA
accagcaactccaatgactt

SEQ ID NO: 103914 - DNA, 20 bp, Artificial Sequence
  MKO10103914_B_Olfr1412
  gRNA
ccaggacggtcaccatgtac

SEQ ID NO: 103915 - DNA, 20 bp, Artificial Sequence
  MKO10103915_B_Olfr1413
  gRNA
ccaggacggtcactacatac

SEQ ID NO: 103916 - DNA, 20 bp, Artificial Sequence
  MKO10103916_B_Olfr1413
  gRNA
atgtgaaggacgccccgagg

SEQ ID NO: 103917 - DNA, 20 bp, Artificial Sequence
  MKO10103917_B_Olfr1413
  gRNA
agccttcagttgtaaccaga

SEQ ID NO: 103918 - DNA, 20 bp, Artificial Sequence
  MKO10103918_B_Olfr1414
  gRNA
aggaagccgtccagcatctt

SEQ ID NO: 103919 - DNA, 20 bp, Artificial Sequence
  MKO10103919_B_Olfr1414
  gRNA
cttgggtcaagctcccttgt

SEQ ID NO: 103920 - DNA, 20 bp, Artificial Sequence
  MKO10103920_B_Olfr1414
  gRNA
acaaacataccagatctcca

SEQ ID NO: 103921 - DNA, 20 bp, Artificial Sequence
  MKO10103921_B_Olfr1415
  gRNA
ttggccaccattctttccta

SEQ ID NO: 103922 - DNA, 20 bp, Artificial Sequence
  MKO10103922_B_Olfr1415
  gRNA
aggaaacgcatctctttcac

SEQ ID NO: 103923 - DNA, 20 bp, Artificial Sequence
  MKO10103923_B_Olfr1415
  gRNA
cttcacagtctctgtgatta

SEQ ID NO: 103924 - DNA, 20 bp, Artificial Sequence
  MKO10103924_B_Olfr1416
  gRNA
ttggccaccattctctccta

SEQ ID NO: 103925 - DNA, 20 bp, Artificial Sequence
  MKO10103925_B_Olfr1416
  gRNA
tcgcacatacatgaagatca

SEQ ID NO: 103926 - DNA, 20 bp, Artificial Sequence
  MKO10103926_B_Olfr1416
  gRNA
cttcaccatctctgtgatta

SEQ ID NO: 103927 - DNA, 20 bp, Artificial Sequence
  MKO10103927_B_Olfr1417
  gRNA
actgcctttctgtagcagta

SEQ ID NO: 103928 - DNA, 20 bp, Artificial Sequence
  MKO10103928_B_Olfr1417
  gRNA
accgttgtcctcctgcagta

SEQ ID NO: 103929 - DNA, 20 bp, Artificial Sequence
  MKO10103929_B_Olfr1417
  gRNA
gacactgaccacaaacagag

SEQ ID NO: 103930 - DNA, 20 bp, Artificial Sequence
  MKO10103930_B_Olfr1418
  gRNA
gatataccctcatcatgagc

SEQ ID NO: 103931 - DNA, 20 bp, Artificial Sequence
  MKO10103931_B_Olfr1418
  gRNA
attcagcacaggggtgatga

SEQ ID NO: 103932 - DNA, 20 bp, Artificial Sequence
  MKO10103932_B_Olfr1418
  gRNA
attgcctttctgtagcagta

SEQ ID NO: 103933 - DNA, 20 bp, Artificial Sequence
  MKO10103933_B_Olfr1419
  gRNA
gcattgtggctaccatcctg

SEQ ID NO: 103934 - DNA, 20 bp, Artificial Sequence
  MKO10103934_B_Olfr1419
  gRNA
ctcattggaaacctcaccat

SEQ ID NO: 103935 - DNA, 20 bp, Artificial Sequence
  MKO10103935_B_Olfr1419
  gRNA
cctctgctgacgtcatcctc

SEQ ID NO: 103936 - DNA, 20 bp, Artificial Sequence
  MKO10103936_B_Olfr141
  gRNA
ataaagcctactagcatatt

SEQ ID NO: 103937 - DNA, 20 bp, Artificial Sequence
  MKO10103937_B_Olfr141
  gRNA
tcatcttcagaattgacaac

SEQ ID NO: 103938 - DNA, 20 bp, Artificial Sequence
  MKO10103938_B_Olfr141
  gRNA
cttatcattgcatcctatgc

SEQ ID NO: 103939 - DNA, 20 bp, Artificial Sequence
  MKO10103939_B_Olfr1420
  gRNA
catgcctgcagtcatacgcc

SEQ ID NO: 103940 - DNA, 20 bp, Artificial Sequence
  MKO10103940_B_Olfr1420
  gRNA
ctgctcctctcacatcgtag

SEQ ID NO: 103941 - DNA, 20 bp, Artificial Sequence
  MKO10103941_B_Olfr1420
  gRNA
cgtccattctcacctgaccc

SEQ ID NO: 103942 - DNA, 20 bp, Artificial Sequence
  MKO10103942_B_Olfr1423
  gRNA
ctgtgggacatcgcagtaga

SEQ ID NO: 103943 - DNA, 20 bp, Artificial Sequence
  MKO10103943_B_Olfr1423
  gRNA
cagccctcatcgcggcctcc

SEQ ID NO: 103944 - DNA, 20 bp, Artificial Sequence
  MKO10103944_B_Olfr1423
  gRNA
tgaccatcatgagtagtaag

SEQ ID NO: 103945 - DNA, 20 bp, Artificial Sequence
  MKO10103945_B_Olfr1424
  gRNA
atgcatccactcccccaata

SEQ ID NO: 103946 - DNA, 20 bp, Artificial Sequence
  MKO10103946_B_Olfr1424
  gRNA
gaaaataagttctttgatcc

SEQ ID NO: 103947 - DNA, 20 bp, Artificial Sequence
  MKO10103947_B_Olfr1424
  gRNA
gacagagatgactttatctg

SEQ ID NO: 103948 - DNA, 20 bp, Artificial Sequence
  MKO10103948_B_Olfr1425
  gRNA
gagaaggtccaccagaacct

SEQ ID NO: 103949 - DNA, 20 bp, Artificial Sequence
  MKO10103949_B_Olfr1425
  gRNA
accccttgatctacactcta

SEQ ID NO: 103950 - DNA, 20 bp, Artificial Sequence
  MKO10103950_B_Olfr1425
  gRNA
cagaggggagatgactgtaa

SEQ ID NO: 103951 - DNA, 20 bp, Artificial Sequence
  MKO10103951_B_Olfr1426
  gRNA
atgagatggaaaactacacc

SEQ ID NO: 103952 - DNA, 20 bp, Artificial Sequence
  MKO10103952_B_Olfr1426
  gRNA
gcaacgccctctgctcatga

SEQ ID NO: 103953 - DNA, 20 bp, Artificial Sequence
  MKO10103953_B_Olfr1426
  gRNA
gagaaggtctaccagaacct

SEQ ID NO: 103954 - DNA, 20 bp, Artificial Sequence
  MKO10103954_B_Olfr1427
  gRNA
tgtcagtgcaggcgagtttg

SEQ ID NO: 103955 - DNA, 20 bp, Artificial Sequence
  MKO10103955_B_Olfr1427
  gRNA
gcaccgccctctactcatga

SEQ ID NO: 103956 - DNA, 20 bp, Artificial Sequence
  MKO10103956_B_Olfr1427
  gRNA
atcgatacatggccatcttc

SEQ ID NO: 103957 - DNA, 20 bp, Artificial Sequence
  MKO10103957_B_Olfr1428
  gRNA
gaagacgaattctttcacat

SEQ ID NO: 103958 - DNA, 20 bp, Artificial Sequence
  MKO10103958_B_Olfr1428
  gRNA
gcaggggtttagcaattgca

SEQ ID NO: 103959 - DNA, 20 bp, Artificial Sequence
  MKO10103959_B_Olfr1428
  gRNA
tgttccgtccctccccagaa

SEQ ID NO: 103960 - DNA, 20 bp, Artificial Sequence
  MKO10103960_B_Olfr142
  gRNA
gggcaacagtcttattcttg

SEQ ID NO: 103961 - DNA, 20 bp, Artificial Sequence
  MKO10103961_B_Olfr142
  gRNA
tttattgtgatggccaacag

SEQ ID NO: 103962 - DNA, 20 bp, Artificial Sequence
  MKO10103962_B_Olfr142
  gRNA
cacaagcttatcttcagtga

SEQ ID NO: 103963 - DNA, 20 bp, Artificial Sequence
  MKO10103963_B_Olfr1431
  gRNA
ctgtggaagtaacaaagcag

SEQ ID NO: 103964 - DNA, 20 bp, Artificial Sequence
  MKO10103964_B_Olfr1431
  gRNA
cacatctgtcttctacactg

SEQ ID NO: 103965 - DNA, 20 bp, Artificial Sequence
  MKO10103965_B_Olfr1431
  gRNA
agctacacagcaggactcac

SEQ ID NO: 103966 - DNA, 20 bp, Artificial Sequence
  MKO10103966_B_Olfr1433
  gRNA
tataaacgccttagccatca

SEQ ID NO: 103967 - DNA, 20 bp, Artificial Sequence
  MKO10103967_B_Olfr1433
  gRNA
tgcatctgtcttctatagtg

SEQ ID NO: 103968 - DNA, 20 bp, Artificial Sequence
  MKO10103968_B_Olfr1433
  gRNA
aaaaaggtaatctgcagcta

SEQ ID NO: 103969 - DNA, 20 bp, Artificial Sequence
  MKO10103969_B_Olfr1434
  gRNA
tataaacgccttagccatca

SEQ ID NO: 103970 - DNA, 20 bp, Artificial Sequence
  MKO10103970_B_Olfr1434
  gRNA
tgcatctgtcttctatagtg

SEQ ID NO: 103971 - DNA, 20 bp, Artificial Sequence
  MKO10103971_B_Olfr1434
  gRNA
aaaaaggtaatctgcagcta

SEQ ID NO: 103972 - DNA, 20 bp, Artificial Sequence
  MKO10103972_B_Olfr1436
  gRNA
gtgctgtaatatacagtgta

SEQ ID NO: 103973 - DNA, 20 bp, Artificial Sequence
  MKO10103973_B_Olfr1436
  gRNA
actaaaatagacaaaagcag

SEQ ID NO: 103974 - DNA, 20 bp, Artificial Sequence
  MKO10103974_B_Olfr1436
  gRNA
atgctgcagctccacttctg

SEQ ID NO: 103975 - DNA, 20 bp, Artificial Sequence
  MKO10103975_B_Olfr1437
  gRNA
acccacactttgcgctcaga

SEQ ID NO: 103976 - DNA, 20 bp, Artificial Sequence
  MKO10103976_B_Olfr1437
  gRNA
atactttatgtttgccacaa

SEQ ID NO: 103977 - DNA, 20 bp, Artificial Sequence
  MKO10103977_B_Olfr1437
  gRNA
gattcctatgttgaaccctt

SEQ ID NO: 103978 - DNA, 20 bp, Artificial Sequence
  MKO10103978_B_Olfr143
  gRNA
gagaagaataccatctcttt

SEQ ID NO: 103979 - DNA, 20 bp, Artificial Sequence
  MKO10103979_B_Olfr143
  gRNA
accatcttctgctaagactg

SEQ ID NO: 103980 - DNA, 20 bp, Artificial Sequence
  MKO10103980_B_Olfr143
  gRNA
cccacagtcttagcagaaga

SEQ ID NO: 103981 - DNA, 20 bp, Artificial Sequence
  MKO10103981_B_Olfr1440
  gRNA
acccaagagaccagtactat

SEQ ID NO: 103982 - DNA, 20 bp, Artificial Sequence
  MKO10103982_B_Olfr1440
  gRNA
tgggcctcatcatcttgatt

SEQ ID NO: 103983 - DNA, 20 bp, Artificial Sequence
  MKO10103983_B_Olfr1440
  gRNA
tgtgccaatgatataaccat

SEQ ID NO: 103984 - DNA, 20 bp, Artificial Sequence
  MKO10103984_B_Olfr1441
  gRNA
cagccaagtagtgaacttcc

SEQ ID NO: 103985 - DNA, 20 bp, Artificial Sequence
  MKO10103985_B_Olfr1441
  gRNA
ctgtatagcacagcctataa

SEQ ID NO: 103986 - DNA, 20 bp, Artificial Sequence
  MKO10103986_B_Olfr1441
  gRNA
ggtgtatgagacatcaacaa

SEQ ID NO: 103987 - DNA, 20 bp, Artificial Sequence
  MKO10103987_B_Olfr1442
  gRNA
atctatttcaccaatgtgat

SEQ ID NO: 103988 - DNA, 20 bp, Artificial Sequence
  MKO10103988_B_Olfr1442
  gRNA
agtgagatagtactcattta

SEQ ID NO: 103989 - DNA, 20 bp, Artificial Sequence
  MKO10103989_B_Olfr1442
  gRNA
aataacagtcccgtagaaaa

SEQ ID NO: 103990 - DNA, 20 bp, Artificial Sequence
  MKO10103990_B_Olfr1443
  gRNA
tgaagtagataagagtgaac

SEQ ID NO: 103991 - DNA, 20 bp, Artificial Sequence
  MKO10103991_B_Olfr1443
  gRNA
ctgtgatgttccagccgtca

SEQ ID NO: 103992 - DNA, 20 bp, Artificial Sequence
  MKO10103992_B_Olfr1443
  gRNA
aggagtaaaagatgtctacc

SEQ ID NO: 103993 - DNA, 20 bp, Artificial Sequence
  MKO10103993_B_Olfr1444
  gRNA
cagcatggattgaggcatta

SEQ ID NO: 103994 - DNA, 20 bp, Artificial Sequence
  MKO10103994_B_Olfr1444
  gRNA
tgagtatcccagatctacaa

SEQ ID NO: 103995 - DNA, 20 bp, Artificial Sequence
  MKO10103995_B_Olfr1444
  gRNA
atcagctgtagctcccaaga

SEQ ID NO: 103996 - DNA, 20 bp, Artificial Sequence
  MKO10103996_B_Olfr1445
  gRNA
gccacaagcattgtgtgtta

SEQ ID NO: 103997 - DNA, 20 bp, Artificial Sequence
  MKO10103997_B_Olfr1445
  gRNA
gtcactcccaaagtaatgcc

SEQ ID NO: 103998 - DNA, 20 bp, Artificial Sequence
  MKO10103998_B_Olfr1445
  gRNA
tgtgaatgctagagaaattt

SEQ ID NO: 103999 - DNA, 20 bp, Artificial Sequence
  MKO10103999_B_Olfr1446
  gRNA
tagaagctcagtcatcactg

SEQ ID NO: 104000 - DNA, 20 bp, Artificial Sequence
  MKO10104000_B_Olfr1446
  gRNA
tactgtggagaattatctgt

SEQ ID NO: 104001 - DNA, 20 bp, Artificial Sequence
  MKO10104001_B_Olfr1446
  gRNA
agccgagtgcatctttaaga

SEQ ID NO: 104002 - DNA, 20 bp, Artificial Sequence
  MKO10104002_B_Olfr1447
  gRNA
tgactaaaagtatgtataca

SEQ ID NO: 104003 - DNA, 20 bp, Artificial Sequence
  MKO10104003_B_Olfr1447
  gRNA
gagtgaatatgtctgcaata

SEQ ID NO: 104004 - DNA, 20 bp, Artificial Sequence
  MKO10104004_B_Olfr1447
  gRNA
tgataaacaggggaagctgc

SEQ ID NO: 104005 - DNA, 20 bp, Artificial Sequence
  MKO10104005_B_Olfr1448
  gRNA
aatcacagtctcactgatat

SEQ ID NO: 104006 - DNA, 20 bp, Artificial Sequence
  MKO10104006_B_Olfr1448
  gRNA
ttcatctgaaggacgccaca

SEQ ID NO: 104007 - DNA, 20 bp, Artificial Sequence
  MKO10104007_B_Olfr1448
  gRNA
gtcactcccaaagtaatgtc

SEQ ID NO: 104008 - DNA, 20 bp, Artificial Sequence
  MKO10104008_B_Olfr1449
  gRNA
ggatatcagtcaatcccaaa

SEQ ID NO: 104009 - DNA, 20 bp, Artificial Sequence
  MKO10104009_B_Olfr1449
  gRNA
ctgtgatatacctccaatcc

SEQ ID NO: 104010 - DNA, 20 bp, Artificial Sequence
  MKO10104010_B_Olfr1449
  gRNA
ggtgactacatttatccttt

SEQ ID NO: 104011 - DNA, 20 bp, Artificial Sequence
  MKO10104011_B_Olfr1450
  gRNA
gtttaacatgggaactactg

SEQ ID NO: 104012 - DNA, 20 bp, Artificial Sequence
  MKO10104012_B_Olfr1450
  gRNA
agaagcccaaccatcacttt

SEQ ID NO: 104013 - DNA, 20 bp, Artificial Sequence
  MKO10104013_B_Olfr1450
  gRNA
gctgaatcttctgtctatac

SEQ ID NO: 104014 - DNA, 20 bp, Artificial Sequence
  MKO10104014_B_Olfr1451
  gRNA
tgagggtgaacatgatacaa

SEQ ID NO: 104015 - DNA, 20 bp, Artificial Sequence
  MKO10104015_B_Olfr1451
  gRNA
tgtttccaaccacatcaatg

SEQ ID NO: 104016 - DNA, 20 bp, Artificial Sequence
  MKO10104016_B_Olfr1451
  gRNA
gaagaacatctgtgcagcgc

SEQ ID NO: 104017 - DNA, 20 bp, Artificial Sequence
  MKO10104017_B_Olfr1453
  gRNA
cagtgcttccatctatacta

SEQ ID NO: 104018 - DNA, 20 bp, Artificial Sequence
  MKO10104018_B_Olfr1453
  gRNA
gctgatcttgatgattctct

SEQ ID NO: 104019 - DNA, 20 bp, Artificial Sequence
  MKO10104019_B_Olfr1453
  gRNA
tgtgatatcctgcagatgag

SEQ ID NO: 104020 - DNA, 20 bp, Artificial Sequence
  MKO10104020_B_Olfr1454
  gRNA
gttagtaaaaatgaatgtgt

SEQ ID NO: 104021 - DNA, 20 bp, Artificial Sequence
  MKO10104021_B_Olfr1454
  gRNA
ggcaaaaaagatattgaagc

SEQ ID NO: 104022 - DNA, 20 bp, Artificial Sequence
  MKO10104022_B_Olfr1454
  gRNA
gtcactccaaaagtcatagc

SEQ ID NO: 104023 - DNA, 20 bp, Artificial Sequence
  MKO10104023_B_Olfr1457
  gRNA
ctgaatgcctccatcaacac

SEQ ID NO: 104024 - DNA, 20 bp, Artificial Sequence
  MKO10104024_B_Olfr1457
  gRNA
cctcatttacaccatcaccc

SEQ ID NO: 104025 - DNA, 20 bp, Artificial Sequence
  MKO10104025_B_Olfr1457
  gRNA
tgattaaaagatgtctctga

SEQ ID NO: 104026 - DNA, 20 bp, Artificial Sequence
  MKO10104026_B_Olfr1459
  gRNA
ctaaagatgcattcagcttc

SEQ ID NO: 104027 - DNA, 20 bp, Artificial Sequence
  MKO10104027_B_Olfr1459
  gRNA
ctccttctgtgagtctaatg

SEQ ID NO: 104028 - DNA, 20 bp, Artificial Sequence
  MKO10104028_B_Olfr1459
  gRNA
cagtcccaggtttcctacaa

SEQ ID NO: 104029 - DNA, 20 bp, Artificial Sequence
  MKO10104029_B_Olfr145
  gRNA
gtgcaagagcgttccagaag

SEQ ID NO: 104030 - DNA, 20 bp, Artificial Sequence
  MKO10104030_B_Olfr145
  gRNA
ccttcgcatcagttccacag

SEQ ID NO: 104031 - DNA, 20 bp, Artificial Sequence
  MKO10104031_B_Olfr145
  gRNA
gtgtgacattctccctcttc

SEQ ID NO: 104032 - DNA, 20 bp, Artificial Sequence
  MKO10104032_B_Olfr1461
  gRNA
ctagataaactgagacattg

SEQ ID NO: 104033 - DNA, 20 bp, Artificial Sequence
  MKO10104033_B_Olfr1461
  gRNA
agcagcccagctatgacttt

SEQ ID NO: 104034 - DNA, 20 bp, Artificial Sequence
  MKO10104034_B_Olfr1461
  gRNA
ctcaatgtctcagtttatct

SEQ ID NO: 104035 - DNA, 20 bp, Artificial Sequence
  MKO10104035_B_Olfr1462
  gRNA
aaatacatccactgtataga

SEQ ID NO: 104036 - DNA, 20 bp, Artificial Sequence
  MKO10104036_B_Olfr1462
  gRNA
tgacaaatatattaatgaac

SEQ ID NO: 104037 - DNA, 20 bp, Artificial Sequence
  MKO10104037_B_Olfr1462
  gRNA
gccaacctccagtcactcca

SEQ ID NO: 104038 - DNA, 20 bp, Artificial Sequence
  MKO10104038_B_Olfr1463
  gRNA
ctgagcagcacagctattgt

SEQ ID NO: 104039 - DNA, 20 bp, Artificial Sequence
  MKO10104039_B_Olfr1463
  gRNA
agctatcacaccaaaagtca

SEQ ID NO: 104040 - DNA, 20 bp, Artificial Sequence
  MKO10104040_B_Olfr1463
  gRNA
ttgtgacatgccagcactca

SEQ ID NO: 104041 - DNA, 20 bp, Artificial Sequence
  MKO10104041_B_Olfr1465
  gRNA
tttaaaatgcactcagatgc

SEQ ID NO: 104042 - DNA, 20 bp, Artificial Sequence
  MKO10104042_B_Olfr1465
  gRNA
ctgattgcctccattcacat

SEQ ID NO: 104043 - DNA, 20 bp, Artificial Sequence
  MKO10104043_B_Olfr1465
  gRNA
gacaaggtcatatcctataa

SEQ ID NO: 104044 - DNA, 20 bp, Artificial Sequence
  MKO10104044_B_Olfr1466
  gRNA
ggatgttatttactcttcag

SEQ ID NO: 104045 - DNA, 20 bp, Artificial Sequence
  MKO10104045_B_Olfr1466
  gRNA
tctcatctacatcattaccc

SEQ ID NO: 104046 - DNA, 20 bp, Artificial Sequence
  MKO10104046_B_Olfr1466
  gRNA
atgagaccagccatgacttt

SEQ ID NO: 104047 - DNA, 20 bp, Artificial Sequence
  MKO10104047_B_Olfr1467
  gRNA
tgctatttatacaatcaccg

SEQ ID NO: 104048 - DNA, 20 bp, Artificial Sequence
  MKO10104048_B_Olfr1467
  gRNA
gtatacaagaaccagctcac

SEQ ID NO: 104049 - DNA, 20 bp, Artificial Sequence
  MKO10104049_B_Olfr1467
  gRNA
aaatgtatctcctatgtgga

SEQ ID NO: 104050 - DNA, 20 bp, Artificial Sequence
  MKO10104050_B_Olfr1469
  gRNA
tattagcccagtcatgactg

SEQ ID NO: 104051 - DNA, 20 bp, Artificial Sequence
  MKO10104051_B_Olfr1469
  gRNA
cctcatctataccatcaccc

SEQ ID NO: 104052 - DNA, 20 bp, Artificial Sequence
  MKO10104052_B_Olfr1469
  gRNA
gatgcacacatttgcagtca

SEQ ID NO: 104053 - DNA, 20 bp, Artificial Sequence
  MKO10104053_B_Olfr146
  gRNA
catgatgctactgtaaagta

SEQ ID NO: 104054 - DNA, 20 bp, Artificial Sequence
  MKO10104054_B_Olfr146
  gRNA
tgtttcagaaagttacatgc

SEQ ID NO: 104055 - DNA, 20 bp, Artificial Sequence
  MKO10104055_B_Olfr146
  gRNA
gtgaacaaattcttcctttc

SEQ ID NO: 104056 - DNA, 20 bp, Artificial Sequence
  MKO10104056_B_Olfr1471
  gRNA
gacaaaatgccagagcaaca

SEQ ID NO: 104057 - DNA, 20 bp, Artificial Sequence
  MKO10104057_B_Olfr1471
  gRNA
gaacaagaaatgtccagcag

SEQ ID NO: 104058 - DNA, 20 bp, Artificial Sequence
  MKO10104058_B_Olfr1471
  gRNA
tttgatggagaatatttcag

SEQ ID NO: 104059 - DNA, 20 bp, Artificial Sequence
  MKO10104059_B_Olfr1472
  gRNA
caaagttgacccaaagaaga

SEQ ID NO: 104060 - DNA, 20 bp, Artificial Sequence
  MKO10104060_B_Olfr1472
  gRNA
cttcaactgaacgcattctc

SEQ ID NO: 104061 - DNA, 20 bp, Artificial Sequence
  MKO10104061_B_Olfr1472
  gRNA
accctgtcgtatacagttta

SEQ ID NO: 104062 - DNA, 20 bp, Artificial Sequence
  MKO10104062_B_Olfr1474
  gRNA
gaaaaagtgattaattacgt

SEQ ID NO: 104063 - DNA, 20 bp, Artificial Sequence
  MKO10104063_B_Olfr1474
  gRNA
gatgatcatactgattctgc

SEQ ID NO: 104064 - DNA, 20 bp, Artificial Sequence
  MKO10104064_B_Olfr1474
  gRNA
ccaagtgacaattagaatgc

SEQ ID NO: 104065 - DNA, 20 bp, Artificial Sequence
  MKO10104065_B_Olfr1475
  gRNA
atcactgtattcatcttctt

SEQ ID NO: 104066 - DNA, 20 bp, Artificial Sequence
  MKO10104066_B_Olfr1475
  gRNA
cttcagctgaacgcattctc

SEQ ID NO: 104067 - DNA, 20 bp, Artificial Sequence
  MKO10104067_B_Olfr1475
  gRNA
ttactgaatttattctcatg

SEQ ID NO: 104068 - DNA, 20 bp, Artificial Sequence
  MKO10104068_B_Olfr1477
  gRNA
atatgtgtcttgcttcttgt

SEQ ID NO: 104069 - DNA, 20 bp, Artificial Sequence
  MKO10104069_B_Olfr1477
  gRNA
ctatcagaatttattcttgt

SEQ ID NO: 104070 - DNA, 20 bp, Artificial Sequence
  MKO10104070_B_Olfr1477
  gRNA
agcaagaaacagctaatagt

SEQ ID NO: 104071 - DNA, 20 bp, Artificial Sequence
  MKO10104071_B_Olfr147
  gRNA
tactggtgcaggaaagttga

SEQ ID NO: 104072 - DNA, 20 bp, Artificial Sequence
  MKO10104072_B_Olfr147
  gRNA
gaagaatgtcacataagtaa

SEQ ID NO: 104073 - DNA, 20 bp, Artificial Sequence
  MKO10104073_B_Olfr147
  gRNA
atggtgaccttatacaatag

SEQ ID NO: 104074 - DNA, 20 bp, Artificial Sequence
  MKO10104074_B_Olfr1480
  gRNA
aatgcattcaagaaagttgc

SEQ ID NO: 104075 - DNA, 20 bp, Artificial Sequence
  MKO10104075_B_Olfr1480
  gRNA
acttacttgacaacattgtt

SEQ ID NO: 104076 - DNA, 20 bp, Artificial Sequence
  MKO10104076_B_Olfr1480
  gRNA
tgccaacttgtcagtgtcca

SEQ ID NO: 104077 - DNA, 20 bp, Artificial Sequence
  MKO10104077_B_Olfr1484
  gRNA
aagaagtcaagaatgcagtc

SEQ ID NO: 104078 - DNA, 20 bp, Artificial Sequence
  MKO10104078_B_Olfr1484
  gRNA
agtaagatccagcaagaagc

SEQ ID NO: 104079 - DNA, 20 bp, Artificial Sequence
  MKO10104079_B_Olfr1484
  gRNA
aatttcatttatgtgaatac

SEQ ID NO: 104080 - DNA, 20 bp, Artificial Sequence
  MKO10104080_B_Olfr1487
  gRNA
aatttcatttgtgtgaatac

SEQ ID NO: 104081 - DNA, 20 bp, Artificial Sequence
  MKO10104081_B_Olfr1487
  gRNA
caagaaagggctaatagtgg

SEQ ID NO: 104082 - DNA, 20 bp, Artificial Sequence
  MKO10104082_B_Olfr1487
  gRNA
atttatttgacaacattgtt

SEQ ID NO: 104083 - DNA, 20 bp, Artificial Sequence
  MKO10104083_B_Olfr1489
  gRNA
gagaaacccttctattacct

SEQ ID NO: 104084 - DNA, 20 bp, Artificial Sequence
  MKO10104084_B_Olfr1489
  gRNA
acacagatgttcttcttaat

SEQ ID NO: 104085 - DNA, 20 bp, Artificial Sequence
  MKO10104085_B_Olfr1489
  gRNA
acatattgttgttgtcatgg

SEQ ID NO: 104086 - DNA, 20 bp, Artificial Sequence
  MKO10104086_B_Olfr148
  gRNA
gtactgacagtaagttggcc

SEQ ID NO: 104087 - DNA, 20 bp, Artificial Sequence
  MKO10104087_B_Olfr148
  gRNA
gaccatgaaatgttatattc

SEQ ID NO: 104088 - DNA, 20 bp, Artificial Sequence
  MKO10104088_B_Olfr148
  gRNA
ctactgtgcatccaaccaag

SEQ ID NO: 104089 - DNA, 20 bp, Artificial Sequence
  MKO10104089_B_Olfr1490
  gRNA
tatgtagacgtgtttcagtc

SEQ ID NO: 104090 - DNA, 20 bp, Artificial Sequence
  MKO10104090_B_Olfr1490
  gRNA
gcttatggattgataatctc

SEQ ID NO: 104091 - DNA, 20 bp, Artificial Sequence
  MKO10104091_B_Olfr1490
  gRNA
aacatagctctatccctgag

SEQ ID NO: 104092 - DNA, 20 bp, Artificial Sequence
  MKO10104092_B_Olfr1491
  gRNA
ctcgagcagctctgatgatg

SEQ ID NO: 104093 - DNA, 20 bp, Artificial Sequence
  MKO10104093_B_Olfr1491
  gRNA
caccaatgctcctgaattcc

SEQ ID NO: 104094 - DNA, 20 bp, Artificial Sequence
  MKO10104094_B_Olfr1491
  gRNA
catcatcagagctgctcgag

SEQ ID NO: 104095 - DNA, 20 bp, Artificial Sequence
  MKO10104095_B_Olfr1494
  gRNA
aagtctgtcctcaatcagtc

SEQ ID NO: 104096 - DNA, 20 bp, Artificial Sequence
  MKO10104096_B_Olfr1494
  gRNA
cgtgacaaaggtgtagacca

SEQ ID NO: 104097 - DNA, 20 bp, Artificial Sequence
  MKO10104097_B_Olfr1494
  gRNA
tcttcgcatgcgctctgcag

SEQ ID NO: 104098 - DNA, 20 bp, Artificial Sequence
  MKO10104098_B_Olfr1495
  gRNA
tcaaggcggtgtctacagaa

SEQ ID NO: 104099 - DNA, 20 bp, Artificial Sequence
  MKO10104099_B_Olfr1495
  gRNA
tcaaagagcctattaccatc

SEQ ID NO: 104100 - DNA, 20 bp, Artificial Sequence
  MKO10104100_B_Olfr1495
  gRNA
ctaggatactaactacatag

SEQ ID NO: 104101 - DNA, 20 bp, Artificial Sequence
  MKO10104101_B_Olfr1496
  gRNA
atacaaacatcatgcacccc

SEQ ID NO: 104102 - DNA, 20 bp, Artificial Sequence
  MKO10104102_B_Olfr1496
  gRNA
acaatattgcttagagccca

SEQ ID NO: 104103 - DNA, 20 bp, Artificial Sequence
  MKO10104103_B_Olfr1496
  gRNA
attgatcattgcatctgagc

SEQ ID NO: 104104 - DNA, 20 bp, Artificial Sequence
  MKO10104104_B_Olfr1497
  gRNA
attatgcaaatccgctcagc

SEQ ID NO: 104105 - DNA, 20 bp, Artificial Sequence
  MKO10104105_B_Olfr1497
  gRNA
gacagtccgaataaagccac

SEQ ID NO: 104106 - DNA, 20 bp, Artificial Sequence
  MKO10104106_B_Olfr1497
  gRNA
agctgagcggatttgcataa

SEQ ID NO: 104107 - DNA, 20 bp, Artificial Sequence
  MKO10104107_B_Olfr1499
  gRNA
gctttactgaccatccagag

SEQ ID NO: 104108 - DNA, 20 bp, Artificial Sequence
  MKO10104108_B_Olfr1499
  gRNA
cccagataacccacatacat

SEQ ID NO: 104109 - DNA, 20 bp, Artificial Sequence
  MKO10104109_B_Olfr1499
  gRNA
tgaattcagttactgttgtg

SEQ ID NO: 104110 - DNA, 20 bp, Artificial Sequence
  MKO10104110_B_Olfr149
  gRNA
tttctacatcttcactctcg

SEQ ID NO: 104111 - DNA, 20 bp, Artificial Sequence
  MKO10104111_B_Olfr149
  gRNA
gccgaaaactgctgtcccca

SEQ ID NO: 104112 - DNA, 20 bp, Artificial Sequence
  MKO10104112_B_Olfr149
  gRNA
tgaacagttgcatccaacca

SEQ ID NO: 104113 - DNA, 20 bp, Artificial Sequence
  MKO10104113_B_Olfr1500
  gRNA
tgagagctatatccaggaat

SEQ ID NO: 104114 - DNA, 20 bp, Artificial Sequence
  MKO10104114_B_Olfr1500
  gRNA
atccatcgattgctacctct

SEQ ID NO: 104115 - DNA, 20 bp, Artificial Sequence
  MKO10104115_B_Olfr1500
  gRNA
ccacaggtcagctttaacag

SEQ ID NO: 104116 - DNA, 20 bp, Artificial Sequence
  MKO10104116_B_Olfr1501
  gRNA
gaccatcttattactcccca

SEQ ID NO: 104117 - DNA, 20 bp, Artificial Sequence
  MKO10104117_B_Olfr1501
  gRNA
ctggttgctgcagcatattc

SEQ ID NO: 104118 - DNA, 20 bp, Artificial Sequence
  MKO10104118_B_Olfr1501
  gRNA
acacaatcttgtcttgccag

SEQ ID NO: 104119 - DNA, 20 bp, Artificial Sequence
  MKO10104119_B_Olfr1502
  gRNA
ctaagaaataccagcaatag

SEQ ID NO: 104120 - DNA, 20 bp, Artificial Sequence
  MKO10104120_B_Olfr1502
  gRNA
acacaactttatcttcatcc

SEQ ID NO: 104121 - DNA, 20 bp, Artificial Sequence
  MKO10104121_B_Olfr1502
  gRNA
catgcccaaatttcccagca

SEQ ID NO: 104122 - DNA, 20 bp, Artificial Sequence
  MKO10104122_B_Olfr1504
  gRNA
acactcagtactagcataaa

SEQ ID NO: 104123 - DNA, 20 bp, Artificial Sequence
  MKO10104123_B_Olfr1504
  gRNA
tcatggccatggcataaagg

SEQ ID NO: 104124 - DNA, 20 bp, Artificial Sequence
  MKO10104124_B_Olfr1504
  gRNA
taacatgggcaaatccctct

SEQ ID NO: 104125 - DNA, 20 bp, Artificial Sequence
  MKO10104125_B_Olfr1505
  gRNA
tagaatgaattccgttactg

SEQ ID NO: 104126 - DNA, 20 bp, Artificial Sequence
  MKO10104126_B_Olfr1505
  gRNA
catgcccaagtttcccagca

SEQ ID NO: 104127 - DNA, 20 bp, Artificial Sequence
  MKO10104127_B_Olfr1505
  gRNA
ctaagaaataccagaaatag

SEQ ID NO: 104128 - DNA, 20 bp, Artificial Sequence
  MKO10104128_B_Olfr1506
  gRNA
gaaataatggtcaatgatat

SEQ ID NO: 104129 - DNA, 20 bp, Artificial Sequence
  MKO10104129_B_Olfr1506
  gRNA
atcttccgcttgcccttctg

SEQ ID NO: 104130 - DNA, 20 bp, Artificial Sequence
  MKO10104130_B_Olfr1506
  gRNA
agcggaagatgagaagaact

SEQ ID NO: 104131 - DNA, 20 bp, Artificial Sequence
  MKO10104131_B_Olfr1507
  gRNA
gcagatacaatcttgtcctc

SEQ ID NO: 104132 - DNA, 20 bp, Artificial Sequence
  MKO10104132_B_Olfr1507
  gRNA
tacaaatccgaaagtacaga

SEQ ID NO: 104133 - DNA, 20 bp, Artificial Sequence
  MKO10104133_B_Olfr1507
  gRNA
attattgtcatatacctcaa

SEQ ID NO: 104134 - DNA, 20 bp, Artificial Sequence
  MKO10104134_B_Olfr1508
  gRNA
caagccagtttgatcacttg

SEQ ID NO: 104135 - DNA, 20 bp, Artificial Sequence
  MKO10104135_B_Olfr1508
  gRNA
tgtacctcaagtgatcaaac

SEQ ID NO: 104136 - DNA, 20 bp, Artificial Sequence
  MKO10104136_B_Olfr1508
  gRNA
attattgtcatatactgcaa

SEQ ID NO: 104137 - DNA, 20 bp, Artificial Sequence
  MKO10104137_B_Olfr1509
  gRNA
attctgatcgtgtccaatag

SEQ ID NO: 104138 - DNA, 20 bp, Artificial Sequence
  MKO10104138_B_Olfr1509
  gRNA
aagtagctatcgataatgtt

SEQ ID NO: 104139 - DNA, 20 bp, Artificial Sequence
  MKO10104139_B_Olfr1509
  gRNA
gagacgtggcgtgaagacta

SEQ ID NO: 104140 - DNA, 20 bp, Artificial Sequence
  MKO10104140_B_Olfr150
  gRNA
aataatcacccctaaaatgc

SEQ ID NO: 104141 - DNA, 20 bp, Artificial Sequence
  MKO10104141_B_Olfr150
  gRNA
ctgagtcatacattcctgat

SEQ ID NO: 104142 - DNA, 20 bp, Artificial Sequence
  MKO10104142_B_Olfr150
  gRNA
tattccaacattgactatcc

SEQ ID NO: 104143 - DNA, 20 bp, Artificial Sequence
  MKO10104143_B_Olfr1510
  gRNA
gtgaagtttaaaataagtcg

SEQ ID NO: 104144 - DNA, 20 bp, Artificial Sequence
  MKO10104144_B_Olfr1510
  gRNA
gagtggtttgaatagaccca

SEQ ID NO: 104145 - DNA, 20 bp, Artificial Sequence
  MKO10104145_B_Olfr1510
  gRNA
aaaattatgcacaatcctag

SEQ ID NO: 104146 - DNA, 20 bp, Artificial Sequence
  MKO10104146_B_Olfr1511
  gRNA
gagtagcttgaatagaccca

SEQ ID NO: 104147 - DNA, 20 bp, Artificial Sequence
  MKO10104147_B_Olfr1511
  gRNA
gaagaagtaatccacttcct

SEQ ID NO: 104148 - DNA, 20 bp, Artificial Sequence
  MKO10104148_B_Olfr1511
  gRNA
aaacttcactcccgccagca

SEQ ID NO: 104149 - DNA, 20 bp, Artificial Sequence
  MKO10104149_B_Olfr1512
  gRNA
gcgcgttccccagctgagtc

SEQ ID NO: 104150 - DNA, 20 bp, Artificial Sequence
  MKO10104150_B_Olfr1512
  gRNA
aggaggtgaagttagccttg

SEQ ID NO: 104151 - DNA, 20 bp, Artificial Sequence
  MKO10104151_B_Olfr1512
  gRNA
cgaagggccttctcaacatg

SEQ ID NO: 104152 - DNA, 20 bp, Artificial Sequence
  MKO10104152_B_Olfr1513
  gRNA
atgttatctctacaccacta

SEQ ID NO: 104153 - DNA, 20 bp, Artificial Sequence
  MKO10104153_B_Olfr1513
  gRNA
tgggtggctggcttaatcca

SEQ ID NO: 104154 - DNA, 20 bp, Artificial Sequence
  MKO10104154_B_Olfr1513
  gRNA
tacctgcgacctgacagcca

SEQ ID NO: 104155 - DNA, 20 bp, Artificial Sequence
  MKO10104155_B_Olfr151
  gRNA
ctacgaggatccccagaaag

SEQ ID NO: 104156 - DNA, 20 bp, Artificial Sequence
  MKO10104156_B_Olfr151
  gRNA
ccttcgcatcagctccaacg

SEQ ID NO: 104157 - DNA, 20 bp, Artificial Sequence
  MKO10104157_B_Olfr151
  gRNA
agagttgggtgagcttgcag

SEQ ID NO: 104158 - DNA, 20 bp, Artificial Sequence
  MKO10104158_B_Olfr152
  gRNA
gcacaattaaccatatgcag

SEQ ID NO: 104159 - DNA, 20 bp, Artificial Sequence
  MKO10104159_B_Olfr152
  gRNA
gagtggctactttccactta

SEQ ID NO: 104160 - DNA, 20 bp, Artificial Sequence
  MKO10104160_B_Olfr152
  gRNA
ctccacagaactcccataag

SEQ ID NO: 104161 - DNA, 20 bp, Artificial Sequence
  MKO10104161_B_Olfr1532-ps1
  gRNA
tatatgatggggttcagcat

SEQ ID NO: 104162 - DNA, 20 bp, Artificial Sequence
  MKO10104162_B_Olfr1532-ps1
  gRNA
ctttcacatccttgtttctc

SEQ ID NO: 104163 - DNA, 20 bp, Artificial Sequence
  MKO10104163_B_Olfr1532-ps1
  gRNA
tgtgacagaattcatcttcc

SEQ ID NO: 104164 - DNA, 20 bp, Artificial Sequence
  MKO10104164_B_Olfr1535
  gRNA
tgcatgagtaatgtagccat

SEQ ID NO: 104165 - DNA, 20 bp, Artificial Sequence
  MKO10104165_B_Olfr1535
  gRNA
tcagacgctgtttaacttca

SEQ ID NO: 104166 - DNA, 20 bp, Artificial Sequence
  MKO10104166_B_Olfr1535
  gRNA
caggttagcttcagcatcac

SEQ ID NO: 104167 - DNA, 20 bp, Artificial Sequence
  MKO10104167_B_Olfr1537
  gRNA
ctgagccatgcattcagagt

SEQ ID NO: 104168 - DNA, 20 bp, Artificial Sequence
  MKO10104168_B_Olfr1537
  gRNA
ccatcctctccattcactcc

SEQ ID NO: 104169 - DNA, 20 bp, Artificial Sequence
  MKO10104169_B_Olfr1537
  gRNA
atctatctgatcaccatggc

SEQ ID NO: 104170 - DNA, 20 bp, Artificial Sequence
  MKO10104170_B_Olfr153
  gRNA
aaacatatctaccagcatct

SEQ ID NO: 104171 - DNA, 20 bp, Artificial Sequence
  MKO10104171_B_Olfr153
  gRNA
atttacttgagtatctgagc

SEQ ID NO: 104172 - DNA, 20 bp, Artificial Sequence
  MKO10104172_B_Olfr153
  gRNA
aagatgctggtagatatgtt

SEQ ID NO: 104173 - DNA, 20 bp, Artificial Sequence
  MKO10104173_B_Olfr154
  gRNA
catcagcagaactgatcttt

SEQ ID NO: 104174 - DNA, 20 bp, Artificial Sequence
  MKO10104174_B_Olfr154
  gRNA
tatttgcacatgccagtgag

SEQ ID NO: 104175 - DNA, 20 bp, Artificial Sequence
  MKO10104175_B_Olfr154
  gRNA
aacatgtcagacaacatctt

SEQ ID NO: 104176 - DNA, 20 bp, Artificial Sequence
  MKO10104176_B_Olfr155
  gRNA
gactgccaagaagatcatgt

SEQ ID NO: 104177 - DNA, 20 bp, Artificial Sequence
  MKO10104177_B_Olfr155
  gRNA
ccaggagaatgaagccggac

SEQ ID NO: 104178 - DNA, 20 bp, Artificial Sequence
  MKO10104178_B_Olfr155
  gRNA
caatgcggctgcccttctgt

SEQ ID NO: 104179 - DNA, 20 bp, Artificial Sequence
  MKO10104179_B_Olfr156
  gRNA
ggtcagcaccccataaaata

SEQ ID NO: 104180 - DNA, 20 bp, Artificial Sequence
  MKO10104180_B_Olfr156
  gRNA
tagctgaatttgtcttgctg

SEQ ID NO: 104181 - DNA, 20 bp, Artificial Sequence
  MKO10104181_B_Olfr156
  gRNA
ttcctcactatcactgaatc

SEQ ID NO: 104182 - DNA, 20 bp, Artificial Sequence
  MKO10104182_B_Olfr157
  gRNA
tccgttcccttagtccttga

SEQ ID NO: 104183 - DNA, 20 bp, Artificial Sequence
  MKO10104183_B_Olfr157
  gRNA
gggtcagcagtccatagaag

SEQ ID NO: 104184 - DNA, 20 bp, Artificial Sequence
  MKO10104184_B_Olfr157
  gRNA
acttgccaggttcctcacag

SEQ ID NO: 104185 - DNA, 20 bp, Artificial Sequence
  MKO10104185_B_Olfr159
  gRNA
atcaccacttgaagtgtttc

SEQ ID NO: 104186 - DNA, 20 bp, Artificial Sequence
  MKO10104186_B_Olfr159
  gRNA
agtgatgcttccagataccc

SEQ ID NO: 104187 - DNA, 20 bp, Artificial Sequence
  MKO10104187_B_Olfr159
  gRNA
gggcaatgtcgtcctcatcc

SEQ ID NO: 104188 - DNA, 20 bp, Artificial Sequence
  MKO10104188_B_Olfr15
  gRNA
agtgatgaagatccgctctg

SEQ ID NO: 104189 - DNA, 20 bp, Artificial Sequence
  MKO10104189_B_Olfr15
  gRNA
tgctttcgcgccttgatgct

SEQ ID NO: 104190 - DNA, 20 bp, Artificial Sequence
  MKO10104190_B_Olfr15
  gRNA
tcatggcgggtacctcacac

SEQ ID NO: 104191 - DNA, 20 bp, Artificial Sequence
  MKO10104191_B_Olfr160
  gRNA
gacagccatttctatatcat

SEQ ID NO: 104192 - DNA, 20 bp, Artificial Sequence
  MKO10104192_B_Olfr160
  gRNA
gatctacataatcaccatgg

SEQ ID NO: 104193 - DNA, 20 bp, Artificial Sequence
  MKO10104193_B_Olfr160
  gRNA
tgttgagcctatgagtccca

SEQ ID NO: 104194 - DNA, 20 bp, Artificial Sequence
  MKO10104194_B_Olfr161
  gRNA
tcaggatggcacaagcaata

SEQ ID NO: 104195 - DNA, 20 bp, Artificial Sequence
  MKO10104195_B_Olfr161
  gRNA
ctgtgtagatataaatctca

SEQ ID NO: 104196 - DNA, 20 bp, Artificial Sequence
  MKO10104196_B_Olfr161
  gRNA
gctgcctggagagtcccaga

SEQ ID NO: 104197 - DNA, 20 bp, Artificial Sequence
  MKO10104197_B_Olfr164
  gRNA
ttctggtcgttctcccaccc

SEQ ID NO: 104198 - DNA, 20 bp, Artificial Sequence
  MKO10104198_B_Olfr164
  gRNA
actacatgaaagtgtgagta

SEQ ID NO: 104199 - DNA, 20 bp, Artificial Sequence
  MKO10104199_B_Olfr164
  gRNA
taacactttcatgaatgctc

SEQ ID NO: 104200 - DNA, 20 bp, Artificial Sequence
  MKO10104200_B_Olfr165
  gRNA
tgttgcggaggctgtaaatt

SEQ ID NO: 104201 - DNA, 20 bp, Artificial Sequence
  MKO10104201_B_Olfr165
  gRNA
caccatgacgtgagatgaac

SEQ ID NO: 104202 - DNA, 20 bp, Artificial Sequence
  MKO10104202_B_Olfr165
  gRNA
taataccttcatgaatgccc

SEQ ID NO: 104203 - DNA, 20 bp, Artificial Sequence
  MKO10104203_B_Olfr166
  gRNA
tgatgagcatcaaaagtagc

SEQ ID NO: 104204 - DNA, 20 bp, Artificial Sequence
  MKO10104204_B_Olfr166
  gRNA
agtaccaaggactcttgtca

SEQ ID NO: 104205 - DNA, 20 bp, Artificial Sequence
  MKO10104205_B_Olfr166
  gRNA
cccaacagaagataagattc

SEQ ID NO: 104206 - DNA, 20 bp, Artificial Sequence
  MKO10104206_B_Olfr167
  gRNA
tgcatatccagtatgagcac

SEQ ID NO: 104207 - DNA, 20 bp, Artificial Sequence
  MKO10104207_B_Olfr167
  gRNA
atccctccgatccccagaag

SEQ ID NO: 104208 - DNA, 20 bp, Artificial Sequence
  MKO10104208_B_Olfr167
  gRNA
cacccccaaaagtcaagaag

SEQ ID NO: 104209 - DNA, 20 bp, Artificial Sequence
  MKO10104209_B_Olfr168
  gRNA
tatcacagcttcctatggta

SEQ ID NO: 104210 - DNA, 20 bp, Artificial Sequence
  MKO10104210_B_Olfr168
  gRNA
cattatcttgctcatgcgaa

SEQ ID NO: 104211 - DNA, 20 bp, Artificial Sequence
  MKO10104211_B_Olfr168
  gRNA
caagccctcagaacctgcca

SEQ ID NO: 104212 - DNA, 20 bp, Artificial Sequence
  MKO10104212_B_Olfr169
  gRNA
tcgtaataaagatgtcctta

SEQ ID NO: 104213 - DNA, 20 bp, Artificial Sequence
  MKO10104213_B_Olfr169
  gRNA
gcctgcagccaggagcctac

SEQ ID NO: 104214 - DNA, 20 bp, Artificial Sequence
  MKO10104214_B_Olfr169
  gRNA
gtattccaaatgcagtcatc

SEQ ID NO: 104215 - DNA, 20 bp, Artificial Sequence
  MKO10104215_B_Olfr16
  gRNA
tttaggcactggcctggtta

SEQ ID NO: 104216 - DNA, 20 bp, Artificial Sequence
  MKO10104216_B_Olfr16
  gRNA
aaggttgtaaaaaatcaggc

SEQ ID NO: 104217 - DNA, 20 bp, Artificial Sequence
  MKO10104217_B_Olfr16
  gRNA
tttgtaattcttgtgcccat

SEQ ID NO: 104218 - DNA, 20 bp, Artificial Sequence
  MKO10104218_B_Olfr170
  gRNA
ctcatatatgtgaaaatgac

SEQ ID NO: 104219 - DNA, 20 bp, Artificial Sequence
  MKO10104219_B_Olfr170
  gRNA
tttgctaccctgtgctgatg

SEQ ID NO: 104220 - DNA, 20 bp, Artificial Sequence
  MKO10104220_B_Olfr170
  gRNA
tgactgagcagaaaatacat

SEQ ID NO: 104221 - DNA, 20 bp, Artificial Sequence
  MKO10104221_B_Olfr171
  gRNA
aggacatgactgccaagaga

SEQ ID NO: 104222 - DNA, 20 bp, Artificial Sequence
  MKO10104222_B_Olfr171
  gRNA
ttcagtgggctcctggctgc

SEQ ID NO: 104223 - DNA, 20 bp, Artificial Sequence
  MKO10104223_B_Olfr171
  gRNA
ctttattcagaatattactt

SEQ ID NO: 104224 - DNA, 20 bp, Artificial Sequence
  MKO10104224_B_Olfr172
  gRNA
gcagtctgcagtttcaacag

SEQ ID NO: 104225 - DNA, 20 bp, Artificial Sequence
  MKO10104225_B_Olfr172
  gRNA
caatacaagctcattgacat

SEQ ID NO: 104226 - DNA, 20 bp, Artificial Sequence
  MKO10104226_B_Olfr172
  gRNA
gctctgccttcagatgatca

SEQ ID NO: 104227 - DNA, 20 bp, Artificial Sequence
  MKO10104227_B_Olfr173
  gRNA
ggtgtgaagagaacgttctt

SEQ ID NO: 104228 - DNA, 20 bp, Artificial Sequence
  MKO10104228_B_Olfr173
  gRNA
cacaacctattgtgaagact

SEQ ID NO: 104229 - DNA, 20 bp, Artificial Sequence
  MKO10104229_B_Olfr173
  gRNA
gctctgccttcagatgacga

SEQ ID NO: 104230 - DNA, 20 bp, Artificial Sequence
  MKO10104230_B_Olfr175-ps1
  gRNA
cttaaagatacttctattcc

SEQ ID NO: 104231 - DNA, 20 bp, Artificial Sequence
  MKO10104231_B_Olfr175-ps1
  gRNA
aatagaagtatctttaagtc

SEQ ID NO: 104232 - DNA, 20 bp, Artificial Sequence
  MKO10104232_B_Olfr175-ps1
  gRNA
ctgcattccatgattcacat

SEQ ID NO: 104233 - DNA, 20 bp, Artificial Sequence
  MKO10104233_B_Olfr176
  gRNA
gaggatgaactctgttgcca

SEQ ID NO: 104234 - DNA, 20 bp, Artificial Sequence
  MKO10104234_B_Olfr176
  gRNA
acgaggttctatgtagatca

SEQ ID NO: 104235 - DNA, 20 bp, Artificial Sequence
  MKO10104235_B_Olfr176
  gRNA
aacagaagtgtctttaagtc

SEQ ID NO: 104236 - DNA, 20 bp, Artificial Sequence
  MKO10104236_B_Olfr177
  gRNA
gaggatgaactctgttgcca

SEQ ID NO: 104237 - DNA, 20 bp, Artificial Sequence
  MKO10104237_B_Olfr177
  gRNA
acgaggttctatgtagatca

SEQ ID NO: 104238 - DNA, 20 bp, Artificial Sequence
  MKO10104238_B_Olfr177
  gRNA
aacagaagtgtctttaagtc

SEQ ID NO: 104239 - DNA, 20 bp, Artificial Sequence
  MKO10104239_B_Olfr178
  gRNA
ctgtacaggagagtctatac

SEQ ID NO: 104240 - DNA, 20 bp, Artificial Sequence
  MKO10104240_B_Olfr178
  gRNA
ttactacctcagtatttctc

SEQ ID NO: 104241 - DNA, 20 bp, Artificial Sequence
  MKO10104241_B_Olfr178
  gRNA
tttgaccacacaattcatcc

SEQ ID NO: 104242 - DNA, 20 bp, Artificial Sequence
  MKO10104242_B_Olfr17
  gRNA
gatcacagatcgccatgtag

SEQ ID NO: 104243 - DNA, 20 bp, Artificial Sequence
  MKO10104243_B_Olfr17
  gRNA
gcacagactagggctatgac

SEQ ID NO: 104244 - DNA, 20 bp, Artificial Sequence
  MKO10104244_B_Olfr17
  gRNA
gttgagtactctgatactcc

SEQ ID NO: 104245 - DNA, 20 bp, Artificial Sequence
  MKO10104245_B_Olfr180
  gRNA
ctgcattccttgattcatgt

SEQ ID NO: 104246 - DNA, 20 bp, Artificial Sequence
  MKO10104246_B_Olfr180
  gRNA
ctgtacaggagagtctatat

SEQ ID NO: 104247 - DNA, 20 bp, Artificial Sequence
  MKO10104247_B_Olfr180
  gRNA
acgaggctccaagtagatca

SEQ ID NO: 104248 - DNA, 20 bp, Artificial Sequence
  MKO10104248_B_Olfr181
  gRNA
acagtagagttcatcctcat

SEQ ID NO: 104249 - DNA, 20 bp, Artificial Sequence
  MKO10104249_B_Olfr181
  gRNA
cagacagcctgtatgtatca

SEQ ID NO: 104250 - DNA, 20 bp, Artificial Sequence
  MKO10104250_B_Olfr181
  gRNA
tgtgatctgagaatcctatg

SEQ ID NO: 104251 - DNA, 20 bp, Artificial Sequence
  MKO10104251_B_Olfr183
  gRNA
atatacttcatgaccattgt

SEQ ID NO: 104252 - DNA, 20 bp, Artificial Sequence
  MKO10104252_B_Olfr183
  gRNA
aaagccacctataaatgata

SEQ ID NO: 104253 - DNA, 20 bp, Artificial Sequence
  MKO10104253_B_Olfr183
  gRNA
tatcatccacagtgacaccg

SEQ ID NO: 104254 - DNA, 20 bp, Artificial Sequence
  MKO10104254_B_Olfr186
  gRNA
agaaggccttccttatacct

SEQ ID NO: 104255 - DNA, 20 bp, Artificial Sequence
  MKO10104255_B_Olfr186
  gRNA
gatatatcatcaagaatagt

SEQ ID NO: 104256 - DNA, 20 bp, Artificial Sequence
  MKO10104256_B_Olfr186
  gRNA
cacagatcatcaagggctgc

SEQ ID NO: 104257 - DNA, 20 bp, Artificial Sequence
  MKO10104257_B_Olfr187
  gRNA
caaactgacgtttcccacaa

SEQ ID NO: 104258 - DNA, 20 bp, Artificial Sequence
  MKO10104258_B_Olfr187
  gRNA
gatcactctctctgaatgta

SEQ ID NO: 104259 - DNA, 20 bp, Artificial Sequence
  MKO10104259_B_Olfr187
  gRNA
tgagaacaaactctgttagc

SEQ ID NO: 104260 - DNA, 20 bp, Artificial Sequence
  MKO10104260_B_Olfr18
  gRNA
agcatagagatgacacagtc

SEQ ID NO: 104261 - DNA, 20 bp, Artificial Sequence
  MKO10104261_B_Olfr18
  gRNA
cacactaccaaagatgatag

SEQ ID NO: 104262 - DNA, 20 bp, Artificial Sequence
  MKO10104262_B_Olfr18
  gRNA
cagcttcagcctatactctt

SEQ ID NO: 104263 - DNA, 20 bp, Artificial Sequence
  MKO10104263_B_Olfr190
  gRNA
agaaagccttcttcatgctt

SEQ ID NO: 104264 - DNA, 20 bp, Artificial Sequence
  MKO10104264_B_Olfr190
  gRNA
tactacagaatgtttcttgt

SEQ ID NO: 104265 - DNA, 20 bp, Artificial Sequence
  MKO10104265_B_Olfr190
  gRNA
gtctgtccaaagcatgaaga

SEQ ID NO: 104266 - DNA, 20 bp, Artificial Sequence
  MKO10104266_B_Olfr191
  gRNA
tgccaagagaaaacattccg

SEQ ID NO: 104267 - DNA, 20 bp, Artificial Sequence
  MKO10104267_B_Olfr191
  gRNA
gataaatgaccaaaaacagc

SEQ ID NO: 104268 - DNA, 20 bp, Artificial Sequence
  MKO10104268_B_Olfr191
  gRNA
gcataacatcacaataaaaa

SEQ ID NO: 104269 - DNA, 20 bp, Artificial Sequence
  MKO10104269_B_Olfr192
  gRNA
accagaaaaaaacaagaata

SEQ ID NO: 104270 - DNA, 20 bp, Artificial Sequence
  MKO10104270_B_Olfr192
  gRNA
agaaagccttcttcatacct

SEQ ID NO: 104271 - DNA, 20 bp, Artificial Sequence
  MKO10104271_B_Olfr192
  gRNA
atctatcttatcactattgt

SEQ ID NO: 104272 - DNA, 20 bp, Artificial Sequence
  MKO10104272_B_Olfr193
  gRNA
attcatgctttaattcatga

SEQ ID NO: 104273 - DNA, 20 bp, Artificial Sequence
  MKO10104273_B_Olfr193
  gRNA
ctcccaagaaaaaagtacat

SEQ ID NO: 104274 - DNA, 20 bp, Artificial Sequence
  MKO10104274_B_Olfr193
  gRNA
catctatctcatcaccattg

SEQ ID NO: 104275 - DNA, 20 bp, Artificial Sequence
  MKO10104275_B_Olfr194
  gRNA
catggaggtgaacagaagcc

SEQ ID NO: 104276 - DNA, 20 bp, Artificial Sequence
  MKO10104276_B_Olfr194
  gRNA
cttcatttatgtcaccacca

SEQ ID NO: 104277 - DNA, 20 bp, Artificial Sequence
  MKO10104277_B_Olfr194
  gRNA
agatgagaaagattaaacca

SEQ ID NO: 104278 - DNA, 20 bp, Artificial Sequence
  MKO10104278_B_Olfr195
  gRNA
ctgcatcctatgattgaagt

SEQ ID NO: 104279 - DNA, 20 bp, Artificial Sequence
  MKO10104279_B_Olfr195
  gRNA
tgtgacaaatgaattcatcc

SEQ ID NO: 104280 - DNA, 20 bp, Artificial Sequence
  MKO10104280_B_Olfr195
  gRNA
gtacaggagattctgtataa

SEQ ID NO: 104281 - DNA, 20 bp, Artificial Sequence
  MKO10104281_B_Olfr196
  gRNA
attgagagaagggtcattac

SEQ ID NO: 104282 - DNA, 20 bp, Artificial Sequence
  MKO10104282_B_Olfr196
  gRNA
taagcaagtaaaaaattcac

SEQ ID NO: 104283 - DNA, 20 bp, Artificial Sequence
  MKO10104283_B_Olfr196
  gRNA
tgccaagagaaaacattctg

SEQ ID NO: 104284 - DNA, 20 bp, Artificial Sequence
  MKO10104284_B_Olfr197
  gRNA
gtttagctcttgttgatact

SEQ ID NO: 104285 - DNA, 20 bp, Artificial Sequence
  MKO10104285_B_Olfr197
  gRNA
atttgtgatgtgtgcaacta

SEQ ID NO: 104286 - DNA, 20 bp, Artificial Sequence
  MKO10104286_B_Olfr197
  gRNA
gagctaaacacccaagaaat

SEQ ID NO: 104287 - DNA, 20 bp, Artificial Sequence
  MKO10104287_B_Olfr198
  gRNA
gtctggatcaggtgaagata

SEQ ID NO: 104288 - DNA, 20 bp, Artificial Sequence
  MKO10104288_B_Olfr198
  gRNA
caaacactgccaccacagtc

SEQ ID NO: 104289 - DNA, 20 bp, Artificial Sequence
  MKO10104289_B_Olfr198
  gRNA
agatgagagcaatgagccca

SEQ ID NO: 104290 - DNA, 20 bp, Artificial Sequence
  MKO10104290_B_Olfr199
  gRNA
ctgtactcagtttatagccg

SEQ ID NO: 104291 - DNA, 20 bp, Artificial Sequence
  MKO10104291_B_Olfr199
  gRNA
agacttgtatagaagttgca

SEQ ID NO: 104292 - DNA, 20 bp, Artificial Sequence
  MKO10104292_B_Olfr199
  gRNA
attgaacaaagcactcagcc

SEQ ID NO: 104293 - DNA, 20 bp, Artificial Sequence
  MKO10104293_B_Olfr19
  gRNA
tgtttgtgagcttaatcaac

SEQ ID NO: 104294 - DNA, 20 bp, Artificial Sequence
  MKO10104294_B_Olfr19
  gRNA
gattaagctcacaaacaaag

SEQ ID NO: 104295 - DNA, 20 bp, Artificial Sequence
  MKO10104295_B_Olfr19
  gRNA
acgtgcaatctcatcatcac

SEQ ID NO: 104296 - DNA, 20 bp, Artificial Sequence
  MKO10104296_B_Olfr1
  gRNA
ctctgacacccgtgttaatg

SEQ ID NO: 104297 - DNA, 20 bp, Artificial Sequence
  MKO10104297_B_Olfr1
  gRNA
gttccatcgattccctatgc

SEQ ID NO: 104298 - DNA, 20 bp, Artificial Sequence
  MKO10104298_B_Olfr1
  gRNA
cagtaataattctactgtga

SEQ ID NO: 104299 - DNA, 20 bp, Artificial Sequence
  MKO10104299_B_Olfr201
  gRNA
gaacagggcagcctttagcg

SEQ ID NO: 104300 - DNA, 20 bp, Artificial Sequence
  MKO10104300_B_Olfr201
  gRNA
attgagcaaagcactcaacc

SEQ ID NO: 104301 - DNA, 20 bp, Artificial Sequence
  MKO10104301_B_Olfr201
  gRNA
gtacttattcctcagtagcc

SEQ ID NO: 104302 - DNA, 20 bp, Artificial Sequence
  MKO10104302_B_Olfr202
  gRNA
atagaaatagtctataacgt

SEQ ID NO: 104303 - DNA, 20 bp, Artificial Sequence
  MKO10104303_B_Olfr202
  gRNA
atgtaaccccctcctttatc

SEQ ID NO: 104304 - DNA, 20 bp, Artificial Sequence
  MKO10104304_B_Olfr202
  gRNA
accacaagcatgttaattga

SEQ ID NO: 104305 - DNA, 20 bp, Artificial Sequence
  MKO10104305_B_Olfr203
  gRNA
gctgcaagttcccatgttct

SEQ ID NO: 104306 - DNA, 20 bp, Artificial Sequence
  MKO10104306_B_Olfr203
  gRNA
gtgactgcgtttattctcag

SEQ ID NO: 104307 - DNA, 20 bp, Artificial Sequence
  MKO10104307_B_Olfr203
  gRNA
gtgtgcacttgcctgataag

SEQ ID NO: 104308 - DNA, 20 bp, Artificial Sequence
  MKO10104308_B_Olfr204
  gRNA
agagactacgatagtcacag

SEQ ID NO: 104309 - DNA, 20 bp, Artificial Sequence
  MKO10104309_B_Olfr204
  gRNA
taacacagtacagagtctct

SEQ ID NO: 104310 - DNA, 20 bp, Artificial Sequence
  MKO10104310_B_Olfr204
  gRNA
tgcacagatccatctcttaa

SEQ ID NO: 104311 - DNA, 20 bp, Artificial Sequence
  MKO10104311_B_Olfr205
  gRNA
agatgcatctctgaatgcat

SEQ ID NO: 104312 - DNA, 20 bp, Artificial Sequence
  MKO10104312_B_Olfr205
  gRNA
aagaacaaactcagtcaaca

SEQ ID NO: 104313 - DNA, 20 bp, Artificial Sequence
  MKO10104313_B_Olfr205
  gRNA
gtctgcaccaggtgaaaacc

SEQ ID NO: 104314 - DNA, 20 bp, Artificial Sequence
  MKO10104314_B_Olfr206
  gRNA
gtaaactgtggacttaatat

SEQ ID NO: 104315 - DNA, 20 bp, Artificial Sequence
  MKO10104315_B_Olfr206
  gRNA
tctcatctatgtcaccacta

SEQ ID NO: 104316 - DNA, 20 bp, Artificial Sequence
  MKO10104316_B_Olfr206
  gRNA
atcagtatatcctatataat

SEQ ID NO: 104317 - DNA, 20 bp, Artificial Sequence
  MKO10104317_B_Olfr207
  gRNA
atgtttcatcctggtagcga

SEQ ID NO: 104318 - DNA, 20 bp, Artificial Sequence
  MKO10104318_B_Olfr207
  gRNA
ggggtgtgatggagctgaac

SEQ ID NO: 104319 - DNA, 20 bp, Artificial Sequence
  MKO10104319_B_Olfr207
  gRNA
ctctgacaaagataattatc

SEQ ID NO: 104320 - DNA, 20 bp, Artificial Sequence
  MKO10104320_B_Olfr208
  gRNA
atgtttcatcctggtagcga

SEQ ID NO: 104321 - DNA, 20 bp, Artificial Sequence
  MKO10104321_B_Olfr208
  gRNA
ggggtgtgatggagctgaac

SEQ ID NO: 104322 - DNA, 20 bp, Artificial Sequence
  MKO10104322_B_Olfr208
  gRNA
ctctgacaaagataattatc

SEQ ID NO: 104323 - DNA, 20 bp, Artificial Sequence
  MKO10104323_B_Olfr209
  gRNA
atgtttcatcctggtagcga

SEQ ID NO: 104324 - DNA, 20 bp, Artificial Sequence
  MKO10104324_B_Olfr209
  gRNA
ggggtgtgatggagctgaac

SEQ ID NO: 104325 - DNA, 20 bp, Artificial Sequence
  MKO10104325_B_Olfr209
  gRNA
ctctgacaaagataattatc

SEQ ID NO: 104326 - DNA, 20 bp, Artificial Sequence
  MKO10104326_B_Olfr20
  gRNA
ggtgacccagcatggcagaa

SEQ ID NO: 104327 - DNA, 20 bp, Artificial Sequence
  MKO10104327_B_Olfr20
  gRNA
caatttgtgcataggacaca

SEQ ID NO: 104328 - DNA, 20 bp, Artificial Sequence
  MKO10104328_B_Olfr20
  gRNA
gtacagctgctgatgctctg

SEQ ID NO: 104329 - DNA, 20 bp, Artificial Sequence
  MKO10104329_B_Olfr211
  gRNA
gaagttcaatatgccataaa

SEQ ID NO: 104330 - DNA, 20 bp, Artificial Sequence
  MKO10104330_B_Olfr211
  gRNA
aatcatgacactgttcacgt

SEQ ID NO: 104331 - DNA, 20 bp, Artificial Sequence
  MKO10104331_B_Olfr211
  gRNA
tacctcctccattatgccca

SEQ ID NO: 104332 - DNA, 20 bp, Artificial Sequence
  MKO10104332_B_Olfr212
  gRNA
ttatgagcgtgttgcccatg

SEQ ID NO: 104333 - DNA, 20 bp, Artificial Sequence
  MKO10104333_B_Olfr212
  gRNA
agtaggccagcaagtgcatc

SEQ ID NO: 104334 - DNA, 20 bp, Artificial Sequence
  MKO10104334_B_Olfr212
  gRNA
cttatccctggatcgctatc

SEQ ID NO: 104335 - DNA, 20 bp, Artificial Sequence
  MKO10104335_B_Olfr213
  gRNA
cttatccctggaccgctatc

SEQ ID NO: 104336 - DNA, 20 bp, Artificial Sequence
  MKO10104336_B_Olfr213
  gRNA
tgcactgctcctgtgatatc

SEQ ID NO: 104337 - DNA, 20 bp, Artificial Sequence
  MKO10104337_B_Olfr213
  gRNA
cataattagcatcacctgcg

SEQ ID NO: 104338 - DNA, 20 bp, Artificial Sequence
  MKO10104338_B_Olfr214
  gRNA
ctcaatcatgcgtcttccat

SEQ ID NO: 104339 - DNA, 20 bp, Artificial Sequence
  MKO10104339_B_Olfr214
  gRNA
ctatactctgcgcaacaagc

SEQ ID NO: 104340 - DNA, 20 bp, Artificial Sequence
  MKO10104340_B_Olfr214
  gRNA
ctccaaaaagaaagatcgcc

SEQ ID NO: 104341 - DNA, 20 bp, Artificial Sequence
  MKO10104341_B_Olfr215
  gRNA
aactgtccaggaatttaccc

SEQ ID NO: 104342 - DNA, 20 bp, Artificial Sequence
  MKO10104342_B_Olfr215
  gRNA
caaggcaggccataattaga

SEQ ID NO: 104343 - DNA, 20 bp, Artificial Sequence
  MKO10104343_B_Olfr215
  gRNA
cgtgagagcttcagcagaac

SEQ ID NO: 104344 - DNA, 20 bp, Artificial Sequence
  MKO10104344_B_Olfr218
  gRNA
ggccaaacactgatgtaacc

SEQ ID NO: 104345 - DNA, 20 bp, Artificial Sequence
  MKO10104345_B_Olfr218
  gRNA
gaggctctacgaaaggccat

SEQ ID NO: 104346 - DNA, 20 bp, Artificial Sequence
  MKO10104346_B_Olfr218
  gRNA
caagactcatgggtaacaca

SEQ ID NO: 104347 - DNA, 20 bp, Artificial Sequence
  MKO10104347_B_Olfr220
  gRNA
actcctcaatgtctcctgcg

SEQ ID NO: 104348 - DNA, 20 bp, Artificial Sequence
  MKO10104348_B_Olfr220
  gRNA
gtctactagctctgcctgag

SEQ ID NO: 104349 - DNA, 20 bp, Artificial Sequence
  MKO10104349_B_Olfr220
  gRNA
gacaagagcatctcattcaa

SEQ ID NO: 104350 - DNA, 20 bp, Artificial Sequence
  MKO10104350_B_Olfr221
  gRNA
cctacaaatgcgttcaaacc

SEQ ID NO: 104351 - DNA, 20 bp, Artificial Sequence
  MKO10104351_B_Olfr221
  gRNA
agtagctggacttagggcgc

SEQ ID NO: 104352 - DNA, 20 bp, Artificial Sequence
  MKO10104352_B_Olfr221
  gRNA
agaacgccttgaacctgccc

SEQ ID NO: 104353 - DNA, 20 bp, Artificial Sequence
  MKO10104353_B_Olfr222
  gRNA
attcgccgtagtatcagcac

SEQ ID NO: 104354 - DNA, 20 bp, Artificial Sequence
  MKO10104354_B_Olfr222
  gRNA
gttgccgaagccgctgagcc

SEQ ID NO: 104355 - DNA, 20 bp, Artificial Sequence
  MKO10104355_B_Olfr222
  gRNA
cgtgcagccaccgtaactga

SEQ ID NO: 104356 - DNA, 20 bp, Artificial Sequence
  MKO10104356_B_Olfr223
  gRNA
ctgcaccgaaagcgctctgc

SEQ ID NO: 104357 - DNA, 20 bp, Artificial Sequence
  MKO10104357_B_Olfr223
  gRNA
catgccagtttaatcaaagc

SEQ ID NO: 104358 - DNA, 20 bp, Artificial Sequence
  MKO10104358_B_Olfr223
  gRNA
gatgcatgatgagcacatat

SEQ ID NO: 104359 - DNA, 20 bp, Artificial Sequence
  MKO10104359_B_Olfr224
  gRNA
tcctcctgatatcaacctgt

SEQ ID NO: 104360 - DNA, 20 bp, Artificial Sequence
  MKO10104360_B_Olfr224
  gRNA
gttcaacagaggggtaagta

SEQ ID NO: 104361 - DNA, 20 bp, Artificial Sequence
  MKO10104361_B_Olfr224
  gRNA
gggtgtcagagagtatcaac

SEQ ID NO: 104362 - DNA, 20 bp, Artificial Sequence
  MKO10104362_B_Olfr225
  gRNA
ggcggcagcaatgtagccgt

SEQ ID NO: 104363 - DNA, 20 bp, Artificial Sequence
  MKO10104363_B_Olfr225
  gRNA
cggaagaccatcagcttcgt

SEQ ID NO: 104364 - DNA, 20 bp, Artificial Sequence
  MKO10104364_B_Olfr225
  gRNA
ccggcatctcgcacacaaag

SEQ ID NO: 104365 - DNA, 20 bp, Artificial Sequence
  MKO10104365_B_Olfr228
  gRNA
taacttgattacttcaccac

SEQ ID NO: 104366 - DNA, 20 bp, Artificial Sequence
  MKO10104366_B_Olfr228
  gRNA
aaatctgctcttagaaaaac

SEQ ID NO: 104367 - DNA, 20 bp, Artificial Sequence
  MKO10104367_B_Olfr228
  gRNA
aaaaaatatttatgctgatt

SEQ ID NO: 104368 - DNA, 20 bp, Artificial Sequence
  MKO10104368_B_Olfr229
  gRNA
actctgcaattgcgaaaaca

SEQ ID NO: 104369 - DNA, 20 bp, Artificial Sequence
  MKO10104369_B_Olfr229
  gRNA
tccatcgaacttactgatga

SEQ ID NO: 104370 - DNA, 20 bp, Artificial Sequence
  MKO10104370_B_Olfr229
  gRNA
ggtgtgagctgagtagaatc

SEQ ID NO: 104371 - DNA, 20 bp, Artificial Sequence
  MKO10104371_B_Olfr231
  gRNA
ctttgtatccaactaacagc

SEQ ID NO: 104372 - DNA, 20 bp, Artificial Sequence
  MKO10104372_B_Olfr231
  gRNA
gtcgcaatccatgcaatctc

SEQ ID NO: 104373 - DNA, 20 bp, Artificial Sequence
  MKO10104373_B_Olfr231
  gRNA
tataggacagggcaattaca

SEQ ID NO: 104374 - DNA, 20 bp, Artificial Sequence
  MKO10104374_B_Olfr235
  gRNA
tggggaaatctgagaatccc

SEQ ID NO: 104375 - DNA, 20 bp, Artificial Sequence
  MKO10104375_B_Olfr235
  gRNA
agattcagtcagccccatag

SEQ ID NO: 104376 - DNA, 20 bp, Artificial Sequence
  MKO10104376_B_Olfr235
  gRNA
ccaatcttattaaagcaata

SEQ ID NO: 104377 - DNA, 20 bp, Artificial Sequence
  MKO10104377_B_Olfr237-ps1
  gRNA
gtgtgtgcagtctgtggtcc

SEQ ID NO: 104378 - DNA, 20 bp, Artificial Sequence
  MKO10104378_B_Olfr237-ps1
  gRNA
gaatgaaagccaaccagaca

SEQ ID NO: 104379 - DNA, 20 bp, Artificial Sequence
  MKO10104379_B_Olfr237-ps1
  gRNA
agatgattccattccccaga

SEQ ID NO: 104380 - DNA, 20 bp, Artificial Sequence
  MKO10104380_B_Olfr239
  gRNA
atgcggagagaatgtactgg

SEQ ID NO: 104381 - DNA, 20 bp, Artificial Sequence
  MKO10104381_B_Olfr239
  gRNA
cattgggtccacagaaggtg

SEQ ID NO: 104382 - DNA, 20 bp, Artificial Sequence
  MKO10104382_B_Olfr239
  gRNA
ccgcatgccaacttcaatag

SEQ ID NO: 104383 - DNA, 20 bp, Artificial Sequence
  MKO10104383_B_Olfr23
  gRNA
gagtttactccttgttgcca

SEQ ID NO: 104384 - DNA, 20 bp, Artificial Sequence
  MKO10104384_B_Olfr23
  gRNA
ataaaactctcttctaacta

SEQ ID NO: 104385 - DNA, 20 bp, Artificial Sequence
  MKO10104385_B_Olfr23
  gRNA
gagttaatgataatgataat

SEQ ID NO: 104386 - DNA, 20 bp, Artificial Sequence
  MKO10104386_B_Olfr242
  gRNA
aagaacatcatctcttactc

SEQ ID NO: 104387 - DNA, 20 bp, Artificial Sequence
  MKO10104387_B_Olfr242
  gRNA
aagcatgaagccagtgttta

SEQ ID NO: 104388 - DNA, 20 bp, Artificial Sequence
  MKO10104388_B_Olfr242
  gRNA
ccatcctctgcattcactcc

SEQ ID NO: 104389 - DNA, 20 bp, Artificial Sequence
  MKO10104389_B_Olfr243
  gRNA
gtctagtccaagaatactga

SEQ ID NO: 104390 - DNA, 20 bp, Artificial Sequence
  MKO10104390_B_Olfr243
  gRNA
tttgtggccttcagtattct

SEQ ID NO: 104391 - DNA, 20 bp, Artificial Sequence
  MKO10104391_B_Olfr243
  gRNA
tgcatcttaccaaaaatgtt

SEQ ID NO: 104392 - DNA, 20 bp, Artificial Sequence
  MKO10104392_B_Olfr247
  gRNA
aattgttcctgctccacaaa

SEQ ID NO: 104393 - DNA, 20 bp, Artificial Sequence
  MKO10104393_B_Olfr247
  gRNA
tatggcttatgatcgctttg

SEQ ID NO: 104394 - DNA, 20 bp, Artificial Sequence
  MKO10104394_B_Olfr247
  gRNA
gagtgaagatccaggtggtc

SEQ ID NO: 104395 - DNA, 20 bp, Artificial Sequence
  MKO10104395_B_Olfr248
  gRNA
ttgcaagagcgaccatatac

SEQ ID NO: 104396 - DNA, 20 bp, Artificial Sequence
  MKO10104396_B_Olfr248
  gRNA
tgcaagcaacctgaccatca

SEQ ID NO: 104397 - DNA, 20 bp, Artificial Sequence
  MKO10104397_B_Olfr248
  gRNA
gatcaaccaaacaatcttac

SEQ ID NO: 104398 - DNA, 20 bp, Artificial Sequence
  MKO10104398_B_Olfr24
  gRNA
caagatctttgtgctcattg

SEQ ID NO: 104399 - DNA, 20 bp, Artificial Sequence
  MKO10104399_B_Olfr24
  gRNA
gcctgctggttggtgtccca

SEQ ID NO: 104400 - DNA, 20 bp, Artificial Sequence
  MKO10104400_B_Olfr24
  gRNA
atgaagcaggaatataccca

SEQ ID NO: 104401 - DNA, 20 bp, Artificial Sequence
  MKO10104401_B_Olfr250
  gRNA
tatccatttgtcatcatcta

SEQ ID NO: 104402 - DNA, 20 bp, Artificial Sequence
  MKO10104402_B_Olfr250
  gRNA
ctaaagacagttacaatcca

SEQ ID NO: 104403 - DNA, 20 bp, Artificial Sequence
  MKO10104403_B_Olfr250
  gRNA
aatgcttgctgcacacttga

SEQ ID NO: 104404 - DNA, 20 bp, Artificial Sequence
  MKO10104404_B_Olfr251
  gRNA
tcataaaccctgtatgagtc

SEQ ID NO: 104405 - DNA, 20 bp, Artificial Sequence
  MKO10104405_B_Olfr251
  gRNA
ctgtgtagtttaacaagaat

SEQ ID NO: 104406 - DNA, 20 bp, Artificial Sequence
  MKO10104406_B_Olfr251
  gRNA
cttgtgagctctgctgtagt

SEQ ID NO: 104407 - DNA, 20 bp, Artificial Sequence
  MKO10104407_B_Olfr257
  gRNA
ctgacgaatacaaaagatcc

SEQ ID NO: 104408 - DNA, 20 bp, Artificial Sequence
  MKO10104408_B_Olfr257
  gRNA
cgctacgtcatgcccacctc

SEQ ID NO: 104409 - DNA, 20 bp, Artificial Sequence
  MKO10104409_B_Olfr257
  gRNA
taccctcctagctgtgagtt

SEQ ID NO: 104410 - DNA, 20 bp, Artificial Sequence
  MKO10104410_B_Olfr259
  gRNA
aattccatgattcacacaat

SEQ ID NO: 104411 - DNA, 20 bp, Artificial Sequence
  MKO10104411_B_Olfr259
  gRNA
aacagaaaaccctaattggc

SEQ ID NO: 104412 - DNA, 20 bp, Artificial Sequence
  MKO10104412_B_Olfr259
  gRNA
tgcctcacacctaacagctg

SEQ ID NO: 104413 - DNA, 20 bp, Artificial Sequence
  MKO10104413_B_Olfr25
  gRNA
tgagtcatgcatcctgtaaa

SEQ ID NO: 104414 - DNA, 20 bp, Artificial Sequence
  MKO10104414_B_Olfr25
  gRNA
gtttgctagtgccatggttc

SEQ ID NO: 104415 - DNA, 20 bp, Artificial Sequence
  MKO10104415_B_Olfr25
  gRNA
ttgtaagcctttactgtaca

SEQ ID NO: 104416 - DNA, 20 bp, Artificial Sequence
  MKO10104416_B_Olfr262
  gRNA
aacatagcaaagatctatga

SEQ ID NO: 104417 - DNA, 20 bp, Artificial Sequence
  MKO10104417_B_Olfr262
  gRNA
gtaaatctgtgaatcccaag

SEQ ID NO: 104418 - DNA, 20 bp, Artificial Sequence
  MKO10104418_B_Olfr262
  gRNA
acaagactcactcaacccca

SEQ ID NO: 104419 - DNA, 20 bp, Artificial Sequence
  MKO10104419_B_Olfr263
  gRNA
aggatgttgtgtccacatcg

SEQ ID NO: 104420 - DNA, 20 bp, Artificial Sequence
  MKO10104420_B_Olfr263
  gRNA
atgcactgaaaaaactcatg

SEQ ID NO: 104421 - DNA, 20 bp, Artificial Sequence
  MKO10104421_B_Olfr263
  gRNA
cttctagtttctccttactt

SEQ ID NO: 104422 - DNA, 20 bp, Artificial Sequence
  MKO10104422_B_Olfr266
  gRNA
gttggctgagggcacaagat

SEQ ID NO: 104423 - DNA, 20 bp, Artificial Sequence
  MKO10104423_B_Olfr266
  gRNA
cgataccccatcctcatgac

SEQ ID NO: 104424 - DNA, 20 bp, Artificial Sequence
  MKO10104424_B_Olfr266
  gRNA
atagtggagtttgttcttcg

SEQ ID NO: 104425 - DNA, 20 bp, Artificial Sequence
  MKO10104425_B_Olfr267
  gRNA
cttcagccttgtcatgtatc

SEQ ID NO: 104426 - DNA, 20 bp, Artificial Sequence
  MKO10104426_B_Olfr267
  gRNA
cgccagaagtatacactctg

SEQ ID NO: 104427 - DNA, 20 bp, Artificial Sequence
  MKO10104427_B_Olfr267
  gRNA
tactgaccaccagcataacc

SEQ ID NO: 104428 - DNA, 20 bp, Artificial Sequence
  MKO10104428_B_Olfr26
  gRNA
attatcaaagaatgggcact

SEQ ID NO: 104429 - DNA, 20 bp, Artificial Sequence
  MKO10104429_B_Olfr26
  gRNA
gagcttctcctatttattat

SEQ ID NO: 104430 - DNA, 20 bp, Artificial Sequence
  MKO10104430_B_Olfr26
  gRNA
attgagatgtgtgttagaac

SEQ ID NO: 104431 - DNA, 20 bp, Artificial Sequence
  MKO10104431_B_Olfr270
  gRNA
ccatttgtagagcacaacca

SEQ ID NO: 104432 - DNA, 20 bp, Artificial Sequence
  MKO10104432_B_Olfr270
  gRNA
attcagacagcctatgaccc

SEQ ID NO: 104433 - DNA, 20 bp, Artificial Sequence
  MKO10104433_B_Olfr270
  gRNA
caaagtattatatgtgcaca

SEQ ID NO: 104434 - DNA, 20 bp, Artificial Sequence
  MKO10104434_B_Olfr272
  gRNA
aataaaaccgtctgcagctt

SEQ ID NO: 104435 - DNA, 20 bp, Artificial Sequence
  MKO10104435_B_Olfr272
  gRNA
atcaacgtgatcagcctaac

SEQ ID NO: 104436 - DNA, 20 bp, Artificial Sequence
  MKO10104436_B_Olfr272
  gRNA
gggcctccatcacgctttga

SEQ ID NO: 104437 - DNA, 20 bp, Artificial Sequence
  MKO10104437_B_Olfr273
  gRNA
ggccatatttgatatgacca

SEQ ID NO: 104438 - DNA, 20 bp, Artificial Sequence
  MKO10104438_B_Olfr273
  gRNA
cccaaatctcaagatctgac

SEQ ID NO: 104439 - DNA, 20 bp, Artificial Sequence
  MKO10104439_B_Olfr273
  gRNA
gctgccagagaaccatgatg

SEQ ID NO: 104440 - DNA, 20 bp, Artificial Sequence
  MKO10104440_B_Olfr275
  gRNA
aagagagaagtacatctgcg

SEQ ID NO: 104441 - DNA, 20 bp, Artificial Sequence
  MKO10104441_B_Olfr275
  gRNA
gaccctcctgttcataataa

SEQ ID NO: 104442 - DNA, 20 bp, Artificial Sequence
  MKO10104442_B_Olfr275
  gRNA
ttctgctctcactcctatgc

SEQ ID NO: 104443 - DNA, 20 bp, Artificial Sequence
  MKO10104443_B_Olfr279
  gRNA
atgtgtagccgatctccagc

SEQ ID NO: 104444 - DNA, 20 bp, Artificial Sequence
  MKO10104444_B_Olfr279
  gRNA
agcacatgcccgccttgctc

SEQ ID NO: 104445 - DNA, 20 bp, Artificial Sequence
  MKO10104445_B_Olfr279
  gRNA
tcatgaggaccgggtaatga

SEQ ID NO: 104446 - DNA, 20 bp, Artificial Sequence
  MKO10104446_B_Olfr27
  gRNA
aagaacatcatctcttactc

SEQ ID NO: 104447 - DNA, 20 bp, Artificial Sequence
  MKO10104447_B_Olfr27
  gRNA
aagcatgaagccagtgttta

SEQ ID NO: 104448 - DNA, 20 bp, Artificial Sequence
  MKO10104448_B_Olfr27
  gRNA
ccatcctctgcattcactcc

SEQ ID NO: 104449 - DNA, 20 bp, Artificial Sequence
  MKO10104449_B_Olfr281
  gRNA
cagcagcttcggtaccgtga

SEQ ID NO: 104450 - DNA, 20 bp, Artificial Sequence
  MKO10104450_B_Olfr281
  gRNA
acagcgcgaaaagtagagcc

SEQ ID NO: 104451 - DNA, 20 bp, Artificial Sequence
  MKO10104451_B_Olfr281
  gRNA
cataagataacgaatcaagc

SEQ ID NO: 104452 - DNA, 20 bp, Artificial Sequence
  MKO10104452_B_Olfr282
  gRNA
tgtggtcatctcatggggcg

SEQ ID NO: 104453 - DNA, 20 bp, Artificial Sequence
  MKO10104453_B_Olfr282
  gRNA
agatatcggaacaggacaag

SEQ ID NO: 104454 - DNA, 20 bp, Artificial Sequence
  MKO10104454_B_Olfr282
  gRNA
ttgagcatcagttccaccac

SEQ ID NO: 104455 - DNA, 20 bp, Artificial Sequence
  MKO10104455_B_Olfr283
  gRNA
cgtgaccgttcttctcacag

SEQ ID NO: 104456 - DNA, 20 bp, Artificial Sequence
  MKO10104456_B_Olfr283
  gRNA
gtcttctttgtgttcgctac

SEQ ID NO: 104457 - DNA, 20 bp, Artificial Sequence
  MKO10104457_B_Olfr283
  gRNA
cgctacctcatgccaaattc

SEQ ID NO: 104458 - DNA, 20 bp, Artificial Sequence
  MKO10104458_B_Olfr284
  gRNA
tatgaccgctacgttgccat

SEQ ID NO: 104459 - DNA, 20 bp, Artificial Sequence
  MKO10104459_B_Olfr284
  gRNA
gtttatcagttatctcttac

SEQ ID NO: 104460 - DNA, 20 bp, Artificial Sequence
  MKO10104460_B_Olfr284
  gRNA
ggcctgtctgcttgcagcga

SEQ ID NO: 104461 - DNA, 20 bp, Artificial Sequence
  MKO10104461_B_Olfr285
  gRNA
ctgacgaatacaaaagatcc

SEQ ID NO: 104462 - DNA, 20 bp, Artificial Sequence
  MKO10104462_B_Olfr285
  gRNA
cgctacgtcatgcccacctc

SEQ ID NO: 104463 - DNA, 20 bp, Artificial Sequence
  MKO10104463_B_Olfr285
  gRNA
taccctcctagctgtgagtt

SEQ ID NO: 104464 - DNA, 20 bp, Artificial Sequence
  MKO10104464_B_Olfr286
  gRNA
ggtcctgtcgatccttacat

SEQ ID NO: 104465 - DNA, 20 bp, Artificial Sequence
  MKO10104465_B_Olfr286
  gRNA
gccgagctttgtacaccatg

SEQ ID NO: 104466 - DNA, 20 bp, Artificial Sequence
  MKO10104466_B_Olfr286
  gRNA
tttctctgcagaacggacct

SEQ ID NO: 104467 - DNA, 20 bp, Artificial Sequence
  MKO10104467_B_Olfr287
  gRNA
aaatgaagggggctatgggg

SEQ ID NO: 104468 - DNA, 20 bp, Artificial Sequence
  MKO10104468_B_Olfr287
  gRNA
ctccgcagggcctcctcctc

SEQ ID NO: 104469 - DNA, 20 bp, Artificial Sequence
  MKO10104469_B_Olfr287
  gRNA
tgtgactgagttcatcctcg

SEQ ID NO: 104470 - DNA, 20 bp, Artificial Sequence
  MKO10104470_B_Olfr288
  gRNA
aagtagaaaaggtcttccta

SEQ ID NO: 104471 - DNA, 20 bp, Artificial Sequence
  MKO10104471_B_Olfr288
  gRNA
ttgaggaggaggccctgtgg

SEQ ID NO: 104472 - DNA, 20 bp, Artificial Sequence
  MKO10104472_B_Olfr288
  gRNA
tgggagaggcagcctggctt

SEQ ID NO: 104473 - DNA, 20 bp, Artificial Sequence
  MKO10104473_B_Olfr290
  gRNA
cagtcccagctagagccacc

SEQ ID NO: 104474 - DNA, 20 bp, Artificial Sequence
  MKO10104474_B_Olfr290
  gRNA
aactcccatgtattacctgt

SEQ ID NO: 104475 - DNA, 20 bp, Artificial Sequence
  MKO10104475_B_Olfr290
  gRNA
atttgccaacaggtaataca

SEQ ID NO: 104476 - DNA, 20 bp, Artificial Sequence
  MKO10104476_B_Olfr291
  gRNA
ttagtgatagcaagtatctt

SEQ ID NO: 104477 - DNA, 20 bp, Artificial Sequence
  MKO10104477_B_Olfr291
  gRNA
aagaagcacttctgccatat

SEQ ID NO: 104478 - DNA, 20 bp, Artificial Sequence
  MKO10104478_B_Olfr291
  gRNA
tgcgctttccttctgctgac

SEQ ID NO: 104479 - DNA, 20 bp, Artificial Sequence
  MKO10104479_B_Olfr292
  gRNA
ataatcacaggatacatgag

SEQ ID NO: 104480 - DNA, 20 bp, Artificial Sequence
  MKO10104480_B_Olfr292
  gRNA
tgatgataagattcccaaac

SEQ ID NO: 104481 - DNA, 20 bp, Artificial Sequence
  MKO10104481_B_Olfr292
  gRNA
agcaatcccagaaataattg

SEQ ID NO: 104482 - DNA, 20 bp, Artificial Sequence
  MKO10104482_B_Olfr293
  gRNA
tgtacatgggaagcctgtta

SEQ ID NO: 104483 - DNA, 20 bp, Artificial Sequence
  MKO10104483_B_Olfr293
  gRNA
aagacctccagtagtaacat

SEQ ID NO: 104484 - DNA, 20 bp, Artificial Sequence
  MKO10104484_B_Olfr293
  gRNA
agcatatgatatagcaatga

SEQ ID NO: 104485 - DNA, 20 bp, Artificial Sequence
  MKO10104485_B_Olfr294
  gRNA
aaatgtgaggcactatacca

SEQ ID NO: 104486 - DNA, 20 bp, Artificial Sequence
  MKO10104486_B_Olfr294
  gRNA
gagttctaagtatctgtcca

SEQ ID NO: 104487 - DNA, 20 bp, Artificial Sequence
  MKO10104487_B_Olfr294
  gRNA
tgatgagcgtgatgagaagt

SEQ ID NO: 104488 - DNA, 20 bp, Artificial Sequence
  MKO10104488_B_Olfr295
  gRNA
atttctttggctgggtgtgc

SEQ ID NO: 104489 - DNA, 20 bp, Artificial Sequence
  MKO10104489_B_Olfr295
  gRNA
agcaatctcagaaatagttg

SEQ ID NO: 104490 - DNA, 20 bp, Artificial Sequence
  MKO10104490_B_Olfr295
  gRNA
acaagaacagcacagtgagt

SEQ ID NO: 104491 - DNA, 20 bp, Artificial Sequence
  MKO10104491_B_Olfr297
  gRNA
cttacctcacttatcctttc

SEQ ID NO: 104492 - DNA, 20 bp, Artificial Sequence
  MKO10104492_B_Olfr297
  gRNA
tgaaagtgttcatacctgaa

SEQ ID NO: 104493 - DNA, 20 bp, Artificial Sequence
  MKO10104493_B_Olfr297
  gRNA
aacatagcacatgtctaaga

SEQ ID NO: 104494 - DNA, 20 bp, Artificial Sequence
  MKO10104494_B_Olfr298
  gRNA
caacaaaatctctgtccaag

SEQ ID NO: 104495 - DNA, 20 bp, Artificial Sequence
  MKO10104495_B_Olfr298
  gRNA
tccaatgacactagaataac

SEQ ID NO: 104496 - DNA, 20 bp, Artificial Sequence
  MKO10104496_B_Olfr298
  gRNA
gcttgacatcactatttctc

SEQ ID NO: 104497 - DNA, 20 bp, Artificial Sequence
  MKO10104497_B_Olfr299
  gRNA
accaacattagaagtagtta

SEQ ID NO: 104498 - DNA, 20 bp, Artificial Sequence
  MKO10104498_B_Olfr299
  gRNA
ctaatctctgccattatcat

SEQ ID NO: 104499 - DNA, 20 bp, Artificial Sequence
  MKO10104499_B_Olfr299
  gRNA
gcttgtttcaactctctcac

SEQ ID NO: 104500 - DNA, 20 bp, Artificial Sequence
  MKO10104500_B_Olfr2
  gRNA
aaaaatagtagtgcccgcag

SEQ ID NO: 104501 - DNA, 20 bp, Artificial Sequence
  MKO10104501_B_Olfr2
  gRNA
ttcagtcagcaccaacacgt

SEQ ID NO: 104502 - DNA, 20 bp, Artificial Sequence
  MKO10104502_B_Olfr2
  gRNA
attggttccgaggagaatca

SEQ ID NO: 104503 - DNA, 20 bp, Artificial Sequence
  MKO10104503_B_Olfr301
  gRNA
gcagctaccactgaccaaaa

SEQ ID NO: 104504 - DNA, 20 bp, Artificial Sequence
  MKO10104504_B_Olfr301
  gRNA
aacgtagcatatatctaaaa

SEQ ID NO: 104505 - DNA, 20 bp, Artificial Sequence
  MKO10104505_B_Olfr301
  gRNA
aattaggagtttgttattaa

SEQ ID NO: 104506 - DNA, 20 bp, Artificial Sequence
  MKO10104506_B_Olfr303
  gRNA
attgtgaagttgtacttagc

SEQ ID NO: 104507 - DNA, 20 bp, Artificial Sequence
  MKO10104507_B_Olfr303
  gRNA
tgtgaccacgatgttgccat

SEQ ID NO: 104508 - DNA, 20 bp, Artificial Sequence
  MKO10104508_B_Olfr303
  gRNA
cttctcacaatgagctccta

SEQ ID NO: 104509 - DNA, 20 bp, Artificial Sequence
  MKO10104509_B_Olfr304
  gRNA
cccaatgacactagagtaac

SEQ ID NO: 104510 - DNA, 20 bp, Artificial Sequence
  MKO10104510_B_Olfr304
  gRNA
atgattgcctcataacacag

SEQ ID NO: 104511 - DNA, 20 bp, Artificial Sequence
  MKO10104511_B_Olfr304
  gRNA
acacttgcttgtaacttgtg

SEQ ID NO: 104512 - DNA, 20 bp, Artificial Sequence
  MKO10104512_B_Olfr305
  gRNA
gtgatgttccatcactctta

SEQ ID NO: 104513 - DNA, 20 bp, Artificial Sequence
  MKO10104513_B_Olfr305
  gRNA
caaatacttctcctgatcca

SEQ ID NO: 104514 - DNA, 20 bp, Artificial Sequence
  MKO10104514_B_Olfr305
  gRNA
ctgaaatgcacatccaagta

SEQ ID NO: 104515 - DNA, 20 bp, Artificial Sequence
  MKO10104515_B_Olfr307
  gRNA
cgtcaggagaaatccagtga

SEQ ID NO: 104516 - DNA, 20 bp, Artificial Sequence
  MKO10104516_B_Olfr307
  gRNA
taataattctatttccgttc

SEQ ID NO: 104517 - DNA, 20 bp, Artificial Sequence
  MKO10104517_B_Olfr307
  gRNA
gggcttccaggtatatccca

SEQ ID NO: 104518 - DNA, 20 bp, Artificial Sequence
  MKO10104518_B_Olfr308
  gRNA
gcagactgttcataatagtc

SEQ ID NO: 104519 - DNA, 20 bp, Artificial Sequence
  MKO10104519_B_Olfr308
  gRNA
taatatggcaatcttgctat

SEQ ID NO: 104520 - DNA, 20 bp, Artificial Sequence
  MKO10104520_B_Olfr308
  gRNA
accagatctctaagaatgac

SEQ ID NO: 104521 - DNA, 20 bp, Artificial Sequence
  MKO10104521_B_Olfr309
  gRNA
acccaatagtatatagcttc

SEQ ID NO: 104522 - DNA, 20 bp, Artificial Sequence
  MKO10104522_B_Olfr309
  gRNA
ctattgctgtaaccaattcc

SEQ ID NO: 104523 - DNA, 20 bp, Artificial Sequence
  MKO10104523_B_Olfr309
  gRNA
taccaccttgtctttatcaa

SEQ ID NO: 104524 - DNA, 20 bp, Artificial Sequence
  MKO10104524_B_Olfr30
  gRNA
gatcttccgtgatccacagt

SEQ ID NO: 104525 - DNA, 20 bp, Artificial Sequence
  MKO10104525_B_Olfr30
  gRNA
ggttggacgagcatctcttt

SEQ ID NO: 104526 - DNA, 20 bp, Artificial Sequence
  MKO10104526_B_Olfr30
  gRNA
tgctcatggtcgtggcctcc

SEQ ID NO: 104527 - DNA, 20 bp, Artificial Sequence
  MKO10104527_B_Olfr310
  gRNA
aatgtagcccatgtctaaaa

SEQ ID NO: 104528 - DNA, 20 bp, Artificial Sequence
  MKO10104528_B_Olfr310
  gRNA
tgtgcacacttgcaatgaca

SEQ ID NO: 104529 - DNA, 20 bp, Artificial Sequence
  MKO10104529_B_Olfr310
  gRNA
ctcagtcactagggtggaat

SEQ ID NO: 104530 - DNA, 20 bp, Artificial Sequence
  MKO10104530_B_Olfr311
  gRNA
tccataaaacaagatgaccg

SEQ ID NO: 104531 - DNA, 20 bp, Artificial Sequence
  MKO10104531_B_Olfr311
  gRNA
gctctacagaaactttactg

SEQ ID NO: 104532 - DNA, 20 bp, Artificial Sequence
  MKO10104532_B_Olfr311
  gRNA
gagctccttcgccctcacag

SEQ ID NO: 104533 - DNA, 20 bp, Artificial Sequence
  MKO10104533_B_Olfr312
  gRNA
gtagatagctccacccaccc

SEQ ID NO: 104534 - DNA, 20 bp, Artificial Sequence
  MKO10104534_B_Olfr312
  gRNA
ccaatgcagaacaatatttc

SEQ ID NO: 104535 - DNA, 20 bp, Artificial Sequence
  MKO10104535_B_Olfr312
  gRNA
cttcgcatcccctcagtaga

SEQ ID NO: 104536 - DNA, 20 bp, Artificial Sequence
  MKO10104536_B_Olfr313
  gRNA
agcccacctcctcactgaga

SEQ ID NO: 104537 - DNA, 20 bp, Artificial Sequence
  MKO10104537_B_Olfr313
  gRNA
tgtatgaaaggctgagtaga

SEQ ID NO: 104538 - DNA, 20 bp, Artificial Sequence
  MKO10104538_B_Olfr313
  gRNA
ctttgcatcccctcagtaga

SEQ ID NO: 104539 - DNA, 20 bp, Artificial Sequence
  MKO10104539_B_Olfr314
  gRNA
gtgtgtggagccggcggtcc

SEQ ID NO: 104540 - DNA, 20 bp, Artificial Sequence
  MKO10104540_B_Olfr314
  gRNA
ctgtgctgccctaactagta

SEQ ID NO: 104541 - DNA, 20 bp, Artificial Sequence
  MKO10104541_B_Olfr314
  gRNA
atgctgacactaccttatcg

SEQ ID NO: 104542 - DNA, 20 bp, Artificial Sequence
  MKO10104542_B_Olfr315
  gRNA
actcgccccctgccaaagtg

SEQ ID NO: 104543 - DNA, 20 bp, Artificial Sequence
  MKO10104543_B_Olfr315
  gRNA
tctcgtgctcgtcaagtagt

SEQ ID NO: 104544 - DNA, 20 bp, Artificial Sequence
  MKO10104544_B_Olfr315
  gRNA
gatcccgctgtccctcgtcc

SEQ ID NO: 104545 - DNA, 20 bp, Artificial Sequence
  MKO10104545_B_Olfr316
  gRNA
atcctggaaaagaccaacca

SEQ ID NO: 104546 - DNA, 20 bp, Artificial Sequence
  MKO10104546_B_Olfr316
  gRNA
gagtcaggaaaccgcagctg

SEQ ID NO: 104547 - DNA, 20 bp, Artificial Sequence
  MKO10104547_B_Olfr316
  gRNA
ttcatttcatttgtctcctc

SEQ ID NO: 104548 - DNA, 20 bp, Artificial Sequence
  MKO10104548_B_Olfr317
  gRNA
actctcagcctaccccgctg

SEQ ID NO: 104549 - DNA, 20 bp, Artificial Sequence
  MKO10104549_B_Olfr317
  gRNA
aagtaagggctagttctaga

SEQ ID NO: 104550 - DNA, 20 bp, Artificial Sequence
  MKO10104550_B_Olfr317
  gRNA
ttgcgaatcagctcagctgc

SEQ ID NO: 104551 - DNA, 20 bp, Artificial Sequence
  MKO10104551_B_Olfr318
  gRNA
ttggactgcacagcccagaa

SEQ ID NO: 104552 - DNA, 20 bp, Artificial Sequence
  MKO10104552_B_Olfr318
  gRNA
ccacactccttacattctcc

SEQ ID NO: 104553 - DNA, 20 bp, Artificial Sequence
  MKO10104553_B_Olfr318
  gRNA
tctcatgggcaacatcacac

SEQ ID NO: 104554 - DNA, 20 bp, Artificial Sequence
  MKO10104554_B_Olfr319
  gRNA
tgacaatcatatgctcatat

SEQ ID NO: 104555 - DNA, 20 bp, Artificial Sequence
  MKO10104555_B_Olfr319
  gRNA
aggaggtcattggggcgctg

SEQ ID NO: 104556 - DNA, 20 bp, Artificial Sequence
  MKO10104556_B_Olfr319
  gRNA
tttatgtttatgagtcttgc

SEQ ID NO: 104557 - DNA, 20 bp, Artificial Sequence
  MKO10104557_B_Olfr31
  gRNA
ccccatgaaagtgaagtccg

SEQ ID NO: 104558 - DNA, 20 bp, Artificial Sequence
  MKO10104558_B_Olfr31
  gRNA
atctctcgtgatctacagaa

SEQ ID NO: 104559 - DNA, 20 bp, Artificial Sequence
  MKO10104559_B_Olfr31
  gRNA
aagataatcaactagcatct

SEQ ID NO: 104560 - DNA, 20 bp, Artificial Sequence
  MKO10104560_B_Olfr320
  gRNA
gtctgcagtccagcctgatg

SEQ ID NO: 104561 - DNA, 20 bp, Artificial Sequence
  MKO10104561_B_Olfr320
  gRNA
gagacaggaaaccgcagctg

SEQ ID NO: 104562 - DNA, 20 bp, Artificial Sequence
  MKO10104562_B_Olfr320
  gRNA
gccactactttgtcccttcc

SEQ ID NO: 104563 - DNA, 20 bp, Artificial Sequence
  MKO10104563_B_Olfr322
  gRNA
gcccgcagcggggtagactg

SEQ ID NO: 104564 - DNA, 20 bp, Artificial Sequence
  MKO10104564_B_Olfr322
  gRNA
ctgtgtcaacactgccgcag

SEQ ID NO: 104565 - DNA, 20 bp, Artificial Sequence
  MKO10104565_B_Olfr322
  gRNA
cttctctgaccggcccgagc

SEQ ID NO: 104566 - DNA, 20 bp, Artificial Sequence
  MKO10104566_B_Olfr323
  gRNA
gatcatggtcccgtagtaga

SEQ ID NO: 104567 - DNA, 20 bp, Artificial Sequence
  MKO10104567_B_Olfr323
  gRNA
gaaatgaccttgttgagttc

SEQ ID NO: 104568 - DNA, 20 bp, Artificial Sequence
  MKO10104568_B_Olfr323
  gRNA
gatcaccatgttgcctgtaa

SEQ ID NO: 104569 - DNA, 20 bp, Artificial Sequence
  MKO10104569_B_Olfr324
  gRNA
caagtccctttactccgccg

SEQ ID NO: 104570 - DNA, 20 bp, Artificial Sequence
  MKO10104570_B_Olfr324
  gRNA
aggccatgatggccgttgga

SEQ ID NO: 104571 - DNA, 20 bp, Artificial Sequence
  MKO10104571_B_Olfr324
  gRNA
ccgtgctgaagaatccattg

SEQ ID NO: 104572 - DNA, 20 bp, Artificial Sequence
  MKO10104572_B_Olfr325
  gRNA
tcctgctgatgtctttatgt

SEQ ID NO: 104573 - DNA, 20 bp, Artificial Sequence
  MKO10104573_B_Olfr325
  gRNA
ggcacaccctgtggttcatg

SEQ ID NO: 104574 - DNA, 20 bp, Artificial Sequence
  MKO10104574_B_Olfr325
  gRNA
ctccctccacagccctgaga

SEQ ID NO: 104575 - DNA, 20 bp, Artificial Sequence
  MKO10104575_B_Olfr328
  gRNA
gacaaatcctgtggttcatg

SEQ ID NO: 104576 - DNA, 20 bp, Artificial Sequence
  MKO10104576_B_Olfr328
  gRNA
gttcaacagaggggtgacta

SEQ ID NO: 104577 - DNA, 20 bp, Artificial Sequence
  MKO10104577_B_Olfr328
  gRNA
taaagccatccaaagatccc

SEQ ID NO: 104578 - DNA, 20 bp, Artificial Sequence
  MKO10104578_B_Olfr329-ps
  gRNA
ctccaagttcatctcctcac

SEQ ID NO: 104579 - DNA, 20 bp, Artificial Sequence
  MKO10104579_B_Olfr329-ps
  gRNA
ctgatgcagagaacacagca

SEQ ID NO: 104580 - DNA, 20 bp, Artificial Sequence
  MKO10104580_B_Olfr329-ps
  gRNA
ggagaagcagagaccagaaa

SEQ ID NO: 104581 - DNA, 20 bp, Artificial Sequence
  MKO10104581_B_Olfr32
  gRNA
gacaaccaccatgatgtgag

SEQ ID NO: 104582 - DNA, 20 bp, Artificial Sequence
  MKO10104582_B_Olfr32
  gRNA
caccacaaaagtgtcagtgc

SEQ ID NO: 104583 - DNA, 20 bp, Artificial Sequence
  MKO10104583_B_Olfr32
  gRNA
ccaacttgaataagggatgg

SEQ ID NO: 104584 - DNA, 20 bp, Artificial Sequence
  MKO10104584_B_Olfr330
  gRNA
agatagcagcaccatagaag

SEQ ID NO: 104585 - DNA, 20 bp, Artificial Sequence
  MKO10104585_B_Olfr330
  gRNA
tgaagccatccaaagatccc

SEQ ID NO: 104586 - DNA, 20 bp, Artificial Sequence
  MKO10104586_B_Olfr330
  gRNA
tccaacagacagacatcagg

SEQ ID NO: 104587 - DNA, 20 bp, Artificial Sequence
  MKO10104587_B_Olfr331
  gRNA
tcctgctgatgtctgtctgt

SEQ ID NO: 104588 - DNA, 20 bp, Artificial Sequence
  MKO10104588_B_Olfr331
  gRNA
atactggagtggatgacaga

SEQ ID NO: 104589 - DNA, 20 bp, Artificial Sequence
  MKO10104589_B_Olfr331
  gRNA
tgtggaggtggattggtatg

SEQ ID NO: 104590 - DNA, 20 bp, Artificial Sequence
  MKO10104590_B_Olfr332
  gRNA
gccagatgaggagtatcaag

SEQ ID NO: 104591 - DNA, 20 bp, Artificial Sequence
  MKO10104591_B_Olfr332
  gRNA
ccctcttgatactcctcatc

SEQ ID NO: 104592 - DNA, 20 bp, Artificial Sequence
  MKO10104592_B_Olfr332
  gRNA
aactgctccgatccaggtgg

SEQ ID NO: 104593 - DNA, 20 bp, Artificial Sequence
  MKO10104593_B_Olfr338
  gRNA
agcttgatcctctgctcgaa

SEQ ID NO: 104594 - DNA, 20 bp, Artificial Sequence
  MKO10104594_B_Olfr338
  gRNA
agacaccaccatcaatcaac

SEQ ID NO: 104595 - DNA, 20 bp, Artificial Sequence
  MKO10104595_B_Olfr338
  gRNA
aaactgtgaaaaaatactcc

SEQ ID NO: 104596 - DNA, 20 bp, Artificial Sequence
  MKO10104596_B_Olfr339
  gRNA
tcaggacagagtacaaagct

SEQ ID NO: 104597 - DNA, 20 bp, Artificial Sequence
  MKO10104597_B_Olfr339
  gRNA
tttgtactctgtcctgatcc

SEQ ID NO: 104598 - DNA, 20 bp, Artificial Sequence
  MKO10104598_B_Olfr339
  gRNA
ataacatcatcatgaatctg

SEQ ID NO: 104599 - DNA, 20 bp, Artificial Sequence
  MKO10104599_B_Olfr33
  gRNA
ccatgttcagagtgctaagt

SEQ ID NO: 104600 - DNA, 20 bp, Artificial Sequence
  MKO10104600_B_Olfr33
  gRNA
cctacttagcactctgaaca

SEQ ID NO: 104601 - DNA, 20 bp, Artificial Sequence
  MKO10104601_B_Olfr33
  gRNA
gtaagagggacaaagtagct

SEQ ID NO: 104602 - DNA, 20 bp, Artificial Sequence
  MKO10104602_B_Olfr340
  gRNA
ttcttctaatagtagtatcc

SEQ ID NO: 104603 - DNA, 20 bp, Artificial Sequence
  MKO10104603_B_Olfr340
  gRNA
gcgctgagaaatatcctcag

SEQ ID NO: 104604 - DNA, 20 bp, Artificial Sequence
  MKO10104604_B_Olfr340
  gRNA
tcataatggtgacaccaatg

SEQ ID NO: 104605 - DNA, 20 bp, Artificial Sequence
  MKO10104605_B_Olfr341
  gRNA
attggcagaggataaaaccc

SEQ ID NO: 104606 - DNA, 20 bp, Artificial Sequence
  MKO10104606_B_Olfr341
  gRNA
cccattcagccagaggatca

SEQ ID NO: 104607 - DNA, 20 bp, Artificial Sequence
  MKO10104607_B_Olfr341
  gRNA
cattgagaaatatcctcaac

SEQ ID NO: 104608 - DNA, 20 bp, Artificial Sequence
  MKO10104608_B_Olfr342
  gRNA
tcagaattgtgacacctata

SEQ ID NO: 104609 - DNA, 20 bp, Artificial Sequence
  MKO10104609_B_Olfr342
  gRNA
aagggcattgcctgaagata

SEQ ID NO: 104610 - DNA, 20 bp, Artificial Sequence
  MKO10104610_B_Olfr342
  gRNA
acccagcatatgagatagat

SEQ ID NO: 104611 - DNA, 20 bp, Artificial Sequence
  MKO10104611_B_Olfr344
  gRNA
agtcacagttccaaagatgc

SEQ ID NO: 104612 - DNA, 20 bp, Artificial Sequence
  MKO10104612_B_Olfr344
  gRNA
agcctctgtgttcttctagt

SEQ ID NO: 104613 - DNA, 20 bp, Artificial Sequence
  MKO10104613_B_Olfr344
  gRNA
tgactgcattacctaaaaca

SEQ ID NO: 104614 - DNA, 20 bp, Artificial Sequence
  MKO10104614_B_Olfr345
  gRNA
cccattcgagcagaggaaca

SEQ ID NO: 104615 - DNA, 20 bp, Artificial Sequence
  MKO10104615_B_Olfr345
  gRNA
ttcttctagtacttgtatcc

SEQ ID NO: 104616 - DNA, 20 bp, Artificial Sequence
  MKO10104616_B_Olfr345
  gRNA
atgaacacagtctcctacca

SEQ ID NO: 104617 - DNA, 20 bp, Artificial Sequence
  MKO10104617_B_Olfr346
  gRNA
tgagcttgacagcttaagca

SEQ ID NO: 104618 - DNA, 20 bp, Artificial Sequence
  MKO10104618_B_Olfr346
  gRNA
agcatattcacaagcatcct

SEQ ID NO: 104619 - DNA, 20 bp, Artificial Sequence
  MKO10104619_B_Olfr346
  gRNA
tctcatcagtcactgttcca

SEQ ID NO: 104620 - DNA, 20 bp, Artificial Sequence
  MKO10104620_B_Olfr347
  gRNA
aagaagtataaccagcttgt

SEQ ID NO: 104621 - DNA, 20 bp, Artificial Sequence
  MKO10104621_B_Olfr347
  gRNA
atcattgtggtatagtgtag

SEQ ID NO: 104622 - DNA, 20 bp, Artificial Sequence
  MKO10104622_B_Olfr347
  gRNA
tcagaatggtgacagctatg

SEQ ID NO: 104623 - DNA, 20 bp, Artificial Sequence
  MKO10104623_B_Olfr348
  gRNA
gagcttgtcattcttgttgt

SEQ ID NO: 104624 - DNA, 20 bp, Artificial Sequence
  MKO10104624_B_Olfr348
  gRNA
ctagaagaatagtgtgcaca

SEQ ID NO: 104625 - DNA, 20 bp, Artificial Sequence
  MKO10104625_B_Olfr348
  gRNA
tgtgccatttgtatgcattc

SEQ ID NO: 104626 - DNA, 20 bp, Artificial Sequence
  MKO10104626_B_Olfr350
  gRNA
gatcatatgccattgaagtg

SEQ ID NO: 104627 - DNA, 20 bp, Artificial Sequence
  MKO10104627_B_Olfr350
  gRNA
tttcatattattcactgatc

SEQ ID NO: 104628 - DNA, 20 bp, Artificial Sequence
  MKO10104628_B_Olfr350
  gRNA
agacatctccctcaatgaac

SEQ ID NO: 104629 - DNA, 20 bp, Artificial Sequence
  MKO10104629_B_Olfr351
  gRNA
cattgtatttgccatcctaa

SEQ ID NO: 104630 - DNA, 20 bp, Artificial Sequence
  MKO10104630_B_Olfr351
  gRNA
cttagggggtacagtactca

SEQ ID NO: 104631 - DNA, 20 bp, Artificial Sequence
  MKO10104631_B_Olfr351
  gRNA
cactcatgtcaatgaactta

SEQ ID NO: 104632 - DNA, 20 bp, Artificial Sequence
  MKO10104632_B_Olfr352
  gRNA
cagtcagtccatctcatata

SEQ ID NO: 104633 - DNA, 20 bp, Artificial Sequence
  MKO10104633_B_Olfr352
  gRNA
tactactgttaattgtgtcc

SEQ ID NO: 104634 - DNA, 20 bp, Artificial Sequence
  MKO10104634_B_Olfr352
  gRNA
gagtacatgccattcagttc

SEQ ID NO: 104635 - DNA, 20 bp, Artificial Sequence
  MKO10104635_B_Olfr353
  gRNA
tgctacaacatccttctccg

SEQ ID NO: 104636 - DNA, 20 bp, Artificial Sequence
  MKO10104636_B_Olfr353
  gRNA
gtcaatgagttagtgctttc

SEQ ID NO: 104637 - DNA, 20 bp, Artificial Sequence
  MKO10104637_B_Olfr353
  gRNA
gtgggtcacagctaatagct

SEQ ID NO: 104638 - DNA, 20 bp, Artificial Sequence
  MKO10104638_B_Olfr354
  gRNA
acagcattaatgcacaaagt

SEQ ID NO: 104639 - DNA, 20 bp, Artificial Sequence
  MKO10104639_B_Olfr354
  gRNA
gtgttgggtatcccttcttc

SEQ ID NO: 104640 - DNA, 20 bp, Artificial Sequence
  MKO10104640_B_Olfr354
  gRNA
aatagaagaggctgctcccc

SEQ ID NO: 104641 - DNA, 20 bp, Artificial Sequence
  MKO10104641_B_Olfr355
  gRNA
tgtaacaaggattctgatgt

SEQ ID NO: 104642 - DNA, 20 bp, Artificial Sequence
  MKO10104642_B_Olfr355
  gRNA
ttgacagtataagtagacac

SEQ ID NO: 104643 - DNA, 20 bp, Artificial Sequence
  MKO10104643_B_Olfr355
  gRNA
taacagtgatagctgtcttc

SEQ ID NO: 104644 - DNA, 20 bp, Artificial Sequence
  MKO10104644_B_Olfr356
  gRNA
catctagtccaatgaaccac

SEQ ID NO: 104645 - DNA, 20 bp, Artificial Sequence
  MKO10104645_B_Olfr356
  gRNA
ctatccccttcactacacct

SEQ ID NO: 104646 - DNA, 20 bp, Artificial Sequence
  MKO10104646_B_Olfr356
  gRNA
gtggatcagagacaattgcc

SEQ ID NO: 104647 - DNA, 20 bp, Artificial Sequence
  MKO10104647_B_Olfr357
  gRNA
tgtgagagtgccgtagaata

SEQ ID NO: 104648 - DNA, 20 bp, Artificial Sequence
  MKO10104648_B_Olfr357
  gRNA
gatagtcatcaatggagctc

SEQ ID NO: 104649 - DNA, 20 bp, Artificial Sequence
  MKO10104649_B_Olfr357
  gRNA
accttgatgattcatacaga

SEQ ID NO: 104650 - DNA, 20 bp, Artificial Sequence
  MKO10104650_B_Olfr358
  gRNA
aacaaaacctatgcgaatgt

SEQ ID NO: 104651 - DNA, 20 bp, Artificial Sequence
  MKO10104651_B_Olfr358
  gRNA
tcgatcctggtttaagtcat

SEQ ID NO: 104652 - DNA, 20 bp, Artificial Sequence
  MKO10104652_B_Olfr358
  gRNA
tttctttatctgagccaacc

SEQ ID NO: 104653 - DNA, 20 bp, Artificial Sequence
  MKO10104653_B_Olfr360
  gRNA
gtagccccttcttcttcatt

SEQ ID NO: 104654 - DNA, 20 bp, Artificial Sequence
  MKO10104654_B_Olfr360
  gRNA
ttctagccaaagtgccaaaa

SEQ ID NO: 104655 - DNA, 20 bp, Artificial Sequence
  MKO10104655_B_Olfr360
  gRNA
tgcacacactctctgtaaat

SEQ ID NO: 104656 - DNA, 20 bp, Artificial Sequence
  MKO10104656_B_Olfr361
  gRNA
atcttgttctagattgtagc

SEQ ID NO: 104657 - DNA, 20 bp, Artificial Sequence
  MKO10104657_B_Olfr361
  gRNA
agtatggaagttcacttgct

SEQ ID NO: 104658 - DNA, 20 bp, Artificial Sequence
  MKO10104658_B_Olfr361
  gRNA
gatttatggctactaaaaac

SEQ ID NO: 104659 - DNA, 20 bp, Artificial Sequence
  MKO10104659_B_Olfr362
  gRNA
ccacgcaagagataatacat

SEQ ID NO: 104660 - DNA, 20 bp, Artificial Sequence
  MKO10104660_B_Olfr362
  gRNA
cctatgtattatctcttgcg

SEQ ID NO: 104661 - DNA, 20 bp, Artificial Sequence
  MKO10104661_B_Olfr362
  gRNA
ggatagtcccaagtctatca

SEQ ID NO: 104662 - DNA, 20 bp, Artificial Sequence
  MKO10104662_B_Olfr365
  gRNA
ccatgaatgacaagttgcta

SEQ ID NO: 104663 - DNA, 20 bp, Artificial Sequence
  MKO10104663_B_Olfr365
  gRNA
agatgatactcccatagaac

SEQ ID NO: 104664 - DNA, 20 bp, Artificial Sequence
  MKO10104664_B_Olfr365
  gRNA
tctcagtcatgaccacaatc

SEQ ID NO: 104665 - DNA, 20 bp, Artificial Sequence
  MKO10104665_B_Olfr366
  gRNA
tgtgtagtcgggcatctctc

SEQ ID NO: 104666 - DNA, 20 bp, Artificial Sequence
  MKO10104666_B_Olfr366
  gRNA
gaccagcaaccccaaacaac

SEQ ID NO: 104667 - DNA, 20 bp, Artificial Sequence
  MKO10104667_B_Olfr366
  gRNA
tggtaaagcagatgtccacc

SEQ ID NO: 104668 - DNA, 20 bp, Artificial Sequence
  MKO10104668_B_Olfr367-ps
  gRNA
gtgaaactggccagacctcc

SEQ ID NO: 104669 - DNA, 20 bp, Artificial Sequence
  MKO10104669_B_Olfr367-ps
  gRNA
ggtggtcagagaagcccgta

SEQ ID NO: 104670 - DNA, 20 bp, Artificial Sequence
  MKO10104670_B_Olfr367-ps
  gRNA
aatgtacctggtgaccttat

SEQ ID NO: 104671 - DNA, 20 bp, Artificial Sequence
  MKO10104671_B_Olfr368
  gRNA
atcgattctgctgcccgggg

SEQ ID NO: 104672 - DNA, 20 bp, Artificial Sequence
  MKO10104672_B_Olfr368
  gRNA
tagacgtggtgacataactg

SEQ ID NO: 104673 - DNA, 20 bp, Artificial Sequence
  MKO10104673_B_Olfr368
  gRNA
tactcattcgtatagatgcc

SEQ ID NO: 104674 - DNA, 20 bp, Artificial Sequence
  MKO10104674_B_Olfr370
  gRNA
cacaatgacgaaggtgtagc

SEQ ID NO: 104675 - DNA, 20 bp, Artificial Sequence
  MKO10104675_B_Olfr370
  gRNA
ccaagaccagcgcgcaaagc

SEQ ID NO: 104676 - DNA, 20 bp, Artificial Sequence
  MKO10104676_B_Olfr370
  gRNA
ttgccaccctctgcgctaca

SEQ ID NO: 104677 - DNA, 20 bp, Artificial Sequence
  MKO10104677_B_Olfr371
  gRNA
gtatgcttataagccatgcc

SEQ ID NO: 104678 - DNA, 20 bp, Artificial Sequence
  MKO10104678_B_Olfr371
  gRNA
gagattcagtccgttctctt

SEQ ID NO: 104679 - DNA, 20 bp, Artificial Sequence
  MKO10104679_B_Olfr371
  gRNA
gggtgtacctcagttctatc

SEQ ID NO: 104680 - DNA, 20 bp, Artificial Sequence
  MKO10104680_B_Olfr372
  gRNA
ttatgggcaggtctgatttc

SEQ ID NO: 104681 - DNA, 20 bp, Artificial Sequence
  MKO10104681_B_Olfr372
  gRNA
cctgcccataaccttgacca

SEQ ID NO: 104682 - DNA, 20 bp, Artificial Sequence
  MKO10104682_B_Olfr372
  gRNA
ggcagctgtattcatgtaca

SEQ ID NO: 104683 - DNA, 20 bp, Artificial Sequence
  MKO10104683_B_Olfr373
  gRNA
tgggagctgtcctgctcatg

SEQ ID NO: 104684 - DNA, 20 bp, Artificial Sequence
  MKO10104684_B_Olfr373
  gRNA
cctgcccatgaacttgacca

SEQ ID NO: 104685 - DNA, 20 bp, Artificial Sequence
  MKO10104685_B_Olfr373
  gRNA
tcatgagcacctggtagtgc

SEQ ID NO: 104686 - DNA, 20 bp, Artificial Sequence
  MKO10104686_B_Olfr374
  gRNA
agtcctatggctacctaaca

SEQ ID NO: 104687 - DNA, 20 bp, Artificial Sequence
  MKO10104687_B_Olfr374
  gRNA
ccctgatgacctttgtccga

SEQ ID NO: 104688 - DNA, 20 bp, Artificial Sequence
  MKO10104688_B_Olfr374
  gRNA
gtgtccgagttcttgctgct

SEQ ID NO: 104689 - DNA, 20 bp, Artificial Sequence
  MKO10104689_B_Olfr376
  gRNA
tttcaaggtctgcaaaaaac

SEQ ID NO: 104690 - DNA, 20 bp, Artificial Sequence
  MKO10104690_B_Olfr376
  gRNA
tcttgcaaagaacactaatt

SEQ ID NO: 104691 - DNA, 20 bp, Artificial Sequence
  MKO10104691_B_Olfr376
  gRNA
gatgggagtccagatgaata

SEQ ID NO: 104692 - DNA, 20 bp, Artificial Sequence
  MKO10104692_B_Olfr378
  gRNA
cataagatacaatgatgaga

SEQ ID NO: 104693 - DNA, 20 bp, Artificial Sequence
  MKO10104693_B_Olfr378
  gRNA
gtattaccatcataggaaga

SEQ ID NO: 104694 - DNA, 20 bp, Artificial Sequence
  MKO10104694_B_Olfr378
  gRNA
caacctgcataaggaataga

SEQ ID NO: 104695 - DNA, 20 bp, Artificial Sequence
  MKO10104695_B_Olfr380
  gRNA
gtaagaatggaatgaccata

SEQ ID NO: 104696 - DNA, 20 bp, Artificial Sequence
  MKO10104696_B_Olfr380
  gRNA
gctgtaaagttattagctga

SEQ ID NO: 104697 - DNA, 20 bp, Artificial Sequence
  MKO10104697_B_Olfr380
  gRNA
tattgccataatgtacacag

SEQ ID NO: 104698 - DNA, 20 bp, Artificial Sequence
  MKO10104698_B_Olfr381
  gRNA
catcacccagtttattctcc

SEQ ID NO: 104699 - DNA, 20 bp, Artificial Sequence
  MKO10104699_B_Olfr381
  gRNA
ccccaagctctgtgtttgtc

SEQ ID NO: 104700 - DNA, 20 bp, Artificial Sequence
  MKO10104700_B_Olfr381
  gRNA
cataggccatgatcacaagg

SEQ ID NO: 104701 - DNA, 20 bp, Artificial Sequence
  MKO10104701_B_Olfr382
  gRNA
cataagccatgaccaaaaga

SEQ ID NO: 104702 - DNA, 20 bp, Artificial Sequence
  MKO10104702_B_Olfr382
  gRNA
ctctcatatctctattcctc

SEQ ID NO: 104703 - DNA, 20 bp, Artificial Sequence
  MKO10104703_B_Olfr382
  gRNA
cttggggtatgggcaggccc

SEQ ID NO: 104704 - DNA, 20 bp, Artificial Sequence
  MKO10104704_B_Olfr384
  gRNA
tagaacatttgctgctgctc

SEQ ID NO: 104705 - DNA, 20 bp, Artificial Sequence
  MKO10104705_B_Olfr384
  gRNA
catccctcagttcatcctcc

SEQ ID NO: 104706 - DNA, 20 bp, Artificial Sequence
  MKO10104706_B_Olfr384
  gRNA
aggcccaggaggatgaactg

SEQ ID NO: 104707 - DNA, 20 bp, Artificial Sequence
  MKO10104707_B_Olfr385
  gRNA
gattagagtcctttgcaaga

SEQ ID NO: 104708 - DNA, 20 bp, Artificial Sequence
  MKO10104708_B_Olfr385
  gRNA
aataagtacagtgtgcaatg

SEQ ID NO: 104709 - DNA, 20 bp, Artificial Sequence
  MKO10104709_B_Olfr385
  gRNA
atgatgctggtataacgaag

SEQ ID NO: 104710 - DNA, 20 bp, Artificial Sequence
  MKO10104710_B_Olfr389
  gRNA
gtaccatctatatcttatgt

SEQ ID NO: 104711 - DNA, 20 bp, Artificial Sequence
  MKO10104711_B_Olfr389
  gRNA
cactagtgaagtacagaact

SEQ ID NO: 104712 - DNA, 20 bp, Artificial Sequence
  MKO10104712_B_Olfr389
  gRNA
cagccaacataagatataga

SEQ ID NO: 104713 - DNA, 20 bp, Artificial Sequence
  MKO10104713_B_Olfr38
  gRNA
ttgtgcctctcaccttacta

SEQ ID NO: 104714 - DNA, 20 bp, Artificial Sequence
  MKO10104714_B_Olfr38
  gRNA
atctaacaagattgcaatca

SEQ ID NO: 104715 - DNA, 20 bp, Artificial Sequence
  MKO10104715_B_Olfr38
  gRNA
gagacatcaacttctcctga

SEQ ID NO: 104716 - DNA, 20 bp, Artificial Sequence
  MKO10104716_B_Olfr390
  gRNA
catctctcagttcttactcc

SEQ ID NO: 104717 - DNA, 20 bp, Artificial Sequence
  MKO10104717_B_Olfr390
  gRNA
acaattattggcatctactt

SEQ ID NO: 104718 - DNA, 20 bp, Artificial Sequence
  MKO10104718_B_Olfr390
  gRNA
agaactgagagatgatagtc

SEQ ID NO: 104719 - DNA, 20 bp, Artificial Sequence
  MKO10104719_B_Olfr391-ps
  gRNA
aaaactgtcataaataacct

SEQ ID NO: 104720 - DNA, 20 bp, Artificial Sequence
  MKO10104720_B_Olfr391-ps
  gRNA
cctatttgttctcctaaagc

SEQ ID NO: 104721 - DNA, 20 bp, Artificial Sequence
  MKO10104721_B_Olfr391-ps
  gRNA
acaaggcatagaacaagtgt

SEQ ID NO: 104722 - DNA, 20 bp, Artificial Sequence
  MKO10104722_B_Olfr392
  gRNA
aagacaatctagccgtgagt

SEQ ID NO: 104723 - DNA, 20 bp, Artificial Sequence
  MKO10104723_B_Olfr392
  gRNA
agagtagaattattacttga

SEQ ID NO: 104724 - DNA, 20 bp, Artificial Sequence
  MKO10104724_B_Olfr392
  gRNA
acaacttcagaagagctggt

SEQ ID NO: 104725 - DNA, 20 bp, Artificial Sequence
  MKO10104725_B_Olfr393
  gRNA
cattagacaagtacagagct

SEQ ID NO: 104726 - DNA, 20 bp, Artificial Sequence
  MKO10104726_B_Olfr393
  gRNA
ggcacaaatatacttcctta

SEQ ID NO: 104727 - DNA, 20 bp, Artificial Sequence
  MKO10104727_B_Olfr393
  gRNA
acagctttaggacagcaaat

SEQ ID NO: 104728 - DNA, 20 bp, Artificial Sequence
  MKO10104728_B_Olfr394
  gRNA
cagtctaaaggggtctgcca

SEQ ID NO: 104729 - DNA, 20 bp, Artificial Sequence
  MKO10104729_B_Olfr394
  gRNA
tagaataggtgttggtactc

SEQ ID NO: 104730 - DNA, 20 bp, Artificial Sequence
  MKO10104730_B_Olfr394
  gRNA
tgtgagcagaatttgcattg

SEQ ID NO: 104731 - DNA, 20 bp, Artificial Sequence
  MKO10104731_B_Olfr395
  gRNA
ggaattccaagatgagagtt

SEQ ID NO: 104732 - DNA, 20 bp, Artificial Sequence
  MKO10104732_B_Olfr395
  gRNA
aagacaatctagccatgagt

SEQ ID NO: 104733 - DNA, 20 bp, Artificial Sequence
  MKO10104733_B_Olfr395
  gRNA
aaagaaccaaactctcatct

SEQ ID NO: 104734 - DNA, 20 bp, Artificial Sequence
  MKO10104734_B_Olfr397
  gRNA
ctcttctagaagcatccgca

SEQ ID NO: 104735 - DNA, 20 bp, Artificial Sequence
  MKO10104735_B_Olfr397
  gRNA
tcttgctggtgtggttcaat

SEQ ID NO: 104736 - DNA, 20 bp, Artificial Sequence
  MKO10104736_B_Olfr397
  gRNA
aatcacattgttagcacaga

SEQ ID NO: 104737 - DNA, 20 bp, Artificial Sequence
  MKO10104737_B_Olfr398
  gRNA
gtgtgtagaccgctgcacta

SEQ ID NO: 104738 - DNA, 20 bp, Artificial Sequence
  MKO10104738_B_Olfr398
  gRNA
agccatgtcttatgaccgtg

SEQ ID NO: 104739 - DNA, 20 bp, Artificial Sequence
  MKO10104739_B_Olfr398
  gRNA
gtgcataggaaagggacacg

SEQ ID NO: 104740 - DNA, 20 bp, Artificial Sequence
  MKO10104740_B_Olfr399
  gRNA
aagaggatgggccgcaaaac

SEQ ID NO: 104741 - DNA, 20 bp, Artificial Sequence
  MKO10104741_B_Olfr399
  gRNA
ttgggtcagtgcattactaa

SEQ ID NO: 104742 - DNA, 20 bp, Artificial Sequence
  MKO10104742_B_Olfr399
  gRNA
tctgaatcctccaactcata

SEQ ID NO: 104743 - DNA, 20 bp, Artificial Sequence
  MKO10104743_B_Olfr39
  gRNA
actatcacaattcctgctac

SEQ ID NO: 104744 - DNA, 20 bp, Artificial Sequence
  MKO10104744_B_Olfr39
  gRNA
tcattaatagactatgaaac

SEQ ID NO: 104745 - DNA, 20 bp, Artificial Sequence
  MKO10104745_B_Olfr39
  gRNA
aagaatatcccgaaaagaat

SEQ ID NO: 104746 - DNA, 20 bp, Artificial Sequence
  MKO10104746_B_Olfr3
  gRNA
ctatgcatcctcatctctta

SEQ ID NO: 104747 - DNA, 20 bp, Artificial Sequence
  MKO10104747_B_Olfr3
  gRNA
caaggctttacagataccct

SEQ ID NO: 104748 - DNA, 20 bp, Artificial Sequence
  MKO10104748_B_Olfr3
  gRNA
tgacacatcactcaaccaac

SEQ ID NO: 104749 - DNA, 20 bp, Artificial Sequence
  MKO10104749_B_Olfr401
  gRNA
agctgccacattgatataag

SEQ ID NO: 104750 - DNA, 20 bp, Artificial Sequence
  MKO10104750_B_Olfr401
  gRNA
caagagccgacccaacatag

SEQ ID NO: 104751 - DNA, 20 bp, Artificial Sequence
  MKO10104751_B_Olfr401
  gRNA
tgtgtgagacaagctccata

SEQ ID NO: 104752 - DNA, 20 bp, Artificial Sequence
  MKO10104752_B_Olfr402
  gRNA
cataatggcaggaaccccta

SEQ ID NO: 104753 - DNA, 20 bp, Artificial Sequence
  MKO10104753_B_Olfr402
  gRNA
gaccaagagccgaaccaaca

SEQ ID NO: 104754 - DNA, 20 bp, Artificial Sequence
  MKO10104754_B_Olfr402
  gRNA
caaaagcatacaattccata

SEQ ID NO: 104755 - DNA, 20 bp, Artificial Sequence
  MKO10104755_B_Olfr403
  gRNA
gtctcacatgagggaagaag

SEQ ID NO: 104756 - DNA, 20 bp, Artificial Sequence
  MKO10104756_B_Olfr403
  gRNA
cagagaagacccccacccca

SEQ ID NO: 104757 - DNA, 20 bp, Artificial Sequence
  MKO10104757_B_Olfr403
  gRNA
tccacaactttgtgtcctgc

SEQ ID NO: 104758 - DNA, 20 bp, Artificial Sequence
  MKO10104758_B_Olfr406
  gRNA
tgatgatggctgacacaatg

SEQ ID NO: 104759 - DNA, 20 bp, Artificial Sequence
  MKO10104759_B_Olfr406
  gRNA
actttctctgcagaagtccc

SEQ ID NO: 104760 - DNA, 20 bp, Artificial Sequence
  MKO10104760_B_Olfr406
  gRNA
atgtacctggtcactgtagc

SEQ ID NO: 104761 - DNA, 20 bp, Artificial Sequence
  MKO10104761_B_Olfr410
  gRNA
tttcacctcttatatgcatg

SEQ ID NO: 104762 - DNA, 20 bp, Artificial Sequence
  MKO10104762_B_Olfr410
  gRNA
gatgccagcaccatagaata

SEQ ID NO: 104763 - DNA, 20 bp, Artificial Sequence
  MKO10104763_B_Olfr410
  gRNA
gaatgaaccacactatccag

SEQ ID NO: 104764 - DNA, 20 bp, Artificial Sequence
  MKO10104764_B_Olfr411
  gRNA
gcccccaactgtgagcaagt

SEQ ID NO: 104765 - DNA, 20 bp, Artificial Sequence
  MKO10104765_B_Olfr411
  gRNA
gtcttcagctacatgcggct

SEQ ID NO: 104766 - DNA, 20 bp, Artificial Sequence
  MKO10104766_B_Olfr411
  gRNA
cacaagcgcacagttcccta

SEQ ID NO: 104767 - DNA, 20 bp, Artificial Sequence
  MKO10104767_B_Olfr412
  gRNA
agacccacagaaggttactc

SEQ ID NO: 104768 - DNA, 20 bp, Artificial Sequence
  MKO10104768_B_Olfr412
  gRNA
cacagccagatgggacgcac

SEQ ID NO: 104769 - DNA, 20 bp, Artificial Sequence
  MKO10104769_B_Olfr412
  gRNA
acatttcgcagaagatgtag

SEQ ID NO: 104770 - DNA, 20 bp, Artificial Sequence
  MKO10104770_B_Olfr414
  gRNA
gaatcatgaccagcgccagc

SEQ ID NO: 104771 - DNA, 20 bp, Artificial Sequence
  MKO10104771_B_Olfr414
  gRNA
tactcattgtttcgacaatc

SEQ ID NO: 104772 - DNA, 20 bp, Artificial Sequence
  MKO10104772_B_Olfr414
  gRNA
caggacggtagagtctctta

SEQ ID NO: 104773 - DNA, 20 bp, Artificial Sequence
  MKO10104773_B_Olfr417
  gRNA
gacagccgcatttcagtcac

SEQ ID NO: 104774 - DNA, 20 bp, Artificial Sequence
  MKO10104774_B_Olfr417
  gRNA
cataccccatcaaagtgaga

SEQ ID NO: 104775 - DNA, 20 bp, Artificial Sequence
  MKO10104775_B_Olfr417
  gRNA
tatcagatccaccagcatct

SEQ ID NO: 104776 - DNA, 20 bp, Artificial Sequence
  MKO10104776_B_Olfr418-ps1
  gRNA
actcggttatcatgaacaag

SEQ ID NO: 104777 - DNA, 20 bp, Artificial Sequence
  MKO10104777_B_Olfr418-ps1
  gRNA
catgataaccgagtacctca

SEQ ID NO: 104778 - DNA, 20 bp, Artificial Sequence
  MKO10104778_B_Olfr418-ps1
  gRNA
cattgccagtcagagttagc

SEQ ID NO: 104779 - DNA, 20 bp, Artificial Sequence
  MKO10104779_B_Olfr419
  gRNA
aatcctcatccttagtctgc

SEQ ID NO: 104780 - DNA, 20 bp, Artificial Sequence
  MKO10104780_B_Olfr419
  gRNA
gaagcagttggtacaagccc

SEQ ID NO: 104781 - DNA, 20 bp, Artificial Sequence
  MKO10104781_B_Olfr419
  gRNA
caggattgctaccaaaatat

SEQ ID NO: 104782 - DNA, 20 bp, Artificial Sequence
  MKO10104782_B_Olfr420
  gRNA
cagtggtgtaccatatctcc

SEQ ID NO: 104783 - DNA, 20 bp, Artificial Sequence
  MKO10104783_B_Olfr420
  gRNA
ccacaccatcgtcatgattc

SEQ ID NO: 104784 - DNA, 20 bp, Artificial Sequence
  MKO10104784_B_Olfr420
  gRNA
ccgtaattatctccacagca

SEQ ID NO: 104785 - DNA, 20 bp, Artificial Sequence
  MKO10104785_B_Olfr421-ps1
  gRNA
ttacagcaaaaaagatcatc

SEQ ID NO: 104786 - DNA, 20 bp, Artificial Sequence
  MKO10104786_B_Olfr421-ps1
  gRNA
acccaaacatcatgacaccc

SEQ ID NO: 104787 - DNA, 20 bp, Artificial Sequence
  MKO10104787_B_Olfr421-ps1
  gRNA
cttcggtatttccaagtgaa

SEQ ID NO: 104788 - DNA, 20 bp, Artificial Sequence
  MKO10104788_B_Olfr424
  gRNA
ctttgaacctgtgttgcgtt

SEQ ID NO: 104789 - DNA, 20 bp, Artificial Sequence
  MKO10104789_B_Olfr424
  gRNA
gaatcatcaccgtgatcctg

SEQ ID NO: 104790 - DNA, 20 bp, Artificial Sequence
  MKO10104790_B_Olfr424
  gRNA
acccaactatcatgactccc

SEQ ID NO: 104791 - DNA, 20 bp, Artificial Sequence
  MKO10104791_B_Olfr426
  gRNA
gtagtcctgaagattccatc

SEQ ID NO: 104792 - DNA, 20 bp, Artificial Sequence
  MKO10104792_B_Olfr426
  gRNA
gcaatgaccttctccaatag

SEQ ID NO: 104793 - DNA, 20 bp, Artificial Sequence
  MKO10104793_B_Olfr426
  gRNA
tgctcctcccagagattgtg

SEQ ID NO: 104794 - DNA, 20 bp, Artificial Sequence
  MKO10104794_B_Olfr427
  gRNA
gcaatgaccttctccaatag

SEQ ID NO: 104795 - DNA, 20 bp, Artificial Sequence
  MKO10104795_B_Olfr427
  gRNA
tgctcctcccagagattgtg

SEQ ID NO: 104796 - DNA, 20 bp, Artificial Sequence
  MKO10104796_B_Olfr427
  gRNA
taagctttctgtgactccaa

SEQ ID NO: 104797 - DNA, 20 bp, Artificial Sequence
  MKO10104797_B_Olfr429
  gRNA
catttatagcttgcgcaaca

SEQ ID NO: 104798 - DNA, 20 bp, Artificial Sequence
  MKO10104798_B_Olfr429
  gRNA
caatcttgatacaaagtgac

SEQ ID NO: 104799 - DNA, 20 bp, Artificial Sequence
  MKO10104799_B_Olfr429
  gRNA
gcctcccaaccagcaaccaa

SEQ ID NO: 104800 - DNA, 20 bp, Artificial Sequence
  MKO10104800_B_Olfr430
  gRNA
gatgagcatattaccaccaa

SEQ ID NO: 104801 - DNA, 20 bp, Artificial Sequence
  MKO10104801_B_Olfr430
  gRNA
tgttagcacagagtagacta

SEQ ID NO: 104802 - DNA, 20 bp, Artificial Sequence
  MKO10104802_B_Olfr430
  gRNA
aactcattcaggccatcaag

SEQ ID NO: 104803 - DNA, 20 bp, Artificial Sequence
  MKO10104803_B_Olfr432
  gRNA
ggtgagcaaagtatatacca

SEQ ID NO: 104804 - DNA, 20 bp, Artificial Sequence
  MKO10104804_B_Olfr432
  gRNA
cagagacaagcttattgcct

SEQ ID NO: 104805 - DNA, 20 bp, Artificial Sequence
  MKO10104805_B_Olfr432
  gRNA
actcggtcatgcccaaggag

SEQ ID NO: 104806 - DNA, 20 bp, Artificial Sequence
  MKO10104806_B_Olfr433
  gRNA
caggtacagctatggcttgc

SEQ ID NO: 104807 - DNA, 20 bp, Artificial Sequence
  MKO10104807_B_Olfr433
  gRNA
actaccatgcactcatgagc

SEQ ID NO: 104808 - DNA, 20 bp, Artificial Sequence
  MKO10104808_B_Olfr433
  gRNA
gatagatgcacagggtcccc

SEQ ID NO: 104809 - DNA, 20 bp, Artificial Sequence
  MKO10104809_B_Olfr434
  gRNA
caaggagcacacattcagtg

SEQ ID NO: 104810 - DNA, 20 bp, Artificial Sequence
  MKO10104810_B_Olfr434
  gRNA
gaggaaactaccaagattta

SEQ ID NO: 104811 - DNA, 20 bp, Artificial Sequence
  MKO10104811_B_Olfr434
  gRNA
tgtgcaaagaaagtcattcc

SEQ ID NO: 104812 - DNA, 20 bp, Artificial Sequence
  MKO10104812_B_Olfr435
  gRNA
tgctcccaaatgtcaaaaat

SEQ ID NO: 104813 - DNA, 20 bp, Artificial Sequence
  MKO10104813_B_Olfr435
  gRNA
cattgcacagtgacctccta

SEQ ID NO: 104814 - DNA, 20 bp, Artificial Sequence
  MKO10104814_B_Olfr435
  gRNA
agcctgtgtgtttgccttag

SEQ ID NO: 104815 - DNA, 20 bp, Artificial Sequence
  MKO10104815_B_Olfr437
  gRNA
atcttcagcctgctcgcaaa

SEQ ID NO: 104816 - DNA, 20 bp, Artificial Sequence
  MKO10104816_B_Olfr437
  gRNA
tatcttacacgcacatcctc

SEQ ID NO: 104817 - DNA, 20 bp, Artificial Sequence
  MKO10104817_B_Olfr437
  gRNA
ccctgactctgatcagcgag

SEQ ID NO: 104818 - DNA, 20 bp, Artificial Sequence
  MKO10104818_B_Olfr43
  gRNA
gtctagctgtgagtagggtg

SEQ ID NO: 104819 - DNA, 20 bp, Artificial Sequence
  MKO10104819_B_Olfr43
  gRNA
taccacagatttcactctcc

SEQ ID NO: 104820 - DNA, 20 bp, Artificial Sequence
  MKO10104820_B_Olfr43
  gRNA
ggcatggtctcacatgaggg

SEQ ID NO: 104821 - DNA, 20 bp, Artificial Sequence
  MKO10104821_B_Olfr441
  gRNA
ccataatggctgctgtctcc

SEQ ID NO: 104822 - DNA, 20 bp, Artificial Sequence
  MKO10104822_B_Olfr441
  gRNA
ctctgtgatccatgtctgat

SEQ ID NO: 104823 - DNA, 20 bp, Artificial Sequence
  MKO10104823_B_Olfr441
  gRNA
gccatcctgagaatccagtc

SEQ ID NO: 104824 - DNA, 20 bp, Artificial Sequence
  MKO10104824_B_Olfr444
  gRNA
ctgaggtcaagggcgccctc

SEQ ID NO: 104825 - DNA, 20 bp, Artificial Sequence
  MKO10104825_B_Olfr444
  gRNA
tcatgatgacagtatagtga

SEQ ID NO: 104826 - DNA, 20 bp, Artificial Sequence
  MKO10104826_B_Olfr444
  gRNA
ccccactaagatgaacacac

SEQ ID NO: 104827 - DNA, 20 bp, Artificial Sequence
  MKO10104827_B_Olfr446
  gRNA
gccattctcggaatccactc

SEQ ID NO: 104828 - DNA, 20 bp, Artificial Sequence
  MKO10104828_B_Olfr446
  gRNA
ctgtgctatcgccatgtaca

SEQ ID NO: 104829 - DNA, 20 bp, Artificial Sequence
  MKO10104829_B_Olfr446
  gRNA
agtctcctatacacgaatcc

SEQ ID NO: 104830 - DNA, 20 bp, Artificial Sequence
  MKO10104830_B_Olfr447
  gRNA
ggttgagcataggattaaaa

SEQ ID NO: 104831 - DNA, 20 bp, Artificial Sequence
  MKO10104831_B_Olfr447
  gRNA
tacccgcatcaatgagttaa

SEQ ID NO: 104832 - DNA, 20 bp, Artificial Sequence
  MKO10104832_B_Olfr447
  gRNA
ttaaaggaggacacctcttg

SEQ ID NO: 104833 - DNA, 20 bp, Artificial Sequence
  MKO10104833_B_Olfr448
  gRNA
gcagagtgaaagtatagagc

SEQ ID NO: 104834 - DNA, 20 bp, Artificial Sequence
  MKO10104834_B_Olfr448
  gRNA
gctctatactttcactctgc

SEQ ID NO: 104835 - DNA, 20 bp, Artificial Sequence
  MKO10104835_B_Olfr448
  gRNA
tccacgttgttcttatcctg

SEQ ID NO: 104836 - DNA, 20 bp, Artificial Sequence
  MKO10104836_B_Olfr449
  gRNA
ctaggcggaaacagagtcca

SEQ ID NO: 104837 - DNA, 20 bp, Artificial Sequence
  MKO10104837_B_Olfr449
  gRNA
actgtgttacgcatgccaac

SEQ ID NO: 104838 - DNA, 20 bp, Artificial Sequence
  MKO10104838_B_Olfr449
  gRNA
ttcagctacagtcagaatat

SEQ ID NO: 104839 - DNA, 20 bp, Artificial Sequence
  MKO10104839_B_Olfr44
  gRNA
atttatatgatcactgtagc

SEQ ID NO: 104840 - DNA, 20 bp, Artificial Sequence
  MKO10104840_B_Olfr44
  gRNA
tgccttcagtggagcgaatg

SEQ ID NO: 104841 - DNA, 20 bp, Artificial Sequence
  MKO10104841_B_Olfr44
  gRNA
atctgtgcatcagctcacac

SEQ ID NO: 104842 - DNA, 20 bp, Artificial Sequence
  MKO10104842_B_Olfr450
  gRNA
tagtattgccccacaaatgc

SEQ ID NO: 104843 - DNA, 20 bp, Artificial Sequence
  MKO10104843_B_Olfr450
  gRNA
gtgagacccttgcagtgctt

SEQ ID NO: 104844 - DNA, 20 bp, Artificial Sequence
  MKO10104844_B_Olfr450
  gRNA
gccacaatcttcacttacct

SEQ ID NO: 104845 - DNA, 20 bp, Artificial Sequence
  MKO10104845_B_Olfr452
  gRNA
aaatgtccacacaggccaat

SEQ ID NO: 104846 - DNA, 20 bp, Artificial Sequence
  MKO10104846_B_Olfr452
  gRNA
caaggctggtcatcacatcg

SEQ ID NO: 104847 - DNA, 20 bp, Artificial Sequence
  MKO10104847_B_Olfr452
  gRNA
aaccatgatcacaatctcat

SEQ ID NO: 104848 - DNA, 20 bp, Artificial Sequence
  MKO10104848_B_Olfr453
  gRNA
cataggccatcattgctaat

SEQ ID NO: 104849 - DNA, 20 bp, Artificial Sequence
  MKO10104849_B_Olfr453
  gRNA
gggctgtatatacgtgaaaa

SEQ ID NO: 104850 - DNA, 20 bp, Artificial Sequence
  MKO10104850_B_Olfr453
  gRNA
tatgtacacgttcgtgcaca

SEQ ID NO: 104851 - DNA, 20 bp, Artificial Sequence
  MKO10104851_B_Olfr455
  gRNA
atccagttactcccctcgac

SEQ ID NO: 104852 - DNA, 20 bp, Artificial Sequence
  MKO10104852_B_Olfr455
  gRNA
cactgccaccgttagcccca

SEQ ID NO: 104853 - DNA, 20 bp, Artificial Sequence
  MKO10104853_B_Olfr455
  gRNA
tggaggactagctgtatccg

SEQ ID NO: 104854 - DNA, 20 bp, Artificial Sequence
  MKO10104854_B_Olfr456
  gRNA
ccatgagagaaaacatgacc

SEQ ID NO: 104855 - DNA, 20 bp, Artificial Sequence
  MKO10104855_B_Olfr456
  gRNA
accatgtgccttcctacctg

SEQ ID NO: 104856 - DNA, 20 bp, Artificial Sequence
  MKO10104856_B_Olfr456
  gRNA
catgaagatccattctaccc

SEQ ID NO: 104857 - DNA, 20 bp, Artificial Sequence
  MKO10104857_B_Olfr457
  gRNA
catgaagatccgttctaccc

SEQ ID NO: 104858 - DNA, 20 bp, Artificial Sequence
  MKO10104858_B_Olfr457
  gRNA
tgtggagcggggctgcatgt

SEQ ID NO: 104859 - DNA, 20 bp, Artificial Sequence
  MKO10104859_B_Olfr457
  gRNA
cattgcccagcagagtcaac

SEQ ID NO: 104860 - DNA, 20 bp, Artificial Sequence
  MKO10104860_B_Olfr458
  gRNA
accatgcgccttcccacctg

SEQ ID NO: 104861 - DNA, 20 bp, Artificial Sequence
  MKO10104861_B_Olfr458
  gRNA
cacaagtaccaaaggctttg

SEQ ID NO: 104862 - DNA, 20 bp, Artificial Sequence
  MKO10104862_B_Olfr458
  gRNA
gatctttgagtcaaagaatt

SEQ ID NO: 104863 - DNA, 20 bp, Artificial Sequence
  MKO10104863_B_Olfr459
  gRNA
cttctattcagtgacactgc

SEQ ID NO: 104864 - DNA, 20 bp, Artificial Sequence
  MKO10104864_B_Olfr459
  gRNA
ctcttcctttacctcgctct

SEQ ID NO: 104865 - DNA, 20 bp, Artificial Sequence
  MKO10104865_B_Olfr459
  gRNA
atgatgacgctatacctcaa

SEQ ID NO: 104866 - DNA, 20 bp, Artificial Sequence
  MKO10104866_B_Olfr45
  gRNA
aaaattgacgcctccaaaaa

SEQ ID NO: 104867 - DNA, 20 bp, Artificial Sequence
  MKO10104867_B_Olfr45
  gRNA
atctcccaaaagagtcataa

SEQ ID NO: 104868 - DNA, 20 bp, Artificial Sequence
  MKO10104868_B_Olfr45
  gRNA
ctgagacatacattccttga

SEQ ID NO: 104869 - DNA, 20 bp, Artificial Sequence
  MKO10104869_B_Olfr460
  gRNA
ccctattgtagtcggctgcc

SEQ ID NO: 104870 - DNA, 20 bp, Artificial Sequence
  MKO10104870_B_Olfr460
  gRNA
gcacaataacagttgtaacc

SEQ ID NO: 104871 - DNA, 20 bp, Artificial Sequence
  MKO10104871_B_Olfr460
  gRNA
ttattgtgcccgtgatgctc

SEQ ID NO: 104872 - DNA, 20 bp, Artificial Sequence
  MKO10104872_B_Olfr461
  gRNA
tgagcagctatacttgtacc

SEQ ID NO: 104873 - DNA, 20 bp, Artificial Sequence
  MKO10104873_B_Olfr461
  gRNA
gtaacagtgtcatgggtagt

SEQ ID NO: 104874 - DNA, 20 bp, Artificial Sequence
  MKO10104874_B_Olfr461
  gRNA
ctgtcccttatatgctccag

SEQ ID NO: 104875 - DNA, 20 bp, Artificial Sequence
  MKO10104875_B_Olfr462
  gRNA
gatggatactgccttgtcca

SEQ ID NO: 104876 - DNA, 20 bp, Artificial Sequence
  MKO10104876_B_Olfr462
  gRNA
cactcaacactgtgtagtac

SEQ ID NO: 104877 - DNA, 20 bp, Artificial Sequence
  MKO10104877_B_Olfr462
  gRNA
agaccgtgactatgatgagg

SEQ ID NO: 104878 - DNA, 20 bp, Artificial Sequence
  MKO10104878_B_Olfr463
  gRNA
catgaacagccagctttgta

SEQ ID NO: 104879 - DNA, 20 bp, Artificial Sequence
  MKO10104879_B_Olfr463
  gRNA
gcgctttgctagtctcttca

SEQ ID NO: 104880 - DNA, 20 bp, Artificial Sequence
  MKO10104880_B_Olfr463
  gRNA
gcatgggggtcatgaccgta

SEQ ID NO: 104881 - DNA, 20 bp, Artificial Sequence
  MKO10104881_B_Olfr464
  gRNA
agaagaccgtcccacctccc

SEQ ID NO: 104882 - DNA, 20 bp, Artificial Sequence
  MKO10104882_B_Olfr464
  gRNA
actccagaaactcctatttg

SEQ ID NO: 104883 - DNA, 20 bp, Artificial Sequence
  MKO10104883_B_Olfr464
  gRNA
tgatgctgaggtcgcactca

SEQ ID NO: 104884 - DNA, 20 bp, Artificial Sequence
  MKO10104884_B_Olfr466
  gRNA
actctgtgagtatgtcccac

SEQ ID NO: 104885 - DNA, 20 bp, Artificial Sequence
  MKO10104885_B_Olfr466
  gRNA
aatagcaacatttgtatacc

SEQ ID NO: 104886 - DNA, 20 bp, Artificial Sequence
  MKO10104886_B_Olfr466
  gRNA
ttggcatgattataattatc

SEQ ID NO: 104887 - DNA, 20 bp, Artificial Sequence
  MKO10104887_B_Olfr467
  gRNA
aggaaactcacaatcatgac

SEQ ID NO: 104888 - DNA, 20 bp, Artificial Sequence
  MKO10104888_B_Olfr467
  gRNA
cttattggttatttcctatg

SEQ ID NO: 104889 - DNA, 20 bp, Artificial Sequence
  MKO10104889_B_Olfr467
  gRNA
gtacaggacagctccaccag

SEQ ID NO: 104890 - DNA, 20 bp, Artificial Sequence
  MKO10104890_B_Olfr469
  gRNA
caaaatgcttgccaacttcc

SEQ ID NO: 104891 - DNA, 20 bp, Artificial Sequence
  MKO10104891_B_Olfr469
  gRNA
tactgtgactataatgacaa

SEQ ID NO: 104892 - DNA, 20 bp, Artificial Sequence
  MKO10104892_B_Olfr469
  gRNA
aaaaagcacctgagaaaagc

SEQ ID NO: 104893 - DNA, 20 bp, Artificial Sequence
  MKO10104893_B_Olfr46
  gRNA
ttctgtgcctatatcagtcc

SEQ ID NO: 104894 - DNA, 20 bp, Artificial Sequence
  MKO10104894_B_Olfr46
  gRNA
ctggatactccactcaacaa

SEQ ID NO: 104895 - DNA, 20 bp, Artificial Sequence
  MKO10104895_B_Olfr46
  gRNA
tgcccctgcattacagctct

SEQ ID NO: 104896 - DNA, 20 bp, Artificial Sequence
  MKO10104896_B_Olfr470
  gRNA
cactgtgactataatgacaa

SEQ ID NO: 104897 - DNA, 20 bp, Artificial Sequence
  MKO10104897_B_Olfr470
  gRNA
aatgcttgccaacttcctgc

SEQ ID NO: 104898 - DNA, 20 bp, Artificial Sequence
  MKO10104898_B_Olfr470
  gRNA
tccgtggagtagctggattt

SEQ ID NO: 104899 - DNA, 20 bp, Artificial Sequence
  MKO10104899_B_Olfr472
  gRNA
ggctgaaaaccataccactg

SEQ ID NO: 104900 - DNA, 20 bp, Artificial Sequence
  MKO10104900_B_Olfr472
  gRNA
gtatatattatcactttagt

SEQ ID NO: 104901 - DNA, 20 bp, Artificial Sequence
  MKO10104901_B_Olfr472
  gRNA
gatgattagctctgccacag

SEQ ID NO: 104902 - DNA, 20 bp, Artificial Sequence
  MKO10104902_B_Olfr473
  gRNA
ggaggctgaaaaccatacca

SEQ ID NO: 104903 - DNA, 20 bp, Artificial Sequence
  MKO10104903_B_Olfr473
  gRNA
ttcagtagaatagttcgact

SEQ ID NO: 104904 - DNA, 20 bp, Artificial Sequence
  MKO10104904_B_Olfr473
  gRNA
ataatgcatatggagctcct

SEQ ID NO: 104905 - DNA, 20 bp, Artificial Sequence
  MKO10104905_B_Olfr474
  gRNA
gtatctattcctcaaccacc

SEQ ID NO: 104906 - DNA, 20 bp, Artificial Sequence
  MKO10104906_B_Olfr474
  gRNA
aatgaataactctgtcatgc

SEQ ID NO: 104907 - DNA, 20 bp, Artificial Sequence
  MKO10104907_B_Olfr474
  gRNA
ctctgtatcacagtattatt

SEQ ID NO: 104908 - DNA, 20 bp, Artificial Sequence
  MKO10104908_B_Olfr476
  gRNA
tgaactctgtcacagttgtg

SEQ ID NO: 104909 - DNA, 20 bp, Artificial Sequence
  MKO10104909_B_Olfr476
  gRNA
atcacaccaacaatgtttaa

SEQ ID NO: 104910 - DNA, 20 bp, Artificial Sequence
  MKO10104910_B_Olfr476
  gRNA
tgaaggaataattccaatga

SEQ ID NO: 104911 - DNA, 20 bp, Artificial Sequence
  MKO10104911_B_Olfr477
  gRNA
cattataggtgtgattgatg

SEQ ID NO: 104912 - DNA, 20 bp, Artificial Sequence
  MKO10104912_B_Olfr477
  gRNA
aattctctgttaaccccaaa

SEQ ID NO: 104913 - DNA, 20 bp, Artificial Sequence
  MKO10104913_B_Olfr477
  gRNA
agagtgttactgtatgtcca

SEQ ID NO: 104914 - DNA, 20 bp, Artificial Sequence
  MKO10104914_B_Olfr478
  gRNA
ttctattcgttagtcttctg

SEQ ID NO: 104915 - DNA, 20 bp, Artificial Sequence
  MKO10104915_B_Olfr478
  gRNA
agacatacaatctcctacat

SEQ ID NO: 104916 - DNA, 20 bp, Artificial Sequence
  MKO10104916_B_Olfr478
  gRNA
gtgaatgaaggaacagttgc

SEQ ID NO: 104917 - DNA, 20 bp, Artificial Sequence
  MKO10104917_B_Olfr479
  gRNA
tcatatctttatgaccccaa

SEQ ID NO: 104918 - DNA, 20 bp, Artificial Sequence
  MKO10104918_B_Olfr479
  gRNA
tttctgtgatatttcacccc

SEQ ID NO: 104919 - DNA, 20 bp, Artificial Sequence
  MKO10104919_B_Olfr479
  gRNA
tgccaacaactgtttcatca

SEQ ID NO: 104920 - DNA, 20 bp, Artificial Sequence
  MKO10104920_B_Olfr47
  gRNA
agcctgtgtgttcactttag

SEQ ID NO: 104921 - DNA, 20 bp, Artificial Sequence
  MKO10104921_B_Olfr47
  gRNA
caggaaactaccaaggcttg

SEQ ID NO: 104922 - DNA, 20 bp, Artificial Sequence
  MKO10104922_B_Olfr47
  gRNA
caggagaaagctgactatcc

SEQ ID NO: 104923 - DNA, 20 bp, Artificial Sequence
  MKO10104923_B_Olfr480
  gRNA
acagtctgcatcctcctagt

SEQ ID NO: 104924 - DNA, 20 bp, Artificial Sequence
  MKO10104924_B_Olfr480
  gRNA
cagttacacccatcatgctg

SEQ ID NO: 104925 - DNA, 20 bp, Artificial Sequence
  MKO10104925_B_Olfr480
  gRNA
aaagggaacatttatccctg

SEQ ID NO: 104926 - DNA, 20 bp, Artificial Sequence
  MKO10104926_B_Olfr481
  gRNA
ttcagctgaccaagtcaaag

SEQ ID NO: 104927 - DNA, 20 bp, Artificial Sequence
  MKO10104927_B_Olfr481
  gRNA
aactaccgagtgcttcctgc

SEQ ID NO: 104928 - DNA, 20 bp, Artificial Sequence
  MKO10104928_B_Olfr481
  gRNA
tcagtataatcctcctaatt

SEQ ID NO: 104929 - DNA, 20 bp, Artificial Sequence
  MKO10104929_B_Olfr482
  gRNA
aattaagccagcagaacatg

SEQ ID NO: 104930 - DNA, 20 bp, Artificial Sequence
  MKO10104930_B_Olfr482
  gRNA
aataataccatctcctacat

SEQ ID NO: 104931 - DNA, 20 bp, Artificial Sequence
  MKO10104931_B_Olfr482
  gRNA
gaacaagagagctcaatcaa

SEQ ID NO: 104932 - DNA, 20 bp, Artificial Sequence
  MKO10104932_B_Olfr483
  gRNA
aaaaaatgatcgattctatt

SEQ ID NO: 104933 - DNA, 20 bp, Artificial Sequence
  MKO10104933_B_Olfr483
  gRNA
tataagatcccacaaccagc

SEQ ID NO: 104934 - DNA, 20 bp, Artificial Sequence
  MKO10104934_B_Olfr483
  gRNA
agccaaaaggaagcattcaa

SEQ ID NO: 104935 - DNA, 20 bp, Artificial Sequence
  MKO10104935_B_Olfr484
  gRNA
tctgtggagtatcttgactt

SEQ ID NO: 104936 - DNA, 20 bp, Artificial Sequence
  MKO10104936_B_Olfr484
  gRNA
agagatcctgacatcagaac

SEQ ID NO: 104937 - DNA, 20 bp, Artificial Sequence
  MKO10104937_B_Olfr484
  gRNA
aggacttgaatgcttccttc

SEQ ID NO: 104938 - DNA, 20 bp, Artificial Sequence
  MKO10104938_B_Olfr485
  gRNA
agacatagcatctcctacct

SEQ ID NO: 104939 - DNA, 20 bp, Artificial Sequence
  MKO10104939_B_Olfr485
  gRNA
agatgctatgtctctcagtc

SEQ ID NO: 104940 - DNA, 20 bp, Artificial Sequence
  MKO10104940_B_Olfr485
  gRNA
actgcagtcactctttctta

SEQ ID NO: 104941 - DNA, 20 bp, Artificial Sequence
  MKO10104941_B_Olfr486
  gRNA
agtggaacgaatcttcaaga

SEQ ID NO: 104942 - DNA, 20 bp, Artificial Sequence
  MKO10104942_B_Olfr486
  gRNA
tagaagagactccaatgaga

SEQ ID NO: 104943 - DNA, 20 bp, Artificial Sequence
  MKO10104943_B_Olfr486
  gRNA
agagagtgactgcagtaaga

SEQ ID NO: 104944 - DNA, 20 bp, Artificial Sequence
  MKO10104944_B_Olfr487
  gRNA
tggaagaaactccaatgaga

SEQ ID NO: 104945 - DNA, 20 bp, Artificial Sequence
  MKO10104945_B_Olfr487
  gRNA
tgctgaagagaatgacttta

SEQ ID NO: 104946 - DNA, 20 bp, Artificial Sequence
  MKO10104946_B_Olfr487
  gRNA
tccctggagtagatggactt

SEQ ID NO: 104947 - DNA, 20 bp, Artificial Sequence
  MKO10104947_B_Olfr488
  gRNA
tgttctgatgcgagtgtctc

SEQ ID NO: 104948 - DNA, 20 bp, Artificial Sequence
  MKO10104948_B_Olfr488
  gRNA
tgccaaagtccacctactcc

SEQ ID NO: 104949 - DNA, 20 bp, Artificial Sequence
  MKO10104949_B_Olfr488
  gRNA
tgacagaagatgaaatgcct

SEQ ID NO: 104950 - DNA, 20 bp, Artificial Sequence
  MKO10104950_B_Olfr48
  gRNA
ataatgatcgtgtagcgcag

SEQ ID NO: 104951 - DNA, 20 bp, Artificial Sequence
  MKO10104951_B_Olfr48
  gRNA
agcagccccgaaaaaatgct

SEQ ID NO: 104952 - DNA, 20 bp, Artificial Sequence
  MKO10104952_B_Olfr48
  gRNA
gtttaacataggagtaatca

SEQ ID NO: 104953 - DNA, 20 bp, Artificial Sequence
  MKO10104953_B_Olfr490
  gRNA
agaagcacaatttcatacct

SEQ ID NO: 104954 - DNA, 20 bp, Artificial Sequence
  MKO10104954_B_Olfr490
  gRNA
attaagaaacccagcaatgt

SEQ ID NO: 104955 - DNA, 20 bp, Artificial Sequence
  MKO10104955_B_Olfr490
  gRNA
cttcagtggaacgcatcttg

SEQ ID NO: 104956 - DNA, 20 bp, Artificial Sequence
  MKO10104956_B_Olfr491
  gRNA
atgaatcctattaacattat

SEQ ID NO: 104957 - DNA, 20 bp, Artificial Sequence
  MKO10104957_B_Olfr491
  gRNA
atatacattgtcaccttagt

SEQ ID NO: 104958 - DNA, 20 bp, Artificial Sequence
  MKO10104958_B_Olfr491
  gRNA
agaacagagttgtgcttcac

SEQ ID NO: 104959 - DNA, 20 bp, Artificial Sequence
  MKO10104959_B_Olfr492
  gRNA
cactgtaataatagtaactg

SEQ ID NO: 104960 - DNA, 20 bp, Artificial Sequence
  MKO10104960_B_Olfr492
  gRNA
gaacaagagagttccactaa

SEQ ID NO: 104961 - DNA, 20 bp, Artificial Sequence
  MKO10104961_B_Olfr492
  gRNA
gccacatccaaggtaggcaa

SEQ ID NO: 104962 - DNA, 20 bp, Artificial Sequence
  MKO10104962_B_Olfr493
  gRNA
tcagtggagaagctcgactt

SEQ ID NO: 104963 - DNA, 20 bp, Artificial Sequence
  MKO10104963_B_Olfr493
  gRNA
aaaaagcagctaagctgagc

SEQ ID NO: 104964 - DNA, 20 bp, Artificial Sequence
  MKO10104964_B_Olfr493
  gRNA
aaaaataccatttcctatct

SEQ ID NO: 104965 - DNA, 20 bp, Artificial Sequence
  MKO10104965_B_Olfr494
  gRNA
attgcatgttctattcagtt

SEQ ID NO: 104966 - DNA, 20 bp, Artificial Sequence
  MKO10104966_B_Olfr494
  gRNA
ctgaatagaacatgcaatgt

SEQ ID NO: 104967 - DNA, 20 bp, Artificial Sequence
  MKO10104967_B_Olfr494
  gRNA
tgcacaagatgatggtaaag

SEQ ID NO: 104968 - DNA, 20 bp, Artificial Sequence
  MKO10104968_B_Olfr495
  gRNA
agcgagagtgacatcagaac

SEQ ID NO: 104969 - DNA, 20 bp, Artificial Sequence
  MKO10104969_B_Olfr495
  gRNA
tgaactctgtcactatagta

SEQ ID NO: 104970 - DNA, 20 bp, Artificial Sequence
  MKO10104970_B_Olfr495
  gRNA
gagtgaaaaaggaagcatta

SEQ ID NO: 104971 - DNA, 20 bp, Artificial Sequence
  MKO10104971_B_Olfr497
  gRNA
ctgacccaaagaaatcagcc

SEQ ID NO: 104972 - DNA, 20 bp, Artificial Sequence
  MKO10104972_B_Olfr497
  gRNA
ggccttgtgtctgccctcaa

SEQ ID NO: 104973 - DNA, 20 bp, Artificial Sequence
  MKO10104973_B_Olfr497
  gRNA
tgggtgtgacagatgatgaa

SEQ ID NO: 104974 - DNA, 20 bp, Artificial Sequence
  MKO10104974_B_Olfr498
  gRNA
tgtcccaaaaaaagcagccg

SEQ ID NO: 104975 - DNA, 20 bp, Artificial Sequence
  MKO10104975_B_Olfr498
  gRNA
gaggctctaaagagacacct

SEQ ID NO: 104976 - DNA, 20 bp, Artificial Sequence
  MKO10104976_B_Olfr498
  gRNA
atgttctattcagtttacct

SEQ ID NO: 104977 - DNA, 20 bp, Artificial Sequence
  MKO10104977_B_Olfr49
  gRNA
atgctaaccaacatcatcac

SEQ ID NO: 104978 - DNA, 20 bp, Artificial Sequence
  MKO10104978_B_Olfr49
  gRNA
cctgtccattcttgccagac

SEQ ID NO: 104979 - DNA, 20 bp, Artificial Sequence
  MKO10104979_B_Olfr49
  gRNA
ctgtgacaactttccactta

SEQ ID NO: 104980 - DNA, 20 bp, Artificial Sequence
  MKO10104980_B_Olfr502
  gRNA
gggaaccacactgcagtgac

SEQ ID NO: 104981 - DNA, 20 bp, Artificial Sequence
  MKO10104981_B_Olfr502
  gRNA
agaaaacagctgaaccaagc

SEQ ID NO: 104982 - DNA, 20 bp, Artificial Sequence
  MKO10104982_B_Olfr502
  gRNA
tgcacaagatgatgacaaag

SEQ ID NO: 104983 - DNA, 20 bp, Artificial Sequence
  MKO10104983_B_Olfr503
  gRNA
tctgtagccaagttgccctg

SEQ ID NO: 104984 - DNA, 20 bp, Artificial Sequence
  MKO10104984_B_Olfr503
  gRNA
tgccctcagaatcatgatat

SEQ ID NO: 104985 - DNA, 20 bp, Artificial Sequence
  MKO10104985_B_Olfr503
  gRNA
agaatggtggagtaatgcag

SEQ ID NO: 104986 - DNA, 20 bp, Artificial Sequence
  MKO10104986_B_Olfr504
  gRNA
cttcaatagttccaagttcc

SEQ ID NO: 104987 - DNA, 20 bp, Artificial Sequence
  MKO10104987_B_Olfr504
  gRNA
ttcttgaacaataattccac

SEQ ID NO: 104988 - DNA, 20 bp, Artificial Sequence
  MKO10104988_B_Olfr504
  gRNA
caagcctggcatgtgatgac

SEQ ID NO: 104989 - DNA, 20 bp, Artificial Sequence
  MKO10104989_B_Olfr506
  gRNA
gccacatcctaggtatgtaa

SEQ ID NO: 104990 - DNA, 20 bp, Artificial Sequence
  MKO10104990_B_Olfr506
  gRNA
attcttgccactatatctgt

SEQ ID NO: 104991 - DNA, 20 bp, Artificial Sequence
  MKO10104991_B_Olfr506
  gRNA
gaacaagagagttcaactag

SEQ ID NO: 104992 - DNA, 20 bp, Artificial Sequence
  MKO10104992_B_Olfr507
  gRNA
catcattgtgatcacagtgt

SEQ ID NO: 104993 - DNA, 20 bp, Artificial Sequence
  MKO10104993_B_Olfr507
  gRNA
cccatccttcaggataccca

SEQ ID NO: 104994 - DNA, 20 bp, Artificial Sequence
  MKO10104994_B_Olfr507
  gRNA
aaaatgaatcaagaattagc

SEQ ID NO: 104995 - DNA, 20 bp, Artificial Sequence
  MKO10104995_B_Olfr508
  gRNA
gaaacatttatccttgtgtc

SEQ ID NO: 104996 - DNA, 20 bp, Artificial Sequence
  MKO10104996_B_Olfr508
  gRNA
aatctactctgtcaccttaa

SEQ ID NO: 104997 - DNA, 20 bp, Artificial Sequence
  MKO10104997_B_Olfr508
  gRNA
cacagtctgtattctcctag

SEQ ID NO: 104998 - DNA, 20 bp, Artificial Sequence
  MKO10104998_B_Olfr509
  gRNA
atcaggattggataatgcag

SEQ ID NO: 104999 - DNA, 20 bp, Artificial Sequence
  MKO10104999_B_Olfr509
  gRNA
tgagaagccaagcacacccg

SEQ ID NO: 105000 - DNA, 20 bp, Artificial Sequence
  MKO10105000_B_Olfr509
  gRNA
aaagctgcctaccaacacaa

SEQ ID NO: 105001 - DNA, 20 bp, Artificial Sequence
  MKO10105001_B_Olfr50
  gRNA
aagtacacagcttgatcctc

SEQ ID NO: 105002 - DNA, 20 bp, Artificial Sequence
  MKO10105002_B_Olfr50
  gRNA
tgctcatcattcttctcatt

SEQ ID NO: 105003 - DNA, 20 bp, Artificial Sequence
  MKO10105003_B_Olfr50
  gRNA
tgtaccattcatatgcatcc

SEQ ID NO: 105004 - DNA, 20 bp, Artificial Sequence
  MKO10105004_B_Olfr510
  gRNA
tataagaccctacaagcaat

SEQ ID NO: 105005 - DNA, 20 bp, Artificial Sequence
  MKO10105005_B_Olfr510
  gRNA
tgctattgaatgtttccttc

SEQ ID NO: 105006 - DNA, 20 bp, Artificial Sequence
  MKO10105006_B_Olfr510
  gRNA
ttcttctgtcacaccaaata

SEQ ID NO: 105007 - DNA, 20 bp, Artificial Sequence
  MKO10105007_B_Olfr512
  gRNA
gcacatgccagttctagcac

SEQ ID NO: 105008 - DNA, 20 bp, Artificial Sequence
  MKO10105008_B_Olfr512
  gRNA
tgagtactctacagaccaca

SEQ ID NO: 105009 - DNA, 20 bp, Artificial Sequence
  MKO10105009_B_Olfr512
  gRNA
gactcctcctgtgctagaac

SEQ ID NO: 105010 - DNA, 20 bp, Artificial Sequence
  MKO10105010_B_Olfr513
  gRNA
ttctcggcagtgaatctcac

SEQ ID NO: 105011 - DNA, 20 bp, Artificial Sequence
  MKO10105011_B_Olfr513
  gRNA
aaataacgtcccatagaaga

SEQ ID NO: 105012 - DNA, 20 bp, Artificial Sequence
  MKO10105012_B_Olfr513
  gRNA
gtctgcaaggaactggtgat

SEQ ID NO: 105013 - DNA, 20 bp, Artificial Sequence
  MKO10105013_B_Olfr514
  gRNA
ggaagtgagaaaatcccaac

SEQ ID NO: 105014 - DNA, 20 bp, Artificial Sequence
  MKO10105014_B_Olfr514
  gRNA
acatggggatatgtaggctg

SEQ ID NO: 105015 - DNA, 20 bp, Artificial Sequence
  MKO10105015_B_Olfr514
  gRNA
tatcatgacagctactgtgt

SEQ ID NO: 105016 - DNA, 20 bp, Artificial Sequence
  MKO10105016_B_Olfr516
  gRNA
acatagggatgtgcaaactc

SEQ ID NO: 105017 - DNA, 20 bp, Artificial Sequence
  MKO10105017_B_Olfr516
  gRNA
tctgcaaaatttatctttag

SEQ ID NO: 105018 - DNA, 20 bp, Artificial Sequence
  MKO10105018_B_Olfr516
  gRNA
tacagttgaattcatcctct

SEQ ID NO: 105019 - DNA, 20 bp, Artificial Sequence
  MKO10105019_B_Olfr517
  gRNA
acatggggatatgcaggctc

SEQ ID NO: 105020 - DNA, 20 bp, Artificial Sequence
  MKO10105020_B_Olfr517
  gRNA
catgcaagctccagtactgc

SEQ ID NO: 105021 - DNA, 20 bp, Artificial Sequence
  MKO10105021_B_Olfr517
  gRNA
ggggaaactgaacacccata

SEQ ID NO: 105022 - DNA, 20 bp, Artificial Sequence
  MKO10105022_B_Olfr518
  gRNA
gatggcagattgcagcaaat

SEQ ID NO: 105023 - DNA, 20 bp, Artificial Sequence
  MKO10105023_B_Olfr518
  gRNA
ggctccactgcagcaacaag

SEQ ID NO: 105024 - DNA, 20 bp, Artificial Sequence
  MKO10105024_B_Olfr518
  gRNA
taccagcatttcaggtgtaa

SEQ ID NO: 105025 - DNA, 20 bp, Artificial Sequence
  MKO10105025_B_Olfr519
  gRNA
acccagtgattatgagcaaa

SEQ ID NO: 105026 - DNA, 20 bp, Artificial Sequence
  MKO10105026_B_Olfr519
  gRNA
acacatcaccaatttcacaa

SEQ ID NO: 105027 - DNA, 20 bp, Artificial Sequence
  MKO10105027_B_Olfr519
  gRNA
gatcaaaatggtgcttgtga

SEQ ID NO: 105028 - DNA, 20 bp, Artificial Sequence
  MKO10105028_B_Olfr51
  gRNA
atcggagaattatcttcctc

SEQ ID NO: 105029 - DNA, 20 bp, Artificial Sequence
  MKO10105029_B_Olfr51
  gRNA
ctgaagttaaaatctgccca

SEQ ID NO: 105030 - DNA, 20 bp, Artificial Sequence
  MKO10105030_B_Olfr51
  gRNA
catatgattcaccaatgcct

SEQ ID NO: 105031 - DNA, 20 bp, Artificial Sequence
  MKO10105031_B_Olfr520
  gRNA
tggctctaccgtcttctacc

SEQ ID NO: 105032 - DNA, 20 bp, Artificial Sequence
  MKO10105032_B_Olfr520
  gRNA
atggaggctacaacttgcaa

SEQ ID NO: 105033 - DNA, 20 bp, Artificial Sequence
  MKO10105033_B_Olfr520
  gRNA
tacagaagcccatgagcgtc

SEQ ID NO: 105034 - DNA, 20 bp, Artificial Sequence
  MKO10105034_B_Olfr521
  gRNA
tagggctttccaatactctt

SEQ ID NO: 105035 - DNA, 20 bp, Artificial Sequence
  MKO10105035_B_Olfr521
  gRNA
acaggatgcgggcataggag

SEQ ID NO: 105036 - DNA, 20 bp, Artificial Sequence
  MKO10105036_B_Olfr521
  gRNA
agccacataggctatggcga

SEQ ID NO: 105037 - DNA, 20 bp, Artificial Sequence
  MKO10105037_B_Olfr522
  gRNA
ccaccactttcatgtatgcc

SEQ ID NO: 105038 - DNA, 20 bp, Artificial Sequence
  MKO10105038_B_Olfr522
  gRNA
cctagagaacctggtcattg

SEQ ID NO: 105039 - DNA, 20 bp, Artificial Sequence
  MKO10105039_B_Olfr522
  gRNA
ttccaggaggggcaggccgc

SEQ ID NO: 105040 - DNA, 20 bp, Artificial Sequence
  MKO10105040_B_Olfr523
  gRNA
gctttcctgcacggacacgc

SEQ ID NO: 105041 - DNA, 20 bp, Artificial Sequence
  MKO10105041_B_Olfr523
  gRNA
cacgtgagccgcagaaagag

SEQ ID NO: 105042 - DNA, 20 bp, Artificial Sequence
  MKO10105042_B_Olfr523
  gRNA
taccacctgcgtgtccgtgc

SEQ ID NO: 105043 - DNA, 20 bp, Artificial Sequence
  MKO10105043_B_Olfr524
  gRNA
cttctgcctgccaccggcgg

SEQ ID NO: 105044 - DNA, 20 bp, Artificial Sequence
  MKO10105044_B_Olfr524
  gRNA
ggtcaagcaagcgctacata

SEQ ID NO: 105045 - DNA, 20 bp, Artificial Sequence
  MKO10105045_B_Olfr524
  gRNA
gtagcgcttgcttgacctct

SEQ ID NO: 105046 - DNA, 20 bp, Artificial Sequence
  MKO10105046_B_Olfr525
  gRNA
tccggagccaggctgcaaat

SEQ ID NO: 105047 - DNA, 20 bp, Artificial Sequence
  MKO10105047_B_Olfr525
  gRNA
tccggatcctccttggagaa

SEQ ID NO: 105048 - DNA, 20 bp, Artificial Sequence
  MKO10105048_B_Olfr525
  gRNA
cagctcagcccctagaaacc

SEQ ID NO: 105049 - DNA, 20 bp, Artificial Sequence
  MKO10105049_B_Olfr527
  gRNA
tgctccaacgcaattgaatg

SEQ ID NO: 105050 - DNA, 20 bp, Artificial Sequence
  MKO10105050_B_Olfr527
  gRNA
ctgctctgcacaccttatcg

SEQ ID NO: 105051 - DNA, 20 bp, Artificial Sequence
  MKO10105051_B_Olfr527
  gRNA
ccacaatggccaagttgacc

SEQ ID NO: 105052 - DNA, 20 bp, Artificial Sequence
  MKO10105052_B_Olfr52
  gRNA
gagtgtgaatcaatgccatg

SEQ ID NO: 105053 - DNA, 20 bp, Artificial Sequence
  MKO10105053_B_Olfr52
  gRNA
tattgtccatgaccctcttc

SEQ ID NO: 105054 - DNA, 20 bp, Artificial Sequence
  MKO10105054_B_Olfr52
  gRNA
tgtgggcctcacagatcgca

SEQ ID NO: 105055 - DNA, 20 bp, Artificial Sequence
  MKO10105055_B_Olfr530
  gRNA
gctggcgatgatgaagacat

SEQ ID NO: 105056 - DNA, 20 bp, Artificial Sequence
  MKO10105056_B_Olfr530
  gRNA
ccttgtcaatctttccctga

SEQ ID NO: 105057 - DNA, 20 bp, Artificial Sequence
  MKO10105057_B_Olfr530
  gRNA
ctgttctctatacttatgtc

SEQ ID NO: 105058 - DNA, 20 bp, Artificial Sequence
  MKO10105058_B_Olfr531
  gRNA
tgctccaacacaattgaacg

SEQ ID NO: 105059 - DNA, 20 bp, Artificial Sequence
  MKO10105059_B_Olfr531
  gRNA
agtttatgctggtgttagtc

SEQ ID NO: 105060 - DNA, 20 bp, Artificial Sequence
  MKO10105060_B_Olfr531
  gRNA
accattctgcagctccaatg

SEQ ID NO: 105061 - DNA, 20 bp, Artificial Sequence
  MKO10105061_B_Olfr532
  gRNA
cctgcgcattcgctcagccg

SEQ ID NO: 105062 - DNA, 20 bp, Artificial Sequence
  MKO10105062_B_Olfr532
  gRNA
agaaattgagtcgcaccagc

SEQ ID NO: 105063 - DNA, 20 bp, Artificial Sequence
  MKO10105063_B_Olfr532
  gRNA
atgtgaaggtagccctcaaa

SEQ ID NO: 105064 - DNA, 20 bp, Artificial Sequence
  MKO10105064_B_Olfr533
  gRNA
gaagagaacatcctggaccc

SEQ ID NO: 105065 - DNA, 20 bp, Artificial Sequence
  MKO10105065_B_Olfr533
  gRNA
ttattgacaatgacatccta

SEQ ID NO: 105066 - DNA, 20 bp, Artificial Sequence
  MKO10105066_B_Olfr533
  gRNA
tcattgtcaataaaaagttc

SEQ ID NO: 105067 - DNA, 20 bp, Artificial Sequence
  MKO10105067_B_Olfr535
  gRNA
ataacactattcacatatgt

SEQ ID NO: 105068 - DNA, 20 bp, Artificial Sequence
  MKO10105068_B_Olfr535
  gRNA
cactaggccaatcagagcct

SEQ ID NO: 105069 - DNA, 20 bp, Artificial Sequence
  MKO10105069_B_Olfr535
  gRNA
ccattagagccactgtgtag

SEQ ID NO: 105070 - DNA, 20 bp, Artificial Sequence
  MKO10105070_B_Olfr536
  gRNA
gatggggtcacagttgtgta

SEQ ID NO: 105071 - DNA, 20 bp, Artificial Sequence
  MKO10105071_B_Olfr536
  gRNA
aactgctgggctcctggaca

SEQ ID NO: 105072 - DNA, 20 bp, Artificial Sequence
  MKO10105072_B_Olfr536
  gRNA
agtcatgacattgttgataa

SEQ ID NO: 105073 - DNA, 20 bp, Artificial Sequence
  MKO10105073_B_Olfr538
  gRNA
tgtgagcagcagcacttcag

SEQ ID NO: 105074 - DNA, 20 bp, Artificial Sequence
  MKO10105074_B_Olfr538
  gRNA
gccagagctgcacacagctg

SEQ ID NO: 105075 - DNA, 20 bp, Artificial Sequence
  MKO10105075_B_Olfr538
  gRNA
gaggactgagtaaaaaaatg

SEQ ID NO: 105076 - DNA, 20 bp, Artificial Sequence
  MKO10105076_B_Olfr539
  gRNA
gaagttgatgcctacaaaaa

SEQ ID NO: 105077 - DNA, 20 bp, Artificial Sequence
  MKO10105077_B_Olfr539
  gRNA
atgctaaccttgttgtctta

SEQ ID NO: 105078 - DNA, 20 bp, Artificial Sequence
  MKO10105078_B_Olfr539
  gRNA
accgatgaaccatacaacca

SEQ ID NO: 105079 - DNA, 20 bp, Artificial Sequence
  MKO10105079_B_Olfr53
  gRNA
cctgattggcctagtatctg

SEQ ID NO: 105080 - DNA, 20 bp, Artificial Sequence
  MKO10105080_B_Olfr53
  gRNA
atttacctcagtgctatact

SEQ ID NO: 105081 - DNA, 20 bp, Artificial Sequence
  MKO10105081_B_Olfr53
  gRNA
catcaccttcaagggatgta

SEQ ID NO: 105082 - DNA, 20 bp, Artificial Sequence
  MKO10105082_B_Olfr541
  gRNA
atgaggaacaatcttagatc

SEQ ID NO: 105083 - DNA, 20 bp, Artificial Sequence
  MKO10105083_B_Olfr541
  gRNA
gctgccaatgatgtagccat

SEQ ID NO: 105084 - DNA, 20 bp, Artificial Sequence
  MKO10105084_B_Olfr541
  gRNA
cttcctgtccctctacatga

SEQ ID NO: 105085 - DNA, 20 bp, Artificial Sequence
  MKO10105085_B_Olfr543
  gRNA
atcaggtcagtatagcggag

SEQ ID NO: 105086 - DNA, 20 bp, Artificial Sequence
  MKO10105086_B_Olfr543
  gRNA
tgcatagatgatacgggtat

SEQ ID NO: 105087 - DNA, 20 bp, Artificial Sequence
  MKO10105087_B_Olfr543
  gRNA
gcaaatcccatctcactccg

SEQ ID NO: 105088 - DNA, 20 bp, Artificial Sequence
  MKO10105088_B_Olfr544
  gRNA
tccaggaagctctctattcg

SEQ ID NO: 105089 - DNA, 20 bp, Artificial Sequence
  MKO10105089_B_Olfr544
  gRNA
cctcaggcgtcatgtcaggg

SEQ ID NO: 105090 - DNA, 20 bp, Artificial Sequence
  MKO10105090_B_Olfr544
  gRNA
attcagcgagatgtccccac

SEQ ID NO: 105091 - DNA, 20 bp, Artificial Sequence
  MKO10105091_B_Olfr545
  gRNA
agtggcggatcacatctgag

SEQ ID NO: 105092 - DNA, 20 bp, Artificial Sequence
  MKO10105092_B_Olfr545
  gRNA
tatggactgcaacatcctcc

SEQ ID NO: 105093 - DNA, 20 bp, Artificial Sequence
  MKO10105093_B_Olfr545
  gRNA
tgcctagaaggagcatatcc

SEQ ID NO: 105094 - DNA, 20 bp, Artificial Sequence
  MKO10105094_B_Olfr547
  gRNA
ggccagggatgcccaacaaa

SEQ ID NO: 105095 - DNA, 20 bp, Artificial Sequence
  MKO10105095_B_Olfr547
  gRNA
ggtcttgattccgtaaatga

SEQ ID NO: 105096 - DNA, 20 bp, Artificial Sequence
  MKO10105096_B_Olfr547
  gRNA
acttacaacagtgtagttta

SEQ ID NO: 105097 - DNA, 20 bp, Artificial Sequence
  MKO10105097_B_Olfr549
  gRNA
tgttaggatcggcttggctg

SEQ ID NO: 105098 - DNA, 20 bp, Artificial Sequence
  MKO10105098_B_Olfr549
  gRNA
catcgagcactacagtagag

SEQ ID NO: 105099 - DNA, 20 bp, Artificial Sequence
  MKO10105099_B_Olfr549
  gRNA
ctgatattcgcgtcaatgtt

SEQ ID NO: 105100 - DNA, 20 bp, Artificial Sequence
  MKO10105100_B_Olfr54
  gRNA
caggcggggatcggagatga

SEQ ID NO: 105101 - DNA, 20 bp, Artificial Sequence
  MKO10105101_B_Olfr54
  gRNA
ggaggaccaccatggtgatt

SEQ ID NO: 105102 - DNA, 20 bp, Artificial Sequence
  MKO10105102_B_Olfr54
  gRNA
tctgttctatggcacagtac

SEQ ID NO: 105103 - DNA, 20 bp, Artificial Sequence
  MKO10105103_B_Olfr550
  gRNA
gacttgatacagtagaccac

SEQ ID NO: 105104 - DNA, 20 bp, Artificial Sequence
  MKO10105104_B_Olfr550
  gRNA
caagtcgaagcagatccgtc

SEQ ID NO: 105105 - DNA, 20 bp, Artificial Sequence
  MKO10105105_B_Olfr550
  gRNA
catccacgccttcacctatg

SEQ ID NO: 105106 - DNA, 20 bp, Artificial Sequence
  MKO10105106_B_Olfr551
  gRNA
tgagcatgggcggcacgacg

SEQ ID NO: 105107 - DNA, 20 bp, Artificial Sequence
  MKO10105107_B_Olfr551
  gRNA
catttgcccaaaagagtgcg

SEQ ID NO: 105108 - DNA, 20 bp, Artificial Sequence
  MKO10105108_B_Olfr551
  gRNA
atctgccgaccattgcacta

SEQ ID NO: 105109 - DNA, 20 bp, Artificial Sequence
  MKO10105109_B_Olfr552
  gRNA
cccgatccctgaaccagaac

SEQ ID NO: 105110 - DNA, 20 bp, Artificial Sequence
  MKO10105110_B_Olfr552
  gRNA
cttctgctcagcctatacct

SEQ ID NO: 105111 - DNA, 20 bp, Artificial Sequence
  MKO10105111_B_Olfr552
  gRNA
aggctcgctacaaggccttt

SEQ ID NO: 105112 - DNA, 20 bp, Artificial Sequence
  MKO10105112_B_Olfr553
  gRNA
agccttaggcgaattagaag

SEQ ID NO: 105113 - DNA, 20 bp, Artificial Sequence
  MKO10105113_B_Olfr553
  gRNA
aatgatttgggttcgaaaaa

SEQ ID NO: 105114 - DNA, 20 bp, Artificial Sequence
  MKO10105114_B_Olfr553
  gRNA
agtactgatgtatggtgtag

SEQ ID NO: 105115 - DNA, 20 bp, Artificial Sequence
  MKO10105115_B_Olfr554
  gRNA
ctgttcgtaccaagcagatc

SEQ ID NO: 105116 - DNA, 20 bp, Artificial Sequence
  MKO10105116_B_Olfr554
  gRNA
gatggggctggccactcccg

SEQ ID NO: 105117 - DNA, 20 bp, Artificial Sequence
  MKO10105117_B_Olfr554
  gRNA
ggtacgaacagcatagacaa

SEQ ID NO: 105118 - DNA, 20 bp, Artificial Sequence
  MKO10105118_B_Olfr555
  gRNA
aggctaacctcattgcatct

SEQ ID NO: 105119 - DNA, 20 bp, Artificial Sequence
  MKO10105119_B_Olfr555
  gRNA
gccatccacgggttcttgtc

SEQ ID NO: 105120 - DNA, 20 bp, Artificial Sequence
  MKO10105120_B_Olfr555
  gRNA
agacaaagcagatacgtaga

SEQ ID NO: 105121 - DNA, 20 bp, Artificial Sequence
  MKO10105121_B_Olfr556
  gRNA
gcagactccatatccgctcc

SEQ ID NO: 105122 - DNA, 20 bp, Artificial Sequence
  MKO10105122_B_Olfr556
  gRNA
gtcctaataccataaatgat

SEQ ID NO: 105123 - DNA, 20 bp, Artificial Sequence
  MKO10105123_B_Olfr556
  gRNA
ttaaggtgggtgggatgatc

SEQ ID NO: 105124 - DNA, 20 bp, Artificial Sequence
  MKO10105124_B_Olfr557
  gRNA
ggatgggccaaacttccatt

SEQ ID NO: 105125 - DNA, 20 bp, Artificial Sequence
  MKO10105125_B_Olfr557
  gRNA
gtaccactgatagcccaatg

SEQ ID NO: 105126 - DNA, 20 bp, Artificial Sequence
  MKO10105126_B_Olfr557
  gRNA
agaccaaggagatccgttca

SEQ ID NO: 105127 - DNA, 20 bp, Artificial Sequence
  MKO10105127_B_Olfr558
  gRNA
tggtgcaccgtttcagcaag

SEQ ID NO: 105128 - DNA, 20 bp, Artificial Sequence
  MKO10105128_B_Olfr558
  gRNA
gaagcccaggcaaaagcgtt

SEQ ID NO: 105129 - DNA, 20 bp, Artificial Sequence
  MKO10105129_B_Olfr558
  gRNA
gagaagtgagtccaaaccaa

SEQ ID NO: 105130 - DNA, 20 bp, Artificial Sequence
  MKO10105130_B_Olfr559
  gRNA
gagtgctacagtgtacatga

SEQ ID NO: 105131 - DNA, 20 bp, Artificial Sequence
  MKO10105131_B_Olfr559
  gRNA
gccatgttcaaagttctgag

SEQ ID NO: 105132 - DNA, 20 bp, Artificial Sequence
  MKO10105132_B_Olfr559
  gRNA
tgaggactctaccacagaga

SEQ ID NO: 105133 - DNA, 20 bp, Artificial Sequence
  MKO10105133_B_Olfr55
  gRNA
atgtggagagaatgtactgg

SEQ ID NO: 105134 - DNA, 20 bp, Artificial Sequence
  MKO10105134_B_Olfr55
  gRNA
ttcctttctactcactgtca

SEQ ID NO: 105135 - DNA, 20 bp, Artificial Sequence
  MKO10105135_B_Olfr55
  gRNA
ggttgcctagcagagtgaag

SEQ ID NO: 105136 - DNA, 20 bp, Artificial Sequence
  MKO10105136_B_Olfr560
  gRNA
gactgtaatgttgacaccga

SEQ ID NO: 105137 - DNA, 20 bp, Artificial Sequence
  MKO10105137_B_Olfr560
  gRNA
caccccaatttgagctattc

SEQ ID NO: 105138 - DNA, 20 bp, Artificial Sequence
  MKO10105138_B_Olfr560
  gRNA
ggatattctggttcaacgcc

SEQ ID NO: 105139 - DNA, 20 bp, Artificial Sequence
  MKO10105139_B_Olfr561
  gRNA
gccaaaggcactattgatcc

SEQ ID NO: 105140 - DNA, 20 bp, Artificial Sequence
  MKO10105140_B_Olfr561
  gRNA
attagagtgtgcacaaaggg

SEQ ID NO: 105141 - DNA, 20 bp, Artificial Sequence
  MKO10105141_B_Olfr561
  gRNA
tcctatgatcagcctgtcat

SEQ ID NO: 105142 - DNA, 20 bp, Artificial Sequence
  MKO10105142_B_Olfr564
  gRNA
gaccttaaaatagctcagat

SEQ ID NO: 105143 - DNA, 20 bp, Artificial Sequence
  MKO10105143_B_Olfr564
  gRNA
cacactgatactgactccta

SEQ ID NO: 105144 - DNA, 20 bp, Artificial Sequence
  MKO10105144_B_Olfr564
  gRNA
agtcagtatcagtgtgcccc

SEQ ID NO: 105145 - DNA, 20 bp, Artificial Sequence
  MKO10105145_B_Olfr566
  gRNA
aactagtccacagatgctat

SEQ ID NO: 105146 - DNA, 20 bp, Artificial Sequence
  MKO10105146_B_Olfr566
  gRNA
actcgagccaatagcatctg

SEQ ID NO: 105147 - DNA, 20 bp, Artificial Sequence
  MKO10105147_B_Olfr566
  gRNA
catatcgatgtaccagagac

SEQ ID NO: 105148 - DNA, 20 bp, Artificial Sequence
  MKO10105148_B_Olfr568
  gRNA
gaagacgaagcagattcgaa

SEQ ID NO: 105149 - DNA, 20 bp, Artificial Sequence
  MKO10105149_B_Olfr568
  gRNA
tcaacacaattgtgccaatc

SEQ ID NO: 105150 - DNA, 20 bp, Artificial Sequence
  MKO10105150_B_Olfr568
  gRNA
tttgcactattctctactac

SEQ ID NO: 105151 - DNA, 20 bp, Artificial Sequence
  MKO10105151_B_Olfr569
  gRNA
cttgttggctatcactgacc

SEQ ID NO: 105152 - DNA, 20 bp, Artificial Sequence
  MKO10105152_B_Olfr569
  gRNA
ggttggagaattatcaattt

SEQ ID NO: 105153 - DNA, 20 bp, Artificial Sequence
  MKO10105153_B_Olfr569
  gRNA
cccctgttcttcatgttgct

SEQ ID NO: 105154 - DNA, 20 bp, Artificial Sequence
  MKO10105154_B_Olfr56
  gRNA
agcccccaagatgcgagcat

SEQ ID NO: 105155 - DNA, 20 bp, Artificial Sequence
  MKO10105155_B_Olfr56
  gRNA
agttatgctggtcttcaccg

SEQ ID NO: 105156 - DNA, 20 bp, Artificial Sequence
  MKO10105156_B_Olfr56
  gRNA
gacatttccacagagcgcca

SEQ ID NO: 105157 - DNA, 20 bp, Artificial Sequence
  MKO10105157_B_Olfr570
  gRNA
tagcccaatttgcacaaccc

SEQ ID NO: 105158 - DNA, 20 bp, Artificial Sequence
  MKO10105158_B_Olfr570
  gRNA
catgtacctgacagctatcc

SEQ ID NO: 105159 - DNA, 20 bp, Artificial Sequence
  MKO10105159_B_Olfr570
  gRNA
agctggcgtgctctgacaac

SEQ ID NO: 105160 - DNA, 20 bp, Artificial Sequence
  MKO10105160_B_Olfr571
  gRNA
aatatggcatgcgagccaac

SEQ ID NO: 105161 - DNA, 20 bp, Artificial Sequence
  MKO10105161_B_Olfr571
  gRNA
ttgctgacagtaccacaacc

SEQ ID NO: 105162 - DNA, 20 bp, Artificial Sequence
  MKO10105162_B_Olfr571
  gRNA
tgggatctgctgaggaccgc

SEQ ID NO: 105163 - DNA, 20 bp, Artificial Sequence
  MKO10105163_B_Olfr572
  gRNA
caaggcgcatgacatcttga

SEQ ID NO: 105164 - DNA, 20 bp, Artificial Sequence
  MKO10105164_B_Olfr572
  gRNA
ctatgtgttcatacttcgca

SEQ ID NO: 105165 - DNA, 20 bp, Artificial Sequence
  MKO10105165_B_Olfr572
  gRNA
gtgtcagtcattcatcgctt

SEQ ID NO: 105166 - DNA, 20 bp, Artificial Sequence
  MKO10105166_B_Olfr574
  gRNA
tcgcactgttctgaacatcg

SEQ ID NO: 105167 - DNA, 20 bp, Artificial Sequence
  MKO10105167_B_Olfr574
  gRNA
gattagaacttgctcacgtc

SEQ ID NO: 105168 - DNA, 20 bp, Artificial Sequence
  MKO10105168_B_Olfr574
  gRNA
cgatgttcagaacagtgcga

SEQ ID NO: 105169 - DNA, 20 bp, Artificial Sequence
  MKO10105169_B_Olfr575
  gRNA
ggttgcgtatggccaagaag

SEQ ID NO: 105170 - DNA, 20 bp, Artificial Sequence
  MKO10105170_B_Olfr575
  gRNA
gcctggagtatgctcatgcg

SEQ ID NO: 105171 - DNA, 20 bp, Artificial Sequence
  MKO10105171_B_Olfr575
  gRNA
tccacgcatgagcatactcc

SEQ ID NO: 105172 - DNA, 20 bp, Artificial Sequence
  MKO10105172_B_Olfr576
  gRNA
tcgtgggcatattccagtcc

SEQ ID NO: 105173 - DNA, 20 bp, Artificial Sequence
  MKO10105173_B_Olfr576
  gRNA
gttaacctatgtgtgagata

SEQ ID NO: 105174 - DNA, 20 bp, Artificial Sequence
  MKO10105174_B_Olfr576
  gRNA
catgtaccttattgccatca

SEQ ID NO: 105175 - DNA, 20 bp, Artificial Sequence
  MKO10105175_B_Olfr577
  gRNA
ccgtattgtccattgcctca

SEQ ID NO: 105176 - DNA, 20 bp, Artificial Sequence
  MKO10105176_B_Olfr577
  gRNA
gggcctgtttcccaaagcgg

SEQ ID NO: 105177 - DNA, 20 bp, Artificial Sequence
  MKO10105177_B_Olfr577
  gRNA
ttgtctgtaatccaccgctt

SEQ ID NO: 105178 - DNA, 20 bp, Artificial Sequence
  MKO10105178_B_Olfr578
  gRNA
catgggctaacacgtgggat

SEQ ID NO: 105179 - DNA, 20 bp, Artificial Sequence
  MKO10105179_B_Olfr578
  gRNA
gctcaccaaagcgatgcaca

SEQ ID NO: 105180 - DNA, 20 bp, Artificial Sequence
  MKO10105180_B_Olfr578
  gRNA
ttatcccttgtgcatcgctt

SEQ ID NO: 105181 - DNA, 20 bp, Artificial Sequence
  MKO10105181_B_Olfr57
  gRNA
ttgcagtagcatgtgagttt

SEQ ID NO: 105182 - DNA, 20 bp, Artificial Sequence
  MKO10105182_B_Olfr57
  gRNA
atgtatatattgactttcac

SEQ ID NO: 105183 - DNA, 20 bp, Artificial Sequence
  MKO10105183_B_Olfr57
  gRNA
caggtgggagtcaacaatga

SEQ ID NO: 105184 - DNA, 20 bp, Artificial Sequence
  MKO10105184_B_Olfr582
  gRNA
tatgatgcattctctcatgt

SEQ ID NO: 105185 - DNA, 20 bp, Artificial Sequence
  MKO10105185_B_Olfr582
  gRNA
tagtttgatgactacagatg

SEQ ID NO: 105186 - DNA, 20 bp, Artificial Sequence
  MKO10105186_B_Olfr582
  gRNA
ccatgtgctcacagtaagac

SEQ ID NO: 105187 - DNA, 20 bp, Artificial Sequence
  MKO10105187_B_Olfr583
  gRNA
ctttatgccaccgccctctc

SEQ ID NO: 105188 - DNA, 20 bp, Artificial Sequence
  MKO10105188_B_Olfr583
  gRNA
cttcagagaaagcaatattg

SEQ ID NO: 105189 - DNA, 20 bp, Artificial Sequence
  MKO10105189_B_Olfr583
  gRNA
tctagaattcataagaatca

SEQ ID NO: 105190 - DNA, 20 bp, Artificial Sequence
  MKO10105190_B_Olfr584
  gRNA
tatgatgtattctctcatgt

SEQ ID NO: 105191 - DNA, 20 bp, Artificial Sequence
  MKO10105191_B_Olfr584
  gRNA
tttgtggctttctctgttgt

SEQ ID NO: 105192 - DNA, 20 bp, Artificial Sequence
  MKO10105192_B_Olfr584
  gRNA
ccagagtatagccagcattt

SEQ ID NO: 105193 - DNA, 20 bp, Artificial Sequence
  MKO10105193_B_Olfr585
  gRNA
gtagagtgcgcattatcact

SEQ ID NO: 105194 - DNA, 20 bp, Artificial Sequence
  MKO10105194_B_Olfr585
  gRNA
cttgtgtcgttcttcagatg

SEQ ID NO: 105195 - DNA, 20 bp, Artificial Sequence
  MKO10105195_B_Olfr585
  gRNA
ccgtgagcagactctagtcc

SEQ ID NO: 105196 - DNA, 20 bp, Artificial Sequence
  MKO10105196_B_Olfr586
  gRNA
tgaagtttctacgttccatt

SEQ ID NO: 105197 - DNA, 20 bp, Artificial Sequence
  MKO10105197_B_Olfr586
  gRNA
caaggcgatagatgacagca

SEQ ID NO: 105198 - DNA, 20 bp, Artificial Sequence
  MKO10105198_B_Olfr586
  gRNA
agccatgagaatcttagata

SEQ ID NO: 105199 - DNA, 20 bp, Artificial Sequence
  MKO10105199_B_Olfr589
  gRNA
ttggcattgctgtgctagtg

SEQ ID NO: 105200 - DNA, 20 bp, Artificial Sequence
  MKO10105200_B_Olfr589
  gRNA
accaaagcgatgtgtcatga

SEQ ID NO: 105201 - DNA, 20 bp, Artificial Sequence
  MKO10105201_B_Olfr589
  gRNA
cagcaccattctcaccaata

SEQ ID NO: 105202 - DNA, 20 bp, Artificial Sequence
  MKO10105202_B_Olfr58
  gRNA
cagggaaagtatggtagctt

SEQ ID NO: 105203 - DNA, 20 bp, Artificial Sequence
  MKO10105203_B_Olfr58
  gRNA
catttccaagcatagtgagc

SEQ ID NO: 105204 - DNA, 20 bp, Artificial Sequence
  MKO10105204_B_Olfr58
  gRNA
tttctttcaagcatcattgt

SEQ ID NO: 105205 - DNA, 20 bp, Artificial Sequence
  MKO10105205_B_Olfr591
  gRNA
atacttaacttcagactctt

SEQ ID NO: 105206 - DNA, 20 bp, Artificial Sequence
  MKO10105206_B_Olfr591
  gRNA
gaatcagaaatacttgagtg

SEQ ID NO: 105207 - DNA, 20 bp, Artificial Sequence
  MKO10105207_B_Olfr591
  gRNA
aaaatgtagcccatgcaaaa

SEQ ID NO: 105208 - DNA, 20 bp, Artificial Sequence
  MKO10105208_B_Olfr592
  gRNA
agccaccgaagtttatttca

SEQ ID NO: 105209 - DNA, 20 bp, Artificial Sequence
  MKO10105209_B_Olfr592
  gRNA
gctctgtcttgataactacc

SEQ ID NO: 105210 - DNA, 20 bp, Artificial Sequence
  MKO10105210_B_Olfr592
  gRNA
tcttgttgccaacctctatt

SEQ ID NO: 105211 - DNA, 20 bp, Artificial Sequence
  MKO10105211_B_Olfr593
  gRNA
ccctcaacctttatcctcat

SEQ ID NO: 105212 - DNA, 20 bp, Artificial Sequence
  MKO10105212_B_Olfr593
  gRNA
gccaatgaggataaaggttg

SEQ ID NO: 105213 - DNA, 20 bp, Artificial Sequence
  MKO10105213_B_Olfr593
  gRNA
ctatcttcttgtgccaccca

SEQ ID NO: 105214 - DNA, 20 bp, Artificial Sequence
  MKO10105214_B_Olfr594
  gRNA
accaaagcggtgtgtcataa

SEQ ID NO: 105215 - DNA, 20 bp, Artificial Sequence
  MKO10105215_B_Olfr594
  gRNA
gactagagtctcaccacacc

SEQ ID NO: 105216 - DNA, 20 bp, Artificial Sequence
  MKO10105216_B_Olfr594
  gRNA
catgctagccaccattgact

SEQ ID NO: 105217 - DNA, 20 bp, Artificial Sequence
  MKO10105217_B_Olfr596
  gRNA
ctctattctcaccaacaaag

SEQ ID NO: 105218 - DNA, 20 bp, Artificial Sequence
  MKO10105218_B_Olfr596
  gRNA
atcagataaacaacaaagaa

SEQ ID NO: 105219 - DNA, 20 bp, Artificial Sequence
  MKO10105219_B_Olfr596
  gRNA
gtcctcactccataaatgac

SEQ ID NO: 105220 - DNA, 20 bp, Artificial Sequence
  MKO10105220_B_Olfr597
  gRNA
agccattgccaatagaatgc

SEQ ID NO: 105221 - DNA, 20 bp, Artificial Sequence
  MKO10105221_B_Olfr597
  gRNA
catccataccttacagtgca

SEQ ID NO: 105222 - DNA, 20 bp, Artificial Sequence
  MKO10105222_B_Olfr597
  gRNA
caatttgaatggaccaaaaa

SEQ ID NO: 105223 - DNA, 20 bp, Artificial Sequence
  MKO10105223_B_Olfr598
  gRNA
actccatgccctgaagggta

SEQ ID NO: 105224 - DNA, 20 bp, Artificial Sequence
  MKO10105224_B_Olfr598
  gRNA
tagcgttctgggatttgaca

SEQ ID NO: 105225 - DNA, 20 bp, Artificial Sequence
  MKO10105225_B_Olfr598
  gRNA
attcttacaccctcaattct

SEQ ID NO: 105226 - DNA, 20 bp, Artificial Sequence
  MKO10105226_B_Olfr599
  gRNA
ttggtgtagactgcgttctg

SEQ ID NO: 105227 - DNA, 20 bp, Artificial Sequence
  MKO10105227_B_Olfr599
  gRNA
gtccgtattaataaatcata

SEQ ID NO: 105228 - DNA, 20 bp, Artificial Sequence
  MKO10105228_B_Olfr599
  gRNA
ttctcctcaagcgactgcaa

SEQ ID NO: 105229 - DNA, 20 bp, Artificial Sequence
  MKO10105229_B_Olfr59
  gRNA
ggtgacaaatagctacaaag

SEQ ID NO: 105230 - DNA, 20 bp, Artificial Sequence
  MKO10105230_B_Olfr59
  gRNA
cacctccaccacagtgccca

SEQ ID NO: 105231 - DNA, 20 bp, Artificial Sequence
  MKO10105231_B_Olfr59
  gRNA
agacataaggatgagcaaaa

SEQ ID NO: 105232 - DNA, 20 bp, Artificial Sequence
  MKO10105232_B_Olfr5
  gRNA
ttgggtcatacaagctatga

SEQ ID NO: 105233 - DNA, 20 bp, Artificial Sequence
  MKO10105233_B_Olfr5
  gRNA
gtacatgacaggttgagtaa

SEQ ID NO: 105234 - DNA, 20 bp, Artificial Sequence
  MKO10105234_B_Olfr5
  gRNA
tcaacttcaggaccagtgca

SEQ ID NO: 105235 - DNA, 20 bp, Artificial Sequence
  MKO10105235_B_Olfr600
  gRNA
tacagccatgtacgcacagt

SEQ ID NO: 105236 - DNA, 20 bp, Artificial Sequence
  MKO10105236_B_Olfr600
  gRNA
ttcggactgcatatattaag

SEQ ID NO: 105237 - DNA, 20 bp, Artificial Sequence
  MKO10105237_B_Olfr600
  gRNA
tacccgctcccttatctgtt

SEQ ID NO: 105238 - DNA, 20 bp, Artificial Sequence
  MKO10105238_B_Olfr601
  gRNA
ctatgagaatatgagttcgg

SEQ ID NO: 105239 - DNA, 20 bp, Artificial Sequence
  MKO10105239_B_Olfr601
  gRNA
caggaaggtaaacccagctg

SEQ ID NO: 105240 - DNA, 20 bp, Artificial Sequence
  MKO10105240_B_Olfr601
  gRNA
gaatcccaatccacacatga

SEQ ID NO: 105241 - DNA, 20 bp, Artificial Sequence
  MKO10105241_B_Olfr603
  gRNA
tcattgctttctcctatgct

SEQ ID NO: 105242 - DNA, 20 bp, Artificial Sequence
  MKO10105242_B_Olfr603
  gRNA
cccctctctcttccatctgc

SEQ ID NO: 105243 - DNA, 20 bp, Artificial Sequence
  MKO10105243_B_Olfr603
  gRNA
gtcctcactccataaatgac

SEQ ID NO: 105244 - DNA, 20 bp, Artificial Sequence
  MKO10105244_B_Olfr605
  gRNA
caacagtcgcatcgccaaga

SEQ ID NO: 105245 - DNA, 20 bp, Artificial Sequence
  MKO10105245_B_Olfr605
  gRNA
gcgactgttggtgagaatag

SEQ ID NO: 105246 - DNA, 20 bp, Artificial Sequence
  MKO10105246_B_Olfr605
  gRNA
atgcatcgaaggtgatatca

SEQ ID NO: 105247 - DNA, 20 bp, Artificial Sequence
  MKO10105247_B_Olfr606
  gRNA
aaaagaatgctagacgaacc

SEQ ID NO: 105248 - DNA, 20 bp, Artificial Sequence
  MKO10105248_B_Olfr606
  gRNA
ttaccccaataatgtagata

SEQ ID NO: 105249 - DNA, 20 bp, Artificial Sequence
  MKO10105249_B_Olfr606
  gRNA
ccgaaacttattgctaaaat

SEQ ID NO: 105250 - DNA, 20 bp, Artificial Sequence
  MKO10105250_B_Olfr608
  gRNA
agcttcctaactcatcgcat

SEQ ID NO: 105251 - DNA, 20 bp, Artificial Sequence
  MKO10105251_B_Olfr608
  gRNA
gattatatagcctgtgtagt

SEQ ID NO: 105252 - DNA, 20 bp, Artificial Sequence
  MKO10105252_B_Olfr608
  gRNA
aaagccggaacactgcttga

SEQ ID NO: 105253 - DNA, 20 bp, Artificial Sequence
  MKO10105253_B_Olfr609
  gRNA
cacggaagatttagtgaccc

SEQ ID NO: 105254 - DNA, 20 bp, Artificial Sequence
  MKO10105254_B_Olfr609
  gRNA
ctttctatgatccaccgatt

SEQ ID NO: 105255 - DNA, 20 bp, Artificial Sequence
  MKO10105255_B_Olfr609
  gRNA
aagaagcattgggcatatcc

SEQ ID NO: 105256 - DNA, 20 bp, Artificial Sequence
  MKO10105256_B_Olfr60
  gRNA
ccattagagccattacatag

SEQ ID NO: 105257 - DNA, 20 bp, Artificial Sequence
  MKO10105257_B_Olfr60
  gRNA
ctaatagcagatgtcttcta

SEQ ID NO: 105258 - DNA, 20 bp, Artificial Sequence
  MKO10105258_B_Olfr60
  gRNA
cttcttgtccctctatgtaa

SEQ ID NO: 105259 - DNA, 20 bp, Artificial Sequence
  MKO10105259_B_Olfr610
  gRNA
gtgttcatcccgatgtccta

SEQ ID NO: 105260 - DNA, 20 bp, Artificial Sequence
  MKO10105260_B_Olfr610
  gRNA
gtttctttccatgctgtcga

SEQ ID NO: 105261 - DNA, 20 bp, Artificial Sequence
  MKO10105261_B_Olfr610
  gRNA
agaatagtagcataacgcaa

SEQ ID NO: 105262 - DNA, 20 bp, Artificial Sequence
  MKO10105262_B_Olfr611
  gRNA
atgtacactgcctccagacc

SEQ ID NO: 105263 - DNA, 20 bp, Artificial Sequence
  MKO10105263_B_Olfr611
  gRNA
aaaagtagagcctcctcaag

SEQ ID NO: 105264 - DNA, 20 bp, Artificial Sequence
  MKO10105264_B_Olfr611
  gRNA
ggcaggcacctgcagagtta

SEQ ID NO: 105265 - DNA, 20 bp, Artificial Sequence
  MKO10105265_B_Olfr612
  gRNA
gagaggcacctgcacagtta

SEQ ID NO: 105266 - DNA, 20 bp, Artificial Sequence
  MKO10105266_B_Olfr612
  gRNA
gaggaggaagtcaagcccca

SEQ ID NO: 105267 - DNA, 20 bp, Artificial Sequence
  MKO10105267_B_Olfr612
  gRNA
atgtacactgcctccagccc

SEQ ID NO: 105268 - DNA, 20 bp, Artificial Sequence
  MKO10105268_B_Olfr613
  gRNA
atagagtggctcctcgtatg

SEQ ID NO: 105269 - DNA, 20 bp, Artificial Sequence
  MKO10105269_B_Olfr613
  gRNA
gggatttccagtttcgatct

SEQ ID NO: 105270 - DNA, 20 bp, Artificial Sequence
  MKO10105270_B_Olfr613
  gRNA
gctgaatgtgacatctccgc

SEQ ID NO: 105271 - DNA, 20 bp, Artificial Sequence
  MKO10105271_B_Olfr615
  gRNA
caaggcagagcgaatctgct

SEQ ID NO: 105272 - DNA, 20 bp, Artificial Sequence
  MKO10105272_B_Olfr615
  gRNA
tctcttaagcagtataggca

SEQ ID NO: 105273 - DNA, 20 bp, Artificial Sequence
  MKO10105273_B_Olfr615
  gRNA
ggctggtgggtgcccgcctg

SEQ ID NO: 105274 - DNA, 20 bp, Artificial Sequence
  MKO10105274_B_Olfr616
  gRNA
tagatgatgttgaccctgac

SEQ ID NO: 105275 - DNA, 20 bp, Artificial Sequence
  MKO10105275_B_Olfr616
  gRNA
tctctagttctctgttcgtt

SEQ ID NO: 105276 - DNA, 20 bp, Artificial Sequence
  MKO10105276_B_Olfr616
  gRNA
taggacttgcagctgttgtt

SEQ ID NO: 105277 - DNA, 20 bp, Artificial Sequence
  MKO10105277_B_Olfr617
  gRNA
acaccaatgtcagagacatc

SEQ ID NO: 105278 - DNA, 20 bp, Artificial Sequence
  MKO10105278_B_Olfr617
  gRNA
agtcttcactccataaatga

SEQ ID NO: 105279 - DNA, 20 bp, Artificial Sequence
  MKO10105279_B_Olfr617
  gRNA
ataccagatgtctctgacat

SEQ ID NO: 105280 - DNA, 20 bp, Artificial Sequence
  MKO10105280_B_Olfr618
  gRNA
gcactcaaccctatcatata

SEQ ID NO: 105281 - DNA, 20 bp, Artificial Sequence
  MKO10105281_B_Olfr618
  gRNA
acaccaaccttagagacatt

SEQ ID NO: 105282 - DNA, 20 bp, Artificial Sequence
  MKO10105282_B_Olfr618
  gRNA
caggaggtaccaccacatag

SEQ ID NO: 105283 - DNA, 20 bp, Artificial Sequence
  MKO10105283_B_Olfr619
  gRNA
cagaaaattgctaatacctt

SEQ ID NO: 105284 - DNA, 20 bp, Artificial Sequence
  MKO10105284_B_Olfr619
  gRNA
caatagagatcagcaatatt

SEQ ID NO: 105285 - DNA, 20 bp, Artificial Sequence
  MKO10105285_B_Olfr619
  gRNA
acaccattctcagagacatc

SEQ ID NO: 105286 - DNA, 20 bp, Artificial Sequence
  MKO10105286_B_Olfr61
  gRNA
cctctacacaatcgctctaa

SEQ ID NO: 105287 - DNA, 20 bp, Artificial Sequence
  MKO10105287_B_Olfr61
  gRNA
gtgctaaccttgttatccta

SEQ ID NO: 105288 - DNA, 20 bp, Artificial Sequence
  MKO10105288_B_Olfr61
  gRNA
aaagttgatgcacccataaa

SEQ ID NO: 105289 - DNA, 20 bp, Artificial Sequence
  MKO10105289_B_Olfr620
  gRNA
gtccactgtgcacacggtaa

SEQ ID NO: 105290 - DNA, 20 bp, Artificial Sequence
  MKO10105290_B_Olfr620
  gRNA
agatacgagtgagaattcag

SEQ ID NO: 105291 - DNA, 20 bp, Artificial Sequence
  MKO10105291_B_Olfr620
  gRNA
gtatggtacttcatgtgatt

SEQ ID NO: 105292 - DNA, 20 bp, Artificial Sequence
  MKO10105292_B_Olfr622
  gRNA
tcttgccaatacgatgagat

SEQ ID NO: 105293 - DNA, 20 bp, Artificial Sequence
  MKO10105293_B_Olfr622
  gRNA
gcaaaaatgatgtgaacgct

SEQ ID NO: 105294 - DNA, 20 bp, Artificial Sequence
  MKO10105294_B_Olfr622
  gRNA
gaatgctcgttctaaagccc

SEQ ID NO: 105295 - DNA, 20 bp, Artificial Sequence
  MKO10105295_B_Olfr623
  gRNA
gtgtactatggttcaatcac

SEQ ID NO: 105296 - DNA, 20 bp, Artificial Sequence
  MKO10105296_B_Olfr623
  gRNA
atatcttaatgggttgcgaa

SEQ ID NO: 105297 - DNA, 20 bp, Artificial Sequence
  MKO10105297_B_Olfr623
  gRNA
caattcagtcgaatgattat

SEQ ID NO: 105298 - DNA, 20 bp, Artificial Sequence
  MKO10105298_B_Olfr624
  gRNA
ccccattattggtctgacta

SEQ ID NO: 105299 - DNA, 20 bp, Artificial Sequence
  MKO10105299_B_Olfr624
  gRNA
aaccatagtcagaccaataa

SEQ ID NO: 105300 - DNA, 20 bp, Artificial Sequence
  MKO10105300_B_Olfr624
  gRNA
caaagaagtagtagacttcc

SEQ ID NO: 105301 - DNA, 20 bp, Artificial Sequence
  MKO10105301_B_Olfr628
  gRNA
tttgtggccttcagtatact

SEQ ID NO: 105302 - DNA, 20 bp, Artificial Sequence
  MKO10105302_B_Olfr628
  gRNA
ctccaagcattgctagaaag

SEQ ID NO: 105303 - DNA, 20 bp, Artificial Sequence
  MKO10105303_B_Olfr628
  gRNA
tccatcttaccaaaaatgct

SEQ ID NO: 105304 - DNA, 20 bp, Artificial Sequence
  MKO10105304_B_Olfr629
  gRNA
cactctgtcacgaatctgtt

SEQ ID NO: 105305 - DNA, 20 bp, Artificial Sequence
  MKO10105305_B_Olfr629
  gRNA
catgtccgcttctcattaaa

SEQ ID NO: 105306 - DNA, 20 bp, Artificial Sequence
  MKO10105306_B_Olfr629
  gRNA
gaatgcccgctctaaagcct

SEQ ID NO: 105307 - DNA, 20 bp, Artificial Sequence
  MKO10105307_B_Olfr62
  gRNA
caaactcggtaagagagctg

SEQ ID NO: 105308 - DNA, 20 bp, Artificial Sequence
  MKO10105308_B_Olfr62
  gRNA
atcatgagtcctttgctgcg

SEQ ID NO: 105309 - DNA, 20 bp, Artificial Sequence
  MKO10105309_B_Olfr62
  gRNA
accagtgacccacgcagcaa

SEQ ID NO: 105310 - DNA, 20 bp, Artificial Sequence
  MKO10105310_B_Olfr630
  gRNA
gttaaaaattgcatcccgtg

SEQ ID NO: 105311 - DNA, 20 bp, Artificial Sequence
  MKO10105311_B_Olfr630
  gRNA
cagagcagcagttccaatct

SEQ ID NO: 105312 - DNA, 20 bp, Artificial Sequence
  MKO10105312_B_Olfr630
  gRNA
gcaaatggaggattccttca

SEQ ID NO: 105313 - DNA, 20 bp, Artificial Sequence
  MKO10105313_B_Olfr631
  gRNA
gtgctcattgcgctgtccta

SEQ ID NO: 105314 - DNA, 20 bp, Artificial Sequence
  MKO10105314_B_Olfr631
  gRNA
aggacagcgcaatgagcacg

SEQ ID NO: 105315 - DNA, 20 bp, Artificial Sequence
  MKO10105315_B_Olfr631
  gRNA
ccagaccagccaccgtgtat

SEQ ID NO: 105316 - DNA, 20 bp, Artificial Sequence
  MKO10105316_B_Olfr632
  gRNA
tcgaaccagatgcaagatag

SEQ ID NO: 105317 - DNA, 20 bp, Artificial Sequence
  MKO10105317_B_Olfr632
  gRNA
taatgccactatcttgcatc

SEQ ID NO: 105318 - DNA, 20 bp, Artificial Sequence
  MKO10105318_B_Olfr632
  gRNA
ccgtgtggcattgataggca

SEQ ID NO: 105319 - DNA, 20 bp, Artificial Sequence
  MKO10105319_B_Olfr633
  gRNA
catgggcaataccctcattc

SEQ ID NO: 105320 - DNA, 20 bp, Artificial Sequence
  MKO10105320_B_Olfr633
  gRNA
gaaagagttgtattaacccc

SEQ ID NO: 105321 - DNA, 20 bp, Artificial Sequence
  MKO10105321_B_Olfr633
  gRNA
acctgctgttcgccttctcc

SEQ ID NO: 105322 - DNA, 20 bp, Artificial Sequence
  MKO10105322_B_Olfr635
  gRNA
gaagaagaactgggcaaaac

SEQ ID NO: 105323 - DNA, 20 bp, Artificial Sequence
  MKO10105323_B_Olfr635
  gRNA
gatggtgtagaggcagaata

SEQ ID NO: 105324 - DNA, 20 bp, Artificial Sequence
  MKO10105324_B_Olfr635
  gRNA
tcatcacaggaggtgctagc

SEQ ID NO: 105325 - DNA, 20 bp, Artificial Sequence
  MKO10105325_B_Olfr638
  gRNA
gaagtaactaacaccactca

SEQ ID NO: 105326 - DNA, 20 bp, Artificial Sequence
  MKO10105326_B_Olfr638
  gRNA
tttcccgaatgttgaaccag

SEQ ID NO: 105327 - DNA, 20 bp, Artificial Sequence
  MKO10105327_B_Olfr638
  gRNA
cacactccctacagtcatgc

SEQ ID NO: 105328 - DNA, 20 bp, Artificial Sequence
  MKO10105328_B_Olfr639
  gRNA
ccagtcctggaatgccagtt

SEQ ID NO: 105329 - DNA, 20 bp, Artificial Sequence
  MKO10105329_B_Olfr639
  gRNA
ctcctatcaatcttcctaac

SEQ ID NO: 105330 - DNA, 20 bp, Artificial Sequence
  MKO10105330_B_Olfr639
  gRNA
actaaagagtgttgcactca

SEQ ID NO: 105331 - DNA, 20 bp, Artificial Sequence
  MKO10105331_B_Olfr63
  gRNA
ccataatttacctcaagtcc

SEQ ID NO: 105332 - DNA, 20 bp, Artificial Sequence
  MKO10105332_B_Olfr63
  gRNA
ccacaagccgagcacaacct

SEQ ID NO: 105333 - DNA, 20 bp, Artificial Sequence
  MKO10105333_B_Olfr63
  gRNA
catagcccatgaccacgagc

SEQ ID NO: 105334 - DNA, 20 bp, Artificial Sequence
  MKO10105334_B_Olfr640
  gRNA
tctccatgatccaccgcttc

SEQ ID NO: 105335 - DNA, 20 bp, Artificial Sequence
  MKO10105335_B_Olfr640
  gRNA
aaatcagggcaatccaagct

SEQ ID NO: 105336 - DNA, 20 bp, Artificial Sequence
  MKO10105336_B_Olfr640
  gRNA
gcccatagatattgttaaca

SEQ ID NO: 105337 - DNA, 20 bp, Artificial Sequence
  MKO10105337_B_Olfr641
  gRNA
cattcattctttctcgatga

SEQ ID NO: 105338 - DNA, 20 bp, Artificial Sequence
  MKO10105338_B_Olfr641
  gRNA
aggcgtcaaaagcaatgctg

SEQ ID NO: 105339 - DNA, 20 bp, Artificial Sequence
  MKO10105339_B_Olfr641
  gRNA
gaatcacagtatttgccccg

SEQ ID NO: 105340 - DNA, 20 bp, Artificial Sequence
  MKO10105340_B_Olfr642
  gRNA
gactgccttcgatgcttgcc

SEQ ID NO: 105341 - DNA, 20 bp, Artificial Sequence
  MKO10105341_B_Olfr642
  gRNA
gagactgcacaagatgttac

SEQ ID NO: 105342 - DNA, 20 bp, Artificial Sequence
  MKO10105342_B_Olfr642
  gRNA
caagcatcgaaggcagtctc

SEQ ID NO: 105343 - DNA, 20 bp, Artificial Sequence
  MKO10105343_B_Olfr643
  gRNA
gtgtccatggctgctcgcta

SEQ ID NO: 105344 - DNA, 20 bp, Artificial Sequence
  MKO10105344_B_Olfr643
  gRNA
tctgctgtcactcaatgacc

SEQ ID NO: 105345 - DNA, 20 bp, Artificial Sequence
  MKO10105345_B_Olfr643
  gRNA
taaaactgatctctcttaag

SEQ ID NO: 105346 - DNA, 20 bp, Artificial Sequence
  MKO10105346_B_Olfr644
  gRNA
gtgtccatgtttgctcgcta

SEQ ID NO: 105347 - DNA, 20 bp, Artificial Sequence
  MKO10105347_B_Olfr644
  gRNA
tcactgatgcccgagtgatg

SEQ ID NO: 105348 - DNA, 20 bp, Artificial Sequence
  MKO10105348_B_Olfr644
  gRNA
cctcccatagcgagcaaaca

SEQ ID NO: 105349 - DNA, 20 bp, Artificial Sequence
  MKO10105349_B_Olfr645
  gRNA
caatccactgcgctatgcca

SEQ ID NO: 105350 - DNA, 20 bp, Artificial Sequence
  MKO10105350_B_Olfr645
  gRNA
tccatcgtgttgctcacctt

SEQ ID NO: 105351 - DNA, 20 bp, Artificial Sequence
  MKO10105351_B_Olfr645
  gRNA
gatcaactttaatgcttgct

SEQ ID NO: 105352 - DNA, 20 bp, Artificial Sequence
  MKO10105352_B_Olfr646
  gRNA
ggctggagttcgcccacctc

SEQ ID NO: 105353 - DNA, 20 bp, Artificial Sequence
  MKO10105353_B_Olfr646
  gRNA
atagcccaaattatctttgc

SEQ ID NO: 105354 - DNA, 20 bp, Artificial Sequence
  MKO10105354_B_Olfr646
  gRNA
cgaggactcaagagcataga

SEQ ID NO: 105355 - DNA, 20 bp, Artificial Sequence
  MKO10105355_B_Olfr648
  gRNA
atgatacgtgtcctacagaa

SEQ ID NO: 105356 - DNA, 20 bp, Artificial Sequence
  MKO10105356_B_Olfr648
  gRNA
acgtggaagtgctccaagcc

SEQ ID NO: 105357 - DNA, 20 bp, Artificial Sequence
  MKO10105357_B_Olfr648
  gRNA
gagcacttccacgtgtggat

SEQ ID NO: 105358 - DNA, 20 bp, Artificial Sequence
  MKO10105358_B_Olfr649
  gRNA
ttcgcccaaagcgatgagca

SEQ ID NO: 105359 - DNA, 20 bp, Artificial Sequence
  MKO10105359_B_Olfr649
  gRNA
atctataatcactgtcatga

SEQ ID NO: 105360 - DNA, 20 bp, Artificial Sequence
  MKO10105360_B_Olfr649
  gRNA
aacgtgagtagctacaacac

SEQ ID NO: 105361 - DNA, 20 bp, Artificial Sequence
  MKO10105361_B_Olfr64
  gRNA
gtactatttccttgccatgc

SEQ ID NO: 105362 - DNA, 20 bp, Artificial Sequence
  MKO10105362_B_Olfr64
  gRNA
caagacacctgactccacaa

SEQ ID NO: 105363 - DNA, 20 bp, Artificial Sequence
  MKO10105363_B_Olfr64
  gRNA
ccataaaacagccattacag

SEQ ID NO: 105364 - DNA, 20 bp, Artificial Sequence
  MKO10105364_B_Olfr651
  gRNA
tcccaagaaataaccttctc

SEQ ID NO: 105365 - DNA, 20 bp, Artificial Sequence
  MKO10105365_B_Olfr651
  gRNA
cgcctcagcaggaaaacatc

SEQ ID NO: 105366 - DNA, 20 bp, Artificial Sequence
  MKO10105366_B_Olfr651
  gRNA
ttatggtgagcatcattgtg

SEQ ID NO: 105367 - DNA, 20 bp, Artificial Sequence
  MKO10105367_B_Olfr652
  gRNA
aggggatcccaatccatacg

SEQ ID NO: 105368 - DNA, 20 bp, Artificial Sequence
  MKO10105368_B_Olfr652
  gRNA
tctgtccttgtccatcgttt

SEQ ID NO: 105369 - DNA, 20 bp, Artificial Sequence
  MKO10105369_B_Olfr652
  gRNA
gaatgtagccattatggtca

SEQ ID NO: 105370 - DNA, 20 bp, Artificial Sequence
  MKO10105370_B_Olfr653
  gRNA
cgtgctgcgactgccctcaa

SEQ ID NO: 105371 - DNA, 20 bp, Artificial Sequence
  MKO10105371_B_Olfr653
  gRNA
atcctcaatgctgttgtaat

SEQ ID NO: 105372 - DNA, 20 bp, Artificial Sequence
  MKO10105372_B_Olfr653
  gRNA
ctttgagggcagtcgcagca

SEQ ID NO: 105373 - DNA, 20 bp, Artificial Sequence
  MKO10105373_B_Olfr654
  gRNA
gtgtcgataccacattcaat

SEQ ID NO: 105374 - DNA, 20 bp, Artificial Sequence
  MKO10105374_B_Olfr654
  gRNA
gtctacgaccaccattccta

SEQ ID NO: 105375 - DNA, 20 bp, Artificial Sequence
  MKO10105375_B_Olfr654
  gRNA
cttgtgcagggaacgttcca

SEQ ID NO: 105376 - DNA, 20 bp, Artificial Sequence
  MKO10105376_B_Olfr655
  gRNA
ctaggcgtccaactagagaa

SEQ ID NO: 105377 - DNA, 20 bp, Artificial Sequence
  MKO10105377_B_Olfr655
  gRNA
ctcgatcatcaaaccagaag

SEQ ID NO: 105378 - DNA, 20 bp, Artificial Sequence
  MKO10105378_B_Olfr655
  gRNA
cttcgtgatcttgcttgtag

SEQ ID NO: 105379 - DNA, 20 bp, Artificial Sequence
  MKO10105379_B_Olfr656
  gRNA
gattcgtgaaagggttgcca

SEQ ID NO: 105380 - DNA, 20 bp, Artificial Sequence
  MKO10105380_B_Olfr656
  gRNA
cgtgggcaatataaccatcc

SEQ ID NO: 105381 - DNA, 20 bp, Artificial Sequence
  MKO10105381_B_Olfr656
  gRNA
agaagctcagacgaccaatg

SEQ ID NO: 105382 - DNA, 20 bp, Artificial Sequence
  MKO10105382_B_Olfr657
  gRNA
gtccggtatcttcctctgca

SEQ ID NO: 105383 - DNA, 20 bp, Artificial Sequence
  MKO10105383_B_Olfr657
  gRNA
cttcaatagttccaagtccc

SEQ ID NO: 105384 - DNA, 20 bp, Artificial Sequence
  MKO10105384_B_Olfr657
  gRNA
cgtttgtccctattgctgaa

SEQ ID NO: 105385 - DNA, 20 bp, Artificial Sequence
  MKO10105385_B_Olfr658
  gRNA
cgcttggtgagaaatgtgaa

SEQ ID NO: 105386 - DNA, 20 bp, Artificial Sequence
  MKO10105386_B_Olfr658
  gRNA
tccagactccatccccgtga

SEQ ID NO: 105387 - DNA, 20 bp, Artificial Sequence
  MKO10105387_B_Olfr658
  gRNA
tataggagattgtgatgcac

SEQ ID NO: 105388 - DNA, 20 bp, Artificial Sequence
  MKO10105388_B_Olfr659
  gRNA
agtagtacattgacctgtga

SEQ ID NO: 105389 - DNA, 20 bp, Artificial Sequence
  MKO10105389_B_Olfr659
  gRNA
aattagctttactgattgtc

SEQ ID NO: 105390 - DNA, 20 bp, Artificial Sequence
  MKO10105390_B_Olfr659
  gRNA
cagctctcaagaatgtagca

SEQ ID NO: 105391 - DNA, 20 bp, Artificial Sequence
  MKO10105391_B_Olfr65
  gRNA
ttgccattcgcaacccacta

SEQ ID NO: 105392 - DNA, 20 bp, Artificial Sequence
  MKO10105392_B_Olfr65
  gRNA
ttggtctgacgtttattcac

SEQ ID NO: 105393 - DNA, 20 bp, Artificial Sequence
  MKO10105393_B_Olfr65
  gRNA
caatgcaggcgaatgattat

SEQ ID NO: 105394 - DNA, 20 bp, Artificial Sequence
  MKO10105394_B_Olfr661
  gRNA
agaccgaagaatcaaagcat

SEQ ID NO: 105395 - DNA, 20 bp, Artificial Sequence
  MKO10105395_B_Olfr661
  gRNA
tccccatgagtgtccaagcc

SEQ ID NO: 105396 - DNA, 20 bp, Artificial Sequence
  MKO10105396_B_Olfr661
  gRNA
attcttaagtgcatacacca

SEQ ID NO: 105397 - DNA, 20 bp, Artificial Sequence
  MKO10105397_B_Olfr663
  gRNA
gcagtcatgggtagtgacct

SEQ ID NO: 105398 - DNA, 20 bp, Artificial Sequence
  MKO10105398_B_Olfr663
  gRNA
aacagtggttgatttgattc

SEQ ID NO: 105399 - DNA, 20 bp, Artificial Sequence
  MKO10105399_B_Olfr663
  gRNA
gtcgatcttcctgtcatcac

SEQ ID NO: 105400 - DNA, 20 bp, Artificial Sequence
  MKO10105400_B_Olfr665
  gRNA
cacaccttcacgaatctgct

SEQ ID NO: 105401 - DNA, 20 bp, Artificial Sequence
  MKO10105401_B_Olfr665
  gRNA
ccagtatgttatgcatcttt

SEQ ID NO: 105402 - DNA, 20 bp, Artificial Sequence
  MKO10105402_B_Olfr665
  gRNA
atgaggtttcctctacagta

SEQ ID NO: 105403 - DNA, 20 bp, Artificial Sequence
  MKO10105403_B_Olfr666
  gRNA
aagcgcttgccctattgcag

SEQ ID NO: 105404 - DNA, 20 bp, Artificial Sequence
  MKO10105404_B_Olfr666
  gRNA
atatcgtagaggatagcaga

SEQ ID NO: 105405 - DNA, 20 bp, Artificial Sequence
  MKO10105405_B_Olfr666
  gRNA
catgtacatgattgctgtag

SEQ ID NO: 105406 - DNA, 20 bp, Artificial Sequence
  MKO10105406_B_Olfr667
  gRNA
aatagggcaggcgcttagtg

SEQ ID NO: 105407 - DNA, 20 bp, Artificial Sequence
  MKO10105407_B_Olfr667
  gRNA
gtgaaaatcaatgcagtcta

SEQ ID NO: 105408 - DNA, 20 bp, Artificial Sequence
  MKO10105408_B_Olfr667
  gRNA
ctagtcttgctactttcttg

SEQ ID NO: 105409 - DNA, 20 bp, Artificial Sequence
  MKO10105409_B_Olfr668
  gRNA
cactatgatattgagagcag

SEQ ID NO: 105410 - DNA, 20 bp, Artificial Sequence
  MKO10105410_B_Olfr668
  gRNA
atatcgtagaggattgcaga

SEQ ID NO: 105411 - DNA, 20 bp, Artificial Sequence
  MKO10105411_B_Olfr668
  gRNA
ttctttgttcatatgttgac

SEQ ID NO: 105412 - DNA, 20 bp, Artificial Sequence
  MKO10105412_B_Olfr669
  gRNA
gtctcgaagcagtgcatata

SEQ ID NO: 105413 - DNA, 20 bp, Artificial Sequence
  MKO10105413_B_Olfr669
  gRNA
cagtggttgtgcaagtaaac

SEQ ID NO: 105414 - DNA, 20 bp, Artificial Sequence
  MKO10105414_B_Olfr669
  gRNA
agtatggttgcatagcgtag

SEQ ID NO: 105415 - DNA, 20 bp, Artificial Sequence
  MKO10105415_B_Olfr66
  gRNA
gtgctggcaagtatggacct

SEQ ID NO: 105416 - DNA, 20 bp, Artificial Sequence
  MKO10105416_B_Olfr66
  gRNA
gattcaagtcctactgtgtt

SEQ ID NO: 105417 - DNA, 20 bp, Artificial Sequence
  MKO10105417_B_Olfr66
  gRNA
ccccttgtgcaatctccctc

SEQ ID NO: 105418 - DNA, 20 bp, Artificial Sequence
  MKO10105418_B_Olfr670
  gRNA
agataatgatgttcccaacc

SEQ ID NO: 105419 - DNA, 20 bp, Artificial Sequence
  MKO10105419_B_Olfr670
  gRNA
caacaacatatagattagcc

SEQ ID NO: 105420 - DNA, 20 bp, Artificial Sequence
  MKO10105420_B_Olfr670
  gRNA
tgtggataggcctagatcaa

SEQ ID NO: 105421 - DNA, 20 bp, Artificial Sequence
  MKO10105421_B_Olfr671
  gRNA
cctctacatggttcttccac

SEQ ID NO: 105422 - DNA, 20 bp, Artificial Sequence
  MKO10105422_B_Olfr671
  gRNA
ggacttctgtgacgttatac

SEQ ID NO: 105423 - DNA, 20 bp, Artificial Sequence
  MKO10105423_B_Olfr671
  gRNA
catgttagattccattgacc

SEQ ID NO: 105424 - DNA, 20 bp, Artificial Sequence
  MKO10105424_B_Olfr672
  gRNA
ttgagctacacagtccctaa

SEQ ID NO: 105425 - DNA, 20 bp, Artificial Sequence
  MKO10105425_B_Olfr672
  gRNA
catactggctgttactgact

SEQ ID NO: 105426 - DNA, 20 bp, Artificial Sequence
  MKO10105426_B_Olfr672
  gRNA
agaacaatctgcattattgt

SEQ ID NO: 105427 - DNA, 20 bp, Artificial Sequence
  MKO10105427_B_Olfr675
  gRNA
caatggaatccagcatggct

SEQ ID NO: 105428 - DNA, 20 bp, Artificial Sequence
  MKO10105428_B_Olfr675
  gRNA
ggacttctgtgatgttatac

SEQ ID NO: 105429 - DNA, 20 bp, Artificial Sequence
  MKO10105429_B_Olfr675
  gRNA
ctcaaggctctcaatacttg

SEQ ID NO: 105430 - DNA, 20 bp, Artificial Sequence
  MKO10105430_B_Olfr676
  gRNA
ttctcaagatgctcgcctaa

SEQ ID NO: 105431 - DNA, 20 bp, Artificial Sequence
  MKO10105431_B_Olfr676
  gRNA
tgcccccagtaatatcactg

SEQ ID NO: 105432 - DNA, 20 bp, Artificial Sequence
  MKO10105432_B_Olfr676
  gRNA
attctgtagtaggttgatgt

SEQ ID NO: 105433 - DNA, 20 bp, Artificial Sequence
  MKO10105433_B_Olfr677
  gRNA
ctctcaagatgcccgattga

SEQ ID NO: 105434 - DNA, 20 bp, Artificial Sequence
  MKO10105434_B_Olfr677
  gRNA
gaattcggaaaacagctcga

SEQ ID NO: 105435 - DNA, 20 bp, Artificial Sequence
  MKO10105435_B_Olfr677
  gRNA
gcacataggaagaggcaatc

SEQ ID NO: 105436 - DNA, 20 bp, Artificial Sequence
  MKO10105436_B_Olfr678
  gRNA
gctagcatgtgccaatatca

SEQ ID NO: 105437 - DNA, 20 bp, Artificial Sequence
  MKO10105437_B_Olfr678
  gRNA
agtatcatactgtacctcag

SEQ ID NO: 105438 - DNA, 20 bp, Artificial Sequence
  MKO10105438_B_Olfr678
  gRNA
ataatccggacaccacagaa

SEQ ID NO: 105439 - DNA, 20 bp, Artificial Sequence
  MKO10105439_B_Olfr679
  gRNA
taagggcagcagggatgaca

SEQ ID NO: 105440 - DNA, 20 bp, Artificial Sequence
  MKO10105440_B_Olfr679
  gRNA
tcagcacgactccattactg

SEQ ID NO: 105441 - DNA, 20 bp, Artificial Sequence
  MKO10105441_B_Olfr679
  gRNA
agaactcaggagattaagca

SEQ ID NO: 105442 - DNA, 20 bp, Artificial Sequence
  MKO10105442_B_Olfr67
  gRNA
aaaggaaaaccactcgatct

SEQ ID NO: 105443 - DNA, 20 bp, Artificial Sequence
  MKO10105443_B_Olfr67
  gRNA
gatattgtcgcatgccaatc

SEQ ID NO: 105444 - DNA, 20 bp, Artificial Sequence
  MKO10105444_B_Olfr67
  gRNA
tatatcgacttctgtattgt

SEQ ID NO: 105445 - DNA, 20 bp, Artificial Sequence
  MKO10105445_B_Olfr681
  gRNA
tggaggacattgagcaaaat

SEQ ID NO: 105446 - DNA, 20 bp, Artificial Sequence
  MKO10105446_B_Olfr681
  gRNA
ttgcccatccccattctttc

SEQ ID NO: 105447 - DNA, 20 bp, Artificial Sequence
  MKO10105447_B_Olfr681
  gRNA
tcgtcctgaaagaatgggga

SEQ ID NO: 105448 - DNA, 20 bp, Artificial Sequence
  MKO10105448_B_Olfr683
  gRNA
gggtccaacctataacaaac

SEQ ID NO: 105449 - DNA, 20 bp, Artificial Sequence
  MKO10105449_B_Olfr683
  gRNA
catagtaagaatcccatttc

SEQ ID NO: 105450 - DNA, 20 bp, Artificial Sequence
  MKO10105450_B_Olfr683
  gRNA
aaactctaccagtttgttat

SEQ ID NO: 105451 - DNA, 20 bp, Artificial Sequence
  MKO10105451_B_Olfr684
  gRNA
ctgagcacagtactttagtc

SEQ ID NO: 105452 - DNA, 20 bp, Artificial Sequence
  MKO10105452_B_Olfr684
  gRNA
aaactatatcaacttgtagc

SEQ ID NO: 105453 - DNA, 20 bp, Artificial Sequence
  MKO10105453_B_Olfr684
  gRNA
caagttgatatagtttattg

SEQ ID NO: 105454 - DNA, 20 bp, Artificial Sequence
  MKO10105454_B_Olfr685
  gRNA
ttaagtctggcttcaccccc

SEQ ID NO: 105455 - DNA, 20 bp, Artificial Sequence
  MKO10105455_B_Olfr685
  gRNA
accacagtgaatcgagctta

SEQ ID NO: 105456 - DNA, 20 bp, Artificial Sequence
  MKO10105456_B_Olfr685
  gRNA
accataagctcgattcactg

SEQ ID NO: 105457 - DNA, 20 bp, Artificial Sequence
  MKO10105457_B_Olfr686
  gRNA
ggcttgtggggccataactg

SEQ ID NO: 105458 - DNA, 20 bp, Artificial Sequence
  MKO10105458_B_Olfr686
  gRNA
cctgaagttgttgccaagat

SEQ ID NO: 105459 - DNA, 20 bp, Artificial Sequence
  MKO10105459_B_Olfr686
  gRNA
tctgtggtcatgcagcgctt

SEQ ID NO: 105460 - DNA, 20 bp, Artificial Sequence
  MKO10105460_B_Olfr688
  gRNA
gcctgagtgagtttgtgtct

SEQ ID NO: 105461 - DNA, 20 bp, Artificial Sequence
  MKO10105461_B_Olfr688
  gRNA
cgtgtctgagttcattctgc

SEQ ID NO: 105462 - DNA, 20 bp, Artificial Sequence
  MKO10105462_B_Olfr688
  gRNA
tataccacggggttaaggga

SEQ ID NO: 105463 - DNA, 20 bp, Artificial Sequence
  MKO10105463_B_Olfr689
  gRNA
atgatgtaaagtagagccat

SEQ ID NO: 105464 - DNA, 20 bp, Artificial Sequence
  MKO10105464_B_Olfr689
  gRNA
actgccagttgacattggcc

SEQ ID NO: 105465 - DNA, 20 bp, Artificial Sequence
  MKO10105465_B_Olfr689
  gRNA
acttggaattgacatgattc

SEQ ID NO: 105466 - DNA, 20 bp, Artificial Sequence
  MKO10105466_B_Olfr68
  gRNA
agagagtcactaatgtttct

SEQ ID NO: 105467 - DNA, 20 bp, Artificial Sequence
  MKO10105467_B_Olfr68
  gRNA
catttgatgagtagtatgga

SEQ ID NO: 105468 - DNA, 20 bp, Artificial Sequence
  MKO10105468_B_Olfr68
  gRNA
tggtagtttgaaagtactta

SEQ ID NO: 105469 - DNA, 20 bp, Artificial Sequence
  MKO10105469_B_Olfr690
  gRNA
tatgtacattgctgcagtct

SEQ ID NO: 105470 - DNA, 20 bp, Artificial Sequence
  MKO10105470_B_Olfr690
  gRNA
gaaaaatgaccctggccatc

SEQ ID NO: 105471 - DNA, 20 bp, Artificial Sequence
  MKO10105471_B_Olfr690
  gRNA
ggtgccaatggcttcagttt

SEQ ID NO: 105472 - DNA, 20 bp, Artificial Sequence
  MKO10105472_B_Olfr691
  gRNA
aatgggggacgatgttggtt

SEQ ID NO: 105473 - DNA, 20 bp, Artificial Sequence
  MKO10105473_B_Olfr691
  gRNA
agtgtttcgcttgccctccc

SEQ ID NO: 105474 - DNA, 20 bp, Artificial Sequence
  MKO10105474_B_Olfr691
  gRNA
agggcaagcgaaacactgct

SEQ ID NO: 105475 - DNA, 20 bp, Artificial Sequence
  MKO10105475_B_Olfr692
  gRNA
tacccaggaggcccgagtaa

SEQ ID NO: 105476 - DNA, 20 bp, Artificial Sequence
  MKO10105476_B_Olfr692
  gRNA
ctatagatgtggctaagccc

SEQ ID NO: 105477 - DNA, 20 bp, Artificial Sequence
  MKO10105477_B_Olfr692
  gRNA
tttactcgggcctcctgggt

SEQ ID NO: 105478 - DNA, 20 bp, Artificial Sequence
  MKO10105478_B_Olfr693
  gRNA
cacctccagatatcaactca

SEQ ID NO: 105479 - DNA, 20 bp, Artificial Sequence
  MKO10105479_B_Olfr693
  gRNA
ggggtactgcatagtgtaga

SEQ ID NO: 105480 - DNA, 20 bp, Artificial Sequence
  MKO10105480_B_Olfr693
  gRNA
tatcagtcccaaagctgtca

SEQ ID NO: 105481 - DNA, 20 bp, Artificial Sequence
  MKO10105481_B_Olfr694
  gRNA
ttaccatgtatcttctgcta

SEQ ID NO: 105482 - DNA, 20 bp, Artificial Sequence
  MKO10105482_B_Olfr694
  gRNA
gctgcacatgccctcaaatg

SEQ ID NO: 105483 - DNA, 20 bp, Artificial Sequence
  MKO10105483_B_Olfr694
  gRNA
ctagagcactgagagatgca

SEQ ID NO: 105484 - DNA, 20 bp, Artificial Sequence
  MKO10105484_B_Olfr695
  gRNA
ggaagtcttcaactccacct

SEQ ID NO: 105485 - DNA, 20 bp, Artificial Sequence
  MKO10105485_B_Olfr695
  gRNA
tgggaatgataactgatggt

SEQ ID NO: 105486 - DNA, 20 bp, Artificial Sequence
  MKO10105486_B_Olfr695
  gRNA
aaagtatagtgctatgataa

SEQ ID NO: 105487 - DNA, 20 bp, Artificial Sequence
  MKO10105487_B_Olfr697
  gRNA
gccaccaccccatacattta

SEQ ID NO: 105488 - DNA, 20 bp, Artificial Sequence
  MKO10105488_B_Olfr697
  gRNA
tggtcagtgccagtgtgtac

SEQ ID NO: 105489 - DNA, 20 bp, Artificial Sequence
  MKO10105489_B_Olfr697
  gRNA
attattctttctgcaaatcg

SEQ ID NO: 105490 - DNA, 20 bp, Artificial Sequence
  MKO10105490_B_Olfr698
  gRNA
tttctacacgattgtcactc

SEQ ID NO: 105491 - DNA, 20 bp, Artificial Sequence
  MKO10105491_B_Olfr698
  gRNA
gacaacacagaatggagctc

SEQ ID NO: 105492 - DNA, 20 bp, Artificial Sequence
  MKO10105492_B_Olfr698
  gRNA
ctgtccaagtagaagataca

SEQ ID NO: 105493 - DNA, 20 bp, Artificial Sequence
  MKO10105493_B_Olfr699
  gRNA
gtacctatgtaccttctgct

SEQ ID NO: 105494 - DNA, 20 bp, Artificial Sequence
  MKO10105494_B_Olfr699
  gRNA
ccctaaaaagtagactgtgt

SEQ ID NO: 105495 - DNA, 20 bp, Artificial Sequence
  MKO10105495_B_Olfr699
  gRNA
agaagggatattgcattgta

SEQ ID NO: 105496 - DNA, 20 bp, Artificial Sequence
  MKO10105496_B_Olfr69
  gRNA
cccactagtgttaaaacaga

SEQ ID NO: 105497 - DNA, 20 bp, Artificial Sequence
  MKO10105497_B_Olfr69
  gRNA
cgtgatgaagattcgcacat

SEQ ID NO: 105498 - DNA, 20 bp, Artificial Sequence
  MKO10105498_B_Olfr69
  gRNA
ttgagctgccaatttcacaa

SEQ ID NO: 105499 - DNA, 20 bp, Artificial Sequence
  MKO10105499_B_Olfr6
  gRNA
gaaggccttccgctgcccag

SEQ ID NO: 105500 - DNA, 20 bp, Artificial Sequence
  MKO10105500_B_Olfr6
  gRNA
agcttgtatgaacttatcta

SEQ ID NO: 105501 - DNA, 20 bp, Artificial Sequence
  MKO10105501_B_Olfr6
  gRNA
taaaagtacacattcagtac

SEQ ID NO: 105502 - DNA, 20 bp, Artificial Sequence
  MKO10105502_B_Olfr700
  gRNA
gagcaggattagtgtataag

SEQ ID NO: 105503 - DNA, 20 bp, Artificial Sequence
  MKO10105503_B_Olfr700
  gRNA
acttagaatgtagagtgttc

SEQ ID NO: 105504 - DNA, 20 bp, Artificial Sequence
  MKO10105504_B_Olfr700
  gRNA
cccaaccacagttagatgtg

SEQ ID NO: 105505 - DNA, 20 bp, Artificial Sequence
  MKO10105505_B_Olfr701
  gRNA
ggtacatgggtacgtgaagc

SEQ ID NO: 105506 - DNA, 20 bp, Artificial Sequence
  MKO10105506_B_Olfr701
  gRNA
agatgctaggatccatgata

SEQ ID NO: 105507 - DNA, 20 bp, Artificial Sequence
  MKO10105507_B_Olfr701
  gRNA
accatgagcctgcaggcctt

SEQ ID NO: 105508 - DNA, 20 bp, Artificial Sequence
  MKO10105508_B_Olfr702
  gRNA
gccagttggctatagtttcc

SEQ ID NO: 105509 - DNA, 20 bp, Artificial Sequence
  MKO10105509_B_Olfr702
  gRNA
tgacacctataatgctgaaa

SEQ ID NO: 105510 - DNA, 20 bp, Artificial Sequence
  MKO10105510_B_Olfr702
  gRNA
tggggcatttgcatgttcag

SEQ ID NO: 105511 - DNA, 20 bp, Artificial Sequence
  MKO10105511_B_Olfr703
  gRNA
agtaaacagaattcgtacat

SEQ ID NO: 105512 - DNA, 20 bp, Artificial Sequence
  MKO10105512_B_Olfr703
  gRNA
ctagggctatcactgatgcc

SEQ ID NO: 105513 - DNA, 20 bp, Artificial Sequence
  MKO10105513_B_Olfr703
  gRNA
ctggcatcagtgatagccct

SEQ ID NO: 105514 - DNA, 20 bp, Artificial Sequence
  MKO10105514_B_Olfr704
  gRNA
cagtaccaagtgtcaaagcc

SEQ ID NO: 105515 - DNA, 20 bp, Artificial Sequence
  MKO10105515_B_Olfr704
  gRNA
tttgacacttggtactgcag

SEQ ID NO: 105516 - DNA, 20 bp, Artificial Sequence
  MKO10105516_B_Olfr704
  gRNA
gctgcacatgccctctaatg

SEQ ID NO: 105517 - DNA, 20 bp, Artificial Sequence
  MKO10105517_B_Olfr705
  gRNA
atgggtcctagcatctctga

SEQ ID NO: 105518 - DNA, 20 bp, Artificial Sequence
  MKO10105518_B_Olfr705
  gRNA
tttgcaataggaatactgca

SEQ ID NO: 105519 - DNA, 20 bp, Artificial Sequence
  MKO10105519_B_Olfr705
  gRNA
gccagcacaccctactctct

SEQ ID NO: 105520 - DNA, 20 bp, Artificial Sequence
  MKO10105520_B_Olfr706
  gRNA
atggctctagcattgatgct

SEQ ID NO: 105521 - DNA, 20 bp, Artificial Sequence
  MKO10105521_B_Olfr706
  gRNA
agtgtctacatcatggatcc

SEQ ID NO: 105522 - DNA, 20 bp, Artificial Sequence
  MKO10105522_B_Olfr706
  gRNA
ccagcacaccttactcttta

SEQ ID NO: 105523 - DNA, 20 bp, Artificial Sequence
  MKO10105523_B_Olfr707
  gRNA
tgtgacagaattcatcttcc

SEQ ID NO: 105524 - DNA, 20 bp, Artificial Sequence
  MKO10105524_B_Olfr707
  gRNA
cagtggtgcacttgtgtccc

SEQ ID NO: 105525 - DNA, 20 bp, Artificial Sequence
  MKO10105525_B_Olfr707
  gRNA
caggaggttcacagaaaaag

SEQ ID NO: 105526 - DNA, 20 bp, Artificial Sequence
  MKO10105526_B_Olfr70
  gRNA
ccgttaatatcagcgcgttg

SEQ ID NO: 105527 - DNA, 20 bp, Artificial Sequence
  MKO10105527_B_Olfr70
  gRNA
actccgttgtacctagggcc

SEQ ID NO: 105528 - DNA, 20 bp, Artificial Sequence
  MKO10105528_B_Olfr70
  gRNA
agcggcccattcacgagctc

SEQ ID NO: 105529 - DNA, 20 bp, Artificial Sequence
  MKO10105529_B_Olfr710
  gRNA
ttctgctagttgtaggatcc

SEQ ID NO: 105530 - DNA, 20 bp, Artificial Sequence
  MKO10105530_B_Olfr710
  gRNA
tgaactccgtcagataagtg

SEQ ID NO: 105531 - DNA, 20 bp, Artificial Sequence
  MKO10105531_B_Olfr710
  gRNA
actgtggttcaaatacaatc

SEQ ID NO: 105532 - DNA, 20 bp, Artificial Sequence
  MKO10105532_B_Olfr711
  gRNA
tgagctagtagactttgctt

SEQ ID NO: 105533 - DNA, 20 bp, Artificial Sequence
  MKO10105533_B_Olfr711
  gRNA
atgatgactggatatcgaag

SEQ ID NO: 105534 - DNA, 20 bp, Artificial Sequence
  MKO10105534_B_Olfr711
  gRNA
ttgtaattatattcactgtc

SEQ ID NO: 105535 - DNA, 20 bp, Artificial Sequence
  MKO10105535_B_Olfr713
  gRNA
aacttatccttcttagagat

SEQ ID NO: 105536 - DNA, 20 bp, Artificial Sequence
  MKO10105536_B_Olfr713
  gRNA
aatcagagtccccaacattt

SEQ ID NO: 105537 - DNA, 20 bp, Artificial Sequence
  MKO10105537_B_Olfr713
  gRNA
cttcaagcctcacttacttt

SEQ ID NO: 105538 - DNA, 20 bp, Artificial Sequence
  MKO10105538_B_Olfr714
  gRNA
aatagctgaatttatcctca

SEQ ID NO: 105539 - DNA, 20 bp, Artificial Sequence
  MKO10105539_B_Olfr714
  gRNA
aatcagagtcctcaacattt

SEQ ID NO: 105540 - DNA, 20 bp, Artificial Sequence
  MKO10105540_B_Olfr714
  gRNA
gtcccttggttcatgatgat

SEQ ID NO: 105541 - DNA, 20 bp, Artificial Sequence
  MKO10105541_B_Olfr715
  gRNA
cctgcttgagaagttcttca

SEQ ID NO: 105542 - DNA, 20 bp, Artificial Sequence
  MKO10105542_B_Olfr715
  gRNA
ccatgaagaacttctcaagc

SEQ ID NO: 105543 - DNA, 20 bp, Artificial Sequence
  MKO10105543_B_Olfr715
  gRNA
tacttctcatgttccttgtt

SEQ ID NO: 105544 - DNA, 20 bp, Artificial Sequence
  MKO10105544_B_Olfr716
  gRNA
gttccgaagactataaatta

SEQ ID NO: 105545 - DNA, 20 bp, Artificial Sequence
  MKO10105545_B_Olfr716
  gRNA
ccctagggtcctgggccagt

SEQ ID NO: 105546 - DNA, 20 bp, Artificial Sequence
  MKO10105546_B_Olfr716
  gRNA
gctttccatcttccctatcg

SEQ ID NO: 105547 - DNA, 20 bp, Artificial Sequence
  MKO10105547_B_Olfr71
  gRNA
cagagacggtcatcgccatg

SEQ ID NO: 105548 - DNA, 20 bp, Artificial Sequence
  MKO10105548_B_Olfr71
  gRNA
ccgtaaaggagatggtcttc

SEQ ID NO: 105549 - DNA, 20 bp, Artificial Sequence
  MKO10105549_B_Olfr71
  gRNA
tgaagtgtctgatcacgtgg

SEQ ID NO: 105550 - DNA, 20 bp, Artificial Sequence
  MKO10105550_B_Olfr720
  gRNA
catatgtgccacgttcttca

SEQ ID NO: 105551 - DNA, 20 bp, Artificial Sequence
  MKO10105551_B_Olfr720
  gRNA
cactattgtgcctaagattt

SEQ ID NO: 105552 - DNA, 20 bp, Artificial Sequence
  MKO10105552_B_Olfr720
  gRNA
ataggcttggggaagcatat

SEQ ID NO: 105553 - DNA, 20 bp, Artificial Sequence
  MKO10105553_B_Olfr722
  gRNA
ttcaccattagatcagactc

SEQ ID NO: 105554 - DNA, 20 bp, Artificial Sequence
  MKO10105554_B_Olfr722
  gRNA
gtcattctctaccacgtaaa

SEQ ID NO: 105555 - DNA, 20 bp, Artificial Sequence
  MKO10105555_B_Olfr722
  gRNA
ctgaaatcagtgcgaagacc

SEQ ID NO: 105556 - DNA, 20 bp, Artificial Sequence
  MKO10105556_B_Olfr723
  gRNA
catacacacaatgagccaga

SEQ ID NO: 105557 - DNA, 20 bp, Artificial Sequence
  MKO10105557_B_Olfr723
  gRNA
gtttccaagaagaaagtaca

SEQ ID NO: 105558 - DNA, 20 bp, Artificial Sequence
  MKO10105558_B_Olfr723
  gRNA
tctcccatgtactttcttct

SEQ ID NO: 105559 - DNA, 20 bp, Artificial Sequence
  MKO10105559_B_Olfr724
  gRNA
tttcagcaccccccaaaaaa

SEQ ID NO: 105560 - DNA, 20 bp, Artificial Sequence
  MKO10105560_B_Olfr724
  gRNA
catacacaccatgagccaga

SEQ ID NO: 105561 - DNA, 20 bp, Artificial Sequence
  MKO10105561_B_Olfr724
  gRNA
gaataaatggattataaaaa

SEQ ID NO: 105562 - DNA, 20 bp, Artificial Sequence
  MKO10105562_B_Olfr725
  gRNA
gtttaaaatgggcgtgaaga

SEQ ID NO: 105563 - DNA, 20 bp, Artificial Sequence
  MKO10105563_B_Olfr725
  gRNA
agtaattaaaaccacagtgt

SEQ ID NO: 105564 - DNA, 20 bp, Artificial Sequence
  MKO10105564_B_Olfr725
  gRNA
atcagttcagaaacctgcct

SEQ ID NO: 105565 - DNA, 20 bp, Artificial Sequence
  MKO10105565_B_Olfr726
  gRNA
atgccaactgactcattgta

SEQ ID NO: 105566 - DNA, 20 bp, Artificial Sequence
  MKO10105566_B_Olfr726
  gRNA
catccatacaatgagtcagt

SEQ ID NO: 105567 - DNA, 20 bp, Artificial Sequence
  MKO10105567_B_Olfr726
  gRNA
attaattcagaaacttgtcc

SEQ ID NO: 105568 - DNA, 20 bp, Artificial Sequence
  MKO10105568_B_Olfr727
  gRNA
gtcaactgaatagctgctaa

SEQ ID NO: 105569 - DNA, 20 bp, Artificial Sequence
  MKO10105569_B_Olfr727
  gRNA
atcaatgcagaaacctgtcc

SEQ ID NO: 105570 - DNA, 20 bp, Artificial Sequence
  MKO10105570_B_Olfr727
  gRNA
ttgctaatagttgcagatag

SEQ ID NO: 105571 - DNA, 20 bp, Artificial Sequence
  MKO10105571_B_Olfr728
  gRNA
tatcataccactgttagcca

SEQ ID NO: 105572 - DNA, 20 bp, Artificial Sequence
  MKO10105572_B_Olfr728
  gRNA
gtgcatggatacgtacagaa

SEQ ID NO: 105573 - DNA, 20 bp, Artificial Sequence
  MKO10105573_B_Olfr728
  gRNA
gcacgcaagctttatcacca

SEQ ID NO: 105574 - DNA, 20 bp, Artificial Sequence
  MKO10105574_B_Olfr729
  gRNA
agtaatgtatgagtcaatgc

SEQ ID NO: 105575 - DNA, 20 bp, Artificial Sequence
  MKO10105575_B_Olfr729
  gRNA
cacaagactatatcattcag

SEQ ID NO: 105576 - DNA, 20 bp, Artificial Sequence
  MKO10105576_B_Olfr729
  gRNA
cattactgaaatacttattg

SEQ ID NO: 105577 - DNA, 20 bp, Artificial Sequence
  MKO10105577_B_Olfr730
  gRNA
gacctgactcattgaatgca

SEQ ID NO: 105578 - DNA, 20 bp, Artificial Sequence
  MKO10105578_B_Olfr730
  gRNA
aaccatgcattcaatgagtc

SEQ ID NO: 105579 - DNA, 20 bp, Artificial Sequence
  MKO10105579_B_Olfr730
  gRNA
atgaatccagatgatgaatg

SEQ ID NO: 105580 - DNA, 20 bp, Artificial Sequence
  MKO10105580_B_Olfr731
  gRNA
agtccaagtaacacgaattc

SEQ ID NO: 105581 - DNA, 20 bp, Artificial Sequence
  MKO10105581_B_Olfr731
  gRNA
ctagttgactcattgtgtgt

SEQ ID NO: 105582 - DNA, 20 bp, Artificial Sequence
  MKO10105582_B_Olfr731
  gRNA
gtcttcatggtagcaaccag

SEQ ID NO: 105583 - DNA, 20 bp, Artificial Sequence
  MKO10105583_B_Olfr732
  gRNA
agccaacaacatcacatagc

SEQ ID NO: 105584 - DNA, 20 bp, Artificial Sequence
  MKO10105584_B_Olfr732
  gRNA
gtaacccttcaccccctcca

SEQ ID NO: 105585 - DNA, 20 bp, Artificial Sequence
  MKO10105585_B_Olfr732
  gRNA
aggatgatcaggatatttcc

SEQ ID NO: 105586 - DNA, 20 bp, Artificial Sequence
  MKO10105586_B_Olfr733
  gRNA
ctcaccatcatatcagaccc

SEQ ID NO: 105587 - DNA, 20 bp, Artificial Sequence
  MKO10105587_B_Olfr733
  gRNA
gtgaataaatcctccaagcc

SEQ ID NO: 105588 - DNA, 20 bp, Artificial Sequence
  MKO10105588_B_Olfr733
  gRNA
tgctctatcagctgacaaag

SEQ ID NO: 105589 - DNA, 20 bp, Artificial Sequence
  MKO10105589_B_Olfr734
  gRNA
tccttattatctgcacaatc

SEQ ID NO: 105590 - DNA, 20 bp, Artificial Sequence
  MKO10105590_B_Olfr734
  gRNA
cttcgtacattctataatac

SEQ ID NO: 105591 - DNA, 20 bp, Artificial Sequence
  MKO10105591_B_Olfr734
  gRNA
ttgagcaatacacccaccaa

SEQ ID NO: 105592 - DNA, 20 bp, Artificial Sequence
  MKO10105592_B_Olfr735
  gRNA
caaccctttgcactacctga

SEQ ID NO: 105593 - DNA, 20 bp, Artificial Sequence
  MKO10105593_B_Olfr735
  gRNA
gctaggagatttcctacaga

SEQ ID NO: 105594 - DNA, 20 bp, Artificial Sequence
  MKO10105594_B_Olfr735
  gRNA
aaccaagtaagtgtccatgc

SEQ ID NO: 105595 - DNA, 20 bp, Artificial Sequence
  MKO10105595_B_Olfr736
  gRNA
tacacccatgtacattctgc

SEQ ID NO: 105596 - DNA, 20 bp, Artificial Sequence
  MKO10105596_B_Olfr736
  gRNA
gttcatataccttagtgctg

SEQ ID NO: 105597 - DNA, 20 bp, Artificial Sequence
  MKO10105597_B_Olfr736
  gRNA
atgataacatatgtaagccc

SEQ ID NO: 105598 - DNA, 20 bp, Artificial Sequence
  MKO10105598_B_Olfr738
  gRNA
caacttcctctctgacacga

SEQ ID NO: 105599 - DNA, 20 bp, Artificial Sequence
  MKO10105599_B_Olfr738
  gRNA
gatttgcccctccttggggc

SEQ ID NO: 105600 - DNA, 20 bp, Artificial Sequence
  MKO10105600_B_Olfr738
  gRNA
ccagctgcatgttcagatgt

SEQ ID NO: 105601 - DNA, 20 bp, Artificial Sequence
  MKO10105601_B_Olfr739
  gRNA
gatcccatgatgcagaaaaa

SEQ ID NO: 105602 - DNA, 20 bp, Artificial Sequence
  MKO10105602_B_Olfr739
  gRNA
caacttcctctctgaaaaca

SEQ ID NO: 105603 - DNA, 20 bp, Artificial Sequence
  MKO10105603_B_Olfr739
  gRNA
gcccagaaaacctccatcaa

SEQ ID NO: 105604 - DNA, 20 bp, Artificial Sequence
  MKO10105604_B_Olfr73
  gRNA
tacggtatgcctggagttct

SEQ ID NO: 105605 - DNA, 20 bp, Artificial Sequence
  MKO10105605_B_Olfr73
  gRNA
taggtacacagtataggaat

SEQ ID NO: 105606 - DNA, 20 bp, Artificial Sequence
  MKO10105606_B_Olfr73
  gRNA
tggggctgtgttcaccctct

SEQ ID NO: 105607 - DNA, 20 bp, Artificial Sequence
  MKO10105607_B_Olfr740
  gRNA
cacacccatgtacctactgc

SEQ ID NO: 105608 - DNA, 20 bp, Artificial Sequence
  MKO10105608_B_Olfr740
  gRNA
gtccagaaaacctccattaa

SEQ ID NO: 105609 - DNA, 20 bp, Artificial Sequence
  MKO10105609_B_Olfr740
  gRNA
cattccagcttcatgctcag

SEQ ID NO: 105610 - DNA, 20 bp, Artificial Sequence
  MKO10105610_B_Olfr741
  gRNA
ttccagagtcccattgatag

SEQ ID NO: 105611 - DNA, 20 bp, Artificial Sequence
  MKO10105611_B_Olfr741
  gRNA
accagaaaacctctatcaat

SEQ ID NO: 105612 - DNA, 20 bp, Artificial Sequence
  MKO10105612_B_Olfr741
  gRNA
cacccccatgtaccttctgc

SEQ ID NO: 105613 - DNA, 20 bp, Artificial Sequence
  MKO10105613_B_Olfr742
  gRNA
aaaaaggccttctccacttg

SEQ ID NO: 105614 - DNA, 20 bp, Artificial Sequence
  MKO10105614_B_Olfr742
  gRNA
cacccccatgtacttcctgc

SEQ ID NO: 105615 - DNA, 20 bp, Artificial Sequence
  MKO10105615_B_Olfr742
  gRNA
gttggccagcaggaagtaca

SEQ ID NO: 105616 - DNA, 20 bp, Artificial Sequence
  MKO10105616_B_Olfr743
  gRNA
aattataatgtctattctcc

SEQ ID NO: 105617 - DNA, 20 bp, Artificial Sequence
  MKO10105617_B_Olfr743
  gRNA
aaatgatcttgttgtcagag

SEQ ID NO: 105618 - DNA, 20 bp, Artificial Sequence
  MKO10105618_B_Olfr743
  gRNA
tgtctacctactcatcctca

SEQ ID NO: 105619 - DNA, 20 bp, Artificial Sequence
  MKO10105619_B_Olfr744
  gRNA
ggaccttcaatacagctgct

SEQ ID NO: 105620 - DNA, 20 bp, Artificial Sequence
  MKO10105620_B_Olfr744
  gRNA
ggtcctagcagctgtattga

SEQ ID NO: 105621 - DNA, 20 bp, Artificial Sequence
  MKO10105621_B_Olfr744
  gRNA
tagagaagaccagctcaatt

SEQ ID NO: 105622 - DNA, 20 bp, Artificial Sequence
  MKO10105622_B_Olfr745
  gRNA
actacccctctatcatgact

SEQ ID NO: 105623 - DNA, 20 bp, Artificial Sequence
  MKO10105623_B_Olfr745
  gRNA
tcacccagcagatacaaatc

SEQ ID NO: 105624 - DNA, 20 bp, Artificial Sequence
  MKO10105624_B_Olfr745
  gRNA
acacaggatagtgcaaacaa

SEQ ID NO: 105625 - DNA, 20 bp, Artificial Sequence
  MKO10105625_B_Olfr746
  gRNA
gtacccctacacacatcata

SEQ ID NO: 105626 - DNA, 20 bp, Artificial Sequence
  MKO10105626_B_Olfr746
  gRNA
atgtatgtcagccccacatc

SEQ ID NO: 105627 - DNA, 20 bp, Artificial Sequence
  MKO10105627_B_Olfr746
  gRNA
actcttatcattattctcac

SEQ ID NO: 105628 - DNA, 20 bp, Artificial Sequence
  MKO10105628_B_Olfr747
  gRNA
attaccctactatcatgact

SEQ ID NO: 105629 - DNA, 20 bp, Artificial Sequence
  MKO10105629_B_Olfr747
  gRNA
gctctgaggaaagttctgtt

SEQ ID NO: 105630 - DNA, 20 bp, Artificial Sequence
  MKO10105630_B_Olfr747
  gRNA
atgtgctactgatctgttca

SEQ ID NO: 105631 - DNA, 20 bp, Artificial Sequence
  MKO10105631_B_Olfr748
  gRNA
ggatccaaggatgtacaaac

SEQ ID NO: 105632 - DNA, 20 bp, Artificial Sequence
  MKO10105632_B_Olfr748
  gRNA
gtacccctacacccatcata

SEQ ID NO: 105633 - DNA, 20 bp, Artificial Sequence
  MKO10105633_B_Olfr748
  gRNA
ctcacctgtttgtacatcct

SEQ ID NO: 105634 - DNA, 20 bp, Artificial Sequence
  MKO10105634_B_Olfr749
  gRNA
attaccctaccatcatgact

SEQ ID NO: 105635 - DNA, 20 bp, Artificial Sequence
  MKO10105635_B_Olfr749
  gRNA
gctctgagaaatgttctgtt

SEQ ID NO: 105636 - DNA, 20 bp, Artificial Sequence
  MKO10105636_B_Olfr749
  gRNA
agagtgataccacaactaaa

SEQ ID NO: 105637 - DNA, 20 bp, Artificial Sequence
  MKO10105637_B_Olfr74
  gRNA
acatgtgaacccccatgcgt

SEQ ID NO: 105638 - DNA, 20 bp, Artificial Sequence
  MKO10105638_B_Olfr74
  gRNA
ccagaaactctgtatcacac

SEQ ID NO: 105639 - DNA, 20 bp, Artificial Sequence
  MKO10105639_B_Olfr74
  gRNA
ccagtgtgatacagagtttc

SEQ ID NO: 105640 - DNA, 20 bp, Artificial Sequence
  MKO10105640_B_Olfr750
  gRNA
actacggagtttgtcctggc

SEQ ID NO: 105641 - DNA, 20 bp, Artificial Sequence
  MKO10105641_B_Olfr750
  gRNA
cttgacttgatcgttgcgca

SEQ ID NO: 105642 - DNA, 20 bp, Artificial Sequence
  MKO10105642_B_Olfr750
  gRNA
ggagaaagccttctgccgac

SEQ ID NO: 105643 - DNA, 20 bp, Artificial Sequence
  MKO10105643_B_Olfr761
  gRNA
gagagtgcccagctctcccc

SEQ ID NO: 105644 - DNA, 20 bp, Artificial Sequence
  MKO10105644_B_Olfr761
  gRNA
ctctgctgaaggcagatcta

SEQ ID NO: 105645 - DNA, 20 bp, Artificial Sequence
  MKO10105645_B_Olfr761
  gRNA
gaaagcaatccccataaagc

SEQ ID NO: 105646 - DNA, 20 bp, Artificial Sequence
  MKO10105646_B_Olfr763
  gRNA
tgttgcctatatgaggcctc

SEQ ID NO: 105647 - DNA, 20 bp, Artificial Sequence
  MKO10105647_B_Olfr763
  gRNA
tctcttcacgagccgcctca

SEQ ID NO: 105648 - DNA, 20 bp, Artificial Sequence
  MKO10105648_B_Olfr763
  gRNA
gggtgacaactgtgtagaac

SEQ ID NO: 105649 - DNA, 20 bp, Artificial Sequence
  MKO10105649_B_Olfr765
  gRNA
agctcccttcagcccaacaa

SEQ ID NO: 105650 - DNA, 20 bp, Artificial Sequence
  MKO10105650_B_Olfr765
  gRNA
aaaaagcctttgtcctttgt

SEQ ID NO: 105651 - DNA, 20 bp, Artificial Sequence
  MKO10105651_B_Olfr765
  gRNA
catcctcgtcctcaccctgc

SEQ ID NO: 105652 - DNA, 20 bp, Artificial Sequence
  MKO10105652_B_Olfr767
  gRNA
gaacaggagagttctagaag

SEQ ID NO: 105653 - DNA, 20 bp, Artificial Sequence
  MKO10105653_B_Olfr767
  gRNA
agctcccttcagcccagcaa

SEQ ID NO: 105654 - DNA, 20 bp, Artificial Sequence
  MKO10105654_B_Olfr767
  gRNA
tgttcgtgaaagaaatttct

SEQ ID NO: 105655 - DNA, 20 bp, Artificial Sequence
  MKO10105655_B_Olfr768
  gRNA
ccccagacgccattgtgtag

SEQ ID NO: 105656 - DNA, 20 bp, Artificial Sequence
  MKO10105656_B_Olfr768
  gRNA
cccttagctctttatgatag

SEQ ID NO: 105657 - DNA, 20 bp, Artificial Sequence
  MKO10105657_B_Olfr768
  gRNA
tccaatgtcatagatcactt

SEQ ID NO: 105658 - DNA, 20 bp, Artificial Sequence
  MKO10105658_B_Olfr769
  gRNA
gaggtggaaggatgatcaac

SEQ ID NO: 105659 - DNA, 20 bp, Artificial Sequence
  MKO10105659_B_Olfr769
  gRNA
ggacaagaactgtgcatact

SEQ ID NO: 105660 - DNA, 20 bp, Artificial Sequence
  MKO10105660_B_Olfr769
  gRNA
tcccagattcctgtacatga

SEQ ID NO: 105661 - DNA, 20 bp, Artificial Sequence
  MKO10105661_B_Olfr76
  gRNA
taacacgttcctcagccaag

SEQ ID NO: 105662 - DNA, 20 bp, Artificial Sequence
  MKO10105662_B_Olfr76
  gRNA
tgagtagcaaatgtcaacga

SEQ ID NO: 105663 - DNA, 20 bp, Artificial Sequence
  MKO10105663_B_Olfr76
  gRNA
tccaccggcctctcacagag

SEQ ID NO: 105664 - DNA, 20 bp, Artificial Sequence
  MKO10105664_B_Olfr770
  gRNA
gaaaaatgcttgactggcac

SEQ ID NO: 105665 - DNA, 20 bp, Artificial Sequence
  MKO10105665_B_Olfr770
  gRNA
accagttatattcaacaagt

SEQ ID NO: 105666 - DNA, 20 bp, Artificial Sequence
  MKO10105666_B_Olfr770
  gRNA
tacttgtataatctagcaac

SEQ ID NO: 105667 - DNA, 20 bp, Artificial Sequence
  MKO10105667_B_Olfr771
  gRNA
gctatgttgtacaaatatcg

SEQ ID NO: 105668 - DNA, 20 bp, Artificial Sequence
  MKO10105668_B_Olfr771
  gRNA
atatcgatcgtaggacataa

SEQ ID NO: 105669 - DNA, 20 bp, Artificial Sequence
  MKO10105669_B_Olfr771
  gRNA
ggtgggagtctaatatagtg

SEQ ID NO: 105670 - DNA, 20 bp, Artificial Sequence
  MKO10105670_B_Olfr772
  gRNA
taatggaaaccacaatcatg

SEQ ID NO: 105671 - DNA, 20 bp, Artificial Sequence
  MKO10105671_B_Olfr772
  gRNA
tgtcacaactttcatcttac

SEQ ID NO: 105672 - DNA, 20 bp, Artificial Sequence
  MKO10105672_B_Olfr772
  gRNA
aaatctcttgttcagacact

SEQ ID NO: 105673 - DNA, 20 bp, Artificial Sequence
  MKO10105673_B_Olfr773
  gRNA
taatggaaaccacaatcata

SEQ ID NO: 105674 - DNA, 20 bp, Artificial Sequence
  MKO10105674_B_Olfr773
  gRNA
tgtcacaactttcatcttac

SEQ ID NO: 105675 - DNA, 20 bp, Artificial Sequence
  MKO10105675_B_Olfr773
  gRNA
aaatctcttgttcagacact

SEQ ID NO: 105676 - DNA, 20 bp, Artificial Sequence
  MKO10105676_B_Olfr774
  gRNA
cagaaaccctcccagccatg

SEQ ID NO: 105677 - DNA, 20 bp, Artificial Sequence
  MKO10105677_B_Olfr774
  gRNA
tatgcccaagagcagaaact

SEQ ID NO: 105678 - DNA, 20 bp, Artificial Sequence
  MKO10105678_B_Olfr774
  gRNA
aaaatcacaaactgaagttc

SEQ ID NO: 105679 - DNA, 20 bp, Artificial Sequence
  MKO10105679_B_Olfr775
  gRNA
gtcacagcagaagtgatcaa

SEQ ID NO: 105680 - DNA, 20 bp, Artificial Sequence
  MKO10105680_B_Olfr775
  gRNA
tgagcaagacagctgtaaaa

SEQ ID NO: 105681 - DNA, 20 bp, Artificial Sequence
  MKO10105681_B_Olfr775
  gRNA
attattgatcccaaaaatct

SEQ ID NO: 105682 - DNA, 20 bp, Artificial Sequence
  MKO10105682_B_Olfr776
  gRNA
tgagcaagacagttgtaaaa

SEQ ID NO: 105683 - DNA, 20 bp, Artificial Sequence
  MKO10105683_B_Olfr776
  gRNA
aactgtcttgctcagataca

SEQ ID NO: 105684 - DNA, 20 bp, Artificial Sequence
  MKO10105684_B_Olfr776
  gRNA
cagaaatcctgccagccatg

SEQ ID NO: 105685 - DNA, 20 bp, Artificial Sequence
  MKO10105685_B_Olfr777
  gRNA
atagcaccatcatgagcagt

SEQ ID NO: 105686 - DNA, 20 bp, Artificial Sequence
  MKO10105686_B_Olfr777
  gRNA
gactatcaacaagggtgtga

SEQ ID NO: 105687 - DNA, 20 bp, Artificial Sequence
  MKO10105687_B_Olfr777
  gRNA
agtcacagaatttcagcttg

SEQ ID NO: 105688 - DNA, 20 bp, Artificial Sequence
  MKO10105688_B_Olfr77
  gRNA
gacaaaatttaactcttcta

SEQ ID NO: 105689 - DNA, 20 bp, Artificial Sequence
  MKO10105689_B_Olfr77
  gRNA
ggctttatacttattcttaa

SEQ ID NO: 105690 - DNA, 20 bp, Artificial Sequence
  MKO10105690_B_Olfr77
  gRNA
tatcttggatcattatgttc

SEQ ID NO: 105691 - DNA, 20 bp, Artificial Sequence
  MKO10105691_B_Olfr780
  gRNA
ggtagggatccactgtagtg

SEQ ID NO: 105692 - DNA, 20 bp, Artificial Sequence
  MKO10105692_B_Olfr780
  gRNA
cactgatgatcctcagctgc

SEQ ID NO: 105693 - DNA, 20 bp, Artificial Sequence
  MKO10105693_B_Olfr780
  gRNA
aaatatcgtgctcagacacg

SEQ ID NO: 105694 - DNA, 20 bp, Artificial Sequence
  MKO10105694_B_Olfr781
  gRNA
atcatcattctcccaccaat

SEQ ID NO: 105695 - DNA, 20 bp, Artificial Sequence
  MKO10105695_B_Olfr781
  gRNA
gatcataagacatgatagcc

SEQ ID NO: 105696 - DNA, 20 bp, Artificial Sequence
  MKO10105696_B_Olfr781
  gRNA
acgatgtagctatcaataaa

SEQ ID NO: 105697 - DNA, 20 bp, Artificial Sequence
  MKO10105697_B_Olfr782
  gRNA
gagaatgaaaaataagtcaa

SEQ ID NO: 105698 - DNA, 20 bp, Artificial Sequence
  MKO10105698_B_Olfr782
  gRNA
agaagacttctttcacctgc

SEQ ID NO: 105699 - DNA, 20 bp, Artificial Sequence
  MKO10105699_B_Olfr782
  gRNA
gaaatccagcttcaaaccca

SEQ ID NO: 105700 - DNA, 20 bp, Artificial Sequence
  MKO10105700_B_Olfr784
  gRNA
ttcttaatgagtattctcac

SEQ ID NO: 105701 - DNA, 20 bp, Artificial Sequence
  MKO10105701_B_Olfr784
  gRNA
taaatcttaattcactgttt

SEQ ID NO: 105702 - DNA, 20 bp, Artificial Sequence
  MKO10105702_B_Olfr784
  gRNA
agtttgagtcccaagagtaa

SEQ ID NO: 105703 - DNA, 20 bp, Artificial Sequence
  MKO10105703_B_Olfr786
  gRNA
ctaatgccaaagtgaacatt

SEQ ID NO: 105704 - DNA, 20 bp, Artificial Sequence
  MKO10105704_B_Olfr786
  gRNA
ctaatgttgcaaaattccta

SEQ ID NO: 105705 - DNA, 20 bp, Artificial Sequence
  MKO10105705_B_Olfr786
  gRNA
ctgagctatgcagttgttga

SEQ ID NO: 105706 - DNA, 20 bp, Artificial Sequence
  MKO10105706_B_Olfr787
  gRNA
ctttaactgagagtctagca

SEQ ID NO: 105707 - DNA, 20 bp, Artificial Sequence
  MKO10105707_B_Olfr787
  gRNA
cctcagaatggtgctgatga

SEQ ID NO: 105708 - DNA, 20 bp, Artificial Sequence
  MKO10105708_B_Olfr787
  gRNA
caaactcagtaatcacagaa

SEQ ID NO: 105709 - DNA, 20 bp, Artificial Sequence
  MKO10105709_B_Olfr788
  gRNA
gaattccatctaccagccag

SEQ ID NO: 105710 - DNA, 20 bp, Artificial Sequence
  MKO10105710_B_Olfr788
  gRNA
gcagagtttcctgttcatga

SEQ ID NO: 105711 - DNA, 20 bp, Artificial Sequence
  MKO10105711_B_Olfr788
  gRNA
ggttgctcttctgttcactt

SEQ ID NO: 105712 - DNA, 20 bp, Artificial Sequence
  MKO10105712_B_Olfr78
  gRNA
aattgaatctactatcctgc

SEQ ID NO: 105713 - DNA, 20 bp, Artificial Sequence
  MKO10105713_B_Olfr78
  gRNA
cccactactgatcaagcgac

SEQ ID NO: 105714 - DNA, 20 bp, Artificial Sequence
  MKO10105714_B_Olfr78
  gRNA
ttccaagtctgagcgagcta

SEQ ID NO: 105715 - DNA, 20 bp, Artificial Sequence
  MKO10105715_B_Olfr790
  gRNA
ctgagccacgcaaccattgt

SEQ ID NO: 105716 - DNA, 20 bp, Artificial Sequence
  MKO10105716_B_Olfr790
  gRNA
gataaagtggtcaattatgt

SEQ ID NO: 105717 - DNA, 20 bp, Artificial Sequence
  MKO10105717_B_Olfr790
  gRNA
tgtacattaagccttctgca

SEQ ID NO: 105718 - DNA, 20 bp, Artificial Sequence
  MKO10105718_B_Olfr791
  gRNA
gattatcatcatccttacgt

SEQ ID NO: 105719 - DNA, 20 bp, Artificial Sequence
  MKO10105719_B_Olfr791
  gRNA
ctgagcacgagatcttcaga

SEQ ID NO: 105720 - DNA, 20 bp, Artificial Sequence
  MKO10105720_B_Olfr791
  gRNA
gactagtaagatacacaccc

SEQ ID NO: 105721 - DNA, 20 bp, Artificial Sequence
  MKO10105721_B_Olfr792
  gRNA
ggagttcttcttcatactcc

SEQ ID NO: 105722 - DNA, 20 bp, Artificial Sequence
  MKO10105722_B_Olfr792
  gRNA
acaccacaataatgagcagc

SEQ ID NO: 105723 - DNA, 20 bp, Artificial Sequence
  MKO10105723_B_Olfr792
  gRNA
gaccctgctgctcattattg

SEQ ID NO: 105724 - DNA, 20 bp, Artificial Sequence
  MKO10105724_B_Olfr794
  gRNA
ttcctgtacagtatatcaac

SEQ ID NO: 105725 - DNA, 20 bp, Artificial Sequence
  MKO10105725_B_Olfr794
  gRNA
tattaagatgagagtccatc

SEQ ID NO: 105726 - DNA, 20 bp, Artificial Sequence
  MKO10105726_B_Olfr794
  gRNA
aatgcagctgccatacatga

SEQ ID NO: 105727 - DNA, 20 bp, Artificial Sequence
  MKO10105727_B_Olfr796
  gRNA
tgctggccgttccgaagaag

SEQ ID NO: 105728 - DNA, 20 bp, Artificial Sequence
  MKO10105728_B_Olfr796
  gRNA
tgcaggcccggtggttcatt

SEQ ID NO: 105729 - DNA, 20 bp, Artificial Sequence
  MKO10105729_B_Olfr796
  gRNA
tacatgggggagtgcagcac

SEQ ID NO: 105730 - DNA, 20 bp, Artificial Sequence
  MKO10105730_B_Olfr798
  gRNA
ttccttgtgagcattgtgac

SEQ ID NO: 105731 - DNA, 20 bp, Artificial Sequence
  MKO10105731_B_Olfr798
  gRNA
gactctactgttcattattg

SEQ ID NO: 105732 - DNA, 20 bp, Artificial Sequence
  MKO10105732_B_Olfr798
  gRNA
gaagaacacctgagccatgc

SEQ ID NO: 105733 - DNA, 20 bp, Artificial Sequence
  MKO10105733_B_Olfr799
  gRNA
attgatagctacattatcct

SEQ ID NO: 105734 - DNA, 20 bp, Artificial Sequence
  MKO10105734_B_Olfr799
  gRNA
gagctgcatcacaacaaaaa

SEQ ID NO: 105735 - DNA, 20 bp, Artificial Sequence
  MKO10105735_B_Olfr799
  gRNA
tgatgatataaccataagaa

SEQ ID NO: 105736 - DNA, 20 bp, Artificial Sequence
  MKO10105736_B_Olfr800
  gRNA
atagcaccatcatgagcagc

SEQ ID NO: 105737 - DNA, 20 bp, Artificial Sequence
  MKO10105737_B_Olfr800
  gRNA
aatcctgccaccacttagcc

SEQ ID NO: 105738 - DNA, 20 bp, Artificial Sequence
  MKO10105738_B_Olfr800
  gRNA
cataacaacattcatcctac

SEQ ID NO: 105739 - DNA, 20 bp, Artificial Sequence
  MKO10105739_B_Olfr801
  gRNA
agaatgctcatcaagaaccg

SEQ ID NO: 105740 - DNA, 20 bp, Artificial Sequence
  MKO10105740_B_Olfr801
  gRNA
taaaagcatcctttacctgc

SEQ ID NO: 105741 - DNA, 20 bp, Artificial Sequence
  MKO10105741_B_Olfr801
  gRNA
cactgttgtgagaatacagt

SEQ ID NO: 105742 - DNA, 20 bp, Artificial Sequence
  MKO10105742_B_Olfr802
  gRNA
cagtccatttcatttacttg

SEQ ID NO: 105743 - DNA, 20 bp, Artificial Sequence
  MKO10105743_B_Olfr802
  gRNA
gcttgacttgctgattcctc

SEQ ID NO: 105744 - DNA, 20 bp, Artificial Sequence
  MKO10105744_B_Olfr802
  gRNA
gtcactatacccaagttctt

SEQ ID NO: 105745 - DNA, 20 bp, Artificial Sequence
  MKO10105745_B_Olfr803
  gRNA
cttgggtaattattgatgcc

SEQ ID NO: 105746 - DNA, 20 bp, Artificial Sequence
  MKO10105746_B_Olfr803
  gRNA
catcttcccaccacttatgc

SEQ ID NO: 105747 - DNA, 20 bp, Artificial Sequence
  MKO10105747_B_Olfr803
  gRNA
cattatcctcctcacattgt

SEQ ID NO: 105748 - DNA, 20 bp, Artificial Sequence
  MKO10105748_B_Olfr804
  gRNA
ggatatattacgaaagactt

SEQ ID NO: 105749 - DNA, 20 bp, Artificial Sequence
  MKO10105749_B_Olfr804
  gRNA
aaaaccacaatttgcaactg

SEQ ID NO: 105750 - DNA, 20 bp, Artificial Sequence
  MKO10105750_B_Olfr804
  gRNA
gaaatccagcttcagaccca

SEQ ID NO: 105751 - DNA, 20 bp, Artificial Sequence
  MKO10105751_B_Olfr805
  gRNA
tgtgaatgccatttccaaga

SEQ ID NO: 105752 - DNA, 20 bp, Artificial Sequence
  MKO10105752_B_Olfr805
  gRNA
aaaacagtgagttaagattt

SEQ ID NO: 105753 - DNA, 20 bp, Artificial Sequence
  MKO10105753_B_Olfr805
  gRNA
aattatctttctcaccctgc

SEQ ID NO: 105754 - DNA, 20 bp, Artificial Sequence
  MKO10105754_B_Olfr806
  gRNA
aattatcttcctcaccctgc

SEQ ID NO: 105755 - DNA, 20 bp, Artificial Sequence
  MKO10105755_B_Olfr806
  gRNA
tcctcagctcctggatgaca

SEQ ID NO: 105756 - DNA, 20 bp, Artificial Sequence
  MKO10105756_B_Olfr806
  gRNA
aaaatcagaatttgaagctg

SEQ ID NO: 105757 - DNA, 20 bp, Artificial Sequence
  MKO10105757_B_Olfr807
  gRNA
ctgtgctatgccaaagataa

SEQ ID NO: 105758 - DNA, 20 bp, Artificial Sequence
  MKO10105758_B_Olfr807
  gRNA
tatataaaagggtttagtac

SEQ ID NO: 105759 - DNA, 20 bp, Artificial Sequence
  MKO10105759_B_Olfr807
  gRNA
cactggtaatgttctcttat

SEQ ID NO: 105760 - DNA, 20 bp, Artificial Sequence
  MKO10105760_B_Olfr808
  gRNA
acttagcaccacaccttctc

SEQ ID NO: 105761 - DNA, 20 bp, Artificial Sequence
  MKO10105761_B_Olfr808
  gRNA
tgaatgcctgtttgacttgc

SEQ ID NO: 105762 - DNA, 20 bp, Artificial Sequence
  MKO10105762_B_Olfr808
  gRNA
tgtgcaagcgatctgcagca

SEQ ID NO: 105763 - DNA, 20 bp, Artificial Sequence
  MKO10105763_B_Olfr809
  gRNA
tgtgaagtggtcaatagtgt

SEQ ID NO: 105764 - DNA, 20 bp, Artificial Sequence
  MKO10105764_B_Olfr809
  gRNA
attgttgtctctatatccta

SEQ ID NO: 105765 - DNA, 20 bp, Artificial Sequence
  MKO10105765_B_Olfr809
  gRNA
tataaagctcataagctcca

SEQ ID NO: 105766 - DNA, 20 bp, Artificial Sequence
  MKO10105766_B_Olfr810
  gRNA
tgaaaactgtcactcttgta

SEQ ID NO: 105767 - DNA, 20 bp, Artificial Sequence
  MKO10105767_B_Olfr810
  gRNA
ttgagtcaaacaattaccat

SEQ ID NO: 105768 - DNA, 20 bp, Artificial Sequence
  MKO10105768_B_Olfr810
  gRNA
gttgagcacagaaattccct

SEQ ID NO: 105769 - DNA, 20 bp, Artificial Sequence
  MKO10105769_B_Olfr811
  gRNA
gatcatcttcctcaccctac

SEQ ID NO: 105770 - DNA, 20 bp, Artificial Sequence
  MKO10105770_B_Olfr811
  gRNA
taaactctatcttcaatgat

SEQ ID NO: 105771 - DNA, 20 bp, Artificial Sequence
  MKO10105771_B_Olfr811
  gRNA
aactaagaacccagttaccc

SEQ ID NO: 105772 - DNA, 20 bp, Artificial Sequence
  MKO10105772_B_Olfr812
  gRNA
aaactggatttctgtacttc

SEQ ID NO: 105773 - DNA, 20 bp, Artificial Sequence
  MKO10105773_B_Olfr812
  gRNA
ctcctgagagaatgcttatc

SEQ ID NO: 105774 - DNA, 20 bp, Artificial Sequence
  MKO10105774_B_Olfr812
  gRNA
gattaagaatccagttaccc

SEQ ID NO: 105775 - DNA, 20 bp, Artificial Sequence
  MKO10105775_B_Olfr813
  gRNA
ttacttctgtctgtaaccct

SEQ ID NO: 105776 - DNA, 20 bp, Artificial Sequence
  MKO10105776_B_Olfr813
  gRNA
catcattactctcacactgc

SEQ ID NO: 105777 - DNA, 20 bp, Artificial Sequence
  MKO10105777_B_Olfr813
  gRNA
aaaatcacaacctcaagctc

SEQ ID NO: 105778 - DNA, 20 bp, Artificial Sequence
  MKO10105778_B_Olfr814
  gRNA
tgtctgagcaagagagttgt

SEQ ID NO: 105779 - DNA, 20 bp, Artificial Sequence
  MKO10105779_B_Olfr814
  gRNA
tttaatcactattgtaacac

SEQ ID NO: 105780 - DNA, 20 bp, Artificial Sequence
  MKO10105780_B_Olfr814
  gRNA
tacaatagtgattaaaaatc

SEQ ID NO: 105781 - DNA, 20 bp, Artificial Sequence
  MKO10105781_B_Olfr815
  gRNA
ttgacaaacacagccattat

SEQ ID NO: 105782 - DNA, 20 bp, Artificial Sequence
  MKO10105782_B_Olfr815
  gRNA
tttaatctctattgtaacac

SEQ ID NO: 105783 - DNA, 20 bp, Artificial Sequence
  MKO10105783_B_Olfr815
  gRNA
tacaatagagattaaaaatc

SEQ ID NO: 105784 - DNA, 20 bp, Artificial Sequence
  MKO10105784_B_Olfr816
  gRNA
agacaaatcccatcgtctcc

SEQ ID NO: 105785 - DNA, 20 bp, Artificial Sequence
  MKO10105785_B_Olfr816
  gRNA
agattcaagcctaacacgag

SEQ ID NO: 105786 - DNA, 20 bp, Artificial Sequence
  MKO10105786_B_Olfr816
  gRNA
atctttccaccactcgtgtt

SEQ ID NO: 105787 - DNA, 20 bp, Artificial Sequence
  MKO10105787_B_Olfr818
  gRNA
gataagtgtcattatagcta

SEQ ID NO: 105788 - DNA, 20 bp, Artificial Sequence
  MKO10105788_B_Olfr818
  gRNA
agaaatgaagaaccagtctc

SEQ ID NO: 105789 - DNA, 20 bp, Artificial Sequence
  MKO10105789_B_Olfr818
  gRNA
aaggaagtgatcaacagttt

SEQ ID NO: 105790 - DNA, 20 bp, Artificial Sequence
  MKO10105790_B_Olfr819
  gRNA
agtgaaggaagcctttcaaa

SEQ ID NO: 105791 - DNA, 20 bp, Artificial Sequence
  MKO10105791_B_Olfr819
  gRNA
aactctgagctcatgaagaa

SEQ ID NO: 105792 - DNA, 20 bp, Artificial Sequence
  MKO10105792_B_Olfr819
  gRNA
gatgtatgtattcaccatct

SEQ ID NO: 105793 - DNA, 20 bp, Artificial Sequence
  MKO10105793_B_Olfr820
  gRNA
tctccaaaaacgcaaaattt

SEQ ID NO: 105794 - DNA, 20 bp, Artificial Sequence
  MKO10105794_B_Olfr820
  gRNA
catcattctcttgactctgc

SEQ ID NO: 105795 - DNA, 20 bp, Artificial Sequence
  MKO10105795_B_Olfr820
  gRNA
tccaatattgattagcatct

SEQ ID NO: 105796 - DNA, 20 bp, Artificial Sequence
  MKO10105796_B_Olfr821
  gRNA
ctaaaaatgagaagtttcgt

SEQ ID NO: 105797 - DNA, 20 bp, Artificial Sequence
  MKO10105797_B_Olfr821
  gRNA
tgtaaccaagagtgtcaaaa

SEQ ID NO: 105798 - DNA, 20 bp, Artificial Sequence
  MKO10105798_B_Olfr821
  gRNA
cagcaaaatttgcaacttgt

SEQ ID NO: 105799 - DNA, 20 bp, Artificial Sequence
  MKO10105799_B_Olfr822
  gRNA
gtagaaatgatcaatgatgt

SEQ ID NO: 105800 - DNA, 20 bp, Artificial Sequence
  MKO10105800_B_Olfr822
  gRNA
aactaataagccaacaactg

SEQ ID NO: 105801 - DNA, 20 bp, Artificial Sequence
  MKO10105801_B_Olfr822
  gRNA
acagactttattgctcatga

SEQ ID NO: 105802 - DNA, 20 bp, Artificial Sequence
  MKO10105802_B_Olfr823
  gRNA
gaaaaaagtagcaagagctt

SEQ ID NO: 105803 - DNA, 20 bp, Artificial Sequence
  MKO10105803_B_Olfr823
  gRNA
aggtttctttctggctgtga

SEQ ID NO: 105804 - DNA, 20 bp, Artificial Sequence
  MKO10105804_B_Olfr823
  gRNA
ttatgaaactggagcagagc

SEQ ID NO: 105805 - DNA, 20 bp, Artificial Sequence
  MKO10105805_B_Olfr824
  gRNA
ttatgaaactggagcagagc

SEQ ID NO: 105806 - DNA, 20 bp, Artificial Sequence
  MKO10105806_B_Olfr824
  gRNA
ttccttaagctataaatcag

SEQ ID NO: 105807 - DNA, 20 bp, Artificial Sequence
  MKO10105807_B_Olfr824
  gRNA
accttcagcttgcgtttctg

SEQ ID NO: 105808 - DNA, 20 bp, Artificial Sequence
  MKO10105808_B_Olfr825
  gRNA
tcaaaacactacttgtagaa

SEQ ID NO: 105809 - DNA, 20 bp, Artificial Sequence
  MKO10105809_B_Olfr825
  gRNA
acagtgcaaagagaaagatc

SEQ ID NO: 105810 - DNA, 20 bp, Artificial Sequence
  MKO10105810_B_Olfr825
  gRNA
agcaagtctatctcatttgc

SEQ ID NO: 105811 - DNA, 20 bp, Artificial Sequence
  MKO10105811_B_Olfr826
  gRNA
agcaagtccatctcatttgc

SEQ ID NO: 105812 - DNA, 20 bp, Artificial Sequence
  MKO10105812_B_Olfr826
  gRNA
acaatgatgactatgacagt

SEQ ID NO: 105813 - DNA, 20 bp, Artificial Sequence
  MKO10105813_B_Olfr826
  gRNA
aggtctcttccatgggcgac

SEQ ID NO: 105814 - DNA, 20 bp, Artificial Sequence
  MKO10105814_B_Olfr827
  gRNA
actgacccagccgcagagat

SEQ ID NO: 105815 - DNA, 20 bp, Artificial Sequence
  MKO10105815_B_Olfr827
  gRNA
gcaaacttacaacccccaag

SEQ ID NO: 105816 - DNA, 20 bp, Artificial Sequence
  MKO10105816_B_Olfr827
  gRNA
ggccatggctgctagtataa

SEQ ID NO: 105817 - DNA, 20 bp, Artificial Sequence
  MKO10105817_B_Olfr828
  gRNA
atcataagtcttgtgaatag

SEQ ID NO: 105818 - DNA, 20 bp, Artificial Sequence
  MKO10105818_B_Olfr828
  gRNA
atcatgaatcctcaaacctg

SEQ ID NO: 105819 - DNA, 20 bp, Artificial Sequence
  MKO10105819_B_Olfr828
  gRNA
tgaatgttcaccaatgtctt

SEQ ID NO: 105820 - DNA, 20 bp, Artificial Sequence
  MKO10105820_B_Olfr829
  gRNA
attatgatcctatacctaag

SEQ ID NO: 105821 - DNA, 20 bp, Artificial Sequence
  MKO10105821_B_Olfr829
  gRNA
gaagataataagttgcagct

SEQ ID NO: 105822 - DNA, 20 bp, Artificial Sequence
  MKO10105822_B_Olfr829
  gRNA
caacaattacagaatcatcc

SEQ ID NO: 105823 - DNA, 20 bp, Artificial Sequence
  MKO10105823_B_Olfr830
  gRNA
tcctaccaataactttcttc

SEQ ID NO: 105824 - DNA, 20 bp, Artificial Sequence
  MKO10105824_B_Olfr830
  gRNA
gttcctcaaacaatagacaa

SEQ ID NO: 105825 - DNA, 20 bp, Artificial Sequence
  MKO10105825_B_Olfr830
  gRNA
gaagccacagcaatcttctt

SEQ ID NO: 105826 - DNA, 20 bp, Artificial Sequence
  MKO10105826_B_Olfr832
  gRNA
aaccatcaccccacagagtt

SEQ ID NO: 105827 - DNA, 20 bp, Artificial Sequence
  MKO10105827_B_Olfr832
  gRNA
gtcaactcaatcagttatac

SEQ ID NO: 105828 - DNA, 20 bp, Artificial Sequence
  MKO10105828_B_Olfr832
  gRNA
gacgcagtgccatcaaagtg

SEQ ID NO: 105829 - DNA, 20 bp, Artificial Sequence
  MKO10105829_B_Olfr834
  gRNA
tgctttgttctagcgtttgc

SEQ ID NO: 105830 - DNA, 20 bp, Artificial Sequence
  MKO10105830_B_Olfr834
  gRNA
aaccatcaccccacagattt

SEQ ID NO: 105831 - DNA, 20 bp, Artificial Sequence
  MKO10105831_B_Olfr834
  gRNA
atctaggatacttatcaaga

SEQ ID NO: 105832 - DNA, 20 bp, Artificial Sequence
  MKO10105832_B_Olfr835
  gRNA
aacccacaatcctgaaccat

SEQ ID NO: 105833 - DNA, 20 bp, Artificial Sequence
  MKO10105833_B_Olfr835
  gRNA
ctttcatgtccttatttcga

SEQ ID NO: 105834 - DNA, 20 bp, Artificial Sequence
  MKO10105834_B_Olfr835
  gRNA
gatcagagcatcagttatgc

SEQ ID NO: 105835 - DNA, 20 bp, Artificial Sequence
  MKO10105835_B_Olfr836
  gRNA
tggtgaatcaattacatttg

SEQ ID NO: 105836 - DNA, 20 bp, Artificial Sequence
  MKO10105836_B_Olfr836
  gRNA
atatcaagatgttgttgatt

SEQ ID NO: 105837 - DNA, 20 bp, Artificial Sequence
  MKO10105837_B_Olfr836
  gRNA
gagcttcagccctttatctt

SEQ ID NO: 105838 - DNA, 20 bp, Artificial Sequence
  MKO10105838_B_Olfr837
  gRNA
attcaacattggaggaacta

SEQ ID NO: 105839 - DNA, 20 bp, Artificial Sequence
  MKO10105839_B_Olfr837
  gRNA
tttagctggctgtctgagcc

SEQ ID NO: 105840 - DNA, 20 bp, Artificial Sequence
  MKO10105840_B_Olfr837
  gRNA
cacagattaatcatacatca

SEQ ID NO: 105841 - DNA, 20 bp, Artificial Sequence
  MKO10105841_B_Olfr843
  gRNA
tggccatagttcatcctctg

SEQ ID NO: 105842 - DNA, 20 bp, Artificial Sequence
  MKO10105842_B_Olfr843
  gRNA
gctgaagataaatgattcaa

SEQ ID NO: 105843 - DNA, 20 bp, Artificial Sequence
  MKO10105843_B_Olfr843
  gRNA
actatgcagtagtgcattaa

SEQ ID NO: 105844 - DNA, 20 bp, Artificial Sequence
  MKO10105844_B_Olfr845
  gRNA
gatatcagccacagatagat

SEQ ID NO: 105845 - DNA, 20 bp, Artificial Sequence
  MKO10105845_B_Olfr845
  gRNA
ggcactcagcactgatggtc

SEQ ID NO: 105846 - DNA, 20 bp, Artificial Sequence
  MKO10105846_B_Olfr845
  gRNA
ctgcagttactgaatctccc

SEQ ID NO: 105847 - DNA, 20 bp, Artificial Sequence
  MKO10105847_B_Olfr846
  gRNA
aaaagtaatatgcacctgtt

SEQ ID NO: 105848 - DNA, 20 bp, Artificial Sequence
  MKO10105848_B_Olfr846
  gRNA
aggctttgtactttcctcta

SEQ ID NO: 105849 - DNA, 20 bp, Artificial Sequence
  MKO10105849_B_Olfr846
  gRNA
ttacacaggttgcctcattc

SEQ ID NO: 105850 - DNA, 20 bp, Artificial Sequence
  MKO10105850_B_Olfr847
  gRNA
gttgaagaacatccacacac

SEQ ID NO: 105851 - DNA, 20 bp, Artificial Sequence
  MKO10105851_B_Olfr847
  gRNA
tacagtgtctgatgatactg

SEQ ID NO: 105852 - DNA, 20 bp, Artificial Sequence
  MKO10105852_B_Olfr847
  gRNA
attatgaatccccaattctg

SEQ ID NO: 105853 - DNA, 20 bp, Artificial Sequence
  MKO10105853_B_Olfr849
  gRNA
ctctccaaaaaagactgtag

SEQ ID NO: 105854 - DNA, 20 bp, Artificial Sequence
  MKO10105854_B_Olfr849
  gRNA
gattagcaagtttcctaagg

SEQ ID NO: 105855 - DNA, 20 bp, Artificial Sequence
  MKO10105855_B_Olfr849
  gRNA
tcagatatatggtcaggaac

SEQ ID NO: 105856 - DNA, 20 bp, Artificial Sequence
  MKO10105856_B_Olfr850
  gRNA
agattataagaaggtttccc

SEQ ID NO: 105857 - DNA, 20 bp, Artificial Sequence
  MKO10105857_B_Olfr850
  gRNA
tactttgatgcacagcctta

SEQ ID NO: 105858 - DNA, 20 bp, Artificial Sequence
  MKO10105858_B_Olfr850
  gRNA
acttccccagatcctcaagt

SEQ ID NO: 105859 - DNA, 20 bp, Artificial Sequence
  MKO10105859_B_Olfr851
  gRNA
catttatagtgctgatgatc

SEQ ID NO: 105860 - DNA, 20 bp, Artificial Sequence
  MKO10105860_B_Olfr851
  gRNA
aacatccatgatgtacagtg

SEQ ID NO: 105861 - DNA, 20 bp, Artificial Sequence
  MKO10105861_B_Olfr851
  gRNA
attctgaagatcccatcagt

SEQ ID NO: 105862 - DNA, 20 bp, Artificial Sequence
  MKO10105862_B_Olfr853
  gRNA
atgtcattaagccatgtaga

SEQ ID NO: 105863 - DNA, 20 bp, Artificial Sequence
  MKO10105863_B_Olfr853
  gRNA
gtctttgtacattagcattg

SEQ ID NO: 105864 - DNA, 20 bp, Artificial Sequence
  MKO10105864_B_Olfr853
  gRNA
agcaaatccatcagttacac

SEQ ID NO: 105865 - DNA, 20 bp, Artificial Sequence
  MKO10105865_B_Olfr854
  gRNA
aatccacaatgctaattagc

SEQ ID NO: 105866 - DNA, 20 bp, Artificial Sequence
  MKO10105866_B_Olfr854
  gRNA
cccaaaattgcagcctgtct

SEQ ID NO: 105867 - DNA, 20 bp, Artificial Sequence
  MKO10105867_B_Olfr854
  gRNA
aatcaggaggatacagaaac

SEQ ID NO: 105868 - DNA, 20 bp, Artificial Sequence
  MKO10105868_B_Olfr855
  gRNA
ttccctgattcacacactta

SEQ ID NO: 105869 - DNA, 20 bp, Artificial Sequence
  MKO10105869_B_Olfr855
  gRNA
agagcacgatgttgtcaatt

SEQ ID NO: 105870 - DNA, 20 bp, Artificial Sequence
  MKO10105870_B_Olfr855
  gRNA
gtgagtcccgcaagtagaga

SEQ ID NO: 105871 - DNA, 20 bp, Artificial Sequence
  MKO10105871_B_Olfr857
  gRNA
agttaaattatgttatctga

SEQ ID NO: 105872 - DNA, 20 bp, Artificial Sequence
  MKO10105872_B_Olfr857
  gRNA
cgcttcagtaatgtatacaa

SEQ ID NO: 105873 - DNA, 20 bp, Artificial Sequence
  MKO10105873_B_Olfr857
  gRNA
cccttgcctctgtagatgtt

SEQ ID NO: 105874 - DNA, 20 bp, Artificial Sequence
  MKO10105874_B_Olfr859
  gRNA
cgaagccaccatactttcct

SEQ ID NO: 105875 - DNA, 20 bp, Artificial Sequence
  MKO10105875_B_Olfr859
  gRNA
atggaaccatataattcaac

SEQ ID NO: 105876 - DNA, 20 bp, Artificial Sequence
  MKO10105876_B_Olfr859
  gRNA
atgcaagtttatcagcatct

SEQ ID NO: 105877 - DNA, 20 bp, Artificial Sequence
  MKO10105877_B_Olfr860
  gRNA
tcctcgtctgtgtagatatt

SEQ ID NO: 105878 - DNA, 20 bp, Artificial Sequence
  MKO10105878_B_Olfr860
  gRNA
gacttcagtaatgtatacca

SEQ ID NO: 105879 - DNA, 20 bp, Artificial Sequence
  MKO10105879_B_Olfr860
  gRNA
tttcttgtcagtatcattgt

SEQ ID NO: 105880 - DNA, 20 bp, Artificial Sequence
  MKO10105880_B_Olfr862
  gRNA
caactatttctagatcaacc

SEQ ID NO: 105881 - DNA, 20 bp, Artificial Sequence
  MKO10105881_B_Olfr862
  gRNA
gccttggaattcctgttact

SEQ ID NO: 105882 - DNA, 20 bp, Artificial Sequence
  MKO10105882_B_Olfr862
  gRNA
actaaaattctgcactaata

SEQ ID NO: 105883 - DNA, 20 bp, Artificial Sequence
  MKO10105883_B_Olfr866
  gRNA
cggacaggaataatccaaag

SEQ ID NO: 105884 - DNA, 20 bp, Artificial Sequence
  MKO10105884_B_Olfr866
  gRNA
gatatcaatcaaagataagt

SEQ ID NO: 105885 - DNA, 20 bp, Artificial Sequence
  MKO10105885_B_Olfr866
  gRNA
tgttagtacaagcaagatta

SEQ ID NO: 105886 - DNA, 20 bp, Artificial Sequence
  MKO10105886_B_Olfr867
  gRNA
gtatgtagtgacttccttac

SEQ ID NO: 105887 - DNA, 20 bp, Artificial Sequence
  MKO10105887_B_Olfr867
  gRNA
gaattgcaacctattctctt

SEQ ID NO: 105888 - DNA, 20 bp, Artificial Sequence
  MKO10105888_B_Olfr867
  gRNA
tataacaaaatttctcatcc

SEQ ID NO: 105889 - DNA, 20 bp, Artificial Sequence
  MKO10105889_B_Olfr868
  gRNA
aaaataagcataccactgcg

SEQ ID NO: 105890 - DNA, 20 bp, Artificial Sequence
  MKO10105890_B_Olfr868
  gRNA
cagcccacgtaggatatgac

SEQ ID NO: 105891 - DNA, 20 bp, Artificial Sequence
  MKO10105891_B_Olfr868
  gRNA
actaagatgccacagcgaca

SEQ ID NO: 105892 - DNA, 20 bp, Artificial Sequence
  MKO10105892_B_Olfr869
  gRNA
gtacttctacgttctctgag

SEQ ID NO: 105893 - DNA, 20 bp, Artificial Sequence
  MKO10105893_B_Olfr869
  gRNA
ctacaatttacacacttcag

SEQ ID NO: 105894 - DNA, 20 bp, Artificial Sequence
  MKO10105894_B_Olfr869
  gRNA
gggacattaaaattgcccta

SEQ ID NO: 105895 - DNA, 20 bp, Artificial Sequence
  MKO10105895_B_Olfr870
  gRNA
cccatatcacaatataaaga

SEQ ID NO: 105896 - DNA, 20 bp, Artificial Sequence
  MKO10105896_B_Olfr870
  gRNA
attgattagtgtatctgagc

SEQ ID NO: 105897 - DNA, 20 bp, Artificial Sequence
  MKO10105897_B_Olfr870
  gRNA
cacacttctcctcaccgtga

SEQ ID NO: 105898 - DNA, 20 bp, Artificial Sequence
  MKO10105898_B_Olfr871
  gRNA
tatattctgatatgtgtcct

SEQ ID NO: 105899 - DNA, 20 bp, Artificial Sequence
  MKO10105899_B_Olfr871
  gRNA
cagaactaaggtacacacca

SEQ ID NO: 105900 - DNA, 20 bp, Artificial Sequence
  MKO10105900_B_Olfr871
  gRNA
attgattagtgtgtctgagc

SEQ ID NO: 105901 - DNA, 20 bp, Artificial Sequence
  MKO10105901_B_Olfr872
  gRNA
gggacattaaaactgctctt

SEQ ID NO: 105902 - DNA, 20 bp, Artificial Sequence
  MKO10105902_B_Olfr872
  gRNA
tgaaccaatgtatactccaa

SEQ ID NO: 105903 - DNA, 20 bp, Artificial Sequence
  MKO10105903_B_Olfr872
  gRNA
ttatgattaagaagttgtga

SEQ ID NO: 105904 - DNA, 20 bp, Artificial Sequence
  MKO10105904_B_Olfr873
  gRNA
acagccattggagtatatct

SEQ ID NO: 105905 - DNA, 20 bp, Artificial Sequence
  MKO10105905_B_Olfr873
  gRNA
caagattaaggagttgtgca

SEQ ID NO: 105906 - DNA, 20 bp, Artificial Sequence
  MKO10105906_B_Olfr873
  gRNA
cagcaaagagataatctatg

SEQ ID NO: 105907 - DNA, 20 bp, Artificial Sequence
  MKO10105907_B_Olfr874
  gRNA
tattgcaagagagctcaaga

SEQ ID NO: 105908 - DNA, 20 bp, Artificial Sequence
  MKO10105908_B_Olfr874
  gRNA
tctggggccatggcccatac

SEQ ID NO: 105909 - DNA, 20 bp, Artificial Sequence
  MKO10105909_B_Olfr874
  gRNA
ttccttgttctatatgattg

SEQ ID NO: 105910 - DNA, 20 bp, Artificial Sequence
  MKO10105910_B_Olfr875
  gRNA
aactacaagctcatttgtga

SEQ ID NO: 105911 - DNA, 20 bp, Artificial Sequence
  MKO10105911_B_Olfr875
  gRNA
acatggtgaccgtgtacatc

SEQ ID NO: 105912 - DNA, 20 bp, Artificial Sequence
  MKO10105912_B_Olfr875
  gRNA
gcaaaagaagtaaacatacc

SEQ ID NO: 105913 - DNA, 20 bp, Artificial Sequence
  MKO10105913_B_Olfr876
  gRNA
gtgtgatatccttccccttc

SEQ ID NO: 105914 - DNA, 20 bp, Artificial Sequence
  MKO10105914_B_Olfr876
  gRNA
aacaactgtgccatgcaccc

SEQ ID NO: 105915 - DNA, 20 bp, Artificial Sequence
  MKO10105915_B_Olfr876
  gRNA
tactacaatcgtatagaaca

SEQ ID NO: 105916 - DNA, 20 bp, Artificial Sequence
  MKO10105916_B_Olfr877
  gRNA
attgatgtatgagctattgc

SEQ ID NO: 105917 - DNA, 20 bp, Artificial Sequence
  MKO10105917_B_Olfr877
  gRNA
aatgggcactccaatgccaa

SEQ ID NO: 105918 - DNA, 20 bp, Artificial Sequence
  MKO10105918_B_Olfr877
  gRNA
accaccttctagtttgcctc

SEQ ID NO: 105919 - DNA, 20 bp, Artificial Sequence
  MKO10105919_B_Olfr878
  gRNA
actggaattcaacccaatta

SEQ ID NO: 105920 - DNA, 20 bp, Artificial Sequence
  MKO10105920_B_Olfr878
  gRNA
cttccctcttccattgaacc

SEQ ID NO: 105921 - DNA, 20 bp, Artificial Sequence
  MKO10105921_B_Olfr878
  gRNA
aataaaaaacacaagctcgt

SEQ ID NO: 105922 - DNA, 20 bp, Artificial Sequence
  MKO10105922_B_Olfr881
  gRNA
ggtgtatgttatggggtttg

SEQ ID NO: 105923 - DNA, 20 bp, Artificial Sequence
  MKO10105923_B_Olfr881
  gRNA
acaccccaactgtcatcaag

SEQ ID NO: 105924 - DNA, 20 bp, Artificial Sequence
  MKO10105924_B_Olfr881
  gRNA
gctgctgtgtcaagccaagc

SEQ ID NO: 105925 - DNA, 20 bp, Artificial Sequence
  MKO10105925_B_Olfr883
  gRNA
aatctacattgtatccatgg

SEQ ID NO: 105926 - DNA, 20 bp, Artificial Sequence
  MKO10105926_B_Olfr883
  gRNA
ttggaagccattgcacacac

SEQ ID NO: 105927 - DNA, 20 bp, Artificial Sequence
  MKO10105927_B_Olfr883
  gRNA
cctgatgagacatggtaact

SEQ ID NO: 105928 - DNA, 20 bp, Artificial Sequence
  MKO10105928_B_Olfr884
  gRNA
aagtacctccatcaatgaga

SEQ ID NO: 105929 - DNA, 20 bp, Artificial Sequence
  MKO10105929_B_Olfr884
  gRNA
aatctatgtggtctccatgt

SEQ ID NO: 105930 - DNA, 20 bp, Artificial Sequence
  MKO10105930_B_Olfr884
  gRNA
gaaaaacattgatgaaactg

SEQ ID NO: 105931 - DNA, 20 bp, Artificial Sequence
  MKO10105931_B_Olfr885
  gRNA
attcagcattggacccagaa

SEQ ID NO: 105932 - DNA, 20 bp, Artificial Sequence
  MKO10105932_B_Olfr885
  gRNA
gaaaagtaccagctcattga

SEQ ID NO: 105933 - DNA, 20 bp, Artificial Sequence
  MKO10105933_B_Olfr885
  gRNA
tacttgagcaggagagttta

SEQ ID NO: 105934 - DNA, 20 bp, Artificial Sequence
  MKO10105934_B_Olfr887
  gRNA
ttgtgcacgagagcttcaga

SEQ ID NO: 105935 - DNA, 20 bp, Artificial Sequence
  MKO10105935_B_Olfr887
  gRNA
tcttagtatccattctgcag

SEQ ID NO: 105936 - DNA, 20 bp, Artificial Sequence
  MKO10105936_B_Olfr887
  gRNA
attcaacattgggcctacaa

SEQ ID NO: 105937 - DNA, 20 bp, Artificial Sequence
  MKO10105937_B_Olfr888
  gRNA
tcaggtctgccacttgatga

SEQ ID NO: 105938 - DNA, 20 bp, Artificial Sequence
  MKO10105938_B_Olfr888
  gRNA
acactcccaccatcatcaag

SEQ ID NO: 105939 - DNA, 20 bp, Artificial Sequence
  MKO10105939_B_Olfr888
  gRNA
tcgaaagccttcagtacgtg

SEQ ID NO: 105940 - DNA, 20 bp, Artificial Sequence
  MKO10105940_B_Olfr889
  gRNA
acatccccactgtcatcaag

SEQ ID NO: 105941 - DNA, 20 bp, Artificial Sequence
  MKO10105941_B_Olfr889
  gRNA
aatctatgtggtctctgtga

SEQ ID NO: 105942 - DNA, 20 bp, Artificial Sequence
  MKO10105942_B_Olfr889
  gRNA
tacttgtgcaggagagcttc

SEQ ID NO: 105943 - DNA, 20 bp, Artificial Sequence
  MKO10105943_B_Olfr890
  gRNA
aatgatgtagccttcacaga

SEQ ID NO: 105944 - DNA, 20 bp, Artificial Sequence
  MKO10105944_B_Olfr890
  gRNA
tcaaaagcattcaggacctg

SEQ ID NO: 105945 - DNA, 20 bp, Artificial Sequence
  MKO10105945_B_Olfr890
  gRNA
agacatgacattggaaagaa

SEQ ID NO: 105946 - DNA, 20 bp, Artificial Sequence
  MKO10105946_B_Olfr891
  gRNA
tcatacttgatgggaggtat

SEQ ID NO: 105947 - DNA, 20 bp, Artificial Sequence
  MKO10105947_B_Olfr891
  gRNA
agtatgaaccaaacatcatc

SEQ ID NO: 105948 - DNA, 20 bp, Artificial Sequence
  MKO10105948_B_Olfr891
  gRNA
acgtgatgatcatgtacagc

SEQ ID NO: 105949 - DNA, 20 bp, Artificial Sequence
  MKO10105949_B_Olfr893
  gRNA
gaattatacagctaccgtga

SEQ ID NO: 105950 - DNA, 20 bp, Artificial Sequence
  MKO10105950_B_Olfr893
  gRNA
atgtgttccctgctaatgat

SEQ ID NO: 105951 - DNA, 20 bp, Artificial Sequence
  MKO10105951_B_Olfr893
  gRNA
ataaggatggcatataccaa

SEQ ID NO: 105952 - DNA, 20 bp, Artificial Sequence
  MKO10105952_B_Olfr894
  gRNA
agcttgctatgaagaaatcc

SEQ ID NO: 105953 - DNA, 20 bp, Artificial Sequence
  MKO10105953_B_Olfr894
  gRNA
catacatcctgtgtgagctg

SEQ ID NO: 105954 - DNA, 20 bp, Artificial Sequence
  MKO10105954_B_Olfr894
  gRNA
tccatcatctgctgaaacag

SEQ ID NO: 105955 - DNA, 20 bp, Artificial Sequence
  MKO10105955_B_Olfr895
  gRNA
tacaaagctgttatgtcacc

SEQ ID NO: 105956 - DNA, 20 bp, Artificial Sequence
  MKO10105956_B_Olfr895
  gRNA
ataacagctttgtagagcag

SEQ ID NO: 105957 - DNA, 20 bp, Artificial Sequence
  MKO10105957_B_Olfr895
  gRNA
gtgatatcttccctctcttt

SEQ ID NO: 105958 - DNA, 20 bp, Artificial Sequence
  MKO10105958_B_Olfr898
  gRNA
ggagaccagacccataaaag

SEQ ID NO: 105959 - DNA, 20 bp, Artificial Sequence
  MKO10105959_B_Olfr898
  gRNA
cagcacataacattcagagt

SEQ ID NO: 105960 - DNA, 20 bp, Artificial Sequence
  MKO10105960_B_Olfr898
  gRNA
cataaaccctgtgtgagtca

SEQ ID NO: 105961 - DNA, 20 bp, Artificial Sequence
  MKO10105961_B_Olfr899
  gRNA
tatccatttgtcatcatcta

SEQ ID NO: 105962 - DNA, 20 bp, Artificial Sequence
  MKO10105962_B_Olfr899
  gRNA
ctaaagacagttacaatcca

SEQ ID NO: 105963 - DNA, 20 bp, Artificial Sequence
  MKO10105963_B_Olfr899
  gRNA
aatgcttgctgcacacttga

SEQ ID NO: 105964 - DNA, 20 bp, Artificial Sequence
  MKO10105964_B_Olfr8
  gRNA
taaagatgtgaagaaagctc

SEQ ID NO: 105965 - DNA, 20 bp, Artificial Sequence
  MKO10105965_B_Olfr8
  gRNA
cgtgtacttcccttgaactg

SEQ ID NO: 105966 - DNA, 20 bp, Artificial Sequence
  MKO10105966_B_Olfr8
  gRNA
actataaaataagaagacaa

SEQ ID NO: 105967 - DNA, 20 bp, Artificial Sequence
  MKO10105967_B_Olfr900
  gRNA
tcataaaccctgtatgagtc

SEQ ID NO: 105968 - DNA, 20 bp, Artificial Sequence
  MKO10105968_B_Olfr900
  gRNA
ctgtgtagtttaacaagaat

SEQ ID NO: 105969 - DNA, 20 bp, Artificial Sequence
  MKO10105969_B_Olfr900
  gRNA
cttgtgagctctgctgtagt

SEQ ID NO: 105970 - DNA, 20 bp, Artificial Sequence
  MKO10105970_B_Olfr901
  gRNA
tatcttaagccttctcctgt

SEQ ID NO: 105971 - DNA, 20 bp, Artificial Sequence
  MKO10105971_B_Olfr901
  gRNA
aagtcttatgcagtgcaatg

SEQ ID NO: 105972 - DNA, 20 bp, Artificial Sequence
  MKO10105972_B_Olfr901
  gRNA
gtctcagcatgcaaattgtg

SEQ ID NO: 105973 - DNA, 20 bp, Artificial Sequence
  MKO10105973_B_Olfr902
  gRNA
ctgagtcatacattgcatat

SEQ ID NO: 105974 - DNA, 20 bp, Artificial Sequence
  MKO10105974_B_Olfr902
  gRNA
gatgtgttaatcctactaga

SEQ ID NO: 105975 - DNA, 20 bp, Artificial Sequence
  MKO10105975_B_Olfr902
  gRNA
attaggtttaaacacacttg

SEQ ID NO: 105976 - DNA, 20 bp, Artificial Sequence
  MKO10105976_B_Olfr904
  gRNA
ggcctctgcaaatgtgtctt

SEQ ID NO: 105977 - DNA, 20 bp, Artificial Sequence
  MKO10105977_B_Olfr904
  gRNA
gagatgaagatagtgatgct

SEQ ID NO: 105978 - DNA, 20 bp, Artificial Sequence
  MKO10105978_B_Olfr904
  gRNA
ttcaaaatttccatctgctc

SEQ ID NO: 105979 - DNA, 20 bp, Artificial Sequence
  MKO10105979_B_Olfr905
  gRNA
tcatgtatgaactaaacata

SEQ ID NO: 105980 - DNA, 20 bp, Artificial Sequence
  MKO10105980_B_Olfr905
  gRNA
tacctccagttcattgacat

SEQ ID NO: 105981 - DNA, 20 bp, Artificial Sequence
  MKO10105981_B_Olfr905
  gRNA
cctgtttctaatgatgtatg

SEQ ID NO: 105982 - DNA, 20 bp, Artificial Sequence
  MKO10105982_B_Olfr906
  gRNA
atgtatatagtaactatgac

SEQ ID NO: 105983 - DNA, 20 bp, Artificial Sequence
  MKO10105983_B_Olfr906
  gRNA
atagcaatattatataagag

SEQ ID NO: 105984 - DNA, 20 bp, Artificial Sequence
  MKO10105984_B_Olfr906
  gRNA
ccatagtttccacctactca

SEQ ID NO: 105985 - DNA, 20 bp, Artificial Sequence
  MKO10105985_B_Olfr907
  gRNA
cgtacatcaccagaaagagt

SEQ ID NO: 105986 - DNA, 20 bp, Artificial Sequence
  MKO10105986_B_Olfr907
  gRNA
tcactgagttcatcttgatg

SEQ ID NO: 105987 - DNA, 20 bp, Artificial Sequence
  MKO10105987_B_Olfr907
  gRNA
aacaggggtatttgtaggtc

SEQ ID NO: 105988 - DNA, 20 bp, Artificial Sequence
  MKO10105988_B_Olfr908
  gRNA
atgttgtgttctgtcatcaa

SEQ ID NO: 105989 - DNA, 20 bp, Artificial Sequence
  MKO10105989_B_Olfr908
  gRNA
gagattgagattattattgt

SEQ ID NO: 105990 - DNA, 20 bp, Artificial Sequence
  MKO10105990_B_Olfr908
  gRNA
cttccaaatgagatctactg

SEQ ID NO: 105991 - DNA, 20 bp, Artificial Sequence
  MKO10105991_B_Olfr90
  gRNA
ggcctggacgattggcctag

SEQ ID NO: 105992 - DNA, 20 bp, Artificial Sequence
  MKO10105992_B_Olfr90
  gRNA
ttgcccctctctcgagcata

SEQ ID NO: 105993 - DNA, 20 bp, Artificial Sequence
  MKO10105993_B_Olfr90
  gRNA
caaaggccatcactgctagc

SEQ ID NO: 105994 - DNA, 20 bp, Artificial Sequence
  MKO10105994_B_Olfr910
  gRNA
aaactaaaaagaggggtatt

SEQ ID NO: 105995 - DNA, 20 bp, Artificial Sequence
  MKO10105995_B_Olfr910
  gRNA
agaaatgatgatgacaatac

SEQ ID NO: 105996 - DNA, 20 bp, Artificial Sequence
  MKO10105996_B_Olfr910
  gRNA
ttatttggagaatattagag

SEQ ID NO: 105997 - DNA, 20 bp, Artificial Sequence
  MKO10105997_B_Olfr911-ps1
  gRNA
ctgcagtggatctcatttga

SEQ ID NO: 105998 - DNA, 20 bp, Artificial Sequence
  MKO10105998_B_Olfr911-ps1
  gRNA
gattagaatctctatttcat

SEQ ID NO: 105999 - DNA, 20 bp, Artificial Sequence
  MKO10105999_B_Olfr911-ps1
  gRNA
gtacaggagagctgcaacag

SEQ ID NO: 106000 - DNA, 20 bp, Artificial Sequence
  MKO10106000_B_Olfr912
  gRNA
gttcatcatggggactacaa

SEQ ID NO: 106001 - DNA, 20 bp, Artificial Sequence
  MKO10106001_B_Olfr912
  gRNA
atgcacatgacccataaaac

SEQ ID NO: 106002 - DNA, 20 bp, Artificial Sequence
  MKO10106002_B_Olfr912
  gRNA
tacctgaaaccctcctctgt

SEQ ID NO: 106003 - DNA, 20 bp, Artificial Sequence
  MKO10106003_B_Olfr913
  gRNA
tgtatcctacaaaaaagagt

SEQ ID NO: 106004 - DNA, 20 bp, Artificial Sequence
  MKO10106004_B_Olfr913
  gRNA
cttattgatagatagagctg

SEQ ID NO: 106005 - DNA, 20 bp, Artificial Sequence
  MKO10106005_B_Olfr913
  gRNA
gtgttatgtgctgacctcaa

SEQ ID NO: 106006 - DNA, 20 bp, Artificial Sequence
  MKO10106006_B_Olfr914
  gRNA
ggaagaatggctctggcaaa

SEQ ID NO: 106007 - DNA, 20 bp, Artificial Sequence
  MKO10106007_B_Olfr914
  gRNA
gtgatcatctttgcttctta

SEQ ID NO: 106008 - DNA, 20 bp, Artificial Sequence
  MKO10106008_B_Olfr914
  gRNA
gaagaacattatttcttaca

SEQ ID NO: 106009 - DNA, 20 bp, Artificial Sequence
  MKO10106009_B_Olfr915
  gRNA
ttatgtttgaacctcatact

SEQ ID NO: 106010 - DNA, 20 bp, Artificial Sequence
  MKO10106010_B_Olfr915
  gRNA
gaacatacatcactagaaag

SEQ ID NO: 106011 - DNA, 20 bp, Artificial Sequence
  MKO10106011_B_Olfr915
  gRNA
gatgtatgttctcactgtat

SEQ ID NO: 106012 - DNA, 20 bp, Artificial Sequence
  MKO10106012_B_Olfr916
  gRNA
accatcctcagctgagtcta

SEQ ID NO: 106013 - DNA, 20 bp, Artificial Sequence
  MKO10106013_B_Olfr916
  gRNA
acccttgttctttatatttc

SEQ ID NO: 106014 - DNA, 20 bp, Artificial Sequence
  MKO10106014_B_Olfr916
  gRNA
ttcatccatagactcagctg

SEQ ID NO: 106015 - DNA, 20 bp, Artificial Sequence
  MKO10106015_B_Olfr917
  gRNA
tcaactatatttgtctccta

SEQ ID NO: 106016 - DNA, 20 bp, Artificial Sequence
  MKO10106016_B_Olfr917
  gRNA
gagacaaatatagttgaagt

SEQ ID NO: 106017 - DNA, 20 bp, Artificial Sequence
  MKO10106017_B_Olfr917
  gRNA
tttcgcatcagttcttctga

SEQ ID NO: 106018 - DNA, 20 bp, Artificial Sequence
  MKO10106018_B_Olfr918
  gRNA
tcaataataagcatgctgac

SEQ ID NO: 106019 - DNA, 20 bp, Artificial Sequence
  MKO10106019_B_Olfr918
  gRNA
tgctggtgcaagaaagttgg

SEQ ID NO: 106020 - DNA, 20 bp, Artificial Sequence
  MKO10106020_B_Olfr918
  gRNA
ctgagtcatgcacccctcat

SEQ ID NO: 106021 - DNA, 20 bp, Artificial Sequence
  MKO10106021_B_Olfr919
  gRNA
ggctttgaatctgccttccg

SEQ ID NO: 106022 - DNA, 20 bp, Artificial Sequence
  MKO10106022_B_Olfr919
  gRNA
ctgagtcatacattcctcat

SEQ ID NO: 106023 - DNA, 20 bp, Artificial Sequence
  MKO10106023_B_Olfr919
  gRNA
tattgaaagcactgagacac

SEQ ID NO: 106024 - DNA, 20 bp, Artificial Sequence
  MKO10106024_B_Olfr91
  gRNA
tgtgtccagtgttattcttg

SEQ ID NO: 106025 - DNA, 20 bp, Artificial Sequence
  MKO10106025_B_Olfr91
  gRNA
ttgaagcagtcccatcatcc

SEQ ID NO: 106026 - DNA, 20 bp, Artificial Sequence
  MKO10106026_B_Olfr91
  gRNA
actcggtggttcccaaggac

SEQ ID NO: 106027 - DNA, 20 bp, Artificial Sequence
  MKO10106027_B_Olfr920
  gRNA
aatgtacatgataactgcat

SEQ ID NO: 106028 - DNA, 20 bp, Artificial Sequence
  MKO10106028_B_Olfr920
  gRNA
ctgagtcatacaacccacat

SEQ ID NO: 106029 - DNA, 20 bp, Artificial Sequence
  MKO10106029_B_Olfr920
  gRNA
tgtacattaatagaaagacc

SEQ ID NO: 106030 - DNA, 20 bp, Artificial Sequence
  MKO10106030_B_Olfr921
  gRNA
tttccaaataagatccactt

SEQ ID NO: 106031 - DNA, 20 bp, Artificial Sequence
  MKO10106031_B_Olfr921
  gRNA
ataacactgccatgtcccca

SEQ ID NO: 106032 - DNA, 20 bp, Artificial Sequence
  MKO10106032_B_Olfr921
  gRNA
ttgatcaatagatacagcag

SEQ ID NO: 106033 - DNA, 20 bp, Artificial Sequence
  MKO10106033_B_Olfr922
  gRNA
gcctcatcatgcaacctgtg

SEQ ID NO: 106034 - DNA, 20 bp, Artificial Sequence
  MKO10106034_B_Olfr922
  gRNA
tcattccaatcagagtgagc

SEQ ID NO: 106035 - DNA, 20 bp, Artificial Sequence
  MKO10106035_B_Olfr922
  gRNA
tagtacataggagtgtgaag

SEQ ID NO: 106036 - DNA, 20 bp, Artificial Sequence
  MKO10106036_B_Olfr923
  gRNA
cttacgcatcagctccacac

SEQ ID NO: 106037 - DNA, 20 bp, Artificial Sequence
  MKO10106037_B_Olfr923
  gRNA
ataatgttatattatccccc

SEQ ID NO: 106038 - DNA, 20 bp, Artificial Sequence
  MKO10106038_B_Olfr923
  gRNA
ttgagtcaagcagcctgtat

SEQ ID NO: 106039 - DNA, 20 bp, Artificial Sequence
  MKO10106039_B_Olfr924
  gRNA
taacattgtcatgtcccaca

SEQ ID NO: 106040 - DNA, 20 bp, Artificial Sequence
  MKO10106040_B_Olfr924
  gRNA
aatatatgtgatcacagtag

SEQ ID NO: 106041 - DNA, 20 bp, Artificial Sequence
  MKO10106041_B_Olfr924
  gRNA
agagtgaagttgagaactaa

SEQ ID NO: 106042 - DNA, 20 bp, Artificial Sequence
  MKO10106042_B_Olfr926
  gRNA
catgtatgcccagaaacaag

SEQ ID NO: 106043 - DNA, 20 bp, Artificial Sequence
  MKO10106043_B_Olfr926
  gRNA
attacagtgttataaagcag

SEQ ID NO: 106044 - DNA, 20 bp, Artificial Sequence
  MKO10106044_B_Olfr926
  gRNA
acagcagtacttcgttgata

SEQ ID NO: 106045 - DNA, 20 bp, Artificial Sequence
  MKO10106045_B_Olfr92
  gRNA
cccccacctatgtcgccagt

SEQ ID NO: 106046 - DNA, 20 bp, Artificial Sequence
  MKO10106046_B_Olfr92
  gRNA
cttctctgacaacccacaac

SEQ ID NO: 106047 - DNA, 20 bp, Artificial Sequence
  MKO10106047_B_Olfr92
  gRNA
accctcttgtatacaccctg

SEQ ID NO: 106048 - DNA, 20 bp, Artificial Sequence
  MKO10106048_B_Olfr930
  gRNA
tgctgcagaatgattcccag

SEQ ID NO: 106049 - DNA, 20 bp, Artificial Sequence
  MKO10106049_B_Olfr930
  gRNA
gaagtaatgacttatgatgt

SEQ ID NO: 106050 - DNA, 20 bp, Artificial Sequence
  MKO10106050_B_Olfr930
  gRNA
attgagatgtgtgttagagc

SEQ ID NO: 106051 - DNA, 20 bp, Artificial Sequence
  MKO10106051_B_Olfr933
  gRNA
gcctccttcaagtaactctc

SEQ ID NO: 106052 - DNA, 20 bp, Artificial Sequence
  MKO10106052_B_Olfr933
  gRNA
tgtaacagttgtgtttgtct

SEQ ID NO: 106053 - DNA, 20 bp, Artificial Sequence
  MKO10106053_B_Olfr933
  gRNA
aacagctagagtgggcacca

SEQ ID NO: 106054 - DNA, 20 bp, Artificial Sequence
  MKO10106054_B_Olfr934
  gRNA
tatgagcaagttccccacta

SEQ ID NO: 106055 - DNA, 20 bp, Artificial Sequence
  MKO10106055_B_Olfr934
  gRNA
ttgccatatgcttccctcta

SEQ ID NO: 106056 - DNA, 20 bp, Artificial Sequence
  MKO10106056_B_Olfr934
  gRNA
atgattattgagtaccttag

SEQ ID NO: 106057 - DNA, 20 bp, Artificial Sequence
  MKO10106057_B_Olfr935
  gRNA
aaactcctaaaacaattgaa

SEQ ID NO: 106058 - DNA, 20 bp, Artificial Sequence
  MKO10106058_B_Olfr935
  gRNA
gtgaaaaaattcttcctctc

SEQ ID NO: 106059 - DNA, 20 bp, Artificial Sequence
  MKO10106059_B_Olfr935
  gRNA
cttacgcattaaatccactg

SEQ ID NO: 106060 - DNA, 20 bp, Artificial Sequence
  MKO10106060_B_Olfr936
  gRNA
tcttcaagctccatagatga

SEQ ID NO: 106061 - DNA, 20 bp, Artificial Sequence
  MKO10106061_B_Olfr936
  gRNA
acatgatgctactgtaaagc

SEQ ID NO: 106062 - DNA, 20 bp, Artificial Sequence
  MKO10106062_B_Olfr936
  gRNA
tgtttcagaatgtttcatgc

SEQ ID NO: 106063 - DNA, 20 bp, Artificial Sequence
  MKO10106063_B_Olfr937
  gRNA
aatctatgtggtcactgtag

SEQ ID NO: 106064 - DNA, 20 bp, Artificial Sequence
  MKO10106064_B_Olfr937
  gRNA
agcccagtcagaatgaactc

SEQ ID NO: 106065 - DNA, 20 bp, Artificial Sequence
  MKO10106065_B_Olfr937
  gRNA
taatatagactccaaagatc

SEQ ID NO: 106066 - DNA, 20 bp, Artificial Sequence
  MKO10106066_B_Olfr938
  gRNA
ggttctctgttaacccagtg

SEQ ID NO: 106067 - DNA, 20 bp, Artificial Sequence
  MKO10106067_B_Olfr938
  gRNA
agaaatcaatgatacctcag

SEQ ID NO: 106068 - DNA, 20 bp, Artificial Sequence
  MKO10106068_B_Olfr938
  gRNA
ctatcaagtctgttcgttga

SEQ ID NO: 106069 - DNA, 20 bp, Artificial Sequence
  MKO10106069_B_Olfr93
  gRNA
acataggcgggggtggatta

SEQ ID NO: 106070 - DNA, 20 bp, Artificial Sequence
  MKO10106070_B_Olfr93
  gRNA
gtggtatttgaactatggat

SEQ ID NO: 106071 - DNA, 20 bp, Artificial Sequence
  MKO10106071_B_Olfr93
  gRNA
tctctaatccgactctcttg

SEQ ID NO: 106072 - DNA, 20 bp, Artificial Sequence
  MKO10106072_B_Olfr943
  gRNA
aaatatacacccctaaaatc

SEQ ID NO: 106073 - DNA, 20 bp, Artificial Sequence
  MKO10106073_B_Olfr943
  gRNA
tctatcaaactcactgatga

SEQ ID NO: 106074 - DNA, 20 bp, Artificial Sequence
  MKO10106074_B_Olfr943
  gRNA
aagaacctcatttcctaccc

SEQ ID NO: 106075 - DNA, 20 bp, Artificial Sequence
  MKO10106075_B_Olfr944
  gRNA
aaacatgaagccagtgatta

SEQ ID NO: 106076 - DNA, 20 bp, Artificial Sequence
  MKO10106076_B_Olfr944
  gRNA
ccctttgaacttgccctcac

SEQ ID NO: 106077 - DNA, 20 bp, Artificial Sequence
  MKO10106077_B_Olfr944
  gRNA
gcccatagaattcagtaatg

SEQ ID NO: 106078 - DNA, 20 bp, Artificial Sequence
  MKO10106078_B_Olfr945
  gRNA
cactgtagtcatgtcctatc

SEQ ID NO: 106079 - DNA, 20 bp, Artificial Sequence
  MKO10106079_B_Olfr945
  gRNA
tgcaaaactgaatccttgtc

SEQ ID NO: 106080 - DNA, 20 bp, Artificial Sequence
  MKO10106080_B_Olfr945
  gRNA
aatcaacatttcatcgatat

SEQ ID NO: 106081 - DNA, 20 bp, Artificial Sequence
  MKO10106081_B_Olfr948
  gRNA
ctgaatcctaattataaagc

SEQ ID NO: 106082 - DNA, 20 bp, Artificial Sequence
  MKO10106082_B_Olfr948
  gRNA
ctggggatgattgcattgat

SEQ ID NO: 106083 - DNA, 20 bp, Artificial Sequence
  MKO10106083_B_Olfr948
  gRNA
acagccttcatcagtgagtt

SEQ ID NO: 106084 - DNA, 20 bp, Artificial Sequence
  MKO10106084_B_Olfr94
  gRNA
gccgctactgtgccgcacgc

SEQ ID NO: 106085 - DNA, 20 bp, Artificial Sequence
  MKO10106085_B_Olfr94
  gRNA
ccacacgcgcggcgaacatc

SEQ ID NO: 106086 - DNA, 20 bp, Artificial Sequence
  MKO10106086_B_Olfr94
  gRNA
gtgccgagtttatcccatat

SEQ ID NO: 106087 - DNA, 20 bp, Artificial Sequence
  MKO10106087_B_Olfr951
  gRNA
tccattgaactcacttgtga

SEQ ID NO: 106088 - DNA, 20 bp, Artificial Sequence
  MKO10106088_B_Olfr951
  gRNA
tgttgccatctgtaacacct

SEQ ID NO: 106089 - DNA, 20 bp, Artificial Sequence
  MKO10106089_B_Olfr951
  gRNA
tgccctccctagagtgaatg

SEQ ID NO: 106090 - DNA, 20 bp, Artificial Sequence
  MKO10106090_B_Olfr952
  gRNA
tagatcatgagattcaacac

SEQ ID NO: 106091 - DNA, 20 bp, Artificial Sequence
  MKO10106091_B_Olfr952
  gRNA
gaagatgtttcctcaaaaca

SEQ ID NO: 106092 - DNA, 20 bp, Artificial Sequence
  MKO10106092_B_Olfr952
  gRNA
agataaggaatagaggcaat

SEQ ID NO: 106093 - DNA, 20 bp, Artificial Sequence
  MKO10106093_B_Olfr954
  gRNA
cgagtaagttcaatagacca

SEQ ID NO: 106094 - DNA, 20 bp, Artificial Sequence
  MKO10106094_B_Olfr954
  gRNA
ctctgctgtgccaaaaatga

SEQ ID NO: 106095 - DNA, 20 bp, Artificial Sequence
  MKO10106095_B_Olfr954
  gRNA
tagagctgagccaagcattc

SEQ ID NO: 106096 - DNA, 20 bp, Artificial Sequence
  MKO10106096_B_Olfr955
  gRNA
gtgacagagttcattcttgc

SEQ ID NO: 106097 - DNA, 20 bp, Artificial Sequence
  MKO10106097_B_Olfr955
  gRNA
tgttgcagaatgtcacatgt

SEQ ID NO: 106098 - DNA, 20 bp, Artificial Sequence
  MKO10106098_B_Olfr955
  gRNA
aagaatgaactctgtcactg

SEQ ID NO: 106099 - DNA, 20 bp, Artificial Sequence
  MKO10106099_B_Olfr957
  gRNA
agcaggggcagctgtagcgc

SEQ ID NO: 106100 - DNA, 20 bp, Artificial Sequence
  MKO10106100_B_Olfr957
  gRNA
atacacccccactaccatcc

SEQ ID NO: 106101 - DNA, 20 bp, Artificial Sequence
  MKO10106101_B_Olfr957
  gRNA
catttcttatgcagaatgca

SEQ ID NO: 106102 - DNA, 20 bp, Artificial Sequence
  MKO10106102_B_Olfr958
  gRNA
ggtgagggaagttaagacgc

SEQ ID NO: 106103 - DNA, 20 bp, Artificial Sequence
  MKO10106103_B_Olfr958
  gRNA
tgattcgtgtataggacaga

SEQ ID NO: 106104 - DNA, 20 bp, Artificial Sequence
  MKO10106104_B_Olfr958
  gRNA
gcctacaccaaaccccatgc

SEQ ID NO: 106105 - DNA, 20 bp, Artificial Sequence
  MKO10106105_B_Olfr959
  gRNA
gtcattcattacaactgctc

SEQ ID NO: 106106 - DNA, 20 bp, Artificial Sequence
  MKO10106106_B_Olfr959
  gRNA
ataattattgagtagcgtaa

SEQ ID NO: 106107 - DNA, 20 bp, Artificial Sequence
  MKO10106107_B_Olfr959
  gRNA
tcacagagtttgtgcgatcc

SEQ ID NO: 106108 - DNA, 20 bp, Artificial Sequence
  MKO10106108_B_Olfr95
  gRNA
ttccgcatcccatccgctgc

SEQ ID NO: 106109 - DNA, 20 bp, Artificial Sequence
  MKO10106109_B_Olfr95
  gRNA
agactgcaacgctgcatctg

SEQ ID NO: 106110 - DNA, 20 bp, Artificial Sequence
  MKO10106110_B_Olfr95
  gRNA
ctttatctatatccgcccta

SEQ ID NO: 106111 - DNA, 20 bp, Artificial Sequence
  MKO10106111_B_Olfr960
  gRNA
agtgttgtttgtcatgttca

SEQ ID NO: 106112 - DNA, 20 bp, Artificial Sequence
  MKO10106112_B_Olfr960
  gRNA
caacctctctatctctgaca

SEQ ID NO: 106113 - DNA, 20 bp, Artificial Sequence
  MKO10106113_B_Olfr960
  gRNA
gttgtgtcctacactcgaat

SEQ ID NO: 106114 - DNA, 20 bp, Artificial Sequence
  MKO10106114_B_Olfr961
  gRNA
aatgtatgcctgtgccctgc

SEQ ID NO: 106115 - DNA, 20 bp, Artificial Sequence
  MKO10106115_B_Olfr961
  gRNA
acagaaacctaagtcaaaga

SEQ ID NO: 106116 - DNA, 20 bp, Artificial Sequence
  MKO10106116_B_Olfr961
  gRNA
aacctctccatctttgactt

SEQ ID NO: 106117 - DNA, 20 bp, Artificial Sequence
  MKO10106117_B_Olfr963
  gRNA
tctaaaattcgctcaacaga

SEQ ID NO: 106118 - DNA, 20 bp, Artificial Sequence
  MKO10106118_B_Olfr963
  gRNA
cctaatcctagtccattgct

SEQ ID NO: 106119 - DNA, 20 bp, Artificial Sequence
  MKO10106119_B_Olfr963
  gRNA
tgaaggtagataacaatgac

SEQ ID NO: 106120 - DNA, 20 bp, Artificial Sequence
  MKO10106120_B_Olfr965
  gRNA
catggtgacattatacctca

SEQ ID NO: 106121 - DNA, 20 bp, Artificial Sequence
  MKO10106121_B_Olfr965
  gRNA
ataggtggggtgtattgcat

SEQ ID NO: 106122 - DNA, 20 bp, Artificial Sequence
  MKO10106122_B_Olfr965
  gRNA
tgtcttaccaagtctgttta

SEQ ID NO: 106123 - DNA, 20 bp, Artificial Sequence
  MKO10106123_B_Olfr967
  gRNA
gatatttggggtgtatagca

SEQ ID NO: 106124 - DNA, 20 bp, Artificial Sequence
  MKO10106124_B_Olfr967
  gRNA
gagcaagaaagctccaataa

SEQ ID NO: 106125 - DNA, 20 bp, Artificial Sequence
  MKO10106125_B_Olfr967
  gRNA
actacctcattgataaaagt

SEQ ID NO: 106126 - DNA, 20 bp, Artificial Sequence
  MKO10106126_B_Olfr968
  gRNA
gccatcatcaatcaactcca

SEQ ID NO: 106127 - DNA, 20 bp, Artificial Sequence
  MKO10106127_B_Olfr968
  gRNA
tcagcagttgctatattctt

SEQ ID NO: 106128 - DNA, 20 bp, Artificial Sequence
  MKO10106128_B_Olfr968
  gRNA
ctgtgatctttccccactcc

SEQ ID NO: 106129 - DNA, 20 bp, Artificial Sequence
  MKO10106129_B_Olfr969
  gRNA
tgtcctatcgagtctgttct

SEQ ID NO: 106130 - DNA, 20 bp, Artificial Sequence
  MKO10106130_B_Olfr969
  gRNA
gaacaagagagttccagtag

SEQ ID NO: 106131 - DNA, 20 bp, Artificial Sequence
  MKO10106131_B_Olfr969
  gRNA
tatgtacttgcagccatctt

SEQ ID NO: 106132 - DNA, 20 bp, Artificial Sequence
  MKO10106132_B_Olfr96
  gRNA
gtaaaagtgatcaactaagt

SEQ ID NO: 106133 - DNA, 20 bp, Artificial Sequence
  MKO10106133_B_Olfr96
  gRNA
gattgtctatacctccacag

SEQ ID NO: 106134 - DNA, 20 bp, Artificial Sequence
  MKO10106134_B_Olfr96
  gRNA
ggcttgctcagatacccaag

SEQ ID NO: 106135 - DNA, 20 bp, Artificial Sequence
  MKO10106135_B_Olfr970
  gRNA
ggctatgatgaagatgtaag

SEQ ID NO: 106136 - DNA, 20 bp, Artificial Sequence
  MKO10106136_B_Olfr970
  gRNA
gttaagagtgaatttctgta

SEQ ID NO: 106137 - DNA, 20 bp, Artificial Sequence
  MKO10106137_B_Olfr970
  gRNA
catgcagactgtgtgagttg

SEQ ID NO: 106138 - DNA, 20 bp, Artificial Sequence
  MKO10106138_B_Olfr971
  gRNA
cacagtgggagtttacactt

SEQ ID NO: 106139 - DNA, 20 bp, Artificial Sequence
  MKO10106139_B_Olfr971
  gRNA
ctgtaaccctttgctttaca

SEQ ID NO: 106140 - DNA, 20 bp, Artificial Sequence
  MKO10106140_B_Olfr971
  gRNA
ttcattgaacttactgaaga

SEQ ID NO: 106141 - DNA, 20 bp, Artificial Sequence
  MKO10106141_B_Olfr972
  gRNA
gatatttggtgtattcagta

SEQ ID NO: 106142 - DNA, 20 bp, Artificial Sequence
  MKO10106142_B_Olfr972
  gRNA
tgtcatttcaagtctgttcc

SEQ ID NO: 106143 - DNA, 20 bp, Artificial Sequence
  MKO10106143_B_Olfr972
  gRNA
caaaaaagcatagctgtgtc

SEQ ID NO: 106144 - DNA, 20 bp, Artificial Sequence
  MKO10106144_B_Olfr974
  gRNA
ttgctctagagactatacca

SEQ ID NO: 106145 - DNA, 20 bp, Artificial Sequence
  MKO10106145_B_Olfr974
  gRNA
cctgtttctgttgatctatt

SEQ ID NO: 106146 - DNA, 20 bp, Artificial Sequence
  MKO10106146_B_Olfr974
  gRNA
taacccctcaaggacaaata

SEQ ID NO: 106147 - DNA, 20 bp, Artificial Sequence
  MKO10106147_B_Olfr975
  gRNA
tgacatttatcttactcccc

SEQ ID NO: 106148 - DNA, 20 bp, Artificial Sequence
  MKO10106148_B_Olfr975
  gRNA
aaaagatatcgagcactgac

SEQ ID NO: 106149 - DNA, 20 bp, Artificial Sequence
  MKO10106149_B_Olfr975
  gRNA
gtgggaatcccatatacagc

SEQ ID NO: 106150 - DNA, 20 bp, Artificial Sequence
  MKO10106150_B_Olfr976
  gRNA
ctgaaaatccgttcctcaga

SEQ ID NO: 106151 - DNA, 20 bp, Artificial Sequence
  MKO10106151_B_Olfr976
  gRNA
ttctattccttataccccaa

SEQ ID NO: 106152 - DNA, 20 bp, Artificial Sequence
  MKO10106152_B_Olfr976
  gRNA
cttgacttaacatctttctc

SEQ ID NO: 106153 - DNA, 20 bp, Artificial Sequence
  MKO10106153_B_Olfr978
  gRNA
ctcaggtagatgaagagacc

SEQ ID NO: 106154 - DNA, 20 bp, Artificial Sequence
  MKO10106154_B_Olfr978
  gRNA
actcaggtacagcagcatga

SEQ ID NO: 106155 - DNA, 20 bp, Artificial Sequence
  MKO10106155_B_Olfr978
  gRNA
ctggtctcttcatctacctg

SEQ ID NO: 106156 - DNA, 20 bp, Artificial Sequence
  MKO10106156_B_Olfr979
  gRNA
gatttacattctcactgtgc

SEQ ID NO: 106157 - DNA, 20 bp, Artificial Sequence
  MKO10106157_B_Olfr979
  gRNA
ccctgattaccatcagaatc

SEQ ID NO: 106158 - DNA, 20 bp, Artificial Sequence
  MKO10106158_B_Olfr979
  gRNA
tcctgattctgatggtaatc

SEQ ID NO: 106159 - DNA, 20 bp, Artificial Sequence
  MKO10106159_B_Olfr97
  gRNA
gtgggaactgcatgtagcca

SEQ ID NO: 106160 - DNA, 20 bp, Artificial Sequence
  MKO10106160_B_Olfr97
  gRNA
ttgccatttctctgagttac

SEQ ID NO: 106161 - DNA, 20 bp, Artificial Sequence
  MKO10106161_B_Olfr97
  gRNA
actgagagagcaacaaaata

SEQ ID NO: 106162 - DNA, 20 bp, Artificial Sequence
  MKO10106162_B_Olfr980
  gRNA
gaaataatgctgaatctcat

SEQ ID NO: 106163 - DNA, 20 bp, Artificial Sequence
  MKO10106163_B_Olfr980
  gRNA
aatgaaaaatcagtgtagtc

SEQ ID NO: 106164 - DNA, 20 bp, Artificial Sequence
  MKO10106164_B_Olfr980
  gRNA
ttctcatcctgatggtgatc

SEQ ID NO: 106165 - DNA, 20 bp, Artificial Sequence
  MKO10106165_B_Olfr981
  gRNA
aagagtggtaccccgagctg

SEQ ID NO: 106166 - DNA, 20 bp, Artificial Sequence
  MKO10106166_B_Olfr981
  gRNA
gccaggccgtaggtaaatga

SEQ ID NO: 106167 - DNA, 20 bp, Artificial Sequence
  MKO10106167_B_Olfr981
  gRNA
gcctgaatatgaaactcgtt

SEQ ID NO: 106168 - DNA, 20 bp, Artificial Sequence
  MKO10106168_B_Olfr982
  gRNA
acccgcttgttcataaccac

SEQ ID NO: 106169 - DNA, 20 bp, Artificial Sequence
  MKO10106169_B_Olfr982
  gRNA
ccgtgtacatcagaccctcc

SEQ ID NO: 106170 - DNA, 20 bp, Artificial Sequence
  MKO10106170_B_Olfr982
  gRNA
ttgcacagcacatctcaccg

SEQ ID NO: 106171 - DNA, 20 bp, Artificial Sequence
  MKO10106171_B_Olfr983
  gRNA
gcagctgtgtcaagcccaac

SEQ ID NO: 106172 - DNA, 20 bp, Artificial Sequence
  MKO10106172_B_Olfr983
  gRNA
tggacctaccctttgcagaa

SEQ ID NO: 106173 - DNA, 20 bp, Artificial Sequence
  MKO10106173_B_Olfr983
  gRNA
gaaaaactgttcacttaagt

SEQ ID NO: 106174 - DNA, 20 bp, Artificial Sequence
  MKO10106174_B_Olfr984
  gRNA
tcataattagtgtgtagcgt

SEQ ID NO: 106175 - DNA, 20 bp, Artificial Sequence
  MKO10106175_B_Olfr984
  gRNA
tacatagttgtgtgcaaacg

SEQ ID NO: 106176 - DNA, 20 bp, Artificial Sequence
  MKO10106176_B_Olfr984
  gRNA
tgttccacagctgatcaaat

SEQ ID NO: 106177 - DNA, 20 bp, Artificial Sequence
  MKO10106177_B_Olfr985
  gRNA
tatctcgtattctgattgta

SEQ ID NO: 106178 - DNA, 20 bp, Artificial Sequence
  MKO10106178_B_Olfr985
  gRNA
cctccgcatccactctaaag

SEQ ID NO: 106179 - DNA, 20 bp, Artificial Sequence
  MKO10106179_B_Olfr985
  gRNA
gatttacatagtcacaatgg

SEQ ID NO: 106180 - DNA, 20 bp, Artificial Sequence
  MKO10106180_B_Olfr986
  gRNA
tcataatggttgggtaacgg

SEQ ID NO: 106181 - DNA, 20 bp, Artificial Sequence
  MKO10106181_B_Olfr986
  gRNA
cagtggctgaagggatccgt

SEQ ID NO: 106182 - DNA, 20 bp, Artificial Sequence
  MKO10106182_B_Olfr986
  gRNA
aggccattacttgtgcaaac

SEQ ID NO: 106183 - DNA, 20 bp, Artificial Sequence
  MKO10106183_B_Olfr987
  gRNA
atgactatgggatagcgcaa

SEQ ID NO: 106184 - DNA, 20 bp, Artificial Sequence
  MKO10106184_B_Olfr987
  gRNA
gatggttgcaaaagtaccat

SEQ ID NO: 106185 - DNA, 20 bp, Artificial Sequence
  MKO10106185_B_Olfr987
  gRNA
aaagcttccatatctttcat

SEQ ID NO: 106186 - DNA, 20 bp, Artificial Sequence
  MKO10106186_B_Olfr988
  gRNA
ggcagacaagacatatgtgt

SEQ ID NO: 106187 - DNA, 20 bp, Artificial Sequence
  MKO10106187_B_Olfr988
  gRNA
gtgccaagatttgtgctgtc

SEQ ID NO: 106188 - DNA, 20 bp, Artificial Sequence
  MKO10106188_B_Olfr988
  gRNA
ctgtaacatacatcccatga

SEQ ID NO: 106189 - DNA, 20 bp, Artificial Sequence
  MKO10106189_B_Olfr98
  gRNA
acccacgatgaactgcagtc

SEQ ID NO: 106190 - DNA, 20 bp, Artificial Sequence
  MKO10106190_B_Olfr98
  gRNA
agcagctaccacctcctgag

SEQ ID NO: 106191 - DNA, 20 bp, Artificial Sequence
  MKO10106191_B_Olfr98
  gRNA
agagaggtgggaactacatg

SEQ ID NO: 106192 - DNA, 20 bp, Artificial Sequence
  MKO10106192_B_Olfr992
  gRNA
catttacatagccactttag

SEQ ID NO: 106193 - DNA, 20 bp, Artificial Sequence
  MKO10106193_B_Olfr992
  gRNA
cagtattgacctcaatatca

SEQ ID NO: 106194 - DNA, 20 bp, Artificial Sequence
  MKO10106194_B_Olfr992
  gRNA
atgataataggatagcgcag

SEQ ID NO: 106195 - DNA, 20 bp, Artificial Sequence
  MKO10106195_B_Olfr993
  gRNA
gaagacagatacatatcatt

SEQ ID NO: 106196 - DNA, 20 bp, Artificial Sequence
  MKO10106196_B_Olfr993
  gRNA
ccgaaaagtctgcatccaga

SEQ ID NO: 106197 - DNA, 20 bp, Artificial Sequence
  MKO10106197_B_Olfr993
  gRNA
gataacaagaatcttgatat

SEQ ID NO: 106198 - DNA, 20 bp, Artificial Sequence
  MKO10106198_B_Olfr994
  gRNA
gcctccttcagacaattccg

SEQ ID NO: 106199 - DNA, 20 bp, Artificial Sequence
  MKO10106199_B_Olfr994
  gRNA
tagcatgaaagagtgacaat

SEQ ID NO: 106200 - DNA, 20 bp, Artificial Sequence
  MKO10106200_B_Olfr994
  gRNA
cttatcatacatatacatca

SEQ ID NO: 106201 - DNA, 20 bp, Artificial Sequence
  MKO10106201_B_Olfr995
  gRNA
aacttgtcgagacatgatta

SEQ ID NO: 106202 - DNA, 20 bp, Artificial Sequence
  MKO10106202_B_Olfr995
  gRNA
gtctggagttagtgttaatg

SEQ ID NO: 106203 - DNA, 20 bp, Artificial Sequence
  MKO10106203_B_Olfr995
  gRNA
ccacaagaaatacaacgaag

SEQ ID NO: 106204 - DNA, 20 bp, Artificial Sequence
  MKO10106204_B_Olfr996
  gRNA
tgacacccacataaataagt

SEQ ID NO: 106205 - DNA, 20 bp, Artificial Sequence
  MKO10106205_B_Olfr996
  gRNA
tgttgtacttataagagcaa

SEQ ID NO: 106206 - DNA, 20 bp, Artificial Sequence
  MKO10106206_B_Olfr996
  gRNA
tggggatgatcgctctcata

SEQ ID NO: 106207 - DNA, 20 bp, Artificial Sequence
  MKO10106207_B_Olfr998
  gRNA
atactctccttatgtctcag

SEQ ID NO: 106208 - DNA, 20 bp, Artificial Sequence
  MKO10106208_B_Olfr998
  gRNA
attcgacctcacctgcctgc

SEQ ID NO: 106209 - DNA, 20 bp, Artificial Sequence
  MKO10106209_B_Olfr998
  gRNA
gaacggtaagcaaaaagcca

SEQ ID NO: 106210 - DNA, 20 bp, Artificial Sequence
  MKO10106210_B_Olfr99
  gRNA
actagaaccccacatctaaa

SEQ ID NO: 106211 - DNA, 20 bp, Artificial Sequence
  MKO10106211_B_Olfr99
  gRNA
attgaggagaatcctaaaca

SEQ ID NO: 106212 - DNA, 20 bp, Artificial Sequence
  MKO10106212_B_Olfr99
  gRNA
gacccagcaagtagataaca

SEQ ID NO: 106213 - DNA, 20 bp, Artificial Sequence
  MKO10106213_B_Olfr9
  gRNA
cgtccccttcttattgattg

SEQ ID NO: 106214 - DNA, 20 bp, Artificial Sequence
  MKO10106214_B_Olfr9
  gRNA
tgtagaccaaagtaagaatc

SEQ ID NO: 106215 - DNA, 20 bp, Artificial Sequence
  MKO10106215_B_Olfr9
  gRNA
tctcttcatgagccgcctca

SEQ ID NO: 106216 - DNA, 20 bp, Artificial Sequence
  MKO10106216_B_Olig1
  gRNA
cgggaacttgcacaccgcac

SEQ ID NO: 106217 - DNA, 20 bp, Artificial Sequence
  MKO10106217_B_Olig1
  gRNA
gagccgcgttcacacgcgcc

SEQ ID NO: 106218 - DNA, 20 bp, Artificial Sequence
  MKO10106218_B_Olig1
  gRNA
gcgctcgacgagccaccgtg

SEQ ID NO: 106219 - DNA, 20 bp, Artificial Sequence
  MKO10106219_B_Olig2
  gRNA
ccgatgggtggaagccggcg

SEQ ID NO: 106220 - DNA, 20 bp, Artificial Sequence
  MKO10106220_B_Olig2
  gRNA
cgtaaggcatgacctcccgc

SEQ ID NO: 106221 - DNA, 20 bp, Artificial Sequence
  MKO10106221_B_Olig2
  gRNA
tgtcctcggtcggatccatc

SEQ ID NO: 106222 - DNA, 20 bp, Artificial Sequence
  MKO10106222_B_Olig3
  gRNA
ccggctttcggctgaatcca

SEQ ID NO: 106223 - DNA, 20 bp, Artificial Sequence
  MKO10106223_B_Olig3
  gRNA
caccgagggcccgtgagcgt

SEQ ID NO: 106224 - DNA, 20 bp, Artificial Sequence
  MKO10106224_B_Olig3
  gRNA
agccgaaagccgggccatgt

SEQ ID NO: 106225 - DNA, 20 bp, Artificial Sequence
  MKO10106225_B_Olr1
  gRNA
ctcgtccagcttccgggtga

SEQ ID NO: 106226 - DNA, 20 bp, Artificial Sequence
  MKO10106226_B_Olr1
  gRNA
attgtgtccactgtacaata

SEQ ID NO: 106227 - DNA, 20 bp, Artificial Sequence
  MKO10106227_B_Olr1
  gRNA
tctcgttcagcttcaaggtg

SEQ ID NO: 106228 - DNA, 20 bp, Artificial Sequence
  MKO10106228_B_Oma1
  gRNA
catttgtccccgagacagct

SEQ ID NO: 106229 - DNA, 20 bp, Artificial Sequence
  MKO10106229_B_Oma1
  gRNA
taacagtagtttactccttc

SEQ ID NO: 106230 - DNA, 20 bp, Artificial Sequence
  MKO10106230_B_Oma1
  gRNA
cggtactcacggcgtgcccc

SEQ ID NO: 106231 - DNA, 20 bp, Artificial Sequence
  MKO10106231_B_Omd
  gRNA
ggaagacgaccatgacagtc

SEQ ID NO: 106232 - DNA, 20 bp, Artificial Sequence
  MKO10106232_B_Omd
  gRNA
cacattcaccagcccgtcca

SEQ ID NO: 106233 - DNA, 20 bp, Artificial Sequence
  MKO10106233_B_Omd
  gRNA
aatcttatagaactcaacgt

SEQ ID NO: 106234 - DNA, 20 bp, Artificial Sequence
  MKO10106234_B_Omg
  gRNA
tccacgatatgcagtttgga

SEQ ID NO: 106235 - DNA, 20 bp, Artificial Sequence
  MKO10106235_B_Omg
  gRNA
gccttccaaactgcatatcg

SEQ ID NO: 106236 - DNA, 20 bp, Artificial Sequence
  MKO10106236_B_Omg
  gRNA
gattggtatatggggttaac

SEQ ID NO: 106237 - DNA, 20 bp, Artificial Sequence
  MKO10106237_B_Omp
  gRNA
cgccgccatcttctggcgca

SEQ ID NO: 106238 - DNA, 20 bp, Artificial Sequence
  MKO10106238_B_Omp
  gRNA
tgatctggccaagatccgca

SEQ ID NO: 106239 - DNA, 20 bp, Artificial Sequence
  MKO10106239_B_Omp
  gRNA
ctactcggagccgcatctgc

SEQ ID NO: 106240 - DNA, 20 bp, Artificial Sequence
  MKO10106240_B_Omt2a
  gRNA
gacacagtcgtgtacattat

SEQ ID NO: 106241 - DNA, 20 bp, Artificial Sequence
  MKO10106241_B_Omt2a
  gRNA
ctcacatgttggagggttgc

SEQ ID NO: 106242 - DNA, 20 bp, Artificial Sequence
  MKO10106242_B_Omt2a
  gRNA
tttctctttagccagagcct

SEQ ID NO: 106243 - DNA, 20 bp, Artificial Sequence
  MKO10106243_B_Omt2b
  gRNA
tcccttcccagatttgaggc

SEQ ID NO: 106244 - DNA, 20 bp, Artificial Sequence
  MKO10106244_B_Omt2b
  gRNA
cctcttaaatgaagtacctc

SEQ ID NO: 106245 - DNA, 20 bp, Artificial Sequence
  MKO10106245_B_Omt2b
  gRNA
tttctctttagccagagcct

SEQ ID NO: 106246 - DNA, 20 bp, Artificial Sequence
  MKO10106246_B_Onecut1
  gRNA
tttggtacaagtgctcgatg

SEQ ID NO: 106247 - DNA, 20 bp, Artificial Sequence
  MKO10106247_B_Onecut1
  gRNA
tcccgcgcacccgcgttcca

SEQ ID NO: 106248 - DNA, 20 bp, Artificial Sequence
  MKO10106248_B_Onecut1
  gRNA
ctccccgtggcgaccgagca

SEQ ID NO: 106249 - DNA, 20 bp, Artificial Sequence
  MKO10106249_B_Onecut2
  gRNA
atttctccaggctgcgacgc

SEQ ID NO: 106250 - DNA, 20 bp, Artificial Sequence
  MKO10106250_B_Onecut2
  gRNA
gtcgctgccgtccaagatcg

SEQ ID NO: 106251 - DNA, 20 bp, Artificial Sequence
  MKO10106251_B_Onecut2
  gRNA
cgcggcgtcgcgctcggcca

SEQ ID NO: 106252 - DNA, 20 bp, Artificial Sequence
  MKO10106252_B_Onecut3
  gRNA
atcctgctctttacgcttgc

SEQ ID NO: 106253 - DNA, 20 bp, Artificial Sequence
  MKO10106253_B_Onecut3
  gRNA
ccgcccgctcgtcgcgcatg

SEQ ID NO: 106254 - DNA, 20 bp, Artificial Sequence
  MKO10106254_B_Onecut3
  gRNA
cgccccagaagcgccgcgtg

SEQ ID NO: 106255 - DNA, 20 bp, Artificial Sequence
  MKO10106255_B_Ooep
  gRNA
ggctggctttccgcttccgc

SEQ ID NO: 106256 - DNA, 20 bp, Artificial Sequence
  MKO10106256_B_Ooep
  gRNA
tgtccctgagacttcgcact

SEQ ID NO: 106257 - DNA, 20 bp, Artificial Sequence
  MKO10106257_B_Ooep
  gRNA
ctaagcaagttaagtaagaa

SEQ ID NO: 106258 - DNA, 20 bp, Artificial Sequence
  MKO10106258_B_Oog1
  gRNA
ctgtctccattgtccagatc

SEQ ID NO: 106259 - DNA, 20 bp, Artificial Sequence
  MKO10106259_B_Oog1
  gRNA
gcatagccttcaaagtctcc

SEQ ID NO: 106260 - DNA, 20 bp, Artificial Sequence
  MKO10106260_B_Oog1
  gRNA
ttctttagaagaagtcacag

SEQ ID NO: 106261 - DNA, 20 bp, Artificial Sequence
  MKO10106261_B_Oog2
  gRNA
attgctcatctgtttcagat

SEQ ID NO: 106262 - DNA, 20 bp, Artificial Sequence
  MKO10106262_B_Oog2
  gRNA
ggtatagctcatcagctagc

SEQ ID NO: 106263 - DNA, 20 bp, Artificial Sequence
  MKO10106263_B_Oog2
  gRNA
ttgtctttgcctagaatatt

SEQ ID NO: 106264 - DNA, 20 bp, Artificial Sequence
  MKO10106264_B_Oog3
  gRNA
tgtctactccccatccaccc

SEQ ID NO: 106265 - DNA, 20 bp, Artificial Sequence
  MKO10106265_B_Oog3
  gRNA
tatctaccacatttagaaca

SEQ ID NO: 106266 - DNA, 20 bp, Artificial Sequence
  MKO10106266_B_Oog3
  gRNA
gcaaactcagagtactcaaa

SEQ ID NO: 106267 - DNA, 20 bp, Artificial Sequence
  MKO10106267_B_Oog4
  gRNA
ttgcacaaaatgatcgctcc

SEQ ID NO: 106268 - DNA, 20 bp, Artificial Sequence
  MKO10106268_B_Oog4
  gRNA
ggtatacctcataggtcagc

SEQ ID NO: 106269 - DNA, 20 bp, Artificial Sequence
  MKO10106269_B_Oog4
  gRNA
tgaaggccatgatacctgta

SEQ ID NO: 106270 - DNA, 20 bp, Artificial Sequence
  MKO10106270_B_Oosp1
  gRNA
gatttcactggtgatcctcc

SEQ ID NO: 106271 - DNA, 20 bp, Artificial Sequence
  MKO10106271_B_Oosp1
  gRNA
ctcagacctgctcgtttcag

SEQ ID NO: 106272 - DNA, 20 bp, Artificial Sequence
  MKO10106272_B_Oosp1
  gRNA
gtctgcaatgtgccgaccac

SEQ ID NO: 106273 - DNA, 20 bp, Artificial Sequence
  MKO10106273_B_Oosp2
  gRNA
agttccaaacaataattcct

SEQ ID NO: 106274 - DNA, 20 bp, Artificial Sequence
  MKO10106274_B_Oosp2
  gRNA
gtgcgtgtatttgagttaca

SEQ ID NO: 106275 - DNA, 20 bp, Artificial Sequence
  MKO10106275_B_Oosp2
  gRNA
tatgccactatctactgagg

SEQ ID NO: 106276 - DNA, 20 bp, Artificial Sequence
  MKO10106276_B_Oosp3
  gRNA
cctggctcacctatatgccc

SEQ ID NO: 106277 - DNA, 20 bp, Artificial Sequence
  MKO10106277_B_Oosp3
  gRNA
ccctgatgaattattattag

SEQ ID NO: 106278 - DNA, 20 bp, Artificial Sequence
  MKO10106278_B_Oosp3
  gRNA
ggaattcttacccagttatt

SEQ ID NO: 106279 - DNA, 20 bp, Artificial Sequence
  MKO10106279_B_Opa1
  gRNA
aaaacttcgatatatcatac

SEQ ID NO: 106280 - DNA, 20 bp, Artificial Sequence
  MKO10106280_B_Opa1
  gRNA
catatctttccattcatcga

SEQ ID NO: 106281 - DNA, 20 bp, Artificial Sequence
  MKO10106281_B_Opa1
  gRNA
caatccacttatagtcacta

SEQ ID NO: 106282 - DNA, 20 bp, Artificial Sequence
  MKO10106282_B_Opa3
  gRNA
gcggacgaagatgcgcataa

SEQ ID NO: 106283 - DNA, 20 bp, Artificial Sequence
  MKO10106283_B_Opa3
  gRNA
tcgtccgcatctccacccag

SEQ ID NO: 106284 - DNA, 20 bp, Artificial Sequence
  MKO10106284_B_Opa3
  gRNA
gcctccgcccacaatgaaga

SEQ ID NO: 106285 - DNA, 20 bp, Artificial Sequence
  MKO10106285_B_Opalin
  gRNA
cgtgcttacctcagatattt

SEQ ID NO: 106286 - DNA, 20 bp, Artificial Sequence
  MKO10106286_B_Opalin
  gRNA
ctttacactgccatcgaata

SEQ ID NO: 106287 - DNA, 20 bp, Artificial Sequence
  MKO10106287_B_Opalin
  gRNA
gctttggcactcgtgacaac

SEQ ID NO: 106288 - DNA, 20 bp, Artificial Sequence
  MKO10106288_B_Opcml
  gRNA
ttgaccaaaatgatcactcg

SEQ ID NO: 106289 - DNA, 20 bp, Artificial Sequence
  MKO10106289_B_Opcml
  gRNA
ctgacgagatgttcattatc

SEQ ID NO: 106290 - DNA, 20 bp, Artificial Sequence
  MKO10106290_B_Opcml
  gRNA
gggtggcgctctccccctgc

SEQ ID NO: 106291 - DNA, 20 bp, Artificial Sequence
  MKO10106291_B_Ophn1
  gRNA
tgacttgctgatcaaacccc

SEQ ID NO: 106292 - DNA, 20 bp, Artificial Sequence
  MKO10106292_B_Ophn1
  gRNA
gaaagaatctcagctactag

SEQ ID NO: 106293 - DNA, 20 bp, Artificial Sequence
  MKO10106293_B_Ophn1
  gRNA
acctatattaatctcatcat

SEQ ID NO: 106294 - DNA, 20 bp, Artificial Sequence
  MKO10106294_B_Oplah
  gRNA
cgcacctttgacgggagagc

SEQ ID NO: 106295 - DNA, 20 bp, Artificial Sequence
  MKO10106295_B_Oplah
  gRNA
ggaagccctgcacatagcgc

SEQ ID NO: 106296 - DNA, 20 bp, Artificial Sequence
  MKO10106296_B_Oplah
  gRNA
gactcggggcattcacagcc

SEQ ID NO: 106297 - DNA, 20 bp, Artificial Sequence
  MKO10106297_B_Opn1mw
  gRNA
aacgaccacaagaatcatcc

SEQ ID NO: 106298 - DNA, 20 bp, Artificial Sequence
  MKO10106298_B_Opn1mw
  gRNA
gtgataattggggccttcaa

SEQ ID NO: 106299 - DNA, 20 bp, Artificial Sequence
  MKO10106299_B_Opn1mw
  gRNA
tacctgctccaaccaaagat

SEQ ID NO: 106300 - DNA, 20 bp, Artificial Sequence
  MKO10106300_B_Opn1sw
  gRNA
ccgattgttgaccatgtaca

SEQ ID NO: 106301 - DNA, 20 bp, Artificial Sequence
  MKO10106301_B_Opn1sw
  gRNA
caagccgtaagtccagcccg

SEQ ID NO: 106302 - DNA, 20 bp, Artificial Sequence
  MKO10106302_B_Opn1sw
  gRNA
caacgtagcgttcaaaagcc

SEQ ID NO: 106303 - DNA, 20 bp, Artificial Sequence
  MKO10106303_B_Opn3
  gRNA
cacacggatataacgttcat

SEQ ID NO: 106304 - DNA, 20 bp, Artificial Sequence
  MKO10106304_B_Opn3
  gRNA
ttacattgtgacccgcttct

SEQ ID NO: 106305 - DNA, 20 bp, Artificial Sequence
  MKO10106305_B_Opn3
  gRNA
attcttatagaggacgcact

SEQ ID NO: 106306 - DNA, 20 bp, Artificial Sequence
  MKO10106306_B_Opn4
  gRNA
gaccatgctcactataccct

SEQ ID NO: 106307 - DNA, 20 bp, Artificial Sequence
  MKO10106307_B_Opn4
  gRNA
ccagcagcctctacaagaag

SEQ ID NO: 106308 - DNA, 20 bp, Artificial Sequence
  MKO10106308_B_Opn4
  gRNA
gttaagcttgacaagactct

SEQ ID NO: 106309 - DNA, 20 bp, Artificial Sequence
  MKO10106309_B_Opn5
  gRNA
ttgatagtcattatttccgc

SEQ ID NO: 106310 - DNA, 20 bp, Artificial Sequence
  MKO10106310_B_Opn5
  gRNA
ttacagatttgcctgttgcc

SEQ ID NO: 106311 - DNA, 20 bp, Artificial Sequence
  MKO10106311_B_Opn5
  gRNA
gtacaatccaatcatctacc

SEQ ID NO: 106312 - DNA, 20 bp, Artificial Sequence
  MKO10106312_B_Oprd1
  gRNA
cgccaatgcgtcggggtcgc

SEQ ID NO: 106313 - DNA, 20 bp, Artificial Sequence
  MKO10106313_B_Oprd1
  gRNA
ttgcacagcagctcgccaaa

SEQ ID NO: 106314 - DNA, 20 bp, Artificial Sequence
  MKO10106314_B_Oprd1
  gRNA
ccagagcgccaagtacttga

SEQ ID NO: 106315 - DNA, 20 bp, Artificial Sequence
  MKO10106315_B_Oprk1
  gRNA
tgggcagaatccgacagtaa

SEQ ID NO: 106316 - DNA, 20 bp, Artificial Sequence
  MKO10106316_B_Oprk1
  gRNA
gatggccggagagatgtgcg

SEQ ID NO: 106317 - DNA, 20 bp, Artificial Sequence
  MKO10106317_B_Oprk1
  gRNA
atataccaacagatgatgcc

SEQ ID NO: 106318 - DNA, 20 bp, Artificial Sequence
  MKO10106318_B_Oprl1
  gRNA
taaagcccaggccgttaatg

SEQ ID NO: 106319 - DNA, 20 bp, Artificial Sequence
  MKO10106319_B_Oprl1
  gRNA
agccaagtagagccccacga

SEQ ID NO: 106320 - DNA, 20 bp, Artificial Sequence
  MKO10106320_B_Oprl1
  gRNA
gatggggtacggtctcattt

SEQ ID NO: 106321 - DNA, 20 bp, Artificial Sequence
  MKO10106321_B_Oprm1
  gRNA
tggtctgcccgtaatgttca

SEQ ID NO: 106322 - DNA, 20 bp, Artificial Sequence
  MKO10106322_B_Oprm1
  gRNA
tttaaggttacctgccaagc

SEQ ID NO: 106323 - DNA, 20 bp, Artificial Sequence
  MKO10106323_B_Oprm1
  gRNA
cctgtccatgcaactcttgc

SEQ ID NO: 106324 - DNA, 20 bp, Artificial Sequence
  MKO10106324_B_Optc
  gRNA
attgtcaccaaacctcacga

SEQ ID NO: 106325 - DNA, 20 bp, Artificial Sequence
  MKO10106325_B_Optc
  gRNA
cacttacgcgtccctgtatg

SEQ ID NO: 106326 - DNA, 20 bp, Artificial Sequence
  MKO10106326_B_Optc
  gRNA
gaaccataccctgagcatag

SEQ ID NO: 106327 - DNA, 20 bp, Artificial Sequence
  MKO10106327_B_Optn
  gRNA
ttcaaactccgcacaactcc

SEQ ID NO: 106328 - DNA, 20 bp, Artificial Sequence
  MKO10106328_B_Optn
  gRNA
ccatcacctacaagctgatg

SEQ ID NO: 106329 - DNA, 20 bp, Artificial Sequence
  MKO10106329_B_Optn
  gRNA
ctaaataatcaagctatgaa

SEQ ID NO: 106330 - DNA, 20 bp, Artificial Sequence
  MKO10106330_B_Orai1
  gRNA
gtgactctttgaccgagttg

SEQ ID NO: 106331 - DNA, 20 bp, Artificial Sequence
  MKO10106331_B_Orai1
  gRNA
gcttaagtagagcttgcgcc

SEQ ID NO: 106332 - DNA, 20 bp, Artificial Sequence
  MKO10106332_B_Orai1
  gRNA
tcatcacctcggagtaactc

SEQ ID NO: 106333 - DNA, 20 bp, Artificial Sequence
  MKO10106333_B_Orai2
  gRNA
tgcagagctcaatgtgccca

SEQ ID NO: 106334 - DNA, 20 bp, Artificial Sequence
  MKO10106334_B_Orai2
  gRNA
gcccctgcctgccctgaacc

SEQ ID NO: 106335 - DNA, 20 bp, Artificial Sequence
  MKO10106335_B_Orai2
  gRNA
ccggctggaggctttcagct

SEQ ID NO: 106336 - DNA, 20 bp, Artificial Sequence
  MKO10106336_B_Orai3
  gRNA
cgaacaggccccgctgaacc

SEQ ID NO: 106337 - DNA, 20 bp, Artificial Sequence
  MKO10106337_B_Orai3
  gRNA
gttcgtgcaccgcggctacc

SEQ ID NO: 106338 - DNA, 20 bp, Artificial Sequence
  MKO10106338_B_Orai3
  gRNA
ccggtacgtggctgagcccg

SEQ ID NO: 106339 - DNA, 20 bp, Artificial Sequence
  MKO10106339_B_Oraov1
  gRNA
caacgtgcagccagacttca

SEQ ID NO: 106340 - DNA, 20 bp, Artificial Sequence
  MKO10106340_B_Oraov1
  gRNA
ggctctgattgcgctgctgc

SEQ ID NO: 106341 - DNA, 20 bp, Artificial Sequence
  MKO10106341_B_Oraov1
  gRNA
tttcaccagcgccactgtgt

SEQ ID NO: 106342 - DNA, 20 bp, Artificial Sequence
  MKO10106342_B_Orc1
  gRNA
ccccaatgcaaagaagtcgc

SEQ ID NO: 106343 - DNA, 20 bp, Artificial Sequence
  MKO10106343_B_Orc1
  gRNA
ctgtactcgtgcacatttct

SEQ ID NO: 106344 - DNA, 20 bp, Artificial Sequence
  MKO10106344_B_Orc1
  gRNA
cttaatgctgcaagcacttc

SEQ ID NO: 106345 - DNA, 20 bp, Artificial Sequence
  MKO10106345_B_Orc2
  gRNA
tacttcagagaaagctccac

SEQ ID NO: 106346 - DNA, 20 bp, Artificial Sequence
  MKO10106346_B_Orc2
  gRNA
ccctgaagagatgactaaat

SEQ ID NO: 106347 - DNA, 20 bp, Artificial Sequence
  MKO10106347_B_Orc2
  gRNA
ttagaactagcaaaaacatc

SEQ ID NO: 106348 - DNA, 20 bp, Artificial Sequence
  MKO10106348_B_Orc3
  gRNA
ttgaaacatatagcttgcta

SEQ ID NO: 106349 - DNA, 20 bp, Artificial Sequence
  MKO10106349_B_Orc3
  gRNA
ttctttgcagcaattacagg

SEQ ID NO: 106350 - DNA, 20 bp, Artificial Sequence
  MKO10106350_B_Orc3
  gRNA
acttctgcagaaagtcaact

SEQ ID NO: 106351 - DNA, 20 bp, Artificial Sequence
  MKO10106351_B_Orc4
  gRNA
ctctgcatgtgcattactct

SEQ ID NO: 106352 - DNA, 20 bp, Artificial Sequence
  MKO10106352_B_Orc4
  gRNA
gtggtctttcctgatcctcg

SEQ ID NO: 106353 - DNA, 20 bp, Artificial Sequence
  MKO10106353_B_Orc4
  gRNA
attgtacttgcactccaaag

SEQ ID NO: 106354 - DNA, 20 bp, Artificial Sequence
  MKO10106354_B_Orc5
  gRNA
ggctcaaagcatccagtatt

SEQ ID NO: 106355 - DNA, 20 bp, Artificial Sequence
  MKO10106355_B_Orc5
  gRNA
caacaatgtttgtgttacat

SEQ ID NO: 106356 - DNA, 20 bp, Artificial Sequence
  MKO10106356_B_Orc5
  gRNA
tcaccaattcttgcagccta

SEQ ID NO: 106357 - DNA, 20 bp, Artificial Sequence
  MKO10106357_B_Orc6
  gRNA
accaaaatgataactgcatc

SEQ ID NO: 106358 - DNA, 20 bp, Artificial Sequence
  MKO10106358_B_Orc6
  gRNA
ctgtacagaagcagtgaact

SEQ ID NO: 106359 - DNA, 20 bp, Artificial Sequence
  MKO10106359_B_Orc6
  gRNA
ggacttgaaccaccagcaaa

SEQ ID NO: 106360 - DNA, 20 bp, Artificial Sequence
  MKO10106360_B_Orm1
  gRNA
tattgtgtcgtttatcaagt

SEQ ID NO: 106361 - DNA, 20 bp, Artificial Sequence
  MKO10106361_B_Orm1
  gRNA
gtctataactccacccatct

SEQ ID NO: 106362 - DNA, 20 bp, Artificial Sequence
  MKO10106362_B_Orm1
  gRNA
tttctctctggaatcctaga

SEQ ID NO: 106363 - DNA, 20 bp, Artificial Sequence
  MKO10106363_B_Orm2
  gRNA
catgcatcttcaagactatc

SEQ ID NO: 106364 - DNA, 20 bp, Artificial Sequence
  MKO10106364_B_Orm2
  gRNA
aaacggggactgtccctcaa

SEQ ID NO: 106365 - DNA, 20 bp, Artificial Sequence
  MKO10106365_B_Orm2
  gRNA
tctctggattcctagatgag

SEQ ID NO: 106366 - DNA, 20 bp, Artificial Sequence
  MKO10106366_B_Orm3
  gRNA
tgaatttcctgcctataatc

SEQ ID NO: 106367 - DNA, 20 bp, Artificial Sequence
  MKO10106367_B_Orm3
  gRNA
ctccccagctatctggcaaa

SEQ ID NO: 106368 - DNA, 20 bp, Artificial Sequence
  MKO10106368_B_Orm3
  gRNA
tagaaggccagatatccccc

SEQ ID NO: 106369 - DNA, 20 bp, Artificial Sequence
  MKO10106369_B_Ormdl1
  gRNA
tatgtggctgacatatgcgt

SEQ ID NO: 106370 - DNA, 20 bp, Artificial Sequence
  MKO10106370_B_Ormdl1
  gRNA
tcagcagagaagctgtgttt

SEQ ID NO: 106371 - DNA, 20 bp, Artificial Sequence
  MKO10106371_B_Ormdl1
  gRNA
atgcgaacaccatgcagctg

SEQ ID NO: 106372 - DNA, 20 bp, Artificial Sequence
  MKO10106372_B_Ormdl2
  gRNA
cagcagcacgctgagcagcg

SEQ ID NO: 106373 - DNA, 20 bp, Artificial Sequence
  MKO10106373_B_Ormdl2
  gRNA
atcttcctacatacagtcaa

SEQ ID NO: 106374 - DNA, 20 bp, Artificial Sequence
  MKO10106374_B_Ormdl2
  gRNA
gtacaataggagagatgctg

SEQ ID NO: 106375 - DNA, 20 bp, Artificial Sequence
  MKO10106375_B_Ormdl3
  gRNA
acttcctagaggctgtgaac

SEQ ID NO: 106376 - DNA, 20 bp, Artificial Sequence
  MKO10106376_B_Ormdl3
  gRNA
tttggaatcaataagtactg

SEQ ID NO: 106377 - DNA, 20 bp, Artificial Sequence
  MKO10106377_B_Ormdl3
  gRNA
tccgtggagctgggggagct

SEQ ID NO: 106378 - DNA, 20 bp, Artificial Sequence
  MKO10106378_B_Os9
  gRNA
caccttccatatggtactgc

SEQ ID NO: 106379 - DNA, 20 bp, Artificial Sequence
  MKO10106379_B_Os9
  gRNA
tatgagtgccgcctaccagc

SEQ ID NO: 106380 - DNA, 20 bp, Artificial Sequence
  MKO10106380_B_Os9
  gRNA
tgtttcgtcgtcccagttga

SEQ ID NO: 106381 - DNA, 20 bp, Artificial Sequence
  MKO10106381_B_Osbp2
  gRNA
ctgccgtgcgaccatcaact

SEQ ID NO: 106382 - DNA, 20 bp, Artificial Sequence
  MKO10106382_B_Osbp2
  gRNA
tttcatcaccgtagtcactg

SEQ ID NO: 106383 - DNA, 20 bp, Artificial Sequence
  MKO10106383_B_Osbp2
  gRNA
tgaggtcattgcacgtgctg

SEQ ID NO: 106384 - DNA, 20 bp, Artificial Sequence
  MKO10106384_B_Osbpl10
  gRNA
gctccagcagagtgtgcgcc

SEQ ID NO: 106385 - DNA, 20 bp, Artificial Sequence
  MKO10106385_B_Osbpl10
  gRNA
caactcacagccggagccag

SEQ ID NO: 106386 - DNA, 20 bp, Artificial Sequence
  MKO10106386_B_Osbpl10
  gRNA
cacactacgctgatcctcca

SEQ ID NO: 106387 - DNA, 20 bp, Artificial Sequence
  MKO10106387_B_Osbpl11
  gRNA
ctgccgctctttagcatctg

SEQ ID NO: 106388 - DNA, 20 bp, Artificial Sequence
  MKO10106388_B_Osbpl11
  gRNA
agcttacctgtactgccacc

SEQ ID NO: 106389 - DNA, 20 bp, Artificial Sequence
  MKO10106389_B_Osbpl11
  gRNA
cattctgacttggtctccgc

SEQ ID NO: 106390 - DNA, 20 bp, Artificial Sequence
  MKO10106390_B_Osbpl1a
  gRNA
gggggagatgcgctctccaa

SEQ ID NO: 106391 - DNA, 20 bp, Artificial Sequence
  MKO10106391_B_Osbpl1a
  gRNA
ccagaaacgatttcagcatc

SEQ ID NO: 106392 - DNA, 20 bp, Artificial Sequence
  MKO10106392_B_Osbpl1a
  gRNA
ccagatgctgaaatcgtttc

SEQ ID NO: 106393 - DNA, 20 bp, Artificial Sequence
  MKO10106393_B_Osbpl2
  gRNA
agccacagctgagaccgcaa

SEQ ID NO: 106394 - DNA, 20 bp, Artificial Sequence
  MKO10106394_B_Osbpl2
  gRNA
ccagaagcgacttcagtgtg

SEQ ID NO: 106395 - DNA, 20 bp, Artificial Sequence
  MKO10106395_B_Osbpl2
  gRNA
gagagacatatgagttgatc

SEQ ID NO: 106396 - DNA, 20 bp, Artificial Sequence
  MKO10106396_B_Osbpl3
  gRNA
atgagtgacgagaagaatct

SEQ ID NO: 106397 - DNA, 20 bp, Artificial Sequence
  MKO10106397_B_Osbpl3
  gRNA
tacctgccggcttccttgct

SEQ ID NO: 106398 - DNA, 20 bp, Artificial Sequence
  MKO10106398_B_Osbpl3
  gRNA
agcaaaaatcctttctgcac

SEQ ID NO: 106399 - DNA, 20 bp, Artificial Sequence
  MKO10106399_B_Osbpl5
  gRNA
agtcccacggaacctgcttc

SEQ ID NO: 106400 - DNA, 20 bp, Artificial Sequence
  MKO10106400_B_Osbpl5
  gRNA
cttgtaccaacctggggtga

SEQ ID NO: 106401 - DNA, 20 bp, Artificial Sequence
  MKO10106401_B_Osbpl5
  gRNA
ctctcttgcaggctgagtac

SEQ ID NO: 106402 - DNA, 20 bp, Artificial Sequence
  MKO10106402_B_Osbpl6
  gRNA
aagcagttctctccaaaacg

SEQ ID NO: 106403 - DNA, 20 bp, Artificial Sequence
  MKO10106403_B_Osbpl6
  gRNA
agatgtgctcttccgtgtca

SEQ ID NO: 106404 - DNA, 20 bp, Artificial Sequence
  MKO10106404_B_Osbpl6
  gRNA
accttgtgccagccctttaa

SEQ ID NO: 106405 - DNA, 20 bp, Artificial Sequence
  MKO10106405_B_Osbpl7
  gRNA
ggaaagagacacgccctctt

SEQ ID NO: 106406 - DNA, 20 bp, Artificial Sequence
  MKO10106406_B_Osbpl7
  gRNA
aagttgctccccgatgagga

SEQ ID NO: 106407 - DNA, 20 bp, Artificial Sequence
  MKO10106407_B_Osbpl7
  gRNA
cgacatcatgcctgagagac

SEQ ID NO: 106408 - DNA, 20 bp, Artificial Sequence
  MKO10106408_B_Osbpl8
  gRNA
agccccgaccttcagccagt

SEQ ID NO: 106409 - DNA, 20 bp, Artificial Sequence
  MKO10106409_B_Osbpl8
  gRNA
agacccctctgtcattgtca

SEQ ID NO: 106410 - DNA, 20 bp, Artificial Sequence
  MKO10106410_B_Osbpl8
  gRNA
tctgaatctaaactatataa

SEQ ID NO: 106411 - DNA, 20 bp, Artificial Sequence
  MKO10106411_B_Osbpl9
  gRNA
attgttctatcaagatctgc

SEQ ID NO: 106412 - DNA, 20 bp, Artificial Sequence
  MKO10106412_B_Osbpl9
  gRNA
ctttgataagaaacttaccg

SEQ ID NO: 106413 - DNA, 20 bp, Artificial Sequence
  MKO10106413_B_Osbpl9
  gRNA
taagtttcttatcaaagtct

SEQ ID NO: 106414 - DNA, 20 bp, Artificial Sequence
  MKO10106414_B_Osbp
  gRNA
aacgacttgatagctaagca

SEQ ID NO: 106415 - DNA, 20 bp, Artificial Sequence
  MKO10106415_B_Osbp
  gRNA
tcaagtcgttgcacgtgctg

SEQ ID NO: 106416 - DNA, 20 bp, Artificial Sequence
  MKO10106416_B_Osbp
  gRNA
ggcaaagcagcacaatcacc

SEQ ID NO: 106417 - DNA, 20 bp, Artificial Sequence
  MKO10106417_B_Oscar
  gRNA
ccttcgaaactgatgaccag

SEQ ID NO: 106418 - DNA, 20 bp, Artificial Sequence
  MKO10106418_B_Oscar
  gRNA
gcatcatagttacttgtgat

SEQ ID NO: 106419 - DNA, 20 bp, Artificial Sequence
  MKO10106419_B_Oscar
  gRNA
ccagggaaacctcatccgtt

SEQ ID NO: 106420 - DNA, 20 bp, Artificial Sequence
  MKO10106420_B_Oscp1
  gRNA
agtgaccagcaacacgtcct

SEQ ID NO: 106421 - DNA, 20 bp, Artificial Sequence
  MKO10106421_B_Oscp1
  gRNA
aggacttacctaatgactcc

SEQ ID NO: 106422 - DNA, 20 bp, Artificial Sequence
  MKO10106422_B_Oscp1
  gRNA
aggcacttactcggatatgc

SEQ ID NO: 106423 - DNA, 20 bp, Artificial Sequence
  MKO10106423_B_Oser1
  gRNA
tccatcatatctctgtctgt

SEQ ID NO: 106424 - DNA, 20 bp, Artificial Sequence
  MKO10106424_B_Oser1
  gRNA
actgtctttagatgcacaca

SEQ ID NO: 106425 - DNA, 20 bp, Artificial Sequence
  MKO10106425_B_Oser1
  gRNA
tctacaaggaagtcttcacg

SEQ ID NO: 106426 - DNA, 20 bp, Artificial Sequence
  MKO10106426_B_Osgepl1
  gRNA
ggaattgaaagattacgtgc

SEQ ID NO: 106427 - DNA, 20 bp, Artificial Sequence
  MKO10106427_B_Osgepl1
  gRNA
atggaatctatttccgtctt

SEQ ID NO: 106428 - DNA, 20 bp, Artificial Sequence
  MKO10106428_B_Osgepl1
  gRNA
cttgtacatccgaaaagcat

SEQ ID NO: 106429 - DNA, 20 bp, Artificial Sequence
  MKO10106429_B_Osgep
  gRNA
agctgttgttgcccgtacag

SEQ ID NO: 106430 - DNA, 20 bp, Artificial Sequence
  MKO10106430_B_Osgep
  gRNA
agcaatacaatcaatgtcct

SEQ ID NO: 106431 - DNA, 20 bp, Artificial Sequence
  MKO10106431_B_Osgep
  gRNA
atctgctcaatgttgtagcc

SEQ ID NO: 106432 - DNA, 20 bp, Artificial Sequence
  MKO10106432_B_Osgin1
  gRNA
cacatcccctacgtgaaacc

SEQ ID NO: 106433 - DNA, 20 bp, Artificial Sequence
  MKO10106433_B_Osgin1
  gRNA
ggaacctccccgggggcgcc

SEQ ID NO: 106434 - DNA, 20 bp, Artificial Sequence
  MKO10106434_B_Osgin1
  gRNA
taggacaggcagataccgga

SEQ ID NO: 106435 - DNA, 20 bp, Artificial Sequence
  MKO10106435_B_Osgin2
  gRNA
cccttaccaagaactaagtg

SEQ ID NO: 106436 - DNA, 20 bp, Artificial Sequence
  MKO10106436_B_Osgin2
  gRNA
aacttaccaattattaccat

SEQ ID NO: 106437 - DNA, 20 bp, Artificial Sequence
  MKO10106437_B_Osgin2
  gRNA
tctatgttgacaatcagctt

SEQ ID NO: 106438 - DNA, 20 bp, Artificial Sequence
  MKO10106438_B_Osmr
  gRNA
gggtagatacgactttgact

SEQ ID NO: 106439 - DNA, 20 bp, Artificial Sequence
  MKO10106439_B_Osmr
  gRNA
agcttcttcacgcttcacag

SEQ ID NO: 106440 - DNA, 20 bp, Artificial Sequence
  MKO10106440_B_Osmr
  gRNA
tcaagttgttctccatggat

SEQ ID NO: 106441 - DNA, 20 bp, Artificial Sequence
  MKO10106441_B_Osm
  gRNA
agagttggagcagccacgat

SEQ ID NO: 106442 - DNA, 20 bp, Artificial Sequence
  MKO10106442_B_Osm
  gRNA
caggacccagtatgcagaca

SEQ ID NO: 106443 - DNA, 20 bp, Artificial Sequence
  MKO10106443_B_Osm
  gRNA
acgatggctccacacgcagc

SEQ ID NO: 106444 - DNA, 20 bp, Artificial Sequence
  MKO10106444_B_Osr1
  gRNA
gacgctacactcacaagtga

SEQ ID NO: 106445 - DNA, 20 bp, Artificial Sequence
  MKO10106445_B_Osr1
  gRNA
gggtgaatgggtaccggtgc

SEQ ID NO: 106446 - DNA, 20 bp, Artificial Sequence
  MKO10106446_B_Osr1
  gRNA
tgtcgcacctgtggtcccgt

SEQ ID NO: 106447 - DNA, 20 bp, Artificial Sequence
  MKO10106447_B_Osr2
  gRNA
ccctacagctgcgagcagtg

SEQ ID NO: 106448 - DNA, 20 bp, Artificial Sequence
  MKO10106448_B_Osr2
  gRNA
ggaaaggattctgtcagtct

SEQ ID NO: 106449 - DNA, 20 bp, Artificial Sequence
  MKO10106449_B_Osr2
  gRNA
agaaaagcccttcaaatgtc

SEQ ID NO: 106450 - DNA, 20 bp, Artificial Sequence
  MKO10106450_B_Ost4
  gRNA
ttactgccacgtagtgatag

SEQ ID NO: 106451 - DNA, 20 bp, Artificial Sequence
  MKO10106451_B_Ost4
  gRNA
agtaaacaaccccaagaagc

SEQ ID NO: 106452 - DNA, 20 bp, Artificial Sequence
  MKO10106452_B_Ostc
  gRNA
agtaaacggacagtatatca

SEQ ID NO: 106453 - DNA, 20 bp, Artificial Sequence
  MKO10106453_B_Ostc
  gRNA
tttctgcaggggctacctga

SEQ ID NO: 106454 - DNA, 20 bp, Artificial Sequence
  MKO10106454_B_Ostc
  gRNA
tctctgatgcccatgttcat

SEQ ID NO: 106455 - DNA, 20 bp, Artificial Sequence
  MKO10106455_B_Ostf1
  gRNA
ttgcatgaagctgcaaaaag

SEQ ID NO: 106456 - DNA, 20 bp, Artificial Sequence
  MKO10106456_B_Ostf1
  gRNA
tcttcaaagtataattcatc

SEQ ID NO: 106457 - DNA, 20 bp, Artificial Sequence
  MKO10106457_B_Ostf1
  gRNA
gatgaattatactttgaaga

SEQ ID NO: 106458 - DNA, 20 bp, Artificial Sequence
  MKO10106458_B_Ostm1
  gRNA
ctgcagcgacacggtgtccg

SEQ ID NO: 106459 - DNA, 20 bp, Artificial Sequence
  MKO10106459_B_Ostm1
  gRNA
gagtcgaaccttcaactgtt

SEQ ID NO: 106460 - DNA, 20 bp, Artificial Sequence
  MKO10106460_B_Ostm1
  gRNA
tccgccacagcgcgggccct

SEQ ID NO: 106461 - DNA, 20 bp, Artificial Sequence
  MKO10106461_B_Ostn
  gRNA
gctcctgcgtcttgatgatc

SEQ ID NO: 106462 - DNA, 20 bp, Artificial Sequence
  MKO10106462_B_Ostn
  gRNA
ggcaagtacacacttcatcc

SEQ ID NO: 106463 - DNA, 20 bp, Artificial Sequence
  MKO10106463_B_Ostn
  gRNA
acagcatcacaatcatagcc

SEQ ID NO: 106464 - DNA, 20 bp, Artificial Sequence
  MKO10106464_B_Otc
  gRNA
taccacacaagacattcact

SEQ ID NO: 106465 - DNA, 20 bp, Artificial Sequence
  MKO10106465_B_Otc
  gRNA
ctttcagctgtacttgactt

SEQ ID NO: 106466 - DNA, 20 bp, Artificial Sequence
  MKO10106466_B_Otc
  gRNA
agtagactcacctgtttctg

SEQ ID NO: 106467 - DNA, 20 bp, Artificial Sequence
  MKO10106467_B_Otoa
  gRNA
cttgtaggaagaaataatag

SEQ ID NO: 106468 - DNA, 20 bp, Artificial Sequence
  MKO10106468_B_Otoa
  gRNA
acatccattgttgcagaaaa

SEQ ID NO: 106469 - DNA, 20 bp, Artificial Sequence
  MKO10106469_B_Otoa
  gRNA
cacattctttgagttcagat

SEQ ID NO: 106470 - DNA, 20 bp, Artificial Sequence
  MKO10106470_B_Otof
  gRNA
attgccaaagtcactttccg

SEQ ID NO: 106471 - DNA, 20 bp, Artificial Sequence
  MKO10106471_B_Otof
  gRNA
cagtcttgaggtgaacaatc

SEQ ID NO: 106472 - DNA, 20 bp, Artificial Sequence
  MKO10106472_B_Otof
  gRNA
ccacaccctcgcagttctcc

SEQ ID NO: 106473 - DNA, 20 bp, Artificial Sequence
  MKO10106473_B_Otogl
  gRNA
ctcactctgatgtttctgac

SEQ ID NO: 106474 - DNA, 20 bp, Artificial Sequence
  MKO10106474_B_Otogl
  gRNA
tctatgaaaatgaacagaga

SEQ ID NO: 106475 - DNA, 20 bp, Artificial Sequence
  MKO10106475_B_Otogl
  gRNA
ggcaccttgtcccgagagcc

SEQ ID NO: 106476 - DNA, 20 bp, Artificial Sequence
  MKO10106476_B_Otog
  gRNA
acactcacccccattgaagc

SEQ ID NO: 106477 - DNA, 20 bp, Artificial Sequence
  MKO10106477_B_Otog
  gRNA
ggaggatgtcacaacagtta

SEQ ID NO: 106478 - DNA, 20 bp, Artificial Sequence
  MKO10106478_B_Otog
  gRNA
ttgtgacatcctccactgca

SEQ ID NO: 106479 - DNA, 20 bp, Artificial Sequence
  MKO10106479_B_Otol1
  gRNA
gcaatggctgagtccaccgc

SEQ ID NO: 106480 - DNA, 20 bp, Artificial Sequence
  MKO10106480_B_Otol1
  gRNA
ccggaatgccacctgctcct

SEQ ID NO: 106481 - DNA, 20 bp, Artificial Sequence
  MKO10106481_B_Otol1
  gRNA
ctaggccctaaaggagagac

SEQ ID NO: 106482 - DNA, 20 bp, Artificial Sequence
  MKO10106482_B_Otop1
  gRNA
cgcgtttatcactgtcgtcc

SEQ ID NO: 106483 - DNA, 20 bp, Artificial Sequence
  MKO10106483_B_Otop1
  gRNA
ttgaaagtcgcatacttcat

SEQ ID NO: 106484 - DNA, 20 bp, Artificial Sequence
  MKO10106484_B_Otop1
  gRNA
tgttcacgaacctcctactg

SEQ ID NO: 106485 - DNA, 20 bp, Artificial Sequence
  MKO10106485_B_Otop2
  gRNA
agtggatgagtccgtgcacc

SEQ ID NO: 106486 - DNA, 20 bp, Artificial Sequence
  MKO10106486_B_Otop2
  gRNA
gttcttaccgggtcaggtcc

SEQ ID NO: 106487 - DNA, 20 bp, Artificial Sequence
  MKO10106487_B_Otop2
  gRNA
agactgtatccatacccacc

SEQ ID NO: 106488 - DNA, 20 bp, Artificial Sequence
  MKO10106488_B_Otop3
  gRNA
aacccattcgaaatatgttc

SEQ ID NO: 106489 - DNA, 20 bp, Artificial Sequence
  MKO10106489_B_Otop3
  gRNA
ctgcctgaacatatttcgaa

SEQ ID NO: 106490 - DNA, 20 bp, Artificial Sequence
  MKO10106490_B_Otop3
  gRNA
cgagctcagcctcaatctca

SEQ ID NO: 106491 - DNA, 20 bp, Artificial Sequence
  MKO10106491_B_Otor
  gRNA
taccgtggttgggatctcct

SEQ ID NO: 106492 - DNA, 20 bp, Artificial Sequence
  MKO10106492_B_Otor
  gRNA
ggccttgtggttctatgtgc

SEQ ID NO: 106493 - DNA, 20 bp, Artificial Sequence
  MKO10106493_B_Otor
  gRNA
atccataaatacaccatgcc

SEQ ID NO: 106494 - DNA, 20 bp, Artificial Sequence
  MKO10106494_B_Otos
  gRNA
gaatccccagcagcatgcca

SEQ ID NO: 106495 - DNA, 20 bp, Artificial Sequence
  MKO10106495_B_Otos
  gRNA
aaagcattacctgcttcctc

SEQ ID NO: 106496 - DNA, 20 bp, Artificial Sequence
  MKO10106496_B_Otos
  gRNA
gctggcccttggcatgctgc

SEQ ID NO: 106497 - DNA, 20 bp, Artificial Sequence
  MKO10106497_B_Otp
  gRNA
gcgctcaccgccagcgaagc

SEQ ID NO: 106498 - DNA, 20 bp, Artificial Sequence
  MKO10106498_B_Otp
  gRNA
gctgtctcacgccgacctcc

SEQ ID NO: 106499 - DNA, 20 bp, Artificial Sequence
  MKO10106499_B_Otp
  gRNA
actcacctagcctggcgtcc

SEQ ID NO: 106500 - DNA, 20 bp, Artificial Sequence
  MKO10106500_B_Ott
  gRNA
caggacacagacgtgacagt

SEQ ID NO: 106501 - DNA, 20 bp, Artificial Sequence
  MKO10106501_B_Ott
  gRNA
tgtttctacctgtcaatttc

SEQ ID NO: 106502 - DNA, 20 bp, Artificial Sequence
  MKO10106502_B_Ott
  gRNA
tcaacctagaaagtctaaca

SEQ ID NO: 106503 - DNA, 20 bp, Artificial Sequence
  MKO10106503_B_Otub1
  gRNA
acctcacctcttgctgaatt

SEQ ID NO: 106504 - DNA, 20 bp, Artificial Sequence
  MKO10106504_B_Otub1
  gRNA
gattgctgtgcagaatcctc

SEQ ID NO: 106505 - DNA, 20 bp, Artificial Sequence
  MKO10106505_B_Otub1
  gRNA
cctcagcatactccttgtac

SEQ ID NO: 106506 - DNA, 20 bp, Artificial Sequence
  MKO10106506_B_Otub2
  gRNA
ttcaggatgatcccgaagaa

SEQ ID NO: 106507 - DNA, 20 bp, Artificial Sequence
  MKO10106507_B_Otub2
  gRNA
gagacggaaactgcttctac

SEQ ID NO: 106508 - DNA, 20 bp, Artificial Sequence
  MKO10106508_B_Otub2
  gRNA
acagaccccaaatgaccttc

SEQ ID NO: 106509 - DNA, 20 bp, Artificial Sequence
  MKO10106509_B_Otud1
  gRNA
ggccggatatcccgaattgc

SEQ ID NO: 106510 - DNA, 20 bp, Artificial Sequence
  MKO10106510_B_Otud1
  gRNA
acccggttccggcacccgct

SEQ ID NO: 106511 - DNA, 20 bp, Artificial Sequence
  MKO10106511_B_Otud1
  gRNA
gcacatcgccgtgcgggccc

SEQ ID NO: 106512 - DNA, 20 bp, Artificial Sequence
  MKO10106512_B_Otud3
  gRNA
tccgagagtggccctccaac

SEQ ID NO: 106513 - DNA, 20 bp, Artificial Sequence
  MKO10106513_B_Otud3
  gRNA
ggatcaccacattcaattga

SEQ ID NO: 106514 - DNA, 20 bp, Artificial Sequence
  MKO10106514_B_Otud3
  gRNA
atcagcttaatgcccctttg

SEQ ID NO: 106515 - DNA, 20 bp, Artificial Sequence
  MKO10106515_B_Otud4
  gRNA
aggtgttgcactctcagtct

SEQ ID NO: 106516 - DNA, 20 bp, Artificial Sequence
  MKO10106516_B_Otud4
  gRNA
tttacctgtacataagtgaa

SEQ ID NO: 106517 - DNA, 20 bp, Artificial Sequence
  MKO10106517_B_Otud4
  gRNA
tgaagaatatttaaaacgtt

SEQ ID NO: 106518 - DNA, 20 bp, Artificial Sequence
  MKO10106518_B_Otud5
  gRNA
acctacagcccgaaatagac

SEQ ID NO: 106519 - DNA, 20 bp, Artificial Sequence
  MKO10106519_B_Otud5
  gRNA
agagatgtacaaccgtcctg

SEQ ID NO: 106520 - DNA, 20 bp, Artificial Sequence
  MKO10106520_B_Otud5
  gRNA
aggacggtgcctgtctattt

SEQ ID NO: 106521 - DNA, 20 bp, Artificial Sequence
  MKO10106521_B_Otud6a
  gRNA
gcgcgaccgaagagctcacc

SEQ ID NO: 106522 - DNA, 20 bp, Artificial Sequence
  MKO10106522_B_Otud6a
  gRNA
actggctgccaaccgtcgtg

SEQ ID NO: 106523 - DNA, 20 bp, Artificial Sequence
  MKO10106523_B_Otud6a
  gRNA
cgtctgcccttgtcgttctt

SEQ ID NO: 106524 - DNA, 20 bp, Artificial Sequence
  MKO10106524_B_Otud6b
  gRNA
cacggaagatgttgctaaat

SEQ ID NO: 106525 - DNA, 20 bp, Artificial Sequence
  MKO10106525_B_Otud6b
  gRNA
tgctgttaacatttcaaact

SEQ ID NO: 106526 - DNA, 20 bp, Artificial Sequence
  MKO10106526_B_Otud6b
  gRNA
ttcccaaaaacgacaaaaag

SEQ ID NO: 106527 - DNA, 20 bp, Artificial Sequence
  MKO10106527_B_Otud7a
  gRNA
agtcctcactgtacacgctc

SEQ ID NO: 106528 - DNA, 20 bp, Artificial Sequence
  MKO10106528_B_Otud7a
  gRNA
agtcgcttagtgcagctgtc

SEQ ID NO: 106529 - DNA, 20 bp, Artificial Sequence
  MKO10106529_B_Otud7a
  gRNA
cctttccaggtcgcctgaac

SEQ ID NO: 106530 - DNA, 20 bp, Artificial Sequence
  MKO10106530_B_Otud7b
  gRNA
tgtctgcagggcgtctgaat

SEQ ID NO: 106531 - DNA, 20 bp, Artificial Sequence
  MKO10106531_B_Otud7b
  gRNA
ccatccccagtagttgctaa

SEQ ID NO: 106532 - DNA, 20 bp, Artificial Sequence
  MKO10106532_B_Otud7b
  gRNA
gggtttccatgatagagact

SEQ ID NO: 106533 - DNA, 20 bp, Artificial Sequence
  MKO10106533_B_Otx1
  gRNA
atgaacgggctgggcctagc

SEQ ID NO: 106534 - DNA, 20 bp, Artificial Sequence
  MKO10106534_B_Otx1
  gRNA
ccaccccgcggaagcagcga

SEQ ID NO: 106535 - DNA, 20 bp, Artificial Sequence
  MKO10106535_B_Otx1
  gRNA
cccagcccgttcatgccgta

SEQ ID NO: 106536 - DNA, 20 bp, Artificial Sequence
  MKO10106536_B_Otx2
  gRNA
tctgaactcacttcccgagc

SEQ ID NO: 106537 - DNA, 20 bp, Artificial Sequence
  MKO10106537_B_Otx2
  gRNA
tactagaggggggactgaac

SEQ ID NO: 106538 - DNA, 20 bp, Artificial Sequence
  MKO10106538_B_Otx2
  gRNA
ccaccccccggaaacagcga

SEQ ID NO: 106539 - DNA, 20 bp, Artificial Sequence
  MKO10106539_B_Ovca2
  gRNA
gacacgctggggccgtttga

SEQ ID NO: 106540 - DNA, 20 bp, Artificial Sequence
  MKO10106540_B_Ovca2
  gRNA
cgagtctggacacgaaccct

SEQ ID NO: 106541 - DNA, 20 bp, Artificial Sequence
  MKO10106541_B_Ovca2
  gRNA
cgagggttcgtgtccagact

SEQ ID NO: 106542 - DNA, 20 bp, Artificial Sequence
  MKO10106542_B_Ovch2
  gRNA
agggctatatcatagatcat

SEQ ID NO: 106543 - DNA, 20 bp, Artificial Sequence
  MKO10106543_B_Ovch2
  gRNA
tggaaaagggttcctatcct

SEQ ID NO: 106544 - DNA, 20 bp, Artificial Sequence
  MKO10106544_B_Ovch2
  gRNA
ggatttatttgtacaactgc

SEQ ID NO: 106545 - DNA, 20 bp, Artificial Sequence
  MKO10106545_B_Ovgp1
  gRNA
gccgaagttccaccctccaa

SEQ ID NO: 106546 - DNA, 20 bp, Artificial Sequence
  MKO10106546_B_Ovgp1
  gRNA
gaggcagtcccccacacgac

SEQ ID NO: 106547 - DNA, 20 bp, Artificial Sequence
  MKO10106547_B_Ovgp1
  gRNA
tggccgactatgtgcccaat

SEQ ID NO: 106548 - DNA, 20 bp, Artificial Sequence
  MKO10106548_B_Ovol1
  gRNA
ggctcggccaccgatgcctc

SEQ ID NO: 106549 - DNA, 20 bp, Artificial Sequence
  MKO10106549_B_Ovol1
  gRNA
tcgagactccagctatagcg

SEQ ID NO: 106550 - DNA, 20 bp, Artificial Sequence
  MKO10106550_B_Ovol1
  gRNA
tgtgtcgattcagcatgcgc

SEQ ID NO: 106551 - DNA, 20 bp, Artificial Sequence
  MKO10106551_B_Ovol2
  gRNA
catccgcccctacaaatgtg

SEQ ID NO: 106552 - DNA, 20 bp, Artificial Sequence
  MKO10106552_B_Ovol2
  gRNA
ccagagcttcacgacgccca

SEQ ID NO: 106553 - DNA, 20 bp, Artificial Sequence
  MKO10106553_B_Ovol2
  gRNA
tcaccttaagtgccacaacc

SEQ ID NO: 106554 - DNA, 20 bp, Artificial Sequence
  MKO10106554_B_Ovol3
  gRNA
agccagccagctacgcttac

SEQ ID NO: 106555 - DNA, 20 bp, Artificial Sequence
  MKO10106555_B_Ovol3
  gRNA
taacgccctaagcctgaatg

SEQ ID NO: 106556 - DNA, 20 bp, Artificial Sequence
  MKO10106556_B_Ovol3
  gRNA
ggcgtccacagccacctaac

SEQ ID NO: 106557 - DNA, 20 bp, Artificial Sequence
  MKO10106557_B_Oxa1l
  gRNA
cttggcctctctgattcgag

SEQ ID NO: 106558 - DNA, 20 bp, Artificial Sequence
  MKO10106558_B_Oxa1l
  gRNA
tgtcctcttacacgtggcaa

SEQ ID NO: 106559 - DNA, 20 bp, Artificial Sequence
  MKO10106559_B_Oxa1l
  gRNA
ggatcttggctgcttctcgc

SEQ ID NO: 106560 - DNA, 20 bp, Artificial Sequence
  MKO10106560_B_Oxct1
  gRNA
tttgagcgacagttcctttc

SEQ ID NO: 106561 - DNA, 20 bp, Artificial Sequence
  MKO10106561_B_Oxct1
  gRNA
aaagctcctataagattctc

SEQ ID NO: 106562 - DNA, 20 bp, Artificial Sequence
  MKO10106562_B_Oxct1
  gRNA
actgcagtcagcaacaatgc

SEQ ID NO: 106563 - DNA, 20 bp, Artificial Sequence
  MKO10106563_B_Oxct2a
  gRNA
gccgtattgagaaacctgca

SEQ ID NO: 106564 - DNA, 20 bp, Artificial Sequence
  MKO10106564_B_Oxct2a
  gRNA
acgcagcgcttgccggtcaa

SEQ ID NO: 106565 - DNA, 20 bp, Artificial Sequence
  MKO10106565_B_Oxct2a
  gRNA
gcgagaagtacgcgagttcc

SEQ ID NO: 106566 - DNA, 20 bp, Artificial Sequence
  MKO10106566_B_Oxct2b
  gRNA
atgggtcgaccgtcatgctc

SEQ ID NO: 106567 - DNA, 20 bp, Artificial Sequence
  MKO10106567_B_Oxct2b
  gRNA
tgaagatcacgttgcccgag

SEQ ID NO: 106568 - DNA, 20 bp, Artificial Sequence
  MKO10106568_B_Oxct2b
  gRNA
acgcagcgcttgccagtcaa

SEQ ID NO: 106569 - DNA, 20 bp, Artificial Sequence
  MKO10106569_B_Oxgr1
  gRNA
cagatacagcaagtccgtca

SEQ ID NO: 106570 - DNA, 20 bp, Artificial Sequence
  MKO10106570_B_Oxgr1
  gRNA
ctatagcatcatcttcctcg

SEQ ID NO: 106571 - DNA, 20 bp, Artificial Sequence
  MKO10106571_B_Oxgr1
  gRNA
tccgaatgaccctcaagatg

SEQ ID NO: 106572 - DNA, 20 bp, Artificial Sequence
  MKO10106572_B_Oxld1
  gRNA
gggccctgtggggttccccc

SEQ ID NO: 106573 - DNA, 20 bp, Artificial Sequence
  MKO10106573_B_Oxld1
  gRNA
accagagcgcagctcgcacc

SEQ ID NO: 106574 - DNA, 20 bp, Artificial Sequence
  MKO10106574_B_Oxld1
  gRNA
ggaaaccccggctgcacgaa

SEQ ID NO: 106575 - DNA, 20 bp, Artificial Sequence
  MKO10106575_B_Oxnad1
  gRNA
ttctgtctcgttctagccgt

SEQ ID NO: 106576 - DNA, 20 bp, Artificial Sequence
  MKO10106576_B_Oxnad1
  gRNA
ttattgtgaacccagacagc

SEQ ID NO: 106577 - DNA, 20 bp, Artificial Sequence
  MKO10106577_B_Oxnad1
  gRNA
gaactgccagtgtcctccgc

SEQ ID NO: 106578 - DNA, 20 bp, Artificial Sequence
  MKO10106578_B_Oxr1
  gRNA
gtcggaaagattcaggctcc

SEQ ID NO: 106579 - DNA, 20 bp, Artificial Sequence
  MKO10106579_B_Oxr1
  gRNA
cacattctgcccagaatttg

SEQ ID NO: 106580 - DNA, 20 bp, Artificial Sequence
  MKO10106580_B_Oxr1
  gRNA
gagccatttaaagtaagtga

SEQ ID NO: 106581 - DNA, 20 bp, Artificial Sequence
  MKO10106581_B_Oxsm
  gRNA
gtccctaaagagcctcttga

SEQ ID NO: 106582 - DNA, 20 bp, Artificial Sequence
  MKO10106582_B_Oxsm
  gRNA
cgttgggactcaactagttt

SEQ ID NO: 106583 - DNA, 20 bp, Artificial Sequence
  MKO10106583_B_Oxsm
  gRNA
aacggccggcaggctagctt

SEQ ID NO: 106584 - DNA, 20 bp, Artificial Sequence
  MKO10106584_B_Oxsr1
  gRNA
atcctccgagaagtcttaga

SEQ ID NO: 106585 - DNA, 20 bp, Artificial Sequence
  MKO10106585_B_Oxsr1
  gRNA
ctcgtcatgaagctgctaag

SEQ ID NO: 106586 - DNA, 20 bp, Artificial Sequence
  MKO10106586_B_Oxsr1
  gRNA
gatggcattggctcatggcc

SEQ ID NO: 106587 - DNA, 20 bp, Artificial Sequence
  MKO10106587_B_Oxtr
  gRNA
gtcgtcgcagctcgagtcag

SEQ ID NO: 106588 - DNA, 20 bp, Artificial Sequence
  MKO10106588_B_Oxtr
  gRNA
atcgagttggacctcgggag

SEQ ID NO: 106589 - DNA, 20 bp, Artificial Sequence
  MKO10106589_B_Oxtr
  gRNA
tgacccgtgccaacgccgca

SEQ ID NO: 106590 - DNA, 20 bp, Artificial Sequence
  MKO10106590_B_Oxt
  gRNA
gcacagccctcttgccgccc

SEQ ID NO: 106591 - DNA, 20 bp, Artificial Sequence
  MKO10106591_B_Oxt
  gRNA
cgggctgcagcagatgcctg

SEQ ID NO: 106592 - DNA, 20 bp, Artificial Sequence
  MKO10106592_B_Oxt
  gRNA
tccccacagtgtctcccctg

SEQ ID NO: 106593 - DNA, 20 bp, Artificial Sequence
  MKO10106593_B_P2rx1
  gRNA
tcactgacacactgctgata

SEQ ID NO: 106594 - DNA, 20 bp, Artificial Sequence
  MKO10106594_B_P2rx1
  gRNA
tcttggcatatgccaccttc

SEQ ID NO: 106595 - DNA, 20 bp, Artificial Sequence
  MKO10106595_B_P2rx1
  gRNA
gaaattggtcataactacaa

SEQ ID NO: 106596 - DNA, 20 bp, Artificial Sequence
  MKO10106596_B_P2rx2
  gRNA
ggaaggagtaacctcgatcc

SEQ ID NO: 106597 - DNA, 20 bp, Artificial Sequence
  MKO10106597_B_P2rx2
  gRNA
ggaggaatacgtaaagcccc

SEQ ID NO: 106598 - DNA, 20 bp, Artificial Sequence
  MKO10106598_B_P2rx2
  gRNA
ccacacagtcgtcatctaaa

SEQ ID NO: 106599 - DNA, 20 bp, Artificial Sequence
  MKO10106599_B_P2rx3
  gRNA
tgaactacagctctgtccgt

SEQ ID NO: 106600 - DNA, 20 bp, Artificial Sequence
  MKO10106600_B_P2rx3
  gRNA
cccccacccgggaagcgctc

SEQ ID NO: 106601 - DNA, 20 bp, Artificial Sequence
  MKO10106601_B_P2rx3
  gRNA
cagagctgtagttcacgcag

SEQ ID NO: 106602 - DNA, 20 bp, Artificial Sequence
  MKO10106602_B_P2rx4
  gRNA
tgaccacagagtccgtttcc

SEQ ID NO: 106603 - DNA, 20 bp, Artificial Sequence
  MKO10106603_B_P2rx4
  gRNA
ctggacaggtaccctgcgtc

SEQ ID NO: 106604 - DNA, 20 bp, Artificial Sequence
  MKO10106604_B_P2rx4
  gRNA
gcaccatgcggccacctcac

SEQ ID NO: 106605 - DNA, 20 bp, Artificial Sequence
  MKO10106605_B_P2rx5
  gRNA
tgatcgtgactcctaaccag

SEQ ID NO: 106606 - DNA, 20 bp, Artificial Sequence
  MKO10106606_B_P2rx5
  gRNA
tacgggtggggaactctacc

SEQ ID NO: 106607 - DNA, 20 bp, Artificial Sequence
  MKO10106607_B_P2rx5
  gRNA
agactccccagcgtgacagt

SEQ ID NO: 106608 - DNA, 20 bp, Artificial Sequence
  MKO10106608_B_P2rx6
  gRNA
gctgatgaagactgccccga

SEQ ID NO: 106609 - DNA, 20 bp, Artificial Sequence
  MKO10106609_B_P2rx6
  gRNA
tttccctaggtgggccctct

SEQ ID NO: 106610 - DNA, 20 bp, Artificial Sequence
  MKO10106610_B_P2rx6
  gRNA
cgtgacaccagctcaagtcc

SEQ ID NO: 106611 - DNA, 20 bp, Artificial Sequence
  MKO10106611_B_P2rx7
  gRNA
cgaattatggcaccgtcaag

SEQ ID NO: 106612 - DNA, 20 bp, Artificial Sequence
  MKO10106612_B_P2rx7
  gRNA
cagaactttaggccagctcc

SEQ ID NO: 106613 - DNA, 20 bp, Artificial Sequence
  MKO10106613_B_P2rx7
  gRNA
agacttccaaaccactgctc

SEQ ID NO: 106614 - DNA, 20 bp, Artificial Sequence
  MKO10106614_B_P2ry10
  gRNA
caacatgcaatggtgatcac

SEQ ID NO: 106615 - DNA, 20 bp, Artificial Sequence
  MKO10106615_B_P2ry10
  gRNA
gttgtaattgctgaacttgc

SEQ ID NO: 106616 - DNA, 20 bp, Artificial Sequence
  MKO10106616_B_P2ry10
  gRNA
tcaccattgcatgttgtacc

SEQ ID NO: 106617 - DNA, 20 bp, Artificial Sequence
  MKO10106617_B_P2ry12
  gRNA
ggtcttcaggtagcggtcaa

SEQ ID NO: 106618 - DNA, 20 bp, Artificial Sequence
  MKO10106618_B_P2ry12
  gRNA
gtatatcagtatatcgttcc

SEQ ID NO: 106619 - DNA, 20 bp, Artificial Sequence
  MKO10106619_B_P2ry12
  gRNA
tcttgtagtctctgacgcac

SEQ ID NO: 106620 - DNA, 20 bp, Artificial Sequence
  MKO10106620_B_P2ry13
  gRNA
cttctatgagacgatgtatg

SEQ ID NO: 106621 - DNA, 20 bp, Artificial Sequence
  MKO10106621_B_P2ry13
  gRNA
tcaagatcatcatgccgttc

SEQ ID NO: 106622 - DNA, 20 bp, Artificial Sequence
  MKO10106622_B_P2ry13
  gRNA
ctcgggacaatcaacaccac

SEQ ID NO: 106623 - DNA, 20 bp, Artificial Sequence
  MKO10106623_B_P2ry14
  gRNA
gaagaccataccgtacaaca

SEQ ID NO: 106624 - DNA, 20 bp, Artificial Sequence
  MKO10106624_B_P2ry14
  gRNA
atatcttcgtgagtatcttc

SEQ ID NO: 106625 - DNA, 20 bp, Artificial Sequence
  MKO10106625_B_P2ry14
  gRNA
gcacgatgctgaagatattg

SEQ ID NO: 106626 - DNA, 20 bp, Artificial Sequence
  MKO10106626_B_P2ry1
  gRNA
aaatgtgtgatttcaacgac

SEQ ID NO: 106627 - DNA, 20 bp, Artificial Sequence
  MKO10106627_B_P2ry1
  gRNA
attggacgtggtgtcatagc

SEQ ID NO: 106628 - DNA, 20 bp, Artificial Sequence
  MKO10106628_B_P2ry1
  gRNA
gccacttatcaggtaacaag

SEQ ID NO: 106629 - DNA, 20 bp, Artificial Sequence
  MKO10106629_B_P2ry2
  gRNA
cggctgctcaaaccggctta

SEQ ID NO: 106630 - DNA, 20 bp, Artificial Sequence
  MKO10106630_B_P2ry2
  gRNA
gccgggcccgttatgcccgc

SEQ ID NO: 106631 - DNA, 20 bp, Artificial Sequence
  MKO10106631_B_P2ry2
  gRNA
actacgcccggggtgaccac

SEQ ID NO: 106632 - DNA, 20 bp, Artificial Sequence
  MKO10106632_B_P2ry4
  gRNA
aatcggtcaccctcataagc

SEQ ID NO: 106633 - DNA, 20 bp, Artificial Sequence
  MKO10106633_B_P2ry4
  gRNA
caaaggtcgatacagtcgcc

SEQ ID NO: 106634 - DNA, 20 bp, Artificial Sequence
  MKO10106634_B_P2ry4
  gRNA
acgtagtggtcaaactcctc

SEQ ID NO: 106635 - DNA, 20 bp, Artificial Sequence
  MKO10106635_B_P2ry6
  gRNA
ggcccgccgcctgtgtcgcc

SEQ ID NO: 106636 - DNA, 20 bp, Artificial Sequence
  MKO10106636_B_P2ry6
  gRNA
caaggcggctcgtatggctg

SEQ ID NO: 106637 - DNA, 20 bp, Artificial Sequence
  MKO10106637_B_P2ry6
  gRNA
caccacctgcgtctaccgtg

SEQ ID NO: 106638 - DNA, 20 bp, Artificial Sequence
  MKO10106638_B_P4ha1
  gRNA
attaacttgaatgcgtttac

SEQ ID NO: 106639 - DNA, 20 bp, Artificial Sequence
  MKO10106639_B_P4ha1
  gRNA
agtactgcctctgaatggtt

SEQ ID NO: 106640 - DNA, 20 bp, Artificial Sequence
  MKO10106640_B_P4ha1
  gRNA
gagctgctaaagctctgttt

SEQ ID NO: 106641 - DNA, 20 bp, Artificial Sequence
  MKO10106641_B_P4ha2
  gRNA
tgaagcggttgaacacagac

SEQ ID NO: 106642 - DNA, 20 bp, Artificial Sequence
  MKO10106642_B_P4ha2
  gRNA
ccaagctcgccaagattaag

SEQ ID NO: 106643 - DNA, 20 bp, Artificial Sequence
  MKO10106643_B_P4ha2
  gRNA
agaattgccgctgaactgag

SEQ ID NO: 106644 - DNA, 20 bp, Artificial Sequence
  MKO10106644_B_P4ha3
  gRNA
actgtacaggtcggtgatgg

SEQ ID NO: 106645 - DNA, 20 bp, Artificial Sequence
  MKO10106645_B_P4ha3
  gRNA
atccagggcgtcttccagac

SEQ ID NO: 106646 - DNA, 20 bp, Artificial Sequence
  MKO10106646_B_P4ha3
  gRNA
attacctcggatgttctcag

SEQ ID NO: 106647 - DNA, 20 bp, Artificial Sequence
  MKO10106647_B_P4hb
  gRNA
gctattgatgacataccttt

SEQ ID NO: 106648 - DNA, 20 bp, Artificial Sequence
  MKO10106648_B_P4hb
  gRNA
cacttcgcttgagtccacca

SEQ ID NO: 106649 - DNA, 20 bp, Artificial Sequence
  MKO10106649_B_P4hb
  gRNA
tctcaccctcaaagttgttg

SEQ ID NO: 106650 - DNA, 20 bp, Artificial Sequence
  MKO10106650_B_P4htm
  gRNA
aagtccaggtggtcgcgggc

SEQ ID NO: 106651 - DNA, 20 bp, Artificial Sequence
  MKO10106651_B_P4htm
  gRNA
gatccctgcccgcgaccacc

SEQ ID NO: 106652 - DNA, 20 bp, Artificial Sequence
  MKO10106652_B_P4htm
  gRNA
taaggcagaatccaatgagc

SEQ ID NO: 106653 - DNA, 20 bp, Artificial Sequence
  MKO10106653_B_Pa2g4
  gRNA
cttccttgagtatatagtcc

SEQ ID NO: 106654 - DNA, 20 bp, Artificial Sequence
  MKO10106654_B_Pa2g4
  gRNA
cagtgaccttggggttcatg

SEQ ID NO: 106655 - DNA, 20 bp, Artificial Sequence
  MKO10106655_B_Pa2g4
  gRNA
gtgacacacacagttattta

SEQ ID NO: 106656 - DNA, 20 bp, Artificial Sequence
  MKO10106656_B_Pabpc1l
  gRNA
ctcggtgggaccacatgatt

SEQ ID NO: 106657 - DNA, 20 bp, Artificial Sequence
  MKO10106657_B_Pabpc1l
  gRNA
caggtagtatacaatgaaca

SEQ ID NO: 106658 - DNA, 20 bp, Artificial Sequence
  MKO10106658_B_Pabpc1l
  gRNA
tgtgcatttcgagacccacg

SEQ ID NO: 106659 - DNA, 20 bp, Artificial Sequence
  MKO10106659_B_Pabpc1
  gRNA
gtgtacaaatccatagccct

SEQ ID NO: 106660 - DNA, 20 bp, Artificial Sequence
  MKO10106660_B_Pabpc1
  gRNA
atttgtacactttgaaacac

SEQ ID NO: 106661 - DNA, 20 bp, Artificial Sequence
  MKO10106661_B_Pabpc1
  gRNA
gcttacaaatccaaatcctt

SEQ ID NO: 106662 - DNA, 20 bp, Artificial Sequence
  MKO10106662_B_Pabpc2
  gRNA
cctgacgttcttctttgcgc

SEQ ID NO: 106663 - DNA, 20 bp, Artificial Sequence
  MKO10106663_B_Pabpc2
  gRNA
acagcccgctgtttgcatac

SEQ ID NO: 106664 - DNA, 20 bp, Artificial Sequence
  MKO10106664_B_Pabpc2
  gRNA
catgggacagcctgggtcgc

SEQ ID NO: 106665 - DNA, 20 bp, Artificial Sequence
  MKO10106665_B_Pabpc4l
  gRNA
aggcgtagcctagtgaacgt

SEQ ID NO: 106666 - DNA, 20 bp, Artificial Sequence
  MKO10106666_B_Pabpc4l
  gRNA
ctgatttcccaacgttcact

SEQ ID NO: 106667 - DNA, 20 bp, Artificial Sequence
  MKO10106667_B_Pabpc4l
  gRNA
ggccagattcaaaagccgta

SEQ ID NO: 106668 - DNA, 20 bp, Artificial Sequence
  MKO10106668_B_Pabpc4
  gRNA
caggtggtctgtgatgagaa

SEQ ID NO: 106669 - DNA, 20 bp, Artificial Sequence
  MKO10106669_B_Pabpc4
  gRNA
acaggacaagatgtttccaa

SEQ ID NO: 106670 - DNA, 20 bp, Artificial Sequence
  MKO10106670_B_Pabpc4
  gRNA
catgccattcatcttctcga

SEQ ID NO: 106671 - DNA, 20 bp, Artificial Sequence
  MKO10106671_B_Pabpc5
  gRNA
gtcatcacatacgactttac

SEQ ID NO: 106672 - DNA, 20 bp, Artificial Sequence
  MKO10106672_B_Pabpc5
  gRNA
tgaatcgaccaacatatacc

SEQ ID NO: 106673 - DNA, 20 bp, Artificial Sequence
  MKO10106673_B_Pabpc5
  gRNA
ctgcatggcaagtcaataga

SEQ ID NO: 106674 - DNA, 20 bp, Artificial Sequence
  MKO10106674_B_Pabpc6
  gRNA
tatgccctacggctctgagt

SEQ ID NO: 106675 - DNA, 20 bp, Artificial Sequence
  MKO10106675_B_Pabpc6
  gRNA
cggacgcgtagcccagcgag

SEQ ID NO: 106676 - DNA, 20 bp, Artificial Sequence
  MKO10106676_B_Pabpc6
  gRNA
tggtacgattactagtgcaa

SEQ ID NO: 106677 - DNA, 20 bp, Artificial Sequence
  MKO10106677_B_Pabpn1l
  gRNA
ataccttgatgacccgacct

SEQ ID NO: 106678 - DNA, 20 bp, Artificial Sequence
  MKO10106678_B_Pabpn1l
  gRNA
ctgctgagccctgagaccgt

SEQ ID NO: 106679 - DNA, 20 bp, Artificial Sequence
  MKO10106679_B_Pabpn1l
  gRNA
ctggatgagagcaccttccg

SEQ ID NO: 106680 - DNA, 20 bp, Artificial Sequence
  MKO10106680_B_Pabpn1
  gRNA
cattgccaacgtagatagag

SEQ ID NO: 106681 - DNA, 20 bp, Artificial Sequence
  MKO10106681_B_Pabpn1
  gRNA
agagtcagtgaggacgtccc

SEQ ID NO: 106682 - DNA, 20 bp, Artificial Sequence
  MKO10106682_B_Pabpn1
  gRNA
ctcctacttaccctttggga

SEQ ID NO: 106683 - DNA, 20 bp, Artificial Sequence
  MKO10106683_B_Pacrgl
  gRNA
ttgagcttatcacttggccg

SEQ ID NO: 106684 - DNA, 20 bp, Artificial Sequence
  MKO10106684_B_Pacrgl
  gRNA
taaatagctgcgaatgcagt

SEQ ID NO: 106685 - DNA, 20 bp, Artificial Sequence
  MKO10106685_B_Pacrgl
  gRNA
aggctttagggagttgcttc

SEQ ID NO: 106686 - DNA, 20 bp, Artificial Sequence
  MKO10106686_B_Pacrg
  gRNA
ttccgaaaatgttatgagcg

SEQ ID NO: 106687 - DNA, 20 bp, Artificial Sequence
  MKO10106687_B_Pacrg
  gRNA
gcccttgagcatgactcgaa

SEQ ID NO: 106688 - DNA, 20 bp, Artificial Sequence
  MKO10106688_B_Pacrg
  gRNA
ctccgtgttccagcatgtcg

SEQ ID NO: 106689 - DNA, 20 bp, Artificial Sequence
  MKO10106689_B_Pacs1
  gRNA
ggctggaaggatgatctcat

SEQ ID NO: 106690 - DNA, 20 bp, Artificial Sequence
  MKO10106690_B_Pacs1
  gRNA
ggtgatgcaacaccctaatg

SEQ ID NO: 106691 - DNA, 20 bp, Artificial Sequence
  MKO10106691_B_Pacs1
  gRNA
agtcattgctgtgaagctgc

SEQ ID NO: 106692 - DNA, 20 bp, Artificial Sequence
  MKO10106692_B_Pacs2
  gRNA
tgcagatcatgctacagcgc

SEQ ID NO: 106693 - DNA, 20 bp, Artificial Sequence
  MKO10106693_B_Pacs2
  gRNA
atgtgatctcaagacacgct

SEQ ID NO: 106694 - DNA, 20 bp, Artificial Sequence
  MKO10106694_B_Pacs2
  gRNA
gagggttacctgcatcttga

SEQ ID NO: 106695 - DNA, 20 bp, Artificial Sequence
  MKO10106695_B_Pacsin1
  gRNA
ggtacctgctgttctccgct

SEQ ID NO: 106696 - DNA, 20 bp, Artificial Sequence
  MKO10106696_B_Pacsin1
  gRNA
cgctccaggctgccatactg

SEQ ID NO: 106697 - DNA, 20 bp, Artificial Sequence
  MKO10106697_B_Pacsin1
  gRNA
tggcttcaaggagacgaaag

SEQ ID NO: 106698 - DNA, 20 bp, Artificial Sequence
  MKO10106698_B_Pacsin2
  gRNA
tggtctgatcaagctccttc

SEQ ID NO: 106699 - DNA, 20 bp, Artificial Sequence
  MKO10106699_B_Pacsin2
  gRNA
gctcatgcagacagttcatg

SEQ ID NO: 106700 - DNA, 20 bp, Artificial Sequence
  MKO10106700_B_Pacsin2
  gRNA
tctcctctttgcacgctgtg

SEQ ID NO: 106701 - DNA, 20 bp, Artificial Sequence
  MKO10106701_B_Pacsin3
  gRNA
agaacgtgcccgcattgaga

SEQ ID NO: 106702 - DNA, 20 bp, Artificial Sequence
  MKO10106702_B_Pacsin3
  gRNA
gtggaaagcccctcgctgcc

SEQ ID NO: 106703 - DNA, 20 bp, Artificial Sequence
  MKO10106703_B_Pacsin3
  gRNA
gagctaccacacagcccgca

SEQ ID NO: 106704 - DNA, 20 bp, Artificial Sequence
  MKO10106704_B_Padi1
  gRNA
tgctaaccatttgaagtcgc

SEQ ID NO: 106705 - DNA, 20 bp, Artificial Sequence
  MKO10106705_B_Padi1
  gRNA
gtgctctacctaactgctgt

SEQ ID NO: 106706 - DNA, 20 bp, Artificial Sequence
  MKO10106706_B_Padi1
  gRNA
caccctccagcgacttcaaa

SEQ ID NO: 106707 - DNA, 20 bp, Artificial Sequence
  MKO10106707_B_Padi2
  gRNA
cttgtctgcagagatctcgc

SEQ ID NO: 106708 - DNA, 20 bp, Artificial Sequence
  MKO10106708_B_Padi2
  gRNA
ggaggactgtagtgacgaaa

SEQ ID NO: 106709 - DNA, 20 bp, Artificial Sequence
  MKO10106709_B_Padi2
  gRNA
gggcagcgcccccattgacc

SEQ ID NO: 106710 - DNA, 20 bp, Artificial Sequence
  MKO10106710_B_Padi3
  gRNA
atgctctcggctggagtggt

SEQ ID NO: 106711 - DNA, 20 bp, Artificial Sequence
  MKO10106711_B_Padi3
  gRNA
cagccgagagcatttgcccc

SEQ ID NO: 106712 - DNA, 20 bp, Artificial Sequence
  MKO10106712_B_Padi3
  gRNA
ccacgaagctcctgtcctgc

SEQ ID NO: 106713 - DNA, 20 bp, Artificial Sequence
  MKO10106713_B_Padi4
  gRNA
atgacatctacgatgactcc

SEQ ID NO: 106714 - DNA, 20 bp, Artificial Sequence
  MKO10106714_B_Padi4
  gRNA
ccgaaggttgtgtagccctt

SEQ ID NO: 106715 - DNA, 20 bp, Artificial Sequence
  MKO10106715_B_Padi4
  gRNA
caagccctgatctacatcac

SEQ ID NO: 106716 - DNA, 20 bp, Artificial Sequence
  MKO10106716_B_Padi6
  gRNA
gcctgatgaacagtcctttc

SEQ ID NO: 106717 - DNA, 20 bp, Artificial Sequence
  MKO10106717_B_Padi6
  gRNA
tgcaagtctttcaccatccg

SEQ ID NO: 106718 - DNA, 20 bp, Artificial Sequence
  MKO10106718_B_Padi6
  gRNA
gctacaattcacaagcagga

SEQ ID NO: 106719 - DNA, 20 bp, Artificial Sequence
  MKO10106719_B_Paf1
  gRNA
acacaccattgggatcaatg

SEQ ID NO: 106720 - DNA, 20 bp, Artificial Sequence
  MKO10106720_B_Paf1
  gRNA
aaaccaggcccaattcccac

SEQ ID NO: 106721 - DNA, 20 bp, Artificial Sequence
  MKO10106721_B_Paf1
  gRNA
tctagaagcttctcatcagc

SEQ ID NO: 106722 - DNA, 20 bp, Artificial Sequence
  MKO10106722_B_Pafah1b1
  gRNA
gaattagataagaagtatgc

SEQ ID NO: 106723 - DNA, 20 bp, Artificial Sequence
  MKO10106723_B_Pafah1b1
  gRNA
caggtgtgggattatgagac

SEQ ID NO: 106724 - DNA, 20 bp, Artificial Sequence
  MKO10106724_B_Pafah1b1
  gRNA
tgttattagattacaaaaaa

SEQ ID NO: 106725 - DNA, 20 bp, Artificial Sequence
  MKO10106725_B_Pafah1b2
  gRNA
gtgcagctccttgatataga

SEQ ID NO: 106726 - DNA, 20 bp, Artificial Sequence
  MKO10106726_B_Pafah1b2
  gRNA
ccacttcatgctcttaattt

SEQ ID NO: 106727 - DNA, 20 bp, Artificial Sequence
  MKO10106727_B_Pafah1b2
  gRNA
ttgtacaacttataaacacg

SEQ ID NO: 106728 - DNA, 20 bp, Artificial Sequence
  MKO10106728_B_Pafah1b3
  gRNA
catcaaagccatcgtacaac

SEQ ID NO: 106729 - DNA, 20 bp, Artificial Sequence
  MKO10106729_B_Pafah1b3
  gRNA
acttcgagagaaaaaccgac

SEQ ID NO: 106730 - DNA, 20 bp, Artificial Sequence
  MKO10106730_B_Pafah1b3
  gRNA
cttgttcaccagttgtacga

SEQ ID NO: 106731 - DNA, 20 bp, Artificial Sequence
  MKO10106731_B_Pafah2
  gRNA
actctccagggcgtcatact

SEQ ID NO: 106732 - DNA, 20 bp, Artificial Sequence
  MKO10106732_B_Pafah2
  gRNA
ctacctgaggattcctgacg

SEQ ID NO: 106733 - DNA, 20 bp, Artificial Sequence
  MKO10106733_B_Pafah2
  gRNA
cttgtcgcttgcctgttagc

SEQ ID NO: 106734 - DNA, 20 bp, Artificial Sequence
  MKO10106734_B_Pag1
  gRNA
cgaggcttaccacattcatc

SEQ ID NO: 106735 - DNA, 20 bp, Artificial Sequence
  MKO10106735_B_Pag1
  gRNA
tggtccccgctatgctgccg

SEQ ID NO: 106736 - DNA, 20 bp, Artificial Sequence
  MKO10106736_B_Pag1
  gRNA
tagccagtgcatctgttgtc

SEQ ID NO: 106737 - DNA, 20 bp, Artificial Sequence
  MKO10106737_B_Pagr1a
  gRNA
acgctcgtcgctcgcagcgc

SEQ ID NO: 106738 - DNA, 20 bp, Artificial Sequence
  MKO10106738_B_Pagr1a
  gRNA
tgatgagccaatgacaccaa

SEQ ID NO: 106739 - DNA, 20 bp, Artificial Sequence
  MKO10106739_B_Pagr1a
  gRNA
ctgtcaatcagtgagtcctt

SEQ ID NO: 106740 - DNA, 20 bp, Artificial Sequence
  MKO10106740_B_Pah
  gRNA
cacttacctcaaataagcgc

SEQ ID NO: 106741 - DNA, 20 bp, Artificial Sequence
  MKO10106741_B_Pah
  gRNA
caaactgctttcgtctcgcc

SEQ ID NO: 106742 - DNA, 20 bp, Artificial Sequence
  MKO10106742_B_Pah
  gRNA
tctgatattctcactcaaag

SEQ ID NO: 106743 - DNA, 20 bp, Artificial Sequence
  MKO10106743_B_Paics
  gRNA
gtgaaatgatccccattgag

SEQ ID NO: 106744 - DNA, 20 bp, Artificial Sequence
  MKO10106744_B_Paics
  gRNA
aagacccagttgctattctt

SEQ ID NO: 106745 - DNA, 20 bp, Artificial Sequence
  MKO10106745_B_Paics
  gRNA
gctgccccaggactgtacgc

SEQ ID NO: 106746 - DNA, 20 bp, Artificial Sequence
  MKO10106746_B_Paip1
  gRNA
tgaactgtaggaatcctatg

SEQ ID NO: 106747 - DNA, 20 bp, Artificial Sequence
  MKO10106747_B_Paip1
  gRNA
agaactatatcttaacctgg

SEQ ID NO: 106748 - DNA, 20 bp, Artificial Sequence
  MKO10106748_B_Paip1
  gRNA
gctaaagaccaagctgcaaa

SEQ ID NO: 106749 - DNA, 20 bp, Artificial Sequence
  MKO10106749_B_Paip2b
  gRNA
cacttacaacagcagttaaa

SEQ ID NO: 106750 - DNA, 20 bp, Artificial Sequence
  MKO10106750_B_Paip2b
  gRNA
tgaagaggatttcaacagac

SEQ ID NO: 106751 - DNA, 20 bp, Artificial Sequence
  MKO10106751_B_Paip2b
  gRNA
acagctcagtacttcactcc

SEQ ID NO: 106752 - DNA, 20 bp, Artificial Sequence
  MKO10106752_B_Paip2
  gRNA
acatgtcagtacttcacccc

SEQ ID NO: 106753 - DNA, 20 bp, Artificial Sequence
  MKO10106753_B_Paip2
  gRNA
caatctgaatcccaatgcaa

SEQ ID NO: 106754 - DNA, 20 bp, Artificial Sequence
  MKO10106754_B_Paip2
  gRNA
atccatttgcagagtacatg

SEQ ID NO: 106755 - DNA, 20 bp, Artificial Sequence
  MKO10106755_B_Pak1ip1
  gRNA
ttcctttctatccacccgtc

SEQ ID NO: 106756 - DNA, 20 bp, Artificial Sequence
  MKO10106756_B_Pak1ip1
  gRNA
ctgccccactgattaagtgc

SEQ ID NO: 106757 - DNA, 20 bp, Artificial Sequence
  MKO10106757_B_Pak1ip1
  gRNA
ttggcaccgataaaacatta

SEQ ID NO: 106758 - DNA, 20 bp, Artificial Sequence
  MKO10106758_B_Pak1
  gRNA
cgtggagcaatcactggagg

SEQ ID NO: 106759 - DNA, 20 bp, Artificial Sequence
  MKO10106759_B_Pak1
  gRNA
attgtatgctcaaaatctga

SEQ ID NO: 106760 - DNA, 20 bp, Artificial Sequence
  MKO10106760_B_Pak1
  gRNA
ttataattcttctaacactt

SEQ ID NO: 106761 - DNA, 20 bp, Artificial Sequence
  MKO10106761_B_Pak2
  gRNA
atggtgtgctcaaaatcaga

SEQ ID NO: 106762 - DNA, 20 bp, Artificial Sequence
  MKO10106762_B_Pak2
  gRNA
gacatcagctgtagtgacag

SEQ ID NO: 106763 - DNA, 20 bp, Artificial Sequence
  MKO10106763_B_Pak2
  gRNA
cttactgctggtgttccaga

SEQ ID NO: 106764 - DNA, 20 bp, Artificial Sequence
  MKO10106764_B_Pak3
  gRNA
atcgtatgctcaaagtctga

SEQ ID NO: 106765 - DNA, 20 bp, Artificial Sequence
  MKO10106765_B_Pak3
  gRNA
actgaaaatgtctgacagct

SEQ ID NO: 106766 - DNA, 20 bp, Artificial Sequence
  MKO10106766_B_Pak3
  gRNA
gatgtgctgctatgtatcca

SEQ ID NO: 106767 - DNA, 20 bp, Artificial Sequence
  MKO10106767_B_Pak4
  gRNA
tctccaccacgttctcgtgc

SEQ ID NO: 106768 - DNA, 20 bp, Artificial Sequence
  MKO10106768_B_Pak4
  gRNA
cagagagtgggcgcttatcg

SEQ ID NO: 106769 - DNA, 20 bp, Artificial Sequence
  MKO10106769_B_Pak4
  gRNA
gcccactcacccggccatca

SEQ ID NO: 106770 - DNA, 20 bp, Artificial Sequence
  MKO10106770_B_Pak6
  gRNA
tgactaccagcacctcaacg

SEQ ID NO: 106771 - DNA, 20 bp, Artificial Sequence
  MKO10106771_B_Pak6
  gRNA
tgcccgtgtcttcgccaccc

SEQ ID NO: 106772 - DNA, 20 bp, Artificial Sequence
  MKO10106772_B_Pak6
  gRNA
ctggacagctacgtgaagat

SEQ ID NO: 106773 - DNA, 20 bp, Artificial Sequence
  MKO10106773_B_Pak7
  gRNA
ggattacgatcgagcacaga

SEQ ID NO: 106774 - DNA, 20 bp, Artificial Sequence
  MKO10106774_B_Pak7
  gRNA
acatgtcaactacgttgtca

SEQ ID NO: 106775 - DNA, 20 bp, Artificial Sequence
  MKO10106775_B_Pak7
  gRNA
gcacctaccctccacctagc

SEQ ID NO: 106776 - DNA, 20 bp, Artificial Sequence
  MKO10106776_B_Palb2
  gRNA
caggacacttgctcgacttc

SEQ ID NO: 106777 - DNA, 20 bp, Artificial Sequence
  MKO10106777_B_Palb2
  gRNA
tggaatgttcatgtaactcg

SEQ ID NO: 106778 - DNA, 20 bp, Artificial Sequence
  MKO10106778_B_Palb2
  gRNA
gcgtgccaaaagagctgaga

SEQ ID NO: 106779 - DNA, 20 bp, Artificial Sequence
  MKO10106779_B_Pald1
  gRNA
agagccggcccatcctgtaa

SEQ ID NO: 106780 - DNA, 20 bp, Artificial Sequence
  MKO10106780_B_Pald1
  gRNA
tcagcgcgcaagaacaccac

SEQ ID NO: 106781 - DNA, 20 bp, Artificial Sequence
  MKO10106781_B_Pald1
  gRNA
cgcacacgccatcctcacct

SEQ ID NO: 106782 - DNA, 20 bp, Artificial Sequence
  MKO10106782_B_Palld
  gRNA
tcatatctctgccgacctga

SEQ ID NO: 106783 - DNA, 20 bp, Artificial Sequence
  MKO10106783_B_Palld
  gRNA
gcgacctgtgtcgtcctcaa

SEQ ID NO: 106784 - DNA, 20 bp, Artificial Sequence
  MKO10106784_B_Palld
  gRNA
cagcccatggtggttccgtc

SEQ ID NO: 106785 - DNA, 20 bp, Artificial Sequence
  MKO10106785_B_Palm2
  gRNA
tcctcctccgctgttcccgc

SEQ ID NO: 106786 - DNA, 20 bp, Artificial Sequence
  MKO10106786_B_Palm2
  gRNA
ttcttcagactgcctgcgcc

SEQ ID NO: 106787 - DNA, 20 bp, Artificial Sequence
  MKO10106787_B_Palm2
  gRNA
gcacttacctccatcagcag

SEQ ID NO: 106788 - DNA, 20 bp, Artificial Sequence
  MKO10106788_B_Palm3
  gRNA
cgtccatgagccaacgttct

SEQ ID NO: 106789 - DNA, 20 bp, Artificial Sequence
  MKO10106789_B_Palm3
  gRNA
ctgttgcaaagtgcgtccac

SEQ ID NO: 106790 - DNA, 20 bp, Artificial Sequence
  MKO10106790_B_Palm3
  gRNA
cctccagccgctgccgatag

SEQ ID NO: 106791 - DNA, 20 bp, Artificial Sequence
  MKO10106791_B_Palmd
  gRNA
ttccactgccgattccatcc

SEQ ID NO: 106792 - DNA, 20 bp, Artificial Sequence
  MKO10106792_B_Palmd
  gRNA
acagaagcgtctgaaaatag

SEQ ID NO: 106793 - DNA, 20 bp, Artificial Sequence
  MKO10106793_B_Palmd
  gRNA
aaatggctcctggatggaat

SEQ ID NO: 106794 - DNA, 20 bp, Artificial Sequence
  MKO10106794_B_Palm
  gRNA
tgcacccacaggagaagcgt

SEQ ID NO: 106795 - DNA, 20 bp, Artificial Sequence
  MKO10106795_B_Palm
  gRNA
aagacagctgcagtacctga

SEQ ID NO: 106796 - DNA, 20 bp, Artificial Sequence
  MKO10106796_B_Palm
  gRNA
cagggtcctggcaacagaca

SEQ ID NO: 106797 - DNA, 20 bp, Artificial Sequence
  MKO10106797_B_Pam16
  gRNA
gaacactcacctttgactgc

SEQ ID NO: 106798 - DNA, 20 bp, Artificial Sequence
  MKO10106798_B_Pam16
  gRNA
tacctgcaaactcctgcctc

SEQ ID NO: 106799 - DNA, 20 bp, Artificial Sequence
  MKO10106799_B_Pam16
  gRNA
caggcagccgctgacgctcg

SEQ ID NO: 106800 - DNA, 20 bp, Artificial Sequence
  MKO10106800_B_Pamr1
  gRNA
gtcattaatgaagcctgtcc

SEQ ID NO: 106801 - DNA, 20 bp, Artificial Sequence
  MKO10106801_B_Pamr1
  gRNA
catgtgccaatatgactatg

SEQ ID NO: 106802 - DNA, 20 bp, Artificial Sequence
  MKO10106802_B_Pamr1
  gRNA
gattctactgcgcagagtgc

SEQ ID NO: 106803 - DNA, 20 bp, Artificial Sequence
  MKO10106803_B_Pam
  gRNA
tgcaacatgccctcatccac

SEQ ID NO: 106804 - DNA, 20 bp, Artificial Sequence
  MKO10106804_B_Pam
  gRNA
cagacatacctttagggagc

SEQ ID NO: 106805 - DNA, 20 bp, Artificial Sequence
  MKO10106805_B_Pam
  gRNA
aagccaatattctatatgcc

SEQ ID NO: 106806 - DNA, 20 bp, Artificial Sequence
  MKO10106806_B_Pan2
  gRNA
cagtatgcagtcgagacacc

SEQ ID NO: 106807 - DNA, 20 bp, Artificial Sequence
  MKO10106807_B_Pan2
  gRNA
ggaagaggataccgttctcc

SEQ ID NO: 106808 - DNA, 20 bp, Artificial Sequence
  MKO10106808_B_Pan2
  gRNA
ggggctgcagaaccacgtac

SEQ ID NO: 106809 - DNA, 20 bp, Artificial Sequence
  MKO10106809_B_Pan3
  gRNA
ctttctttcagttccgggaa

SEQ ID NO: 106810 - DNA, 20 bp, Artificial Sequence
  MKO10106810_B_Pan3
  gRNA
ggcaccgaagtcattaaaca

SEQ ID NO: 106811 - DNA, 20 bp, Artificial Sequence
  MKO10106811_B_Pan3
  gRNA
cctgaaaatacctgcatcaa

SEQ ID NO: 106812 - DNA, 20 bp, Artificial Sequence
  MKO10106812_B_Pank1
  gRNA
tatgagcgatttggccttca

SEQ ID NO: 106813 - DNA, 20 bp, Artificial Sequence
  MKO10106813_B_Pank1
  gRNA
ggcgaggtcttctttgctga

SEQ ID NO: 106814 - DNA, 20 bp, Artificial Sequence
  MKO10106814_B_Pank1
  gRNA
taaaggcgacagcaccaatg

SEQ ID NO: 106815 - DNA, 20 bp, Artificial Sequence
  MKO10106815_B_Pank2
  gRNA
tcgtggagatagcaccaaag

SEQ ID NO: 106816 - DNA, 20 bp, Artificial Sequence
  MKO10106816_B_Pank2
  gRNA
tcgaactaatttgtccactt

SEQ ID NO: 106817 - DNA, 20 bp, Artificial Sequence
  MKO10106817_B_Pank2
  gRNA
ccgatgttcaccagaagcag

SEQ ID NO: 106818 - DNA, 20 bp, Artificial Sequence
  MKO10106818_B_Pank3
  gRNA
ccactgctggtagtgaatat

SEQ ID NO: 106819 - DNA, 20 bp, Artificial Sequence
  MKO10106819_B_Pank3
  gRNA
ggtttatgcagtttgttgac

SEQ ID NO: 106820 - DNA, 20 bp, Artificial Sequence
  MKO10106820_B_Pank3
  gRNA
acgagaaactgttagtaaag

SEQ ID NO: 106821 - DNA, 20 bp, Artificial Sequence
  MKO10106821_B_Pank4
  gRNA
ctctggcgtctccatcgtga

SEQ ID NO: 106822 - DNA, 20 bp, Artificial Sequence
  MKO10106822_B_Pank4
  gRNA
aggtggatcattgaccaagt

SEQ ID NO: 106823 - DNA, 20 bp, Artificial Sequence
  MKO10106823_B_Pank4
  gRNA
accctatgagatctcagtcc

SEQ ID NO: 106824 - DNA, 20 bp, Artificial Sequence
  MKO10106824_B_Panx1
  gRNA
cttgaaatgtagaacatcga

SEQ ID NO: 106825 - DNA, 20 bp, Artificial Sequence
  MKO10106825_B_Panx1
  gRNA
gggagaagaactctcgccag

SEQ ID NO: 106826 - DNA, 20 bp, Artificial Sequence
  MKO10106826_B_Panx1
  gRNA
ggtttccagactcgctctgc

SEQ ID NO: 106827 - DNA, 20 bp, Artificial Sequence
  MKO10106827_B_Panx2
  gRNA
gccttgtcgtcctgcgagcc

SEQ ID NO: 106828 - DNA, 20 bp, Artificial Sequence
  MKO10106828_B_Panx2
  gRNA
agatgctccactccccgaga

SEQ ID NO: 106829 - DNA, 20 bp, Artificial Sequence
  MKO10106829_B_Panx2
  gRNA
ccacatcagcacgctgtatg

SEQ ID NO: 106830 - DNA, 20 bp, Artificial Sequence
  MKO10106830_B_Panx3
  gRNA
ctttgagccgagagcccctg

SEQ ID NO: 106831 - DNA, 20 bp, Artificial Sequence
  MKO10106831_B_Panx3
  gRNA
ttccaggtaccgctctagca

SEQ ID NO: 106832 - DNA, 20 bp, Artificial Sequence
  MKO10106832_B_Panx3
  gRNA
tgcagcacatgttgcagatc

SEQ ID NO: 106833 - DNA, 20 bp, Artificial Sequence
  MKO10106833_B_Paox
  gRNA
atacatactcaaaagaaggc

SEQ ID NO: 106834 - DNA, 20 bp, Artificial Sequence
  MKO10106834_B_Paox
  gRNA
ccctctcactccaagacacc

SEQ ID NO: 106835 - DNA, 20 bp, Artificial Sequence
  MKO10106835_B_Paox
  gRNA
aggtcttcacatgtgctctg

SEQ ID NO: 106836 - DNA, 20 bp, Artificial Sequence
  MKO10106836_B_Papd4
  gRNA
attaccttatctttggcctc

SEQ ID NO: 106837 - DNA, 20 bp, Artificial Sequence
  MKO10106837_B_Papd4
  gRNA
tcaacatctccattatttcg

SEQ ID NO: 106838 - DNA, 20 bp, Artificial Sequence
  MKO10106838_B_Papd4
  gRNA
ataaatcgccatcactgctt

SEQ ID NO: 106839 - DNA, 20 bp, Artificial Sequence
  MKO10106839_B_Papd5
  gRNA
ctaacctggtaggtaaatac

SEQ ID NO: 106840 - DNA, 20 bp, Artificial Sequence
  MKO10106840_B_Papd5
  gRNA
gtacatgtctcccagacccg

SEQ ID NO: 106841 - DNA, 20 bp, Artificial Sequence
  MKO10106841_B_Papd5
  gRNA
cagcgactttgtgtttccga

SEQ ID NO: 106842 - DNA, 20 bp, Artificial Sequence
  MKO10106842_B_Papd7
  gRNA
cgcctgtgaagacctcattc

SEQ ID NO: 106843 - DNA, 20 bp, Artificial Sequence
  MKO10106843_B_Papd7
  gRNA
catcataaagctcacagatc

SEQ ID NO: 106844 - DNA, 20 bp, Artificial Sequence
  MKO10106844_B_Papd7
  gRNA
agtcgacatcagctttaaca

SEQ ID NO: 106845 - DNA, 20 bp, Artificial Sequence
  MKO10106845_B_Papln
  gRNA
tttcacaggctcgaaatgtg

SEQ ID NO: 106846 - DNA, 20 bp, Artificial Sequence
  MKO10106846_B_Papln
  gRNA
gcgcgcggggcccacgcagc

SEQ ID NO: 106847 - DNA, 20 bp, Artificial Sequence
  MKO10106847_B_Papln
  gRNA
tcgctctgcaggagagacgg

SEQ ID NO: 106848 - DNA, 20 bp, Artificial Sequence
  MKO10106848_B_Papl
  gRNA
gcagcttccgcagcgtcacg

SEQ ID NO: 106849 - DNA, 20 bp, Artificial Sequence
  MKO10106849_B_Papl
  gRNA
acattcaccgcgtgacgctg

SEQ ID NO: 106850 - DNA, 20 bp, Artificial Sequence
  MKO10106850_B_Papl
  gRNA
atgtgatcaaattccgctgg

SEQ ID NO: 106851 - DNA, 20 bp, Artificial Sequence
  MKO10106851_B_Papola
  gRNA
ctcgaatccattctttcacc

SEQ ID NO: 106852 - DNA, 20 bp, Artificial Sequence
  MKO10106852_B_Papola
  gRNA
tcgagaaatcagtgaaagca

SEQ ID NO: 106853 - DNA, 20 bp, Artificial Sequence
  MKO10106853_B_Papola
  gRNA
tttcaatttatcatagaatg

SEQ ID NO: 106854 - DNA, 20 bp, Artificial Sequence
  MKO10106854_B_Papolb
  gRNA
ctttcgtgtgtactcctaat

SEQ ID NO: 106855 - DNA, 20 bp, Artificial Sequence
  MKO10106855_B_Papolb
  gRNA
gagccggttgttgtgctcct

SEQ ID NO: 106856 - DNA, 20 bp, Artificial Sequence
  MKO10106856_B_Papolb
  gRNA
gacgatatgccgaactgctt

SEQ ID NO: 106857 - DNA, 20 bp, Artificial Sequence
  MKO10106857_B_Papolg
  gRNA
aggcttggagtacacaccaa

SEQ ID NO: 106858 - DNA, 20 bp, Artificial Sequence
  MKO10106858_B_Papolg
  gRNA
gaatctcccaccttctgttg

SEQ ID NO: 106859 - DNA, 20 bp, Artificial Sequence
  MKO10106859_B_Papolg
  gRNA
ttctgacatcagtgaaagta

SEQ ID NO: 106860 - DNA, 20 bp, Artificial Sequence
  MKO10106860_B_Pappa2
  gRNA
gtggccaagcatgccataat

SEQ ID NO: 106861 - DNA, 20 bp, Artificial Sequence
  MKO10106861_B_Pappa2
  gRNA
caccaacatcatgatccatg

SEQ ID NO: 106862 - DNA, 20 bp, Artificial Sequence
  MKO10106862_B_Pappa2
  gRNA
tcatacacaactccactgat

SEQ ID NO: 106863 - DNA, 20 bp, Artificial Sequence
  MKO10106863_B_Pappa
  gRNA
acctgtagctcttgcgcccc

SEQ ID NO: 106864 - DNA, 20 bp, Artificial Sequence
  MKO10106864_B_Pappa
  gRNA
ccattgtgtgccccacaacc

SEQ ID NO: 106865 - DNA, 20 bp, Artificial Sequence
  MKO10106865_B_Pappa
  gRNA
cacaccatgattcatgagat

SEQ ID NO: 106866 - DNA, 20 bp, Artificial Sequence
  MKO10106866_B_Papss1
  gRNA
ctttatatcgccttacacac

SEQ ID NO: 106867 - DNA, 20 bp, Artificial Sequence
  MKO10106867_B_Papss1
  gRNA
ctgcccgcgccttcttgtag

SEQ ID NO: 106868 - DNA, 20 bp, Artificial Sequence
  MKO10106868_B_Papss1
  gRNA
gcttccgtggttgcacagtt

SEQ ID NO: 106869 - DNA, 20 bp, Artificial Sequence
  MKO10106869_B_Papss2
  gRNA
gcctggccacctccgcgatc

SEQ ID NO: 106870 - DNA, 20 bp, Artificial Sequence
  MKO10106870_B_Papss2
  gRNA
cgaaaaatccacgaatcagc

SEQ ID NO: 106871 - DNA, 20 bp, Artificial Sequence
  MKO10106871_B_Papss2
  gRNA
agtaagcgactgtgtgcaac

SEQ ID NO: 106872 - DNA, 20 bp, Artificial Sequence
  MKO10106872_B_Paqr3
  gRNA
agtcagtgctcctattgtac

SEQ ID NO: 106873 - DNA, 20 bp, Artificial Sequence
  MKO10106873_B_Paqr3
  gRNA
tcacgtacatcacaattact

SEQ ID NO: 106874 - DNA, 20 bp, Artificial Sequence
  MKO10106874_B_Paqr3
  gRNA
atactgggctgctatgtctc

SEQ ID NO: 106875 - DNA, 20 bp, Artificial Sequence
  MKO10106875_B_Paqr4
  gRNA
tttctacctacacaacgagc

SEQ ID NO: 106876 - DNA, 20 bp, Artificial Sequence
  MKO10106876_B_Paqr4
  gRNA
ccttctagggctagccctgc

SEQ ID NO: 106877 - DNA, 20 bp, Artificial Sequence
  MKO10106877_B_Paqr4
  gRNA
gctcaccaagggtgttgaca

SEQ ID NO: 106878 - DNA, 20 bp, Artificial Sequence
  MKO10106878_B_Paqr5
  gRNA
gccacgagtagctgtcattc

SEQ ID NO: 106879 - DNA, 20 bp, Artificial Sequence
  MKO10106879_B_Paqr5
  gRNA
ctgcaagctactccgggtcc

SEQ ID NO: 106880 - DNA, 20 bp, Artificial Sequence
  MKO10106880_B_Paqr5
  gRNA
gcaagtgcgtccagatgttg

SEQ ID NO: 106881 - DNA, 20 bp, Artificial Sequence
  MKO10106881_B_Paqr6
  gRNA
cccataccacctaccgctgc

SEQ ID NO: 106882 - DNA, 20 bp, Artificial Sequence
  MKO10106882_B_Paqr6
  gRNA
tgaccgtctcattagtcatc

SEQ ID NO: 106883 - DNA, 20 bp, Artificial Sequence
  MKO10106883_B_Paqr6
  gRNA
ctatgccgcctactccatgc

SEQ ID NO: 106884 - DNA, 20 bp, Artificial Sequence
  MKO10106884_B_Paqr7
  gRNA
gaggctcgtatatgcccctc

SEQ ID NO: 106885 - DNA, 20 bp, Artificial Sequence
  MKO10106885_B_Paqr7
  gRNA
gcagcgcgtgagggtcttcc

SEQ ID NO: 106886 - DNA, 20 bp, Artificial Sequence
  MKO10106886_B_Paqr7
  gRNA
ccaactctcaggcataaccg

SEQ ID NO: 106887 - DNA, 20 bp, Artificial Sequence
  MKO10106887_B_Paqr8
  gRNA
agaagaagtatgcgctgacg

SEQ ID NO: 106888 - DNA, 20 bp, Artificial Sequence
  MKO10106888_B_Paqr8
  gRNA
atgccaagtatcgctaccga

SEQ ID NO: 106889 - DNA, 20 bp, Artificial Sequence
  MKO10106889_B_Paqr8
  gRNA
ccgacgtgccccagctcttt

SEQ ID NO: 106890 - DNA, 20 bp, Artificial Sequence
  MKO10106890_B_Paqr9
  gRNA
cgccggcgtgaagggaccgc

SEQ ID NO: 106891 - DNA, 20 bp, Artificial Sequence
  MKO10106891_B_Paqr9
  gRNA
gcttcatcctgtccggctac

SEQ ID NO: 106892 - DNA, 20 bp, Artificial Sequence
  MKO10106892_B_Paqr9
  gRNA
gccgctgtggtgctatgcgt

SEQ ID NO: 106893 - DNA, 20 bp, Artificial Sequence
  MKO10106893_B_Pard3b
  gRNA
tgaatcttcacccagtatcc

SEQ ID NO: 106894 - DNA, 20 bp, Artificial Sequence
  MKO10106894_B_Pard3b
  gRNA
aagatacctaccagaacaac

SEQ ID NO: 106895 - DNA, 20 bp, Artificial Sequence
  MKO10106895_B_Pard3b
  gRNA
gctttcactgcacagaccga

SEQ ID NO: 106896 - DNA, 20 bp, Artificial Sequence
  MKO10106896_B_Pard3
  gRNA
ccattgggtggctggcgctc

SEQ ID NO: 106897 - DNA, 20 bp, Artificial Sequence
  MKO10106897_B_Pard3
  gRNA
ccggtatcagcatgtccaac

SEQ ID NO: 106898 - DNA, 20 bp, Artificial Sequence
  MKO10106898_B_Pard3
  gRNA
ccggttggacatgctgatac

SEQ ID NO: 106899 - DNA, 20 bp, Artificial Sequence
  MKO10106899_B_Pard6a
  gRNA
tagtgcaaagcgtcggaact

SEQ ID NO: 106900 - DNA, 20 bp, Artificial Sequence
  MKO10106900_B_Pard6a
  gRNA
cagtcccgatagcatcgtcg

SEQ ID NO: 106901 - DNA, 20 bp, Artificial Sequence
  MKO10106901_B_Pard6a
  gRNA
ctgcgcgccggagtcctctg

SEQ ID NO: 106902 - DNA, 20 bp, Artificial Sequence
  MKO10106902_B_Pard6b
  gRNA
gatccccaatgtcgacgtgt

SEQ ID NO: 106903 - DNA, 20 bp, Artificial Sequence
  MKO10106903_B_Pard6b
  gRNA
agccgctgctcgccccgtgc

SEQ ID NO: 106904 - DNA, 20 bp, Artificial Sequence
  MKO10106904_B_Pard6b
  gRNA
tcagcatgaaccgcggccac

SEQ ID NO: 106905 - DNA, 20 bp, Artificial Sequence
  MKO10106905_B_Pard6g
  gRNA
cgctgcagtcgtagaagcgt

SEQ ID NO: 106906 - DNA, 20 bp, Artificial Sequence
  MKO10106906_B_Pard6g
  gRNA
gtgcacatcagcatagccga

SEQ ID NO: 106907 - DNA, 20 bp, Artificial Sequence
  MKO10106907_B_Pard6g
  gRNA
cttctacgactgcagcgctg

SEQ ID NO: 106908 - DNA, 20 bp, Artificial Sequence
  MKO10106908_B_Parg
  gRNA
aggttaggtgggatgtattt

SEQ ID NO: 106909 - DNA, 20 bp, Artificial Sequence
  MKO10106909_B_Parg
  gRNA
cttgtaccctgtggaagatg

SEQ ID NO: 106910 - DNA, 20 bp, Artificial Sequence
  MKO10106910_B_Parg
  gRNA
ccaagacagctgaatcagaa

SEQ ID NO: 106911 - DNA, 20 bp, Artificial Sequence
  MKO10106911_B_Park2
  gRNA
ctcccatatggagccctctg

SEQ ID NO: 106912 - DNA, 20 bp, Artificial Sequence
  MKO10106912_B_Park2
  gRNA
tttcaaagggcccatcttgc

SEQ ID NO: 106913 - DNA, 20 bp, Artificial Sequence
  MKO10106913_B_Park2
  gRNA
acgatgtcttaattccaaac

SEQ ID NO: 106914 - DNA, 20 bp, Artificial Sequence
  MKO10106914_B_Park7
  gRNA
gatttgtccagataccagtc

SEQ ID NO: 106915 - DNA, 20 bp, Artificial Sequence
  MKO10106915_B_Park7
  gRNA
tctctagtcgcctatggtga

SEQ ID NO: 106916 - DNA, 20 bp, Artificial Sequence
  MKO10106916_B_Park7
  gRNA
tagatcaaagtcactgttgc

SEQ ID NO: 106917 - DNA, 20 bp, Artificial Sequence
  MKO10106917_B_Parl
  gRNA
cacgagtgttcttataggat

SEQ ID NO: 106918 - DNA, 20 bp, Artificial Sequence
  MKO10106918_B_Parl
  gRNA
ctctccacaagcagaagacg

SEQ ID NO: 106919 - DNA, 20 bp, Artificial Sequence
  MKO10106919_B_Parl
  gRNA
gaacctcgaagatcagacac

SEQ ID NO: 106920 - DNA, 20 bp, Artificial Sequence
  MKO10106920_B_Parm1
  gRNA
ctgctggacgaccatgacta

SEQ ID NO: 106921 - DNA, 20 bp, Artificial Sequence
  MKO10106921_B_Parm1
  gRNA
gccctctgcatcttcaccgc

SEQ ID NO: 106922 - DNA, 20 bp, Artificial Sequence
  MKO10106922_B_Parm1
  gRNA
ccagagtaatatggtctgca

SEQ ID NO: 106923 - DNA, 20 bp, Artificial Sequence
  MKO10106923_B_Parn
  gRNA
tgaggacctactgaaaggct

SEQ ID NO: 106924 - DNA, 20 bp, Artificial Sequence
  MKO10106924_B_Parn
  gRNA
taacctacttggaatctgtg

SEQ ID NO: 106925 - DNA, 20 bp, Artificial Sequence
  MKO10106925_B_Parn
  gRNA
agcttctgatatctctcttc

SEQ ID NO: 106926 - DNA, 20 bp, Artificial Sequence
  MKO10106926_B_Parp10
  gRNA
ccagacccgagcagtacgtg

SEQ ID NO: 106927 - DNA, 20 bp, Artificial Sequence
  MKO10106927_B_Parp10
  gRNA
gttatccacgcccctttctg

SEQ ID NO: 106928 - DNA, 20 bp, Artificial Sequence
  MKO10106928_B_Parp10
  gRNA
cacgctgaacatgaagcacc

SEQ ID NO: 106929 - DNA, 20 bp, Artificial Sequence
  MKO10106929_B_Parp11
  gRNA
gaaccctgacgttccctacc

SEQ ID NO: 106930 - DNA, 20 bp, Artificial Sequence
  MKO10106930_B_Parp11
  gRNA
agaaaggagccctctttatt

SEQ ID NO: 106931 - DNA, 20 bp, Artificial Sequence
  MKO10106931_B_Parp11
  gRNA
gtctatcttgtagctgaatt

SEQ ID NO: 106932 - DNA, 20 bp, Artificial Sequence
  MKO10106932_B_Parp12
  gRNA
ggagtttaatgcactgcttt

SEQ ID NO: 106933 - DNA, 20 bp, Artificial Sequence
  MKO10106933_B_Parp12
  gRNA
gtcaccaggcactcctagcc

SEQ ID NO: 106934 - DNA, 20 bp, Artificial Sequence
  MKO10106934_B_Parp12
  gRNA
cttctcttacctgtctttac

SEQ ID NO: 106935 - DNA, 20 bp, Artificial Sequence
  MKO10106935_B_Parp14
  gRNA
accagtgccgaactctcttc

SEQ ID NO: 106936 - DNA, 20 bp, Artificial Sequence
  MKO10106936_B_Parp14
  gRNA
gcctgagaaagtatccgaga

SEQ ID NO: 106937 - DNA, 20 bp, Artificial Sequence
  MKO10106937_B_Parp14
  gRNA
tgaggcttcctcagggtctg

SEQ ID NO: 106938 - DNA, 20 bp, Artificial Sequence
  MKO10106938_B_Parp16
  gRNA
cacacacagctacgcagctc

SEQ ID NO: 106939 - DNA, 20 bp, Artificial Sequence
  MKO10106939_B_Parp16
  gRNA
tcctttcagcttgcggacac

SEQ ID NO: 106940 - DNA, 20 bp, Artificial Sequence
  MKO10106940_B_Parp16
  gRNA
ctgtagaagttccttcaagt

SEQ ID NO: 106941 - DNA, 20 bp, Artificial Sequence
  MKO10106941_B_Parp1
  gRNA
ccttagtcacccatgttcga

SEQ ID NO: 106942 - DNA, 20 bp, Artificial Sequence
  MKO10106942_B_Parp1
  gRNA
tgggactttcccatcgaaca

SEQ ID NO: 106943 - DNA, 20 bp, Artificial Sequence
  MKO10106943_B_Parp1
  gRNA
cggtcaatcatacccagctg

SEQ ID NO: 106944 - DNA, 20 bp, Artificial Sequence
  MKO10106944_B_Parp2
  gRNA
caggctcatgtgtattgtga

SEQ ID NO: 106945 - DNA, 20 bp, Artificial Sequence
  MKO10106945_B_Parp2
  gRNA
ctgcacactctgggtccaca

SEQ ID NO: 106946 - DNA, 20 bp, Artificial Sequence
  MKO10106946_B_Parp2
  gRNA
tgtgaagaccttgctgttaa

SEQ ID NO: 106947 - DNA, 20 bp, Artificial Sequence
  MKO10106947_B_Parp3
  gRNA
caactcccctgatgtgcttc

SEQ ID NO: 106948 - DNA, 20 bp, Artificial Sequence
  MKO10106948_B_Parp3
  gRNA
aggtgtacagcggccctgtg

SEQ ID NO: 106949 - DNA, 20 bp, Artificial Sequence
  MKO10106949_B_Parp3
  gRNA
gatgaaccacttcacctgcc

SEQ ID NO: 106950 - DNA, 20 bp, Artificial Sequence
  MKO10106950_B_Parp4
  gRNA
ttctctggggtgttgtctga

SEQ ID NO: 106951 - DNA, 20 bp, Artificial Sequence
  MKO10106951_B_Parp4
  gRNA
ttcagacaacaccccagaga

SEQ ID NO: 106952 - DNA, 20 bp, Artificial Sequence
  MKO10106952_B_Parp4
  gRNA
cagctctaccaccacagtct

SEQ ID NO: 106953 - DNA, 20 bp, Artificial Sequence
  MKO10106953_B_Parp6
  gRNA
gaacagaacctattgtgttg

SEQ ID NO: 106954 - DNA, 20 bp, Artificial Sequence
  MKO10106954_B_Parp6
  gRNA
ggagtcccacctgatggaca

SEQ ID NO: 106955 - DNA, 20 bp, Artificial Sequence
  MKO10106955_B_Parp6
  gRNA
aggacatcaaaggccagttc

SEQ ID NO: 106956 - DNA, 20 bp, Artificial Sequence
  MKO10106956_B_Parp8
  gRNA
tgttacctgttgctattcta

SEQ ID NO: 106957 - DNA, 20 bp, Artificial Sequence
  MKO10106957_B_Parp8
  gRNA
ctgggtagtcttctgagacg

SEQ ID NO: 106958 - DNA, 20 bp, Artificial Sequence
  MKO10106958_B_Parp8
  gRNA
tgcaaacaggcagtctttct

SEQ ID NO: 106959 - DNA, 20 bp, Artificial Sequence
  MKO10106959_B_Parp9
  gRNA
cagtcgattcttagacaagc

SEQ ID NO: 106960 - DNA, 20 bp, Artificial Sequence
  MKO10106960_B_Parp9
  gRNA
atcaatcctgtcccgagagc

SEQ ID NO: 106961 - DNA, 20 bp, Artificial Sequence
  MKO10106961_B_Parp9
  gRNA
ttgtacgtctccacatctac

SEQ ID NO: 106962 - DNA, 20 bp, Artificial Sequence
  MKO10106962_B_Parpbp
  gRNA
caatgtcctgataaatgacg

SEQ ID NO: 106963 - DNA, 20 bp, Artificial Sequence
  MKO10106963_B_Parpbp
  gRNA
ttctgtacaggtacgggtat

SEQ ID NO: 106964 - DNA, 20 bp, Artificial Sequence
  MKO10106964_B_Parpbp
  gRNA
atgcagccagaatgacgagc

SEQ ID NO: 106965 - DNA, 20 bp, Artificial Sequence
  MKO10106965_B_Pars2
  gRNA
gctccccttgttgttgtacc

SEQ ID NO: 106966 - DNA, 20 bp, Artificial Sequence
  MKO10106966_B_Pars2
  gRNA
tgcccaggaaacctacggcc

SEQ ID NO: 106967 - DNA, 20 bp, Artificial Sequence
  MKO10106967_B_Pars2
  gRNA
ttccgtagagagaacttcga

SEQ ID NO: 106968 - DNA, 20 bp, Artificial Sequence
  MKO10106968_B_Parva
  gRNA
tctttcagtatccgagttcc

SEQ ID NO: 106969 - DNA, 20 bp, Artificial Sequence
  MKO10106969_B_Parva
  gRNA
ctcgctgaagatctctatga

SEQ ID NO: 106970 - DNA, 20 bp, Artificial Sequence
  MKO10106970_B_Parva
  gRNA
tagccccatctccttcgagc

SEQ ID NO: 106971 - DNA, 20 bp, Artificial Sequence
  MKO10106971_B_Parvb
  gRNA
ggaggacctgtacgatggcc

SEQ ID NO: 106972 - DNA, 20 bp, Artificial Sequence
  MKO10106972_B_Parvb
  gRNA
tgccccaggtacttctggac

SEQ ID NO: 106973 - DNA, 20 bp, Artificial Sequence
  MKO10106973_B_Parvb
  gRNA
ctcaacagtgactgacttac

SEQ ID NO: 106974 - DNA, 20 bp, Artificial Sequence
  MKO10106974_B_Parvg
  gRNA
ggccgtcaaccagaacctac

SEQ ID NO: 106975 - DNA, 20 bp, Artificial Sequence
  MKO10106975_B_Parvg
  gRNA
cctcctttgggagctgcaac

SEQ ID NO: 106976 - DNA, 20 bp, Artificial Sequence
  MKO10106976_B_Parvg
  gRNA
tcgtggaagctcttcctccg

SEQ ID NO: 106977 - DNA, 20 bp, Artificial Sequence
  MKO10106977_B_Pask
  gRNA
cctccacatgttcctcgctg

SEQ ID NO: 106978 - DNA, 20 bp, Artificial Sequence
  MKO10106978_B_Pask
  gRNA
tgccgaacaccactgcagcg

SEQ ID NO: 106979 - DNA, 20 bp, Artificial Sequence
  MKO10106979_B_Pask
  gRNA
cttgtgctgtgtagtggttc

SEQ ID NO: 106980 - DNA, 20 bp, Artificial Sequence
  MKO10106980_B_Pate2
  gRNA
gtcatgtatgaccaactgtg

SEQ ID NO: 106981 - DNA, 20 bp, Artificial Sequence
  MKO10106981_B_Pate2
  gRNA
tctgtctgttctgccaatat

SEQ ID NO: 106982 - DNA, 20 bp, Artificial Sequence
  MKO10106982_B_Pate2
  gRNA
gggttgcaggatgtttgtgc

SEQ ID NO: 106983 - DNA, 20 bp, Artificial Sequence
  MKO10106983_B_Pate4
  gRNA
accctccacaaaacagagaa

SEQ ID NO: 106984 - DNA, 20 bp, Artificial Sequence
  MKO10106984_B_Pate4
  gRNA
cttaccaacaaagtgtgata

SEQ ID NO: 106985 - DNA, 20 bp, Artificial Sequence
  MKO10106985_B_Patl1
  gRNA
accaactgcacctgacccaa

SEQ ID NO: 106986 - DNA, 20 bp, Artificial Sequence
  MKO10106986_B_Patl1
  gRNA
tttaatacctgagcaagtag

SEQ ID NO: 106987 - DNA, 20 bp, Artificial Sequence
  MKO10106987_B_Patl1
  gRNA
tagaagatccagctatcatg

SEQ ID NO: 106988 - DNA, 20 bp, Artificial Sequence
  MKO10106988_B_Patl2
  gRNA
tccctacctgctgtggtact

SEQ ID NO: 106989 - DNA, 20 bp, Artificial Sequence
  MKO10106989_B_Patl2
  gRNA
ggaggcggagtccaacagca

SEQ ID NO: 106990 - DNA, 20 bp, Artificial Sequence
  MKO10106990_B_Patl2
  gRNA
tcacctgccacataaaatgc

SEQ ID NO: 106991 - DNA, 20 bp, Artificial Sequence
  MKO10106991_B_Patz1
  gRNA
gtacttgcgggccgcataca

SEQ ID NO: 106992 - DNA, 20 bp, Artificial Sequence
  MKO10106992_B_Patz1
  gRNA
tgagcgacctcacaagtgtc

SEQ ID NO: 106993 - DNA, 20 bp, Artificial Sequence
  MKO10106993_B_Patz1
  gRNA
tccaggccagatcacttgaa

SEQ ID NO: 106994 - DNA, 20 bp, Artificial Sequence
  MKO10106994_B_Pawr
  gRNA
ctacttgaggagaaactagc

SEQ ID NO: 106995 - DNA, 20 bp, Artificial Sequence
  MKO10106995_B_Pawr
  gRNA
ggagggtcgcagcttcattc

SEQ ID NO: 106996 - DNA, 20 bp, Artificial Sequence
  MKO10106996_B_Pawr
  gRNA
gcatcagcctcacaagtcga

SEQ ID NO: 106997 - DNA, 20 bp, Artificial Sequence
  MKO10106997_B_Pax1
  gRNA
taagctaccgagtgcatccg

SEQ ID NO: 106998 - DNA, 20 bp, Artificial Sequence
  MKO10106998_B_Pax1
  gRNA
acctatctcccggcccgccc

SEQ ID NO: 106999 - DNA, 20 bp, Artificial Sequence
  MKO10106999_B_Pax1
  gRNA
ctgggcgggtgtgaaccgtg

SEQ ID NO: 107000 - DNA, 20 bp, Artificial Sequence
  MKO10107000_B_Pax2
  gRNA
ggcccctacccgacgtggtg

SEQ ID NO: 107001 - DNA, 20 bp, Artificial Sequence
  MKO10107001_B_Pax2
  gRNA
gcagcctttccacccaacgc

SEQ ID NO: 107002 - DNA, 20 bp, Artificial Sequence
  MKO10107002_B_Pax2
  gRNA
tcacaaacacccccccgagc

SEQ ID NO: 107003 - DNA, 20 bp, Artificial Sequence
  MKO10107003_B_Pax3
  gRNA
tccagcgggaagccgctgcg

SEQ ID NO: 107004 - DNA, 20 bp, Artificial Sequence
  MKO10107004_B_Pax3
  gRNA
gcaggtgacaacgcctgacg

SEQ ID NO: 107005 - DNA, 20 bp, Artificial Sequence
  MKO10107005_B_Pax3
  gRNA
gatcggaacactgtgccctc

SEQ ID NO: 107006 - DNA, 20 bp, Artificial Sequence
  MKO10107006_B_Pax4
  gRNA
cctctatcaatcgagtactt

SEQ ID NO: 107007 - DNA, 20 bp, Artificial Sequence
  MKO10107007_B_Pax4
  gRNA
gaatggccggccccttcctc

SEQ ID NO: 107008 - DNA, 20 bp, Artificial Sequence
  MKO10107008_B_Pax4
  gRNA
tagctgcacaatctgctgcc

SEQ ID NO: 107009 - DNA, 20 bp, Artificial Sequence
  MKO10107009_B_Pax5
  gRNA
aagctgggaccggctgattg

SEQ ID NO: 107010 - DNA, 20 bp, Artificial Sequence
  MKO10107010_B_Pax5
  gRNA
ttggatcctccaatcacccc

SEQ ID NO: 107011 - DNA, 20 bp, Artificial Sequence
  MKO10107011_B_Pax5
  gRNA
gggcaagttccactatcctt

SEQ ID NO: 107012 - DNA, 20 bp, Artificial Sequence
  MKO10107012_B_Pax6
  gRNA
tatcccgggacttcagtacc

SEQ ID NO: 107013 - DNA, 20 bp, Artificial Sequence
  MKO10107013_B_Pax6
  gRNA
ctagctctacgatcttctgc

SEQ ID NO: 107014 - DNA, 20 bp, Artificial Sequence
  MKO10107014_B_Pax6
  gRNA
cgacatttcccgaattctgc

SEQ ID NO: 107015 - DNA, 20 bp, Artificial Sequence
  MKO10107015_B_Pax7
  gRNA
caagattctgtgccgatatc

SEQ ID NO: 107016 - DNA, 20 bp, Artificial Sequence
  MKO10107016_B_Pax7
  gRNA
cggtcactgcgaccgaagca

SEQ ID NO: 107017 - DNA, 20 bp, Artificial Sequence
  MKO10107017_B_Pax7
  gRNA
caaggccgggtcaatcagct

SEQ ID NO: 107018 - DNA, 20 bp, Artificial Sequence
  MKO10107018_B_Pax8
  gRNA
tagagcccaaggaatccgac

SEQ ID NO: 107019 - DNA, 20 bp, Artificial Sequence
  MKO10107019_B_Pax8
  gRNA
ttggagccccctatcactcc

SEQ ID NO: 107020 - DNA, 20 bp, Artificial Sequence
  MKO10107020_B_Pax8
  gRNA
tggagtaggtactacgagac

SEQ ID NO: 107021 - DNA, 20 bp, Artificial Sequence
  MKO10107021_B_Pax9
  gRNA
ctgtgacattcccgcatcgc

SEQ ID NO: 107022 - DNA, 20 bp, Artificial Sequence
  MKO10107022_B_Pax9
  gRNA
tccaatccattcactgcgtg

SEQ ID NO: 107023 - DNA, 20 bp, Artificial Sequence
  MKO10107023_B_Pax9
  gRNA
tcccttgaaagccagcgatg

SEQ ID NO: 107024 - DNA, 20 bp, Artificial Sequence
  MKO10107024_B_Paxbp1
  gRNA
cacctgggcggagcacgttc

SEQ ID NO: 107025 - DNA, 20 bp, Artificial Sequence
  MKO10107025_B_Paxbp1
  gRNA
agcattggagaaggcgcccc

SEQ ID NO: 107026 - DNA, 20 bp, Artificial Sequence
  MKO10107026_B_Paxbp1
  gRNA
aagacgaggagctcagccgc

SEQ ID NO: 107027 - DNA, 20 bp, Artificial Sequence
  MKO10107027_B_Paxip1
  gRNA
ggcattgtaggagacttcct

SEQ ID NO: 107028 - DNA, 20 bp, Artificial Sequence
  MKO10107028_B_Paxip1
  gRNA
caggagagcgccacattgca

SEQ ID NO: 107029 - DNA, 20 bp, Artificial Sequence
  MKO10107029_B_Paxip1
  gRNA
agaggtgggagaagcccgtg

SEQ ID NO: 107030 - DNA, 20 bp, Artificial Sequence
  MKO10107030_B_Pbdc1
  gRNA
actgcgactggattgttccc

SEQ ID NO: 107031 - DNA, 20 bp, Artificial Sequence
  MKO10107031_B_Pbdc1
  gRNA
tttacagcctgatattgaaa

SEQ ID NO: 107032 - DNA, 20 bp, Artificial Sequence
  MKO10107032_B_Pbdc1
  gRNA
gtagatttggtcatctactt

SEQ ID NO: 107033 - DNA, 20 bp, Artificial Sequence
  MKO10107033_B_Pbk
  gRNA
cacagttacctttagccctc

SEQ ID NO: 107034 - DNA, 20 bp, Artificial Sequence
  MKO10107034_B_Pbk
  gRNA
cacctccatactccatagca

SEQ ID NO: 107035 - DNA, 20 bp, Artificial Sequence
  MKO10107035_B_Pbk
  gRNA
tcttcaaatgttgtaattaa

SEQ ID NO: 107036 - DNA, 20 bp, Artificial Sequence
  MKO10107036_B_Pbld1
  gRNA
gtgagtgaagtccccttgtg

SEQ ID NO: 107037 - DNA, 20 bp, Artificial Sequence
  MKO10107037_B_Pbld1
  gRNA
gagctaacctggggaaaggt

SEQ ID NO: 107038 - DNA, 20 bp, Artificial Sequence
  MKO10107038_B_Pbld1
  gRNA
tgtctacccaacctttcccc

SEQ ID NO: 107039 - DNA, 20 bp, Artificial Sequence
  MKO10107039_B_Pbld2
  gRNA
ttgcagtttgcggacaaaag

SEQ ID NO: 107040 - DNA, 20 bp, Artificial Sequence
  MKO10107040_B_Pbld2
  gRNA
gagctaacctgggggaaggt

SEQ ID NO: 107041 - DNA, 20 bp, Artificial Sequence
  MKO10107041_B_Pbld2
  gRNA
tgtctacccaaccttccccc

SEQ ID NO: 107042 - DNA, 20 bp, Artificial Sequence
  MKO10107042_B_Pbp2
  gRNA
gtaggaagaaacccgtgtac

SEQ ID NO: 107043 - DNA, 20 bp, Artificial Sequence
  MKO10107043_B_Pbp2
  gRNA
acgaacccatcctcaccaac

SEQ ID NO: 107044 - DNA, 20 bp, Artificial Sequence
  MKO10107044_B_Pbp2
  gRNA
gtacacgggtttcttcctac

SEQ ID NO: 107045 - DNA, 20 bp, Artificial Sequence
  MKO10107045_B_Pbrm1
  gRNA
taacaccatccgagactata

SEQ ID NO: 107046 - DNA, 20 bp, Artificial Sequence
  MKO10107046_B_Pbrm1
  gRNA
ttacaagcagctttatactc

SEQ ID NO: 107047 - DNA, 20 bp, Artificial Sequence
  MKO10107047_B_Pbrm1
  gRNA
tcaaccagactattatgaag

SEQ ID NO: 107048 - DNA, 20 bp, Artificial Sequence
  MKO10107048_B_Pbsn
  gRNA
ttacttagctgccagtacca

SEQ ID NO: 107049 - DNA, 20 bp, Artificial Sequence
  MKO10107049_B_Pbsn
  gRNA
tgccaactgtataaagtcat

SEQ ID NO: 107050 - DNA, 20 bp, Artificial Sequence
  MKO10107050_B_Pbsn
  gRNA
ttcctatgactttatacagt

SEQ ID NO: 107051 - DNA, 20 bp, Artificial Sequence
  MKO10107051_B_Pbx1
  gRNA
gtaggactcacctcgcatcc

SEQ ID NO: 107052 - DNA, 20 bp, Artificial Sequence
  MKO10107052_B_Pbx1
  gRNA
atgcattcccacgctggggt

SEQ ID NO: 107053 - DNA, 20 bp, Artificial Sequence
  MKO10107053_B_Pbx1
  gRNA
tgttgtccagtcgcatgagc

SEQ ID NO: 107054 - DNA, 20 bp, Artificial Sequence
  MKO10107054_B_Pbx2
  gRNA
ctcacgtcatgaacctgctg

SEQ ID NO: 107055 - DNA, 20 bp, Artificial Sequence
  MKO10107055_B_Pbx2
  gRNA
gggagtagaaatactcattc

SEQ ID NO: 107056 - DNA, 20 bp, Artificial Sequence
  MKO10107056_B_Pbx2
  gRNA
ttctctgcagacggaaacgc

SEQ ID NO: 107057 - DNA, 20 bp, Artificial Sequence
  MKO10107057_B_Pbx3
  gRNA
cgacccccagctaatgagac

SEQ ID NO: 107058 - DNA, 20 bp, Artificial Sequence
  MKO10107058_B_Pbx3
  gRNA
tttccccgaaagagatcgaa

SEQ ID NO: 107059 - DNA, 20 bp, Artificial Sequence
  MKO10107059_B_Pbx3
  gRNA
gacgcgttctactctgttct

SEQ ID NO: 107060 - DNA, 20 bp, Artificial Sequence
  MKO10107060_B_Pbx4
  gRNA
gcattgagcactcagactac

SEQ ID NO: 107061 - DNA, 20 bp, Artificial Sequence
  MKO10107061_B_Pbx4
  gRNA
agagagcagacttcatccga

SEQ ID NO: 107062 - DNA, 20 bp, Artificial Sequence
  MKO10107062_B_Pbx4
  gRNA
atattcattcagcacgtctg

SEQ ID NO: 107063 - DNA, 20 bp, Artificial Sequence
  MKO10107063_B_Pbxip1
  gRNA
ggcctccgtcccatgaccat

SEQ ID NO: 107064 - DNA, 20 bp, Artificial Sequence
  MKO10107064_B_Pbxip1
  gRNA
cgggactcctccaaggcaga

SEQ ID NO: 107065 - DNA, 20 bp, Artificial Sequence
  MKO10107065_B_Pbxip1
  gRNA
agaatctgagggagcctccc

SEQ ID NO: 107066 - DNA, 20 bp, Artificial Sequence
  MKO10107066_B_Pcbd1
  gRNA
gttgtacacgttaaaccact

SEQ ID NO: 107067 - DNA, 20 bp, Artificial Sequence
  MKO10107067_B_Pcbd1
  gRNA
cctaggccggcaaggcacac

SEQ ID NO: 107068 - DNA, 20 bp, Artificial Sequence
  MKO10107068_B_Pcbd1
  gRNA
gctcagcctgtgtgccttgc

SEQ ID NO: 107069 - DNA, 20 bp, Artificial Sequence
  MKO10107069_B_Pcbd2
  gRNA
cgccacagtcatgcgaggtg

SEQ ID NO: 107070 - DNA, 20 bp, Artificial Sequence
  MKO10107070_B_Pcbd2
  gRNA
ggcggtgggagcgcgtagcg

SEQ ID NO: 107071 - DNA, 20 bp, Artificial Sequence
  MKO10107071_B_Pcbd2
  gRNA
gagagggaccaacttattcc

SEQ ID NO: 107072 - DNA, 20 bp, Artificial Sequence
  MKO10107072_B_Pcbp1
  gRNA
ggcgatagtgatagcccgct

SEQ ID NO: 107073 - DNA, 20 bp, Artificial Sequence
  MKO10107073_B_Pcbp1
  gRNA
ctagacgcctactcgattca

SEQ ID NO: 107074 - DNA, 20 bp, Artificial Sequence
  MKO10107074_B_Pcbp1
  gRNA
cggcgcgcggatcaacatct

SEQ ID NO: 107075 - DNA, 20 bp, Artificial Sequence
  MKO10107075_B_Pcbp2
  gRNA
caggaagttggcagtatcat

SEQ ID NO: 107076 - DNA, 20 bp, Artificial Sequence
  MKO10107076_B_Pcbp2
  gRNA
taatccaccttcaatcacac

SEQ ID NO: 107077 - DNA, 20 bp, Artificial Sequence
  MKO10107077_B_Pcbp2
  gRNA
atggacaccggtgtgattga

SEQ ID NO: 107078 - DNA, 20 bp, Artificial Sequence
  MKO10107078_B_Pcbp3
  gRNA
ggatggtcagggttacgttc

SEQ ID NO: 107079 - DNA, 20 bp, Artificial Sequence
  MKO10107079_B_Pcbp3
  gRNA
agtaaagaagatgcgtgaag

SEQ ID NO: 107080 - DNA, 20 bp, Artificial Sequence
  MKO10107080_B_Pcbp3
  gRNA
caggaagttggaagcatcat

SEQ ID NO: 107081 - DNA, 20 bp, Artificial Sequence
  MKO10107081_B_Pcbp4
  gRNA
tcccaatcagtgatccacac

SEQ ID NO: 107082 - DNA, 20 bp, Artificial Sequence
  MKO10107082_B_Pcbp4
  gRNA
ctttgtgctgctcctgcaaa

SEQ ID NO: 107083 - DNA, 20 bp, Artificial Sequence
  MKO10107083_B_Pcbp4
  gRNA
caggaagtgggcagcatcat

SEQ ID NO: 107084 - DNA, 20 bp, Artificial Sequence
  MKO10107084_B_Pcca
  gRNA
tctttaggttcacgtgaaaa

SEQ ID NO: 107085 - DNA, 20 bp, Artificial Sequence
  MKO10107085_B_Pcca
  gRNA
ggcatcaacatcactgtgaa

SEQ ID NO: 107086 - DNA, 20 bp, Artificial Sequence
  MKO10107086_B_Pcca
  gRNA
aaaattctcattgctaacag

SEQ ID NO: 107087 - DNA, 20 bp, Artificial Sequence
  MKO10107087_B_Pccb
  gRNA
catggagagcgacatgtttg

SEQ ID NO: 107088 - DNA, 20 bp, Artificial Sequence
  MKO10107088_B_Pccb
  gRNA
gatgtccgcgtagccagcca

SEQ ID NO: 107089 - DNA, 20 bp, Artificial Sequence
  MKO10107089_B_Pccb
  gRNA
atagtttcccggagatagtg

SEQ ID NO: 107090 - DNA, 20 bp, Artificial Sequence
  MKO10107090_B_Pcdh10
  gRNA
tgggccactctgaccgatgc

SEQ ID NO: 107091 - DNA, 20 bp, Artificial Sequence
  MKO10107091_B_Pcdh10
  gRNA
gcccagtgctttacattcct

SEQ ID NO: 107092 - DNA, 20 bp, Artificial Sequence
  MKO10107092_B_Pcdh10
  gRNA
gatagctgagctctgctcgc

SEQ ID NO: 107093 - DNA, 20 bp, Artificial Sequence
  MKO10107093_B_Pcdh11x
  gRNA
ctttcaacaagtcgcctatc

SEQ ID NO: 107094 - DNA, 20 bp, Artificial Sequence
  MKO10107094_B_Pcdh11x
  gRNA
aaacagtctcttagcgatgt

SEQ ID NO: 107095 - DNA, 20 bp, Artificial Sequence
  MKO10107095_B_Pcdh11x
  gRNA
ctggactcatccacatccac

SEQ ID NO: 107096 - DNA, 20 bp, Artificial Sequence
  MKO10107096_B_Pcdh12
  gRNA
atagcttctcccgatccagc

SEQ ID NO: 107097 - DNA, 20 bp, Artificial Sequence
  MKO10107097_B_Pcdh12
  gRNA
tacctgtattagggtccaac

SEQ ID NO: 107098 - DNA, 20 bp, Artificial Sequence
  MKO10107098_B_Pcdh12
  gRNA
ggctcgggggcccttcttcc

SEQ ID NO: 107099 - DNA, 20 bp, Artificial Sequence
  MKO10107099_B_Pcdh15
  gRNA
agctggggccagtatgacga

SEQ ID NO: 107100 - DNA, 20 bp, Artificial Sequence
  MKO10107100_B_Pcdh15
  gRNA
tggacttaccatcgtcatac

SEQ ID NO: 107101 - DNA, 20 bp, Artificial Sequence
  MKO10107101_B_Pcdh15
  gRNA
attgatgaagagagtcgaaa

SEQ ID NO: 107102 - DNA, 20 bp, Artificial Sequence
  MKO10107102_B_Pcdh17
  gRNA
cgtcactcaccttgttcgag

SEQ ID NO: 107103 - DNA, 20 bp, Artificial Sequence
  MKO10107103_B_Pcdh17
  gRNA
gcacggggacagcgatcagg

SEQ ID NO: 107104 - DNA, 20 bp, Artificial Sequence
  MKO10107104_B_Pcdh17
  gRNA
ctctcggcccagatccctgt

SEQ ID NO: 107105 - DNA, 20 bp, Artificial Sequence
  MKO10107105_B_Pcdh18
  gRNA
gaatgacgggtctcgagaat

SEQ ID NO: 107106 - DNA, 20 bp, Artificial Sequence
  MKO10107106_B_Pcdh18
  gRNA
gtgcttaaccatctcagcga

SEQ ID NO: 107107 - DNA, 20 bp, Artificial Sequence
  MKO10107107_B_Pcdh18
  gRNA
ctggaattctcccgtccgtg

SEQ ID NO: 107108 - DNA, 20 bp, Artificial Sequence
  MKO10107108_B_Pcdh19
  gRNA
acaccattgatgatcaggtc

SEQ ID NO: 107109 - DNA, 20 bp, Artificial Sequence
  MKO10107109_B_Pcdh19
  gRNA
atgacatccgccttgtacct

SEQ ID NO: 107110 - DNA, 20 bp, Artificial Sequence
  MKO10107110_B_Pcdh19
  gRNA
tcacagcagtatcgcagtac

SEQ ID NO: 107111 - DNA, 20 bp, Artificial Sequence
  MKO10107111_B_Pcdh1
  gRNA
cgccattggggccggcgtca

SEQ ID NO: 107112 - DNA, 20 bp, Artificial Sequence
  MKO10107112_B_Pcdh1
  gRNA
gccccgaccatcgagatccg

SEQ ID NO: 107113 - DNA, 20 bp, Artificial Sequence
  MKO10107113_B_Pcdh1
  gRNA
cgtggcaagccccctcgcta

SEQ ID NO: 107114 - DNA, 20 bp, Artificial Sequence
  MKO10107114_B_Pcdh20
  gRNA
tcccagggaatgcgcggccg

SEQ ID NO: 107115 - DNA, 20 bp, Artificial Sequence
  MKO10107115_B_Pcdh20
  gRNA
gcaagctgcgcgcgttccct

SEQ ID NO: 107116 - DNA, 20 bp, Artificial Sequence
  MKO10107116_B_Pcdh20
  gRNA
ctgcccgccggagtgctcat

SEQ ID NO: 107117 - DNA, 20 bp, Artificial Sequence
  MKO10107117_B_Pcdh7
  gRNA
gaaaacgtcactctacgaaa

SEQ ID NO: 107118 - DNA, 20 bp, Artificial Sequence
  MKO10107118_B_Pcdh7
  gRNA
cagccaaacaccgtaatgta

SEQ ID NO: 107119 - DNA, 20 bp, Artificial Sequence
  MKO10107119_B_Pcdh7
  gRNA
caactatgagaggaccacgc

SEQ ID NO: 107120 - DNA, 20 bp, Artificial Sequence
  MKO10107120_B_Pcdh8
  gRNA
cagatacgtgtccccgaaga

SEQ ID NO: 107121 - DNA, 20 bp, Artificial Sequence
  MKO10107121_B_Pcdh8
  gRNA
ctgcgccccctgttgcagtc

SEQ ID NO: 107122 - DNA, 20 bp, Artificial Sequence
  MKO10107122_B_Pcdh8
  gRNA
cagccttacggtgcctctcc

SEQ ID NO: 107123 - DNA, 20 bp, Artificial Sequence
  MKO10107123_B_Pcdh9
  gRNA
acaggacgaattctacgacc

SEQ ID NO: 107124 - DNA, 20 bp, Artificial Sequence
  MKO10107124_B_Pcdh9
  gRNA
tctgggagaccacgagccgg

SEQ ID NO: 107125 - DNA, 20 bp, Artificial Sequence
  MKO10107125_B_Pcdh9
  gRNA
aggcacgattgagagtccta

SEQ ID NO: 107126 - DNA, 20 bp, Artificial Sequence
  MKO10107126_B_Pcdha10
  gRNA
gtgtcccctccggtgggcgc

SEQ ID NO: 107127 - DNA, 20 bp, Artificial Sequence
  MKO10107127_B_Pcdha10
  gRNA
gttagcaggctcctgccgga

SEQ ID NO: 107128 - DNA, 20 bp, Artificial Sequence
  MKO10107128_B_Pcdha10
  gRNA
agagtagcgccagtcagggt

SEQ ID NO: 107129 - DNA, 20 bp, Artificial Sequence
  MKO10107129_B_Pcdha11
  gRNA
gtgtcccctccggtgggcgc

SEQ ID NO: 107130 - DNA, 20 bp, Artificial Sequence
  MKO10107130_B_Pcdha11
  gRNA
gttagcaggctcctgccgga

SEQ ID NO: 107131 - DNA, 20 bp, Artificial Sequence
  MKO10107131_B_Pcdha11
  gRNA
agagtagcgccagtcagggt

SEQ ID NO: 107132 - DNA, 20 bp, Artificial Sequence
  MKO10107132_B_Pcdha12
  gRNA
gtgtcccctccggtgggcgc

SEQ ID NO: 107133 - DNA, 20 bp, Artificial Sequence
  MKO10107133_B_Pcdha12
  gRNA
gttagcaggctcctgccgga

SEQ ID NO: 107134 - DNA, 20 bp, Artificial Sequence
  MKO10107134_B_Pcdha12
  gRNA
agagtagcgccagtcagggt

SEQ ID NO: 107135 - DNA, 20 bp, Artificial Sequence
  MKO10107135_B_Pcdha1
  gRNA
gtgtcccctccggtgggcgc

SEQ ID NO: 107136 - DNA, 20 bp, Artificial Sequence
  MKO10107136_B_Pcdha1
  gRNA
gttagcaggctcctgccgga

SEQ ID NO: 107137 - DNA, 20 bp, Artificial Sequence
  MKO10107137_B_Pcdha1
  gRNA
agagtagcgccagtcagggt

SEQ ID NO: 107138 - DNA, 20 bp, Artificial Sequence
  MKO10107138_B_Pcdha2
  gRNA
gtgtcccctccggtgggcgc

SEQ ID NO: 107139 - DNA, 20 bp, Artificial Sequence
  MKO10107139_B_Pcdha2
  gRNA
gttagcaggctcctgccgga

SEQ ID NO: 107140 - DNA, 20 bp, Artificial Sequence
  MKO10107140_B_Pcdha2
  gRNA
agagtagcgccagtcagggt

SEQ ID NO: 107141 - DNA, 20 bp, Artificial Sequence
  MKO10107141_B_Pcdha3
  gRNA
tcctttctcccccgccgcaa

SEQ ID NO: 107142 - DNA, 20 bp, Artificial Sequence
  MKO10107142_B_Pcdha3
  gRNA
gaggctggcattctacgggc

SEQ ID NO: 107143 - DNA, 20 bp, Artificial Sequence
  MKO10107143_B_Pcdha3
  gRNA
agagtagcgccagtcagggt

SEQ ID NO: 107144 - DNA, 20 bp, Artificial Sequence
  MKO10107144_B_Pcdha4-g
  gRNA
cgccagaacgtgtacatccc

SEQ ID NO: 107145 - DNA, 20 bp, Artificial Sequence
  MKO10107145_B_Pcdha4-g
  gRNA
agtcacctacccgctcgtgc

SEQ ID NO: 107146 - DNA, 20 bp, Artificial Sequence
  MKO10107146_B_Pcdha4-g
  gRNA
gcagcatctctgtatcaaac

SEQ ID NO: 107147 - DNA, 20 bp, Artificial Sequence
  MKO10107147_B_Pcdha4
  gRNA
gtgtcccctccggtgggcgc

SEQ ID NO: 107148 - DNA, 20 bp, Artificial Sequence
  MKO10107148_B_Pcdha4
  gRNA
gttagcaggctcctgccgga

SEQ ID NO: 107149 - DNA, 20 bp, Artificial Sequence
  MKO10107149_B_Pcdha4
  gRNA
agagtagcgccagtcagggt

SEQ ID NO: 107150 - DNA, 20 bp, Artificial Sequence
  MKO10107150_B_Pcdha5
  gRNA
tcctttctcccccgccgcaa

SEQ ID NO: 107151 - DNA, 20 bp, Artificial Sequence
  MKO10107151_B_Pcdha5
  gRNA
gaggctggcattctacgggc

SEQ ID NO: 107152 - DNA, 20 bp, Artificial Sequence
  MKO10107152_B_Pcdha5
  gRNA
agagtagcgccagtcagggt

SEQ ID NO: 107153 - DNA, 20 bp, Artificial Sequence
  MKO10107153_B_Pcdha6
  gRNA
tcctttctcccccgccgcaa

SEQ ID NO: 107154 - DNA, 20 bp, Artificial Sequence
  MKO10107154_B_Pcdha6
  gRNA
gaggctggcattctacgggc

SEQ ID NO: 107155 - DNA, 20 bp, Artificial Sequence
  MKO10107155_B_Pcdha6
  gRNA
agagtagcgccagtcagggt

SEQ ID NO: 107156 - DNA, 20 bp, Artificial Sequence
  MKO10107156_B_Pcdha7
  gRNA
gaggctggcattctacgggc

SEQ ID NO: 107157 - DNA, 20 bp, Artificial Sequence
  MKO10107157_B_Pcdha7
  gRNA
cgacaatgcacctaccctgc

SEQ ID NO: 107158 - DNA, 20 bp, Artificial Sequence
  MKO10107158_B_Pcdha7
  gRNA
agagtagcgccagtcagggt

SEQ ID NO: 107159 - DNA, 20 bp, Artificial Sequence
  MKO10107159_B_Pcdha8
  gRNA
tcctttctcccccgccgcaa

SEQ ID NO: 107160 - DNA, 20 bp, Artificial Sequence
  MKO10107160_B_Pcdha8
  gRNA
gaggctggcattctacgggc

SEQ ID NO: 107161 - DNA, 20 bp, Artificial Sequence
  MKO10107161_B_Pcdha8
  gRNA
agagtagcgccagtcagggt

SEQ ID NO: 107162 - DNA, 20 bp, Artificial Sequence
  MKO10107162_B_Pcdha9
  gRNA
gtgtcccctccggtgggcgc

SEQ ID NO: 107163 - DNA, 20 bp, Artificial Sequence
  MKO10107163_B_Pcdha9
  gRNA
gttagcaggctcctgccgga

SEQ ID NO: 107164 - DNA, 20 bp, Artificial Sequence
  MKO10107164_B_Pcdha9
  gRNA
agagtagcgccagtcagggt

SEQ ID NO: 107165 - DNA, 20 bp, Artificial Sequence
  MKO10107165_B_Pcdhac1
  gRNA
gtgtcccctccggtgggcgc

SEQ ID NO: 107166 - DNA, 20 bp, Artificial Sequence
  MKO10107166_B_Pcdhac1
  gRNA
gttagcaggctcctgccgga

SEQ ID NO: 107167 - DNA, 20 bp, Artificial Sequence
  MKO10107167_B_Pcdhac1
  gRNA
agagtagcgccagtcagggt

SEQ ID NO: 107168 - DNA, 20 bp, Artificial Sequence
  MKO10107168_B_Pcdhac2
  gRNA
gtgtcccctccggtgggcgc

SEQ ID NO: 107169 - DNA, 20 bp, Artificial Sequence
  MKO10107169_B_Pcdhac2
  gRNA
gttagcaggctcctgccgga

SEQ ID NO: 107170 - DNA, 20 bp, Artificial Sequence
  MKO10107170_B_Pcdhac2
  gRNA
agagtagcgccagtcagggt

SEQ ID NO: 107171 - DNA, 20 bp, Artificial Sequence
  MKO10107171_B_Pcdhb10
  gRNA
gaactcttctgcgccctgta

SEQ ID NO: 107172 - DNA, 20 bp, Artificial Sequence
  MKO10107172_B_Pcdhb10
  gRNA
tgacgctctcacgctgtact

SEQ ID NO: 107173 - DNA, 20 bp, Artificial Sequence
  MKO10107173_B_Pcdhb10
  gRNA
ttcagaggaaacgttgtccc

SEQ ID NO: 107174 - DNA, 20 bp, Artificial Sequence
  MKO10107174_B_Pcdhb11
  gRNA
atctccattaaccccgacaa

SEQ ID NO: 107175 - DNA, 20 bp, Artificial Sequence
  MKO10107175_B_Pcdhb11
  gRNA
tgtcacacttcaagtgctac

SEQ ID NO: 107176 - DNA, 20 bp, Artificial Sequence
  MKO10107176_B_Pcdhb11
  gRNA
aatccgtcttagcaaagagc

SEQ ID NO: 107177 - DNA, 20 bp, Artificial Sequence
  MKO10107177_B_Pcdhb12
  gRNA
gtggattgcaaccactcgtg

SEQ ID NO: 107178 - DNA, 20 bp, Artificial Sequence
  MKO10107178_B_Pcdhb12
  gRNA
gccgccccacgattcacagc

SEQ ID NO: 107179 - DNA, 20 bp, Artificial Sequence
  MKO10107179_B_Pcdhb12
  gRNA
gaagaaggcgtctccctaat

SEQ ID NO: 107180 - DNA, 20 bp, Artificial Sequence
  MKO10107180_B_Pcdhb13
  gRNA
tggtgagttcaaattgcgaa

SEQ ID NO: 107181 - DNA, 20 bp, Artificial Sequence
  MKO10107181_B_Pcdhb13
  gRNA
tgcgattgcgagtgagcacg

SEQ ID NO: 107182 - DNA, 20 bp, Artificial Sequence
  MKO10107182_B_Pcdhb13
  gRNA
ctgttagcccgccaccatct

SEQ ID NO: 107183 - DNA, 20 bp, Artificial Sequence
  MKO10107183_B_Pcdhb14
  gRNA
ctcacccgcaatcacagcga

SEQ ID NO: 107184 - DNA, 20 bp, Artificial Sequence
  MKO10107184_B_Pcdhb14
  gRNA
tgaagaaaacttctacacgt

SEQ ID NO: 107185 - DNA, 20 bp, Artificial Sequence
  MKO10107185_B_Pcdhb14
  gRNA
ttcgctgataagtactgaca

SEQ ID NO: 107186 - DNA, 20 bp, Artificial Sequence
  MKO10107186_B_Pcdhb15
  gRNA
taaagtgactgcacgaattg

SEQ ID NO: 107187 - DNA, 20 bp, Artificial Sequence
  MKO10107187_B_Pcdhb15
  gRNA
aacttattcgataactattc

SEQ ID NO: 107188 - DNA, 20 bp, Artificial Sequence
  MKO10107188_B_Pcdhb15
  gRNA
gcagcgcgataaatctgaaa

SEQ ID NO: 107189 - DNA, 20 bp, Artificial Sequence
  MKO10107189_B_Pcdhb16
  gRNA
ccgagtgagcactcgaaaat

SEQ ID NO: 107190 - DNA, 20 bp, Artificial Sequence
  MKO10107190_B_Pcdhb16
  gRNA
ttctggaaaatgcacgattc

SEQ ID NO: 107191 - DNA, 20 bp, Artificial Sequence
  MKO10107191_B_Pcdhb16
  gRNA
agcgggcgaacctccgtctg

SEQ ID NO: 107192 - DNA, 20 bp, Artificial Sequence
  MKO10107192_B_Pcdhb17
  gRNA
gagtggttattccgtgcctg

SEQ ID NO: 107193 - DNA, 20 bp, Artificial Sequence
  MKO10107193_B_Pcdhb17
  gRNA
ttgcagctcaaccttcaatc

SEQ ID NO: 107194 - DNA, 20 bp, Artificial Sequence
  MKO10107194_B_Pcdhb17
  gRNA
ggtggcgctcctccccggtc

SEQ ID NO: 107195 - DNA, 20 bp, Artificial Sequence
  MKO10107195_B_Pcdhb18
  gRNA
accgttcataacagcgatga

SEQ ID NO: 107196 - DNA, 20 bp, Artificial Sequence
  MKO10107196_B_Pcdhb18
  gRNA
atgtaaaaattgtccacgga

SEQ ID NO: 107197 - DNA, 20 bp, Artificial Sequence
  MKO10107197_B_Pcdhb18
  gRNA
tgttgttctcgcgaacgaac

SEQ ID NO: 107198 - DNA, 20 bp, Artificial Sequence
  MKO10107198_B_Pcdhb19
  gRNA
tgacaactcccccgtattct

SEQ ID NO: 107199 - DNA, 20 bp, Artificial Sequence
  MKO10107199_B_Pcdhb19
  gRNA
taatatctatgacctccact

SEQ ID NO: 107200 - DNA, 20 bp, Artificial Sequence
  MKO10107200_B_Pcdhb19
  gRNA
tttgctccttagtgaaccgc

SEQ ID NO: 107201 - DNA, 20 bp, Artificial Sequence
  MKO10107201_B_Pcdhb1
  gRNA
gcacgtggtcattgacgtcc

SEQ ID NO: 107202 - DNA, 20 bp, Artificial Sequence
  MKO10107202_B_Pcdhb1
  gRNA
tctcctccgccaccgaatag

SEQ ID NO: 107203 - DNA, 20 bp, Artificial Sequence
  MKO10107203_B_Pcdhb1
  gRNA
gacgattgtcattgtcgtcc

SEQ ID NO: 107204 - DNA, 20 bp, Artificial Sequence
  MKO10107204_B_Pcdhb20
  gRNA
tatgctcctgaatgagcgac

SEQ ID NO: 107205 - DNA, 20 bp, Artificial Sequence
  MKO10107205_B_Pcdhb20
  gRNA
ctcagctcgatagaactgta

SEQ ID NO: 107206 - DNA, 20 bp, Artificial Sequence
  MKO10107206_B_Pcdhb20
  gRNA
ctgagccggtagcagcgagt

SEQ ID NO: 107207 - DNA, 20 bp, Artificial Sequence
  MKO10107207_B_Pcdhb21
  gRNA
atctctgacaaaccgttctc

SEQ ID NO: 107208 - DNA, 20 bp, Artificial Sequence
  MKO10107208_B_Pcdhb21
  gRNA
caaggtgtctgcgacagatt

SEQ ID NO: 107209 - DNA, 20 bp, Artificial Sequence
  MKO10107209_B_Pcdhb21
  gRNA
tggccggagaagtgtccatc

SEQ ID NO: 107210 - DNA, 20 bp, Artificial Sequence
  MKO10107210_B_Pcdhb22
  gRNA
accccgccgctactttgtga

SEQ ID NO: 107211 - DNA, 20 bp, Artificial Sequence
  MKO10107211_B_Pcdhb22
  gRNA
catcacctactcgttgctgc

SEQ ID NO: 107212 - DNA, 20 bp, Artificial Sequence
  MKO10107212_B_Pcdhb22
  gRNA
ggtgcgcgaccccagtcacc

SEQ ID NO: 107213 - DNA, 20 bp, Artificial Sequence
  MKO10107213_B_Pcdhb2
  gRNA
cgtgctcaagacttagatgt

SEQ ID NO: 107214 - DNA, 20 bp, Artificial Sequence
  MKO10107214_B_Pcdhb2
  gRNA
atttggacggtgccagacct

SEQ ID NO: 107215 - DNA, 20 bp, Artificial Sequence
  MKO10107215_B_Pcdhb2
  gRNA
ccgcgaccctgcccaagatg

SEQ ID NO: 107216 - DNA, 20 bp, Artificial Sequence
  MKO10107216_B_Pcdhb3
  gRNA
tctatactatagcgtccgaa

SEQ ID NO: 107217 - DNA, 20 bp, Artificial Sequence
  MKO10107217_B_Pcdhb3
  gRNA
ccccagatccgtcgctaaat

SEQ ID NO: 107218 - DNA, 20 bp, Artificial Sequence
  MKO10107218_B_Pcdhb3
  gRNA
tttcgactgaactccagtac

SEQ ID NO: 107219 - DNA, 20 bp, Artificial Sequence
  MKO10107219_B_Pcdhb4
  gRNA
ggtaactccatactataatg

SEQ ID NO: 107220 - DNA, 20 bp, Artificial Sequence
  MKO10107220_B_Pcdhb4
  gRNA
catagagcgattgtacaaac

SEQ ID NO: 107221 - DNA, 20 bp, Artificial Sequence
  MKO10107221_B_Pcdhb4
  gRNA
aatccgtctaagcaaaaagt

SEQ ID NO: 107222 - DNA, 20 bp, Artificial Sequence
  MKO10107222_B_Pcdhb5
  gRNA
gcccatagtccccaacctaa

SEQ ID NO: 107223 - DNA, 20 bp, Artificial Sequence
  MKO10107223_B_Pcdhb5
  gRNA
cgaccccgcacaggatgatc

SEQ ID NO: 107224 - DNA, 20 bp, Artificial Sequence
  MKO10107224_B_Pcdhb5
  gRNA
gcagggcttcgaattctacg

SEQ ID NO: 107225 - DNA, 20 bp, Artificial Sequence
  MKO10107225_B_Pcdhb6
  gRNA
ccagatcgcgaagcactatg

SEQ ID NO: 107226 - DNA, 20 bp, Artificial Sequence
  MKO10107226_B_Pcdhb6
  gRNA
agagctcttgcagctagatg

SEQ ID NO: 107227 - DNA, 20 bp, Artificial Sequence
  MKO10107227_B_Pcdhb6
  gRNA
gggggagctccgcccaagtc

SEQ ID NO: 107228 - DNA, 20 bp, Artificial Sequence
  MKO10107228_B_Pcdhb7
  gRNA
gaaaggcttggtaatagtag

SEQ ID NO: 107229 - DNA, 20 bp, Artificial Sequence
  MKO10107229_B_Pcdhb7
  gRNA
cgaccccacacaggaagttg

SEQ ID NO: 107230 - DNA, 20 bp, Artificial Sequence
  MKO10107230_B_Pcdhb7
  gRNA
gttaccactgaatttagccc

SEQ ID NO: 107231 - DNA, 20 bp, Artificial Sequence
  MKO10107231_B_Pcdhb8
  gRNA
ccagatcgcgaagcactgtg

SEQ ID NO: 107232 - DNA, 20 bp, Artificial Sequence
  MKO10107232_B_Pcdhb8
  gRNA
ggctgactgctctattcctg

SEQ ID NO: 107233 - DNA, 20 bp, Artificial Sequence
  MKO10107233_B_Pcdhb8
  gRNA
atcccagagttaccattatg

SEQ ID NO: 107234 - DNA, 20 bp, Artificial Sequence
  MKO10107234_B_Pcdhb9
  gRNA
taatcgagattaacgaagag

SEQ ID NO: 107235 - DNA, 20 bp, Artificial Sequence
  MKO10107235_B_Pcdhb9
  gRNA
ttctcaataaacgcaactag

SEQ ID NO: 107236 - DNA, 20 bp, Artificial Sequence
  MKO10107236_B_Pcdhb9
  gRNA
gaaaggctctgtaacgatag

SEQ ID NO: 107237 - DNA, 20 bp, Artificial Sequence
  MKO10107237_B_Pcdhga10
  gRNA
cgccagaacgtgtacatccc

SEQ ID NO: 107238 - DNA, 20 bp, Artificial Sequence
  MKO10107238_B_Pcdhga10
  gRNA
agtcacctacccgctcgtgc

SEQ ID NO: 107239 - DNA, 20 bp, Artificial Sequence
  MKO10107239_B_Pcdhga10
  gRNA
gcagcatctctgtatcaaac

SEQ ID NO: 107240 - DNA, 20 bp, Artificial Sequence
  MKO10107240_B_Pcdhga11
  gRNA
cgccagaacgtgtacatccc

SEQ ID NO: 107241 - DNA, 20 bp, Artificial Sequence
  MKO10107241_B_Pcdhga11
  gRNA
agtcacctacccgctcgtgc

SEQ ID NO: 107242 - DNA, 20 bp, Artificial Sequence
  MKO10107242_B_Pcdhga11
  gRNA
gcagcatctctgtatcaaac

SEQ ID NO: 107243 - DNA, 20 bp, Artificial Sequence
  MKO10107243_B_Pcdhga12
  gRNA
cgccagaacgtgtacatccc

SEQ ID NO: 107244 - DNA, 20 bp, Artificial Sequence
  MKO10107244_B_Pcdhga12
  gRNA
agtcacctacccgctcgtgc

SEQ ID NO: 107245 - DNA, 20 bp, Artificial Sequence
  MKO10107245_B_Pcdhga12
  gRNA
gcagcatctctgtatcaaac

SEQ ID NO: 107246 - DNA, 20 bp, Artificial Sequence
  MKO10107246_B_Pcdhga1
  gRNA
atgagtgaaataacgactcc

SEQ ID NO: 107247 - DNA, 20 bp, Artificial Sequence
  MKO10107247_B_Pcdhga1
  gRNA
agtcacctacccgctcgtgc

SEQ ID NO: 107248 - DNA, 20 bp, Artificial Sequence
  MKO10107248_B_Pcdhga1
  gRNA
gcagcatctctgtatcaaac

SEQ ID NO: 107249 - DNA, 20 bp, Artificial Sequence
  MKO10107249_B_Pcdhga2
  gRNA
cgccagaacgtgtacatccc

SEQ ID NO: 107250 - DNA, 20 bp, Artificial Sequence
  MKO10107250_B_Pcdhga2
  gRNA
agtcacctacccgctcgtgc

SEQ ID NO: 107251 - DNA, 20 bp, Artificial Sequence
  MKO10107251_B_Pcdhga2
  gRNA
gcagcatctctgtatcaaac

SEQ ID NO: 107252 - DNA, 20 bp, Artificial Sequence
  MKO10107252_B_Pcdhga3
  gRNA
agctttgttgtgcgcgctcc

SEQ ID NO: 107253 - DNA, 20 bp, Artificial Sequence
  MKO10107253_B_Pcdhga3
  gRNA
agtcacctacccgctcgtgc

SEQ ID NO: 107254 - DNA, 20 bp, Artificial Sequence
  MKO10107254_B_Pcdhga3
  gRNA
gcagcatctctgtatcaaac

SEQ ID NO: 107255 - DNA, 20 bp, Artificial Sequence
  MKO10107255_B_Pcdhga4
  gRNA
cgccagaacgtgtacatccc

SEQ ID NO: 107256 - DNA, 20 bp, Artificial Sequence
  MKO10107256_B_Pcdhga4
  gRNA
agtcacctacccgctcgtgc

SEQ ID NO: 107257 - DNA, 20 bp, Artificial Sequence
  MKO10107257_B_Pcdhga4
  gRNA
gcagcatctctgtatcaaac

SEQ ID NO: 107258 - DNA, 20 bp, Artificial Sequence
  MKO10107258_B_Pcdhga5
  gRNA
cgccagaacgtgtacatccc

SEQ ID NO: 107259 - DNA, 20 bp, Artificial Sequence
  MKO10107259_B_Pcdhga5
  gRNA
agtcacctacccgctcgtgc

SEQ ID NO: 107260 - DNA, 20 bp, Artificial Sequence
  MKO10107260_B_Pcdhga5
  gRNA
gcagcatctctgtatcaaac

SEQ ID NO: 107261 - DNA, 20 bp, Artificial Sequence
  MKO10107261_B_Pcdhga6
  gRNA
cgccagaacgtgtacatccc

SEQ ID NO: 107262 - DNA, 20 bp, Artificial Sequence
  MKO10107262_B_Pcdhga6
  gRNA
agtcacctacccgctcgtgc

SEQ ID NO: 107263 - DNA, 20 bp, Artificial Sequence
  MKO10107263_B_Pcdhga6
  gRNA
gcagcatctctgtatcaaac

SEQ ID NO: 107264 - DNA, 20 bp, Artificial Sequence
  MKO10107264_B_Pcdhga7
  gRNA
cgccagaacgtgtacatccc

SEQ ID NO: 107265 - DNA, 20 bp, Artificial Sequence
  MKO10107265_B_Pcdhga7
  gRNA
agtcacctacccgctcgtgc

SEQ ID NO: 107266 - DNA, 20 bp, Artificial Sequence
  MKO10107266_B_Pcdhga7
  gRNA
gcagcatctctgtatcaaac

SEQ ID NO: 107267 - DNA, 20 bp, Artificial Sequence
  MKO10107267_B_Pcdhga8
  gRNA
aataatccgaagttccatgt

SEQ ID NO: 107268 - DNA, 20 bp, Artificial Sequence
  MKO10107268_B_Pcdhga8
  gRNA
acgctgtgcaagatcagcgt

SEQ ID NO: 107269 - DNA, 20 bp, Artificial Sequence
  MKO10107269_B_Pcdhga8
  gRNA
gcagcatctctgtatcaaac

SEQ ID NO: 107270 - DNA, 20 bp, Artificial Sequence
  MKO10107270_B_Pcdhga9
  gRNA
cacggaatagcggatttgcc

SEQ ID NO: 107271 - DNA, 20 bp, Artificial Sequence
  MKO10107271_B_Pcdhga9
  gRNA
agtcacctacccgctcgtgc

SEQ ID NO: 107272 - DNA, 20 bp, Artificial Sequence
  MKO10107272_B_Pcdhga9
  gRNA
gcagcatctctgtatcaaac

SEQ ID NO: 107273 - DNA, 20 bp, Artificial Sequence
  MKO10107273_B_Pcdhgb1
  gRNA
agtcacctacccgctcgtgc

SEQ ID NO: 107274 - DNA, 20 bp, Artificial Sequence
  MKO10107274_B_Pcdhgb1
  gRNA
aagcagagtcgtccgagact

SEQ ID NO: 107275 - DNA, 20 bp, Artificial Sequence
  MKO10107275_B_Pcdhgb1
  gRNA
gcagcatctctgtatcaaac

SEQ ID NO: 107276 - DNA, 20 bp, Artificial Sequence
  MKO10107276_B_Pcdhgb2
  gRNA
cgccagaacgtgtacatccc

SEQ ID NO: 107277 - DNA, 20 bp, Artificial Sequence
  MKO10107277_B_Pcdhgb2
  gRNA
agtcacctacccgctcgtgc

SEQ ID NO: 107278 - DNA, 20 bp, Artificial Sequence
  MKO10107278_B_Pcdhgb2
  gRNA
gcagcatctctgtatcaaac

SEQ ID NO: 107279 - DNA, 20 bp, Artificial Sequence
  MKO10107279_B_Pcdhgb4
  gRNA
cgccagaacgtgtacatccc

SEQ ID NO: 107280 - DNA, 20 bp, Artificial Sequence
  MKO10107280_B_Pcdhgb4
  gRNA
agtcacctacccgctcgtgc

SEQ ID NO: 107281 - DNA, 20 bp, Artificial Sequence
  MKO10107281_B_Pcdhgb4
  gRNA
gcagcatctctgtatcaaac

SEQ ID NO: 107282 - DNA, 20 bp, Artificial Sequence
  MKO10107282_B_Pcdhgb5
  gRNA
atggaactcaccggtgttag

SEQ ID NO: 107283 - DNA, 20 bp, Artificial Sequence
  MKO10107283_B_Pcdhgb5
  gRNA
agtcacctacccgctcgtgc

SEQ ID NO: 107284 - DNA, 20 bp, Artificial Sequence
  MKO10107284_B_Pcdhgb5
  gRNA
gcagcatctctgtatcaaac

SEQ ID NO: 107285 - DNA, 20 bp, Artificial Sequence
  MKO10107285_B_Pcdhgb6
  gRNA
gaattctcctccgggagtgg

SEQ ID NO: 107286 - DNA, 20 bp, Artificial Sequence
  MKO10107286_B_Pcdhgb6
  gRNA
tgctggcttgcctttgtccg

SEQ ID NO: 107287 - DNA, 20 bp, Artificial Sequence
  MKO10107287_B_Pcdhgb6
  gRNA
gcagcatctctgtatcaaac

SEQ ID NO: 107288 - DNA, 20 bp, Artificial Sequence
  MKO10107288_B_Pcdhgb7
  gRNA
cgccagaacgtgtacatccc

SEQ ID NO: 107289 - DNA, 20 bp, Artificial Sequence
  MKO10107289_B_Pcdhgb7
  gRNA
agtcacctacccgctcgtgc

SEQ ID NO: 107290 - DNA, 20 bp, Artificial Sequence
  MKO10107290_B_Pcdhgb7
  gRNA
gcagcatctctgtatcaaac

SEQ ID NO: 107291 - DNA, 20 bp, Artificial Sequence
  MKO10107291_B_Pcdhgb8
  gRNA
cgccagaacgtgtacatccc

SEQ ID NO: 107292 - DNA, 20 bp, Artificial Sequence
  MKO10107292_B_Pcdhgb8
  gRNA
agtcacctacccgctcgtgc

SEQ ID NO: 107293 - DNA, 20 bp, Artificial Sequence
  MKO10107293_B_Pcdhgb8
  gRNA
gcagcatctctgtatcaaac

SEQ ID NO: 107294 - DNA, 20 bp, Artificial Sequence
  MKO10107294_B_Pcdhgc3
  gRNA
cgccagaacgtgtacatccc

SEQ ID NO: 107295 - DNA, 20 bp, Artificial Sequence
  MKO10107295_B_Pcdhgc3
  gRNA
agtcacctacccgctcgtgc

SEQ ID NO: 107296 - DNA, 20 bp, Artificial Sequence
  MKO10107296_B_Pcdhgc3
  gRNA
gcagcatctctgtatcaaac

SEQ ID NO: 107297 - DNA, 20 bp, Artificial Sequence
  MKO10107297_B_Pcdhgc4
  gRNA
cgccagaacgtgtacatccc

SEQ ID NO: 107298 - DNA, 20 bp, Artificial Sequence
  MKO10107298_B_Pcdhgc4
  gRNA
agtcacctacccgctcgtgc

SEQ ID NO: 107299 - DNA, 20 bp, Artificial Sequence
  MKO10107299_B_Pcdhgc4
  gRNA
gcagcatctctgtatcaaac

SEQ ID NO: 107300 - DNA, 20 bp, Artificial Sequence
  MKO10107300_B_Pcdhgc5
  gRNA
cgccagaacgtgtacatccc

SEQ ID NO: 107301 - DNA, 20 bp, Artificial Sequence
  MKO10107301_B_Pcdhgc5
  gRNA
agtcacctacccgctcgtgc

SEQ ID NO: 107302 - DNA, 20 bp, Artificial Sequence
  MKO10107302_B_Pcdhgc5
  gRNA
gcagcatctctgtatcaaac

SEQ ID NO: 107303 - DNA, 20 bp, Artificial Sequence
  MKO10107303_B_Pced1a
  gRNA
caaggtactcggagtaaact

SEQ ID NO: 107304 - DNA, 20 bp, Artificial Sequence
  MKO10107304_B_Pced1a
  gRNA
gacgtcgaaacagtgtttcc

SEQ ID NO: 107305 - DNA, 20 bp, Artificial Sequence
  MKO10107305_B_Pced1a
  gRNA
ggaacgagtctttgtacgaa

SEQ ID NO: 107306 - DNA, 20 bp, Artificial Sequence
  MKO10107306_B_Pced1b
  gRNA
cttgtttgggcgcatggacc

SEQ ID NO: 107307 - DNA, 20 bp, Artificial Sequence
  MKO10107307_B_Pced1b
  gRNA
gtacatggagagcgtcctag

SEQ ID NO: 107308 - DNA, 20 bp, Artificial Sequence
  MKO10107308_B_Pced1b
  gRNA
caaggaattccgcccatacc

SEQ ID NO: 107309 - DNA, 20 bp, Artificial Sequence
  MKO10107309_B_Pcf11
  gRNA
gcttccagttatgtacctta

SEQ ID NO: 107310 - DNA, 20 bp, Artificial Sequence
  MKO10107310_B_Pcf11
  gRNA
agaggtttaataggccaagc

SEQ ID NO: 107311 - DNA, 20 bp, Artificial Sequence
  MKO10107311_B_Pcf11
  gRNA
gcttgagttagaacaagcta

SEQ ID NO: 107312 - DNA, 20 bp, Artificial Sequence
  MKO10107312_B_Pcgf1
  gRNA
tgaacagctgagcctatgcc

SEQ ID NO: 107313 - DNA, 20 bp, Artificial Sequence
  MKO10107313_B_Pcgf1
  gRNA
cactcactgtcttgcaagcc

SEQ ID NO: 107314 - DNA, 20 bp, Artificial Sequence
  MKO10107314_B_Pcgf1
  gRNA
cccctcacctcagccgctcc

SEQ ID NO: 107315 - DNA, 20 bp, Artificial Sequence
  MKO10107315_B_Pcgf2
  gRNA
ccgaggcgaggtcctggaac

SEQ ID NO: 107316 - DNA, 20 bp, Artificial Sequence
  MKO10107316_B_Pcgf2
  gRNA
ccaacttgtagacaatgtcc

SEQ ID NO: 107317 - DNA, 20 bp, Artificial Sequence
  MKO10107317_B_Pcgf2
  gRNA
tgcagcataccccctgacag

SEQ ID NO: 107318 - DNA, 20 bp, Artificial Sequence
  MKO10107318_B_Pcgf3
  gRNA
cagcacttagatccccgaaa

SEQ ID NO: 107319 - DNA, 20 bp, Artificial Sequence
  MKO10107319_B_Pcgf3
  gRNA
aggtaccaggtgacatcaag

SEQ ID NO: 107320 - DNA, 20 bp, Artificial Sequence
  MKO10107320_B_Pcgf3
  gRNA
attgtttacaagctggtgcc

SEQ ID NO: 107321 - DNA, 20 bp, Artificial Sequence
  MKO10107321_B_Pcgf5
  gRNA
ttacgaaataatgggcagtc

SEQ ID NO: 107322 - DNA, 20 bp, Artificial Sequence
  MKO10107322_B_Pcgf5
  gRNA
agaagaacttcagcgtgagt

SEQ ID NO: 107323 - DNA, 20 bp, Artificial Sequence
  MKO10107323_B_Pcgf5
  gRNA
caaatccattagaaatgtta

SEQ ID NO: 107324 - DNA, 20 bp, Artificial Sequence
  MKO10107324_B_Pcgf6
  gRNA
caaattagtgatcaatctag

SEQ ID NO: 107325 - DNA, 20 bp, Artificial Sequence
  MKO10107325_B_Pcgf6
  gRNA
tcttaccttatattataaag

SEQ ID NO: 107326 - DNA, 20 bp, Artificial Sequence
  MKO10107326_B_Pcgf6
  gRNA
atactatgtcttgtaactgc

SEQ ID NO: 107327 - DNA, 20 bp, Artificial Sequence
  MKO10107327_B_Pcid2
  gRNA
ttccaggtgtacctatgctg

SEQ ID NO: 107328 - DNA, 20 bp, Artificial Sequence
  MKO10107328_B_Pcid2
  gRNA
gctgcaaacatttcatcata

SEQ ID NO: 107329 - DNA, 20 bp, Artificial Sequence
  MKO10107329_B_Pcid2
  gRNA
aaatgtttgcagctcattta

SEQ ID NO: 107330 - DNA, 20 bp, Artificial Sequence
  MKO10107330_B_Pcif1
  gRNA
gcttcaagatgagctgcgag

SEQ ID NO: 107331 - DNA, 20 bp, Artificial Sequence
  MKO10107331_B_Pcif1
  gRNA
ctctgagagctgtcgctttc

SEQ ID NO: 107332 - DNA, 20 bp, Artificial Sequence
  MKO10107332_B_Pcif1
  gRNA
atcggttgaagtagtaggga

SEQ ID NO: 107333 - DNA, 20 bp, Artificial Sequence
  MKO10107333_B_Pck1
  gRNA
ggctcgccgctggccaagat

SEQ ID NO: 107334 - DNA, 20 bp, Artificial Sequence
  MKO10107334_B_Pck1
  gRNA
gactgtcttgctttcgatcc

SEQ ID NO: 107335 - DNA, 20 bp, Artificial Sequence
  MKO10107335_B_Pck1
  gRNA
cacacattcgaccttccacc

SEQ ID NO: 107336 - DNA, 20 bp, Artificial Sequence
  MKO10107336_B_Pck2
  gRNA
accaccatagccgctgccga

SEQ ID NO: 107337 - DNA, 20 bp, Artificial Sequence
  MKO10107337_B_Pck2
  gRNA
ggcactgtgtcccgctgcga

SEQ ID NO: 107338 - DNA, 20 bp, Artificial Sequence
  MKO10107338_B_Pck2
  gRNA
gctcactgactcggcttacg

SEQ ID NO: 107339 - DNA, 20 bp, Artificial Sequence
  MKO10107339_B_Pclo
  gRNA
tctggcacacgacctacgac

SEQ ID NO: 107340 - DNA, 20 bp, Artificial Sequence
  MKO10107340_B_Pclo
  gRNA
ggtgtggcttggccagtcgt

SEQ ID NO: 107341 - DNA, 20 bp, Artificial Sequence
  MKO10107341_B_Pclo
  gRNA
acccccagacgcaaaaccat

SEQ ID NO: 107342 - DNA, 20 bp, Artificial Sequence
  MKO10107342_B_Pcm1
  gRNA
tcaggccagagatcctcagc

SEQ ID NO: 107343 - DNA, 20 bp, Artificial Sequence
  MKO10107343_B_Pcm1
  gRNA
aaacttcagtgatttagatc

SEQ ID NO: 107344 - DNA, 20 bp, Artificial Sequence
  MKO10107344_B_Pcm1
  gRNA
gacgttgtcatctctctctt

SEQ ID NO: 107345 - DNA, 20 bp, Artificial Sequence
  MKO10107345_B_Pcmt1
  gRNA
aacaatcagtgcccctcata

SEQ ID NO: 107346 - DNA, 20 bp, Artificial Sequence
  MKO10107346_B_Pcmt1
  gRNA
taaagcttacctattgattg

SEQ ID NO: 107347 - DNA, 20 bp, Artificial Sequence
  MKO10107347_B_Pcmt1
  gRNA
ctttagcaccttcatgcagc

SEQ ID NO: 107348 - DNA, 20 bp, Artificial Sequence
  MKO10107348_B_Pcmtd1
  gRNA
ttacggagccccacagagtc

SEQ ID NO: 107349 - DNA, 20 bp, Artificial Sequence
  MKO10107349_B_Pcmtd1
  gRNA
aaaagtacctgatcctctat

SEQ ID NO: 107350 - DNA, 20 bp, Artificial Sequence
  MKO10107350_B_Pcmtd1
  gRNA
gtggtgcaaaggaaaccgca

SEQ ID NO: 107351 - DNA, 20 bp, Artificial Sequence
  MKO10107351_B_Pcmtd2
  gRNA
ggtcctttcggcgtgaacca

SEQ ID NO: 107352 - DNA, 20 bp, Artificial Sequence
  MKO10107352_B_Pcmtd2
  gRNA
tgtcctgattccgaacggca

SEQ ID NO: 107353 - DNA, 20 bp, Artificial Sequence
  MKO10107353_B_Pcmtd2
  gRNA
ttgaccaagataacacgcac

SEQ ID NO: 107354 - DNA, 20 bp, Artificial Sequence
  MKO10107354_B_Pcna
  gRNA
atgtctgcagatgtgcccct

SEQ ID NO: 107355 - DNA, 20 bp, Artificial Sequence
  MKO10107355_B_Pcna
  gRNA
tccaaaattctaaaatgtgc

SEQ ID NO: 107356 - DNA, 20 bp, Artificial Sequence
  MKO10107356_B_Pcna
  gRNA
tgcttcgaatactagtgcta

SEQ ID NO: 107357 - DNA, 20 bp, Artificial Sequence
  MKO10107357_B_Pcnp
  gRNA
aagactgtttcttccagtaa

SEQ ID NO: 107358 - DNA, 20 bp, Artificial Sequence
  MKO10107358_B_Pcnp
  gRNA
tcttgctccaaaaactctgt

SEQ ID NO: 107359 - DNA, 20 bp, Artificial Sequence
  MKO10107359_B_Pcnp
  gRNA
agagttggaactgtttcctt

SEQ ID NO: 107360 - DNA, 20 bp, Artificial Sequence
  MKO10107360_B_Pcnt
  gRNA
aagagatggcgctccgcagc

SEQ ID NO: 107361 - DNA, 20 bp, Artificial Sequence
  MKO10107361_B_Pcnt
  gRNA
tggctaccgaaccctcctcc

SEQ ID NO: 107362 - DNA, 20 bp, Artificial Sequence
  MKO10107362_B_Pcnt
  gRNA
cccaacagcgagctccccca

SEQ ID NO: 107363 - DNA, 20 bp, Artificial Sequence
  MKO10107363_B_Pcnxl2
  gRNA
cgcagtagaacagcgctgtg

SEQ ID NO: 107364 - DNA, 20 bp, Artificial Sequence
  MKO10107364_B_Pcnxl2
  gRNA
gtcaccaaccaatggccccg

SEQ ID NO: 107365 - DNA, 20 bp, Artificial Sequence
  MKO10107365_B_Pcnxl2
  gRNA
gggagtggacactctgccct

SEQ ID NO: 107366 - DNA, 20 bp, Artificial Sequence
  MKO10107366_B_Pcnxl3
  gRNA
gagcttcagcatttctcgat

SEQ ID NO: 107367 - DNA, 20 bp, Artificial Sequence
  MKO10107367_B_Pcnxl3
  gRNA
ggggcccagaatcctccatc

SEQ ID NO: 107368 - DNA, 20 bp, Artificial Sequence
  MKO10107368_B_Pcnxl3
  gRNA
cttatcaggagttgctgccc

SEQ ID NO: 107369 - DNA, 20 bp, Artificial Sequence
  MKO10107369_B_Pcnxl4
  gRNA
aatggtggccttccttgcgc

SEQ ID NO: 107370 - DNA, 20 bp, Artificial Sequence
  MKO10107370_B_Pcnxl4
  gRNA
gtaaggagctgtccagcgca

SEQ ID NO: 107371 - DNA, 20 bp, Artificial Sequence
  MKO10107371_B_Pcnxl4
  gRNA
ggagccttgatacaggaatc

SEQ ID NO: 107372 - DNA, 20 bp, Artificial Sequence
  MKO10107372_B_Pcnx
  gRNA
tgctgctgttccaagtcgag

SEQ ID NO: 107373 - DNA, 20 bp, Artificial Sequence
  MKO10107373_B_Pcnx
  gRNA
tacactcctacctgattgct

SEQ ID NO: 107374 - DNA, 20 bp, Artificial Sequence
  MKO10107374_B_Pcnx
  gRNA
agttctagtctttgtaaaga

SEQ ID NO: 107375 - DNA, 20 bp, Artificial Sequence
  MKO10107375_B_Pcolce2
  gRNA
ctactgcagatacgactacg

SEQ ID NO: 107376 - DNA, 20 bp, Artificial Sequence
  MKO10107376_B_Pcolce2
  gRNA
acttcaggagaccggtattg

SEQ ID NO: 107377 - DNA, 20 bp, Artificial Sequence
  MKO10107377_B_Pcolce2
  gRNA
ggcattcttaccggagagtc

SEQ ID NO: 107378 - DNA, 20 bp, Artificial Sequence
  MKO10107378_B_Pcolce
  gRNA
ggggacgtgaccggggagtc

SEQ ID NO: 107379 - DNA, 20 bp, Artificial Sequence
  MKO10107379_B_Pcolce
  gRNA
ctgtgagtgacgactcaaag

SEQ ID NO: 107380 - DNA, 20 bp, Artificial Sequence
  MKO10107380_B_Pcolce
  gRNA
gaaccttgaccacgcccaac

SEQ ID NO: 107381 - DNA, 20 bp, Artificial Sequence
  MKO10107381_B_Pcp2
  gRNA
gatggaatgcagaaacgacc

SEQ ID NO: 107382 - DNA, 20 bp, Artificial Sequence
  MKO10107382_B_Pcp2
  gRNA
ctgctgcactcagcttccgc

SEQ ID NO: 107383 - DNA, 20 bp, Artificial Sequence
  MKO10107383_B_Pcp2
  gRNA
gcttacggctttctgggttc

SEQ ID NO: 107384 - DNA, 20 bp, Artificial Sequence
  MKO10107384_B_Pcp4l1
  gRNA
tcagatgcctggttggctgc

SEQ ID NO: 107385 - DNA, 20 bp, Artificial Sequence
  MKO10107385_B_Pcp4l1
  gRNA
tctctgtctctggcgctgtc

SEQ ID NO: 107386 - DNA, 20 bp, Artificial Sequence
  MKO10107386_B_Pcp4l1
  gRNA
gtcaatttcttcctcctcct

SEQ ID NO: 107387 - DNA, 20 bp, Artificial Sequence
  MKO10107387_B_Pcp4
  gRNA
tgtttatagagacaaagtgc

SEQ ID NO: 107388 - DNA, 20 bp, Artificial Sequence
  MKO10107388_B_Pcp4
  gRNA
tgtcgatatcaaattcttct

SEQ ID NO: 107389 - DNA, 20 bp, Artificial Sequence
  MKO10107389_B_Pcp4
  gRNA
agagacagagcgtgcagctg

SEQ ID NO: 107390 - DNA, 20 bp, Artificial Sequence
  MKO10107390_B_Pcsk1n
  gRNA
tctgctacgcgtcaaacgcc

SEQ ID NO: 107391 - DNA, 20 bp, Artificial Sequence
  MKO10107391_B_Pcsk1n
  gRNA
agagcccccagtacgttctc

SEQ ID NO: 107392 - DNA, 20 bp, Artificial Sequence
  MKO10107392_B_Pcsk1n
  gRNA
caccaaaatgccgacgcccc

SEQ ID NO: 107393 - DNA, 20 bp, Artificial Sequence
  MKO10107393_B_Pcsk1
  gRNA
gcgctcttcatatcactaag

SEQ ID NO: 107394 - DNA, 20 bp, Artificial Sequence
  MKO10107394_B_Pcsk1
  gRNA
atctcttcaatgatccaatg

SEQ ID NO: 107395 - DNA, 20 bp, Artificial Sequence
  MKO10107395_B_Pcsk1
  gRNA
accttcatgtaatacctgtt

SEQ ID NO: 107396 - DNA, 20 bp, Artificial Sequence
  MKO10107396_B_Pcsk2
  gRNA
accgtaaaaagagagggtac

SEQ ID NO: 107397 - DNA, 20 bp, Artificial Sequence
  MKO10107397_B_Pcsk2
  gRNA
ctctctctagctgccgctta

SEQ ID NO: 107398 - DNA, 20 bp, Artificial Sequence
  MKO10107398_B_Pcsk2
  gRNA
accatcatccataattccaa

SEQ ID NO: 107399 - DNA, 20 bp, Artificial Sequence
  MKO10107399_B_Pcsk4
  gRNA
agaaagaccacccggacctc

SEQ ID NO: 107400 - DNA, 20 bp, Artificial Sequence
  MKO10107400_B_Pcsk4
  gRNA
agctcaccggttctcatcgt

SEQ ID NO: 107401 - DNA, 20 bp, Artificial Sequence
  MKO10107401_B_Pcsk4
  gRNA
ggaaccagggactgaccggc

SEQ ID NO: 107402 - DNA, 20 bp, Artificial Sequence
  MKO10107402_B_Pcsk5
  gRNA
gaatatcgtggtgactatcc

SEQ ID NO: 107403 - DNA, 20 bp, Artificial Sequence
  MKO10107403_B_Pcsk5
  gRNA
ttctctcgatgccgtcatcc

SEQ ID NO: 107404 - DNA, 20 bp, Artificial Sequence
  MKO10107404_B_Pcsk5
  gRNA
aggtctgttctctcgagcag

SEQ ID NO: 107405 - DNA, 20 bp, Artificial Sequence
  MKO10107405_B_Pcsk6
  gRNA
aaaaatgatagtaatcgtcc

SEQ ID NO: 107406 - DNA, 20 bp, Artificial Sequence
  MKO10107406_B_Pcsk6
  gRNA
tatgcaagctacgatgtcaa

SEQ ID NO: 107407 - DNA, 20 bp, Artificial Sequence
  MKO10107407_B_Pcsk6
  gRNA
ggtaaaatggctgcaacaac

SEQ ID NO: 107408 - DNA, 20 bp, Artificial Sequence
  MKO10107408_B_Pcsk7
  gRNA
cgtagttgggtgcgatgtcc

SEQ ID NO: 107409 - DNA, 20 bp, Artificial Sequence
  MKO10107409_B_Pcsk7
  gRNA
atacctaggtatccgggtgc

SEQ ID NO: 107410 - DNA, 20 bp, Artificial Sequence
  MKO10107410_B_Pcsk7
  gRNA
tggaccacttactgacagta

SEQ ID NO: 107411 - DNA, 20 bp, Artificial Sequence
  MKO10107411_B_Pcsk9
  gRNA
cacgctgttgaagtcggtga

SEQ ID NO: 107412 - DNA, 20 bp, Artificial Sequence
  MKO10107412_B_Pcsk9
  gRNA
atgctgggataattcgctcc

SEQ ID NO: 107413 - DNA, 20 bp, Artificial Sequence
  MKO10107413_B_Pcsk9
  gRNA
acagtcagcggcaccctcat

SEQ ID NO: 107414 - DNA, 20 bp, Artificial Sequence
  MKO10107414_B_Pctp
  gRNA
cacccgccagcgccgagacc

SEQ ID NO: 107415 - DNA, 20 bp, Artificial Sequence
  MKO10107415_B_Pctp
  gRNA
ttccgtcctggctcattaac

SEQ ID NO: 107416 - DNA, 20 bp, Artificial Sequence
  MKO10107416_B_Pctp
  gRNA
atgaacagatggtggcatac

SEQ ID NO: 107417 - DNA, 20 bp, Artificial Sequence
  MKO10107417_B_Pcx
  gRNA
ctgtgcacgcacgaaacact

SEQ ID NO: 107418 - DNA, 20 bp, Artificial Sequence
  MKO10107418_B_Pcx
  gRNA
gggtgtccgccgatcctcct

SEQ ID NO: 107419 - DNA, 20 bp, Artificial Sequence
  MKO10107419_B_Pcx
  gRNA
tactccagacgccggacatt

SEQ ID NO: 107420 - DNA, 20 bp, Artificial Sequence
  MKO10107420_B_Pcyox1l
  gRNA
gcttgacgaagtcctgcatg

SEQ ID NO: 107421 - DNA, 20 bp, Artificial Sequence
  MKO10107421_B_Pcyox1l
  gRNA
agcgctgtgtgacgcccacc

SEQ ID NO: 107422 - DNA, 20 bp, Artificial Sequence
  MKO10107422_B_Pcyox1l
  gRNA
ctgacagctgttatcggagc

SEQ ID NO: 107423 - DNA, 20 bp, Artificial Sequence
  MKO10107423_B_Pcyox1
  gRNA
gaaaagttgatgcacgccat

SEQ ID NO: 107424 - DNA, 20 bp, Artificial Sequence
  MKO10107424_B_Pcyox1
  gRNA
tgtaatcaacgtgattaagc

SEQ ID NO: 107425 - DNA, 20 bp, Artificial Sequence
  MKO10107425_B_Pcyox1
  gRNA
ttccattgtacacgcccacc

SEQ ID NO: 107426 - DNA, 20 bp, Artificial Sequence
  MKO10107426_B_Pcyt1a
  gRNA
gcggcctgtgagagtttatg

SEQ ID NO: 107427 - DNA, 20 bp, Artificial Sequence
  MKO10107427_B_Pcyt1a
  gRNA
ccatccgcataaactctcac

SEQ ID NO: 107428 - DNA, 20 bp, Artificial Sequence
  MKO10107428_B_Pcyt1a
  gRNA
cttacacggagttcccctgc

SEQ ID NO: 107429 - DNA, 20 bp, Artificial Sequence
  MKO10107429_B_Pcyt1b
  gRNA
cctcacctggtgttcctaag

SEQ ID NO: 107430 - DNA, 20 bp, Artificial Sequence
  MKO10107430_B_Pcyt1b
  gRNA
tcctaccaacaagtagctgt

SEQ ID NO: 107431 - DNA, 20 bp, Artificial Sequence
  MKO10107431_B_Pcyt1b
  gRNA
ccatctgcatacactctaac

SEQ ID NO: 107432 - DNA, 20 bp, Artificial Sequence
  MKO10107432_B_Pcyt2
  gRNA
gcccccggtgtttacccagg

SEQ ID NO: 107433 - DNA, 20 bp, Artificial Sequence
  MKO10107433_B_Pcyt2
  gRNA
cacctcatccacccacttga

SEQ ID NO: 107434 - DNA, 20 bp, Artificial Sequence
  MKO10107434_B_Pcyt2
  gRNA
tgtgtccaccacagacctcg

SEQ ID NO: 107435 - DNA, 20 bp, Artificial Sequence
  MKO10107435_B_Pdap1
  gRNA
ggctcgtatactgcctcact

SEQ ID NO: 107436 - DNA, 20 bp, Artificial Sequence
  MKO10107436_B_Pdap1
  gRNA
agtgaggcagtatacgagcc

SEQ ID NO: 107437 - DNA, 20 bp, Artificial Sequence
  MKO10107437_B_Pdap1
  gRNA
ggcttcaggtgacccaaaaa

SEQ ID NO: 107438 - DNA, 20 bp, Artificial Sequence
  MKO10107438_B_Pdcd10
  gRNA
caccgagtccctccttcgta

SEQ ID NO: 107439 - DNA, 20 bp, Artificial Sequence
  MKO10107439_B_Pdcd10
  gRNA
caggctgaaaaggaaaatcc

SEQ ID NO: 107440 - DNA, 20 bp, Artificial Sequence
  MKO10107440_B_Pdcd10
  gRNA
tctgagagccgctttcatta

SEQ ID NO: 107441 - DNA, 20 bp, Artificial Sequence
  MKO10107441_B_Pdcd11
  gRNA
aaatccgcatcccctcacat

SEQ ID NO: 107442 - DNA, 20 bp, Artificial Sequence
  MKO10107442_B_Pdcd11
  gRNA
tacatccggcagaagaacaa

SEQ ID NO: 107443 - DNA, 20 bp, Artificial Sequence
  MKO10107443_B_Pdcd11
  gRNA
acacacctcaccaacattcc

SEQ ID NO: 107444 - DNA, 20 bp, Artificial Sequence
  MKO10107444_B_Pdcd1lg2
  gRNA
aacccaaagtccccagaacg

SEQ ID NO: 107445 - DNA, 20 bp, Artificial Sequence
  MKO10107445_B_Pdcd1lg2
  gRNA
aggcttgaggcgcagaacac

SEQ ID NO: 107446 - DNA, 20 bp, Artificial Sequence
  MKO10107446_B_Pdcd1lg2
  gRNA
caccatcgctttgatcttcc

SEQ ID NO: 107447 - DNA, 20 bp, Artificial Sequence
  MKO10107447_B_Pdcd1
  gRNA
tggtttgagccaacccgtcc

SEQ ID NO: 107448 - DNA, 20 bp, Artificial Sequence
  MKO10107448_B_Pdcd1
  gRNA
agctgagcccctacgtccca

SEQ ID NO: 107449 - DNA, 20 bp, Artificial Sequence
  MKO10107449_B_Pdcd1
  gRNA
gatatcttgttgaggtctcc

SEQ ID NO: 107450 - DNA, 20 bp, Artificial Sequence
  MKO10107450_B_Pdcd2l
  gRNA
tgtccaccccttctctccgc

SEQ ID NO: 107451 - DNA, 20 bp, Artificial Sequence
  MKO10107451_B_Pdcd2l
  gRNA
ttcatgaacctataaaacgt

SEQ ID NO: 107452 - DNA, 20 bp, Artificial Sequence
  MKO10107452_B_Pdcd2l
  gRNA
gaagagaattgctgcttgcc

SEQ ID NO: 107453 - DNA, 20 bp, Artificial Sequence
  MKO10107453_B_Pdcd2
  gRNA
gatattccagattgcccgtg

SEQ ID NO: 107454 - DNA, 20 bp, Artificial Sequence
  MKO10107454_B_Pdcd2
  gRNA
cttggattcgtgctttgcca

SEQ ID NO: 107455 - DNA, 20 bp, Artificial Sequence
  MKO10107455_B_Pdcd2
  gRNA
tgtagacaaaatagaccata

SEQ ID NO: 107456 - DNA, 20 bp, Artificial Sequence
  MKO10107456_B_Pdcd4
  gRNA
ggtgatgagcacaaatgacg

SEQ ID NO: 107457 - DNA, 20 bp, Artificial Sequence
  MKO10107457_B_Pdcd4
  gRNA
ctagataggcggtccagatc

SEQ ID NO: 107458 - DNA, 20 bp, Artificial Sequence
  MKO10107458_B_Pdcd4
  gRNA
tgctcatcaccgtcccgcaa

SEQ ID NO: 107459 - DNA, 20 bp, Artificial Sequence
  MKO10107459_B_Pdcd5
  gRNA
tcctggtgatgcagcccaac

SEQ ID NO: 107460 - DNA, 20 bp, Artificial Sequence
  MKO10107460_B_Pdcd5
  gRNA
cagtatcttagcccaagttc

SEQ ID NO: 107461 - DNA, 20 bp, Artificial Sequence
  MKO10107461_B_Pdcd5
  gRNA
gcctgaaaaaactaaagcag

SEQ ID NO: 107462 - DNA, 20 bp, Artificial Sequence
  MKO10107462_B_Pdcd6ip
  gRNA
agatctgcttgacgttcacg

SEQ ID NO: 107463 - DNA, 20 bp, Artificial Sequence
  MKO10107463_B_Pdcd6ip
  gRNA
tacctggtactgcttagcag

SEQ ID NO: 107464 - DNA, 20 bp, Artificial Sequence
  MKO10107464_B_Pdcd6ip
  gRNA
cacccagatgaacgacgcca

SEQ ID NO: 107465 - DNA, 20 bp, Artificial Sequence
  MKO10107465_B_Pdcd6
  gRNA
tttgtagggttgataaagac

SEQ ID NO: 107466 - DNA, 20 bp, Artificial Sequence
  MKO10107466_B_Pdcd6
  gRNA
cttcagcaagcattatccaa

SEQ ID NO: 107467 - DNA, 20 bp, Artificial Sequence
  MKO10107467_B_Pdcd6
  gRNA
cccagagttgtccctgtcgt

SEQ ID NO: 107468 - DNA, 20 bp, Artificial Sequence
  MKO10107468_B_Pdcd7
  gRNA
tgcccgcgctcattcagata

SEQ ID NO: 107469 - DNA, 20 bp, Artificial Sequence
  MKO10107469_B_Pdcd7
  gRNA
gcatgattgggatcagtacc

SEQ ID NO: 107470 - DNA, 20 bp, Artificial Sequence
  MKO10107470_B_Pdcd7
  gRNA
ctttcgagcaccatcttcag

SEQ ID NO: 107471 - DNA, 20 bp, Artificial Sequence
  MKO10107471_B_Pdcl2
  gRNA
gcgcttacagcaggaggcca

SEQ ID NO: 107472 - DNA, 20 bp, Artificial Sequence
  MKO10107472_B_Pdcl2
  gRNA
agagatgaattacaacccac

SEQ ID NO: 107473 - DNA, 20 bp, Artificial Sequence
  MKO10107473_B_Pdcl2
  gRNA
ttccattctgtatcttcgtt

SEQ ID NO: 107474 - DNA, 20 bp, Artificial Sequence
  MKO10107474_B_Pdcl3
  gRNA
tttcacatcgggaaacttcc

SEQ ID NO: 107475 - DNA, 20 bp, Artificial Sequence
  MKO10107475_B_Pdcl3
  gRNA
cagctcacccttgtttgtac

SEQ ID NO: 107476 - DNA, 20 bp, Artificial Sequence
  MKO10107476_B_Pdcl3
  gRNA
accccaatgcagacaccgag

SEQ ID NO: 107477 - DNA, 20 bp, Artificial Sequence
  MKO10107477_B_Pdcl
  gRNA
cattagttccacacctgcag

SEQ ID NO: 107478 - DNA, 20 bp, Artificial Sequence
  MKO10107478_B_Pdcl
  gRNA
caaaaggtgtgatcaatgac

SEQ ID NO: 107479 - DNA, 20 bp, Artificial Sequence
  MKO10107479_B_Pdcl
  gRNA
ctgtctccaactgcttgaag

SEQ ID NO: 107480 - DNA, 20 bp, Artificial Sequence
  MKO10107480_B_Pdc
  gRNA
ccaatcatttattactcctt

SEQ ID NO: 107481 - DNA, 20 bp, Artificial Sequence
  MKO10107481_B_Pdc
  gRNA
ccaaaggagtaataaatgat

SEQ ID NO: 107482 - DNA, 20 bp, Artificial Sequence
  MKO10107482_B_Pdc
  gRNA
caaaatcttcttctaagctt

SEQ ID NO: 107483 - DNA, 20 bp, Artificial Sequence
  MKO10107483_B_Pddc1
  gRNA
tgactgagagcaatgcccga

SEQ ID NO: 107484 - DNA, 20 bp, Artificial Sequence
  MKO10107484_B_Pddc1
  gRNA
ttccagggctacagtctgac

SEQ ID NO: 107485 - DNA, 20 bp, Artificial Sequence
  MKO10107485_B_Pddc1
  gRNA
cccctggggtggccacctgt

SEQ ID NO: 107486 - DNA, 20 bp, Artificial Sequence
  MKO10107486_B_Pde10a
  gRNA
ttggcagccacaaaagccga

SEQ ID NO: 107487 - DNA, 20 bp, Artificial Sequence
  MKO10107487_B_Pde10a
  gRNA
aaacaaattcatctaatacc

SEQ ID NO: 107488 - DNA, 20 bp, Artificial Sequence
  MKO10107488_B_Pde10a
  gRNA
ttacattattgcactctcca

SEQ ID NO: 107489 - DNA, 20 bp, Artificial Sequence
  MKO10107489_B_Pde11a
  gRNA
gaagagctgagcattagata

SEQ ID NO: 107490 - DNA, 20 bp, Artificial Sequence
  MKO10107490_B_Pde11a
  gRNA
ggacatcagttcaaaggatt

SEQ ID NO: 107491 - DNA, 20 bp, Artificial Sequence
  MKO10107491_B_Pde11a
  gRNA
caaatgtatcttccgttctg

SEQ ID NO: 107492 - DNA, 20 bp, Artificial Sequence
  MKO10107492_B_Pde12
  gRNA
tttaatagtacaccatcaac

SEQ ID NO: 107493 - DNA, 20 bp, Artificial Sequence
  MKO10107493_B_Pde12
  gRNA
ttgctaatacccatctctac

SEQ ID NO: 107494 - DNA, 20 bp, Artificial Sequence
  MKO10107494_B_Pde12
  gRNA
gccggttgcgacctgcgagc

SEQ ID NO: 107495 - DNA, 20 bp, Artificial Sequence
  MKO10107495_B_Pde1a
  gRNA
tgatcttatcaaccgcttca

SEQ ID NO: 107496 - DNA, 20 bp, Artificial Sequence
  MKO10107496_B_Pde1a
  gRNA
tttgagtgacgtcagctgca

SEQ ID NO: 107497 - DNA, 20 bp, Artificial Sequence
  MKO10107497_B_Pde1a
  gRNA
cattatataatgcttcatac

SEQ ID NO: 107498 - DNA, 20 bp, Artificial Sequence
  MKO10107498_B_Pde1b
  gRNA
ctcttctgccctgcgacctt

SEQ ID NO: 107499 - DNA, 20 bp, Artificial Sequence
  MKO10107499_B_Pde1b
  gRNA
accctgcaggctgcgctaca

SEQ ID NO: 107500 - DNA, 20 bp, Artificial Sequence
  MKO10107500_B_Pde1b
  gRNA
acccagcagacccgagccaa

SEQ ID NO: 107501 - DNA, 20 bp, Artificial Sequence
  MKO10107501_B_Pde1c
  gRNA
atcgtccatgcggtgcaagc

SEQ ID NO: 107502 - DNA, 20 bp, Artificial Sequence
  MKO10107502_B_Pde1c
  gRNA
cttcagtgcatgatctccac

SEQ ID NO: 107503 - DNA, 20 bp, Artificial Sequence
  MKO10107503_B_Pde1c
  gRNA
agccaatcccgaacttctga

SEQ ID NO: 107504 - DNA, 20 bp, Artificial Sequence
  MKO10107504_B_Pde2a
  gRNA
gccatgcgccgacagcctgc

SEQ ID NO: 107505 - DNA, 20 bp, Artificial Sequence
  MKO10107505_B_Pde2a
  gRNA
cccccctcatgagctgccac

SEQ ID NO: 107506 - DNA, 20 bp, Artificial Sequence
  MKO10107506_B_Pde2a
  gRNA
attcctcaggcggggccagc

SEQ ID NO: 107507 - DNA, 20 bp, Artificial Sequence
  MKO10107507_B_Pde3a
  gRNA
gcacttacctgggatcctcg

SEQ ID NO: 107508 - DNA, 20 bp, Artificial Sequence
  MKO10107508_B_Pde3a
  gRNA
gccttcctcagagtccgagc

SEQ ID NO: 107509 - DNA, 20 bp, Artificial Sequence
  MKO10107509_B_Pde3a
  gRNA
gcagagaagggtcggccagg

SEQ ID NO: 107510 - DNA, 20 bp, Artificial Sequence
  MKO10107510_B_Pde3b
  gRNA
ctcattagtcagcaacgatg

SEQ ID NO: 107511 - DNA, 20 bp, Artificial Sequence
  MKO10107511_B_Pde3b
  gRNA
acagacgatgacctctgctt

SEQ ID NO: 107512 - DNA, 20 bp, Artificial Sequence
  MKO10107512_B_Pde3b
  gRNA
tccatactcacctggtaatg

SEQ ID NO: 107513 - DNA, 20 bp, Artificial Sequence
  MKO10107513_B_Pde4a
  gRNA
ctacacctacttgtgctaag

SEQ ID NO: 107514 - DNA, 20 bp, Artificial Sequence
  MKO10107514_B_Pde4a
  gRNA
ctgacctgctcatttccgac

SEQ ID NO: 107515 - DNA, 20 bp, Artificial Sequence
  MKO10107515_B_Pde4a
  gRNA
ctgaaaaagctggtacacac

SEQ ID NO: 107516 - DNA, 20 bp, Artificial Sequence
  MKO10107516_B_Pde4b
  gRNA
gtttcttacacttcgcaagc

SEQ ID NO: 107517 - DNA, 20 bp, Artificial Sequence
  MKO10107517_B_Pde4b
  gRNA
ccctcaagccggctcttcgt

SEQ ID NO: 107518 - DNA, 20 bp, Artificial Sequence
  MKO10107518_B_Pde4b
  gRNA
actggagcctgactagccgc

SEQ ID NO: 107519 - DNA, 20 bp, Artificial Sequence
  MKO10107519_B_Pde4c
  gRNA
ttccaattgtgaagaccacg

SEQ ID NO: 107520 - DNA, 20 bp, Artificial Sequence
  MKO10107520_B_Pde4c
  gRNA
gattgtcacgcccttcgccc

SEQ ID NO: 107521 - DNA, 20 bp, Artificial Sequence
  MKO10107521_B_Pde4c
  gRNA
gtgatcctgagacggttctc

SEQ ID NO: 107522 - DNA, 20 bp, Artificial Sequence
  MKO10107522_B_Pde4dip
  gRNA
gtaggggtctcatgcaagtc

SEQ ID NO: 107523 - DNA, 20 bp, Artificial Sequence
  MKO10107523_B_Pde4dip
  gRNA
gtacgtggagctgtccgagc

SEQ ID NO: 107524 - DNA, 20 bp, Artificial Sequence
  MKO10107524_B_Pde4dip
  gRNA
tacgacaatccagagcctca

SEQ ID NO: 107525 - DNA, 20 bp, Artificial Sequence
  MKO10107525_B_Pde4d
  gRNA
cgcagcaaagttgttccgta

SEQ ID NO: 107526 - DNA, 20 bp, Artificial Sequence
  MKO10107526_B_Pde4d
  gRNA
ttacatatcactggcaatcg

SEQ ID NO: 107527 - DNA, 20 bp, Artificial Sequence
  MKO10107527_B_Pde4d
  gRNA
tggctagcctgcgaaccgta

SEQ ID NO: 107528 - DNA, 20 bp, Artificial Sequence
  MKO10107528_B_Pde5a
  gRNA
acagagacatggtcaacgca

SEQ ID NO: 107529 - DNA, 20 bp, Artificial Sequence
  MKO10107529_B_Pde5a
  gRNA
gcagaagttgaccaaattac

SEQ ID NO: 107530 - DNA, 20 bp, Artificial Sequence
  MKO10107530_B_Pde5a
  gRNA
gaacaataccacagaatgcc

SEQ ID NO: 107531 - DNA, 20 bp, Artificial Sequence
  MKO10107531_B_Pde6a
  gRNA
aagaaacttacccttccgtc

SEQ ID NO: 107532 - DNA, 20 bp, Artificial Sequence
  MKO10107532_B_Pde6a
  gRNA
aactgtgacagatactccgt

SEQ ID NO: 107533 - DNA, 20 bp, Artificial Sequence
  MKO10107533_B_Pde6a
  gRNA
tttattcacagccatgatta

SEQ ID NO: 107534 - DNA, 20 bp, Artificial Sequence
  MKO10107534_B_Pde6b
  gRNA
ttcgtgggcctgagtatggc

SEQ ID NO: 107535 - DNA, 20 bp, Artificial Sequence
  MKO10107535_B_Pde6b
  gRNA
ctctgcgtgtctcacagttg

SEQ ID NO: 107536 - DNA, 20 bp, Artificial Sequence
  MKO10107536_B_Pde6b
  gRNA
agcttaggtgatagatcttc

SEQ ID NO: 107537 - DNA, 20 bp, Artificial Sequence
  MKO10107537_B_Pde6c
  gRNA
gtgcgacagcaacaaagctg

SEQ ID NO: 107538 - DNA, 20 bp, Artificial Sequence
  MKO10107538_B_Pde6c
  gRNA
gctttgttgctgtcgcacta

SEQ ID NO: 107539 - DNA, 20 bp, Artificial Sequence
  MKO10107539_B_Pde6c
  gRNA
cagagaagttgtatttccgt

SEQ ID NO: 107540 - DNA, 20 bp, Artificial Sequence
  MKO10107540_B_Pde6d
  gRNA
ccgaaacagggaagatactc

SEQ ID NO: 107541 - DNA, 20 bp, Artificial Sequence
  MKO10107541_B_Pde6d
  gRNA
ccagagtatcttccctgttt

SEQ ID NO: 107542 - DNA, 20 bp, Artificial Sequence
  MKO10107542_B_Pde6d
  gRNA
gagacactgccttgcacttg

SEQ ID NO: 107543 - DNA, 20 bp, Artificial Sequence
  MKO10107543_B_Pde6g
  gRNA
ctgactaaatgatgccatac

SEQ ID NO: 107544 - DNA, 20 bp, Artificial Sequence
  MKO10107544_B_Pde6g
  gRNA
aggtttggggatgacatccc

SEQ ID NO: 107545 - DNA, 20 bp, Artificial Sequence
  MKO10107545_B_Pde6g
  gRNA
gtccccaggccttccattcc

SEQ ID NO: 107546 - DNA, 20 bp, Artificial Sequence
  MKO10107546_B_Pde6h
  gRNA
gttcctagcccctccatgcc

SEQ ID NO: 107547 - DNA, 20 bp, Artificial Sequence
  MKO10107547_B_Pde6h
  gRNA
aggtttggagatgacatccc

SEQ ID NO: 107548 - DNA, 20 bp, Artificial Sequence
  MKO10107548_B_Pde6h
  gRNA
caagctcatgcagctccaga

SEQ ID NO: 107549 - DNA, 20 bp, Artificial Sequence
  MKO10107549_B_Pde7a
  gRNA
ttgaagcatcagtctccgcc

SEQ ID NO: 107550 - DNA, 20 bp, Artificial Sequence
  MKO10107550_B_Pde7a
  gRNA
agtctgatcagaactgtcat

SEQ ID NO: 107551 - DNA, 20 bp, Artificial Sequence
  MKO10107551_B_Pde7a
  gRNA
ctgtttgatagactaacaaa

SEQ ID NO: 107552 - DNA, 20 bp, Artificial Sequence
  MKO10107552_B_Pde7b
  gRNA
cccggagaagcctagatgca

SEQ ID NO: 107553 - DNA, 20 bp, Artificial Sequence
  MKO10107553_B_Pde7b
  gRNA
aaagtcccacgttccaactt

SEQ ID NO: 107554 - DNA, 20 bp, Artificial Sequence
  MKO10107554_B_Pde7b
  gRNA
acacatttgacactctgttc

SEQ ID NO: 107555 - DNA, 20 bp, Artificial Sequence
  MKO10107555_B_Pde8a
  gRNA
gtttgtcctggaaacaggta

SEQ ID NO: 107556 - DNA, 20 bp, Artificial Sequence
  MKO10107556_B_Pde8a
  gRNA
cccgtgtgaagccagcagca

SEQ ID NO: 107557 - DNA, 20 bp, Artificial Sequence
  MKO10107557_B_Pde8a
  gRNA
ttaatgcccttccttgctgc

SEQ ID NO: 107558 - DNA, 20 bp, Artificial Sequence
  MKO10107558_B_Pde8b
  gRNA
cgtgtgctcagaggggttcg

SEQ ID NO: 107559 - DNA, 20 bp, Artificial Sequence
  MKO10107559_B_Pde8b
  gRNA
tgggcccatgagactgacac

SEQ ID NO: 107560 - DNA, 20 bp, Artificial Sequence
  MKO10107560_B_Pde8b
  gRNA
agggtcctgtgtcagtctca

SEQ ID NO: 107561 - DNA, 20 bp, Artificial Sequence
  MKO10107561_B_Pde9a
  gRNA
gcttaccgctctgaattcgc

SEQ ID NO: 107562 - DNA, 20 bp, Artificial Sequence
  MKO10107562_B_Pde9a
  gRNA
agaacgagaagaacttatcc

SEQ ID NO: 107563 - DNA, 20 bp, Artificial Sequence
  MKO10107563_B_Pde9a
  gRNA
ctcttacagcactccctaca

SEQ ID NO: 107564 - DNA, 20 bp, Artificial Sequence
  MKO10107564_B_Pdf
  gRNA
ctgcttgttcatcgacaaaa

SEQ ID NO: 107565 - DNA, 20 bp, Artificial Sequence
  MKO10107565_B_Pdf
  gRNA
acctggcacacgtgcgcgta

SEQ ID NO: 107566 - DNA, 20 bp, Artificial Sequence
  MKO10107566_B_Pdf
  gRNA
ccccgagctgcggcgcacta

SEQ ID NO: 107567 - DNA, 20 bp, Artificial Sequence
  MKO10107567_B_Pdgfa
  gRNA
caggccgcttctcgggcaca

SEQ ID NO: 107568 - DNA, 20 bp, Artificial Sequence
  MKO10107568_B_Pdgfa
  gRNA
ctcttggagatagactccgt

SEQ ID NO: 107569 - DNA, 20 bp, Artificial Sequence
  MKO10107569_B_Pdgfa
  gRNA
ttaaccatgtgcccgagaag

SEQ ID NO: 107570 - DNA, 20 bp, Artificial Sequence
  MKO10107570_B_Pdgfb
  gRNA
aacatgacccgagcacactc

SEQ ID NO: 107571 - DNA, 20 bp, Artificial Sequence
  MKO10107571_B_Pdgfb
  gRNA
ctgctgcacagagactccgt

SEQ ID NO: 107572 - DNA, 20 bp, Artificial Sequence
  MKO10107572_B_Pdgfb
  gRNA
cactactgtctcacacttgc

SEQ ID NO: 107573 - DNA, 20 bp, Artificial Sequence
  MKO10107573_B_Pdgfc
  gRNA
ccatacgggaagagctaaag

SEQ ID NO: 107574 - DNA, 20 bp, Artificial Sequence
  MKO10107574_B_Pdgfc
  gRNA
tatgaggaaacttcgggctg

SEQ ID NO: 107575 - DNA, 20 bp, Artificial Sequence
  MKO10107575_B_Pdgfc
  gRNA
acagataccatattctggcc

SEQ ID NO: 107576 - DNA, 20 bp, Artificial Sequence
  MKO10107576_B_Pdgfd
  gRNA
taccatgatcggaagtccaa

SEQ ID NO: 107577 - DNA, 20 bp, Artificial Sequence
  MKO10107577_B_Pdgfd
  gRNA
tttgttcttgacgttatcct

SEQ ID NO: 107578 - DNA, 20 bp, Artificial Sequence
  MKO10107578_B_Pdgfd
  gRNA
acactttaggtatgactttg

SEQ ID NO: 107579 - DNA, 20 bp, Artificial Sequence
  MKO10107579_B_Pdgfra
  gRNA
tgaagaagacgaccccaacg

SEQ ID NO: 107580 - DNA, 20 bp, Artificial Sequence
  MKO10107580_B_Pdgfra
  gRNA
ggcataaacattaaactcgc

SEQ ID NO: 107581 - DNA, 20 bp, Artificial Sequence
  MKO10107581_B_Pdgfra
  gRNA
gtagtagcaagtgtaccatc

SEQ ID NO: 107582 - DNA, 20 bp, Artificial Sequence
  MKO10107582_B_Pdgfrb
  gRNA
cggtcccaggagccataaca

SEQ ID NO: 107583 - DNA, 20 bp, Artificial Sequence
  MKO10107583_B_Pdgfrb
  gRNA
ggcctagtcatcacgccccc

SEQ ID NO: 107584 - DNA, 20 bp, Artificial Sequence
  MKO10107584_B_Pdgfrb
  gRNA
tcagtgagtgtgaacgacca

SEQ ID NO: 107585 - DNA, 20 bp, Artificial Sequence
  MKO10107585_B_Pdgfrl
  gRNA
gacggggctgtcactcgaca

SEQ ID NO: 107586 - DNA, 20 bp, Artificial Sequence
  MKO10107586_B_Pdgfrl
  gRNA
acaccggtgaattcagctgc

SEQ ID NO: 107587 - DNA, 20 bp, Artificial Sequence
  MKO10107587_B_Pdgfrl
  gRNA
gtgaagcagagtgaacgcta

SEQ ID NO: 107588 - DNA, 20 bp, Artificial Sequence
  MKO10107588_B_Pdha1
  gRNA
tttctaggcaagccgagtgc

SEQ ID NO: 107589 - DNA, 20 bp, Artificial Sequence
  MKO10107589_B_Pdha1
  gRNA
cagtgatgaggtggtccgta

SEQ ID NO: 107590 - DNA, 20 bp, Artificial Sequence
  MKO10107590_B_Pdha1
  gRNA
ccatttctaggacgaagagg

SEQ ID NO: 107591 - DNA, 20 bp, Artificial Sequence
  MKO10107591_B_Pdha2
  gRNA
tccattctcgccgagctgac

SEQ ID NO: 107592 - DNA, 20 bp, Artificial Sequence
  MKO10107592_B_Pdha2
  gRNA
cgtgaacgataactgatccc

SEQ ID NO: 107593 - DNA, 20 bp, Artificial Sequence
  MKO10107593_B_Pdha2
  gRNA
aattcggcgcatggagttga

SEQ ID NO: 107594 - DNA, 20 bp, Artificial Sequence
  MKO10107594_B_Pdhb
  gRNA
gctttacagatgggctttgc

SEQ ID NO: 107595 - DNA, 20 bp, Artificial Sequence
  MKO10107595_B_Pdhb
  gRNA
aaaacgcctcttcagcagcc

SEQ ID NO: 107596 - DNA, 20 bp, Artificial Sequence
  MKO10107596_B_Pdhb
  gRNA
catcgacacccccatctcag

SEQ ID NO: 107597 - DNA, 20 bp, Artificial Sequence
  MKO10107597_B_Pdhx
  gRNA
tccagctgcccgcaacattc

SEQ ID NO: 107598 - DNA, 20 bp, Artificial Sequence
  MKO10107598_B_Pdhx
  gRNA
aggagcacaaagggacggca

SEQ ID NO: 107599 - DNA, 20 bp, Artificial Sequence
  MKO10107599_B_Pdhx
  gRNA
aggtggagcactgacatcct

SEQ ID NO: 107600 - DNA, 20 bp, Artificial Sequence
  MKO10107600_B_Pdia2
  gRNA
tgctatgtatgacgaggaag

SEQ ID NO: 107601 - DNA, 20 bp, Artificial Sequence
  MKO10107601_B_Pdia2
  gRNA
aatgaccaccatatcccatt

SEQ ID NO: 107602 - DNA, 20 bp, Artificial Sequence
  MKO10107602_B_Pdia2
  gRNA
ccaaacttctcaaaaagttg

SEQ ID NO: 107603 - DNA, 20 bp, Artificial Sequence
  MKO10107603_B_Pdia3
  gRNA
gtagttatctctcaagttgc

SEQ ID NO: 107604 - DNA, 20 bp, Artificial Sequence
  MKO10107604_B_Pdia3
  gRNA
gctgcagcaaccagattaaa

SEQ ID NO: 107605 - DNA, 20 bp, Artificial Sequence
  MKO10107605_B_Pdia3
  gRNA
ccgatgctcacctttgctaa

SEQ ID NO: 107606 - DNA, 20 bp, Artificial Sequence
  MKO10107606_B_Pdia4
  gRNA
ccgttgactatgatggctcc

SEQ ID NO: 107607 - DNA, 20 bp, Artificial Sequence
  MKO10107607_B_Pdia4
  gRNA
gagaagtttcccagcctgat

SEQ ID NO: 107608 - DNA, 20 bp, Artificial Sequence
  MKO10107608_B_Pdia4
  gRNA
tgacgatgacttggaagtta

SEQ ID NO: 107609 - DNA, 20 bp, Artificial Sequence
  MKO10107609_B_Pdia5
  gRNA
aaggccaaggcaccgtctgc

SEQ ID NO: 107610 - DNA, 20 bp, Artificial Sequence
  MKO10107610_B_Pdia5
  gRNA
gaaagttgacctcagcccaa

SEQ ID NO: 107611 - DNA, 20 bp, Artificial Sequence
  MKO10107611_B_Pdia5
  gRNA
tcaccttcaacgtcacagct

SEQ ID NO: 107612 - DNA, 20 bp, Artificial Sequence
  MKO10107612_B_Pdia6
  gRNA
gttagctccaaatatcttga

SEQ ID NO: 107613 - DNA, 20 bp, Artificial Sequence
  MKO10107613_B_Pdia6
  gRNA
accgctgactgctagaaaga

SEQ ID NO: 107614 - DNA, 20 bp, Artificial Sequence
  MKO10107614_B_Pdia6
  gRNA
aaaggtgtggtcactgccag

SEQ ID NO: 107615 - DNA, 20 bp, Artificial Sequence
  MKO10107615_B_Pdik1l
  gRNA
gaagtccgtcccgcatgccg

SEQ ID NO: 107616 - DNA, 20 bp, Artificial Sequence
  MKO10107616_B_Pdik1l
  gRNA
acacaacaccgtaactacct

SEQ ID NO: 107617 - DNA, 20 bp, Artificial Sequence
  MKO10107617_B_Pdik1l
  gRNA
ccagaagcgcctattatttg

SEQ ID NO: 107618 - DNA, 20 bp, Artificial Sequence
  MKO10107618_B_Pdilt
  gRNA
ggcaaagccgcagagatctt

SEQ ID NO: 107619 - DNA, 20 bp, Artificial Sequence
  MKO10107619_B_Pdilt
  gRNA
gtcataaagcaacagctcac

SEQ ID NO: 107620 - DNA, 20 bp, Artificial Sequence
  MKO10107620_B_Pdilt
  gRNA
gaagaagccaacgatgacca

SEQ ID NO: 107621 - DNA, 20 bp, Artificial Sequence
  MKO10107621_B_Pdk1
  gRNA
acaagagttgcctgttagat

SEQ ID NO: 107622 - DNA, 20 bp, Artificial Sequence
  MKO10107622_B_Pdk1
  gRNA
taggtatatccaaagccttc

SEQ ID NO: 107623 - DNA, 20 bp, Artificial Sequence
  MKO10107623_B_Pdk1
  gRNA
caatgatgtcattcccacca

SEQ ID NO: 107624 - DNA, 20 bp, Artificial Sequence
  MKO10107624_B_Pdk2
  gRNA
tgggcaccacgtcattgtgc

SEQ ID NO: 107625 - DNA, 20 bp, Artificial Sequence
  MKO10107625_B_Pdk2
  gRNA
gaacgggcagctcctgccgg

SEQ ID NO: 107626 - DNA, 20 bp, Artificial Sequence
  MKO10107626_B_Pdk2
  gRNA
atcgatgctgccaatgtgtt

SEQ ID NO: 107627 - DNA, 20 bp, Artificial Sequence
  MKO10107627_B_Pdk3
  gRNA
ggttggtataaaaccgatcc

SEQ ID NO: 107628 - DNA, 20 bp, Artificial Sequence
  MKO10107628_B_Pdk3
  gRNA
cctgcacatccgaaacatat

SEQ ID NO: 107629 - DNA, 20 bp, Artificial Sequence
  MKO10107629_B_Pdk3
  gRNA
ccaaggcgtgattgagtaca

SEQ ID NO: 107630 - DNA, 20 bp, Artificial Sequence
  MKO10107630_B_Pdk4
  gRNA
tcgatacttccaatgtggct

SEQ ID NO: 107631 - DNA, 20 bp, Artificial Sequence
  MKO10107631_B_Pdk4
  gRNA
tatcgacccaaactgtgatg

SEQ ID NO: 107632 - DNA, 20 bp, Artificial Sequence
  MKO10107632_B_Pdk4
  gRNA
acatgaaccgcatttctact

SEQ ID NO: 107633 - DNA, 20 bp, Artificial Sequence
  MKO10107633_B_Pdlim1
  gRNA
ttcccctcctcggtcactag

SEQ ID NO: 107634 - DNA, 20 bp, Artificial Sequence
  MKO10107634_B_Pdlim1
  gRNA
ccaggtcactcccggaagca

SEQ ID NO: 107635 - DNA, 20 bp, Artificial Sequence
  MKO10107635_B_Pdlim1
  gRNA
cagagtccttgtcaatgata

SEQ ID NO: 107636 - DNA, 20 bp, Artificial Sequence
  MKO10107636_B_Pdlim2
  gRNA
ggtggccagggtaggtcaag

SEQ ID NO: 107637 - DNA, 20 bp, Artificial Sequence
  MKO10107637_B_Pdlim2
  gRNA
agtgctggcaaccagattcc

SEQ ID NO: 107638 - DNA, 20 bp, Artificial Sequence
  MKO10107638_B_Pdlim2
  gRNA
aggtcccaaacagcctctcc

SEQ ID NO: 107639 - DNA, 20 bp, Artificial Sequence
  MKO10107639_B_Pdlim3
  gRNA
cccagccgctcctcgccagt

SEQ ID NO: 107640 - DNA, 20 bp, Artificial Sequence
  MKO10107640_B_Pdlim3
  gRNA
ccagggcagaaactcgctta

SEQ ID NO: 107641 - DNA, 20 bp, Artificial Sequence
  MKO10107641_B_Pdlim3
  gRNA
tgtcaatcttgagacacaac

SEQ ID NO: 107642 - DNA, 20 bp, Artificial Sequence
  MKO10107642_B_Pdlim4
  gRNA
ccacgatcatcttacgctct

SEQ ID NO: 107643 - DNA, 20 bp, Artificial Sequence
  MKO10107643_B_Pdlim4
  gRNA
tcgggcctgggatctccata

SEQ ID NO: 107644 - DNA, 20 bp, Artificial Sequence
  MKO10107644_B_Pdlim4
  gRNA
acacatgcagagcgctcatc

SEQ ID NO: 107645 - DNA, 20 bp, Artificial Sequence
  MKO10107645_B_Pdlim5
  gRNA
gacgtggttctcagcatcga

SEQ ID NO: 107646 - DNA, 20 bp, Artificial Sequence
  MKO10107646_B_Pdlim5
  gRNA
cgtaccttctggacggaaac

SEQ ID NO: 107647 - DNA, 20 bp, Artificial Sequence
  MKO10107647_B_Pdlim5
  gRNA
agctgcagccaagagtgagc

SEQ ID NO: 107648 - DNA, 20 bp, Artificial Sequence
  MKO10107648_B_Pdlim7
  gRNA
tgatggaggataccgaagac

SEQ ID NO: 107649 - DNA, 20 bp, Artificial Sequence
  MKO10107649_B_Pdlim7
  gRNA
ggctcacccgagagatagag

SEQ ID NO: 107650 - DNA, 20 bp, Artificial Sequence
  MKO10107650_B_Pdlim7
  gRNA
cttccgtctgcaagggggca

SEQ ID NO: 107651 - DNA, 20 bp, Artificial Sequence
  MKO10107651_B_Pdp1
  gRNA
aggagaatgtgtgtgtgtcc

SEQ ID NO: 107652 - DNA, 20 bp, Artificial Sequence
  MKO10107652_B_Pdp1
  gRNA
catctcattcgccatgctgt

SEQ ID NO: 107653 - DNA, 20 bp, Artificial Sequence
  MKO10107653_B_Pdp1
  gRNA
gcctgcaaatgcacccatag

SEQ ID NO: 107654 - DNA, 20 bp, Artificial Sequence
  MKO10107654_B_Pdp2
  gRNA
ctgagctgtcccggcttaag

SEQ ID NO: 107655 - DNA, 20 bp, Artificial Sequence
  MKO10107655_B_Pdp2
  gRNA
gggccacgcgtgtgcgcaag

SEQ ID NO: 107656 - DNA, 20 bp, Artificial Sequence
  MKO10107656_B_Pdp2
  gRNA
tcgtggcagcccttgagtat

SEQ ID NO: 107657 - DNA, 20 bp, Artificial Sequence
  MKO10107657_B_Pdpk1
  gRNA
actgagcccggttcgtcccc

SEQ ID NO: 107658 - DNA, 20 bp, Artificial Sequence
  MKO10107658_B_Pdpk1
  gRNA
gtacttactagcatattctc

SEQ ID NO: 107659 - DNA, 20 bp, Artificial Sequence
  MKO10107659_B_Pdpk1
  gRNA
cgcgctcaccagctggctgg

SEQ ID NO: 107660 - DNA, 20 bp, Artificial Sequence
  MKO10107660_B_Pdpn
  gRNA
gttggcgtcttgttagccat

SEQ ID NO: 107661 - DNA, 20 bp, Artificial Sequence
  MKO10107661_B_Pdpn
  gRNA
gagtacaaccactgtcaaag

SEQ ID NO: 107662 - DNA, 20 bp, Artificial Sequence
  MKO10107662_B_Pdpn
  gRNA
tggcttgccagtagtcaccc

SEQ ID NO: 107663 - DNA, 20 bp, Artificial Sequence
  MKO10107663_B_Pdpr
  gRNA
cttcacgtactgatcaaaaa

SEQ ID NO: 107664 - DNA, 20 bp, Artificial Sequence
  MKO10107664_B_Pdpr
  gRNA
ctctgaagcgtatcaactca

SEQ ID NO: 107665 - DNA, 20 bp, Artificial Sequence
  MKO10107665_B_Pdpr
  gRNA
cggcacagttgacaaaatac

SEQ ID NO: 107666 - DNA, 20 bp, Artificial Sequence
  MKO10107666_B_Pdrg1
  gRNA
aatgcctcaccctaagacga

SEQ ID NO: 107667 - DNA, 20 bp, Artificial Sequence
  MKO10107667_B_Pdrg1
  gRNA
tggatcatttccttcgtctt

SEQ ID NO: 107668 - DNA, 20 bp, Artificial Sequence
  MKO10107668_B_Pdrg1
  gRNA
gcaacttaccagagacactc

SEQ ID NO: 107669 - DNA, 20 bp, Artificial Sequence
  MKO10107669_B_Pds5a
  gRNA
tctatacagaccttgtgtgc

SEQ ID NO: 107670 - DNA, 20 bp, Artificial Sequence
  MKO10107670_B_Pds5a
  gRNA
tttattaccagacagttaaa

SEQ ID NO: 107671 - DNA, 20 bp, Artificial Sequence
  MKO10107671_B_Pds5a
  gRNA
attgatttaagaatttagct

SEQ ID NO: 107672 - DNA, 20 bp, Artificial Sequence
  MKO10107672_B_Pds5b
  gRNA
gcatatgaactttctgattg

SEQ ID NO: 107673 - DNA, 20 bp, Artificial Sequence
  MKO10107673_B_Pds5b
  gRNA
caaagagccctcaatttaat

SEQ ID NO: 107674 - DNA, 20 bp, Artificial Sequence
  MKO10107674_B_Pds5b
  gRNA
atatatttatgtttataaca

SEQ ID NO: 107675 - DNA, 20 bp, Artificial Sequence
  MKO10107675_B_Pdss1
  gRNA
tgtgatatactatgcatagt

SEQ ID NO: 107676 - DNA, 20 bp, Artificial Sequence
  MKO10107676_B_Pdss1
  gRNA
aatgatccacactgctactc

SEQ ID NO: 107677 - DNA, 20 bp, Artificial Sequence
  MKO10107677_B_Pdss1
  gRNA
gatgatgcaagttctcgaag

SEQ ID NO: 107678 - DNA, 20 bp, Artificial Sequence
  MKO10107678_B_Pdss2
  gRNA
gctcagcaatatcgccatgc

SEQ ID NO: 107679 - DNA, 20 bp, Artificial Sequence
  MKO10107679_B_Pdss2
  gRNA
ttactatcccacgatgcacc

SEQ ID NO: 107680 - DNA, 20 bp, Artificial Sequence
  MKO10107680_B_Pdss2
  gRNA
cttggtgcatggagtatacc

SEQ ID NO: 107681 - DNA, 20 bp, Artificial Sequence
  MKO10107681_B_Pdx1
  gRNA
gcgagcgggggcacttcgta

SEQ ID NO: 107682 - DNA, 20 bp, Artificial Sequence
  MKO10107682_B_Pdx1
  gRNA
ggacccgtactgcctacacc

SEQ ID NO: 107683 - DNA, 20 bp, Artificial Sequence
  MKO10107683_B_Pdx1
  gRNA
cctcccggacctttcccgaa

SEQ ID NO: 107684 - DNA, 20 bp, Artificial Sequence
  MKO10107684_B_Pdxdc1
  gRNA
ggcacctacctgccttggag

SEQ ID NO: 107685 - DNA, 20 bp, Artificial Sequence
  MKO10107685_B_Pdxdc1
  gRNA
agaccctacattagctgaaa

SEQ ID NO: 107686 - DNA, 20 bp, Artificial Sequence
  MKO10107686_B_Pdxdc1
  gRNA
aaaacttgaaagaggcgatg

SEQ ID NO: 107687 - DNA, 20 bp, Artificial Sequence
  MKO10107687_B_Pdxk
  gRNA
gggccaggtgctgaagtccc

SEQ ID NO: 107688 - DNA, 20 bp, Artificial Sequence
  MKO10107688_B_Pdxk
  gRNA
ttccacttgtcgcccatcac

SEQ ID NO: 107689 - DNA, 20 bp, Artificial Sequence
  MKO10107689_B_Pdxk
  gRNA
cgcagtgtgtgaccctgtga

SEQ ID NO: 107690 - DNA, 20 bp, Artificial Sequence
  MKO10107690_B_Pdxp
  gRNA
ggtcacgctggccagccgtc

SEQ ID NO: 107691 - DNA, 20 bp, Artificial Sequence
  MKO10107691_B_Pdxp
  gRNA
ctcgtcgtagcctacgagca

SEQ ID NO: 107692 - DNA, 20 bp, Artificial Sequence
  MKO10107692_B_Pdxp
  gRNA
cgcggccctgcgcgacgtgc

SEQ ID NO: 107693 - DNA, 20 bp, Artificial Sequence
  MKO10107693_B_Pdyn
  gRNA
cgtgatgccctctaatgtta

SEQ ID NO: 107694 - DNA, 20 bp, Artificial Sequence
  MKO10107694_B_Pdyn
  gRNA
ttccgagatggcccgggatg

SEQ ID NO: 107695 - DNA, 20 bp, Artificial Sequence
  MKO10107695_B_Pdyn
  gRNA
gcattcgccccaagctgaag

SEQ ID NO: 107696 - DNA, 20 bp, Artificial Sequence
  MKO10107696_B_Pdzd11
  gRNA
gtcaactcattgttgtagtc

SEQ ID NO: 107697 - DNA, 20 bp, Artificial Sequence
  MKO10107697_B_Pdzd11
  gRNA
catcattcacagctagaact

SEQ ID NO: 107698 - DNA, 20 bp, Artificial Sequence
  MKO10107698_B_Pdzd11
  gRNA
gatgaagatgcctagctgcg

SEQ ID NO: 107699 - DNA, 20 bp, Artificial Sequence
  MKO10107699_B_Pdzd2
  gRNA
ctggactgacaacgaagacc

SEQ ID NO: 107700 - DNA, 20 bp, Artificial Sequence
  MKO10107700_B_Pdzd2
  gRNA
gatgaactgctggtgatcaa

SEQ ID NO: 107701 - DNA, 20 bp, Artificial Sequence
  MKO10107701_B_Pdzd2
  gRNA
gaggtgagcgctttgatcct

SEQ ID NO: 107702 - DNA, 20 bp, Artificial Sequence
  MKO10107702_B_Pdzd3
  gRNA
gatcgaccctgcacaccaca

SEQ ID NO: 107703 - DNA, 20 bp, Artificial Sequence
  MKO10107703_B_Pdzd3
  gRNA
ttgctcaacagacaaaagcg

SEQ ID NO: 107704 - DNA, 20 bp, Artificial Sequence
  MKO10107704_B_Pdzd3
  gRNA
gggggttaccagattggtcc

SEQ ID NO: 107705 - DNA, 20 bp, Artificial Sequence
  MKO10107705_B_Pdzd4
  gRNA
cagcgccatgatatgctcga

SEQ ID NO: 107706 - DNA, 20 bp, Artificial Sequence
  MKO10107706_B_Pdzd4
  gRNA
ctgtgcgatagcacaccatc

SEQ ID NO: 107707 - DNA, 20 bp, Artificial Sequence
  MKO10107707_B_Pdzd4
  gRNA
gttcatggagggcggcccgc

SEQ ID NO: 107708 - DNA, 20 bp, Artificial Sequence
  MKO10107708_B_Pdzd7
  gRNA
tgcgccggaccatcatgtgt

SEQ ID NO: 107709 - DNA, 20 bp, Artificial Sequence
  MKO10107709_B_Pdzd7
  gRNA
gaagtgcagttcaacgccgt

SEQ ID NO: 107710 - DNA, 20 bp, Artificial Sequence
  MKO10107710_B_Pdzd7
  gRNA
gtcatcgaacctgacaccgt

SEQ ID NO: 107711 - DNA, 20 bp, Artificial Sequence
  MKO10107711_B_Pdzd8
  gRNA
cccaaactcacctgctgcga

SEQ ID NO: 107712 - DNA, 20 bp, Artificial Sequence
  MKO10107712_B_Pdzd8
  gRNA
acaaaggagttctattaaga

SEQ ID NO: 107713 - DNA, 20 bp, Artificial Sequence
  MKO10107713_B_Pdzd8
  gRNA
ctaacaatgtaactttaagc

SEQ ID NO: 107714 - DNA, 20 bp, Artificial Sequence
  MKO10107714_B_Pdzd9
  gRNA
ctgcggcccctttattgatg

SEQ ID NO: 107715 - DNA, 20 bp, Artificial Sequence
  MKO10107715_B_Pdzd9
  gRNA
aatttgtagcactgtcccta

SEQ ID NO: 107716 - DNA, 20 bp, Artificial Sequence
  MKO10107716_B_Pdzd9
  gRNA
ctacaaattaaggcttaccg

SEQ ID NO: 107717 - DNA, 20 bp, Artificial Sequence
  MKO10107717_B_Pdzk1ip1
  gRNA
gaatgcctacgagaatgttc

SEQ ID NO: 107718 - DNA, 20 bp, Artificial Sequence
  MKO10107718_B_Pdzk1ip1
  gRNA
gggagcacagtgatgatcat

SEQ ID NO: 107719 - DNA, 20 bp, Artificial Sequence
  MKO10107719_B_Pdzk1ip1
  gRNA
ggatggcagatactcctcaa

SEQ ID NO: 107720 - DNA, 20 bp, Artificial Sequence
  MKO10107720_B_Pdzk1
  gRNA
gatggtaggtcaaatcatta

SEQ ID NO: 107721 - DNA, 20 bp, Artificial Sequence
  MKO10107721_B_Pdzk1
  gRNA
ccttcttgatcactaccacc

SEQ ID NO: 107722 - DNA, 20 bp, Artificial Sequence
  MKO10107722_B_Pdzk1
  gRNA
gatcacttgattgaagtgaa

SEQ ID NO: 107723 - DNA, 20 bp, Artificial Sequence
  MKO10107723_B_Pdzrn3
  gRNA
aggcccgctgtcaactattt

SEQ ID NO: 107724 - DNA, 20 bp, Artificial Sequence
  MKO10107724_B_Pdzrn3
  gRNA
atatcccccatgtagtcatt

SEQ ID NO: 107725 - DNA, 20 bp, Artificial Sequence
  MKO10107725_B_Pdzrn3
  gRNA
taatcctgtcatgaatttgc

SEQ ID NO: 107726 - DNA, 20 bp, Artificial Sequence
  MKO10107726_B_Pdzrn4
  gRNA
ctgccactcccttcatccga

SEQ ID NO: 107727 - DNA, 20 bp, Artificial Sequence
  MKO10107727_B_Pdzrn4
  gRNA
gcaagctggagacgtactca

SEQ ID NO: 107728 - DNA, 20 bp, Artificial Sequence
  MKO10107728_B_Pdzrn4
  gRNA
gcccgtgtcttcttcatcat

SEQ ID NO: 107729 - DNA, 20 bp, Artificial Sequence
  MKO10107729_B_Pea15a
  gRNA
aacctttgtccagcttgttg

SEQ ID NO: 107730 - DNA, 20 bp, Artificial Sequence
  MKO10107730_B_Pea15a
  gRNA
ccccttgttcaggccttctt

SEQ ID NO: 107731 - DNA, 20 bp, Artificial Sequence
  MKO10107731_B_Pea15a
  gRNA
tgaagaagaaatcatcaaat

SEQ ID NO: 107732 - DNA, 20 bp, Artificial Sequence
  MKO10107732_B_Peak1
  gRNA
ccagttgggatcaatatcgt

SEQ ID NO: 107733 - DNA, 20 bp, Artificial Sequence
  MKO10107733_B_Peak1
  gRNA
gagtcactctccagtcgacg

SEQ ID NO: 107734 - DNA, 20 bp, Artificial Sequence
  MKO10107734_B_Peak1
  gRNA
caaagaatctcgcacgaagt

SEQ ID NO: 107735 - DNA, 20 bp, Artificial Sequence
  MKO10107735_B_Pear1
  gRNA
gcaaaagcacgtcccactct

SEQ ID NO: 107736 - DNA, 20 bp, Artificial Sequence
  MKO10107736_B_Pear1
  gRNA
cagcttcaccacgaccacta

SEQ ID NO: 107737 - DNA, 20 bp, Artificial Sequence
  MKO10107737_B_Pear1
  gRNA
gcgcaggtgggactccttag

SEQ ID NO: 107738 - DNA, 20 bp, Artificial Sequence
  MKO10107738_B_Pebp1
  gRNA
tgcccgccaccggggctccc

SEQ ID NO: 107739 - DNA, 20 bp, Artificial Sequence
  MKO10107739_B_Pebp1
  gRNA
tggccgccgacatcagccag

SEQ ID NO: 107740 - DNA, 20 bp, Artificial Sequence
  MKO10107740_B_Pebp1
  gRNA
cagctcgtccaccgtcaccc

SEQ ID NO: 107741 - DNA, 20 bp, Artificial Sequence
  MKO10107741_B_Pebp4
  gRNA
tagcggtgtagaccagtttc

SEQ ID NO: 107742 - DNA, 20 bp, Artificial Sequence
  MKO10107742_B_Pebp4
  gRNA
acagggtgcgctgtacctgc

SEQ ID NO: 107743 - DNA, 20 bp, Artificial Sequence
  MKO10107743_B_Pebp4
  gRNA
ttagacctgctgggggcatc

SEQ ID NO: 107744 - DNA, 20 bp, Artificial Sequence
  MKO10107744_B_Pecam1
  gRNA
cctgtccggattcaaattgc

SEQ ID NO: 107745 - DNA, 20 bp, Artificial Sequence
  MKO10107745_B_Pecam1
  gRNA
tcttccagatgcaagcctcc

SEQ ID NO: 107746 - DNA, 20 bp, Artificial Sequence
  MKO10107746_B_Pecam1
  gRNA
ccagcgtgagtcccagagcc

SEQ ID NO: 107747 - DNA, 20 bp, Artificial Sequence
  MKO10107747_B_Pecr
  gRNA
gttgatcctcactccgctgc

SEQ ID NO: 107748 - DNA, 20 bp, Artificial Sequence
  MKO10107748_B_Pecr
  gRNA
aaatctaccttagctaagta

SEQ ID NO: 107749 - DNA, 20 bp, Artificial Sequence
  MKO10107749_B_Pecr
  gRNA
cgtgggccagcagcggagtg

SEQ ID NO: 107750 - DNA, 20 bp, Artificial Sequence
  MKO10107750_B_Pef1
  gRNA
aggtggtgtccccccgaatg

SEQ ID NO: 107751 - DNA, 20 bp, Artificial Sequence
  MKO10107751_B_Pef1
  gRNA
taatggagcccgagcggtcc

SEQ ID NO: 107752 - DNA, 20 bp, Artificial Sequence
  MKO10107752_B_Pef1
  gRNA
tagcagagcgtgcgcagtac

SEQ ID NO: 107753 - DNA, 20 bp, Artificial Sequence
  MKO10107753_B_Peg10
  gRNA
ccttctctcgatgtgaatac

SEQ ID NO: 107754 - DNA, 20 bp, Artificial Sequence
  MKO10107754_B_Peg10
  gRNA
gacagctctgcgcgaatgtc

SEQ ID NO: 107755 - DNA, 20 bp, Artificial Sequence
  MKO10107755_B_Peg10
  gRNA
gcattggagtagtccacaac

SEQ ID NO: 107756 - DNA, 20 bp, Artificial Sequence
  MKO10107756_B_Peg12
  gRNA
ctccgtagcagccgcctcgc

SEQ ID NO: 107757 - DNA, 20 bp, Artificial Sequence
  MKO10107757_B_Peg12
  gRNA
ggccttgtccgccggcagcg

SEQ ID NO: 107758 - DNA, 20 bp, Artificial Sequence
  MKO10107758_B_Peg12
  gRNA
ttcgcgagggctacagctac

SEQ ID NO: 107759 - DNA, 20 bp, Artificial Sequence
  MKO10107759_B_Peg3
  gRNA
ggaagagaaagatcccgttg

SEQ ID NO: 107760 - DNA, 20 bp, Artificial Sequence
  MKO10107760_B_Peg3
  gRNA
cctcgaccatctcatgcttt

SEQ ID NO: 107761 - DNA, 20 bp, Artificial Sequence
  MKO10107761_B_Peg3
  gRNA
ctacagaaagctgctctcgc

SEQ ID NO: 107762 - DNA, 20 bp, Artificial Sequence
  MKO10107762_B_Peli1
  gRNA
tcttctgtgaacccattacg

SEQ ID NO: 107763 - DNA, 20 bp, Artificial Sequence
  MKO10107763_B_Peli1
  gRNA
tcagttactacaaaatcaat

SEQ ID NO: 107764 - DNA, 20 bp, Artificial Sequence
  MKO10107764_B_Peli1
  gRNA
ctccttcctctatcaccgtt

SEQ ID NO: 107765 - DNA, 20 bp, Artificial Sequence
  MKO10107765_B_Peli2
  gRNA
ggcatcttcgttctgaccgc

SEQ ID NO: 107766 - DNA, 20 bp, Artificial Sequence
  MKO10107766_B_Peli2
  gRNA
cccgcaaggaggcttcaccg

SEQ ID NO: 107767 - DNA, 20 bp, Artificial Sequence
  MKO10107767_B_Peli2
  gRNA
tgtactccaccactaccgtc

SEQ ID NO: 107768 - DNA, 20 bp, Artificial Sequence
  MKO10107768_B_Peli3
  gRNA
gcgggaatgtgtacacgctg

SEQ ID NO: 107769 - DNA, 20 bp, Artificial Sequence
  MKO10107769_B_Peli3
  gRNA
cggcttgccttggagacgag

SEQ ID NO: 107770 - DNA, 20 bp, Artificial Sequence
  MKO10107770_B_Peli3
  gRNA
actccggatggtctgatgga

SEQ ID NO: 107771 - DNA, 20 bp, Artificial Sequence
  MKO10107771_B_Pelo
  gRNA
tggcggctactcccgtcagc

SEQ ID NO: 107772 - DNA, 20 bp, Artificial Sequence
  MKO10107772_B_Pelo
  gRNA
ggccatcgacttcgactccc

SEQ ID NO: 107773 - DNA, 20 bp, Artificial Sequence
  MKO10107773_B_Pelo
  gRNA
gagcccgaccgagcgttcta

SEQ ID NO: 107774 - DNA, 20 bp, Artificial Sequence
  MKO10107774_B_Pelp1
  gRNA
acagtgtgaacaatcagctt

SEQ ID NO: 107775 - DNA, 20 bp, Artificial Sequence
  MKO10107775_B_Pelp1
  gRNA
gccaagaaacacaatgttgc

SEQ ID NO: 107776 - DNA, 20 bp, Artificial Sequence
  MKO10107776_B_Pelp1
  gRNA
aatctcagtaatgcacatct

SEQ ID NO: 107777 - DNA, 20 bp, Artificial Sequence
  MKO10107777_B_Pemt
  gRNA
cacatttcccttcagcgtgc

SEQ ID NO: 107778 - DNA, 20 bp, Artificial Sequence
  MKO10107778_B_Pemt
  gRNA
tatgatgagccagcccaaga

SEQ ID NO: 107779 - DNA, 20 bp, Artificial Sequence
  MKO10107779_B_Pemt
  gRNA
tcatccacaggtgactactt

SEQ ID NO: 107780 - DNA, 20 bp, Artificial Sequence
  MKO10107780_B_Penk
  gRNA
gatggacgagctatatccca

SEQ ID NO: 107781 - DNA, 20 bp, Artificial Sequence
  MKO10107781_B_Penk
  gRNA
aagcctcaggaaccgcgcca

SEQ ID NO: 107782 - DNA, 20 bp, Artificial Sequence
  MKO10107782_B_Penk
  gRNA
ccagaagaagaagcgaacgg

SEQ ID NO: 107783 - DNA, 20 bp, Artificial Sequence
  MKO10107783_B_Peo1
  gRNA
acctgcagataccgtttccc

SEQ ID NO: 107784 - DNA, 20 bp, Artificial Sequence
  MKO10107784_B_Peo1
  gRNA
acctgatgctctgttgtccg

SEQ ID NO: 107785 - DNA, 20 bp, Artificial Sequence
  MKO10107785_B_Peo1
  gRNA
ccagccgtgtcacagcaaac

SEQ ID NO: 107786 - DNA, 20 bp, Artificial Sequence
  MKO10107786_B_Pepd
  gRNA
ttcagggcgaatagtgccag

SEQ ID NO: 107787 - DNA, 20 bp, Artificial Sequence
  MKO10107787_B_Pepd
  gRNA
tgatgtccagtacacggatg

SEQ ID NO: 107788 - DNA, 20 bp, Artificial Sequence
  MKO10107788_B_Pepd
  gRNA
cgcctcagctgtcgtgttgc

SEQ ID NO: 107789 - DNA, 20 bp, Artificial Sequence
  MKO10107789_B_Per1
  gRNA
cgaatacacacttcgaaacc

SEQ ID NO: 107790 - DNA, 20 bp, Artificial Sequence
  MKO10107790_B_Per1
  gRNA
catcccgtttgcaacgcagc

SEQ ID NO: 107791 - DNA, 20 bp, Artificial Sequence
  MKO10107791_B_Per1
  gRNA
cctgctctgagctcgcactc

SEQ ID NO: 107792 - DNA, 20 bp, Artificial Sequence
  MKO10107792_B_Per2
  gRNA
gtctcacctgcagccgctcg

SEQ ID NO: 107793 - DNA, 20 bp, Artificial Sequence
  MKO10107793_B_Per2
  gRNA
tcacctgcttcacgctccgc

SEQ ID NO: 107794 - DNA, 20 bp, Artificial Sequence
  MKO10107794_B_Per2
  gRNA
cttcaaggttgccagcgtgc

SEQ ID NO: 107795 - DNA, 20 bp, Artificial Sequence
  MKO10107795_B_Per3
  gRNA
tggtgcacattcatactgcg

SEQ ID NO: 107796 - DNA, 20 bp, Artificial Sequence
  MKO10107796_B_Per3
  gRNA
gcttagtgtgcctctcggct

SEQ ID NO: 107797 - DNA, 20 bp, Artificial Sequence
  MKO10107797_B_Per3
  gRNA
gttaagagcatctagggtac

SEQ ID NO: 107798 - DNA, 20 bp, Artificial Sequence
  MKO10107798_B_Perp
  gRNA
ggccgcccatccgaagccat

SEQ ID NO: 107799 - DNA, 20 bp, Artificial Sequence
  MKO10107799_B_Perp
  gRNA
ctctcgttcttcgccctgtg

SEQ ID NO: 107800 - DNA, 20 bp, Artificial Sequence
  MKO10107800_B_Perp
  gRNA
cggtcttaccagccagtgcg

SEQ ID NO: 107801 - DNA, 20 bp, Artificial Sequence
  MKO10107801_B_Pes1
  gRNA
aacctcacctgaagtcaggc

SEQ ID NO: 107802 - DNA, 20 bp, Artificial Sequence
  MKO10107802_B_Pes1
  gRNA
cagggctcaccttgtactct

SEQ ID NO: 107803 - DNA, 20 bp, Artificial Sequence
  MKO10107803_B_Pes1
  gRNA
aagcctatggaaagagcgaa

SEQ ID NO: 107804 - DNA, 20 bp, Artificial Sequence
  MKO10107804_B_Pet100
  gRNA
aagaatttaagcagaagatc

SEQ ID NO: 107805 - DNA, 20 bp, Artificial Sequence
  MKO10107805_B_Pet100
  gRNA
gagcgagatgggggtgaagc

SEQ ID NO: 107806 - DNA, 20 bp, Artificial Sequence
  MKO10107806_B_Pet100
  gRNA
acctgaccctccttctctct

SEQ ID NO: 107807 - DNA, 20 bp, Artificial Sequence
  MKO10107807_B_Pet112
  gRNA
tgccactgtcctgctccaac

SEQ ID NO: 107808 - DNA, 20 bp, Artificial Sequence
  MKO10107808_B_Pet112
  gRNA
gctccaggaccacttcaaga

SEQ ID NO: 107809 - DNA, 20 bp, Artificial Sequence
  MKO10107809_B_Pet112
  gRNA
tgccaagccagtcatcaccg

SEQ ID NO: 107810 - DNA, 20 bp, Artificial Sequence
  MKO10107810_B_Pet117
  gRNA
agcagaaagagagaagatgt

SEQ ID NO: 107811 - DNA, 20 bp, Artificial Sequence
  MKO10107811_B_Pet117
  gRNA
gggaatgtcgaggagttcga

SEQ ID NO: 107812 - DNA, 20 bp, Artificial Sequence
  MKO10107812_B_Pet117
  gRNA
ccgccgtcagcagcaccgag

SEQ ID NO: 107813 - DNA, 20 bp, Artificial Sequence
  MKO10107813_B_Pet2
  gRNA
tcaccaaacgcttagtcatg

SEQ ID NO: 107814 - DNA, 20 bp, Artificial Sequence
  MKO10107814_B_Pet2
  gRNA
tcaccagcctccaactcgta

SEQ ID NO: 107815 - DNA, 20 bp, Artificial Sequence
  MKO10107815_B_Pet2
  gRNA
cctgttccaccgttatgagt

SEQ ID NO: 107816 - DNA, 20 bp, Artificial Sequence
  MKO10107816_B_Pex10
  gRNA
gaaagagatcgagttgctct

SEQ ID NO: 107817 - DNA, 20 bp, Artificial Sequence
  MKO10107817_B_Pex10
  gRNA
gctgggagtgcatcaccgag

SEQ ID NO: 107818 - DNA, 20 bp, Artificial Sequence
  MKO10107818_B_Pex10
  gRNA
ctgcctccatcggctccacg

SEQ ID NO: 107819 - DNA, 20 bp, Artificial Sequence
  MKO10107819_B_Pex11a
  gRNA
ccgagtcgccaaccaaagcc

SEQ ID NO: 107820 - DNA, 20 bp, Artificial Sequence
  MKO10107820_B_Pex11a
  gRNA
cctggctttggttggcgact

SEQ ID NO: 107821 - DNA, 20 bp, Artificial Sequence
  MKO10107821_B_Pex11a
  gRNA
ccgtggtactgaagctcaag

SEQ ID NO: 107822 - DNA, 20 bp, Artificial Sequence
  MKO10107822_B_Pex11b
  gRNA
atctcagaacgacatctgac

SEQ ID NO: 107823 - DNA, 20 bp, Artificial Sequence
  MKO10107823_B_Pex11b
  gRNA
ttatgagattcgcctattga

SEQ ID NO: 107824 - DNA, 20 bp, Artificial Sequence
  MKO10107824_B_Pex11b
  gRNA
acagaaacagattcgacaac

SEQ ID NO: 107825 - DNA, 20 bp, Artificial Sequence
  MKO10107825_B_Pex11g
  gRNA
ctgccgatgccaaggtcctc

SEQ ID NO: 107826 - DNA, 20 bp, Artificial Sequence
  MKO10107826_B_Pex11g
  gRNA
taagcttcagcattgtccac

SEQ ID NO: 107827 - DNA, 20 bp, Artificial Sequence
  MKO10107827_B_Pex11g
  gRNA
tttaactctactcagcaacc

SEQ ID NO: 107828 - DNA, 20 bp, Artificial Sequence
  MKO10107828_B_Pex12
  gRNA
actaagctctttcagttctc

SEQ ID NO: 107829 - DNA, 20 bp, Artificial Sequence
  MKO10107829_B_Pex12
  gRNA
gagacccgctcttcagcatg

SEQ ID NO: 107830 - DNA, 20 bp, Artificial Sequence
  MKO10107830_B_Pex12
  gRNA
cgaccagccatccatctttg

SEQ ID NO: 107831 - DNA, 20 bp, Artificial Sequence
  MKO10107831_B_Pex13
  gRNA
actctgctcttgcaactacg

SEQ ID NO: 107832 - DNA, 20 bp, Artificial Sequence
  MKO10107832_B_Pex13
  gRNA
agtcactaccaccaatcctt

SEQ ID NO: 107833 - DNA, 20 bp, Artificial Sequence
  MKO10107833_B_Pex13
  gRNA
gaggaagatcatctacacgg

SEQ ID NO: 107834 - DNA, 20 bp, Artificial Sequence
  MKO10107834_B_Pex14
  gRNA
cggcagctgtgcccgactgc

SEQ ID NO: 107835 - DNA, 20 bp, Artificial Sequence
  MKO10107835_B_Pex14
  gRNA
atctcgccatcgggagcctc

SEQ ID NO: 107836 - DNA, 20 bp, Artificial Sequence
  MKO10107836_B_Pex14
  gRNA
ggccacttaccttgtagagt

SEQ ID NO: 107837 - DNA, 20 bp, Artificial Sequence
  MKO10107837_B_Pex16
  gRNA
tgcgcatgctcctgttgatc

SEQ ID NO: 107838 - DNA, 20 bp, Artificial Sequence
  MKO10107838_B_Pex16
  gRNA
tgagagcaatgacgagccaa

SEQ ID NO: 107839 - DNA, 20 bp, Artificial Sequence
  MKO10107839_B_Pex16
  gRNA
ttcagacagctcgtgtgaat

SEQ ID NO: 107840 - DNA, 20 bp, Artificial Sequence
  MKO10107840_B_Pex19
  gRNA
ggtacagcacatccttagac

SEQ ID NO: 107841 - DNA, 20 bp, Artificial Sequence
  MKO10107841_B_Pex19
  gRNA
ggccacttaacgtctccttt

SEQ ID NO: 107842 - DNA, 20 bp, Artificial Sequence
  MKO10107842_B_Pex19
  gRNA
gaactcgggcatgtctgaag

SEQ ID NO: 107843 - DNA, 20 bp, Artificial Sequence
  MKO10107843_B_Pex1
  gRNA
cctgttggcaagataccaca

SEQ ID NO: 107844 - DNA, 20 bp, Artificial Sequence
  MKO10107844_B_Pex1
  gRNA
cgcttgagagtccaagtttc

SEQ ID NO: 107845 - DNA, 20 bp, Artificial Sequence
  MKO10107845_B_Pex1
  gRNA
ccaaagctgttgttcccatc

SEQ ID NO: 107846 - DNA, 20 bp, Artificial Sequence
  MKO10107846_B_Pex26
  gRNA
gcgctctgcggccttcagcg

SEQ ID NO: 107847 - DNA, 20 bp, Artificial Sequence
  MKO10107847_B_Pex26
  gRNA
tctggatccggcggaagagc

SEQ ID NO: 107848 - DNA, 20 bp, Artificial Sequence
  MKO10107848_B_Pex26
  gRNA
ctggtagtaccggaggaccc

SEQ ID NO: 107849 - DNA, 20 bp, Artificial Sequence
  MKO10107849_B_Pex2
  gRNA
actttgacagaacgcctcct

SEQ ID NO: 107850 - DNA, 20 bp, Artificial Sequence
  MKO10107850_B_Pex2
  gRNA
ggatgcacttgaactgaata

SEQ ID NO: 107851 - DNA, 20 bp, Artificial Sequence
  MKO10107851_B_Pex2
  gRNA
aaccgtcatttagcgtcttt

SEQ ID NO: 107852 - DNA, 20 bp, Artificial Sequence
  MKO10107852_B_Pex3
  gRNA
ctttaggccttcaaacaagc

SEQ ID NO: 107853 - DNA, 20 bp, Artificial Sequence
  MKO10107853_B_Pex3
  gRNA
catgctgccgacactgagag

SEQ ID NO: 107854 - DNA, 20 bp, Artificial Sequence
  MKO10107854_B_Pex3
  gRNA
catatttccagcttgtttga

SEQ ID NO: 107855 - DNA, 20 bp, Artificial Sequence
  MKO10107855_B_Pex5l
  gRNA
aatgccacctcagcgtctcc

SEQ ID NO: 107856 - DNA, 20 bp, Artificial Sequence
  MKO10107856_B_Pex5l
  gRNA
taccttctcactggccgaga

SEQ ID NO: 107857 - DNA, 20 bp, Artificial Sequence
  MKO10107857_B_Pex5l
  gRNA
gaattgcagcttccatgaac

SEQ ID NO: 107858 - DNA, 20 bp, Artificial Sequence
  MKO10107858_B_Pex5
  gRNA
tgaacagtcaaactttcgcc

SEQ ID NO: 107859 - DNA, 20 bp, Artificial Sequence
  MKO10107859_B_Pex5
  gRNA
tgccaacccgctgatgaagc

SEQ ID NO: 107860 - DNA, 20 bp, Artificial Sequence
  MKO10107860_B_Pex5
  gRNA
gggatacaagagttgcattc

SEQ ID NO: 107861 - DNA, 20 bp, Artificial Sequence
  MKO10107861_B_Pex6
  gRNA
tcgcctcactacagtgctaa

SEQ ID NO: 107862 - DNA, 20 bp, Artificial Sequence
  MKO10107862_B_Pex6
  gRNA
gtgttgtgtgtgtcaacagc

SEQ ID NO: 107863 - DNA, 20 bp, Artificial Sequence
  MKO10107863_B_Pex6
  gRNA
catacctgggcagtctctcc

SEQ ID NO: 107864 - DNA, 20 bp, Artificial Sequence
  MKO10107864_B_Pex7
  gRNA
gcgtgtgctctttatagact

SEQ ID NO: 107865 - DNA, 20 bp, Artificial Sequence
  MKO10107865_B_Pex7
  gRNA
gtgtcatttacagcacaatc

SEQ ID NO: 107866 - DNA, 20 bp, Artificial Sequence
  MKO10107866_B_Pex7
  gRNA
ctgtggaactctattagtat

SEQ ID NO: 107867 - DNA, 20 bp, Artificial Sequence
  MKO10107867_B_Pf4
  gRNA
aagatctccatcgctttctt

SEQ ID NO: 107868 - DNA, 20 bp, Artificial Sequence
  MKO10107868_B_Pf4
  gRNA
cctgttgtttctgccagcgg

SEQ ID NO: 107869 - DNA, 20 bp, Artificial Sequence
  MKO10107869_B_Pf4
  gRNA
gacagagccaccctgaagaa

SEQ ID NO: 107870 - DNA, 20 bp, Artificial Sequence
  MKO10107870_B_Pfas
  gRNA
ctccatcgacatactagctg

SEQ ID NO: 107871 - DNA, 20 bp, Artificial Sequence
  MKO10107871_B_Pfas
  gRNA
gcaacatcatcccgcaccaa

SEQ ID NO: 107872 - DNA, 20 bp, Artificial Sequence
  MKO10107872_B_Pfas
  gRNA
cacctccagcaacaaatcgt

SEQ ID NO: 107873 - DNA, 20 bp, Artificial Sequence
  MKO10107873_B_Pfdn1
  gRNA
cctccttgacgctccgctcc

SEQ ID NO: 107874 - DNA, 20 bp, Artificial Sequence
  MKO10107874_B_Pfdn1
  gRNA
tccgcgccatcagcatctcc

SEQ ID NO: 107875 - DNA, 20 bp, Artificial Sequence
  MKO10107875_B_Pfdn1
  gRNA
taggtttattctacagtcca

SEQ ID NO: 107876 - DNA, 20 bp, Artificial Sequence
  MKO10107876_B_Pfdn2
  gRNA
gacccgcaagtgctaccgca

SEQ ID NO: 107877 - DNA, 20 bp, Artificial Sequence
  MKO10107877_B_Pfdn2
  gRNA
gcaaagaactgaacgaattc

SEQ ID NO: 107878 - DNA, 20 bp, Artificial Sequence
  MKO10107878_B_Pfdn2
  gRNA
agcccctctgttcctgccga

SEQ ID NO: 107879 - DNA, 20 bp, Artificial Sequence
  MKO10107879_B_Pfdn4
  gRNA
tgatgaaaacgtctccgatc

SEQ ID NO: 107880 - DNA, 20 bp, Artificial Sequence
  MKO10107880_B_Pfdn4
  gRNA
gagtcgaatcacagagctaa

SEQ ID NO: 107881 - DNA, 20 bp, Artificial Sequence
  MKO10107881_B_Pfdn4
  gRNA
gatggcggccaccatgaaga

SEQ ID NO: 107882 - DNA, 20 bp, Artificial Sequence
  MKO10107882_B_Pfdn5
  gRNA
cagcacgttcagacagtcct

SEQ ID NO: 107883 - DNA, 20 bp, Artificial Sequence
  MKO10107883_B_Pfdn5
  gRNA
gaccaagtacgtggaagcca

SEQ ID NO: 107884 - DNA, 20 bp, Artificial Sequence
  MKO10107884_B_Pfdn5
  gRNA
gcagaacttaccctgcttca

SEQ ID NO: 107885 - DNA, 20 bp, Artificial Sequence
  MKO10107885_B_Pfkfb1
  gRNA
gtgtgctctagcagccctaa

SEQ ID NO: 107886 - DNA, 20 bp, Artificial Sequence
  MKO10107886_B_Pfkfb1
  gRNA
gatacttatggacatccttt

SEQ ID NO: 107887 - DNA, 20 bp, Artificial Sequence
  MKO10107887_B_Pfkfb1
  gRNA
attctttcgcccagacaaca

SEQ ID NO: 107888 - DNA, 20 bp, Artificial Sequence
  MKO10107888_B_Pfkfb2
  gRNA
ctttcgacatgacaatgaag

SEQ ID NO: 107889 - DNA, 20 bp, Artificial Sequence
  MKO10107889_B_Pfkfb2
  gRNA
aactaacacgctacctcaac

SEQ ID NO: 107890 - DNA, 20 bp, Artificial Sequence
  MKO10107890_B_Pfkfb2
  gRNA
cccactctcttcagtaaaat

SEQ ID NO: 107891 - DNA, 20 bp, Artificial Sequence
  MKO10107891_B_Pfkfb3
  gRNA
ttggaacacctatccagttg

SEQ ID NO: 107892 - DNA, 20 bp, Artificial Sequence
  MKO10107892_B_Pfkfb3
  gRNA
cgttggaactgacccagagc

SEQ ID NO: 107893 - DNA, 20 bp, Artificial Sequence
  MKO10107893_B_Pfkfb3
  gRNA
cttcttccgccctgacaatg

SEQ ID NO: 107894 - DNA, 20 bp, Artificial Sequence
  MKO10107894_B_Pfkfb4
  gRNA
taggcacgccaatccagttg

SEQ ID NO: 107895 - DNA, 20 bp, Artificial Sequence
  MKO10107895_B_Pfkfb4
  gRNA
tgtacgtcttgactatgtcc

SEQ ID NO: 107896 - DNA, 20 bp, Artificial Sequence
  MKO10107896_B_Pfkfb4
  gRNA
agatcatcgctctccgctct

SEQ ID NO: 107897 - DNA, 20 bp, Artificial Sequence
  MKO10107897_B_Pfkl
  gRNA
tccatcgataacgacttctg

SEQ ID NO: 107898 - DNA, 20 bp, Artificial Sequence
  MKO10107898_B_Pfkl
  gRNA
cgtttccaatatcatccagc

SEQ ID NO: 107899 - DNA, 20 bp, Artificial Sequence
  MKO10107899_B_Pfkl
  gRNA
cctcaccagctggatgatat

SEQ ID NO: 107900 - DNA, 20 bp, Artificial Sequence
  MKO10107900_B_Pfkm
  gRNA
cattgtcgattgagccaacc

SEQ ID NO: 107901 - DNA, 20 bp, Artificial Sequence
  MKO10107901_B_Pfkm
  gRNA
catagacacgctctcccacg

SEQ ID NO: 107902 - DNA, 20 bp, Artificial Sequence
  MKO10107902_B_Pfkm
  gRNA
ccgcgtcttctttgtccatg

SEQ ID NO: 107903 - DNA, 20 bp, Artificial Sequence
  MKO10107903_B_Pfkp
  gRNA
tgcgcatgggaatctacacg

SEQ ID NO: 107904 - DNA, 20 bp, Artificial Sequence
  MKO10107904_B_Pfkp
  gRNA
gaagtattcctacctcaacg

SEQ ID NO: 107905 - DNA, 20 bp, Artificial Sequence
  MKO10107905_B_Pfkp
  gRNA
ccaccatacccaccacgttg

SEQ ID NO: 107906 - DNA, 20 bp, Artificial Sequence
  MKO10107906_B_Pfn1
  gRNA
cgtcttgcagcagtgagtcc

SEQ ID NO: 107907 - DNA, 20 bp, Artificial Sequence
  MKO10107907_B_Pfn1
  gRNA
tcttgttgatcaaaccaccg

SEQ ID NO: 107908 - DNA, 20 bp, Artificial Sequence
  MKO10107908_B_Pfn1
  gRNA
tccagcgctagtcctgctga

SEQ ID NO: 107909 - DNA, 20 bp, Artificial Sequence
  MKO10107909_B_Pfn2
  gRNA
agagatagcctatacgttga

SEQ ID NO: 107910 - DNA, 20 bp, Artificial Sequence
  MKO10107910_B_Pfn2
  gRNA
tcttattcaatccgcctcca

SEQ ID NO: 107911 - DNA, 20 bp, Artificial Sequence
  MKO10107911_B_Pfn2
  gRNA
gaataagaaggcatactcaa

SEQ ID NO: 107912 - DNA, 20 bp, Artificial Sequence
  MKO10107912_B_Pfn3
  gRNA
gatcgtgcactgtcttattg

SEQ ID NO: 107913 - DNA, 20 bp, Artificial Sequence
  MKO10107913_B_Pfn3
  gRNA
acacacagcgattgtccgag

SEQ ID NO: 107914 - DNA, 20 bp, Artificial Sequence
  MKO10107914_B_Pfn3
  gRNA
actcggacaatcgctgtgtg

SEQ ID NO: 107915 - DNA, 20 bp, Artificial Sequence
  MKO10107915_B_Pfn4
  gRNA
cttactgttagataccctgc

SEQ ID NO: 107916 - DNA, 20 bp, Artificial Sequence
  MKO10107916_B_Pfn4
  gRNA
tgccaccacaagatacatgt

SEQ ID NO: 107917 - DNA, 20 bp, Artificial Sequence
  MKO10107917_B_Pfn4
  gRNA
ttcacccttacactaaatcc

SEQ ID NO: 107918 - DNA, 20 bp, Artificial Sequence
  MKO10107918_B_Pfpl
  gRNA
atgtacgacagaatatcttg

SEQ ID NO: 107919 - DNA, 20 bp, Artificial Sequence
  MKO10107919_B_Pfpl
  gRNA
cagttgtgccgtcaattatc

SEQ ID NO: 107920 - DNA, 20 bp, Artificial Sequence
  MKO10107920_B_Pfpl
  gRNA
cagggatgaccatcgaaacc

SEQ ID NO: 107921 - DNA, 20 bp, Artificial Sequence
  MKO10107921_B_Pga5
  gRNA
ggaagaccgaagcgggttga

SEQ ID NO: 107922 - DNA, 20 bp, Artificial Sequence
  MKO10107922_B_Pga5
  gRNA
cacccgtctttgacaacctg

SEQ ID NO: 107923 - DNA, 20 bp, Artificial Sequence
  MKO10107923_B_Pga5
  gRNA
cagcattggcacgccccctc

SEQ ID NO: 107924 - DNA, 20 bp, Artificial Sequence
  MKO10107924_B_Pgam1
  gRNA
ctgtgcagaagagagcaatc

SEQ ID NO: 107925 - DNA, 20 bp, Artificial Sequence
  MKO10107925_B_Pgam1
  gRNA
gatgcttaacgatgccccga

SEQ ID NO: 107926 - DNA, 20 bp, Artificial Sequence
  MKO10107926_B_Pgam1
  gRNA
cccctcctgtgagagcctga

SEQ ID NO: 107927 - DNA, 20 bp, Artificial Sequence
  MKO10107927_B_Pgam2
  gRNA
ccccaggaccgccgctatgc

SEQ ID NO: 107928 - DNA, 20 bp, Artificial Sequence
  MKO10107928_B_Pgam2
  gRNA
tgcttcagggatgtccgacc

SEQ ID NO: 107929 - DNA, 20 bp, Artificial Sequence
  MKO10107929_B_Pgam2
  gRNA
ctggtccagctcatacacaa

SEQ ID NO: 107930 - DNA, 20 bp, Artificial Sequence
  MKO10107930_B_Pgam5
  gRNA
gagtcatacctaatggtgtc

SEQ ID NO: 107931 - DNA, 20 bp, Artificial Sequence
  MKO10107931_B_Pgam5
  gRNA
ggccttatagtgatccagcc

SEQ ID NO: 107932 - DNA, 20 bp, Artificial Sequence
  MKO10107932_B_Pgam5
  gRNA
ggggctccgacttgcaagcc

SEQ ID NO: 107933 - DNA, 20 bp, Artificial Sequence
  MKO10107933_B_Pgap1
  gRNA
aagtcagtcctgaacgaact

SEQ ID NO: 107934 - DNA, 20 bp, Artificial Sequence
  MKO10107934_B_Pgap1
  gRNA
cctgtaatgaaacgatctaa

SEQ ID NO: 107935 - DNA, 20 bp, Artificial Sequence
  MKO10107935_B_Pgap1
  gRNA
aatgcactcgtgtacaaact

SEQ ID NO: 107936 - DNA, 20 bp, Artificial Sequence
  MKO10107936_B_Pgap2
  gRNA
aggtcccccaacgctacgtg

SEQ ID NO: 107937 - DNA, 20 bp, Artificial Sequence
  MKO10107937_B_Pgap2
  gRNA
ttaggacaacagtgtactcc

SEQ ID NO: 107938 - DNA, 20 bp, Artificial Sequence
  MKO10107938_B_Pgap2
  gRNA
cactgttgtcctaaccaaca

SEQ ID NO: 107939 - DNA, 20 bp, Artificial Sequence
  MKO10107939_B_Pgap3
  gRNA
tacccaagcgaaggccatgc

SEQ ID NO: 107940 - DNA, 20 bp, Artificial Sequence
  MKO10107940_B_Pgap3
  gRNA
tgtggccctcctgaaggtag

SEQ ID NO: 107941 - DNA, 20 bp, Artificial Sequence
  MKO10107941_B_Pgap3
  gRNA
ctcaggtgtctctcaatgct

SEQ ID NO: 107942 - DNA, 20 bp, Artificial Sequence
  MKO10107942_B_Pgbd1
  gRNA
cagctcgatcactctaaatt

SEQ ID NO: 107943 - DNA, 20 bp, Artificial Sequence
  MKO10107943_B_Pgbd1
  gRNA
gtaacatcgaagatgtaaca

SEQ ID NO: 107944 - DNA, 20 bp, Artificial Sequence
  MKO10107944_B_Pgbd1
  gRNA
gttacatcctcaaccactgc

SEQ ID NO: 107945 - DNA, 20 bp, Artificial Sequence
  MKO10107945_B_Pgbd5
  gRNA
ccggagcctgtgccggaacg

SEQ ID NO: 107946 - DNA, 20 bp, Artificial Sequence
  MKO10107946_B_Pgbd5
  gRNA
gcaacatgtcactgatctgc

SEQ ID NO: 107947 - DNA, 20 bp, Artificial Sequence
  MKO10107947_B_Pgbd5
  gRNA
ccacaggcgtcatcatcaag

SEQ ID NO: 107948 - DNA, 20 bp, Artificial Sequence
  MKO10107948_B_Pgc
  gRNA
tgccaaggtagacaccgaag

SEQ ID NO: 107949 - DNA, 20 bp, Artificial Sequence
  MKO10107949_B_Pgc
  gRNA
tctggccagggtcatacttg

SEQ ID NO: 107950 - DNA, 20 bp, Artificial Sequence
  MKO10107950_B_Pgc
  gRNA
aagaaccacaagtatgaccc

SEQ ID NO: 107951 - DNA, 20 bp, Artificial Sequence
  MKO10107951_B_Pgd
  gRNA
gaacacttactgtcgtgtcc

SEQ ID NO: 107952 - DNA, 20 bp, Artificial Sequence
  MKO10107952_B_Pgd
  gRNA
tacgggccgtcactcatgcc

SEQ ID NO: 107953 - DNA, 20 bp, Artificial Sequence
  MKO10107953_B_Pgd
  gRNA
agagctgacattgcactgat

SEQ ID NO: 107954 - DNA, 20 bp, Artificial Sequence
  MKO10107954_B_Pgf
  gRNA
tcttgaagattccccccaat

SEQ ID NO: 107955 - DNA, 20 bp, Artificial Sequence
  MKO10107955_B_Pgf
  gRNA
ttgagttgttcccagcagac

SEQ ID NO: 107956 - DNA, 20 bp, Artificial Sequence
  MKO10107956_B_Pgf
  gRNA
ccgcagggggccctgtctgc

SEQ ID NO: 107957 - DNA, 20 bp, Artificial Sequence
  MKO10107957_B_Pggt1b
  gRNA
acaaagacgatataatagag

SEQ ID NO: 107958 - DNA, 20 bp, Artificial Sequence
  MKO10107958_B_Pggt1b
  gRNA
tttccgaggttcttcatacc

SEQ ID NO: 107959 - DNA, 20 bp, Artificial Sequence
  MKO10107959_B_Pggt1b
  gRNA
cagctacattagaagaagta

SEQ ID NO: 107960 - DNA, 20 bp, Artificial Sequence
  MKO10107960_B_Pgk1
  gRNA
accagataacaaacaaccaa

SEQ ID NO: 107961 - DNA, 20 bp, Artificial Sequence
  MKO10107961_B_Pgk1
  gRNA
gatttgagttcagcagcaac

SEQ ID NO: 107962 - DNA, 20 bp, Artificial Sequence
  MKO10107962_B_Pgk1
  gRNA
tccaagcatcaaattctgct

SEQ ID NO: 107963 - DNA, 20 bp, Artificial Sequence
  MKO10107963_B_Pgk2
  gRNA
atatgacgtccttgttcagc

SEQ ID NO: 107964 - DNA, 20 bp, Artificial Sequence
  MKO10107964_B_Pgk2
  gRNA
ctgctacttgctgcgccaaa

SEQ ID NO: 107965 - DNA, 20 bp, Artificial Sequence
  MKO10107965_B_Pgk2
  gRNA
aggatgatagacccattatc

SEQ ID NO: 107966 - DNA, 20 bp, Artificial Sequence
  MKO10107966_B_Pgls
  gRNA
cagcagagggcgcccgtgcg

SEQ ID NO: 107967 - DNA, 20 bp, Artificial Sequence
  MKO10107967_B_Pgls
  gRNA
ccctgaccatcccctcctac

SEQ ID NO: 107968 - DNA, 20 bp, Artificial Sequence
  MKO10107968_B_Pgls
  gRNA
ctttgggctgcgttcagcac

SEQ ID NO: 107969 - DNA, 20 bp, Artificial Sequence
  MKO10107969_B_Pglyrp1
  gRNA
gaggacggtcatgtctatga

SEQ ID NO: 107970 - DNA, 20 bp, Artificial Sequence
  MKO10107970_B_Pglyrp1
  gRNA
agcacggagggcccgctttg

SEQ ID NO: 107971 - DNA, 20 bp, Artificial Sequence
  MKO10107971_B_Pglyrp1
  gRNA
catgaccgtcctctccaata

SEQ ID NO: 107972 - DNA, 20 bp, Artificial Sequence
  MKO10107972_B_Pglyrp2
  gRNA
tgttccgaagtaacttccga

SEQ ID NO: 107973 - DNA, 20 bp, Artificial Sequence
  MKO10107973_B_Pglyrp2
  gRNA
cctgcgcgaattgcgcagct

SEQ ID NO: 107974 - DNA, 20 bp, Artificial Sequence
  MKO10107974_B_Pglyrp2
  gRNA
cacctgctaagagagtacta

SEQ ID NO: 107975 - DNA, 20 bp, Artificial Sequence
  MKO10107975_B_Pglyrp3
  gRNA
tgggtgacaggtagccattc

SEQ ID NO: 107976 - DNA, 20 bp, Artificial Sequence
  MKO10107976_B_Pglyrp3
  gRNA
cgctgctttatcagctacag

SEQ ID NO: 107977 - DNA, 20 bp, Artificial Sequence
  MKO10107977_B_Pglyrp3
  gRNA
caggctcagtggtactctgc

SEQ ID NO: 107978 - DNA, 20 bp, Artificial Sequence
  MKO10107978_B_Pglyrp4
  gRNA
cttgtcatacaccatatccc

SEQ ID NO: 107979 - DNA, 20 bp, Artificial Sequence
  MKO10107979_B_Pglyrp4
  gRNA
caaactgatcaggtgtcaga

SEQ ID NO: 107980 - DNA, 20 bp, Artificial Sequence
  MKO10107980_B_Pglyrp4
  gRNA
gccacctgaggatgctgtcc

SEQ ID NO: 107981 - DNA, 20 bp, Artificial Sequence
  MKO10107981_B_Pgm1
  gRNA
catttctaggtttgcccggc

SEQ ID NO: 107982 - DNA, 20 bp, Artificial Sequence
  MKO10107982_B_Pgm1
  gRNA
tgcgactgcatttatcaccc

SEQ ID NO: 107983 - DNA, 20 bp, Artificial Sequence
  MKO10107983_B_Pgm1
  gRNA
tgcctcgcacaatccaaagc

SEQ ID NO: 107984 - DNA, 20 bp, Artificial Sequence
  MKO10107984_B_Pgm2l1
  gRNA
tcaggggatgtacaaatacc

SEQ ID NO: 107985 - DNA, 20 bp, Artificial Sequence
  MKO10107985_B_Pgm2l1
  gRNA
tgcaggacttcgatctgcca

SEQ ID NO: 107986 - DNA, 20 bp, Artificial Sequence
  MKO10107986_B_Pgm2l1
  gRNA
ttgttgtgggctatgacact

SEQ ID NO: 107987 - DNA, 20 bp, Artificial Sequence
  MKO10107987_B_Pgm2
  gRNA
gatgcaagatacggcagggg

SEQ ID NO: 107988 - DNA, 20 bp, Artificial Sequence
  MKO10107988_B_Pgm2
  gRNA
acacaccccgtcaccatcaa

SEQ ID NO: 107989 - DNA, 20 bp, Artificial Sequence
  MKO10107989_B_Pgm2
  gRNA
cttcgattgtcttgctgatt

SEQ ID NO: 107990 - DNA, 20 bp, Artificial Sequence
  MKO10107990_B_Pgm3
  gRNA
aatgtctcacctgattcgta

SEQ ID NO: 107991 - DNA, 20 bp, Artificial Sequence
  MKO10107991_B_Pgm3
  gRNA
ggggccaacatttcccccaa

SEQ ID NO: 107992 - DNA, 20 bp, Artificial Sequence
  MKO10107992_B_Pgm3
  gRNA
cacagcttctttctccacga

SEQ ID NO: 107993 - DNA, 20 bp, Artificial Sequence
  MKO10107993_B_Pgm5
  gRNA
aattcgaagatctggacata

SEQ ID NO: 107994 - DNA, 20 bp, Artificial Sequence
  MKO10107994_B_Pgm5
  gRNA
tagattggtcgactgattat

SEQ ID NO: 107995 - DNA, 20 bp, Artificial Sequence
  MKO10107995_B_Pgm5
  gRNA
atccgtgttgatgctatgca

SEQ ID NO: 107996 - DNA, 20 bp, Artificial Sequence
  MKO10107996_B_Pgpep1l
  gRNA
ctcgcaaggctttgcccaga

SEQ ID NO: 107997 - DNA, 20 bp, Artificial Sequence
  MKO10107997_B_Pgpep1l
  gRNA
gaacagtgtggtaagaaccg

SEQ ID NO: 107998 - DNA, 20 bp, Artificial Sequence
  MKO10107998_B_Pgpep1l
  gRNA
ggctgttgagaatgtcgaag

SEQ ID NO: 107999 - DNA, 20 bp, Artificial Sequence
  MKO10107999_B_Pgpep1
  gRNA
gcatgtgtacgagatccccg

SEQ ID NO: 108000 - DNA, 20 bp, Artificial Sequence
  MKO10108000_B_Pgpep1
  gRNA
ctgcaccgtctggtattcca

SEQ ID NO: 108001 - DNA, 20 bp, Artificial Sequence
  MKO10108001_B_Pgpep1
  gRNA
catcgactccatcatcgaca

SEQ ID NO: 108002 - DNA, 20 bp, Artificial Sequence
  MKO10108002_B_Pgp
  gRNA
caacccggagcgcaccgtca

SEQ ID NO: 108003 - DNA, 20 bp, Artificial Sequence
  MKO10108003_B_Pgp
  gRNA
acgctgctgttcgactgcga

SEQ ID NO: 108004 - DNA, 20 bp, Artificial Sequence
  MKO10108004_B_Pgp
  gRNA
caccactaccgcgcgcacgt

SEQ ID NO: 108005 - DNA, 20 bp, Artificial Sequence
  MKO10108005_B_Pgr15l
  gRNA
aagtaagtatcccgagttga

SEQ ID NO: 108006 - DNA, 20 bp, Artificial Sequence
  MKO10108006_B_Pgr15l
  gRNA
ggctcggagaaaatatcagt

SEQ ID NO: 108007 - DNA, 20 bp, Artificial Sequence
  MKO10108007_B_Pgr15l
  gRNA
tgcatctgctcgtcaactca

SEQ ID NO: 108008 - DNA, 20 bp, Artificial Sequence
  MKO10108008_B_Pgrmc1
  gRNA
ttgccggaagagatgcatcc

SEQ ID NO: 108009 - DNA, 20 bp, Artificial Sequence
  MKO10108009_B_Pgrmc1
  gRNA
gcccctggatgcatctcttc

SEQ ID NO: 108010 - DNA, 20 bp, Artificial Sequence
  MKO10108010_B_Pgrmc1
  gRNA
aaccaaaagacgagacagct

SEQ ID NO: 108011 - DNA, 20 bp, Artificial Sequence
  MKO10108011_B_Pgrmc2
  gRNA
ttgctggcagggacgcctcc

SEQ ID NO: 108012 - DNA, 20 bp, Artificial Sequence
  MKO10108012_B_Pgrmc2
  gRNA
caccaaggatcacagtaaac

SEQ ID NO: 108013 - DNA, 20 bp, Artificial Sequence
  MKO10108013_B_Pgrmc2
  gRNA
gtcctgtttactgtgatcct

SEQ ID NO: 108014 - DNA, 20 bp, Artificial Sequence
  MKO10108014_B_Pgr
  gRNA
aggtcgtacaagcatgtcag

SEQ ID NO: 108015 - DNA, 20 bp, Artificial Sequence
  MKO10108015_B_Pgr
  gRNA
cactttctcagacgacatgc

SEQ ID NO: 108016 - DNA, 20 bp, Artificial Sequence
  MKO10108016_B_Pgr
  gRNA
cagaagatctgcttaatctg

SEQ ID NO: 108017 - DNA, 20 bp, Artificial Sequence
  MKO10108017_B_Pgs1
  gRNA
agagttcttcgagctcatga

SEQ ID NO: 108018 - DNA, 20 bp, Artificial Sequence
  MKO10108018_B_Pgs1
  gRNA
tgccatcacaactcgcctct

SEQ ID NO: 108019 - DNA, 20 bp, Artificial Sequence
  MKO10108019_B_Pgs1
  gRNA
gaagtttccttccgacctca

SEQ ID NO: 108020 - DNA, 20 bp, Artificial Sequence
  MKO10108020_B_Phactr1
  gRNA
atcctggcctctgcgagata

SEQ ID NO: 108021 - DNA, 20 bp, Artificial Sequence
  MKO10108021_B_Phactr1
  gRNA
ttgaaggagatctacgataa

SEQ ID NO: 108022 - DNA, 20 bp, Artificial Sequence
  MKO10108022_B_Phactr1
  gRNA
ggctccatttccgacagagc

SEQ ID NO: 108023 - DNA, 20 bp, Artificial Sequence
  MKO10108023_B_Phactr2
  gRNA
gatcaggcaattccttaagc

SEQ ID NO: 108024 - DNA, 20 bp, Artificial Sequence
  MKO10108024_B_Phactr2
  gRNA
gataagaaggggcctgctta

SEQ ID NO: 108025 - DNA, 20 bp, Artificial Sequence
  MKO10108025_B_Phactr2
  gRNA
gctacccaagaggagaatgt

SEQ ID NO: 108026 - DNA, 20 bp, Artificial Sequence
  MKO10108026_B_Phactr3
  gRNA
ggattcgaactccccctgtg

SEQ ID NO: 108027 - DNA, 20 bp, Artificial Sequence
  MKO10108027_B_Phactr3
  gRNA
tgtatcatccagatgagcat

SEQ ID NO: 108028 - DNA, 20 bp, Artificial Sequence
  MKO10108028_B_Phactr3
  gRNA
tataccgtctgcatccactg

SEQ ID NO: 108029 - DNA, 20 bp, Artificial Sequence
  MKO10108029_B_Phactr4
  gRNA
aaaagcaagttctcagcgtt

SEQ ID NO: 108030 - DNA, 20 bp, Artificial Sequence
  MKO10108030_B_Phactr4
  gRNA
agaaacagcaaccccatcat

SEQ ID NO: 108031 - DNA, 20 bp, Artificial Sequence
  MKO10108031_B_Phactr4
  gRNA
ccacccccataggcagtgcc

SEQ ID NO: 108032 - DNA, 20 bp, Artificial Sequence
  MKO10108032_B_Phax
  gRNA
ttcctgggcttcgtcgagag

SEQ ID NO: 108033 - DNA, 20 bp, Artificial Sequence
  MKO10108033_B_Phax
  gRNA
gagatgtgtcatcgtcctcc

SEQ ID NO: 108034 - DNA, 20 bp, Artificial Sequence
  MKO10108034_B_Phax
  gRNA
tcccaagtatcctcactact

SEQ ID NO: 108035 - DNA, 20 bp, Artificial Sequence
  MKO10108035_B_Phb2
  gRNA
gctgccgtccattgttaatg

SEQ ID NO: 108036 - DNA, 20 bp, Artificial Sequence
  MKO10108036_B_Phb2
  gRNA
cccgccattacctgaagtga

SEQ ID NO: 108037 - DNA, 20 bp, Artificial Sequence
  MKO10108037_B_Phb2
  gRNA
agagctgacagagcgcgcca

SEQ ID NO: 108038 - DNA, 20 bp, Artificial Sequence
  MKO10108038_B_Phb
  gRNA
ccagtcatcactggtagcaa

SEQ ID NO: 108039 - DNA, 20 bp, Artificial Sequence
  MKO10108039_B_Phb
  gRNA
ccacagacacatctgacctt

SEQ ID NO: 108040 - DNA, 20 bp, Artificial Sequence
  MKO10108040_B_Phb
  gRNA
cctttgctaccagtgatgac

SEQ ID NO: 108041 - DNA, 20 bp, Artificial Sequence
  MKO10108041_B_Phc1
  gRNA
gcactgcttgccgttcatac

SEQ ID NO: 108042 - DNA, 20 bp, Artificial Sequence
  MKO10108042_B_Phc1
  gRNA
tgctaccaccctgacgcagt

SEQ ID NO: 108043 - DNA, 20 bp, Artificial Sequence
  MKO10108043_B_Phc1
  gRNA
tggaaatattgagccgcatt

SEQ ID NO: 108044 - DNA, 20 bp, Artificial Sequence
  MKO10108044_B_Phc2
  gRNA
gtagctcgtaccttgcaggt

SEQ ID NO: 108045 - DNA, 20 bp, Artificial Sequence
  MKO10108045_B_Phc2
  gRNA
ggtgggacgctcgtccctgc

SEQ ID NO: 108046 - DNA, 20 bp, Artificial Sequence
  MKO10108046_B_Phc2
  gRNA
gtgaaaaagtcccactcgtt

SEQ ID NO: 108047 - DNA, 20 bp, Artificial Sequence
  MKO10108047_B_Phc3
  gRNA
gtacctgcagcagatgtacg

SEQ ID NO: 108048 - DNA, 20 bp, Artificial Sequence
  MKO10108048_B_Phc3
  gRNA
gatgtatctccgagctcaga

SEQ ID NO: 108049 - DNA, 20 bp, Artificial Sequence
  MKO10108049_B_Phc3
  gRNA
ggatgtagatggtcttccac

SEQ ID NO: 108050 - DNA, 20 bp, Artificial Sequence
  MKO10108050_B_Phex
  gRNA
tggagaaatcagtcagccga

SEQ ID NO: 108051 - DNA, 20 bp, Artificial Sequence
  MKO10108051_B_Phex
  gRNA
cctaagtttccaagctaaac

SEQ ID NO: 108052 - DNA, 20 bp, Artificial Sequence
  MKO10108052_B_Phex
  gRNA
cctgaagatatgccaagcta

SEQ ID NO: 108053 - DNA, 20 bp, Artificial Sequence
  MKO10108053_B_Phf10
  gRNA
tagtattctcctgtttcatc

SEQ ID NO: 108054 - DNA, 20 bp, Artificial Sequence
  MKO10108054_B_Phf10
  gRNA
tgatgacgtttaattctctc

SEQ ID NO: 108055 - DNA, 20 bp, Artificial Sequence
  MKO10108055_B_Phf10
  gRNA
tccatgtaaaaggaggcgaa

SEQ ID NO: 108056 - DNA, 20 bp, Artificial Sequence
  MKO10108056_B_Phf11a
  gRNA
aacctgcagctgtattcatc

SEQ ID NO: 108057 - DNA, 20 bp, Artificial Sequence
  MKO10108057_B_Phf11a
  gRNA
tcaaagtttctaactgtatt

SEQ ID NO: 108058 - DNA, 20 bp, Artificial Sequence
  MKO10108058_B_Phf11a
  gRNA
catcaacttgtagaattgcg

SEQ ID NO: 108059 - DNA, 20 bp, Artificial Sequence
  MKO10108059_B_Phf11b
  gRNA
atcctgcagctgtattcatc

SEQ ID NO: 108060 - DNA, 20 bp, Artificial Sequence
  MKO10108060_B_Phf11b
  gRNA
catcaacttgtagaattgcg

SEQ ID NO: 108061 - DNA, 20 bp, Artificial Sequence
  MKO10108061_B_Phf11b
  gRNA
ttaccacttatcctgtgcca

SEQ ID NO: 108062 - DNA, 20 bp, Artificial Sequence
  MKO10108062_B_Phf11c
  gRNA
acatcctccacaacaagaag

SEQ ID NO: 108063 - DNA, 20 bp, Artificial Sequence
  MKO10108063_B_Phf11c
  gRNA
tcttgttgtggaggatgttc

SEQ ID NO: 108064 - DNA, 20 bp, Artificial Sequence
  MKO10108064_B_Phf11c
  gRNA
agaaagaaacgcctctcatc

SEQ ID NO: 108065 - DNA, 20 bp, Artificial Sequence
  MKO10108065_B_Phf11d
  gRNA
acattctccagaacaagaag

SEQ ID NO: 108066 - DNA, 20 bp, Artificial Sequence
  MKO10108066_B_Phf11d
  gRNA
tcttgttctggagaatgttc

SEQ ID NO: 108067 - DNA, 20 bp, Artificial Sequence
  MKO10108067_B_Phf11d
  gRNA
cagtccaatcatagaaaaga

SEQ ID NO: 108068 - DNA, 20 bp, Artificial Sequence
  MKO10108068_B_Phf12
  gRNA
tcgctaacctggtagtgcag

SEQ ID NO: 108069 - DNA, 20 bp, Artificial Sequence
  MKO10108069_B_Phf12
  gRNA
cgacagctgcgatagctgca

SEQ ID NO: 108070 - DNA, 20 bp, Artificial Sequence
  MKO10108070_B_Phf12
  gRNA
cagcatgagttagaccataa

SEQ ID NO: 108071 - DNA, 20 bp, Artificial Sequence
  MKO10108071_B_Phf13
  gRNA
gaccattgacagcgacggct

SEQ ID NO: 108072 - DNA, 20 bp, Artificial Sequence
  MKO10108072_B_Phf13
  gRNA
gcccgcatatgccaagacga

SEQ ID NO: 108073 - DNA, 20 bp, Artificial Sequence
  MKO10108073_B_Phf13
  gRNA
agtactcccccacttgtaag

SEQ ID NO: 108074 - DNA, 20 bp, Artificial Sequence
  MKO10108074_B_Phf14
  gRNA
ctaggttgttatggagtcga

SEQ ID NO: 108075 - DNA, 20 bp, Artificial Sequence
  MKO10108075_B_Phf14
  gRNA
aggagatacaccacatttac

SEQ ID NO: 108076 - DNA, 20 bp, Artificial Sequence
  MKO10108076_B_Phf14
  gRNA
tatcataatcaagagcttcc

SEQ ID NO: 108077 - DNA, 20 bp, Artificial Sequence
  MKO10108077_B_Phf19
  gRNA
ccagttggcatcaactgcga

SEQ ID NO: 108078 - DNA, 20 bp, Artificial Sequence
  MKO10108078_B_Phf19
  gRNA
atgaacgagatcctcatctg

SEQ ID NO: 108079 - DNA, 20 bp, Artificial Sequence
  MKO10108079_B_Phf19
  gRNA
gcccaagtgtgacgtctgca

SEQ ID NO: 108080 - DNA, 20 bp, Artificial Sequence
  MKO10108080_B_Phf1
  gRNA
tgaggacgattcccagtttc

SEQ ID NO: 108081 - DNA, 20 bp, Artificial Sequence
  MKO10108081_B_Phf1
  gRNA
tccctatgcccgggccatgc

SEQ ID NO: 108082 - DNA, 20 bp, Artificial Sequence
  MKO10108082_B_Phf1
  gRNA
agctgtgagaagtgtcgcca

SEQ ID NO: 108083 - DNA, 20 bp, Artificial Sequence
  MKO10108083_B_Phf20l1
  gRNA
gatgactccagcgctcaaaa

SEQ ID NO: 108084 - DNA, 20 bp, Artificial Sequence
  MKO10108084_B_Phf20l1
  gRNA
tttgttaattgcttcaatct

SEQ ID NO: 108085 - DNA, 20 bp, Artificial Sequence
  MKO10108085_B_Phf20l1
  gRNA
gcacattaaagccatgcctg

SEQ ID NO: 108086 - DNA, 20 bp, Artificial Sequence
  MKO10108086_B_Phf20
  gRNA
gagggtttacatgatgagga

SEQ ID NO: 108087 - DNA, 20 bp, Artificial Sequence
  MKO10108087_B_Phf20
  gRNA
cttgttcacagcagtgactc

SEQ ID NO: 108088 - DNA, 20 bp, Artificial Sequence
  MKO10108088_B_Phf20
  gRNA
cagagtcactgctgtgaaca

SEQ ID NO: 108089 - DNA, 20 bp, Artificial Sequence
  MKO10108089_B_Phf21a
  gRNA
ggctcttaaagtggaaattc

SEQ ID NO: 108090 - DNA, 20 bp, Artificial Sequence
  MKO10108090_B_Phf21a
  gRNA
acctgtgatgcagttagact

SEQ ID NO: 108091 - DNA, 20 bp, Artificial Sequence
  MKO10108091_B_Phf21a
  gRNA
cctgtggatcctgcttcatt

SEQ ID NO: 108092 - DNA, 20 bp, Artificial Sequence
  MKO10108092_B_Phf21b
  gRNA
tcgggctctgctgaactctc

SEQ ID NO: 108093 - DNA, 20 bp, Artificial Sequence
  MKO10108093_B_Phf21b
  gRNA
tcaagaagcagctccacgaa

SEQ ID NO: 108094 - DNA, 20 bp, Artificial Sequence
  MKO10108094_B_Phf21b
  gRNA
ggaagatcagccccccagca

SEQ ID NO: 108095 - DNA, 20 bp, Artificial Sequence
  MKO10108095_B_Phf23
  gRNA
ttacatcccccctagcaaag

SEQ ID NO: 108096 - DNA, 20 bp, Artificial Sequence
  MKO10108096_B_Phf23
  gRNA
ggaagtatgcgtcaatgatg

SEQ ID NO: 108097 - DNA, 20 bp, Artificial Sequence
  MKO10108097_B_Phf23
  gRNA
ccatttagccaccggagaaa

SEQ ID NO: 108098 - DNA, 20 bp, Artificial Sequence
  MKO10108098_B_Phf2
  gRNA
aacattctacgtgagtgatg

SEQ ID NO: 108099 - DNA, 20 bp, Artificial Sequence
  MKO10108099_B_Phf2
  gRNA
gacgtgaaaccagtgcagaa

SEQ ID NO: 108100 - DNA, 20 bp, Artificial Sequence
  MKO10108100_B_Phf2
  gRNA
actcacgtgtggacttgcca

SEQ ID NO: 108101 - DNA, 20 bp, Artificial Sequence
  MKO10108101_B_Phf3
  gRNA
ttaccttgtgccattaaacg

SEQ ID NO: 108102 - DNA, 20 bp, Artificial Sequence
  MKO10108102_B_Phf3
  gRNA
aagaaaatcacctcgtttaa

SEQ ID NO: 108103 - DNA, 20 bp, Artificial Sequence
  MKO10108103_B_Phf3
  gRNA
tgagccaaccacatttacct

SEQ ID NO: 108104 - DNA, 20 bp, Artificial Sequence
  MKO10108104_B_Phf5a
  gRNA
cacccacaccagcctgcttg

SEQ ID NO: 108105 - DNA, 20 bp, Artificial Sequence
  MKO10108105_B_Phf5a
  gRNA
ttgtccaaagattgtcaatt

SEQ ID NO: 108106 - DNA, 20 bp, Artificial Sequence
  MKO10108106_B_Phf5a
  gRNA
actcacatccttctcctgaa

SEQ ID NO: 108107 - DNA, 20 bp, Artificial Sequence
  MKO10108107_B_Phf6
  gRNA
caagaaaactgcacataact

SEQ ID NO: 108108 - DNA, 20 bp, Artificial Sequence
  MKO10108108_B_Phf6
  gRNA
actaagaagaaaagtcgcaa

SEQ ID NO: 108109 - DNA, 20 bp, Artificial Sequence
  MKO10108109_B_Phf6
  gRNA
cattctgataatgagagtct

SEQ ID NO: 108110 - DNA, 20 bp, Artificial Sequence
  MKO10108110_B_Phf7
  gRNA
tctggacacactgatcattc

SEQ ID NO: 108111 - DNA, 20 bp, Artificial Sequence
  MKO10108111_B_Phf7
  gRNA
gtctagcagactgcctcaga

SEQ ID NO: 108112 - DNA, 20 bp, Artificial Sequence
  MKO10108112_B_Phf7
  gRNA
aggaagctgtcttcaagtcc

SEQ ID NO: 108113 - DNA, 20 bp, Artificial Sequence
  MKO10108113_B_Phf8
  gRNA
aagttctgccccgaagttct

SEQ ID NO: 108114 - DNA, 20 bp, Artificial Sequence
  MKO10108114_B_Phf8
  gRNA
ttaccactgccctaactgtg

SEQ ID NO: 108115 - DNA, 20 bp, Artificial Sequence
  MKO10108115_B_Phf8
  gRNA
acatccctcacagtgaatga

SEQ ID NO: 108116 - DNA, 20 bp, Artificial Sequence
  MKO10108116_B_Phgdh
  gRNA
acctcttaccttcattccaa

SEQ ID NO: 108117 - DNA, 20 bp, Artificial Sequence
  MKO10108117_B_Phgdh
  gRNA
gccacccgaatgcaatcctt

SEQ ID NO: 108118 - DNA, 20 bp, Artificial Sequence
  MKO10108118_B_Phgdh
  gRNA
actgtgaaggcctcattgtc

SEQ ID NO: 108119 - DNA, 20 bp, Artificial Sequence
  MKO10108119_B_Phgr1
  gRNA
ggtggtccacaccctggcca

SEQ ID NO: 108120 - DNA, 20 bp, Artificial Sequence
  MKO10108120_B_Phgr1
  gRNA
gggtgagggccacagtgccc

SEQ ID NO: 108121 - DNA, 20 bp, Artificial Sequence
  MKO10108121_B_Phgr1
  gRNA
tgtccctcatgacagtgtcc

SEQ ID NO: 108122 - DNA, 20 bp, Artificial Sequence
  MKO10108122_B_Phip
  gRNA
cctagtaaagtctgtactcc

SEQ ID NO: 108123 - DNA, 20 bp, Artificial Sequence
  MKO10108123_B_Phip
  gRNA
catatttgcagcaagtgatc

SEQ ID NO: 108124 - DNA, 20 bp, Artificial Sequence
  MKO10108124_B_Phip
  gRNA
cctccttctcggccacttcg

SEQ ID NO: 108125 - DNA, 20 bp, Artificial Sequence
  MKO10108125_B_Phka1
  gRNA
agataatgtgtacagtatcc

SEQ ID NO: 108126 - DNA, 20 bp, Artificial Sequence
  MKO10108126_B_Phka1
  gRNA
gctgcactgcatgatcagac

SEQ ID NO: 108127 - DNA, 20 bp, Artificial Sequence
  MKO10108127_B_Phka1
  gRNA
cagaagtagcatccaactgc

SEQ ID NO: 108128 - DNA, 20 bp, Artificial Sequence
  MKO10108128_B_Phka2
  gRNA
ggacaatatctatagcatat

SEQ ID NO: 108129 - DNA, 20 bp, Artificial Sequence
  MKO10108129_B_Phka2
  gRNA
gcttgggcgagatgcggagc

SEQ ID NO: 108130 - DNA, 20 bp, Artificial Sequence
  MKO10108130_B_Phka2
  gRNA
acccaccacagtgctacatg

SEQ ID NO: 108131 - DNA, 20 bp, Artificial Sequence
  MKO10108131_B_Phkb
  gRNA
gacctgataatgaaactcta

SEQ ID NO: 108132 - DNA, 20 bp, Artificial Sequence
  MKO10108132_B_Phkb
  gRNA
aattcctctcatacacttta

SEQ ID NO: 108133 - DNA, 20 bp, Artificial Sequence
  MKO10108133_B_Phkb
  gRNA
tcccatagagtttcattatc

SEQ ID NO: 108134 - DNA, 20 bp, Artificial Sequence
  MKO10108134_B_Phkg1
  gRNA
gaagccggagaatatccttt

SEQ ID NO: 108135 - DNA, 20 bp, Artificial Sequence
  MKO10108135_B_Phkg1
  gRNA
gcttcgggaagccaccctga

SEQ ID NO: 108136 - DNA, 20 bp, Artificial Sequence
  MKO10108136_B_Phkg1
  gRNA
tctccggcttcaggtcccga

SEQ ID NO: 108137 - DNA, 20 bp, Artificial Sequence
  MKO10108137_B_Phkg2
  gRNA
caatcccttaggatgcggaa

SEQ ID NO: 108138 - DNA, 20 bp, Artificial Sequence
  MKO10108138_B_Phkg2
  gRNA
tgactatctcaccgagaaag

SEQ ID NO: 108139 - DNA, 20 bp, Artificial Sequence
  MKO10108139_B_Phkg2
  gRNA
cagatacgcctttcagattt

SEQ ID NO: 108140 - DNA, 20 bp, Artificial Sequence
  MKO10108140_B_Phlda1
  gRNA
gccactaggttgggacggtt

SEQ ID NO: 108141 - DNA, 20 bp, Artificial Sequence
  MKO10108141_B_Phlda1
  gRNA
gccgaaccgtcccaacctag

SEQ ID NO: 108142 - DNA, 20 bp, Artificial Sequence
  MKO10108142_B_Phlda1
  gRNA
ccgcccggagcgcgcagaga

SEQ ID NO: 108143 - DNA, 20 bp, Artificial Sequence
  MKO10108143_B_Phlda2
  gRNA
ctccgacgagatcctttgcg

SEQ ID NO: 108144 - DNA, 20 bp, Artificial Sequence
  MKO10108144_B_Phlda2
  gRNA
gctccacgcagtccaccttg

SEQ ID NO: 108145 - DNA, 20 bp, Artificial Sequence
  MKO10108145_B_Phlda2
  gRNA
catcgtcaccaactattaca

SEQ ID NO: 108146 - DNA, 20 bp, Artificial Sequence
  MKO10108146_B_Phlda3
  gRNA
gtcgatctcgcccccgcctt

SEQ ID NO: 108147 - DNA, 20 bp, Artificial Sequence
  MKO10108147_B_Phlda3
  gRNA
tcactagcgtgaagtagatg

SEQ ID NO: 108148 - DNA, 20 bp, Artificial Sequence
  MKO10108148_B_Phlda3
  gRNA
gaagagctgcagcccgcgct

SEQ ID NO: 108149 - DNA, 20 bp, Artificial Sequence
  MKO10108149_B_Phldb1
  gRNA
cccgtctcaatcagatccaa

SEQ ID NO: 108150 - DNA, 20 bp, Artificial Sequence
  MKO10108150_B_Phldb1
  gRNA
actctcaccctgtacccttg

SEQ ID NO: 108151 - DNA, 20 bp, Artificial Sequence
  MKO10108151_B_Phldb1
  gRNA
cctggggcccggacccctgc

SEQ ID NO: 108152 - DNA, 20 bp, Artificial Sequence
  MKO10108152_B_Phldb2
  gRNA
tgcaatggaagacgcccgga

SEQ ID NO: 108153 - DNA, 20 bp, Artificial Sequence
  MKO10108153_B_Phldb2
  gRNA
gtctgtgttcgaggacgctc

SEQ ID NO: 108154 - DNA, 20 bp, Artificial Sequence
  MKO10108154_B_Phldb2
  gRNA
ggatatggaatgcgctcttt

SEQ ID NO: 108155 - DNA, 20 bp, Artificial Sequence
  MKO10108155_B_Phldb3
  gRNA
tcggctgggtctccacccgc

SEQ ID NO: 108156 - DNA, 20 bp, Artificial Sequence
  MKO10108156_B_Phldb3
  gRNA
ggagttacagcgccagaaga

SEQ ID NO: 108157 - DNA, 20 bp, Artificial Sequence
  MKO10108157_B_Phldb3
  gRNA
tctccacatgatcccgctcc

SEQ ID NO: 108158 - DNA, 20 bp, Artificial Sequence
  MKO10108158_B_Phlpp1
  gRNA
ctgtttagcgttcagctctt

SEQ ID NO: 108159 - DNA, 20 bp, Artificial Sequence
  MKO10108159_B_Phlpp1
  gRNA
aaaggctcctaggtggttat

SEQ ID NO: 108160 - DNA, 20 bp, Artificial Sequence
  MKO10108160_B_Phlpp1
  gRNA
ttgcagttcaccaagtcctc

SEQ ID NO: 108161 - DNA, 20 bp, Artificial Sequence
  MKO10108161_B_Phlpp2
  gRNA
agcctcctcctgtatgcgca

SEQ ID NO: 108162 - DNA, 20 bp, Artificial Sequence
  MKO10108162_B_Phlpp2
  gRNA
ctggatcgaatcctactgtc

SEQ ID NO: 108163 - DNA, 20 bp, Artificial Sequence
  MKO10108163_B_Phlpp2
  gRNA
ccagcgtcagaaatatgtgc

SEQ ID NO: 108164 - DNA, 20 bp, Artificial Sequence
  MKO10108164_B_Phospho1
  gRNA
tcgatcgtgcgtgccgcgcc

SEQ ID NO: 108165 - DNA, 20 bp, Artificial Sequence
  MKO10108165_B_Phospho1
  gRNA
attgtagtagccctcgcgat

SEQ ID NO: 108166 - DNA, 20 bp, Artificial Sequence
  MKO10108166_B_Phospho1
  gRNA
cctgcgtgccacctatcgcg

SEQ ID NO: 108167 - DNA, 20 bp, Artificial Sequence
  MKO10108167_B_Phospho2
  gRNA
gtctcaaaatcttgagccta

SEQ ID NO: 108168 - DNA, 20 bp, Artificial Sequence
  MKO10108168_B_Phospho2
  gRNA
tctattgtagtttggtcttc

SEQ ID NO: 108169 - DNA, 20 bp, Artificial Sequence
  MKO10108169_B_Phospho2
  gRNA
gagaagttctatcatccctg

SEQ ID NO: 108170 - DNA, 20 bp, Artificial Sequence
  MKO10108170_B_Phox2a
  gRNA
caaaggcgcggcgggagcga

SEQ ID NO: 108171 - DNA, 20 bp, Artificial Sequence
  MKO10108171_B_Phox2a
  gRNA
ccccgacatttacactcgcg

SEQ ID NO: 108172 - DNA, 20 bp, Artificial Sequence
  MKO10108172_B_Phox2a
  gRNA
gagcactcgtgaacgttgtg

SEQ ID NO: 108173 - DNA, 20 bp, Artificial Sequence
  MKO10108173_B_Phox2b
  gRNA
ccgtacctggactctcgcct

SEQ ID NO: 108174 - DNA, 20 bp, Artificial Sequence
  MKO10108174_B_Phox2b
  gRNA
cgcagccgcaccgcccttgc

SEQ ID NO: 108175 - DNA, 20 bp, Artificial Sequence
  MKO10108175_B_Phox2b
  gRNA
tttgagctgcgcgcttgtga

SEQ ID NO: 108176 - DNA, 20 bp, Artificial Sequence
  MKO10108176_B_Phpt1
  gRNA
acacgtgtatcttcctgtcc

SEQ ID NO: 108177 - DNA, 20 bp, Artificial Sequence
  MKO10108177_B_Phpt1
  gRNA
tcagtagccatcgtcagccc

SEQ ID NO: 108178 - DNA, 20 bp, Artificial Sequence
  MKO10108178_B_Phpt1
  gRNA
agccaagtatcctgactatg

SEQ ID NO: 108179 - DNA, 20 bp, Artificial Sequence
  MKO10108179_B_Phrf1
  gRNA
accattcgatgatgcaatcc

SEQ ID NO: 108180 - DNA, 20 bp, Artificial Sequence
  MKO10108180_B_Phrf1
  gRNA
attgcatcatcgaatggtcc

SEQ ID NO: 108181 - DNA, 20 bp, Artificial Sequence
  MKO10108181_B_Phrf1
  gRNA
atcttaccagatctatcctc

SEQ ID NO: 108182 - DNA, 20 bp, Artificial Sequence
  MKO10108182_B_Phtf1
  gRNA
attgatgttgacttaatcag

SEQ ID NO: 108183 - DNA, 20 bp, Artificial Sequence
  MKO10108183_B_Phtf1
  gRNA
gagcatatgatcagcagata

SEQ ID NO: 108184 - DNA, 20 bp, Artificial Sequence
  MKO10108184_B_Phtf1
  gRNA
aagtcaacatcaatcaagtc

SEQ ID NO: 108185 - DNA, 20 bp, Artificial Sequence
  MKO10108185_B_Phtf2
  gRNA
acgttacttgtaaccaccag

SEQ ID NO: 108186 - DNA, 20 bp, Artificial Sequence
  MKO10108186_B_Phtf2
  gRNA
cgtttaccgcctgtgcctag

SEQ ID NO: 108187 - DNA, 20 bp, Artificial Sequence
  MKO10108187_B_Phtf2
  gRNA
ctcagggtctgcatttgcta

SEQ ID NO: 108188 - DNA, 20 bp, Artificial Sequence
  MKO10108188_B_Phyhd1
  gRNA
aattctgtccggcagtgcag

SEQ ID NO: 108189 - DNA, 20 bp, Artificial Sequence
  MKO10108189_B_Phyhd1
  gRNA
gagtccctcacaactcaaga

SEQ ID NO: 108190 - DNA, 20 bp, Artificial Sequence
  MKO10108190_B_Phyhd1
  gRNA
atccgattcttctttgaaaa

SEQ ID NO: 108191 - DNA, 20 bp, Artificial Sequence
  MKO10108191_B_Phyhipl
  gRNA
caatgaagtagtgcgtgatg

SEQ ID NO: 108192 - DNA, 20 bp, Artificial Sequence
  MKO10108192_B_Phyhipl
  gRNA
cagtgtccacgaacagtcat

SEQ ID NO: 108193 - DNA, 20 bp, Artificial Sequence
  MKO10108193_B_Phyhipl
  gRNA
catatcccatgagatcttga

SEQ ID NO: 108194 - DNA, 20 bp, Artificial Sequence
  MKO10108194_B_Phyhip
  gRNA
tattgttgatctcgatgctg

SEQ ID NO: 108195 - DNA, 20 bp, Artificial Sequence
  MKO10108195_B_Phyhip
  gRNA
gttctaccgcaaccatcaca

SEQ ID NO: 108196 - DNA, 20 bp, Artificial Sequence
  MKO10108196_B_Phyhip
  gRNA
ggccgtgcctctgcccatga

SEQ ID NO: 108197 - DNA, 20 bp, Artificial Sequence
  MKO10108197_B_Phyh
  gRNA
gtttctcgtcattaagaatc

SEQ ID NO: 108198 - DNA, 20 bp, Artificial Sequence
  MKO10108198_B_Phyh
  gRNA
tctctcattataacgatccc

SEQ ID NO: 108199 - DNA, 20 bp, Artificial Sequence
  MKO10108199_B_Phyh
  gRNA
gatcgttataatgagagatg

SEQ ID NO: 108200 - DNA, 20 bp, Artificial Sequence
  MKO10108200_B_Phykpl
  gRNA
gtactgtcgagctagtctca

SEQ ID NO: 108201 - DNA, 20 bp, Artificial Sequence
  MKO10108201_B_Phykpl
  gRNA
agtccacgatgttgtcatgc

SEQ ID NO: 108202 - DNA, 20 bp, Artificial Sequence
  MKO10108202_B_Phykpl
  gRNA
acccagattccggaacttgt

SEQ ID NO: 108203 - DNA, 20 bp, Artificial Sequence
  MKO10108203_B_Pi15
  gRNA
cagaatttgtctgtacgaac

SEQ ID NO: 108204 - DNA, 20 bp, Artificial Sequence
  MKO10108204_B_Pi15
  gRNA
acatcctattcgattagaag

SEQ ID NO: 108205 - DNA, 20 bp, Artificial Sequence
  MKO10108205_B_Pi15
  gRNA
catgggcagcaacttgcatt

SEQ ID NO: 108206 - DNA, 20 bp, Artificial Sequence
  MKO10108206_B_Pi16
  gRNA
ggaggttgcgctcgacttgc

SEQ ID NO: 108207 - DNA, 20 bp, Artificial Sequence
  MKO10108207_B_Pi16
  gRNA
tcccaaggccgagtcgccag

SEQ ID NO: 108208 - DNA, 20 bp, Artificial Sequence
  MKO10108208_B_Pi16
  gRNA
gccgtaagccctaccaggag

SEQ ID NO: 108209 - DNA, 20 bp, Artificial Sequence
  MKO10108209_B_Pi4k2a
  gRNA
caacattgtaccacgtacaa

SEQ ID NO: 108210 - DNA, 20 bp, Artificial Sequence
  MKO10108210_B_Pi4k2a
  gRNA
gggtcactgacctttgtacg

SEQ ID NO: 108211 - DNA, 20 bp, Artificial Sequence
  MKO10108211_B_Pi4k2a
  gRNA
gatcaaatatgactgtccga

SEQ ID NO: 108212 - DNA, 20 bp, Artificial Sequence
  MKO10108212_B_Pi4k2b
  gRNA
cagccgcggagggtcgcgcc

SEQ ID NO: 108213 - DNA, 20 bp, Artificial Sequence
  MKO10108213_B_Pi4k2b
  gRNA
taggaggaagtcctatccga

SEQ ID NO: 108214 - DNA, 20 bp, Artificial Sequence
  MKO10108214_B_Pi4k2b
  gRNA
gattaagtttgacatccacc

SEQ ID NO: 108215 - DNA, 20 bp, Artificial Sequence
  MKO10108215_B_Pi4ka
  gRNA
tcttctacccaatacacttt

SEQ ID NO: 108216 - DNA, 20 bp, Artificial Sequence
  MKO10108216_B_Pi4ka
  gRNA
cttatcttcttcgacttctc

SEQ ID NO: 108217 - DNA, 20 bp, Artificial Sequence
  MKO10108217_B_Pi4ka
  gRNA
gcaagccacatcagacagca

SEQ ID NO: 108218 - DNA, 20 bp, Artificial Sequence
  MKO10108218_B_Pi4kb
  gRNA
tgatgctgtccaccgagaac

SEQ ID NO: 108219 - DNA, 20 bp, Artificial Sequence
  MKO10108219_B_Pi4kb
  gRNA
gacttgatgaattctcgctc

SEQ ID NO: 108220 - DNA, 20 bp, Artificial Sequence
  MKO10108220_B_Pi4kb
  gRNA
gtcttcagggtctcgtttga

SEQ ID NO: 108221 - DNA, 20 bp, Artificial Sequence
  MKO10108221_B_Pianp
  gRNA
atccatcatcatcgttcttg

SEQ ID NO: 108222 - DNA, 20 bp, Artificial Sequence
  MKO10108222_B_Pianp
  gRNA
ctgagggcctgcgccgcttc

SEQ ID NO: 108223 - DNA, 20 bp, Artificial Sequence
  MKO10108223_B_Pianp
  gRNA
gggggcatcacagattcacc

SEQ ID NO: 108224 - DNA, 20 bp, Artificial Sequence
  MKO10108224_B_Pias1
  gRNA
ctgatctgctgcacctgttg

SEQ ID NO: 108225 - DNA, 20 bp, Artificial Sequence
  MKO10108225_B_Pias1
  gRNA
ggtgggaagtgatcttcttg

SEQ ID NO: 108226 - DNA, 20 bp, Artificial Sequence
  MKO10108226_B_Pias1
  gRNA
caaatgtgacttcacagtgc

SEQ ID NO: 108227 - DNA, 20 bp, Artificial Sequence
  MKO10108227_B_Pias2
  gRNA
aaactcaccgcagctggact

SEQ ID NO: 108228 - DNA, 20 bp, Artificial Sequence
  MKO10108228_B_Pias2
  gRNA
cagttcaaagcagtattcag

SEQ ID NO: 108229 - DNA, 20 bp, Artificial Sequence
  MKO10108229_B_Pias2
  gRNA
catatttctctaacttgctg

SEQ ID NO: 108230 - DNA, 20 bp, Artificial Sequence
  MKO10108230_B_Pias3
  gRNA
ttcctcgaacctctggctgg

SEQ ID NO: 108231 - DNA, 20 bp, Artificial Sequence
  MKO10108231_B_Pias3
  gRNA
ggggggaaatagtcctcctg

SEQ ID NO: 108232 - DNA, 20 bp, Artificial Sequence
  MKO10108232_B_Pias3
  gRNA
tcccattaaccttaacaaag

SEQ ID NO: 108233 - DNA, 20 bp, Artificial Sequence
  MKO10108233_B_Pias4
  gRNA
ctctgataccagctgtccgc

SEQ ID NO: 108234 - DNA, 20 bp, Artificial Sequence
  MKO10108234_B_Pias4
  gRNA
ttgaccttcacagcgatgtt

SEQ ID NO: 108235 - DNA, 20 bp, Artificial Sequence
  MKO10108235_B_Pias4
  gRNA
gctccccttcttcaacatgc

SEQ ID NO: 108236 - DNA, 20 bp, Artificial Sequence
  MKO10108236_B_Pibf1
  gRNA
tgtgcagattgaggagctag

SEQ ID NO: 108237 - DNA, 20 bp, Artificial Sequence
  MKO10108237_B_Pibf1
  gRNA
ccaactgaagcagctgacgg

SEQ ID NO: 108238 - DNA, 20 bp, Artificial Sequence
  MKO10108238_B_Pibf1
  gRNA
ctttgtcatagttctcttga

SEQ ID NO: 108239 - DNA, 20 bp, Artificial Sequence
  MKO10108239_B_Picalm
  gRNA
gaagtgcatccatttgattt

SEQ ID NO: 108240 - DNA, 20 bp, Artificial Sequence
  MKO10108240_B_Picalm
  gRNA
gatttcacaaaagtgaagag

SEQ ID NO: 108241 - DNA, 20 bp, Artificial Sequence
  MKO10108241_B_Picalm
  gRNA
atatgtctacatttattaga

SEQ ID NO: 108242 - DNA, 20 bp, Artificial Sequence
  MKO10108242_B_Pick1
  gRNA
tccttgtctctatatcgtcc

SEQ ID NO: 108243 - DNA, 20 bp, Artificial Sequence
  MKO10108243_B_Pick1
  gRNA
catcttcgccacctctacct

SEQ ID NO: 108244 - DNA, 20 bp, Artificial Sequence
  MKO10108244_B_Pick1
  gRNA
ccgcctgcagcttgttgtaa

SEQ ID NO: 108245 - DNA, 20 bp, Artificial Sequence
  MKO10108245_B_Pid1
  gRNA
agcagtcctcttccatgagc

SEQ ID NO: 108246 - DNA, 20 bp, Artificial Sequence
  MKO10108246_B_Pid1
  gRNA
acctgcaggcgctcagtagc

SEQ ID NO: 108247 - DNA, 20 bp, Artificial Sequence
  MKO10108247_B_Pid1
  gRNA
cggctggaagatgtggcagc

SEQ ID NO: 108248 - DNA, 20 bp, Artificial Sequence
  MKO10108248_B_Piezo1
  gRNA
gttgagacaccttcacccaa

SEQ ID NO: 108249 - DNA, 20 bp, Artificial Sequence
  MKO10108249_B_Piezo1
  gRNA
cctgggtgcgccgactctgc

SEQ ID NO: 108250 - DNA, 20 bp, Artificial Sequence
  MKO10108250_B_Piezo1
  gRNA
cctacacaccgtgcctcacc

SEQ ID NO: 108251 - DNA, 20 bp, Artificial Sequence
  MKO10108251_B_Piezo2
  gRNA
cttaccttgcatcgttgctt

SEQ ID NO: 108252 - DNA, 20 bp, Artificial Sequence
  MKO10108252_B_Piezo2
  gRNA
tcattgcaagtctgaccatc

SEQ ID NO: 108253 - DNA, 20 bp, Artificial Sequence
  MKO10108253_B_Piezo2
  gRNA
cttaccttgcaggctcaaca

SEQ ID NO: 108254 - DNA, 20 bp, Artificial Sequence
  MKO10108254_B_Pif1
  gRNA
ggcatgcgcagcttcttcac

SEQ ID NO: 108255 - DNA, 20 bp, Artificial Sequence
  MKO10108255_B_Pif1
  gRNA
ggggtggcagcctgccacat

SEQ ID NO: 108256 - DNA, 20 bp, Artificial Sequence
  MKO10108256_B_Pif1
  gRNA
agtccccacagatgatgagc

SEQ ID NO: 108257 - DNA, 20 bp, Artificial Sequence
  MKO10108257_B_Pifo
  gRNA
agtcagtcccaaaagttact

SEQ ID NO: 108258 - DNA, 20 bp, Artificial Sequence
  MKO10108258_B_Pifo
  gRNA
atatcttgatgcctcgattt

SEQ ID NO: 108259 - DNA, 20 bp, Artificial Sequence
  MKO10108259_B_Pifo
  gRNA
gtgtggggcattcccctaag

SEQ ID NO: 108260 - DNA, 20 bp, Artificial Sequence
  MKO10108260_B_Piga
  gRNA
tctctctgccacgttccgcc

SEQ ID NO: 108261 - DNA, 20 bp, Artificial Sequence
  MKO10108261_B_Piga
  gRNA
ccatgcagaacgcttcagtg

SEQ ID NO: 108262 - DNA, 20 bp, Artificial Sequence
  MKO10108262_B_Piga
  gRNA
cctcactgaagcgttctgca

SEQ ID NO: 108263 - DNA, 20 bp, Artificial Sequence
  MKO10108263_B_Pigb
  gRNA
aggtctccatggtgttcgtg

SEQ ID NO: 108264 - DNA, 20 bp, Artificial Sequence
  MKO10108264_B_Pigb
  gRNA
gaatggacggagcgattgag

SEQ ID NO: 108265 - DNA, 20 bp, Artificial Sequence
  MKO10108265_B_Pigb
  gRNA
catcttcgccagtatttaca

SEQ ID NO: 108266 - DNA, 20 bp, Artificial Sequence
  MKO10108266_B_Pigc
  gRNA
ggccgacctgaagagtactc

SEQ ID NO: 108267 - DNA, 20 bp, Artificial Sequence
  MKO10108267_B_Pigc
  gRNA
ctgtactgacagactccgtc

SEQ ID NO: 108268 - DNA, 20 bp, Artificial Sequence
  MKO10108268_B_Pigc
  gRNA
tccggaaaaacatctatgcc

SEQ ID NO: 108269 - DNA, 20 bp, Artificial Sequence
  MKO10108269_B_Pigf
  gRNA
tctcgccactctggatctac

SEQ ID NO: 108270 - DNA, 20 bp, Artificial Sequence
  MKO10108270_B_Pigf
  gRNA
gtaccttgtctctgtttgtt

SEQ ID NO: 108271 - DNA, 20 bp, Artificial Sequence
  MKO10108271_B_Pigf
  gRNA
atagaacaaaaatgatgtga

SEQ ID NO: 108272 - DNA, 20 bp, Artificial Sequence
  MKO10108272_B_Pigg
  gRNA
tggtcacaagctcagcgaaa

SEQ ID NO: 108273 - DNA, 20 bp, Artificial Sequence
  MKO10108273_B_Pigg
  gRNA
ccacacttcactgctgtcga

SEQ ID NO: 108274 - DNA, 20 bp, Artificial Sequence
  MKO10108274_B_Pigg
  gRNA
tttctacaggcattgatgac

SEQ ID NO: 108275 - DNA, 20 bp, Artificial Sequence
  MKO10108275_B_Pigh
  gRNA
cttcaatcaagcagtccaac

SEQ ID NO: 108276 - DNA, 20 bp, Artificial Sequence
  MKO10108276_B_Pigh
  gRNA
cgatgattagtagagtctcc

SEQ ID NO: 108277 - DNA, 20 bp, Artificial Sequence
  MKO10108277_B_Pigh
  gRNA
tcgagtagttcctgtcttcc

SEQ ID NO: 108278 - DNA, 20 bp, Artificial Sequence
  MKO10108278_B_Pigk
  gRNA
ctgtttatagaagcgtcaag

SEQ ID NO: 108279 - DNA, 20 bp, Artificial Sequence
  MKO10108279_B_Pigk
  gRNA
caatgtgtatggagacgatg

SEQ ID NO: 108280 - DNA, 20 bp, Artificial Sequence
  MKO10108280_B_Pigk
  gRNA
cacaaataactgggctgttt

SEQ ID NO: 108281 - DNA, 20 bp, Artificial Sequence
  MKO10108281_B_Pigl
  gRNA
tatgtgctgaaggagggtgc

SEQ ID NO: 108282 - DNA, 20 bp, Artificial Sequence
  MKO10108282_B_Pigl
  gRNA
ttgctttgtacaaagctgtg

SEQ ID NO: 108283 - DNA, 20 bp, Artificial Sequence
  MKO10108283_B_Pigl
  gRNA
tcctccagggccctgcactc

SEQ ID NO: 108284 - DNA, 20 bp, Artificial Sequence
  MKO10108284_B_Pigm
  gRNA
tgtagcggtaggtcgcccgc

SEQ ID NO: 108285 - DNA, 20 bp, Artificial Sequence
  MKO10108285_B_Pigm
  gRNA
cgggcggcacccgaaagttc

SEQ ID NO: 108286 - DNA, 20 bp, Artificial Sequence
  MKO10108286_B_Pigm
  gRNA
cgcgaagccatagaacaccg

SEQ ID NO: 108287 - DNA, 20 bp, Artificial Sequence
  MKO10108287_B_Pign
  gRNA
ggccatgtagccttgatagc

SEQ ID NO: 108288 - DNA, 20 bp, Artificial Sequence
  MKO10108288_B_Pign
  gRNA
ttaatgaaagcaagtacacg

SEQ ID NO: 108289 - DNA, 20 bp, Artificial Sequence
  MKO10108289_B_Pign
  gRNA
atcttgcccatgtttgccaa

SEQ ID NO: 108290 - DNA, 20 bp, Artificial Sequence
  MKO10108290_B_Pigo
  gRNA
caggggactcatagaacgcc

SEQ ID NO: 108291 - DNA, 20 bp, Artificial Sequence
  MKO10108291_B_Pigo
  gRNA
tccggggaagaggtctctcc

SEQ ID NO: 108292 - DNA, 20 bp, Artificial Sequence
  MKO10108292_B_Pigo
  gRNA
cccatcccgtttgggaacac

SEQ ID NO: 108293 - DNA, 20 bp, Artificial Sequence
  MKO10108293_B_Pigp
  gRNA
aggccagtaagttaagccta

SEQ ID NO: 108294 - DNA, 20 bp, Artificial Sequence
  MKO10108294_B_Pigp
  gRNA
agggcccatcatgagagggc

SEQ ID NO: 108295 - DNA, 20 bp, Artificial Sequence
  MKO10108295_B_Pigp
  gRNA
ctgcagtactttatcttgtg

SEQ ID NO: 108296 - DNA, 20 bp, Artificial Sequence
  MKO10108296_B_Pigq
  gRNA
cattggccagctgtccaatt

SEQ ID NO: 108297 - DNA, 20 bp, Artificial Sequence
  MKO10108297_B_Pigq
  gRNA
ctgctgggctcaagatgaat

SEQ ID NO: 108298 - DNA, 20 bp, Artificial Sequence
  MKO10108298_B_Pigq
  gRNA
gctcaataaagggggacata

SEQ ID NO: 108299 - DNA, 20 bp, Artificial Sequence
  MKO10108299_B_Pigr
  gRNA
cggaaatactggtgccgaca

SEQ ID NO: 108300 - DNA, 20 bp, Artificial Sequence
  MKO10108300_B_Pigr
  gRNA
gagcgttgtgcacatgccgc

SEQ ID NO: 108301 - DNA, 20 bp, Artificial Sequence
  MKO10108301_B_Pigr
  gRNA
caatcgtcgctctgttgtga

SEQ ID NO: 108302 - DNA, 20 bp, Artificial Sequence
  MKO10108302_B_Pigs
  gRNA
gtagcttctcttggtcgtcc

SEQ ID NO: 108303 - DNA, 20 bp, Artificial Sequence
  MKO10108303_B_Pigs
  gRNA
cttctccggctcagctaaca

SEQ ID NO: 108304 - DNA, 20 bp, Artificial Sequence
  MKO10108304_B_Pigs
  gRNA
ccggagagctttggagcacg

SEQ ID NO: 108305 - DNA, 20 bp, Artificial Sequence
  MKO10108305_B_Pigt
  gRNA
tgtctagtgtggataagtcc

SEQ ID NO: 108306 - DNA, 20 bp, Artificial Sequence
  MKO10108306_B_Pigt
  gRNA
ccatgacttactctgcagat

SEQ ID NO: 108307 - DNA, 20 bp, Artificial Sequence
  MKO10108307_B_Pigt
  gRNA
ctcactcaccttggaactgc

SEQ ID NO: 108308 - DNA, 20 bp, Artificial Sequence
  MKO10108308_B_Pigu
  gRNA
cggatgagttcagccacatc

SEQ ID NO: 108309 - DNA, 20 bp, Artificial Sequence
  MKO10108309_B_Pigu
  gRNA
gcgctacatccctctgaaag

SEQ ID NO: 108310 - DNA, 20 bp, Artificial Sequence
  MKO10108310_B_Pigu
  gRNA
ccaattctgcatagtcaatt

SEQ ID NO: 108311 - DNA, 20 bp, Artificial Sequence
  MKO10108311_B_Pigv
  gRNA
catcctgactctagtgctac

SEQ ID NO: 108312 - DNA, 20 bp, Artificial Sequence
  MKO10108312_B_Pigv
  gRNA
aggatcaagaaccgctgctg

SEQ ID NO: 108313 - DNA, 20 bp, Artificial Sequence
  MKO10108313_B_Pigv
  gRNA
cgaatctcagcacctctttc

SEQ ID NO: 108314 - DNA, 20 bp, Artificial Sequence
  MKO10108314_B_Pigw
  gRNA
acaatccacgacttatttaa

SEQ ID NO: 108315 - DNA, 20 bp, Artificial Sequence
  MKO10108315_B_Pigw
  gRNA
caatcacagtgagattctcg

SEQ ID NO: 108316 - DNA, 20 bp, Artificial Sequence
  MKO10108316_B_Pigw
  gRNA
caggaacattctaccgagta

SEQ ID NO: 108317 - DNA, 20 bp, Artificial Sequence
  MKO10108317_B_Pigx
  gRNA
tcgtagtgaagccaactcat

SEQ ID NO: 108318 - DNA, 20 bp, Artificial Sequence
  MKO10108318_B_Pigx
  gRNA
ctgtgcactatcgctatcac

SEQ ID NO: 108319 - DNA, 20 bp, Artificial Sequence
  MKO10108319_B_Pigx
  gRNA
attaagcattacattccacc

SEQ ID NO: 108320 - DNA, 20 bp, Artificial Sequence
  MKO10108320_B_Pigyl
  gRNA
ctggcgctggtgcagccctc

SEQ ID NO: 108321 - DNA, 20 bp, Artificial Sequence
  MKO10108321_B_Pigyl
  gRNA
gaagctcttcagacataact

SEQ ID NO: 108322 - DNA, 20 bp, Artificial Sequence
  MKO10108322_B_Pigyl
  gRNA
cctgctctactccgcctccg

SEQ ID NO: 108323 - DNA, 20 bp, Artificial Sequence
  MKO10108323_B_Pigz
  gRNA
cgatatgatggtggcagccc

SEQ ID NO: 108324 - DNA, 20 bp, Artificial Sequence
  MKO10108324_B_Pigz
  gRNA
tgtacgatctggccccgttg

SEQ ID NO: 108325 - DNA, 20 bp, Artificial Sequence
  MKO10108325_B_Pigz
  gRNA
gacccgtttgtggggatgca

SEQ ID NO: 108326 - DNA, 20 bp, Artificial Sequence
  MKO10108326_B_Pih1d1
  gRNA
aactggtggtcaccatcgcc

SEQ ID NO: 108327 - DNA, 20 bp, Artificial Sequence
  MKO10108327_B_Pih1d1
  gRNA
cctcaccaggatttagctgt

SEQ ID NO: 108328 - DNA, 20 bp, Artificial Sequence
  MKO10108328_B_Pih1d1
  gRNA
gtttctcaccaggctttggc

SEQ ID NO: 108329 - DNA, 20 bp, Artificial Sequence
  MKO10108329_B_Pih1d2
  gRNA
tcgctcctcgatgcacagca

SEQ ID NO: 108330 - DNA, 20 bp, Artificial Sequence
  MKO10108330_B_Pih1d2
  gRNA
atttctgtattaatcgattc

SEQ ID NO: 108331 - DNA, 20 bp, Artificial Sequence
  MKO10108331_B_Pih1d2
  gRNA
cagaccagaagactccgctg

SEQ ID NO: 108332 - DNA, 20 bp, Artificial Sequence
  MKO10108332_B_Pih1d3
  gRNA
agtaaactttccccagcccg

SEQ ID NO: 108333 - DNA, 20 bp, Artificial Sequence
  MKO10108333_B_Pih1d3
  gRNA
atacctaggattaacaagaa

SEQ ID NO: 108334 - DNA, 20 bp, Artificial Sequence
  MKO10108334_B_Pih1d3
  gRNA
gatcctttcttgttaatcct

SEQ ID NO: 108335 - DNA, 20 bp, Artificial Sequence
  MKO10108335_B_Pik3ap1
  gRNA
ctactgtcggcggggctggt

SEQ ID NO: 108336 - DNA, 20 bp, Artificial Sequence
  MKO10108336_B_Pik3ap1
  gRNA
gtcgagtgctgcaaatcctg

SEQ ID NO: 108337 - DNA, 20 bp, Artificial Sequence
  MKO10108337_B_Pik3ap1
  gRNA
tgcctaccccacagcgaatg

SEQ ID NO: 108338 - DNA, 20 bp, Artificial Sequence
  MKO10108338_B_Pik3c2a
  gRNA
tttgtgcagtgatcagtata

SEQ ID NO: 108339 - DNA, 20 bp, Artificial Sequence
  MKO10108339_B_Pik3c2a
  gRNA
agtcatcatgtacccagcaa

SEQ ID NO: 108340 - DNA, 20 bp, Artificial Sequence
  MKO10108340_B_Pik3c2a
  gRNA
tgtagaagagaacttccagt

SEQ ID NO: 108341 - DNA, 20 bp, Artificial Sequence
  MKO10108341_B_Pik3c2b
  gRNA
ctgagacctcaaacaattcg

SEQ ID NO: 108342 - DNA, 20 bp, Artificial Sequence
  MKO10108342_B_Pik3c2b
  gRNA
atccaggactattccctaac

SEQ ID NO: 108343 - DNA, 20 bp, Artificial Sequence
  MKO10108343_B_Pik3c2b
  gRNA
gctacactcacgatgagctg

SEQ ID NO: 108344 - DNA, 20 bp, Artificial Sequence
  MKO10108344_B_Pik3c2g
  gRNA
ctactttaaaagctggtatc

SEQ ID NO: 108345 - DNA, 20 bp, Artificial Sequence
  MKO10108345_B_Pik3c2g
  gRNA
tttcatcaatgctaatccaa

SEQ ID NO: 108346 - DNA, 20 bp, Artificial Sequence
  MKO10108346_B_Pik3c2g
  gRNA
gatgtgctaaagaaagagat

SEQ ID NO: 108347 - DNA, 20 bp, Artificial Sequence
  MKO10108347_B_Pik3c3
  gRNA
gtgtccttgccgatgagcct

SEQ ID NO: 108348 - DNA, 20 bp, Artificial Sequence
  MKO10108348_B_Pik3c3
  gRNA
gcctgtgtaccttggcgagg

SEQ ID NO: 108349 - DNA, 20 bp, Artificial Sequence
  MKO10108349_B_Pik3c3
  gRNA
cccactggcacagcgcttcc

SEQ ID NO: 108350 - DNA, 20 bp, Artificial Sequence
  MKO10108350_B_Pik3ca
  gRNA
tacttctgcttgtcgttgtt

SEQ ID NO: 108351 - DNA, 20 bp, Artificial Sequence
  MKO10108351_B_Pik3ca
  gRNA
gaatgttccttcgaaagtct

SEQ ID NO: 108352 - DNA, 20 bp, Artificial Sequence
  MKO10108352_B_Pik3ca
  gRNA
tcttacctaggattggaaca

SEQ ID NO: 108353 - DNA, 20 bp, Artificial Sequence
  MKO10108353_B_Pik3cb
  gRNA
tatacgagtcaatgtccatg

SEQ ID NO: 108354 - DNA, 20 bp, Artificial Sequence
  MKO10108354_B_Pik3cb
  gRNA
cttcctttccacgaatagtg

SEQ ID NO: 108355 - DNA, 20 bp, Artificial Sequence
  MKO10108355_B_Pik3cb
  gRNA
ctgtgaccccgcagaaaaat

SEQ ID NO: 108356 - DNA, 20 bp, Artificial Sequence
  MKO10108356_B_Pik3cd
  gRNA
ggcctgtgccctccgaaaaa

SEQ ID NO: 108357 - DNA, 20 bp, Artificial Sequence
  MKO10108357_B_Pik3cd
  gRNA
agaagtcaacaaccacgctc

SEQ ID NO: 108358 - DNA, 20 bp, Artificial Sequence
  MKO10108358_B_Pik3cd
  gRNA
cgaacttcacgttgaccagc

SEQ ID NO: 108359 - DNA, 20 bp, Artificial Sequence
  MKO10108359_B_Pik3cg
  gRNA
gatacctaccaccagggtac

SEQ ID NO: 108360 - DNA, 20 bp, Artificial Sequence
  MKO10108360_B_Pik3cg
  gRNA
agcctcgcaggtacgcctcc

SEQ ID NO: 108361 - DNA, 20 bp, Artificial Sequence
  MKO10108361_B_Pik3cg
  gRNA
actaaaagccggtaccctgg

SEQ ID NO: 108362 - DNA, 20 bp, Artificial Sequence
  MKO10108362_B_Pik3ip1
  gRNA
aacccggaccaggacccgcg

SEQ ID NO: 108363 - DNA, 20 bp, Artificial Sequence
  MKO10108363_B_Pik3ip1
  gRNA
tcgtgggctacacttacaag

SEQ ID NO: 108364 - DNA, 20 bp, Artificial Sequence
  MKO10108364_B_Pik3ip1
  gRNA
ctgctaacgccctaccagcc

SEQ ID NO: 108365 - DNA, 20 bp, Artificial Sequence
  MKO10108365_B_Pik3r1
  gRNA
ttgagttaataaaccactac

SEQ ID NO: 108366 - DNA, 20 bp, Artificial Sequence
  MKO10108366_B_Pik3r1
  gRNA
gacgcatctactaaaatgca

SEQ ID NO: 108367 - DNA, 20 bp, Artificial Sequence
  MKO10108367_B_Pik3r1
  gRNA
gtaccattcagcatcctgca

SEQ ID NO: 108368 - DNA, 20 bp, Artificial Sequence
  MKO10108368_B_Pik3r2
  gRNA
tgaccctgctcccccgattc

SEQ ID NO: 108369 - DNA, 20 bp, Artificial Sequence
  MKO10108369_B_Pik3r2
  gRNA
aggctttacctcgaagtgcc

SEQ ID NO: 108370 - DNA, 20 bp, Artificial Sequence
  MKO10108370_B_Pik3r2
  gRNA
cagctgcaggcaacgccagc

SEQ ID NO: 108371 - DNA, 20 bp, Artificial Sequence
  MKO10108371_B_Pik3r3
  gRNA
gtcattggcttaggtggctt

SEQ ID NO: 108372 - DNA, 20 bp, Artificial Sequence
  MKO10108372_B_Pik3r3
  gRNA
ttcattccatttgtgactgc

SEQ ID NO: 108373 - DNA, 20 bp, Artificial Sequence
  MKO10108373_B_Pik3r3
  gRNA
cgaactaagaaggtaccatc

SEQ ID NO: 108374 - DNA, 20 bp, Artificial Sequence
  MKO10108374_B_Pik3r4
  gRNA
gtgggacaagagaacgtcgt

SEQ ID NO: 108375 - DNA, 20 bp, Artificial Sequence
  MKO10108375_B_Pik3r4
  gRNA
cgagacggctctgcgattcc

SEQ ID NO: 108376 - DNA, 20 bp, Artificial Sequence
  MKO10108376_B_Pik3r4
  gRNA
gatgaagccacgcgtcctaa

SEQ ID NO: 108377 - DNA, 20 bp, Artificial Sequence
  MKO10108377_B_Pik3r5
  gRNA
agactccgacctcctgctga

SEQ ID NO: 108378 - DNA, 20 bp, Artificial Sequence
  MKO10108378_B_Pik3r5
  gRNA
ggtcataggtgcctttctct

SEQ ID NO: 108379 - DNA, 20 bp, Artificial Sequence
  MKO10108379_B_Pik3r5
  gRNA
cttgagttcagcatcaatga

SEQ ID NO: 108380 - DNA, 20 bp, Artificial Sequence
  MKO10108380_B_Pik3r6
  gRNA
accagaatggagctctttcc

SEQ ID NO: 108381 - DNA, 20 bp, Artificial Sequence
  MKO10108381_B_Pik3r6
  gRNA
acagactccatggagagctc

SEQ ID NO: 108382 - DNA, 20 bp, Artificial Sequence
  MKO10108382_B_Pik3r6
  gRNA
ccctctcaccttagtgagca

SEQ ID NO: 108383 - DNA, 20 bp, Artificial Sequence
  MKO10108383_B_Pikfyve
  gRNA
ctggcatccaatattgcttc

SEQ ID NO: 108384 - DNA, 20 bp, Artificial Sequence
  MKO10108384_B_Pikfyve
  gRNA
tgttgtaatcaagaaatccc

SEQ ID NO: 108385 - DNA, 20 bp, Artificial Sequence
  MKO10108385_B_Pikfyve
  gRNA
ggctggttctgctttccttc

SEQ ID NO: 108386 - DNA, 20 bp, Artificial Sequence
  MKO10108386_B_Pilra
  gRNA
tgggattgatagtgttcctc

SEQ ID NO: 108387 - DNA, 20 bp, Artificial Sequence
  MKO10108387_B_Pilra
  gRNA
ggatttcagctttagtcttc

SEQ ID NO: 108388 - DNA, 20 bp, Artificial Sequence
  MKO10108388_B_Pilra
  gRNA
aacactctcatgtttctcac

SEQ ID NO: 108389 - DNA, 20 bp, Artificial Sequence
  MKO10108389_B_Pilrb1
  gRNA
ttggtcatagtcctagtcta

SEQ ID NO: 108390 - DNA, 20 bp, Artificial Sequence
  MKO10108390_B_Pilrb1
  gRNA
agggactccagccatggctc

SEQ ID NO: 108391 - DNA, 20 bp, Artificial Sequence
  MKO10108391_B_Pilrb1
  gRNA
tcatcaggctgtctgcatgc

SEQ ID NO: 108392 - DNA, 20 bp, Artificial Sequence
  MKO10108392_B_Pilrb2
  gRNA
ggaaattcagcaagatcaaa

SEQ ID NO: 108393 - DNA, 20 bp, Artificial Sequence
  MKO10108393_B_Pilrb2
  gRNA
gctttgctgatctcgcttcc

SEQ ID NO: 108394 - DNA, 20 bp, Artificial Sequence
  MKO10108394_B_Pilrb2
  gRNA
ccactcaccagcatgcagac

SEQ ID NO: 108395 - DNA, 20 bp, Artificial Sequence
  MKO10108395_B_Pim1
  gRNA
ctcgggcgtcattagacttc

SEQ ID NO: 108396 - DNA, 20 bp, Artificial Sequence
  MKO10108396_B_Pim1
  gRNA
agaaggaccggatttccgat

SEQ ID NO: 108397 - DNA, 20 bp, Artificial Sequence
  MKO10108397_B_Pim1
  gRNA
cgatggtagcgaatccactc

SEQ ID NO: 108398 - DNA, 20 bp, Artificial Sequence
  MKO10108398_B_Pim2
  gRNA
gtgtgatacgccttcttgac

SEQ ID NO: 108399 - DNA, 20 bp, Artificial Sequence
  MKO10108399_B_Pim2
  gRNA
tgtgctaggctggtccaccg

SEQ ID NO: 108400 - DNA, 20 bp, Artificial Sequence
  MKO10108400_B_Pim2
  gRNA
aggtgtcctactctatgaca

SEQ ID NO: 108401 - DNA, 20 bp, Artificial Sequence
  MKO10108401_B_Pim3
  gRNA
gcgggcagccgcatcgccga

SEQ ID NO: 108402 - DNA, 20 bp, Artificial Sequence
  MKO10108402_B_Pim3
  gRNA
gcccgtgatatcggtgatat

SEQ ID NO: 108403 - DNA, 20 bp, Artificial Sequence
  MKO10108403_B_Pim3
  gRNA
atccgatatcaccgatatca

SEQ ID NO: 108404 - DNA, 20 bp, Artificial Sequence
  MKO10108404_B_Pin1rt1
  gRNA
gctgagctcactttatctca

SEQ ID NO: 108405 - DNA, 20 bp, Artificial Sequence
  MKO10108405_B_Pin1rt1
  gRNA
tgaagcacagccaatctcgg

SEQ ID NO: 108406 - DNA, 20 bp, Artificial Sequence
  MKO10108406_B_Pin1rt1
  gRNA
acgagaagctgccgcccggc

SEQ ID NO: 108407 - DNA, 20 bp, Artificial Sequence
  MKO10108407_B_Pin1
  gRNA
gatgcccgagtccgtgaaca

SEQ ID NO: 108408 - DNA, 20 bp, Artificial Sequence
  MKO10108408_B_Pin1
  gRNA
ctcatacgcttctcccagcc

SEQ ID NO: 108409 - DNA, 20 bp, Artificial Sequence
  MKO10108409_B_Pin1
  gRNA
gcaaacgacgcatcctcaaa

SEQ ID NO: 108410 - DNA, 20 bp, Artificial Sequence
  MKO10108410_B_Pin4
  gRNA
actgcattgccaccaccttt

SEQ ID NO: 108411 - DNA, 20 bp, Artificial Sequence
  MKO10108411_B_Pin4
  gRNA
tttatcttcactatattgtg

SEQ ID NO: 108412 - DNA, 20 bp, Artificial Sequence
  MKO10108412_B_Pin4
  gRNA
cacattctgtgtgaaaaaca

SEQ ID NO: 108413 - DNA, 20 bp, Artificial Sequence
  MKO10108413_B_Pink1
  gRNA
gggcccggatgtcgtcctga

SEQ ID NO: 108414 - DNA, 20 bp, Artificial Sequence
  MKO10108414_B_Pink1
  gRNA
cggaaaacccggatgatgtt

SEQ ID NO: 108415 - DNA, 20 bp, Artificial Sequence
  MKO10108415_B_Pink1
  gRNA
acagtgtgcgaccgtggccc

SEQ ID NO: 108416 - DNA, 20 bp, Artificial Sequence
  MKO10108416_B_Pinlyp
  gRNA
tgcgtctttgccgtcttcac

SEQ ID NO: 108417 - DNA, 20 bp, Artificial Sequence
  MKO10108417_B_Pinlyp
  gRNA
ctctgtagcacagcccctcg

SEQ ID NO: 108418 - DNA, 20 bp, Artificial Sequence
  MKO10108418_B_Pinlyp
  gRNA
attctctgtccgattgttca

SEQ ID NO: 108419 - DNA, 20 bp, Artificial Sequence
  MKO10108419_B_Pinx1
  gRNA
tacctgctgtttcctgaccg

SEQ ID NO: 108420 - DNA, 20 bp, Artificial Sequence
  MKO10108420_B_Pinx1
  gRNA
tccacagggtttgggagctc

SEQ ID NO: 108421 - DNA, 20 bp, Artificial Sequence
  MKO10108421_B_Pinx1
  gRNA
tgaatttcatataatgaacc

SEQ ID NO: 108422 - DNA, 20 bp, Artificial Sequence
  MKO10108422_B_Pip4k2a
  gRNA
gccaccggctatctgtatat

SEQ ID NO: 108423 - DNA, 20 bp, Artificial Sequence
  MKO10108423_B_Pip4k2a
  gRNA
attgggaaggggtgcacttc

SEQ ID NO: 108424 - DNA, 20 bp, Artificial Sequence
  MKO10108424_B_Pip4k2a
  gRNA
accgagccccgctgcgagcc

SEQ ID NO: 108425 - DNA, 20 bp, Artificial Sequence
  MKO10108425_B_Pip4k2b
  gRNA
cgatgccgaacctctccctg

SEQ ID NO: 108426 - DNA, 20 bp, Artificial Sequence
  MKO10108426_B_Pip4k2b
  gRNA
atgtaccgcctgaccgtgga

SEQ ID NO: 108427 - DNA, 20 bp, Artificial Sequence
  MKO10108427_B_Pip4k2b
  gRNA
tgttcctgtcatgctaatgc

SEQ ID NO: 108428 - DNA, 20 bp, Artificial Sequence
  MKO10108428_B_Pip4k2c
  gRNA
agtgtcgagcgaagatattg

SEQ ID NO: 108429 - DNA, 20 bp, Artificial Sequence
  MKO10108429_B_Pip4k2c
  gRNA
aggtcatacttcctatgcac

SEQ ID NO: 108430 - DNA, 20 bp, Artificial Sequence
  MKO10108430_B_Pip4k2c
  gRNA
gtcatcgtcttcctgtgcat

SEQ ID NO: 108431 - DNA, 20 bp, Artificial Sequence
  MKO10108431_B_Pip5k1a
  gRNA
cacgctctggtttggtgctc

SEQ ID NO: 108432 - DNA, 20 bp, Artificial Sequence
  MKO10108432_B_Pip5k1a
  gRNA
catcgaagtgttgattcctc

SEQ ID NO: 108433 - DNA, 20 bp, Artificial Sequence
  MKO10108433_B_Pip5k1a
  gRNA
cttgtatgtagtctctccag

SEQ ID NO: 108434 - DNA, 20 bp, Artificial Sequence
  MKO10108434_B_Pip5k1b
  gRNA
atgtcctgccgcgtgccatg

SEQ ID NO: 108435 - DNA, 20 bp, Artificial Sequence
  MKO10108435_B_Pip5k1b
  gRNA
cgcgttctggcttggacgtg

SEQ ID NO: 108436 - DNA, 20 bp, Artificial Sequence
  MKO10108436_B_Pip5k1b
  gRNA
ccggaaggccagcggtgcgt

SEQ ID NO: 108437 - DNA, 20 bp, Artificial Sequence
  MKO10108437_B_Pip5k1c
  gRNA
ctcccgacgcatccacgcct

SEQ ID NO: 108438 - DNA, 20 bp, Artificial Sequence
  MKO10108438_B_Pip5k1c
  gRNA
tgcatgagcacgtcccgctc

SEQ ID NO: 108439 - DNA, 20 bp, Artificial Sequence
  MKO10108439_B_Pip5k1c
  gRNA
gaccacctcgtccaccctga

SEQ ID NO: 108440 - DNA, 20 bp, Artificial Sequence
  MKO10108440_B_Pip5kl1
  gRNA
gggtcttcacaaagaagcgc

SEQ ID NO: 108441 - DNA, 20 bp, Artificial Sequence
  MKO10108441_B_Pip5kl1
  gRNA
tagaatgacacgaatgatgc

SEQ ID NO: 108442 - DNA, 20 bp, Artificial Sequence
  MKO10108442_B_Pip5kl1
  gRNA
ttcctacctcttcgtgaact

SEQ ID NO: 108443 - DNA, 20 bp, Artificial Sequence
  MKO10108443_B_Pipox
  gRNA
atgcagaagccggttggtcc

SEQ ID NO: 108444 - DNA, 20 bp, Artificial Sequence
  MKO10108444_B_Pipox
  gRNA
ctggccccccaccacatcta

SEQ ID NO: 108445 - DNA, 20 bp, Artificial Sequence
  MKO10108445_B_Pipox
  gRNA
ccactgacgaaagatactca

SEQ ID NO: 108446 - DNA, 20 bp, Artificial Sequence
  MKO10108446_B_Pip
  gRNA
gctggggatcattgaaagcc

SEQ ID NO: 108447 - DNA, 20 bp, Artificial Sequence
  MKO10108447_B_Pip
  gRNA
agatgttccatcaacagcac

SEQ ID NO: 108448 - DNA, 20 bp, Artificial Sequence
  MKO10108448_B_Pip
  gRNA
ggtttacttactcatcatcc

SEQ ID NO: 108449 - DNA, 20 bp, Artificial Sequence
  MKO10108449_B_Pira11
  gRNA
cttctggagaccacagagtg

SEQ ID NO: 108450 - DNA, 20 bp, Artificial Sequence
  MKO10108450_B_Pira11
  gRNA
caggactgactctgagcctc

SEQ ID NO: 108451 - DNA, 20 bp, Artificial Sequence
  MKO10108451_B_Pira11
  gRNA
acacactcacctgtcagcac

SEQ ID NO: 108452 - DNA, 20 bp, Artificial Sequence
  MKO10108452_B_Pira1
  gRNA
cttctggagaccacagagtg

SEQ ID NO: 108453 - DNA, 20 bp, Artificial Sequence
  MKO10108453_B_Pira1
  gRNA
caggactgactctgagcctc

SEQ ID NO: 108454 - DNA, 20 bp, Artificial Sequence
  MKO10108454_B_Pira1
  gRNA
acacactcacctgtcagcac

SEQ ID NO: 108455 - DNA, 20 bp, Artificial Sequence
  MKO10108455_B_Pira2
  gRNA
acacactcacctgtcagcac

SEQ ID NO: 108456 - DNA, 20 bp, Artificial Sequence
  MKO10108456_B_Pira2
  gRNA
gacacccagcctttcagccc

SEQ ID NO: 108457 - DNA, 20 bp, Artificial Sequence
  MKO10108457_B_Pira2
  gRNA
acctgagaccaggagctcca

SEQ ID NO: 108458 - DNA, 20 bp, Artificial Sequence
  MKO10108458_B_Pira4
  gRNA
cttctggagaccacagagtg

SEQ ID NO: 108459 - DNA, 20 bp, Artificial Sequence
  MKO10108459_B_Pira4
  gRNA
caggactgactctgagcctc

SEQ ID NO: 108460 - DNA, 20 bp, Artificial Sequence
  MKO10108460_B_Pira4
  gRNA
acacactcacctgtcagcac

SEQ ID NO: 108461 - DNA, 20 bp, Artificial Sequence
  MKO10108461_B_Pira6
  gRNA
ggcttagttgatgttccttg

SEQ ID NO: 108462 - DNA, 20 bp, Artificial Sequence
  MKO10108462_B_Pira6
  gRNA
ctccacagccacagagaacc

SEQ ID NO: 108463 - DNA, 20 bp, Artificial Sequence
  MKO10108463_B_Pira6
  gRNA
acagttcacaataccacaac

SEQ ID NO: 108464 - DNA, 20 bp, Artificial Sequence
  MKO10108464_B_Pira7
  gRNA
cttctggagaccacagagtg

SEQ ID NO: 108465 - DNA, 20 bp, Artificial Sequence
  MKO10108465_B_Pira7
  gRNA
caggactgactctgagcctc

SEQ ID NO: 108466 - DNA, 20 bp, Artificial Sequence
  MKO10108466_B_Pira7
  gRNA
acacactcacctgtcagcac

SEQ ID NO: 108467 - DNA, 20 bp, Artificial Sequence
  MKO10108467_B_Pirb
  gRNA
gcatgttgtagtgtcacaga

SEQ ID NO: 108468 - DNA, 20 bp, Artificial Sequence
  MKO10108468_B_Pirb
  gRNA
caggactgactctgagcctc

SEQ ID NO: 108469 - DNA, 20 bp, Artificial Sequence
  MKO10108469_B_Pirb
  gRNA
acacactcacctgtcagcac

SEQ ID NO: 108470 - DNA, 20 bp, Artificial Sequence
  MKO10108470_B_Pirt
  gRNA
ataaagttgtgcaagtgctc

SEQ ID NO: 108471 - DNA, 20 bp, Artificial Sequence
  MKO10108471_B_Pirt
  gRNA
gttccagaagtgagtctgtc

SEQ ID NO: 108472 - DNA, 20 bp, Artificial Sequence
  MKO10108472_B_Pirt
  gRNA
cacctgtgtggcctacatct

SEQ ID NO: 108473 - DNA, 20 bp, Artificial Sequence
  MKO10108473_B_Pir
  gRNA
cccactgtacctttaggaat

SEQ ID NO: 108474 - DNA, 20 bp, Artificial Sequence
  MKO10108474_B_Pir
  gRNA
tcgcacaccaaccttatatc

SEQ ID NO: 108475 - DNA, 20 bp, Artificial Sequence
  MKO10108475_B_Pir
  gRNA
catgttggtaaaatgaaccc

SEQ ID NO: 108476 - DNA, 20 bp, Artificial Sequence
  MKO10108476_B_Pisd
  gRNA
ggcagtagattcatagtgac

SEQ ID NO: 108477 - DNA, 20 bp, Artificial Sequence
  MKO10108477_B_Pisd
  gRNA
aggtcctctgtattggctcg

SEQ ID NO: 108478 - DNA, 20 bp, Artificial Sequence
  MKO10108478_B_Pisd
  gRNA
cgtatgtggcttgcactgtg

SEQ ID NO: 108479 - DNA, 20 bp, Artificial Sequence
  MKO10108479_B_Pithd1
  gRNA
gcagtttgttgaaagtgatg

SEQ ID NO: 108480 - DNA, 20 bp, Artificial Sequence
  MKO10108480_B_Pithd1
  gRNA
ctaattctcctgtaatgtct

SEQ ID NO: 108481 - DNA, 20 bp, Artificial Sequence
  MKO10108481_B_Pithd1
  gRNA
cctgcggggagagtggactg

SEQ ID NO: 108482 - DNA, 20 bp, Artificial Sequence
  MKO10108482_B_Pitpna
  gRNA
aggctttctcgtgtatattc

SEQ ID NO: 108483 - DNA, 20 bp, Artificial Sequence
  MKO10108483_B_Pitpna
  gRNA
cttacctcatctacagacac

SEQ ID NO: 108484 - DNA, 20 bp, Artificial Sequence
  MKO10108484_B_Pitpna
  gRNA
cctgcctgtgtctgtagatg

SEQ ID NO: 108485 - DNA, 20 bp, Artificial Sequence
  MKO10108485_B_Pitpnb
  gRNA
acaaaatctaccacctgaag

SEQ ID NO: 108486 - DNA, 20 bp, Artificial Sequence
  MKO10108486_B_Pitpnb
  gRNA
gcaatcatcctcacaaatgc

SEQ ID NO: 108487 - DNA, 20 bp, Artificial Sequence
  MKO10108487_B_Pitpnb
  gRNA
cttacctcttgaacagaaca

SEQ ID NO: 108488 - DNA, 20 bp, Artificial Sequence
  MKO10108488_B_Pitpnc1
  gRNA
cgtgcagaacgagccctttg

SEQ ID NO: 108489 - DNA, 20 bp, Artificial Sequence
  MKO10108489_B_Pitpnc1
  gRNA
tcccttgttgtcttcatact

SEQ ID NO: 108490 - DNA, 20 bp, Artificial Sequence
  MKO10108490_B_Pitpnc1
  gRNA
aaccaagtatgaagacaaca

SEQ ID NO: 108491 - DNA, 20 bp, Artificial Sequence
  MKO10108491_B_Pitpnm1
  gRNA
acgcatgctagcgcagcgta

SEQ ID NO: 108492 - DNA, 20 bp, Artificial Sequence
  MKO10108492_B_Pitpnm1
  gRNA
cctaacgtcttcaacctgag

SEQ ID NO: 108493 - DNA, 20 bp, Artificial Sequence
  MKO10108493_B_Pitpnm1
  gRNA
cttacccatatacccggaca

SEQ ID NO: 108494 - DNA, 20 bp, Artificial Sequence
  MKO10108494_B_Pitpnm2
  gRNA
agacatcatcgacatcgtca

SEQ ID NO: 108495 - DNA, 20 bp, Artificial Sequence
  MKO10108495_B_Pitpnm2
  gRNA
cccggcaagtcttgactgac

SEQ ID NO: 108496 - DNA, 20 bp, Artificial Sequence
  MKO10108496_B_Pitpnm2
  gRNA
gatggtgagggcccaccggc

SEQ ID NO: 108497 - DNA, 20 bp, Artificial Sequence
  MKO10108497_B_Pitpnm3
  gRNA
catgaatctcgatacttcct

SEQ ID NO: 108498 - DNA, 20 bp, Artificial Sequence
  MKO10108498_B_Pitpnm3
  gRNA
agtatcgagattcatgaaga

SEQ ID NO: 108499 - DNA, 20 bp, Artificial Sequence
  MKO10108499_B_Pitpnm3
  gRNA
cgcccgggacatggccaagg

SEQ ID NO: 108500 - DNA, 20 bp, Artificial Sequence
  MKO10108500_B_Pitrm1
  gRNA
acgagctctacagtataaag

SEQ ID NO: 108501 - DNA, 20 bp, Artificial Sequence
  MKO10108501_B_Pitrm1
  gRNA
atactgtagagctcgttcac

SEQ ID NO: 108502 - DNA, 20 bp, Artificial Sequence
  MKO10108502_B_Pitrm1
  gRNA
gaacctcctctccgtgtatt

SEQ ID NO: 108503 - DNA, 20 bp, Artificial Sequence
  MKO10108503_B_Pitx1
  gRNA
tttacctggcagatcagcgt

SEQ ID NO: 108504 - DNA, 20 bp, Artificial Sequence
  MKO10108504_B_Pitx1
  gRNA
acctcactgaaccgcgagtg

SEQ ID NO: 108505 - DNA, 20 bp, Artificial Sequence
  MKO10108505_B_Pitx1
  gRNA
gtagcggttcctttggaacg

SEQ ID NO: 108506 - DNA, 20 bp, Artificial Sequence
  MKO10108506_B_Pitx2
  gRNA
cacggcgatttcttcgcgag

SEQ ID NO: 108507 - DNA, 20 bp, Artificial Sequence
  MKO10108507_B_Pitx2
  gRNA
tccccccttaccattggcgc

SEQ ID NO: 108508 - DNA, 20 bp, Artificial Sequence
  MKO10108508_B_Pitx2
  gRNA
ggcgccttacctgcgacttc

SEQ ID NO: 108509 - DNA, 20 bp, Artificial Sequence
  MKO10108509_B_Pitx3
  gRNA
gcgtccgataacgacagcgc

SEQ ID NO: 108510 - DNA, 20 bp, Artificial Sequence
  MKO10108510_B_Pitx3
  gRNA
aagccctgcgctgtcgttat

SEQ ID NO: 108511 - DNA, 20 bp, Artificial Sequence
  MKO10108511_B_Pitx3
  gRNA
tccacaccgcgatctcttcg

SEQ ID NO: 108512 - DNA, 20 bp, Artificial Sequence
  MKO10108512_B_Piwil1
  gRNA
gaagccttcgggcctccatc

SEQ ID NO: 108513 - DNA, 20 bp, Artificial Sequence
  MKO10108513_B_Piwil1
  gRNA
catcgactacaatcccctga

SEQ ID NO: 108514 - DNA, 20 bp, Artificial Sequence
  MKO10108514_B_Piwil1
  gRNA
cgccgagacttccatgacct

SEQ ID NO: 108515 - DNA, 20 bp, Artificial Sequence
  MKO10108515_B_Piwil2
  gRNA
gcactctgccgatccccctc

SEQ ID NO: 108516 - DNA, 20 bp, Artificial Sequence
  MKO10108516_B_Piwil2
  gRNA
aaacgagaagtgcctccttt

SEQ ID NO: 108517 - DNA, 20 bp, Artificial Sequence
  MKO10108517_B_Piwil2
  gRNA
gtacacacctgaaagtcaca

SEQ ID NO: 108518 - DNA, 20 bp, Artificial Sequence
  MKO10108518_B_Piwil4
  gRNA
actggtacagctgccaatcc

SEQ ID NO: 108519 - DNA, 20 bp, Artificial Sequence
  MKO10108519_B_Piwil4
  gRNA
aatgacacttgtcccacctc

SEQ ID NO: 108520 - DNA, 20 bp, Artificial Sequence
  MKO10108520_B_Piwil4
  gRNA
aagagttgggtgtctgtacc

SEQ ID NO: 108521 - DNA, 20 bp, Artificial Sequence
  MKO10108521_B_Pja1
  gRNA
ttgccagcacacgtcgtcgc

SEQ ID NO: 108522 - DNA, 20 bp, Artificial Sequence
  MKO10108522_B_Pja1
  gRNA
cagaatcttcctcgtagtat

SEQ ID NO: 108523 - DNA, 20 bp, Artificial Sequence
  MKO10108523_B_Pja1
  gRNA
cgtgagcgaagacctcgaag

SEQ ID NO: 108524 - DNA, 20 bp, Artificial Sequence
  MKO10108524_B_Pja2
  gRNA
atagtctgatatcctcctgc

SEQ ID NO: 108525 - DNA, 20 bp, Artificial Sequence
  MKO10108525_B_Pja2
  gRNA
atggacttgatccaatgaac

SEQ ID NO: 108526 - DNA, 20 bp, Artificial Sequence
  MKO10108526_B_Pja2
  gRNA
gaaagaagcttgggtcgggc

SEQ ID NO: 108527 - DNA, 20 bp, Artificial Sequence
  MKO10108527_B_Pkd1l2
  gRNA
gtcaaagatgaagctcccgt

SEQ ID NO: 108528 - DNA, 20 bp, Artificial Sequence
  MKO10108528_B_Pkd1l2
  gRNA
cacccacaggtagctacccc

SEQ ID NO: 108529 - DNA, 20 bp, Artificial Sequence
  MKO10108529_B_Pkd1l2
  gRNA
ccgatgtagccgcagctccc

SEQ ID NO: 108530 - DNA, 20 bp, Artificial Sequence
  MKO10108530_B_Pkd1l3
  gRNA
aggggaaacctgacgctgcc

SEQ ID NO: 108531 - DNA, 20 bp, Artificial Sequence
  MKO10108531_B_Pkd1l3
  gRNA
ggttggtgacacatggctaa

SEQ ID NO: 108532 - DNA, 20 bp, Artificial Sequence
  MKO10108532_B_Pkd1l3
  gRNA
acagccgcctttccccctca

SEQ ID NO: 108533 - DNA, 20 bp, Artificial Sequence
  MKO10108533_B_Pkd1
  gRNA
gttccagcgtgttgagctaa

SEQ ID NO: 108534 - DNA, 20 bp, Artificial Sequence
  MKO10108534_B_Pkd1
  gRNA
ccacaacctacttcagacgc

SEQ ID NO: 108535 - DNA, 20 bp, Artificial Sequence
  MKO10108535_B_Pkd1
  gRNA
cctggtgaacctttcagcac

SEQ ID NO: 108536 - DNA, 20 bp, Artificial Sequence
  MKO10108536_B_Pkd2l1
  gRNA
ctcacaagctacagcggggg

SEQ ID NO: 108537 - DNA, 20 bp, Artificial Sequence
  MKO10108537_B_Pkd2l1
  gRNA
ggtatacatagtgttcctcg

SEQ ID NO: 108538 - DNA, 20 bp, Artificial Sequence
  MKO10108538_B_Pkd2l1
  gRNA
actagaacttgtcattccgt

SEQ ID NO: 108539 - DNA, 20 bp, Artificial Sequence
  MKO10108539_B_Pkd2l2
  gRNA
gagtaacaactcctcgagtg

SEQ ID NO: 108540 - DNA, 20 bp, Artificial Sequence
  MKO10108540_B_Pkd2l2
  gRNA
taatccagttgttcagtcga

SEQ ID NO: 108541 - DNA, 20 bp, Artificial Sequence
  MKO10108541_B_Pkd2l2
  gRNA
ggaggttaacaccacactcg

SEQ ID NO: 108542 - DNA, 20 bp, Artificial Sequence
  MKO10108542_B_Pkd2
  gRNA
acagagctccatttggaccg

SEQ ID NO: 108543 - DNA, 20 bp, Artificial Sequence
  MKO10108543_B_Pkd2
  gRNA
cacagatgcacaagactacg

SEQ ID NO: 108544 - DNA, 20 bp, Artificial Sequence
  MKO10108544_B_Pkd2
  gRNA
agtacctgaaaagtgtgtta

SEQ ID NO: 108545 - DNA, 20 bp, Artificial Sequence
  MKO10108545_B_Pkdcc
  gRNA
tgcacggtgtctcttccacg

SEQ ID NO: 108546 - DNA, 20 bp, Artificial Sequence
  MKO10108546_B_Pkdcc
  gRNA
tggaaactctagcgtgcagt

SEQ ID NO: 108547 - DNA, 20 bp, Artificial Sequence
  MKO10108547_B_Pkdcc
  gRNA
gctctatggctattgctacc

SEQ ID NO: 108548 - DNA, 20 bp, Artificial Sequence
  MKO10108548_B_Pkdrej
  gRNA
catgctcaagcttcggacgt

SEQ ID NO: 108549 - DNA, 20 bp, Artificial Sequence
  MKO10108549_B_Pkdrej
  gRNA
aaccggcgagtattcttctc

SEQ ID NO: 108550 - DNA, 20 bp, Artificial Sequence
  MKO10108550_B_Pkdrej
  gRNA
ccagccctacgccgccccgt

SEQ ID NO: 108551 - DNA, 20 bp, Artificial Sequence
  MKO10108551_B_Pkhd1l1
  gRNA
ctactctgttcgagtcagtg

SEQ ID NO: 108552 - DNA, 20 bp, Artificial Sequence
  MKO10108552_B_Pkhd1l1
  gRNA
cacactgactcgaacagagt

SEQ ID NO: 108553 - DNA, 20 bp, Artificial Sequence
  MKO10108553_B_Pkhd1l1
  gRNA
tgtgatgctccttattgtgg

SEQ ID NO: 108554 - DNA, 20 bp, Artificial Sequence
  MKO10108554_B_Pkhd1
  gRNA
ttccagtttgaacccgcaga

SEQ ID NO: 108555 - DNA, 20 bp, Artificial Sequence
  MKO10108555_B_Pkhd1
  gRNA
gaaggccggagagacgtcac

SEQ ID NO: 108556 - DNA, 20 bp, Artificial Sequence
  MKO10108556_B_Pkhd1
  gRNA
tactccctggaaatgcgctc

SEQ ID NO: 108557 - DNA, 20 bp, Artificial Sequence
  MKO10108557_B_Pkia
  gRNA
tttgttagcaatgactgatg

SEQ ID NO: 108558 - DNA, 20 bp, Artificial Sequence
  MKO10108558_B_Pkia
  gRNA
gaattagccttaaaactagc

SEQ ID NO: 108559 - DNA, 20 bp, Artificial Sequence
  MKO10108559_B_Pkia
  gRNA
aaatgcaatacatgatatcc

SEQ ID NO: 108560 - DNA, 20 bp, Artificial Sequence
  MKO10108560_B_Pkib
  gRNA
ccttgctgaggacgcaaagc

SEQ ID NO: 108561 - DNA, 20 bp, Artificial Sequence
  MKO10108561_B_Pkib
  gRNA
ccaaaaacacccctaaatga

SEQ ID NO: 108562 - DNA, 20 bp, Artificial Sequence
  MKO10108562_B_Pkib
  gRNA
aagaatgaagagaaagacca

SEQ ID NO: 108563 - DNA, 20 bp, Artificial Sequence
  MKO10108563_B_Pkig
  gRNA
ctggctgctggcttccttgt

SEQ ID NO: 108564 - DNA, 20 bp, Artificial Sequence
  MKO10108564_B_Pkig
  gRNA
ggaagtcgagtcctcctact

SEQ ID NO: 108565 - DNA, 20 bp, Artificial Sequence
  MKO10108565_B_Pkig
  gRNA
tccgagtcaccctggatgtc

SEQ ID NO: 108566 - DNA, 20 bp, Artificial Sequence
  MKO10108566_B_Pklr
  gRNA
cggtccacagagcgtgacgc

SEQ ID NO: 108567 - DNA, 20 bp, Artificial Sequence
  MKO10108567_B_Pklr
  gRNA
gaaggtgtccgccatagctg

SEQ ID NO: 108568 - DNA, 20 bp, Artificial Sequence
  MKO10108568_B_Pklr
  gRNA
gctctgagtcgatatccaga

SEQ ID NO: 108569 - DNA, 20 bp, Artificial Sequence
  MKO10108569_B_Pkmyt1
  gRNA
gctgcggaagccctaagtcg

SEQ ID NO: 108570 - DNA, 20 bp, Artificial Sequence
  MKO10108570_B_Pkmyt1
  gRNA
ggctggtgcatcctgccagt

SEQ ID NO: 108571 - DNA, 20 bp, Artificial Sequence
  MKO10108571_B_Pkmyt1
  gRNA
ggcccaccggccacaccacc

SEQ ID NO: 108572 - DNA, 20 bp, Artificial Sequence
  MKO10108572_B_Pkm
  gRNA
tgggggcagagtcaatgtcc

SEQ ID NO: 108573 - DNA, 20 bp, Artificial Sequence
  MKO10108573_B_Pkm
  gRNA
agggcctgcttcccgatctg

SEQ ID NO: 108574 - DNA, 20 bp, Artificial Sequence
  MKO10108574_B_Pkm
  gRNA
ccttcagcatctccacagat

SEQ ID NO: 108575 - DNA, 20 bp, Artificial Sequence
  MKO10108575_B_Pkn1
  gRNA
ctgcatgctccactcgaaaa

SEQ ID NO: 108576 - DNA, 20 bp, Artificial Sequence
  MKO10108576_B_Pkn1
  gRNA
atgatccagacctatagcaa

SEQ ID NO: 108577 - DNA, 20 bp, Artificial Sequence
  MKO10108577_B_Pkn1
  gRNA
gcgctcttcgaagctgcatg

SEQ ID NO: 108578 - DNA, 20 bp, Artificial Sequence
  MKO10108578_B_Pkn2
  gRNA
aaatgcacacatcgttgtat

SEQ ID NO: 108579 - DNA, 20 bp, Artificial Sequence
  MKO10108579_B_Pkn2
  gRNA
tgataagccctcttgagctt

SEQ ID NO: 108580 - DNA, 20 bp, Artificial Sequence
  MKO10108580_B_Pkn2
  gRNA
acagaaattggacgacatca

SEQ ID NO: 108581 - DNA, 20 bp, Artificial Sequence
  MKO10108581_B_Pkn3
  gRNA
gcagcaccgacttcgagtag

SEQ ID NO: 108582 - DNA, 20 bp, Artificial Sequence
  MKO10108582_B_Pkn3
  gRNA
ccttaccttgggggtgccgc

SEQ ID NO: 108583 - DNA, 20 bp, Artificial Sequence
  MKO10108583_B_Pkn3
  gRNA
ggctctcggaggctttacat

SEQ ID NO: 108584 - DNA, 20 bp, Artificial Sequence
  MKO10108584_B_Pknox1
  gRNA
gtactcccctgtgcaatccc

SEQ ID NO: 108585 - DNA, 20 bp, Artificial Sequence
  MKO10108585_B_Pknox1
  gRNA
cagattcagagtgccatcac

SEQ ID NO: 108586 - DNA, 20 bp, Artificial Sequence
  MKO10108586_B_Pknox1
  gRNA
ctcaatgtccacatcgaagc

SEQ ID NO: 108587 - DNA, 20 bp, Artificial Sequence
  MKO10108587_B_Pknox2
  gRNA
cgagaactttgtccaccagc

SEQ ID NO: 108588 - DNA, 20 bp, Artificial Sequence
  MKO10108588_B_Pknox2
  gRNA
gaggatccacctgctagagt

SEQ ID NO: 108589 - DNA, 20 bp, Artificial Sequence
  MKO10108589_B_Pknox2
  gRNA
ccccgaggtcattcctgagc

SEQ ID NO: 108590 - DNA, 20 bp, Artificial Sequence
  MKO10108590_B_Pkp1
  gRNA
tgccggggccctgcgcaacc

SEQ ID NO: 108591 - DNA, 20 bp, Artificial Sequence
  MKO10108591_B_Pkp1
  gRNA
ctctcggcaggtctatcagc

SEQ ID NO: 108592 - DNA, 20 bp, Artificial Sequence
  MKO10108592_B_Pkp1
  gRNA
gctgacaattacaacaacta

SEQ ID NO: 108593 - DNA, 20 bp, Artificial Sequence
  MKO10108593_B_Pkp2
  gRNA
gtatgtctacaagctacacg

SEQ ID NO: 108594 - DNA, 20 bp, Artificial Sequence
  MKO10108594_B_Pkp2
  gRNA
tgtagcttgtagacatactc

SEQ ID NO: 108595 - DNA, 20 bp, Artificial Sequence
  MKO10108595_B_Pkp2
  gRNA
ttcagaacgaagatgttcaa

SEQ ID NO: 108596 - DNA, 20 bp, Artificial Sequence
  MKO10108596_B_Pkp3
  gRNA
acccattgtgccgcgactgc

SEQ ID NO: 108597 - DNA, 20 bp, Artificial Sequence
  MKO10108597_B_Pkp3
  gRNA
catagtgtgatattgacctc

SEQ ID NO: 108598 - DNA, 20 bp, Artificial Sequence
  MKO10108598_B_Pkp3
  gRNA
tcccgatcccagggcatgag

SEQ ID NO: 108599 - DNA, 20 bp, Artificial Sequence
  MKO10108599_B_Pkp4
  gRNA
cactattctagcttccgtga

SEQ ID NO: 108600 - DNA, 20 bp, Artificial Sequence
  MKO10108600_B_Pkp4
  gRNA
tgtcctgatgagatagttgt

SEQ ID NO: 108601 - DNA, 20 bp, Artificial Sequence
  MKO10108601_B_Pkp4
  gRNA
cttgcagatgtgccaaatcc

SEQ ID NO: 108602 - DNA, 20 bp, Artificial Sequence
  MKO10108602_B_Pla1a
  gRNA
ccagactgacaccaatgatg

SEQ ID NO: 108603 - DNA, 20 bp, Artificial Sequence
  MKO10108603_B_Pla1a
  gRNA
cagcatccaagcgttcctcc

SEQ ID NO: 108604 - DNA, 20 bp, Artificial Sequence
  MKO10108604_B_Pla1a
  gRNA
ctggtgtactctggtccagc

SEQ ID NO: 108605 - DNA, 20 bp, Artificial Sequence
  MKO10108605_B_Pla2g10
  gRNA
agccacgtgacgccattgac

SEQ ID NO: 108606 - DNA, 20 bp, Artificial Sequence
  MKO10108606_B_Pla2g10
  gRNA
caccagtcaatggcgtcacg

SEQ ID NO: 108607 - DNA, 20 bp, Artificial Sequence
  MKO10108607_B_Pla2g10
  gRNA
gtgagcctgtcaattgcact

SEQ ID NO: 108608 - DNA, 20 bp, Artificial Sequence
  MKO10108608_B_Pla2g12a
  gRNA
ttatatccatagcgtggaac

SEQ ID NO: 108609 - DNA, 20 bp, Artificial Sequence
  MKO10108609_B_Pla2g12a
  gRNA
gacaccagcatgcagcccgc

SEQ ID NO: 108610 - DNA, 20 bp, Artificial Sequence
  MKO10108610_B_Pla2g12a
  gRNA
gacagatgctacgagacctg

SEQ ID NO: 108611 - DNA, 20 bp, Artificial Sequence
  MKO10108611_B_Pla2g12b
  gRNA
tgcccgctgactgttcataa

SEQ ID NO: 108612 - DNA, 20 bp, Artificial Sequence
  MKO10108612_B_Pla2g12b
  gRNA
tccactcaccatatcgacac

SEQ ID NO: 108613 - DNA, 20 bp, Artificial Sequence
  MKO10108613_B_Pla2g12b
  gRNA
cgagtctgtcaacagctacg

SEQ ID NO: 108614 - DNA, 20 bp, Artificial Sequence
  MKO10108614_B_Pla2g15
  gRNA
ttcgaggtgctccctatgat

SEQ ID NO: 108615 - DNA, 20 bp, Artificial Sequence
  MKO10108615_B_Pla2g15
  gRNA
acgtgcgtgtccctggcttt

SEQ ID NO: 108616 - DNA, 20 bp, Artificial Sequence
  MKO10108616_B_Pla2g15
  gRNA
tcctgcagtgcctggtgatt

SEQ ID NO: 108617 - DNA, 20 bp, Artificial Sequence
  MKO10108617_B_Pla2g16
  gRNA
ttggcggccttgggcctcgt

SEQ ID NO: 108618 - DNA, 20 bp, Artificial Sequence
  MKO10108618_B_Pla2g16
  gRNA
tgatggatacgtgatccacc

SEQ ID NO: 108619 - DNA, 20 bp, Artificial Sequence
  MKO10108619_B_Pla2g16
  gRNA
tccgccctatgtacagacac

SEQ ID NO: 108620 - DNA, 20 bp, Artificial Sequence
  MKO10108620_B_Pla2g1b
  gRNA
ccccagtggacgacttagac

SEQ ID NO: 108621 - DNA, 20 bp, Artificial Sequence
  MKO10108621_B_Pla2g1b
  gRNA
gacaggctaacagaatttcc

SEQ ID NO: 108622 - DNA, 20 bp, Artificial Sequence
  MKO10108622_B_Pla2g1b
  gRNA
tgtagcagtggtcatgagtc

SEQ ID NO: 108623 - DNA, 20 bp, Artificial Sequence
  MKO10108623_B_Pla2g2a
  gRNA
tgactgttgctacaagcgcc

SEQ ID NO: 108624 - DNA, 20 bp, Artificial Sequence
  MKO10108624_B_Pla2g2a
  gRNA
cttaccaaaggccatgatcg

SEQ ID NO: 108625 - DNA, 20 bp, Artificial Sequence
  MKO10108625_B_Pla2g2a
  gRNA
tcttaccagaacaggtgatt

SEQ ID NO: 108626 - DNA, 20 bp, Artificial Sequence
  MKO10108626_B_Pla2g2c
  gRNA
ctccacaggtggatgcaccg

SEQ ID NO: 108627 - DNA, 20 bp, Artificial Sequence
  MKO10108627_B_Pla2g2c
  gRNA
ggtcaccgtcccattgacaa

SEQ ID NO: 108628 - DNA, 20 bp, Artificial Sequence
  MKO10108628_B_Pla2g2c
  gRNA
agccatattccttaagcttg

SEQ ID NO: 108629 - DNA, 20 bp, Artificial Sequence
  MKO10108629_B_Pla2g2d
  gRNA
tatgcccacctgaagatcga

SEQ ID NO: 108630 - DNA, 20 bp, Artificial Sequence
  MKO10108630_B_Pla2g2d
  gRNA
ggcaggtataactgcaaccc

SEQ ID NO: 108631 - DNA, 20 bp, Artificial Sequence
  MKO10108631_B_Pla2g2d
  gRNA
aagtccacagtgacagccgt

SEQ ID NO: 108632 - DNA, 20 bp, Artificial Sequence
  MKO10108632_B_Pla2g2e
  gRNA
gccctgcagtacaatgacta

SEQ ID NO: 108633 - DNA, 20 bp, Artificial Sequence
  MKO10108633_B_Pla2g2e
  gRNA
gatgaaacctcccattgccc

SEQ ID NO: 108634 - DNA, 20 bp, Artificial Sequence
  MKO10108634_B_Pla2g2e
  gRNA
actcgagacaacatcttctg

SEQ ID NO: 108635 - DNA, 20 bp, Artificial Sequence
  MKO10108635_B_Pla2g2f
  gRNA
gcttctcatagcaacagtcg

SEQ ID NO: 108636 - DNA, 20 bp, Artificial Sequence
  MKO10108636_B_Pla2g2f
  gRNA
acgcggccatcccatggatg

SEQ ID NO: 108637 - DNA, 20 bp, Artificial Sequence
  MKO10108637_B_Pla2g2f
  gRNA
attctttgccatcgcagtcc

SEQ ID NO: 108638 - DNA, 20 bp, Artificial Sequence
  MKO10108638_B_Pla2g3
  gRNA
cacgcccatgatgtcggaga

SEQ ID NO: 108639 - DNA, 20 bp, Artificial Sequence
  MKO10108639_B_Pla2g3
  gRNA
tatagtaagtcctgggccga

SEQ ID NO: 108640 - DNA, 20 bp, Artificial Sequence
  MKO10108640_B_Pla2g3
  gRNA
ggtagttgtgctgtgacgtc

SEQ ID NO: 108641 - DNA, 20 bp, Artificial Sequence
  MKO10108641_B_Pla2g4a
  gRNA
acgtgccaccaaagtaacca

SEQ ID NO: 108642 - DNA, 20 bp, Artificial Sequence
  MKO10108642_B_Pla2g4a
  gRNA
ccctgtatcttcaatgaaag

SEQ ID NO: 108643 - DNA, 20 bp, Artificial Sequence
  MKO10108643_B_Pla2g4a
  gRNA
ataatgatataaaccccgtg

SEQ ID NO: 108644 - DNA, 20 bp, Artificial Sequence
  MKO10108644_B_Pla2g4b
  gRNA
agcgtgtggctggaagccgt

SEQ ID NO: 108645 - DNA, 20 bp, Artificial Sequence
  MKO10108645_B_Pla2g4b
  gRNA
attgtcagtgctgtttgacg

SEQ ID NO: 108646 - DNA, 20 bp, Artificial Sequence
  MKO10108646_B_Pla2g4b
  gRNA
acttccacttccggatccat

SEQ ID NO: 108647 - DNA, 20 bp, Artificial Sequence
  MKO10108647_B_Pla2g4c
  gRNA
tgtgcacaaacgcagtccca

SEQ ID NO: 108648 - DNA, 20 bp, Artificial Sequence
  MKO10108648_B_Pla2g4c
  gRNA
tcttcactctacaccaagaa

SEQ ID NO: 108649 - DNA, 20 bp, Artificial Sequence
  MKO10108649_B_Pla2g4c
  gRNA
atcggtatgagaagaatgag

SEQ ID NO: 108650 - DNA, 20 bp, Artificial Sequence
  MKO10108650_B_Pla2g4d
  gRNA
gggaccagaagagttagatg

SEQ ID NO: 108651 - DNA, 20 bp, Artificial Sequence
  MKO10108651_B_Pla2g4d
  gRNA
aaccttcagcctgaatcctc

SEQ ID NO: 108652 - DNA, 20 bp, Artificial Sequence
  MKO10108652_B_Pla2g4d
  gRNA
tcttacccacctgaggattc

SEQ ID NO: 108653 - DNA, 20 bp, Artificial Sequence
  MKO10108653_B_Pla2g4e
  gRNA
ctacttacttctcttcgagt

SEQ ID NO: 108654 - DNA, 20 bp, Artificial Sequence
  MKO10108654_B_Pla2g4e
  gRNA
gaagttcccactcaacccag

SEQ ID NO: 108655 - DNA, 20 bp, Artificial Sequence
  MKO10108655_B_Pla2g4e
  gRNA
tcagatccagactcaagtaa

SEQ ID NO: 108656 - DNA, 20 bp, Artificial Sequence
  MKO10108656_B_Pla2g4f
  gRNA
ggagcttgccctttatgacg

SEQ ID NO: 108657 - DNA, 20 bp, Artificial Sequence
  MKO10108657_B_Pla2g4f
  gRNA
cttgcacaaaaaacttcacc

SEQ ID NO: 108658 - DNA, 20 bp, Artificial Sequence
  MKO10108658_B_Pla2g4f
  gRNA
tgtgtaggatccaaaagagc

SEQ ID NO: 108659 - DNA, 20 bp, Artificial Sequence
  MKO10108659_B_Pla2g5
  gRNA
ctgtgcctgtgaccggaagc

SEQ ID NO: 108660 - DNA, 20 bp, Artificial Sequence
  MKO10108660_B_Pla2g5
  gRNA
cacccttaccgcagatgact

SEQ ID NO: 108661 - DNA, 20 bp, Artificial Sequence
  MKO10108661_B_Pla2g5
  gRNA
actcaagtccatgattgaga

SEQ ID NO: 108662 - DNA, 20 bp, Artificial Sequence
  MKO10108662_B_Pla2g6
  gRNA
tgtccccttgcacagcgtaa

SEQ ID NO: 108663 - DNA, 20 bp, Artificial Sequence
  MKO10108663_B_Pla2g6
  gRNA
gccttccattacgctgtgca

SEQ ID NO: 108664 - DNA, 20 bp, Artificial Sequence
  MKO10108664_B_Pla2g6
  gRNA
agcacctgaccgacctcatc

SEQ ID NO: 108665 - DNA, 20 bp, Artificial Sequence
  MKO10108665_B_Pla2g7
  gRNA
aacatacctgtgttcgacag

SEQ ID NO: 108666 - DNA, 20 bp, Artificial Sequence
  MKO10108666_B_Pla2g7
  gRNA
ctctgacaactcctgcaagc

SEQ ID NO: 108667 - DNA, 20 bp, Artificial Sequence
  MKO10108667_B_Pla2g7
  gRNA
aggcgaccttgatcttgagc

SEQ ID NO: 108668 - DNA, 20 bp, Artificial Sequence
  MKO10108668_B_Pla2r1
  gRNA
acttctcgtcttcttcgtat

SEQ ID NO: 108669 - DNA, 20 bp, Artificial Sequence
  MKO10108669_B_Pla2r1
  gRNA
gtggattggtttgaaccagc

SEQ ID NO: 108670 - DNA, 20 bp, Artificial Sequence
  MKO10108670_B_Pla2r1
  gRNA
caccactcagctacctgaac

SEQ ID NO: 108671 - DNA, 20 bp, Artificial Sequence
  MKO10108671_B_Plaa
  gRNA
agggtcatacagccgcagta

SEQ ID NO: 108672 - DNA, 20 bp, Artificial Sequence
  MKO10108672_B_Plaa
  gRNA
gttagcattaagccctgttc

SEQ ID NO: 108673 - DNA, 20 bp, Artificial Sequence
  MKO10108673_B_Plaa
  gRNA
aaatttgggacattacttag

SEQ ID NO: 108674 - DNA, 20 bp, Artificial Sequence
  MKO10108674_B_Plac1
  gRNA
ctgcagttgggttgttcgct

SEQ ID NO: 108675 - DNA, 20 bp, Artificial Sequence
  MKO10108675_B_Plac1
  gRNA
aatgaaccttcgcaagttcc

SEQ ID NO: 108676 - DNA, 20 bp, Artificial Sequence
  MKO10108676_B_Plac1
  gRNA
atatttcgttgatgagccct

SEQ ID NO: 108677 - DNA, 20 bp, Artificial Sequence
  MKO10108677_B_Plac8l1
  gRNA
agcatttaatctcgaacttg

SEQ ID NO: 108678 - DNA, 20 bp, Artificial Sequence
  MKO10108678_B_Plac8l1
  gRNA
gtcttgagtgtgacattgcc

SEQ ID NO: 108679 - DNA, 20 bp, Artificial Sequence
  MKO10108679_B_Plac8l1
  gRNA
acttctaactatgagctgga

SEQ ID NO: 108680 - DNA, 20 bp, Artificial Sequence
  MKO10108680_B_Plac8
  gRNA
ggttgagtcacgataactgt

SEQ ID NO: 108681 - DNA, 20 bp, Artificial Sequence
  MKO10108681_B_Plac8
  gRNA
agctccttagaaagcgttca

SEQ ID NO: 108682 - DNA, 20 bp, Artificial Sequence
  MKO10108682_B_Plac8
  gRNA
agagccatgaacgctttcta

SEQ ID NO: 108683 - DNA, 20 bp, Artificial Sequence
  MKO10108683_B_Plac9a
  gRNA
gccgcgtgtctgtcacagcc

SEQ ID NO: 108684 - DNA, 20 bp, Artificial Sequence
  MKO10108684_B_Plac9a
  gRNA
ccagacggtggagaagacag

SEQ ID NO: 108685 - DNA, 20 bp, Artificial Sequence
  MKO10108685_B_Plac9a
  gRNA
tcaccatctccaagcaagtc

SEQ ID NO: 108686 - DNA, 20 bp, Artificial Sequence
  MKO10108686_B_Plac9b
  gRNA
gccgcgtgtctgtcacagcc

SEQ ID NO: 108687 - DNA, 20 bp, Artificial Sequence
  MKO10108687_B_Plac9b
  gRNA
ccagacggtggagaagacag

SEQ ID NO: 108688 - DNA, 20 bp, Artificial Sequence
  MKO10108688_B_Plac9b
  gRNA
tcaccatctccaagcaagtc

SEQ ID NO: 108689 - DNA, 20 bp, Artificial Sequence
  MKO10108689_B_Plag1
  gRNA
ccacgcttacgtttccctga

SEQ ID NO: 108690 - DNA, 20 bp, Artificial Sequence
  MKO10108690_B_Plag1
  gRNA
gtgtcgcttaaaaccaagct

SEQ ID NO: 108691 - DNA, 20 bp, Artificial Sequence
  MKO10108691_B_Plag1
  gRNA
tctacacccggaaggatgtc

SEQ ID NO: 108692 - DNA, 20 bp, Artificial Sequence
  MKO10108692_B_Plagl1
  gRNA
gaacttctccagggtgacga

SEQ ID NO: 108693 - DNA, 20 bp, Artificial Sequence
  MKO10108693_B_Plagl1
  gRNA
tcctacgcgtgtgacgattg

SEQ ID NO: 108694 - DNA, 20 bp, Artificial Sequence
  MKO10108694_B_Plagl1
  gRNA
cgccattgctcgccgagtgc

SEQ ID NO: 108695 - DNA, 20 bp, Artificial Sequence
  MKO10108695_B_Plagl2
  gRNA
gccttgccgcagtgcagctg

SEQ ID NO: 108696 - DNA, 20 bp, Artificial Sequence
  MKO10108696_B_Plagl2
  gRNA
agtggtgcacacaggtcgta

SEQ ID NO: 108697 - DNA, 20 bp, Artificial Sequence
  MKO10108697_B_Plagl2
  gRNA
tcttcttgacatggcgtgtc

SEQ ID NO: 108698 - DNA, 20 bp, Artificial Sequence
  MKO10108698_B_Plat
  gRNA
gcatcacctacagaggcacg

SEQ ID NO: 108699 - DNA, 20 bp, Artificial Sequence
  MKO10108699_B_Plat
  gRNA
agcgaaccaagatgcttcaa

SEQ ID NO: 108700 - DNA, 20 bp, Artificial Sequence
  MKO10108700_B_Plat
  gRNA
tctctttgcagggaatacat

SEQ ID NO: 108701 - DNA, 20 bp, Artificial Sequence
  MKO10108701_B_Plaur
  gRNA
tggcgcacacggtctctgtc

SEQ ID NO: 108702 - DNA, 20 bp, Artificial Sequence
  MKO10108702_B_Plaur
  gRNA
tctgcaggactaccgtgctt

SEQ ID NO: 108703 - DNA, 20 bp, Artificial Sequence
  MKO10108703_B_Plaur
  gRNA
cacctgggccaccattgcag

SEQ ID NO: 108704 - DNA, 20 bp, Artificial Sequence
  MKO10108704_B_Plau
  gRNA
agacctgatgctattagcct

SEQ ID NO: 108705 - DNA, 20 bp, Artificial Sequence
  MKO10108705_B_Plau
  gRNA
ttgcagggtggcagtgtact

SEQ ID NO: 108706 - DNA, 20 bp, Artificial Sequence
  MKO10108706_B_Plau
  gRNA
gctatgtgcagattggccta

SEQ ID NO: 108707 - DNA, 20 bp, Artificial Sequence
  MKO10108707_B_Plb1
  gRNA
ttagggccctcccaaatcca

SEQ ID NO: 108708 - DNA, 20 bp, Artificial Sequence
  MKO10108708_B_Plb1
  gRNA
ctcttctggagagaacacat

SEQ ID NO: 108709 - DNA, 20 bp, Artificial Sequence
  MKO10108709_B_Plb1
  gRNA
ttgagtgtgctttctgagtc

SEQ ID NO: 108710 - DNA, 20 bp, Artificial Sequence
  MKO10108710_B_Plbd1
  gRNA
gacaagaatggggacgccta

SEQ ID NO: 108711 - DNA, 20 bp, Artificial Sequence
  MKO10108711_B_Plbd1
  gRNA
tatgtggtgacccagctcga

SEQ ID NO: 108712 - DNA, 20 bp, Artificial Sequence
  MKO10108712_B_Plbd1
  gRNA
accagtatgctgttgcacag

SEQ ID NO: 108713 - DNA, 20 bp, Artificial Sequence
  MKO10108713_B_Plbd2
  gRNA
tacgcatcatcaagaagtac

SEQ ID NO: 108714 - DNA, 20 bp, Artificial Sequence
  MKO10108714_B_Plbd2
  gRNA
ggccgtttaaccttcccaac

SEQ ID NO: 108715 - DNA, 20 bp, Artificial Sequence
  MKO10108715_B_Plbd2
  gRNA
gaggttcaccatcaaaccct

SEQ ID NO: 108716 - DNA, 20 bp, Artificial Sequence
  MKO10108716_B_Plcb1
  gRNA
atcatcccacttgacgaatt

SEQ ID NO: 108717 - DNA, 20 bp, Artificial Sequence
  MKO10108717_B_Plcb1
  gRNA
gttccctaccttgggagctt

SEQ ID NO: 108718 - DNA, 20 bp, Artificial Sequence
  MKO10108718_B_Plcb1
  gRNA
cacacctggcatccttgaca

SEQ ID NO: 108719 - DNA, 20 bp, Artificial Sequence
  MKO10108719_B_Plcb2
  gRNA
agtccatgttgaagacctcc

SEQ ID NO: 108720 - DNA, 20 bp, Artificial Sequence
  MKO10108720_B_Plcb2
  gRNA
cgaggagcattgactgtcat

SEQ ID NO: 108721 - DNA, 20 bp, Artificial Sequence
  MKO10108721_B_Plcb2
  gRNA
acttcccaaagcgagtatct

SEQ ID NO: 108722 - DNA, 20 bp, Artificial Sequence
  MKO10108722_B_Plcb3
  gRNA
ccctaagattcgagaagtac

SEQ ID NO: 108723 - DNA, 20 bp, Artificial Sequence
  MKO10108723_B_Plcb3
  gRNA
cccagtacttctcgaatctt

SEQ ID NO: 108724 - DNA, 20 bp, Artificial Sequence
  MKO10108724_B_Plcb3
  gRNA
cagggtcaccaggttccgac

SEQ ID NO: 108725 - DNA, 20 bp, Artificial Sequence
  MKO10108725_B_Plcb4
  gRNA
tcgccaagcagccataccaa

SEQ ID NO: 108726 - DNA, 20 bp, Artificial Sequence
  MKO10108726_B_Plcb4
  gRNA
ttcctgacgtggaagagtga

SEQ ID NO: 108727 - DNA, 20 bp, Artificial Sequence
  MKO10108727_B_Plcb4
  gRNA
ttacctttggtatggctgct

SEQ ID NO: 108728 - DNA, 20 bp, Artificial Sequence
  MKO10108728_B_Plcd1
  gRNA
cacggtcgatctctgcccgc

SEQ ID NO: 108729 - DNA, 20 bp, Artificial Sequence
  MKO10108729_B_Plcd1
  gRNA
gattcactcctgcttgcgaa

SEQ ID NO: 108730 - DNA, 20 bp, Artificial Sequence
  MKO10108730_B_Plcd1
  gRNA
tttatcagcctttcgcaagc

SEQ ID NO: 108731 - DNA, 20 bp, Artificial Sequence
  MKO10108731_B_Plcd3
  gRNA
attggtctaggcgctcccgc

SEQ ID NO: 108732 - DNA, 20 bp, Artificial Sequence
  MKO10108732_B_Plcd3
  gRNA
ggacatcctcatcctccgtc

SEQ ID NO: 108733 - DNA, 20 bp, Artificial Sequence
  MKO10108733_B_Plcd3
  gRNA
gtacgcttaccgcctcttca

SEQ ID NO: 108734 - DNA, 20 bp, Artificial Sequence
  MKO10108734_B_Plcd4
  gRNA
ctcagtactagccactgatc

SEQ ID NO: 108735 - DNA, 20 bp, Artificial Sequence
  MKO10108735_B_Plcd4
  gRNA
gagcttctctgaaactcatc

SEQ ID NO: 108736 - DNA, 20 bp, Artificial Sequence
  MKO10108736_B_Plcd4
  gRNA
agaaggcacaatgatgcgca

SEQ ID NO: 108737 - DNA, 20 bp, Artificial Sequence
  MKO10108737_B_Plce1
  gRNA
gttctccactttgagacgtg

SEQ ID NO: 108738 - DNA, 20 bp, Artificial Sequence
  MKO10108738_B_Plce1
  gRNA
ggcagtgatctctggcattc

SEQ ID NO: 108739 - DNA, 20 bp, Artificial Sequence
  MKO10108739_B_Plce1
  gRNA
ggcccagcatgagtcttccg

SEQ ID NO: 108740 - DNA, 20 bp, Artificial Sequence
  MKO10108740_B_Plcg1
  gRNA
ttagcacctaccgatcctct

SEQ ID NO: 108741 - DNA, 20 bp, Artificial Sequence
  MKO10108741_B_Plcg1
  gRNA
gctaatggaggatacactgc

SEQ ID NO: 108742 - DNA, 20 bp, Artificial Sequence
  MKO10108742_B_Plcg1
  gRNA
ccggaagcagttctactcag

SEQ ID NO: 108743 - DNA, 20 bp, Artificial Sequence
  MKO10108743_B_Plcg2
  gRNA
ttgccaaactgagcgtgctg

SEQ ID NO: 108744 - DNA, 20 bp, Artificial Sequence
  MKO10108744_B_Plcg2
  gRNA
cgctcactttgaagttgacc

SEQ ID NO: 108745 - DNA, 20 bp, Artificial Sequence
  MKO10108745_B_Plcg2
  gRNA
tagatcaaacccgaagaaac

SEQ ID NO: 108746 - DNA, 20 bp, Artificial Sequence
  MKO10108746_B_Plch1
  gRNA
atctgccccgcagaaaagtc

SEQ ID NO: 108747 - DNA, 20 bp, Artificial Sequence
  MKO10108747_B_Plch1
  gRNA
ctccatctacaaagtcaccg

SEQ ID NO: 108748 - DNA, 20 bp, Artificial Sequence
  MKO10108748_B_Plch1
  gRNA
catttagtttatgcatcagc

SEQ ID NO: 108749 - DNA, 20 bp, Artificial Sequence
  MKO10108749_B_Plch2
  gRNA
gactacggcttggatatgcc

SEQ ID NO: 108750 - DNA, 20 bp, Artificial Sequence
  MKO10108750_B_Plch2
  gRNA
agcaccgctcctgcctccga

SEQ ID NO: 108751 - DNA, 20 bp, Artificial Sequence
  MKO10108751_B_Plch2
  gRNA
attggtccgcttctactacc

SEQ ID NO: 108752 - DNA, 20 bp, Artificial Sequence
  MKO10108752_B_Plcl1
  gRNA
gaacgccatagtgtctgtta

SEQ ID NO: 108753 - DNA, 20 bp, Artificial Sequence
  MKO10108753_B_Plcl1
  gRNA
gaaggactgctttccttacc

SEQ ID NO: 108754 - DNA, 20 bp, Artificial Sequence
  MKO10108754_B_Plcl1
  gRNA
attccaagcgaagctctcaa

SEQ ID NO: 108755 - DNA, 20 bp, Artificial Sequence
  MKO10108755_B_Plcl2
  gRNA
gctgcaagccatcgtgcctg

SEQ ID NO: 108756 - DNA, 20 bp, Artificial Sequence
  MKO10108756_B_Plcl2
  gRNA
tgccgtgtctcctcgattcc

SEQ ID NO: 108757 - DNA, 20 bp, Artificial Sequence
  MKO10108757_B_Plcl2
  gRNA
ctttaagattgtaatattcc

SEQ ID NO: 108758 - DNA, 20 bp, Artificial Sequence
  MKO10108758_B_Plcxd1
  gRNA
ccggcgcatgcgcgatccgc

SEQ ID NO: 108759 - DNA, 20 bp, Artificial Sequence
  MKO10108759_B_Plcxd1
  gRNA
gcaatcacacccccgcgagg

SEQ ID NO: 108760 - DNA, 20 bp, Artificial Sequence
  MKO10108760_B_Plcxd1
  gRNA
ccagctgctgcgtcacgtcc

SEQ ID NO: 108761 - DNA, 20 bp, Artificial Sequence
  MKO10108761_B_Plcxd2
  gRNA
ggatccgctactttgaccta

SEQ ID NO: 108762 - DNA, 20 bp, Artificial Sequence
  MKO10108762_B_Plcxd2
  gRNA
gttcaactcaatcacagtcg

SEQ ID NO: 108763 - DNA, 20 bp, Artificial Sequence
  MKO10108763_B_Plcxd2
  gRNA
aagctgtcatacgccttgcc

SEQ ID NO: 108764 - DNA, 20 bp, Artificial Sequence
  MKO10108764_B_Plcxd3
  gRNA
ttcgagaccctcgttgactt

SEQ ID NO: 108765 - DNA, 20 bp, Artificial Sequence
  MKO10108765_B_Plcxd3
  gRNA
atattgatgccgctctctcc

SEQ ID NO: 108766 - DNA, 20 bp, Artificial Sequence
  MKO10108766_B_Plcxd3
  gRNA
cctacctgggatggctaaat

SEQ ID NO: 108767 - DNA, 20 bp, Artificial Sequence
  MKO10108767_B_Plcz1
  gRNA
aatgaacccattgtgtacca

SEQ ID NO: 108768 - DNA, 20 bp, Artificial Sequence
  MKO10108768_B_Plcz1
  gRNA
aagtatgagcccattgaaga

SEQ ID NO: 108769 - DNA, 20 bp, Artificial Sequence
  MKO10108769_B_Plcz1
  gRNA
tgtgtaaccatggtacacaa

SEQ ID NO: 108770 - DNA, 20 bp, Artificial Sequence
  MKO10108770_B_Pld1
  gRNA
ttcatcagaaaacgcaatcc

SEQ ID NO: 108771 - DNA, 20 bp, Artificial Sequence
  MKO10108771_B_Pld1
  gRNA
ggcatgatagtttctgtaca

SEQ ID NO: 108772 - DNA, 20 bp, Artificial Sequence
  MKO10108772_B_Pld1
  gRNA
gacagccagagaggtaggtc

SEQ ID NO: 108773 - DNA, 20 bp, Artificial Sequence
  MKO10108773_B_Pld2
  gRNA
ggcaccgaaagatacaccag

SEQ ID NO: 108774 - DNA, 20 bp, Artificial Sequence
  MKO10108774_B_Pld2
  gRNA
tattctgttcgcttgacgca

SEQ ID NO: 108775 - DNA, 20 bp, Artificial Sequence
  MKO10108775_B_Pld2
  gRNA
gaagaagttccgacactttc

SEQ ID NO: 108776 - DNA, 20 bp, Artificial Sequence
  MKO10108776_B_Pld3
  gRNA
tacggggacttacatctatt

SEQ ID NO: 108777 - DNA, 20 bp, Artificial Sequence
  MKO10108777_B_Pld3
  gRNA
agtagaaggatgcgatgtcc

SEQ ID NO: 108778 - DNA, 20 bp, Artificial Sequence
  MKO10108778_B_Pld3
  gRNA
tgctgtgagcaccggcaagg

SEQ ID NO: 108779 - DNA, 20 bp, Artificial Sequence
  MKO10108779_B_Pld4
  gRNA
ccacttctttcaccagtcat

SEQ ID NO: 108780 - DNA, 20 bp, Artificial Sequence
  MKO10108780_B_Pld4
  gRNA
actggggatgctagctgtac

SEQ ID NO: 108781 - DNA, 20 bp, Artificial Sequence
  MKO10108781_B_Pld4
  gRNA
gtggatgtcttggccaatgt

SEQ ID NO: 108782 - DNA, 20 bp, Artificial Sequence
  MKO10108782_B_Pld5
  gRNA
gaacatgaccgcctacaaca

SEQ ID NO: 108783 - DNA, 20 bp, Artificial Sequence
  MKO10108783_B_Pld5
  gRNA
ggccttaccctttaacttca

SEQ ID NO: 108784 - DNA, 20 bp, Artificial Sequence
  MKO10108784_B_Pld5
  gRNA
cctcttaccgacatttattt

SEQ ID NO: 108785 - DNA, 20 bp, Artificial Sequence
  MKO10108785_B_Pld6
  gRNA
aagaagagcacctcgcgcct

SEQ ID NO: 108786 - DNA, 20 bp, Artificial Sequence
  MKO10108786_B_Pld6
  gRNA
ccgccaactcgagcgcccca

SEQ ID NO: 108787 - DNA, 20 bp, Artificial Sequence
  MKO10108787_B_Pld6
  gRNA
ccgcctgctgcgcgcgctgt

SEQ ID NO: 108788 - DNA, 20 bp, Artificial Sequence
  MKO10108788_B_Plec
  gRNA
ctgtacgaagacctccgtga

SEQ ID NO: 108789 - DNA, 20 bp, Artificial Sequence
  MKO10108789_B_Plec
  gRNA
agccacctacctggaagtgc

SEQ ID NO: 108790 - DNA, 20 bp, Artificial Sequence
  MKO10108790_B_Plec
  gRNA
aaggtgtttgttgacccact

SEQ ID NO: 108791 - DNA, 20 bp, Artificial Sequence
  MKO10108791_B_Plek2
  gRNA
aatccggccaagccccaaca

SEQ ID NO: 108792 - DNA, 20 bp, Artificial Sequence
  MKO10108792_B_Plek2
  gRNA
ataacaggggctatccatgc

SEQ ID NO: 108793 - DNA, 20 bp, Artificial Sequence
  MKO10108793_B_Plek2
  gRNA
gtctctctcctctcgagaac

SEQ ID NO: 108794 - DNA, 20 bp, Artificial Sequence
  MKO10108794_B_Plekha1
  gRNA
gacagtgcagttatcaaagc

SEQ ID NO: 108795 - DNA, 20 bp, Artificial Sequence
  MKO10108795_B_Plekha1
  gRNA
gtattgtgtgaagcaaggag

SEQ ID NO: 108796 - DNA, 20 bp, Artificial Sequence
  MKO10108796_B_Plekha1
  gRNA
caattggatgaaaacacaat

SEQ ID NO: 108797 - DNA, 20 bp, Artificial Sequence
  MKO10108797_B_Plekha2
  gRNA
gtctttcagaacctggccgt

SEQ ID NO: 108798 - DNA, 20 bp, Artificial Sequence
  MKO10108798_B_Plekha2
  gRNA
caccctagagaagaagccgc

SEQ ID NO: 108799 - DNA, 20 bp, Artificial Sequence
  MKO10108799_B_Plekha2
  gRNA
tatacatacagtgatcttgc

SEQ ID NO: 108800 - DNA, 20 bp, Artificial Sequence
  MKO10108800_B_Plekha3
  gRNA
aagcgtgtttgaccgacacg

SEQ ID NO: 108801 - DNA, 20 bp, Artificial Sequence
  MKO10108801_B_Plekha3
  gRNA
atggcggtctgtgagattaa

SEQ ID NO: 108802 - DNA, 20 bp, Artificial Sequence
  MKO10108802_B_Plekha3
  gRNA
gaagttccaaccatctgaac

SEQ ID NO: 108803 - DNA, 20 bp, Artificial Sequence
  MKO10108803_B_Plekha4
  gRNA
gagaggttggcttcgagcac

SEQ ID NO: 108804 - DNA, 20 bp, Artificial Sequence
  MKO10108804_B_Plekha4
  gRNA
tcgacgagaccccaacttgc

SEQ ID NO: 108805 - DNA, 20 bp, Artificial Sequence
  MKO10108805_B_Plekha4
  gRNA
cgaggggctccgggcccatc

SEQ ID NO: 108806 - DNA, 20 bp, Artificial Sequence
  MKO10108806_B_Plekha5
  gRNA
cccggtcaccggcgaggccg

SEQ ID NO: 108807 - DNA, 20 bp, Artificial Sequence
  MKO10108807_B_Plekha5
  gRNA
cttcttgtcttcggacgtca

SEQ ID NO: 108808 - DNA, 20 bp, Artificial Sequence
  MKO10108808_B_Plekha5
  gRNA
catgacgtccgaagacaaga

SEQ ID NO: 108809 - DNA, 20 bp, Artificial Sequence
  MKO10108809_B_Plekha6
  gRNA
cgacatagccaaccacaaca

SEQ ID NO: 108810 - DNA, 20 bp, Artificial Sequence
  MKO10108810_B_Plekha6
  gRNA
tgaagcagtggaataagcgt

SEQ ID NO: 108811 - DNA, 20 bp, Artificial Sequence
  MKO10108811_B_Plekha6
  gRNA
ttccccgacagatgagaagc

SEQ ID NO: 108812 - DNA, 20 bp, Artificial Sequence
  MKO10108812_B_Plekha7
  gRNA
accaggtagatcgacaaaca

SEQ ID NO: 108813 - DNA, 20 bp, Artificial Sequence
  MKO10108813_B_Plekha7
  gRNA
cgaccctgctcggtgaactc

SEQ ID NO: 108814 - DNA, 20 bp, Artificial Sequence
  MKO10108814_B_Plekha7
  gRNA
cagcgactacaagtacgcac

SEQ ID NO: 108815 - DNA, 20 bp, Artificial Sequence
  MKO10108815_B_Plekha8
  gRNA
cgcatggacctcatcatccc

SEQ ID NO: 108816 - DNA, 20 bp, Artificial Sequence
  MKO10108816_B_Plekha8
  gRNA
cttgccccaagttcattccg

SEQ ID NO: 108817 - DNA, 20 bp, Artificial Sequence
  MKO10108817_B_Plekha8
  gRNA
tacctcagagtcagtgacac

SEQ ID NO: 108818 - DNA, 20 bp, Artificial Sequence
  MKO10108818_B_Plekhb1
  gRNA
gggtggaatttgcctccatc

SEQ ID NO: 108819 - DNA, 20 bp, Artificial Sequence
  MKO10108819_B_Plekhb1
  gRNA
ctgcttacatggcatcatcc

SEQ ID NO: 108820 - DNA, 20 bp, Artificial Sequence
  MKO10108820_B_Plekhb1
  gRNA
acagccagccgcccctcacc

SEQ ID NO: 108821 - DNA, 20 bp, Artificial Sequence
  MKO10108821_B_Plekhb2
  gRNA
actgcatcaatatccgcacg

SEQ ID NO: 108822 - DNA, 20 bp, Artificial Sequence
  MKO10108822_B_Plekhb2
  gRNA
ggcatggaagtttacactgc
